United States Patent Application Publication US 2007/0083945 A1 - sequence listing, part 35

SEQ ID NO: 236806 - DNA, 341 bp, Glycine max
atttgcactcccatttttactaagtacaccccctgccttttttttggtgaatcttttttcgtaaagctaccgaaacttacgaatttcgtaacgatacctgttttctttccgtaatgttacggaaccttgcggattacataatcatccccttcttgacttacggaatgttaccgaacctcactaattgtgcaacgatgacttcatctgatttctggtgtggcacggaaccttacggattgtgcatcaatattttcttattgtgtccggcatgtcccggaatttcacaaatgctaatgatgggtgccagcacctcacatgaccaaacaaaagttgatgtcatc

SEQ ID NO: 236807 - DNA, 294 bp, Glycine max
  unsure (1)..(294): unsure at all n locations
cttaaaacatactagcttggtaaaaacgcagaggaactgaagtttcttgatggagagagaggaaagacccctaaaccaattgaggcagatcataaacaccatcgttggaggtttcatggnggaaaggttacaacctttgcacgaataaggcacctatgacaagtccaatttgtcaatatagtctctcgacactaagtactcaacatgtggaccataaccttcatgacagatgacttcaaggcaatcgacccagtgcaggatgatcccatggttattagtgtcgagataactaac

SEQ ID NO: 236808 - DNA, 389 bp, Glycine max
ccttaagtcaccgcggctgcagcttgagagctttccttaaatcattctcttatttggagctgggcccttgggaagaatcagtctatcatgtagattgtttttgcagcttacgagaccttgctggtattcatcttcagtgattcggatggagattgcgtccactttgacacatggcttctggagctggcaagatagacagctgaaggattttgaaagactcgagcaaaagatttacgctttgtaattgtagaggtgaatatggagtccctcaattgtgttcattttactccttataatgcttgaaattgatatttttaattcttataatgtatattttaattacctattaaaaaaatatatcaacataattcttatgattaaaagagaat

SEQ ID NO: 236809 - DNA, 321 bp, Glycine max
  unsure (1)..(321): unsure at all n locations
ctctcagccacttatgatagccgccgatgataccattactgctttccctaagctctctgtactttcttcacgccgcatcccatgccttgcgaactccttggagtaccctcgcgctgtggtcactgaaaccccgtgcgatgaaaggcgtgatgctttcttctaatggcgctcctctcatgcggtagccaagctgtcttatggcgagaacgggattataattaatacaaccccttgttgccatcaaagggaacattggacatccttcgcatgaagatagaatctngatgtcttctttcttctagcgagggaacccattaacag

SEQ ID NO: 236810 - DNA, 412 bp, Glycine max
acgcttatcatgtgtacaccagattctttttattaattatgaattgcgaatgataccactagtaaataataactacctgctgcaaacagattatatgaggactctatttgtacaatggaacacgaaggtagctatttcaattattagagcaaccacataaactcctaattggcttaatgactcgaccaacaaagcaaaaaaaacttgaaatgtgaatatgctaaggcttgttaatgcaaatgccgaagtcagactctcacaacttcttttacaacctgtatataagactctaagcataaacatggcagagacagtttgtcttacaaaaaaaactaatgaaagaaagtattcttattctgatatttgcacaacacagaaatgtgataaacacaatacattgtcagaaaatatt

SEQ ID NO: 236811 - DNA, 315 bp, Glycine max
  unsure (1)..(315): unsure at all n locations
agctngagatgaagaagagtataatggtgatacttcttgcttctattcggtgaccacagagtggcacctggagatatgtcgcggtggtcaagagaccttgtggacctcatgtggggtgctattgcccaaaaccaagctttaccgattccaaaccaacccgggcatattcagtcagggaaaacctgtgatgtacttaaacaggcgagctcctggcattctacagataaaatgaacaaaaaccacaaagcatggaggcttgtgggaggctggcatctataactttgattgtatatgggtatggcctctggaataatt

SEQ ID NO: 236812 - DNA, 421 bp, Glycine max
gatcttaagcgactgcagctgcagctttgaacagcaaccttacgcctgttattctttggtatgaaaaagggatcgcttctactcggatgttgggtccgggaaacacgacgggacggctattcactgcggattgacaccaagcctgcaaaagaatatggctttcggtaatgcgctatgccactggcgtctgcagcgtcaccaagaccaaagctatgacaagtcccgctgggggccgttgtgttttatcatggtaaacctctcctacccgactactcaactggtggtgagttgacgatcgcacttgccgggattgacaccgaacttgaaatttataggtccctaatagctgggtaccatgcatactgttcctggagaaatgtatcggcacaatccacacatacaccgagcttaagggaagctg

SEQ ID NO: 236813 - DNA, 420 bp, Glycine max
agcttcattgatatttcaccttctctataatatatggttacttctaaaagtactagcttatcagacttctaaatattaacaaaacagaagtattgaaatttcccatatgagcattatattgggctcaccaataaaacaatatcagaattgctggagtagaatactaagacaactctctgccgtcattaagaaacatatatccacaattttgatgagcttgtgactgagcatttacgagtttctacctactataattgacacaggacaagtgatgcacaagcattattggaaaataattaattcttcaagtaacaggctaaacctaaccaatagaaatccaattaaactataaaatatacacgctagcaaaagtaggtgacaacaactccaacaagacaatgttatgattacaacttcatt

SEQ ID NO: 236814 - DNA, 361 bp, Glycine max
cttcatcattcccttttgtatatagaccatacagcattgctctcatcctattaattaacataactaacataaacttttcgtcctggcgcagaactaaattatagctattcaatttcttcaacctctttggtaaattctttcatgcctgtgcaaggaaaattgttcattcggccgaaacaaaaaaacgaaccattgtcaaagcttcatattatttcaggtaatcactgccactgaggtgcgcttggtcaaatgaaggtctgtcatttcaatatgttgttaattagtccaatccacgataattgggtgtaatctattcagatcccgatcgaatgccatataatcgatgcgtgaaagggaaact

SEQ ID NO: 236815 - DNA, 372 bp, Glycine max
  unsure (1)..(372): unsure at all n locations
cgcagcatgcactatataacaaattgnttattattttcaatatgctcggagataggacgcatcaacaagaatcaagccnaggctgttgagcacacaatcaattggggaaaacacaccatatgattataacgatggatgtgctaaactctcacaaaggataaatcatcactgtcaaattgcgctgttcaaactatcatgacgtgtagagaagaatcaaggagatcaaggcacaaaatgtcaagaacttatattttcaaaacaagtacccatttcttgaacaaaanctattattcaaagagaaacacgcaaagtcctacgtgcacaccaaattggcccaaatattaaaccaaaatccgcgaaactagcacatta

SEQ ID NO: 236816 - DNA, 356 bp, Glycine max
gcatgcaagcttggtagattcacaggtgtttcttgtgtatgttcaaactgagaaatgagcctatgcataccgacgtgagaaagagtgccttagaaaggaggggtagaatcatatgtctgtcgtaagtgttgcaagtgaaaagggttcccttgtgtcacatcacatcaacaaaagctttgtctgcgcgggttaaatgtgcatagggtgggtcgccatgatacatgaagataaccctctagagcaaccaaattgggtgtggccgtaccctactgagtatgaattggcgaactggcgaattgtcaaacaacccagaatttttgtggcacgcacacagtaattccgtagtcctaacccta

SEQ ID NO: 236817 - DNA, 407 bp, Glycine max
tcgagcacactattctgtaatcgaataccaagtttctaggaatgcaaaacgagaaatttgaacgaattaattgattaacccatttggtaattgaataaatctatttttctgttaaaactatgtatactctctcttgttcattctcattagtgactcttgattagatcttatcttttataaatactttctgagagtcatttaagggaaccactctacatttcaaacgagagattcatgatgaccaagattcattcattcttcatcatggtttgagtaaggaaagaaagacttgacgatattgtgatttgcacattcaagagcattcaatcctattttgacttctttctagtttttgaccttgattagggttattaaggagtttatgtgagttgataggatttcaactc

SEQ ID NO: 236818 - DNA, 477 bp, Glycine max
  unsure (1)..(477): unsure at all n locations
cgctctccatgaagaataattatgaggtatatgattttgtaatctccacggattcaacctagccatgttaggaaagcatggttggaatttgattaataacccacatactaaaatgtataaaattctcaaaaataaatattatccaaatgttggattcttagatgccaaactagggcataaaccatgctatacattgtctggacattgtcttcctactcgtctggaaattatccaaatgttggattcttaaattacaagtccaacccaaggtaaagcatttcttatagcgtgttcttagaaattgtcttcctactcgtgttaggctccaaaccaagggagtcgcgagcccttctacatgttaactggtatgaaaattttgagaatgacttacacatgtgtttcagangtgaacatgtccaaatgtggtggactttgtagttcaattaagccaaaattctatcagggtgaacccacaat

SEQ ID NO: 236819 - DNA, 382 bp, Glycine max
actttctgcttttatagttgaccacagagttgtacctggagatatgtcgcgggggtcaggagaccttggggacgtcaggtggggtgctattgcccaaaaccaagcttgaccaatcccgacccaacccgggcatagtcggtcagtgagaacctgtgatgtacctaaacaagcgagctcctggcagtcaacagataaaaggaacaaagaccacaaagcaaggaggcttgtggtggctggccagctgtgaactattgatgatatgtgggttatggcctctggtaatcgattaccaagggtgggtaatcgattacaaggcttaaaaatgaagacagggggctaagatggtctctggtaatcgattaccagcggatgtaatcgatta

SEQ ID NO: 236820 - DNA, 401 bp, Glycine max
  unsure (1)..(401): unsure at all n locations
attaagtgcatatagggctactgacatcttggaatngatacatacggacatttgtggaccatttcatacacctttgtggaatggtcaacaatattttatatcattcatagaagattactccagatatgcatactttgtttcttatacaggaaaattcacaatctttggatgtgttcaaaacatttaaagttgaagttgaaaatcaactcaacaaaagaataaagtgtgtcagatctgaccgtggtggtgaatactatggcagatatgatggttcaggtgaacaacgtccggggccttntgccaggtacctagaggaatgtggaatcatcctacagtacaccatgtcggggtcacctatcatgaatggtgtggctgaaagacaaaacaaaactcttaaagat

SEQ ID NO: 236821 - DNA, 453 bp, Glycine max
  unsure (1)..(453): unsure at all n locations
agcttttcttatctctctcggggttatattattacgattatgaaatctttcagtanaacgagaaggacacttataaccattttctctggcaatctcgcttataggttttaccgtcgtttgtatagcagacaacgcattatttaacctcacatcgtccagtatactttggaaacttaccccctcgcttgctagacggcgatgtaatgtagaaacagaaatgtagagatatcgagcaaccttgtttgctgaccattttgtgccgggttcggatagcagcaggttataacaacgacttatcaatgattgtttactatatgataaaagtaaatgattaacatgattcactcctaacgaaagtagaacgcccattgctaagtgctcctgaatcttagttgagaagcctcgggaaacagatgtctttaattgctctccacaatatattaactcaagatt

SEQ ID NO: 236822 - DNA, 272 bp, Glycine max
  unsure (1)..(272): unsure at all n locations
tgtggtaatatttcaaccacagtaacatatttgcccggcgatgcaaggagacgtgatggaacaaaactgccgactggtgctgttcaaggccgaaatgattttggctatgctgtgtttggtggcgcatgtcctcctaaaggagataaaccacatcattaccagtttaaagtatgggctctaanaacttgaaagattcctgtagattctaactccagcggagcggtagttggtatatgcttaatgctaataaaatcgcaaccgctgagataaca

SEQ ID NO: 236823 - DNA, 396 bp, Glycine max
  unsure (1)..(396): unsure at all n locations
gaaaagagaactggaccattgatatgccccaacaaaaaattggttgtgtctgggttcttattcttcaatcatttgaaagtggcaccgcgaagtgcccttcgtatcattaaagttcttagatggaggttctatctcaagnttcatacatctaanaccactatctangaatcttttgttattgaagaccttgatttgcgcacaagcacattaaaaagataattattagtttcctaaaggatctattaagactaactagatattataaaaaagttcacactatatctcatgagaaaaccagttctatttccaataaccatgaaaagactagagccattgggagaaaatatctccaagttgtgtcggtcaattccatanacatatgtttattttattttt

SEQ ID NO: 236824 - DNA, 319 bp, Glycine max
aaagaaaaaggaattccatctaaaaaaaagaaaagagaaggcaaattcccgctgcaagaaaaaaaagaaaagaaagaaatccccatccaagagggcgagaaagcaaaaagaatagaaagaaaattcccacccaacgaatgggaaacgaaaaagaaaaaagaaagccccggcaaaaaaactacaagaaatgtgcagaaaggtctttgacccacaaaactgacaaactaatgtccgcatgacaaaaggaggaaggaccccaccaatggctctcctcaatccacaaatacggcgcacaccctttttcgcccgccaacaaaaa

SEQ ID NO: 236825 - DNA, 265 bp, Glycine max
tcctttccttggtttgaagctcactacaagccttaagtgaaataccatgatatcaccatatccttaaggaattttggagctttggaatttgtttgggaataagtgtggggggtattctgttcattggacaattgtgtattgttggctatgcttcatgacgtatcttgggccatacttgatgtacatttgatatttgttaaatgttggacatgctgaatgaattgctgtctctaaaggctatagagtaaaaaaataaaaatcgaat

SEQ ID NO: 236826 - DNA, 451 bp, Glycine max
  unsure (1)..(451): unsure at all n locations
agctntcaactgacgtctcatattcgtagccaggatttcctagttcattcatgagaatacaggaggtgctattagtggaacattgttggaagccatttacaaaactgggtattcttaaaacaagttggatgttctctaactttgtttttggtttatgttttctctcgacactcaaggttctcactcagtccctcaagatcaaataagctttgataccaattgttgacacaagagattcacaaaaacagaaaatcttaaaatgttctcaaaagaaatagacactccagcactcaacaatgttctcaaaagagaaacttgaaatttgatattcatgcatatgtagggtgcttgagtcaaaacatatatgcttacaaaaggcacaaaacanaagatacttctacctaacaacttaattgctcatgtacccatcttaaatgaaaagcttaacact

SEQ ID NO: 236827 - DNA, 477 bp, Glycine max
acagcttgtcgctgctattcacaagcctaattaagcagaatgagtggagtatgcctatttccattggttttcagagaaagaaacaaggtttctgactttctagctattgatcaatcccataaactccctctaggaatgaatattaattgcatgcttgaattagattcaattttttagtaatcaattccaaaatcatattgaaagctaaaacaaacaaatattaattgcttttacttcatgatgattttagttccaaaatcaattatggtaattaactatccaaacatgcatgctaatatagaaacattaattgtttataatccccacctggtatttgtagggagtaactttttctggaccggatactatcatatatttgagttaacattggataatctaaaattatttttaacaaatatttgatgtaattatatacacttacatgtttaattaggtaatgtgtctacaattgattga

SEQ ID NO: 236828 - DNA, 461 bp, Glycine max
  unsure (1)..(461): unsure at all n locations
agaaactaagcttctttttagacctcgatcggncatgttgcgtggccgatgtcgattgttatnnttttcgatcaatatgggcgaataatattttttctgccgagatgggctaatgttttcctggccgaataaatgggaacatgcgtgtttcggccgaaacaaaacgtcggttgagatagcactaaaaaacctagccgacctacattgtaaattttttatgcgacaccgatacaagaaaacatactctgccgcataaaaaataatctgccagcgatcgtttttaanaaaaattgcacaatgtctgctgagaaatatcatttagggctacttcacgtctgatgtcggctaatgacttttttattcaatccctgaatgagaattgcatgatgtctattaagaaatgttcgatcggcgtcatcccgggatgcttcttttcttgacctcaatcggtcatatttcct

SEQ ID NO: 236829 - DNA, 368 bp, Glycine max
gctttatgaaaggaagtgctataacttatttttcatgttctttgctccgcacagaaggccgaaaaacacactaaagctgcgatctgatgaatacgggtgcattttctttgttgctctgacgttgatgcgctttgttccccctccccgtcttttgggttttctattattttgatccggtgcgaatttaggatgcttaaagcttccatttttataagtacgggtgccgttatattgatgctctttcaaagctttatgatgctgccttgctttaactaatgttgcatgttctttgttcacagagaaggtcgaacaacacacttaagcgacgattttatgactacaggcgtgttgggatgttctgcgtattc

SEQ ID NO: 236830 - DNA, 241 bp, Glycine max
  unsure (1)..(241): unsure at all n locations
ggcagcagcagcttacaaagagaagggagagccagatttgtccaangaacggcgaacttgaatacatntgctagttataattaccctgatctcaagatcgcaaagcggcatcgctgtcttcatactgcacaaaatgtgtacaaccaccccaaggatcagcattgcgtgtcagtattctctcgcgacagcgcgggcagtgtaagtagaaacaaccaccttgctgcacctgaggctgacaaag

SEQ ID NO: 236831 - DNA, 475 bp, Glycine max
  unsure (1)..(475): unsure at all n locations
gggggcatttcattggtaatgtctaacaaaacagggagagtctatctacaaaaaaaaagaagtcaagaacagatgttattaaaggcatgtgttgacgaaaaaagaggtacataaaacattggtttcttgactcaggttgtagtaattgtatgtgtggaaaaaggaagtatttttcagattttgatgagacgtccatagattcagtaaagttcgacaataactccaatatatggtggtcagtgggaaaggcaacatcaggttggagatgaatcgatttagcagcataaccacgagtcttttatgtgtcagaattgaagaacaatctactgagtcttggacaattgcaagagaaggtactgattgttatatttcagcgaaggcaatgtaaagtgtatatcctatgaaaggcttgattataaaatcaaatatgtccgcanatcagttgtttattntatatgacatatctctgcttgta

SEQ ID NO: 236832 - DNA, 383 bp, Glycine max
  unsure (1)..(383): unsure at all n locations
agctngaacgaaggtaagacacatcgttcttcaattctttgtgattccngactccatttcattgaagcgcatatccacttgtaattccagagtgtcaaacccttcaccaacaaaggtttgaagaccatcaaacctgtccattatctttgaaaggagagatgaatcctcttcatgatgtccttcttcaccaacatgtgaagcacctttctttacccaagagccatcatgctccttttgataaccaaaagatgctatgactgaagcgcctacaaggaaagatctcttgattggaaaataacgctcaaactcaagacggatgttgtaatgttaatgaaaacggtgacaaatgaggattaggcattgtaacattcaatcacaatgcc

SEQ ID NO: 236833 - DNA, 477 bp, Glycine max
  unsure (1)..(477): unsure at all n locations
tcaacaagttagtaattnttctacttataattgtagatatatgatgtttatatatatgaagtcataattttgcatgatctgtcaaagaaaatatgatgtttctacttgcatgatgtgttataatatatgatgtttatatatatttcgaattttgttgttaataaaactgtttaattagaaactgtataatttttttgtttaataaaactgtttaattctgcatgatctgtttaataaaactgtttataaaactgtttatatataatatatgatgttaacatttttaaaactgtttataaaacagtttagttagaaaaaatgttaaaactagagaaaaaaaatgtataataaaactgttatttttaaaactgtttaattagagtaaaacaatttttctttgtttttattcgaaattttaataaatatgttatatagaatgatatatgttgatgatgatgttggatgctatcgaatata

SEQ ID NO: 236834 - DNA, 367 bp, Glycine max
accagaaataatagatatggggcgtgactgcaggcacttgcttctatggatatagaagcaccggtctatacacattagctaatagagcttacccgcgaggtaatagatactgtcgcaaataaatatgggcttatagcactcaggaggaggattatcactccttgtataacatgtgatgccttatagatgatcactactctatctatagataagatatcacaatacatttgagtgacaactaatcagagaataaccctactatcttggaacgcgactgctgatgttcttgcgactacactcccgtatccaggctgacgagaagggtggactcactctattatagacatgtcgatgccatgttattttg

SEQ ID NO: 236835 - DNA, 285 bp, Glycine max
taaatcatgattttaaattgcggtcacaatcatggtttcatgactattctcgataaagggaaaattttgtggataaatgcaaccacaattgcagacacattgtggtcagacagacctcaaacagcttgatgttgaggccaaaattgtagtggcggactgcttgttaaaactttgcataaaataaaaacatgatagtactttgagtggagttgaaacagatgagatacactatgtgttgattgatctgaagatcaaatcaacatggtttgtaagggtatgatttgc

SEQ ID NO: 236836 - DNA, 454 bp, Glycine max
  unsure (1)..(454): unsure at all n locations
tctatgccacacgcagnttcagtggtgcacaacatccaatgatgcctttcagaagcttaaggaaacgatcatggcagctcctgttttggccttacccaacttcaaaagtccatttgttgtcgagacatacgtgtcggggtcaggcatgggagcagttcttatgcaagaaggtcacccatctccttcttcagtaagcaattctgcccgaaactgatgaatgcgtcaacatatgtccgtgagctcgcagctataacctctgccgtcaagaagtggaggcagtacatgttaggtcacatgttcattatcgtaaccgaccatcggagcctgagggaactcatgaaccaaacgattcagatgcctaagcaacaccgttacttagcacagttgttgggttacgacttcacgattcaatattgtgcgggacgagctaacgtagtggcggatgctttgtcac

SEQ ID NO: 236837 - DNA, 345 bp, Glycine max
gacttgagtcgtcaagagattatttatatgtgaccatgacatgagtttcaattatataattaacatcatctctcaaacatctttcaatcaatctttcaatatctttctacagaattttcagattcatttctcttcatctttctaaaaggtttttatcaacactttctcttccaagaaaagttctttggtcaaaaacttgtgctattcatctttttcattctcttctccctttgccaaaagaacgaaggactaatcacctggaatcttttgtgtctctcttctcccttacaaaagattcaaaggactaaccacctgataattcttttgattcttccccttccctta

SEQ ID NO: 236838 - DNA, 434 bp, Glycine max
  unsure (1)..(434): unsure at all n locations
tgcatttggaatggcganagccncactccatcattatgattattacctgacatctcaaacaaacaaatcaaatgtaacaagacaattatagttgctgtttgaatacctcacccgctcaagtgtatcacacaatgatggcttttctctaatgaaacaatcttgccttttaccactctaattccccttgagttcttagacaattcaagagattatggccacaacaaagaacaattcaccaatatgcgtaaggtaaggctagagagacaacgaaaaggttaaccaagaaaaaggctaacaatgtttttaggcgcaaatgaaggaaataaaattcagaatttaggaattcaagtaacaatccttcatgcaaccaatatattaccttaaagagattttttctaaaagttcttcaagcatgaaccattcagcccaatttt

SEQ ID NO: 236839 - DNA, 355 bp, Glycine max
  unsure (1)..(355): unsure at all n locations
agcttgagatgaggaagtgtagaagggtgtaacttcctgcttttattggggaccacagagtggtacctggagatatgtcgcgggggtcaggagaccttggggacgtcaggtggggtgctattgcccaaaaccaagcttgaccaatcccgacccaccccgggcatagtcggtcagtgagaacctgtgatgtacctaaacaggcgagctcctggcagtcaacagataaaaggaacaaagaccacaaagcanagaggcttgtggtggctggccagttgtgaattttgtgtgatatgtggattatggcctctggtaatctattaccaagggtgggtaatcgattacacggcttaaaaat

SEQ ID NO: 236840 - DNA, 377 bp, Glycine max
tttatgttagtatttgacatgaaacaagatttataatccactatgattagactcataataaagttatgttatatgcatgagatattgtattcaaacctatgttatcactatctagtttttataaaagcaacaacaaaatttaaacctagcaccttatttaaattacttaagcctctcactacaaagcaaagataatgttgctaccatttaaaaaaagtttaatacattgatattggtaggttcatgaaccttattgaaaactatatctatgtaattaaatgcccatatacaatttatgggagcttaatatcgctagaaaaataataatatgtgataattaattcgagagacctcaatacaaagattattgataatca

SEQ ID NO: 236841 - DNA, 333 bp, Glycine max
agcttctgtgcagttcgtgagtgaggattatttaactcaagttagcaaatgagaacagtttttatgtaattcagagccattcagatgaaatagtctaataatttaacttcatatcaagtccagccaagactcaatctatgtcccatcttaatatatccttttgaaggagtataagtaattaacaagattcaccacttaggagcatttttcctgaatattgtgcatctacgttaatgaacatggaggatccattaataacaatcaggtcaggtgtctacattcttcaaggagaaactcaataagaatggcttactttaaggcatggaatataaa

SEQ ID NO: 236842 - DNA, 458 bp, Glycine max
tgtatgtgaacggacgtgagtgtggacgttagaatctgtatctcgtcgaacgacggcactgggaatcgattaccaaaacatatggatcgattacattttcttgacatagattggaacgtgtgcacaccaatttgaaaactttttcaaaacaatgttgctactggtgatcgagaacaacaatctggtagtcgattaccagagagtaagaactctttgcgaaacatgtttagagagaaaacatgtgctacacaattgttgagaaaaactttacatacttatattgagtaagccttaactggagtctcgaatcatgagtcactgaatagttcttgattcacttgagttgtactttgattgatccttgagacactcgagctggtctttgattgatctttgagctcttagtcatcgcctctgccatgatctcttgttatcatcattgttatcatcgaaacacc

SEQ ID NO: 236843 - DNA, 343 bp, Glycine max
  unsure (1)..(343): unsure at all n locations
agctgttatgtaagctgagccgatccttattaaaaagnctatgacaggtaatgagtcaagctcaagccttacttattcaactcaagccgagctcaagcctaataaaggttggcctgacttaactcatctccacccctagtcacgagctatctatatgtaggtgtactcattacctatagtggtcacttaacaatttatttaaattgctaaatttatctaaaaatctgaaaaataaatatataatttttgtatttgattaaatttggttgctgtaaagaaaatgattgaatttggttttctgtttgaaaatgctgtaaaaaaaactaatctaaaaattgttgta

SEQ ID NO: 236844 - DNA, 341 bp, Glycine max
ctagaaccacagatctgtacctgtctcaagggtcttgggtttgtgctcctctgctgaccacaatacacacctttgcccttccatgcagcaacctgtatgaaattgacactccgaagcttatgctgcagacatttacaatatacctcctcaacctcagtagcctaactaaccacctcagaacagttatgacctttccatcatcagatacaaccctggatggaggaatcaccctaatcttagatggtctagccctcagtaacaacgacaacaacctgctcctttctttcaaaatgctgttggcccaagcagaccatacattcctccaccaatccaacaacagc

SEQ ID NO: 236845 - DNA, 412 bp, Glycine max
  unsure (1)..(412): unsure at all n locations
aacttaacttatgaggagggctttctttcttcactttctaggcaccaacgcgagctctgaccactgtccttccttcccgcgaagctacttttcatgttcgcctgagagggcttatagcctaaaccatacttcccacgacttccttgggtttttatcaagctagttatgccgccattgtctttgcctaaacccatcccgggttcataaccgttccccaacataactcgggccatcattaccgccgcatctgacaaacaatgttgcccaaagagggagtccacggaggaaatgctgaccacctcanaagactggaaaccgtttctaacgatcttctgcggcttcacataggcatggaggatggcacttaccagatattttctcgctgacacataccaaggcccttcctacaact

SEQ ID NO: 236846 - DNA, 464 bp, Glycine max
  unsure (1)..(464): unsure at all n locations
cgctntngatggagatgggaatgagtgtgctgtttatttctctcctgcagccccctccattgctagattaggtcgtgggattcagcatctgcatgaggcatctcacgcagcgaggcaaacagaaggaagtagaatccaagcatcaatagaatctctaataaaaagaatatagaaggcaacggattgatagagggataatagatatttttttgctggacagttatgattttcttcataaagtgatgaataactgattggtaagagttcaagagattcttctgtatatatttttctcttacagaaacattcatattatatgctctgcttacatggtgaagcttataatcatgtattccaattagagtagacatgaatgactaaatgctatcaatggatttctgaaaacatgaaatgtagtcttaaataacatgtataatgatgtcagacaaaattctaatagatcc

SEQ ID NO: 236847 - DNA, 445 bp, Glycine max
gatccttaagtcacctgaggcatcaagcttgtcagcataaaataattgtgaaagaataaaatattggacaaagcttacctcatgatttgatgactaattctaatactataaatagtcctatgatgtgcaacattggttgttggtagggctgtactctatttagacttgctatatttgctaggatttctagacaaccgagacaaactaatgttagaaacttgacccaatgcccaaatatcagcagttgtttttaatatactcagttgacgactgtattgatagttagttagttagttagaacagtgaacaatgtacattaagaataagagggatacaaacaatagagggtaggttctaacttggaatagaaaaactaagtctctccatacctcagaagagaagagaagagaaggctcctcttggtttgggtctgcggacttcaact

SEQ ID NO: 236848 - DNA, 428 bp, Glycine max
gcagattttgtaatgacccactaacctagaatttatatttcttattgccattaacctagggaattaaaaaaaacttaatggctgagtgtaactgaaattgtggcaaccaaaagtcacccccaacagccaacaagtcagccaccatttggtctcccaaaaggctgatgcctacgttgccaattgggcccttattacaacttgaactaaacctaactaaagcccttttagttgattaacccaaaacatatttttggtcagccaactttacaaggattgggccattatttagacaaactaaacactctaaaattgaaaccaagtggtgtcatttagtcctcctccatttgggccatgatacaactcacaaccttggacttttctccttgaaacttgggcttgtattcaaacagtatggacagcacttgttg

SEQ ID NO: 236849 - DNA, 376 bp, Glycine max
  unsure (1)..(376): unsure at all n locations
agcttacggtaaaatctgggacctagccatggtataagtctccatanagtccattgcctccctcgcccagtattatgatcagccgttgaggtgcttcacttttggggacttccagctatcacccatggtggaagaattcgaagaaatcctaggatgtcctctagggggaaggaaaccacacctcttctcagggttctatccctcattagctagaatttctaaaattgtccaaatctcggcgcatgaattagaccgccaaaagaaagtcgaaaatggggtggttggaataccgagaaaatatntggaggcaaaagcaagaatcttggcaggtaaagacgagtgggccccgttcatagatattctcacactattgatc

SEQ ID NO: 236850 - DNA, 437 bp, Glycine max
  unsure (1)..(437): unsure at all n locations
actaagctaacaaaagctaacaaccagaagcaagaggcatgtatttctaaanaaggggagaaaacagatgcacatttatctatttacacttgcctgttgcttgaatctcgattccaggtattgtattgncatcatcaaaaagggggagattgtagatgcaattggctctgatgatctgatgatgaccatgatgatgtgttgcaatcgatgcaaatgggcttttcaagattaaaattcaagacaattctctacgatttcaagtcacaacatcttcatgatcactataatattatgaagggaaatcctaattgaattaccaaaggatttggccaaccgagttataataaaaaatgtttttcaaagcctttacttctcttgtaatctattaccacaggaagtaatcgattaccagtggccacactccttaattacatcta

SEQ ID NO: 236851 - DNA, 354 bp, Glycine max
  unsure (1)..(354): unsure at all n locations
agcttngtagttcatttcttgcagaggtttaaatactgagcaatattcgtcataacaacattgtaaagttgctatgctgcatttccaaagaggatactctgctccttgtctatgagtatctggaaaaccataaccttgataggtggctacaaaagacatttaaccagcagctgtgtcaggttcagtccttgattggccaaagagaatgcatatatccattggagcagcacaaggtttgcgctacatgcatcatgactgcttaccgccggttgttcatcgcgatgtgaaacaagtaacattctgtcggattctaaatcaatgcaaaagtgctgattttgtctggcaaaatgtgat

SEQ ID NO: 236852 - DNA, 477 bp, Glycine max
tgttatggggcctgaattcctggaggaatatgtgaatggctgacttgcaagttgcaaatatgttaccacctagtcagaaaagatcgacataaaatggcaacaaccaccaatccattgtctagactccttatgaaatgagatcacaagcacataacatgtcttaacttgatagttaatgctagaaattccaacaattctacatataccaccatgcaatcacataaacaaggttttaaaaatggcttgtgaccacgatttcagtcacaacatcaaggtttttggagtctctgtgactgtgacttcaattacaatcatatttatctgtaattttctgcgacatcgaagattacaatgacaccacaattgcaaccgctactgatatttaaaaccttgcatagaaataatccatacatagtgaaagaggcttctaccataactgttgaagaagcattaacatatagggagcactcggaggaa

SEQ ID NO: 236853 - DNA, 479 bp, Glycine max
tgagtttaatgcatatttatataaagatataattaaagtttattagatttaaagacttgtttgaaaaaaaataacttcgataattttttgaataagttcttattatataaaagctcattataaaagtaattaaaattcaactagtaacctatttgtgtttggatatacatatatgttgataagaattggatatatacgtgttgataagagcttacataattttgaagtgtttgcatgcaatgtcaagtgaacttataaaaggttatctcattttaaaaattaaaaaaaaagtgaaccatgcataaaagtaaataagaaattaaaaactaactaaacatttaatatactaacatcatatgtattacaaaaaatattcagaatgaaaaccattttgcctataaaaccaaaatgttagtgatatatatgcctcttttttttatttcttttccaaaattatcgtcaattttaaatcatctaca

SEQ ID NO: 236854 - DNA, 339 bp, Glycine max
  unsure (1)..(339): unsure at all n locations
agctngacttatgaattgattttagccttattttcactnttgttattagncaatccgattaagagagaaaaatcccaaaggaaaacgtttgattgatctttttgattatcttactaaaagatattttatattattatattattattttgcctctctttggttttaagatgtggntatggcatgaccgaacggtcggtatttattttaacagaaattaaaggatgttacaatacgaatgatcggtggaaatttattttattttttgatttggcgagaaaatgacttaaataaatgactaaagcacgttaaacggggtacggaaagtcaatgaaatgaaaa

SEQ ID NO: 236855 - DNA, 453 bp, Glycine max
ctaagcttatatgagcttctatctaactcatatatggtctggaatgcttatatattcttaccaagagatttcagaaatccatcaaaagatcatagaaaacttgagaaaatccttcaggatcaagtagatgtttcactggatgagtccactcagacatacgaagcttgcataactcttaaagaaaaagagtccaagctatgtcttgagattaagacaagtgccggagaaaaagctacccttcttaagaacttttaggagtgggaaaacaaactgaaagaccttcataaggagcttaatgaagttcataatcatcaaaaagaagaaagatatgatctttggagagtgtgcaccagcacacaaagattatgaagacctcacaatgacttaacataatctttgggtggaatgtgaagatcacaagaaatctatgagtctcttgaaaatgagcttatg

SEQ ID NO: 236856 - DNA, 325 bp, Glycine max
  unsure (1)..(325): unsure at all n locations
aaagaaatggaactttgaagtgtatctcataagactttgattcatcaaaagtacaaccaagggttacacatgtttttatatatagactaggtagcttccttgagaagatttcttgagaaaactaccttgagaagcttctgtgagaaaacttccttgagaagctagagcttagctactcacanccctctaataactaagctcacctccttgagaagcttccttgataagattcctatanaagctagagcttagctacatacccccttctaatagctaagcttcacttcttgagatgagacgctagaacttagctacaccaccccca

SEQ ID NO: 236857 - DNA, 439 bp, Glycine max
  unsure (1)..(439): unsure at all n locations
tctanactatatacaagaacgaagctctgatactatttgtttacaagcggccttacatatcttaagaagaggggggggttgaattaagatattgcaaactattttccctaattaaaaatctatttcactttttactcaagtcatgaatgcccttaatgacgatcttcttaaatattaattcaaatgaaacaatttgaatatgaatataacgcactaataccttaaggagattatgggaagagaaaatgcaaactcacgtttatactggttcggccacacccttgtgcctacgtccagtccccaagcaacccgcttgagagtgccactatctagtaaatcccttttacaagctctatacacactaggacaatgctttctttgtgtttagagatccgttacaacaagagactcacaggctcttaattccttagagaatgag

SEQ ID NO: 236858 - DNA, 348 bp, Glycine max
gctaaagaaaaaaacaagatgtttttgtacttagattgctgaaccatctactttggaaataggtatatatatatatatatatatatatatatatatatactaatcattttggtgtcaatgtattcatctatagttcaaagagaccacgttacctgatgttgatctaaaaaaaatgggtaaagcttacttggcacaattaaatttagaataataaatgggtagttttaaaatcagatttacttttaaaatcaaaattaactaccgctcatgaaagctctccttttaacttatcacaactaatgaatatgactgtggttgattttcttttttagtttatctgaggtaaat

SEQ ID NO: 236859 - DNA, 467 bp, Glycine max
tgaataggtcaataacttcatatttcagtcatggtataattaattctaacaggaatcgaaaagaagaaaatagactttccattttccacacatcaagaagcaaatacagatatgacagacatttctggaaatgttttgtttagacttttgttcaactttggtaaaatcatattcttctttttttctggataataaaggatacggaaagaatgttgtggacaaaatgatacagtatcccacatccattttttgcatactcaatttttttttttggaaaccatggtattggtatgaagttgtccctggcaaaagcagtgacaaatctttttcagggaccttgagcacacacaaagtgagtattctcctctcaacacaatttctttcatacccaagggtcaaccaagattagaaccctgaaccacaagccgctaccacttgtgtcaatcgttgttggtcgcatctttagt

SEQ ID NO: 236860 - DNA, 312 bp, Glycine max
  unsure (1)..(312): unsure at all n locations
acatgcatcaaataggctggggaaactgaagactcaaaacttcagaaccatgagttgcaacctgttcggacaaactttttcccattccaaccggtgcacttttttagttggtgtgtctttccgaggcaaggactcaacccaaccgagcttaatcactgctataagtatttgaactctgttcaacccctcgtcatcattcccttgtaccacattctagtaaacacctgcatattatntgttgtcatggcttacaaaaatcaaagaatgtgttcttcacgggaaatggtcttgacattctgtcaggctacctgc

SEQ ID NO: 236861 - DNA, 470 bp, Glycine max
cttgatgccaacattggagaggttaatgaaacaacgagatgatgcgctccatgagaggttggatcaaatggagaatagagatcataatgaagaagaaaggaggagaagagggaatgatggtgttcctagacaaaaccgaattgatggtattaaactcaacattcctccatttaaaggaaagaatgatccggaggcctacttggagtgggagatgaaaatagagcatttttctcatgcaacaactatgaggaggaccaaaaggtgaagcgtgccgccatggagttttccgactatgctcttgtgtggtggaacaagctacaaaaggagagagcaagaaatgaagagctggttgatacatggacggagatgaaaaagatcatgaggaagcgatatgtgccggctagttactcaagggacttgaaattcaagctccaaaaactaacccaaggcaacaagggggttgaggagta

SEQ ID NO: 236862 - DNA, 416 bp, Glycine max
  unsure (1)..(416): unsure at all n locations
accttaagtcacctgcggctgcagcttaaacaaatacttgccttatttaactatctttgggcttggcggccacgatcaacaaagtactttcgacacctactatatgttgatttgaccaacgctgttatcggtatgttgcggcaatccttcaataccttatttatacattctgaaaggttcgttgtcatgtgaccatatcgacgtccttctctatcataagccatggtccacttttcctttgaaatgcgatcaatccatgttgctatggctggactcagttgacgngaattttctaaattatgataaaaaaaaatatgcttgcaaggagtgtagcctgcatgaaattagttagcaacaataatttgaagtatacatgagagttaaattaggtaaccatgataaataaaatcttaccc

SEQ ID NO: 236863 - DNA, 466 bp, Glycine max
  unsure (1)..(466): unsure at all n locations
tgtagccacatggactcaccatgtaatagatgctttgaagctcctttgagccgtgttatccttacctcgcctagaagcccactacataccttatgcgatgagccatggctatcccacatccttatggacatttggagctcaggcatcgtgcgtgaataacagagagggcacttgtttcattggacaacttgctatgttcgctatgcttcacgacgtatctagggccatacttgatgtgcgttgcatatggagcaaaagttggaccttctgctagaaaggttcgccctcaaaggctatacatcataagagcaaggccccactctgaatctattatcaagacaagggagtgattcacgatctcgctggctcaacagagaggataccgtgggttttaatcatcatgtataaaatttaggcgccactactntagattattcgtaattatacatacataatatgcacctat

SEQ ID NO: 236864 - DNA, 338 bp, Glycine max
  unsure (1)..(338): unsure at all n locations
agcttnttaggttcagatgatgcttatgggtctgtagctacctcatgcactcctctaatgactatggcatcatttctggcgctaaactgctgggagtcggaggccatcttctcaattaaatttctggcttcagcatgagtcatgtctccaagggctccaccactggcaacatctatcatacttctctccatattactgagtccttcataaaaatattggaaaagaagctgttctgaaatctgatggcgggggcaactggcacatagcttcttaaatctctcccagtactcatacacgctctctccactgagttgtgtaaaacctgagatatccttact

SEQ ID NO: 236865 - DNA, 461 bp, Glycine max
cgaggatagagacttcttaagctatttatcttctctcttatagaggcttactcaagctcgaggatagagacttcccaagctatttatcttctctctcagagaggctctctaactttctagctgtcttactctaagaagtggattcactcttgtcttggatcgactcactctacggtggctcactcaagcttgaggatagagacttcccaaactatttatctcataaatcctcccaactacttcaaaaatttcctttgtactattaacccactctaataatattttttctaagctatggataacactactcaatcgtcaactatttctgtccctatcttcaatggtgaaaaatatgatttctggcgtgtcaaaatggaaacatatttttcatctcaagatttatgggacatattagaagaaggcttcaccattctcgcggatacttcagttcttaatgcatc

SEQ ID NO: 236866 - DNA, 400 bp, Glycine max
  unsure (1)..(400): unsure at all n locations
agctctggcaatggcgttctctgtctttgtttcccaacngcgtctctgattaacaatgattccaacggtgatttacagtaatcagcgattttcaccaaagttttgaagctttcaattaagcttgatgacaaaaattccttctgtggaatccacaggttagcaaaattgttgcaatgcacaaattgcattgtgtatttgtcaatcccacaattccttcaaagtacgatttaaatctagatcgtcaactggatcacatgtctgctacatatgagaagtgattcattcgagatcagtctatcttcacgtggcttctgtctactctctctgagtcggtgctgtcgagagtgttgaatttgcaccatccgcatgagatttggacaaaattcctaccattactatg

SEQ ID NO: 236867 - DNA, 395 bp, Glycine max
catagctttaattgttgattaattcttgaaaattagtcttgttaaaaatctattggttttgctctcatttcattttttggtcttttgttattgattgtctctttgtttcgttgtttgtgagttgccatatagggaattggaaaggaggattggtgccatcccttgaagaatttgagtgaagaagctatgagaaaaccaccataagagctattggactaagaaacactccaaactgattgaatcaccaaatacagcacaaccaccaaaattgaggattgttttataattttgtaattgtcaatttacttacctttattactctcaaattttgtaacaaaaatgcctctcattggatgtgtgttaggagcctccaataggttaccaaacttccatgt

SEQ ID NO: 236868 - DNA, 436 bp, Glycine max
ggaccctagaacgacctgcagcatgccagcttcccaacaaccaagtaagttttcattcaaacaacacaaactatcacagccaataaaacagggcaaaggcagaaaactctgcccaaaacaccaaccaaaatcacagctgttctcacttaaagaccccagaaacaattccttcggtccaattcgttaaccgctggaacgactcgaaaaccatactggaaggctctagtacttaagcctacattgggacccgggggaactactagcaaacgttcagaactcattctgtactactctgtccacagcccaccacacacaagcatttttctgcacaaagccaaaatactgctacacctattggacagcaaaaatctacataagtgcagaattcgaaaatcacactctctctcattcaatcttgccaaatcaaaacctacaa

SEQ ID NO: 236869 - DNA, 411 bp, Glycine max
  unsure (1)..(411): unsure at all n locations
tgcggactatacctccgaccaaacactgtcttgtttctgtttcaggccggatttaaggcgggctgcagcttcggctccgcttacctaactgtactggaggcggattccgtggctttatcctctatanttttctggagttttaacatgacctccgagatggaagccatttgatcttttaatgccgatagatgggccttcatctgttcctgcatgccctcttcattatccatttttctggatagagtgttatagggatgccttggtgttttcttaattatgatgaaattcctaaagaaataaacaacggtgagtatgccaccaaaacatgaatatgcaaatgaatgattggagcacttggatccaccccaaggacttttagataacgtgataagttcataacttctcatgtta

SEQ ID NO: 236870 - DNA, 364 bp, Glycine max
agcttaaagtatgcccaagtcattcatccttatgagatgttgttgaagtattggcgatcagaattgccattccttggattatagggttgaaccaaactcatgcttttacaaaaaggttcatcaagtcaagttgaaatatggaagtaaccgtcttgcaaaattggggcaaaagatgaatcgagtcacatcactgcttcgtctactgccaaacatatttaggattattgatgtccttgttacttccagtttcaccttgacaaagatgtcatggaccatgttgaaaatctaaattgattcaaccccatatcttgcgtaaaaattcgcaatacttcaactgtacatcattcgcatggcatccatgctt

SEQ ID NO: 236871 - DNA, 455 bp, Glycine max
  unsure (1)..(455): unsure at all n locations
tgagtttgaccaagtttcttatccgttgatacgccacaactaaggtaagttttttaatgtagggattgaggtcaccatggccatcaacgtcaatcttgacaacgcatgctgaatccaccaccgtgtactctgtgaaagttgaagtgttcaagaaatggaagatgggttttccatctgttgtagaaaaccttgtggcaccatcactagccatcaccttcttcataggatccaccccaaatctctcacacatgttggtcttctcgcacttgcaatatttgcaatccccacatttcccattgaaaattggcaccaccaagtccccttctttcatgtcatttacaccttctcccacactctccgcaatcctaaaaattcatagcacacacaaatatccaaaggtgttctcacttcaattcaatttcatgtgatagaacttatanttttatgtacaatat

SEQ ID NO: 236872 - DNA, 367 bp, Glycine max
  unsure (1)..(367): unsure at all n locations
agcttataatatatcgagacgctcgaaatttaacttttgaagcacncgagaaaagcaaatggacataacttttcacacggatgttcgattcaggcgcataatatgtcaagaggctccaaattgaacaacggaagctctcgagatattcaaatggtcataacttttcacacgaatgtccgattcaggcttataatatatcgagatgctccaaattgaacaatggaagctcttgagaaattcaaaagttcgtaacttttcacactgatgtccgactcaagcttataatatatcgatacgctctaaattaagcatccgaaactctcgggatattcaaatgggcataactgttcacacggatgtccgattc

SEQ ID NO: 236873 - DNA, 455 bp, Glycine max
  unsure (1)..(455): unsure at all n locations
tttgacgaggcttgtctgtctcataagtgtgtgctctgtatatctgccttatgcggaggatacggaccgcatactatgtgtagacaatcagtgggacgttccattagtataccttgtgttgtgtgtgcccctcgtacaaagatgggccagatgagattcatcgcaactttggcgtnttgtgagtcaccgatgcatcatacatgatgagcgcgtcgccatggatgccacacgcttttataagaggtgatatgcttatacgtatatgtcgactaccttgggtgacatcatacatggactcatgattgttatcactcttgccttatgtgacttagcgagggtgtggtaccatgaagacttatcagaatgctcgtgcgcgtatgcactctgtggcacgcgcttaccgcttgatgatatgctttcgcatatgtctcactcgtcgtgtgacacctatactg

SEQ ID NO: 236874 - DNA, 492 bp, Glycine max
ttacggaccttgaaactaagcttcgttcttttataatgagaagttatggactcattacgttatctaaaaaccttggggtggatccaagtgctccgatcatccatttgcatactcatgttttggtggcatactcaccgttgtttatttctttaggagtttcatcataactaagaaaacaccaaggcacccctataacactcgatccagaaaaatggataatgaagagggcgtgcaggaacagatgaatgccgatctatcggccttaaaagatcaaatggcttccatctcggaggtcatgttaaaactccacaaaaccatataggataaagccaccgcaaccgcctccagtacagttagggaagcggagccggtgctgcaacccgccttgaatccgggcctagacagaaacacggccgtgttcggtcgaaggtatatcccgcaagcttatacttatggactgcctccggacttcaccccccgtgccactccgga

SEQ ID NO: 236875 - DNA, 473 bp, Glycine max
tgtgtgtatatatgcatattataactgtatgtgtgactagttatctctcccgacattgcctgagacaaaatatataaaccacgagtccaacaaaagttaacttctgactgtaacatatacaaagaaaaaaaataaaaagaaaccttgatagaaaaacaacccttttgatcaatcaaaattatgtacataaacatgaagttggactttttatgtgtatcgggtaccttccacctgcgaagacccttcaccatattggtaaatttttcagaaccacgatacaatattgttgacatgagaacgaaaattcatctttctgggatacaaacaagaaaacctaggcctcaatgaaactcactttttgctaacattcgggtgttccgtggttgcgatgacttgtgaagtatctggagaagactacttgtcttttttgccaaagccaaaaccactttggtaacaacaatgtttggtaaatg

SEQ ID NO: 236876 - DNA, 442 bp, Glycine max
  unsure (1)..(442): unsure at all n locations
gatcttaacactgagctgcactgcttggttaatggattattcttattangactngnangacccaatttgggcaaaattggatgagggcaagagggatttctaaatctgcctatattgtgcagcaaaaagctgtcaaattttgtgcagcagaattcggctcttgtgcataaaatgtttgtgtattgctggttgtggaaagggtatcacatattgggttctggacatttctattagatcccagcggtcaaaatgtatatctatgtactagggatctccagtaaaattttcaagtcgatccaacggttaacgaatcggaacgaagaaaatgtactgtggtatttaagaaaaaaagctgcctactggattgtgtttgggccaaagttttgactatgcctgtgttttggttttggatagttatgaagttacatatagaatgcttggt

SEQ ID NO: 236877 - DNA, 479 bp, Glycine max
tgaccttcctctcaggttcaagcttgttgacgacctcaatgttcttctctcaagccttcacttgttccacacttagtcgacgcttcttctcagattgatgccccggttcttcaacacacccttcctcgtcgagtccgtccaacatcgatcggaactccctgccatacatgtggtggctgttcctcggactatgttcctctaaaccaatgcaaattaaatcagacatcatcattattagtataaccaacataaaacatggatcttggatctgtgtctgaattttaaaaaacaaaaaccaatatttaaaaagtgtgaatgaattaattaagcacctgttgatgatgatggaaaaattgtcatgagggcagtggaagaatctgagctgttaagtctcttcatgagtgggaaagatgggatcttattgttgcttgaagaagaagaagaagaataacaagaagaacaagtcagcctttaatgat

SEQ ID NO: 236878 - DNA, 350 bp, Glycine max
catgcaactttgaggacggtgatgttttggtttcactgagccatgaggctgcacacaatgatgggttaaataggctttcttaatgctaaaactggaccattttatatgaaataggtttttcaaaaatctttaatttgacacttatactaaacatgtcaagttagactaaccttcattatactaggccaaagctccttacctaattgtctatgtacttttagtcaaatttggttaaaatatctctatcaatgcaaaaaaaaagacaaactttctacctaaaataatcaatgtaaaataaaacgatttttttttcggttacaaatataattaatatagaaagccacaaatac

SEQ ID NO: 236879 - DNA, 401 bp, Glycine max
  unsure (1)..(401): unsure at all n locations
gcttancgccagtcttgcactattcctatctgattacacctgatgcgcttagcgcattgatctcgcgcttagtgcgcgaccttgatactgatgctctgccagattctgctttgcgctaaacgcgcggnggatgcgtgcttggcccaactgctgagcttagcccaactgccacgttttgtaattcanaacttagcctctttttcacctaaaattgcacaaatttcatcattaaatccaatggaaatgttctagagatagctttaaccataaaacaagatttatttacagaagtactccaaaataaccataaattggggaactatacaagttgtggaaaatgatttctatacaaaagttagtcatataaggcgactaacaaactccccccaaattacatgttt

SEQ ID NO: 236880 - DNA, 418 bp, Glycine max
tacttctcgcaacagaagagcgagttgtgacatctccatttcatacatgcgcatgggactctatctatgcctgagcctagtggattactactctcatattattgtcattttgcttatgcaagaacaattatacaaaacgtgctatatatatcattcattaatgcttatattatattaataataactatactttagcaatatattgttatgaatgtgatttgaaattaacataaagtatttatttctgggccaattctattttggcaccctgctggtaatgaaattgtttatagcatgagcttgtacatcctatttatttgatatctttcagttaaatgccagaagcatgttttatattccttaacatgaaaaaaatccttaaattcagatcgatttttttaatccatttccatttctg

SEQ ID NO: 236881 - DNA, 336 bp, Glycine max
  unsure (1)..(336): unsure at all n locations
gagcatcgttttactggacagaagtactctccagcaagtgactgaatgttcactatgcactcattggcaaatcccatgccgacctataaagcacagcttcagctccagacacgcataaagctaaacacaattaattcaatcaattatacagtggtttaaatgcaactcatgatatggatgcaacaagacacagacaaggcaagggcatatgacattaaaaaaaaggacactggcacactgcatagntatatataaagtataaagctaatttatttgagagtaagtctacagttaatttaaaattaacacaaaacaaaaattctaaatcacaaatca

SEQ ID NO: 236882 - DNA, 448 bp, Glycine max
  unsure (1)..(448): unsure at all n locations
ctctagctntccatngaggtattatggtcttcttttattgctctaagacgngtgaatatgcccaaatctatggagcaattttggctttgtttcatgcttgattggtttgaattgaggggttgtatgggatggacctatgcctatgttgcattctgatgcaatggggcatgccacattgcccccattctcttgctattcatgccaaaacatgcgcccaccaagtgctcggtgaaatgtctcaatgacatatgagcatggttttgtaagcttggaattgtgggactcgtttatatatatagggacaacatgacggatttaaaatgagtacccgaatgcaattctatgcctatgaacccaagcttntaatttcaatgcaaggaagcatgacttatgcgtaggaatctaaatattggtttttgaatgtaaaaaggcatgaatattatgacat

SEQ ID NO: 236883 - DNA, 340 bp, Glycine max
  unsure (1)..(340): unsure at all n locations
ggatcttaagcaccgcggctgcaactagncagaatgcaaacgcttagtttcttcaccttcaagctcttcatcaagtccttcaatacctcaaagcacctcctgcctaaggtttgttcttttctgcaaacagcaattccaccgccacagcttatgtagactctgattggggcaattgcaaggatactagaaggtcaacaactggtttttgaatctgcttgggctcatctctcatatgttggaagtcaaaaaagcaacccactgttgcaaggtcctcatcagaggctgagtatagagctttagcttctcttaccaatgagttattatggctggcacaacttct

SEQ ID NO: 236884 - DNA, 459 bp, Glycine max
  unsure (1)..(459): unsure at all n locations
tctgcatgtntagagagttctagagagagaaaggtccatgttccacagagtctgggagattctgttgtgtgaagatctgcagagaccacagccatcctgagagattgagatgcgtttgtgagtgattgtgaggtcctataggtggaggagacatccccactacttgtatttctgcaatctttcatctttatcttctgtttattggaaaggaagtttccctgttatggaaagctaaatcctctgttggatcttccttgtaggtacttgatgtaaatatctttttatatgtttaatgatgttttgtgtgttcattgtgctatcanaactgcattctacgatgcttttagcttgatcacgtagatgcatgtgttttaaggatcattcaacagtgggaactggtctgattcttataacttgatatgacagggctagtttgtcgtattttcacgaggaatcggg

SEQ ID NO: 236885 - DNA, 331 bp, Glycine max
  unsure (1)..(331): unsure at all n locations
gaccttaagtcaccgcggctgcagcgactatgccttttttctgtataannagncccagaaaactcttcttgaaatctctcttactccttactcaagtgattggtccatccatgtggagcccacccaagcaaaactcttgctccttggatagtcctctatcacaatccaatcaaatttgaagtggttggtttaagtcgttcttctaataagaaaaaaggaaactcaacccataccaacccatttgcaaacggtttaggtgggattgggtccacacgtcaaaacatataatttgttccgctattttctacaacgtaatatttttattaaatga

SEQ ID NO: 236886 - DNA, 465 bp, Glycine max
tcctatggaagagagaggccaggctcgatctcatagcatggtcttgaaagaggagttagctgcttgctcaaagtacaaaagaaactcttctcaacatttatgcgagacagagaccaacatgttagccatcgtcagcaagtaccatgaagaactaaatctaaccatggcccacgagcatagagtggcggacgagtatgcccaagtgttcgtggaaaaagaggctagaggaagggtgatcatctcgttacatcaagaggcaacaatgtggatggactgatttgctcttaccttgaacgggagtcatgaacttccccgattgctatccaaggccacagcaatggcgaacaactactccgtccccaaggaaatccacagacttcttagctattgtcagcatatgatagacttaatggcccatataattataaaccactatgaagtgttgattattacttcaaagatcag

SEQ ID NO: 236887 - DNA, 284 bp, Glycine max
ggactaggcggcgggcgggcgattgtgcacaacaagtttttcacatccacaaagcgcgcataaacccaccattccctgttgcccacctccatctgagctcacgtactcccacgtatcccatatactcgtttttctcaacaccgggtccccatcaatcctctcaagctttcacaacatccaagcaaaacaacattcaaacagcacaatctatcacagccaagaaaacagagcaaaggcagaaaactctgccaaaacaccaaccaaaatcacagcttttttcacgt

SEQ ID NO: 236888 - DNA, 493 bp, Glycine max
  unsure (1)..(493): unsure at all n locations
tgctattacgtgacctatgaaactcagctntggaaaagggaaagcttttttggacaaaatctattaatattggtatctcccttagggtttaatactctaccatttgatcaatttctttctatttttttccctaagtgcaaaaatagcttcttgaaagctaactatagggcgagttggatgataacatatacaataaaagtttttgaaatttttaatttcgagagtgagctcgtatttacctttgatctttttgctagtatcttgcacagaacaacaagtcttgattaatttctctaaggaagaaagaatagaaatgagtctctgagaataacattttttccaccataaatggaaatctctaagaataatctttggtacgaaagaagatggttgaaattgtagcttcactttaggggttcccttttcgatgactntagggattagactttcatccccttgaatttgatatcgatgtgtcttctttcgatagatg

SEQ ID NO: 236889 - DNA, 375 bp, Glycine max
  unsure (1)..(375): unsure at all n locations
agcttcattctacacctgaaaaagaagattatatatttgcacaaaagagaaagcttcctaacaaaaattttcatgcaggtggaccttcttctagtaattatgacttaccgcagcctcctatccctcttctattcccacctatagcaattctaaacaaaaaaatggaagaagcggaaaaggagatcttggagaccttaaaaaagtagaggtgagcatacctctactagatgccatcaagcagattccaagatatgccaagtttttaaaggagttgtgcacccacaaaaggaagctcaaaggcccaacaatcagcattgataggtaaatctgttcctcacattcttgagaaatgtaggacccangtactttctgtta

SEQ ID NO: 236890 - DNA, 337 bp, Glycine max
ctcagctctccctatttgctataatgggggagaaggaagatgatttgttccccccttagcacttctctctctctcgaaatgcgaggaaaatatttcccgaaaaaatcaagctatgcgcttctgaacgtttcctgagtaattacacgaagatctttaccgtcttcagatcatcgctcgcgttcgttttcttactcttcacgggaagtacctcaaaccaagttttcatttatttatgtccccgggggccacacttgattatgattttattccgtgtcattacttttctacccctttgaccggctcaaccatgttttaattatttcttgttaattaaaat

SEQ ID NO: 236891 - DNA, 427 bp, Glycine max
agcttgcacttcttcactctcctcaggatttgtattctctttcccactcagaccttttatctttgggagccaagttatcccttgtgttttagacttcaaccatttgtgatagtcgcctatgacgccattgctacttcccctaagctctttatcttttctttccactctattccatgctttacggactctttgaagtatcttcgcactagcttcaatgaaacctcatgcgatgaaaggcacgatgatttccttcgatggtgcacctctcatagggtatcctatctgtcttatggccaggatgggattataattaataccacccctcatccctatcaagtggacatttggtattccttcgcttgagcataacactcctgccaagagtgcttccgaatcactttacccttttcgaagcacatgcgatgac

SEQ ID NO: 236892 - DNA, 233 bp, Glycine max
gacatccacatgatcaaaaagttagattgaccattagtgaaacacaaatcaaacgaactaaaatgatcaaaccacatcgctctctctctctctcaagacgaagtatttattaagtcaaatgggcaaacttcactcgcaaaagttgctcttagtagttatagctagccaaagcaatcccatctgtaacaatttaacataacccctaaggagataaataaaaaaaaagggtaaca

SEQ ID NO: 236893 - DNA, 347 bp, Glycine max
  unsure (1)..(347): unsure at all n locations
ggtagaattatggcgtacccatcacatgtggtactaggtgtgtggttcttcaaaggngcacaacangttcttcacatacacaatgcgcgcataaacccaccatcccctgttgcccacctccaactgaactcacgtactcccacgtaacccatatcctcgttattctcaacaccgggtccacattaatcctaccaagatgtcacaacatccaagtcaaacaacatttacacagtctaagctattacaggcaagcataacaaagcaaatgcagaatactctgcctaaacaccaaccaaaaatcacagctttttccactcacagaccccaataacaatttctttgattca

SEQ ID NO: 236894 - DNA, 395 bp, Glycine max
  unsure (1)..(395): unsure at all n locations
agctggnccctagaaaaggtgaagctttgtttttgcattactttccatgaatcctgataaatataggtgaactctgttgtcacttaatattttatgttgaagtatctcgattgattagtcattttcaggcgttttttttctctgacgctggtattttttttttggcacctttcttggttctcaataaaaatgttctatccataaaaggtacattttaattattcattgcgcttcaaatggtgagatcgaaatgaacgcatgtattttatggtatattttcatatcaaaaagttacggaatagttcttgttgacgcttaaaaattggacccgcattaacttcctattcgctggtatataacctataacctatataaggcctgattttattgtatgc

SEQ ID NO: 236895 - DNA, 451 bp, Glycine max
  unsure (1)..(451): unsure at all n locations
tatcacaacattggcattgttgttttaagtnancatcntgcatccctgtcagacaagcaaaaaaatttcctttgtgagcaagcttgtttattatcttaagatcaacatcatcccaagactaatcaacaacctctagaataaaaatattatggccttcaaactttcacctttttgaagaaggtttattgacagttgggtagccatgaacaaccaagccttagaaacatctcagatgtagctttataagctactcctgcattgctagccttctccttctacacagattccaccatttgagtgtcatctcctttagaaccactaacacttgaatctttcaaaatattagcagcattagggacaacctttaaggaatcatctttntcctccttaacaagaatttgagcaacatagacctaaacaacaatcnttgacttcttattgttcaccaaat

SEQ ID NO: 236896 - DNA, 345 bp, Glycine max
agctggggagtttatctggctagaaggtgtcttttttgatggagatgaagctgaaattgggcgtgaagaaccactattccttgcagcttgtgcaggctgtgaattttgaggggtaggcaagtggcttggtagtactgcataggacttcttctcctgctcctttaaaatgtcccttaatgatgtgggcttaggaatcctatcagaatcagtattccatgctggaggaggagatgggcttgttgtctctcctttccaagaacaaaatctcccaacaagggtccttgaggaacggaacgcattaattctttctcctgtgaacagaacggagcttttacctttcaatgg

SEQ ID NO: 236897 - DNA, 445 bp, Glycine max
gcttaacaaactcagaaagtaagagatcatgtattccgaattatatggggagaaaacggatgcacattttatctatatacacatgcttgttgcttgaatcttgatttcaggcattgtattgtcatcatcaaaaagggggagattgtcgatgcaattggctttgatgttttgatgatgatcatgatgatgtgttgcaatcgatgcaaatgggcttttcaagattaaaattcaagacaatactttaagattacaagtcacaccatccagatgatcactataatattacgaagggaattcctaattgaattagcaaacgtttggccaagtgatttaaaatatacagtgtttctcaaagcttttactctctggtaatcgattaccagaggatgtaatcgattaccattggccacatacgttctataacagctataacaatttgaattct

SEQ ID NO: 236898 - DNA, 469 bp, Glycine max
  unsure (1)..(469): unsure at all n locations
ctggaacgtgacanactttagataaggattgaatatcatcttcatgcatatngatcngtacagaacctataccaacatacttacgaggagtattgttacccataaggacattaccaccaaacttctcctcatatgtcacaagccaatttttgtgtagacacatatgataaaaacaacctaagtccaatacccattgttcaaaatgttgtagttgttcaccaatgaccataaccaaatcccttttctataaagagtcattctgaacaagggcagcaatataatagttctttactttctttggacaatctcgctcccaatgacccggtttttttgcagtaattgcaaatgtccttatgatcagattttctcttctagccacctattcctttcttcttcttctaccctttggcagaatcagtcaccgataatccgaatgcataaactttatcaccattcccaaacaccttta

SEQ ID NO: 236899 - DNA, 411 bp, Glycine max
agcttgaagacaagactatacgatttatcttccttgggtatagcaatatctttaagggctaccgtgtctacaacttgcaaactaagaaactcgtcatcagtcgagatgttgaagttgatgaatatgcttcatggaattgggatgaagaaaaagtggagaagaacgttcttatacccgcttaactacctcaagaagaatatgaggaagaagatccaggtgaaccaccttcacctacatcacaacaacaagatcaagaactatcatcaccagagtctactccaaaacgagtaagatctttggtggacatatatgaaacttgtaacttggccatacttgaacctggaagctttaagaagcgtcaaacaggaagttgggtcaggcaatggaagagagatacgatgatcggaaagc

SEQ ID NO: 236900 - DNA, 464 bp, Glycine max
  unsure (1)..(464): unsure at all n locations
gggttcgaggtacttacccgttgaagatcgaagaacgatgaataacgaatgaagaacgtcgaagaacggttcaaacctttgcgagattcctcacggaaaacgttacggaaacgtttcggaagcgcctcggcttagattttcttcacggaaacaatttttccaagcaaattcgaaagagagagaagtgccaaaggggctggaccctttttcttcttgttttcctcccctatttatagcaaaataggggaggtggttgccgcccagctcgcccaggcgagctcagctcgcccaggcgagcagggttgcttcctccagaagcaaccgccttctggaggaatcttctggagggcccaagtgggcctgggtgctatttgcacccccatttttactaagtacacccccctctgctggttttggtaattcttttttcgaaagttacggaaacttacgaatntcgtaacgat

SEQ ID NO: 236901 - DNA, 473 bp, Glycine max
  unsure (1)..(473): unsure at all n locations
ctcagctgagctcgtctggtgaggctgaagaggcattttttcgatcaaagagccgntaaggagatcaagattttgtctgaagtgggtagagtcccgtactcaaaattcaatggcaagatcaagatgtcaaatgaagagtttgaggcactgagagcaaaggccaatgagtgtgaggatttggttgaaaagaaagaagcaattgtgatggcagagctgcaggaaatctatgcaagaaagaatgaagtggacagaaaggtggaaactaatctgaaggcaattgaggaaacaaaggctgcagaggagacggctttgtggagtgcagagatggcagattctgcaaaagtggcaattgaaagtgaacttatgaggtggcgtcaataacaagaaaagctgataccagatgctgcttctcagaaattggagcattctgcagcaccaatctcgttgaccatctagaatagagtcaaatcttg

SEQ ID NO: 236902 - DNA, 331 bp, Glycine max
agcttgatccgagacaatatttcccaattcaaactttacaaaaggacaccaacaaagtgatgaataaaactaataattaagctgtttttatatatatttgataaataacttaattaaaatattgttattaaataaatgtttattatataagtattgagtatatatcgtttttataactgaagaggaaattaatatgattaaattatatttatgaaacctttaagttgtttttataaaatatccagtcgaacttattgaaataaaactataacaaggttataataacctctgttagactcatataccagtacttattataggggaataaatg

SEQ ID NO: 236903 - DNA, 457 bp, Glycine max
  unsure (1)..(457): unsure at all n locations
ggctagttntgtgggctccactctagtggtcttatttggatctttaagaggtgattcaagagcatcatgaagagtagttgaagcattctagtaagagcaactcaagctatatctctatgtaagaaatatgcatttctgcttcaacccttctattgagagtgacccacctttgcaaaagcttgtaatttgtactagatgagaaattgtgacttccttcaaaaagatgatgaaactcacaaaccaagaggggggtgggggtgaattggtttctaaatcaaaatagacttttaaaaaccagagtaaacaaaacttcttttccaaggatcgtatcacaaaattttgataaaccaatatttaatcaatcaccctttacacaaaatcctttgttaaagnttgtcataccctaatttcgtccggggacctttgctngatgacatgcgacctttctttggtcctt

SEQ ID NO: 236904 - DNA, 381 bp, Glycine max
  unsure (1)..(381): unsure at all n locations
agcttctagccaaatggacttaccttgacttaatttttttgatagccctttggagccttgtttccctttcctttttttgaagctcactacaagccttaagtgaaaaaccatgatatcaccatatccttaagggaatttggagctttggaattgttttgggaataagtgtgggggtttttgtttcattggataacatgttttgttggtcatgcttcatgatatatnttgagccatacttgatgtaaattgcatattggttaaatgttggacatgctgaatatgatgttgtttctcaaaggctacagagtaaaaaaaatattaacaaacatcganaaagaaaaagaaaagcagtcaagttgagtgaataagatcatatatgac

SEQ ID NO: 236905 - DNA, 471 bp, Glycine max
  unsure (1)..(471): unsure at all n locations
tgtaactctnggcagattctgtaaaactagacacttaataagttatgactntngaaagaatcttcagaaacaagtcacttgaagaattgtgacttttggaaatgtatttttcaaaatcagtcactggtaatcgattaccattaaggtgtaatcgattacacatcaacagatgtgacttcattttgaattttgaaaatcttaacattttaaaacactggtaatcgattacatgattatggtaactgattacagctttgtaaatcagtttgaaaaaaatgctggctactggtaatcgattactaccttctggtaatcgattaccagagagtaaaacactctggtaaaaaatttggtgaaaacttcatgtcctactcaatgttttgaaaaagtttttagtacttatcttgattgagtcttctcttgattcttgaatcttgagtcttgaatcttgatcttgattcttgaatcttg

SEQ ID NO: 236906 - DNA, 397 bp, Glycine max
agctattccaaggtggtcttcagcttctcttttaaactcgacccattgtcgataagtacctttgcgacgacatggtccatacatctcactgacacatgtagagccttattgtgtcctctcccctcaatgagaatttcttcttccgcaaacgcgatataattattggtggttatatgattaacgatgccttcaaaaccctcaactgagatatcgtgtgctacatgggcatcgttgaggacctttatcaacagtgcacgatgaggctcggagtttatgcgcagttcaagcaaagagatccttgttggagttttaattaagtgctcaactaccttaaactcgctttgttgatgaggcgaaggaactcatgagcctcttccacagtcactgtcttttcttg

SEQ ID NO: 236907 - DNA, 412 bp, Glycine max
  unsure (1)..(412): unsure at all n locations
ntnntatttcagtagatgaagatgaattcttggtctccttatggactcctctaagaacaataacatcatttcttgcactgaattgttgggagttggaagccatcttctcaattaaattcctagcttcagcaggggtcatatcaccaagagctccaccactggcagcatcaatcatactcctctccatgttgctaagtccctcagagaaatattgaagaaggagttgctcataaatctggcggtgagggcagcttgcacacaatctcttgaatcttttccagtactcatacaagctttctccactaagttgtctgatgcctgaaatgtcttttctgatggcagtggtcctagatgcacggaagaatttctccaagaacaccctcttaaggtcatcccagctgaaaatagacct

SEQ ID NO: 236908 - DNA, 361 bp, Glycine max
  unsure (1)..(361): unsure at all n locations
agctggcaaggggtaatttaattcaattttttatagttntaagaacggcaaggatattgctatctatgtcaatggtgaagcaaaaaaaggtatatagaatgccacaagctagctacataactaatactactttgttatatttggttctagtatctgttggcaaataataatgttatgtaattatgtaacaataatgttgacaatctattgacatattgtgttatcaaggagtttgacgggatagttccgcgtaatcttttttagtatactatgttttaattntttntatttgttaaaaacaactaatgatgtcagacaagttgaaaaacgattaaaaacataattaacccagtgattggat

SEQ ID NO: 236909 - DNA, 465 bp, Glycine max
cttcattaaaatccaaaaccttgtcattttctcttatttcacataagcttctaggggtgttcagagtagcaaaacttttcttcttgctcttgagggttgctctagaaaccttgaagccttaaattgttggtaagttggttcatccttcactttaaccttggtcattcttcttcatcacttgagtcttctctcatgctcttgagttttgttaaagattgttttgactcaagaacttcattcttggctttacccttctctttcatgtggagactacaagaggtaagggggttttctccaatctttgaatcctaaccatgtgatgcatggaaactttgatggaagcttgcttgtggggcttctatggaggctggatctttgagaagattcctaaagaagctagagcttagctacacacaccccctataatagctaagctcacctccttgagaagcttccttgagaaga

SEQ ID NO: 236910 - DNA, 464 bp, Glycine max
tgatgatatggtcttcaccgacgaaaggatcaaagtggttctgtattatatgcaaatctgatcatcttgctttgataaatgcaaaaaaaaaaaaaaaaagctggggcaaataaagagggtgaggatgaaggagaagcccgtgctgtgactgccattcctatacagccaagtttcccaccaacccaacaatgtcattactcagccaataaccaaccttctccttacccaccgcccagttatccacaaaggccatccctaaaacaaccacaaagtctacctaccgcacttccaatgacaaacaccacctttagcataaaccaaaacaccaaccaagaaatgaattttgcagcgagaaagcctgtagaattcaccccaattccagtgtcctatgctgacttgctcccatatctacttgaaaattcaatggtagccataaccccaaccatggttcatcaacctccatt

SEQ ID NO: 236911 - DNA, 369 bp, Glycine max
ccttaagtcacctgcagctgcagcttaaaatatggctataaacttttgtttccaggaatctataaataacctccctctttaggagtgggttaccactacgaaaaccgctgcaaattttataaggcataattaaaattggaaccataaaaggacttatgtccttataaaccagaatgcaacataaaaacctaagcaatggctgagaaaaagaaataatcatatatttaaggccaaaaattattacattgcttggaaagagaaactttaggttcaaatgaaagtgtaggatattggatcactcagtacactgaggccacaatgtaaaaactaggaaacatttactgcgaaatacttttatgagatgtaata

SEQ ID NO: 236912 - DNA, 467 bp, Glycine max
  unsure (1)..(467): unsure at all n locations
tcttntggaccttgaacaagccacgaacgcctgctgcagttccattctatgcgctcgcgactggtccctctcttcccttcgcagctagagttcattattgctaccccatagggctccgcgaaatttgttccggccatactcttccttgcgagccctctcggtctctcgttcaagggctcttgcggtaattgcattctcttcccgtaacccggcacactccttccgaacgtgtgtagcagccaacttgaacttctccttggcgagatttgcctttcctaactcgcttttgagagctgggactaactcgttctcttccggtgcttcaaaattctctttgctgacgacttttaacttggcgagccaatctaaacctcgtatgcgaactttcagccattcgtggtacccaccaatgatgccattacgaatgcctctaagctcttgatctttccttaacggagtttcccatg

SEQ ID NO: 236913 - DNA, 401 bp, Glycine max
  unsure (1)..(401): unsure at all n locations
aacttgctaagcaagatcagcagagaatatattctttctttattgnggaaaacacaattttactcatccctaaaccctaacacctcattttccaccacccacaaccactggtggccaccatgagcctgtcttgtttgccgccaaacctccacaccaagaagaacattgctattggagcggaatcctcaaaaacctcctcaaggagtgggaggagaaaaatgcctcaatccttcctttttgtacttgttcagggaaatcttgactctaagcctttctcaaagtaggttgaagtgctcttaatgcctccttggcattgcgtattgaaaaacgggggttttacacttcgtttgaaaaactcttgagaatgagacatttgaaatatcatttttttacaatcccaa

SEQ ID NO: 236914 - DNA, 474 bp, Glycine max
  unsure (1)..(474): unsure at all n locations
tatctttctcaagcgcataactagagctctatgaagagattgtttcanggatgggncngagataccatgcttcaacaagttaacctagatgatacaagtacagcatgatcaatccttttcagttttcaatatactaatagtctttaaaacataaaattataaaagaattaagaatttgcacatgatgtacaaggattttaaattaaacaaggaagcccataatactgcaaaattgctaccgaagacaaaaaaagttaatgaaatatttaaaataagtagtcaagacaaaatgcactagccaataatactattactaaccaagaccctacgaaaacaacatatgaaatggagaagaaaaatgatatatacacactagcctctaggtgtcaacgcatgtggcagtgttcaaaggcatgtgtgtgtgatacaatactggtgcataattgaaatgcatttatagaatagaggttgaca

SEQ ID NO: 236915 - DNA, 474 bp, Glycine max
  unsure (1)..(474): unsure at all n locations
tctgcttattagtgcacagctccttcaagaatgtggcatatcttggaattngctntattgcatccaacagaggtatgtttacctctacttttctaaacgtttccaagatctctttctctgcctcttctatttttttgttggaaactgctcttggagggaatggaagagggggaatgtgctgcttctgcaaatcagaattacctgtggaagaagattcacctgcacagaaattgttaggtaaatttttgtcatcacctttttctggaatagagtgaagtttggcaggttcatttgcagatgaggaaggtgctacgggttgaggtccttgacattgctttcccgacctcaatgaaatggcactgaaatttttgggattttggacagcttgagaaggcagcttgtcagaattctgggactgttgttgattctaatgggtagccaattgtcccatctgattggttaagctctgaatgg

SEQ ID NO: 236916 - DNA, 353 bp, Glycine max
  unsure (1)..(353): unsure at all n locations
agcttaaagtccattatggatgcataggctattttctttctganggcnnctaatctagcaactggagcatatatttcctcataatctatcccctcttcttgattatatcctttggtgactaatctagccttatgtctaataactatgccattttcatctaatttatatctaaacacccattttgttccaatgaatggcgagttttgaggtttcttatctaacttccaaaaattatttttttcaaaatggggtagctcttcctacatagctattattccattttcatttattataacttcattaaatatttgggttcatcatagatcaaaagcctgttattgcataatctttga

SEQ ID NO: 236917 - DNA, 466 bp, Glycine max
  unsure (1)..(466): unsure at all n locations
tgtatgccatgtgatcttgtgagggcaaaagatagagggcgttatgtattttcagtgttattctctagttaaaattatagttcctttttattataatattgatataaaatatatttctttatgatttatgtttggcgaaaagactaaccattcatctttattaaatctcttttttagttatatttctttaagctcaattactattggatcaatagcatattatattattaatcaaaattaggggttcattgtaattatattaaataaatatgtattttgtgcaatgtatatggatgggtaggtctaaattaaatttcaatagttaaaaatagtaattaataatttaaattatttattctaaattctaaacaaatatatattaaaattatttattggttataaattntaaatacataacgaacaacatatttataattattataaagagaatgatcttagtgtcatc

SEQ ID NO: 236918 - DNA, 469 bp, Glycine max
  unsure (1)..(469): unsure at all n locations
ctttctctctcctcactcagccaaagcagaggaattcagtatctctccctcttcctcacgttgctttttccttctcctccattctccattgaaaccccaacaaagctccaacctttggccatcatttctgtcccaaatcgtgaaaggagggcgtttttggagtcgtgaagtccgtggctacgagtgggactttgaaatttcaggtttgggtggacttctttctcctttaaatttcgtgggtatggggttttgggagatatgatgggtagttttgttagttttctgcttcatggtagttatttgtgaagactcttgttgaaagcttgttgaaatttgccatgtttggatgagttaaacatatccattctgtttttgggtttttgtgatgatgtttgtgatgtttatatgctgaaantgctgatggaaaactgttagagatgaagggtagaattaacctatggttagaaag

SEQ ID NO: 236919 - DNA, 483 bp, Glycine max
  unsure (1)..(483): unsure at all n locations
acggacctatgaaactcagctgtagcnattcaacgacataacttggagctagatttcctattgaattccgnagtatatcgagacgctcgaaattcagaacaaaagctctgagcaaaatcaaacgacaataactttttactcggatgtccgaatgaatctcgtaatatatcgagccgctcgtaattgaaaacagaagctctgagcaaattcaaacgacaataactttttacttgtatgtccgattgtttcccgtagtataacgagaccctcgtaattgaaaccagaagctcgtagcaaactcaaacggcaataaatttttactcggatgtccgaatgaatcccataatatatcgaggcgatagtaattgaaaacagaagctatgagcaaattcaaatgacaataacttttaactcggatgtcggattgagtctcgtaatatattgagacgctcgtaattgaaaacagaagctctgagcgaagtc

SEQ ID NO: 236920 - DNA, 297 bp, Glycine max
aacttaaaacttataaattaatttggttaattgaaagtgtttgataaaactaactaattagttaaccgataaatgttaaatgatataaaagaacacatttaaattttatttttaataacttattatcttaaaaagtatgataataatttttaaattttgtattataaaaaaaaggtaagattaaaaatttcattttttggaaaaattaaattaaattaaataaactttattagaattatgttgtttaaaatcattctcttaacatttagatatgttagtaataatattatattaaaa

SEQ ID NO: 236921 - DNA, 484 bp, Glycine max
  unsure (1)..(484): unsure at all n locations
acggacctattatactcagcttatatagaagaanctnttccctagacgagggtttctatctcctcatnncgggctggatcatggctgaactggtggatcgtgcgagcaatcattggaagggggctatataaaggaaagaataaagaaacagcttgaggaagggggtagttttttttcacgtaacaattaatgctctctgaattcttatgtttattcaatttttaaaaatatttatctgcacattcttatgttggtgatattcaagcgaatctatttaaaaaaaaaacaaatgaaaaatatatttgtttcttatcttaaaaatgagttttaacttcaggaccaataagagttaatttgttaacgaatgaagagatactgatattaaaacgatatataaatagctattagagagagatctatgaattgtaagttattgtgtaaaaacaacaacttgggatgtggaaggatgatacccatgaaaatg

SEQ ID NO: 236922 - DNA, 275 bp, Glycine max
  unsure (1)..(275): unsure at all n locations
tcacaccaacgccggngttccaatgtgatggcaacagcttgacctcttatttctcgctcctttcaaaaacgtgtctctgtgcctcactttgcagtagcaacgctacaagctcatctaattggtctctcaaatcctgaaggtccatattcttttcccacaattggcacctgttaaagaagatgcaagctaccattactttgaatatcaagaaacaaaaagcgtaaataaatgttcaaaaaaactggcatttaatatacccaagaacgacaaaaaaa

SEQ ID NO: 236923 - DNA, 375 bp, Glycine max
  unsure (1)..(375): unsure at all n locations
acggacctatgaaactcagctgctagagggacnggangacagaaggagcatttcattattttcacacgcaaacacactttggaaatctatcgccactttagacctcgaaaaagctttgactctctattcgagggatatttggaatcacctttagacccactacacacactatatagaccggttgtgctcatatggacctaggtaaatgctcattcactacctcggtacggacaggggactccctgtcactacgaaatcatgcttgatacatggtggtcaagtgaaggatcttgatacttgttctagcctgacaagaaggttacaaatacaaactttgcgtgtgaagagaaaactaacctgtacacattggaaatc

SEQ ID NO: 236924 - DNA, 430 bp, Glycine max
agcttcaccagagaatgaagaccctaccctatcctcattcctacgtgatggcatccaacgttgtactgctacattccaaatataaaattaaatgtgacttagtagtcacacaatattagattggaaattttgggacatgcttcccaagcaagaatttccttattttagaatgaatagattcgtcattttctttctctcccttttcttttcattttgaatcttcatcttctagtactaacggatgagatttgtctctagggaattttctcccaccaagaacattcaaagtatatcttgctttagggattgatttttgttaataatcgtttgaattataatgtgttcgatcttagaattgtcaatcctgttagttttattactcaatacaaatcacacggtttttttttcttaagatccatgagttaagaaa

SEQ ID NO: 236925 - DNA, 446 bp, Glycine max
  unsure (1)..(446): unsure at all n locations
agcttgcccataatgattatgtctaaattttatgngagcttgatgacataaaaaaggttcgtatcatgtaaacaattataacaacatgcttaaattaaccttaagtctttttgataataaaaatgctctttttttnttcttaagcaatgcaaccgtctcactgttgcaactactaaaaagctattggtatacaatggttggagctttaaaggttgtcctatatgcaatagaaaactgaagagacaatggagccatacacatgtccaggctgtaagaataggaatgagggaaaaatgcttacgtgatcaattaaatcacataacaaatgtatgttacatgtttaagatttccattagatttatgtagaaaatctgttttatctaacagaatctgattggaggtcacaattacacaccagcaacatacctttacgttcgtattatgga

SEQ ID NO: 236926 - DNA, 435 bp, Glycine max
tggccagacacgagtagtagtgagcaatgtactcttcctgtttcaccacaacaaacaggggtatcagagaggcgttatacaactttattggatatgcgtaggagtatgttaatcaattagactttacccgtatctttgtggatgtatgccttgaaaactgccatgtatttgttaaacagggttcctaattaagcaatattcaaaacaccttttgaactgcggacaaataggatacctaatataaggcacctgcatgattggggttgccaggcagaaataacgatttgtaatccgcatgaaagaatattggatgcgggaacaatcagtggatatttcattgtgtattcataaaagttaaaagggtatatgtattattgttctaatcataggataagaacttgcaaaactggaaatgcaaggttattggatatgatg

SEQ ID NO: 236927 - DNA, 168 bp, Glycine max
tcgtcagcaagtaccaaaaaaaattaaatctagccacggctcatgagcacaaagtggcggacgagtaagcccgagtgtacacggaaaaggatgctataagaagggtgatcgactccttacatcatgaggccacattctggatggaccgatttgctcttatctttaacg

SEQ ID NO: 236928 - DNA, 455 bp, Glycine max
aattatctgtgtgggagggatgttgaattctggttgttcctggcgccgagatgatggtacaagacctgaaccaagaactgcagtttcttttggtgaggaagccatggaaaagcataccgtttgcaatgatttccttaatctcagaaggctattgggaaacgctggtgaaaacacgaatgccaacctgatataaatttgaatgaacaatgtagaggggcgtgtgaggcaacggccaaatttgctttgtggtgaacgtgctattaatgttaagtgattcgtttgggcacgttcagattgctgtatttgctataattcttctagcaaacaaatgcccatcttgcccctcagattttcaaactgattagcatccaaagcctatgtgacaatatctgctattagttcctcactgtcaacatgcttcagtgtgatcactctatcatctacaagatctctga

SEQ ID NO: 236929 - DNA, 247 bp, Glycine max
agcttgcttgtgggacttctatggaggctgtatctttgatcttcaatgaggtcctttaatggtgattttccaccatggagatgcagcggaagacaaaggagaagaggtgagaggaggcaccatccactagggaataagccatggaagaaggagctccaccaccaagatgagccttggataagaatcttggaaggatgcttcaatggaggaaaagaaagagggagagaaagagagggggggggggggg

SEQ ID NO: 236930 - DNA, 480 bp, Glycine max
  unsure (1)..(480): unsure at all n locations
ctatacacaactcaagcttgatgatgtattgnggccatgctagatgtatatacatattttgtttaattgttgctntattccacacatattcaaaatgctcttaaatattcgcttactgttctaaaaaaattcaaaaaaaaagaaagaccaatatagaaaaaagagtgaagttgaataaatgaggtcttgttttgaggacttggactggtttgaagacttggttgattttgttgatactggagagtttgggtttagtacttttgcttaatttccacttattccccattgctcctctattcctttgggttgtagctacttatcccatactttcctccaccttgtctctggccccattacaaccttataagaccttttgatcctcatgtgtatgtgtatatcgagtttggttgtcacatttagtgttttgccaagtctatgtggcgtgtgctttcatgggtgctctgagagtaaacagtatcc

SEQ ID NO: 236931 - DNA, 458 bp, Glycine max
  unsure (1)..(458): unsure at all n locations
ntgtgacaaaccagtggttggagggcaaggatggatggtttattttatgtgtgggattcataatcatgaattggccaagtcattagttggacatccatacgctggacgattgactaaagctgaaaagacacttattgctgatatgaccaagtcaatggtgaaaccaagaaacatcctgctaactttgaaggagcacaatgtcagtagttgtaaaaccatcaaacaaatatacaatgcaagaagtgcataccgttcttccattagaggaagtgatactaaaatgcaacatctaatgaagcttattgaacgggatcaatgatcgaggccgtacccgaatcaaatcaaataaacattaaaaatacagtatctaggaagtgatcctaggtcgtctcccaatgagcaatggtcaaccaacgttcataatagatagtgataaaatagtaacgaatttggggggg

SEQ ID NO: 236932 - DNA, 378 bp, Glycine max
  unsure (1)..(378): unsure at all n locations
attcatgatatatcatgtgatattagcgaacaagcgtctatgagaagtttaaaactctgtctttagcataactttaaagttgatctactcttatacttcataagacatgaaaaaaaaaatggagtgacaagaccgtaattcagaaaactcggcctacttcatgcataaagatagatacttctcctcacttaccatgcatgaggagtacttatagaagagataaaaagagatctgttataatatgtgtaggaggtaagagtaaaacatgtgagttattataaatcatttgtatttgatttttataaataaaaaagaagcatgggagagtacaaatnctatttaatatctttaacatttatatcctaaagatcgaagaat

SEQ ID NO: 236933 - DNA, 364 bp, Glycine max
cattaatggaacttataggggaattatggaaattatactggcaaacaatgatactaaaatgcatacctatcacatgaatggatatgcattctttggttgtcgggtactggctaactcctcttttatgtgccattccatgtttctggaacaataacacaacttgattttgtggctgcaagatggaatttggtgaatggtctgagaaagcacgggtacatataacaagtgggatggataagctccactaccacccaggatatatatattatcttaaaatgtatatgtcacatcacaggcattatttatggtataattttcaccttactatgtcttataaatcttgttaagcataaaaaggaacttt

SEQ ID NO: 236934 - DNA, 437 bp, Glycine max
  unsure (1)..(437): unsure at all n locations
nggcggagttcgctgagaatcatggaaggctcggggtgtgttataaaccttcacatgccgacaagaggaaagtcgccctagataggaaggagagaaacctggctcatctacaagggtgaggactacaagtggaaagggtccccatttgtcatatcagggaaacctttgttagtgcggggtggatgcacgaggattatgttgtggtgatagatgaagaaacccctcaagatcgaccggattgggtgcagccatgtcctccgggctttgaattgtgtaattggcaaatcgtcgaacgacccaagatttccatgacaaattcaatgtaatccaatagtaccaaccctattgctaggcctagactgtagggtctgcttcttttgttgggcatacctctatctttaatgtgcccacaaatataaatacaccaccctttttat

SEQ ID NO: 236935 - DNA, 275 bp, Glycine max
  unsure (1)..(275): unsure at all n locations
gagagaggggtaaaaactgcatgagtggtgatggcgctgtattaaaaaacaacagacggncgcctcgcgtgtgtttaatctagcggcgtgatgcaaatcatacgtcgagattgaaacatgcttatacataaatccctgtgtttcgtgtgcacgaatcagagagttcataaaataaggagcaaagaataacttgagacatcagagataaagggtcacaacaatggcttccttaaactctctctattgctccctcttacggtctaacactgacttct

SEQ ID NO: 236936 - DNA, 470 bp, Glycine max
  unsure (1)..(470): unsure at all n locations
tgtagccattagaagagaatgagcatgtgattagaagtatgactgataatggtagtcagttnttcagattgattgtgaaggaatgcattaaccatatcccgatgagagtgtgatccttaaattttgagagaaacgactatcatttagtattgatttttgcgtgaatctttgaagtatggactgaatgtaagaaattgatgatgatgaaggccatgtttgattgtgatagccacttagccaaaaagctaaccatgtgcttgaatgaattatcccttgtacccagtttgagcttaatgaattattgattgattgaaccctaagcctatacagtgttatctcctgctaccttgtaggagagaatcatccataggaagcgtggttcacagcaaatttgtcccaaatttgggggagtaactatcaaggtaaatttgttccaaatttgggggaggcactgggtaagaatggaaatg

SEQ ID NO: 236937 - DNA, 316 bp, Glycine max
cagcaaggaccaagaagaaataaatctagccacggcccacgagcacaaagtggcggacgagtatgcccgaatgtacgcggaaaaggaggctagaggaagggtgatcgactcgttacttcaagaggcaacaatgtggagggaccgatttgctcttactttgaacgagagtcaagaacttccccgattgctagccaaggccaaagcaatggcggacacctactccacccccgaggagatccacggacttctcaactattgtcagcatatgatagacttactgacccatataattagaaaccgctaggaaagttctatt

SEQ ID NO: 236938 - DNA, 458 bp, Glycine max
tcttaatctcggctgatgaagatgaattcatgtgtatcttttgcactcctctaatgacaataacatcacttctggcactaaatcgctgggagtttgaagtcatcttctcaattaaatttctggcttcagcagggctcatgtctccaagggctccaccactggcagcatctatcatacttctctccatgttgctaagtccatcataaaaatattggaggaaaagctgctcataaatctggtggtgatggcaactagcacatagtttcttaaatctctcccagtattcatataagctctctccactgagttgtctaatgcctgaaatatcttttttgatggtcgtggtcctgatagcacggaaaattttttctaagaatactctcttgaggtcatcctatctcgtgatggaccgtggagcaaggaataaagccagtcctctgccactccctataaaagat

SEQ ID NO: 236939 - DNA, 445 bp, Glycine max
accttgaaactcagcttaaaggaagctcaagaagaaaaagatttgtttgtatgcacaaaacgatcaacgataagacggagacaaatgtactctgaagtgtgtccacaagacactcattcatcaaagatcaacaagtggacatatgggtccaacgtgccctttagcaagcaagctagcaaggctcacggctgcgctttccgaaggaggatagacgcacggaatcgccaccaacgactatttgtgggaaacgtctgataaaaccgacggaaaccggtcgacatgaaaatactaagctcatgaggcgtgttcacgtgtgatgaacgtatacgcacctctcacatttgtctctaaggacaacgacctatctaatatgaatcgtggagattcgcctaccttcactgttaatccttcttatttattagaggacgacataagcggcgctttt

SEQ ID NO: 236940 - DNA, 343 bp, Glycine max
  unsure (1)..(343): unsure at all n locations
aaacaaattccttgtggatacgatactcgaacttaccggtttatatactacttgtgcgaattggtacactngcttaccagggaacattattcaaactcaaactttgttggatgtgtggatacaaaaaaatccacccttggttatgtatttcttttagccggaaaagcggtatcatggaagagtgtaaagcaatttgttggtgctacatccactataaaagttaaaattacagcatgttttgaggctacaattcaagctaattggctgtagaactttatttaaggcctggaaatgtcgaaatattgccaatgcactaaaatgtattggataactccgacaatgt

SEQ ID NO: 236941 - DNA, 317 bp, Glycine max
ccagaacgacccacccctaaaccaataggcgatcttgggatgatcacaccacttacttgacacaagaatcacatatgtccccagcgtacagaggctcatcccaagaccccagacctcctacagctatcaactaaaaccgttcactgccctttgagcgagaaaggacactttagtgtcaaagacatatgtaagcctttcgactgggcaaagatgaagcttcagtcacattaaacgcgcgattgccacgacgaccaatcgacagcttgtgaggatcctcataaacgcctgaaaccccaccaatccttgatctaggagaa

SEQ ID NO: 236942 - DNA, 327 bp, Glycine max
ccgcagcagcagcagaaacaacaaaaaatatgttgttatatgcaacccgcggacgcaaaaccagagacgcaccaccagcgaagttcacactcactcgcggaaaaagcgcacacggctaagcacagaatagcccgaaagagagagcataagaggggcgcaatcttctattcgtagaagccaaacacgaacagaagaatggcggacaccaacaaaatatggatgaacacggaagcctaaccaggaggtggggagaaagaaacactgattgcccccgaaaaaacacagcgtacagacagtggaataacagctgccacctgcacaacaaaa

SEQ ID NO: 236943 - DNA, 463 bp, Glycine max
acatgaatagcaatagcaatagcaaatacgggaatgatgactgatttatatccaagtgccaatccaaaaatcaaatttgttgcagctccagtcctgcaggaatctgccacatcttgcactggactgcaatttggaaattagatatgaataactagttagcaatttaaaatctgaatatctaattcactaactatgtgggttatagttattagagtcttatgattcacgatttgatgcaactcggaaaaggatacatatcataagaagaatcataaatgactttgaatatcatgataaatgaatgaatcaatgtgatttagtatcattgatatgaatcacacaattcattacttttttttccttccttttttacctttctttaacgaatcacacaattcattgaagcaatgtgatttagtatcatttatatgaatcacacaattcattacttttttttcttctt

SEQ ID NO: 236944 - DNA, 427 bp, Glycine max
  unsure (1)..(427): unsure at all n locations
agctntacccatgtggagtgatttttgatcttttcttatnnacaaggtcggaaaaaaaattcttattttataagttaatgtaatcttttttttaagattcaattatttaattcatcaaaataaattaaagtaattaatttaatttatagtcatgaatttatttaaaatttatatctatatatatatgaacatatattaaaactattcttatcgctaatattcattaatgtgttctagttgtgtgccatacaactgattaagtatattttaatttataaataattaatattatagacattatagattaaattttataaaaatatataaacattacttttaatttgagctcgaattcaccgactttggtggtagaaagtcacatacattaagtgttataatttctatactcgacataaaaaatattact

SEQ ID NO: 236945 - DNA, 472 bp, Glycine max
  unsure (1)..(472): unsure at all n locations
tgtaacaaatataccttntaaatataatatgggtcacaccaaacatggatgaaacgattatcatcctagagatctgggtagaatattacattacaaagaaaagagaattcatcaactcatggttcattgagataggagaaatcaccattggtgttaaattattatgtatgctagtcatctcatttgtgctattgtacaggatgttgagtttttttgagagttttcgactgtggagagacttaaagagagctgagcttgatgaggaagccatcttgtggagctttggatgagattctgagtgattgtgagatttctagaggtggaggagacatccccactacttgtaattcatcaggctttcactttctcttcttattgttgtaaaagaagcttccctgctatggagagctaaatcctcagctggttcttcttatggngtactcgatgtanatactctcatatttatctaatg

SEQ ID NO: 236946 - DNA, 378 bp, Glycine max
  unsure (1)..(378): unsure at all n locations
agcttggaggcaggacgagttatcatttcttaccccanaagaaaactacaaataaaaaatcgttcttttattattcaggaatatagacaagtaacacaccttatctaagagtcaagatagggtaatgaacttcattacccatatccacaagatatatgttatttggaacgcattctgcaagggtaagaaaatcaattagttgctaacttttaataattgataaaataaaataattagtgttacacaaagaattatacatttgccttaaagggggcatggaactttaaatctcagtaattatatattgtctattccgaacctaaaacatttatcctagtgacatatggcacacataagagatcttaaattctccttgag

SEQ ID NO: 236947 - DNA, 457 bp, Glycine max
ctgatgaatgtcgaaagaaatcacatgtttgtcatcattaataagggggagaatttgaatgtatgcatacatgattttgatgatgccaaagaagaaccaaacaaggctgcttcaaatgataagcatttgcttcaagaataattcaagattgcttcaacaaacaaagccttgtttcaagattcactaaagaccaagccatgccttaaaacaaagtgctttcaagacatgcaaggctctggtaatcgattaccaggaagtgtaatcgattaccagaagacagggttgagaaatagctgttaaaaaaggttctgaatatgaattttcaacatgtaattgattaccatatgtctgtaatctattaccagcaacggaactttagaaatcaaattcaaaagtcataacccttagattataactggtaatcgattaccaacattgaatcgataccggtggaagt

SEQ ID NO: 236948 - DNA, 395 bp, Glycine max
  unsure (1)..(395): unsure at all n locations
agcaggggagcacacctttatcccatcatttttcccnnaccaaggatcagtcacctcaaatagaggaagaaaaataattcatggctaaggttttgtatgctccacccatttacaaggttgatgtatgcaatggttttgatgaggccagatactatccatgcaatgggagttgttagcaagtttatgtcaaatgagggaaagctcattgggaagcacttaagtggattttgaggtacttgtgaggcactatagagaagtgtttgtactttagcagagatgccttgaccttggtctttcttggataagaaggagcactactttcactgaacattgctgtttgaacaaatgaaaacataacatactccagtagactgatcagctttgggaattttact

SEQ ID NO: 236949 - DNA, 463 bp, Glycine max
  unsure (1)..(463): unsure at all n locations
ngaaggcatgacatccaccatcgtctgatatgatgactcttataacgngcctactatcatcgntatcaacttcctctccattattgggggcactacttgagctgccatatccttccacctttggacgtaccctttgaaagattcatgccctcttttgcacaaaatctatagctgtgtcctatccaaagtcatatcataattgtactgatactgcctaatgaaggtaaccattaagtctttccaaaaatggactcgggaaggttccacattaatgtaccaggtgacaactaccccatcaagactttcctgaaagagatgcatcagcaaattttcatcttttgtgtatgccctcattatcctgcaatacaccatcacgtggttcttagggcaagtagtcaccttgtacttattgaagttagactctaatcacactccctctatgtcagtaaaagcatatctttca

SEQ ID NO: 236950 - DNA, 442 bp, Glycine max
  unsure (1)..(442): unsure at all n locations
agcttaatcatttaactntggaaagcattgntttttttggtaatatataatgatatgaaacatgctccacaataattaaataagaaagacataagtaatgatattaaaataaaatcctatcccatgcttcaaagaacttaattatttatcaaatgtgttgaatcttgttaatttattttttatagactaattttaagtttgaatgttttttaaacactcataaaattattttaaatcttataaacttataaggttcttttaaatcttaaaatttaatggtataaatcttttaaaattcaaactataaaattttaatcataaaaatattttaaaaaaattatataagttattatatttttccaagtccttcaaatttcccaagaactgtntgatgctaaattaaaatcctaatctaatacgatctaatgtaaaacgtgtcatt

SEQ ID NO: 236951 - DNA, 395 bp, Glycine max
tgtctgtgtagactacacagtcgaggtacttacaaaccatcgtgtgctgtagaatagatttgagatgtcattctttcgtaacgacaagtactttcataatggaaataaattttgattacattctcacacatgaagaagagatccttatgtacataaatgagctagagtgtcagcctatgctgggatttatattcctactgataaataactaacttcctactctattacttacgatatccgagtatattctttctgatacaagataccaattgcatgtggttgctcgattaactttgcaccttctgtattatcaagcaaggtgtgaaacatttgcaagaaccggtgagcaatcgatgctttaatatcctataacctaagctggcatgaatacatgc

SEQ ID NO: 236952 - DNA, 366 bp, Glycine max
  unsure (1)..(366): unsure at all n locations
agcttcatggntaagtatgtatggcaaatctttatattgttgctcaagacatacaagtgagcttgtaacaaatcttctacacttggagtgatcacatgtagtcctcttgaacccttaccacccactctgtcatcatgccgagactcaggaaggccaacaggcttaaccttctcaatgtattctgaacaaaattcaatggcttcttctgcaatgtatctctcaacaatagatgcttctggaaaatatagattctttgtatacccttttaagatcttcatgtattgctcaaccaggtacattcaccgtagataaacaggaccacaacatttgatttctctgaccacaagcacaatcaagtgaatcatg

SEQ ID NO: 236953 - DNA, 412 bp, Glycine max
ttccctagacggttgttttctgctatgacagggttgtaacgtgagggaacaatgcattgcattagcgtgagagagcgatcactactgatctaaagctagtgtttttttgctagatgaacaatacactactcatgctattgtgaaggaagcgggcttttacaagcatgggatgctgcacgagagaactaatggcatgctctacagcttggactactttggtgaagatcatgaattaggaatgcatggttaatatcactcagacattattaatctatgggacaacgttgaatgaatgctggtgaatcatgagtttgtggcatagaataatatgagtacagttattatcaatgtacagagtaggtagacaaattattatacatgatacattaattttcttaccttagtattgtat

SEQ ID NO: 236954 - DNA, 201 bp, Glycine max
  unsure (1)..(201): unsure at all n locations
ttttgcactncctcacggtacccactcctcacgttcggatttttagggacaaacaccatgtctatacgcgccgcaagggatccctatcgcaccaaatctaaatctagatcaatgggcgatctataggtgacgcatgaacagatgtaaacccacatgttagctatgaaagaacaaatggcctccattaaggaggccatgtta

SEQ ID NO: 236955 - DNA, 460 bp, Glycine max
  unsure (1)..(460): unsure at all n locations
actcagctngtttcctgccagataaagtaggcatcggaaagattgtcatgggtataccttgggnacattgagttcccatggggatggaacttactaatggaaaaggcttcaccaagggtgaaccttatgtttctcgagccttggaccagggacatgtttgcccttggttttgttaagcctacggagctgtgtcgaggcttaccaaggacgagccttacattttctagacctgtaaggattggcaagcgcgaagcttttgatgagtcttgagtgcaacataagtgttgtgctctggcatacgtgcctcttacaaagtggcaagaaatggaggcatggaggtgtgaaccaatatgacttatgaagggcaaaccttgggttttgaagaccctttggaggattgaccaaggaattgtttgacttgtgttttgagcaccatgctcttgcatacatgtcgctcgct

SEQ ID NO: 236956 - DNA, 481 bp, Glycine max
  unsure (1)..(481): unsure at all n locations
cttgcttccacacttcttatactgcacatatggtgcactgtactctcatatgcgcaagtaagaagagataattttctgggccctcgtgtccgtaaatgcattcatatcatgcatcacataaggatctcttcatggcatcataatgaacatatcgattttacatttgtccattatcatattccagcatcacattttgcatgagtcattgcatcatcatgcatatgcgttaaacatactttttgttctacaaactgcataccttttgttttcatgttcgctcatgcatgatccttgcaatttcctccgcaaaacaaaaacaaaaagggaagcatgaaaattcatgatgcattcttagttgcatatattcggtaccataagccaaccatgttgggatcataaacccgtttcacttaaaaacaaaataattgaacatggtacctaatgcatgngtaactatgaaatgatgtttcttctggcatct

SEQ ID NO: 236957 - DNA, 357 bp, Glycine max
agcttcatctaaggaagaggggagaggaatagtatttatgttgcagattcaaaaaaaataaatctaacagaaactaattatagtagaattaataattctgtttataagacattctagaattttagtaaaatatttaattttttttccattaggtatctttattaaatattctaaggagacatttgtttaacgaaattttcttatactctcataaatgttattttctgaaatataacatggaaatattattttttggatatttaaaaaaatgtttgactatactttaatttttaaaaattaaaggtatttcaataaaaagaaacatacatgtgtaatatacaataaatttttatattt

SEQ ID NO: 236958 - DNA, 472 bp, Glycine max
  unsure (1)..(472): unsure at all n locations
tgagtaatcaattatccaaagcgtaataggttaccaagtattntactcatttttcatattcactcaagtattttatatataatgtaatatcaattatctagtaattaaacattatgtgatgacagtgtatatattcacttgtatgataaataatattatattgttcatgtcattatatttgtaatcttagattgcattagatatacaagaaacaattataaaatagtaaatacgcaaaccttgcatgtgtatattgtggtggtgtcaaaatttatgtgtatatgttggttgccagtgagttatgtaatatcctaaaattttaatctcaagaaagaaactttgttcaaacatcttaaagcatatttagtgttagatcttgaataaggatnttgaactcaagatttggtcttcattagaacctccaataaaggagttgggttgggtagatctccaacatggagaatggattctt

SEQ ID NO: 236959 - DNA, 434 bp, Glycine max
  unsure (1)..(434): unsure at all n locations
ggcttctacatgacggncatccgtgactgatagtttgttgagattgacgcagttccctttgctatccgaagactatcaagtccgatggcatgcagagacgaacatagtcatctacttcccttgtcgagagactcaatgtctattgaccaaagctactgaagtctcccctactatcttgagacaagcaagtccaatagcatgcagggaccattaccattatccgttattgtcgccttcaaggcaccaaggcttttgctgatgcacctgatgtcttttatgctctttctattgacaggttacgctaatcgagcagatcgtcggtcgggaggaaattcagctcgaacgacattagtgtcttatctttacttcccttttatctccaataaaaggtaagtaaaaaggggcaactgtcataccctaatcttatctgggga

SEQ ID NO: 236960 - DNA, 358 bp, Glycine max
  unsure (1)..(358): unsure at all n locations
gcttgaaaagatttgcgcttttacatgtttctatcttttgagnggcatctggattgaatggtgcatcttaatctctatctatccatatgtagctcatgcatcaccatgtagaggtagagagattatttctaaaggtagaaacttcttcaatgcataaaaatcttgttttaatcaattgccaggctattcgtaatcgattacaccagttgcttatagcttggagagaaattctagtttcagtttaatcgattaccagttatctgtaaccaactacataattgagtagagaccatgtctgggtcttcatgagtctctgctttaattgattactaggtgatcgtatacgattacttcattc

SEQ ID NO: 236961 - DNA, 465 bp, Glycine max
  unsure (1)..(465): unsure at all n locations
tcttactttanaattataagttgtttaggaggaaggtttttccttctcaactacttgaataaaacgataacataaagtaaagcttccaattaaaacttaatattattgctttagaagttacctttaaaatcacagattttggtttttcacttttttgatccagggtagattttgtttttgaatatgaaatctactttgtataaaactttttataaaatattagagtaatgcatttgtaaacaaggttttttttttcaaaactaaaggtaaggatacatctaaaagtaaaaaagaaatagtaaaaaaagatacaacacacggaggaatttatactggttcatcccaacgtaggcaacatccagtacctatacatgtaggctttcactattaagactaaacacattacaatggcattctttcttttgaagcctccacatgcttgtacacaagtattctaaatctttg

SEQ ID NO: 236962 - DNA, 345 bp, Glycine max
  unsure (1)..(345): unsure at all n locations
tgatagcacgatacttgattaatcatactccaagctcagtcctaaaaaagaaaacatcatatgtagtattgcatggccaatcccnctcttatactcacctatgtatcttgggcccttgtgttttgcacgcaacctatatacaaacggagacaaatttgcaagtcacagtcattggtgtgtcttcatggggtacccttatgggcaaaaaggatggaaagtctacgaccttgagacccatgaaatctttgtgtcacgagacgttactttctttgaaaaccaatttccatttcatcacactaaaactacaccaactccctcaatcttcatcactgaagaagctgatct

SEQ ID NO: 236963 - DNA, 478 bp, Glycine max
  unsure (1)..(478): unsure at all n locations
ctcagcttttggctttaataaagggtttgctcgtgctctattattttatttaagcaatgccacatgtctccatttgagtggagcgagaagggcccactttcccttattgactgtgacccatactcagccacaaaagtgaggaaaatctgacctttgaaacagctaaaatcctgcctcggtttgcatgccatttctctggttccaattcctcgcatttctctgcgtccgtcggggccagttttcgaaagcaagcaatatatatatcaaaacgctcagaataaaaccccgagcgtggttcagacgttggtttctttaaattttaagtcgcacgcacaacgatgatttttaaactaattaattaagaattaacccataacctcccagntatggatttctcttccttaattaatctaacccgcgtatcttgccctcactattcctacccttaccaagaacatatatgcatatacactgaata

SEQ ID NO: 236964 - DNA, 434 bp, Glycine max
  unsure (1)..(434): unsure at all n locations
agctngagaattagaattctgatatgaagcttgttgttcaaaacagaagtaaaaatatgaaaaatgtgaacacaaaaggaagcaattcatggaaaaaaaaaagcaagaacaaagtaaataaaaaaatagaggatacacaacaaaaaaacttatttcagaaatagaatttaaaaaccaaatcattatcatgtcatgatttttaattgcgtttcataacaatgataacaacaattgtgcctgcattccattacagcatagtagtatacataatatatagtcaatcaagtaatctaatataaatttgccaaattcatggcaggatagccaatttacccacttgattcattccaccttgtagctcaatttagcagcaagtcattacttgatacatattcaattcacaattaattcagccccatatgatacatattcac

SEQ ID NO: 236965 - DNA, 490 bp, Glycine max
  unsure (1)..(490): unsure at all n locations
cattacggacctatgaaactcagcttgggtgacatattgacatggtgtaaaaataatttctttcaggtgggaagtgaaattgtacacttatttgcaggctatggtatctgatgcattctacatgttaattntgtagtttgaacatctctagtaatttttggagaacagacaaataatgatttctgtggtcgtggatttaacaagtgtaaagaaggaatttactgtgttgtgtgttctttaccatacacaatgcctttatttatattcagaatttatacattgttaaggaaaccttataatgacgggaaatccctaatttcagttatacaattaatcatatcctaaatgtatatttcacactccccctcaagctggagcatatgtcatatgaaccaagcttgttacaaatgtcgttaacacaagagcccttgagaaattntctgagcatgtctgctcgtngatctttagagctgacaaacttagtggcgat

SEQ ID NO: 236966 - DNA, 379 bp, Glycine max
  unsure (1)..(379): unsure at all n locations
agcnttgctgaatgagttgaaggtaaaatttgttattggaatgctgntgangggagataacaagtctgctataagccttgcaaagaatcctgttgctcatggaaggagcaagcacattgagactagatttcactacttaagagatcaagtgtataatggaagattgaggttggatttttgcagatctgcagatcaacttgcagacattttgacaaaacctttgaagaaggagaggtttgaagatctgaggaaaaagatgggacttagaagctcaaatgaaatctgaattaaggaggagtgttagataaaaagataattcagatgattagttagttagttctatcacttgtatgttaattagtggtagttataacaaaat

SEQ ID NO: 236967 - DNA, 475 bp, Glycine max
  unsure (1)..(475): unsure at all n locations
tagagaccaattgaaaaagaatgttagaaatctaattattttattctcaggtacaagntaatattcttacctctgcagcacactgcacacccaagcctatattgagtttagagataggcaatttttttttgtcatttttaattaagttactaggattcctaaacttatatttacttttttaattaagtttgacaacaacctaattaaaaaaactcatacaagttcagagacccaatatgagaaaaaaaatatattcaaagacgtagttaaaaattgtgaaatagttcaggaatttgcaaattaatttaacgtagattaaattatagcatacattaatctctctaaaaaataataatgtaactttacaatttatgatgtatttttttattaaatgctttaaattacttagaaatttaagcattgattnttttttttttttgcatttttggtactagaagtatactctattaacatt

SEQ ID NO: 236968 - DNA, 389 bp, Glycine max
  unsure (1)..(389): unsure at all n locations
agcttatcgatcttttgagcaatgtttctctccaanncataattggatgcatcacatattagctcgaatggggcattccaatcaggtgcatgaatgataggtgtggtagtcaccgcacgcttgaggcaatcaaaagcctctttgcactgatcatcaaaatcaaactccacctccttttgcagcaaattggatagtggaagggctaccttgctaaattccttgataaagcgcctataaaaccctgcatgaccaagaaaagaacgaacctctctcacgcaagaggagtaaggcaattgtgaaataacatctatttttgcagggtctacctttatacccctactggaaatgatatgccctaaaattataccttgttctaccatgaagtgaca

SEQ ID NO: 236969 - DNA, 395 bp, Glycine max
  unsure (1)..(395): unsure at all n locations
ctgtagcantgtaccagagtgaagctgtgttgcctcttgtctgacgngcggacgcatatatcgttcgatagcgtggacgggtcaagtgcagataccaccactgatttacataacacctttactactatcacatacggtttgttgatgagtgtacttgatcactaagccgttgcatgtatggatactctagaagcgatggtaccttagccataggctttgactgaatcggaggctcacgggagtacaaagtgattacacaaacgcactcagtgtcatgcactccgatgcgcattcgtattaacacaggcccctcactgtgacagcttactatctcaaactaccttggtgactgtcttatcctcatggctctagcttctttaggcgactactctata

SEQ ID NO: 236970 - DNA, 416 bp, Glycine max
  unsure (1)..(416): unsure at all n locations
cctgcaggcncgccagcttgaacttggagttgtgacataatattttatagcatcnggnnactcatgccacaaacataaggcaatgtaataaaaatttaatggtcagaaattgaaaaaacaaaacactcacatgatgaatcaattaaaaattattattgttataacttttagaatatttattataaaaggcaataaattcatgatgcatgattcatctatgagttcttttctcacattataataaatactaggtttagtctcttttttcttgctaactaggtttaagcatatattgctcatttaaattcaccgttgaattaatttgagaaaatcgctattttaactaatttatttgtcccttttaatacacattatacattttaattttatttaaaattctaaatgctactttattc

SEQ ID NO: 236971 - DNA, 443 bp, Glycine max
gacctatgaaactcaagctgatctgacatgtgaggactaactggttgtgtttttttagacacttgacttttattgctaattatgaatcatgaatgccgtttatctgaacaattttatcattttttagaaatatatgtatatactatacattgtatagactataacagatttaaaaatagaagctatcctgctatatgctatctcactataatgtttttggagccagccgctatgtgttgctctctgggattaacaacaattattgaaatgtatgatatatataaattatatatgtatcaaaaattaacttaattcaactcacagtacaacacataaaaattatcataatattgactcaaaagatcaattggccaaatatgacaagagggtgcatgacacatgctcgcaccacaacgctcataactactgcaatagcagacaga

SEQ ID NO: 236972 - DNA, 410 bp, Glycine max
  unsure (1)..(410): unsure at all n locations
agcttcccaggaaacagatggaagngggagtcatttttttcatcttcttccctacttggaattggctttccttaatccttgcatcatgccatcttttagtcctctccttgtacagtttttgccttttcatagactatcaatctaagcttttctagctcatttaattgcatcttatttcacaaatgccaaaatattccaagtacttaaaagacatactttctaataagaaaaagttggcaaattttgcattcgtgggccttaatgaagaatgttctactgttgtcttgaagaaaatacccgtaaagctaagagaccctgagagttntacaattccatgaatgatatgggagtcttatnttgaaaatgctcgtgtgacttgggggctagcataaattcactgtcttatgctt

SEQ ID NO: 236973 - DNA, 370 bp, Glycine max
  unsure (1)..(370): unsure at all n locations
acctgcggcatgaagctnngaacagaaatgaaagtgttgtataagtatttttcaacgaacattatacaaacttaggagagagagagagagacagtgaacacccacgaacctgagtaagactactaacaagtatgtgtgtgttagaaagagaaagatgaatcgggagagggtgtcatcttgatgttgttctccatataaaaatcccccgtatttcgtttcacttaaaaccctagtttcgatgtgctgctctataacaacacaatagatcaggaagaaccctaaccaaacaagataccaacggttgtggaggttgggcaacaaatggcggagctctccacccttcctcctgtagaagcaagcttcatgatga

SEQ ID NO: 236974 - DNA, 181 bp, Glycine max
  unsure (1)..(181): unsure at all n locations
tctaacttatgaccctgagacaggaaaggtgacgtgagctacatgatattaatttgcgaacannnncttgtntgaacattaatgtaagacctactattttatgcaacggatcactgccgaagatgctctaaatcatgagcggttccgtgaagttcctctccccacaagtaaagaactcatg

SEQ ID NO: 236975 - DNA, 470 bp, Glycine max
tctacttatgtggcagggcgggcttccttcaccctcttgtctccaacgctaactttgaccattgttcttccttcccgcgatgcttcttttcatgtccgcctgagtgggcttatagcctaaaccatacttcccacgatttccttgggtatttatcaggctagttatgccgccgttgttttttcctaaacccatcccgggttcataaccgttccccaacataactcgggccatcattaccgctgcatcggacagacaaggttgcccaaagagggagtccacggaggaaatgctgaccacctcaaaagactggaaagcagtttctaacgattcttctgcggcttccacataaggcatggaggatgggcagcttaccaagatatctttctcgcctgacacgatgaccaagtgcccctccactacgaatttcagcttttggtggagtgtagaatgcacaactcccaccgagtgga

SEQ ID NO: 236976 - DNA, 227 bp, Glycine max
agcttgagatgaggaagtgttgaagggtgtatctttctgtttttattgacgaccacagagtggtacctggagatatgtcgtgggggtcaagataccttggggacgtcaggtggagtgctattgcccaaaaccatacttgaccaatcccgacccaaccctggcatagtcggtcagtgagaacctgtgatgtacctaaacaagcgagctcctggctgtccacagataaa

SEQ ID NO: 236977 - DNA, 480 bp, Glycine max
  unsure (1)..(480): unsure at all n locations
ntangtattgctctctaagagnggagatcttcatctcttgtgcgcttcttttcttcaaggtgtgacaccctctacccctcacatatatactaacaaaggaataaaaatttaaatattaattaaaagtatcctttttaaaacatttttaaatacaagcctttcaaagggataaaaggttcacaatcactttcttctacatcatattcaaacttgtccaaataaataataaagtcatcggctcaaacaaggccgtctggacttcatacaattaatataaaatcctataccccaatgtcacatcctatcagagcgttgtgtctcgacgtccttcagcataatatcccttaaagcagttcacctagttatctgctcccccgaacacagagttcaagatcatcacaggatccaaacacacacaacaaatcgagagtgagttatcacattcctaactaatagagaaataagacaactagatatata

SEQ ID NO: 236978 - DNA, 309 bp, Glycine max
  unsure (1)..(309): unsure at all n locations
agctagacaatantatgtttacttcctgtttagagccngaatttgctaaatatcaacttttgctaacttaatctttgctccttttgaaagtcaacttttttggtgaagatgtagctttctctctgttttttggtctatttcctttatctactgcacaattatttgaattttatcccctaaaataatttaggatgcttttaccgttttgcagatgacggcaagggagtatatggcttgccaactgaaggtgtagaaattacatctttcgacaggtaattttttgccttcattacacaaatttgtttgact

SEQ ID NO: 236979 - DNA, 461 bp, Glycine max
  unsure (1)..(461): unsure at all n locations
gcatgggggatcagattatgatgcttgttttatctgngcttccaaccaggttggttttaagaacatattcccttccatattctattaatgttcttttgttccatttcatagagtatccaatattataggcttctctgtttttatgttatggatttcttatgcttttgttggaatcatgtttatgttatgtccttaacatgtcaggtggcccaagtgctgcttacgttgccatattcattttcccagctgggaatgctttctggcatacttttccaactcttctatggtttactgggaagttggacagcttacctcattatcatactctacgtcgaataccgaacaagataagagagagagaaggttaacttcagaaaccatgtcatccatgntcaactcaccaacattaacataatnttttatgtaatataagtccaaacaataacctcttaattaaatct

SEQ ID NO: 236980 - DNA, 370 bp, Glycine max
  unsure (1)..(370): unsure at all n locations
cccatgcatctatagaagaaacgtatgggtcaataacaataggtctgccagaaatgatgacaaccacacacttaacagtcccacaaacattgttgatgacaattggggccagattccatcattgcaagtgtcgtactgtccccagcagtctcggcataaggaggctcgccaactacaacaatggcatattcgaagttattggacctaacaaactcattgtcagggttgtcacgaaagacgacttctgtgcttgtatcaactgctgatnttatggcactgagaatagttgttcctgtccaaggaaaagaatattagtttctgctcctttgacatgcatgcaactacctgctattaattaactaaaaatatg

SEQ ID NO: 236981 - DNA, 469 bp, Glycine max
  unsure (1)..(469): unsure at all n locations
tggcctagcccacatcacatgttaggtgcaatgcttttgcatacaaatgctgactnttccttttaaaaaaataataaaacaaagatatttgcgggtcccatgttgctcaaaacgtttcgttttcagttttcacatcttctgtaggtacatgaacatgtcctgcaagggcgagagctggcccatttgatactgaacagtgccaaaaaggtaatcatccacggaaaggttattatcgtccaagtaattaaactgaaaatcaaacgcgttttctagctttaggtccagatcatcgttccacttggggtcgctctgcacctccctctcgcacgtgacatcgggcgaaaccacgtgctccgaactgctcgagtccgtgttcaaccttggcaccgaatccgaagtctccatgtacaattgctcatttcctagcttatgaatctctggcttcgtctcgttctcgtgctcaacacta

SEQ ID NO: 236982 - DNA, 346 bp, Glycine max
  unsure (1)..(346): unsure at all n locations
attctctcttctccctttnccaaaagaacgaaggactaaccacctaaattcttttgtgtctctcttctccttttgccaaaaagaattcgacaaggactaactgcctgaattctttttgtgtctctcttttcccttttccaaaaaaacgaaggactaaccgcctgaattcttttgtgtctctcttctccctttggcaaaaagaattcgacaaggattaaccgcctgaattctttttgtgtctctcttatcccttttccaaaaaacgaaggactaaccgcttgaattcttttgtgtctcccttctccctcgtcaaagaattcaaaacgacaccatctgagaattcttt

SEQ ID NO: 236983 - DNA, 469 bp, Glycine max
tctacttatgtggcagggcgggcttccttcactttcttgtctccaacgcgagctctgaccactgttcttccttcccgcgatgcttctttcaatgtccgcttgagtgggcttatagcctaaaccatacttcccacgatttccttgggtatctatcaggctagttatgccgccgttgtttttgcctaaacccatcccgggttcataaccgttccccaacataactcgggccatcattaccgctgcatcggacagacaaggctgcccaaagagggagtccacggaggaaatgctgaccacctcaaaagactggaaagcagtttctaacgattcttctgcggcttccacataaggcatggaggatgggcagcttaccaaaatatcttcctcgcctgacacgatgaccaagtgcccctccactacggaattcagcttttggtggagtgtagaaggcacaactcccactgagtga

SEQ ID NO: 236984 - DNA, 378 bp, Glycine max
  unsure (1)..(378): unsure at all n locations
agctnttactaaattgttaagagaatgttgtttttaagagaaacttaacagaaagtaaaagcggaaattaaatgcacagcggaaagtaaaagtggtgggaagaaggaaaaaaacacacaagagtttttatactggttcggcaacaacccgtgcctacatccagtccccaagcgacctacggtccttgagatttctttcaaccttgtaaaaatccttttacaagcgaagatccacaagggatgtaccctcccttgttctctttgaacctagtggatgtaccctcctgtcataccctaatttcgtccggggacctttgcttgatgacatgcgacctttctttggtccttgtgaggtgcttggtacccatcattaggcaat

SEQ ID NO: 236985 - DNA, 469 bp, Glycine max
  unsure (1)..(469): unsure at all n locations
tagattaacatagcctaaacttacgtaaggcgattaagctaagcctagncttaaatgagggatctacagatgaagcttagtttaaattaatctaaacctacaagggttgcttaagttaagtctactccaacaagagggatctgagggcgaagcttgagctaagctagcataatgagggatcatggcttagtactttaggctacagcatanaacacaaaagcatgattgattagagaaatatccttatatgcatcagcttgtttgttagatagacccaacacttttacctactgctttcaatcttacttgcattttcactgtttttagcctacacttcagttaattatgctctaaaccatccattatcaatctttctttcaacaatgccttatttttgtatttaaccctatctaatactagatccctgagttngatactcggattcatcccgtttaaaaaaattaaatac

SEQ ID NO: 236986 - DNA, 371 bp, Glycine max
  unsure (1)..(371): unsure at all n locations
cgcaagctaactggagataagaagaatgcctttcnttttaaangaccacacatctnatntattaattcacgagtgagttggatatatctatttgaattacgtctttgtattattatctaaacattcttaacatgaaccgattatggaaaactgctaatataaatactaagtttcactaattaaattcaaataacccttaataaagcttgaattatacttcaactaagaaaatatattcactttcataacgaaacatcttcatttaagcttgagttagggctaatgtgatcttgctcactttggctctggtcttaaaatgatttgttattttcggtgacaattacaaatccttttgaaaaaaaaatactaat

SEQ ID NO: 236987 - DNA, 463 bp, Glycine max
  unsure (1)..(463): unsure at all n locations
tatgctagaatanactgtcagctgctacaccactggaatacacatcagaagaaattgagagcgcgtttcacagtttataacatcttcttagtctagagtagacttcacaaacaaagccaatgctttaaaaaaattaagattcatagccacactttcttttgactggtcatagccacacttatcacttcctaagttaatacataacatcaatttaaagatttaccattatagtaaatcacaaaacatgaagtacaatgtattcaatttttcagaataaaaaacttcacttcgtctctgcgaacttttcaacatattaagcaaacctaacagttattacttaacaaattggggacagataaaggcattggaattggatatattaagacctaatggtgagcattgaaaacgaaaagttaaatctaaataacattaccaatcacttcaacggctggtacgaagtgtc

SEQ ID NO: 236988 - DNA, 411 bp, Glycine max
  unsure (1)..(411): unsure at all n locations
cttgcagantnggactgcgcgagagagaggatctaagtgtgtactagaagaggcgaatgcgatcatcctactaggacgactgataaaactgacgcacatgaacagggtgagagacatggagagacccatgccgtgactgtcatttctatacggccatggttaccaccaaacccatcaatgtaattactgagtgaataacatgccttctccttacccaccacccagctatcctctaatgccatacgtgcatcacccacttagctctgataccgcactctcgatgagcaacaccagctttagctcattgcacgagatcaacaccttccttgaagcgaattatgcgacgagaaagcctgtcgaaatcaccccaattccagcgccctatgctgacttgctaccatatatacttga

SEQ ID NO: 236989 - DNA, 376 bp, Glycine max
  unsure (1)..(376): unsure at all n locations
agcttcactaattaacaagatttgtccactacatactcgattatataaacaagattaatcataatatagagacacaattgataacttacaacacatgcgacatgctattttgagccaattggggccataatgtaaaaagaccaggtttgactggtgctctaaaaggccaagctctaccaaacattctctttctcactaggagatgcctctcaataacccctaattgcttgaaactctctggtaaggttccattttctttggctgtggccagcatcgggaaatggtagcatggctctagtatgttgtacacgttacgcccatcaatggnctgatagcataataatgatgatcatgtacccaacaaagagacaatatt

SEQ ID NO: 236990 - DNA, 463 bp, Glycine max
  unsure (1)..(463): unsure at all n locations
tcaccttctggtcctgctcatagctgttgcatgagatattatgctctantttcatctcccactccaagtaggcctccggatcattctttcctttaaatggaggaatgttgagtttaataccatcaattcggntttgtctaggaacaccatcattccctcttctcctcctttcttcttcattatgatctctattctccatttgatccaacctctcatggagcgcatcatctcgttgtttcattaacctctccaaatgttgcatcaaagctcgcatttggaattgcgaaagccccactccatcattaggattaatacctgacatctctaacatacaaatcaaacgtcacaagacaattatagctgctgtttgaatacctcacccactcaagtgtatcacacaactatggcgtcttctcttaagagacacttttgccttttaccactctaatccccctgagtccta

SEQ ID NO: 236991 - DNA, 383 bp, Glycine max
agcttggcatagtgcagaaaatgttatgttcaatgcagttgcacacaaaatgctgacttttcgtacaagaatgatgaggtcccacttacacgcatatgttggatagcattccaaggtattatagaatttgggaatacatttttatatttcatcaacattttggtaaccccaaatgtattaaatagggtaaaagccattttcaatctcaataactgatgttcttttatttagagatttaggagttcaaaataagataagaggtttttcgttgtttactacaagtcttagctagaatcacatgaaattcaaaattaaatatatcttaccaacatcaaactccaatgttgcaacgttgaagtcaacacaagctttctggtggagtc

SEQ ID NO: 236992 - DNA, 464 bp, Glycine max
tcctatgcataacctcaaatgttcatctccttttcaaatctttgctttaagggggccaactagtcaattactgacagctatcttgtttgcattttgtcacatgtgttgcaggtatcctttcactaacaaacaagcaattcctccaatggactgggaagagtatatttctgagattgcatctgacataatgaaggaacagagcccaaaaaggttttcttctagtacaatttactttgatctttcataataaatagagtgttcaactggacgttgaaatttgtcaggttcatggtttgcctaatgaattgtatagtgaactaatttcatgttttatttagttatctgagtgacttgtgtggtgtgcaatgcctctttcatattctctatctcatctatcttaagatgtttcaagttcgaggaaagctctatgagctgctaatcaattgcattcctccggagatcat

SEQ ID NO: 236993 - DNA, 348 bp, Glycine max
agcttgtttcttgcaattccaagatacaagatagcttcctaagagatggcatgtcctacttgtgcttttcctatctagtttgcaccttgcaaaatcataatctaaaaagccaattagatttaaggaggtacctttgggataccgcaaaccaacattggttgttcccttaaggtacttaatgatccttttaacagttgttaagtgagattccttaagattagcctgataccttatacacaagcaaacactaagcataatatcaggttgacttgcagttaactaaagaagtgaaccaatcatacctctataccttgactcataaagtgatttgcctttctcatataattc

SEQ ID NO: 236994 - DNA, 430 bp, Glycine max
  unsure (1)..(430): unsure at all n locations
tcatgatttatgacatagggttaggtttagagttanggtgtgaatcattggattccctagtgtaaaacaaaagtgtctttgatgcactgacgtaaagcaaaagtgtgtctaacacactgacataaagcaaaagtatctctgacgcactgacataaagaaaaagtgtctctaaccttgggttagattaggtttagtggtcattgtttatggacctaaggttagggttagggttagtgtttagggattagagtgtaggttcagttattatattagtgttaggttttacaatgtangtttggggttctgggtcaagaattaaggcttatgacctatggttaaagtaagggttacggtttgaagcattggattccctaacgcactaacgtaaaacaaaagtgtctctatgcactggcgaaaacactgaatttct

SEQ ID NO: 236995 - DNA, 229 bp, Glycine max
  unsure (1)..(229): unsure at all n locations
acacattttntagaagctcatcaatgttcatactatgtagcggcttgcccaaatcgcccaattgattctgaacctcatcaagtgtgagactgtacattgagttttgccgcaccaaaggctggagtggtgactgtntcccattactgtcttcaccaccaccatgaggtcccataggttgggtccccatttaccaattatcactgttaaaattcacttcacacctcacact

SEQ ID NO: 236996 - DNA, 399 bp, Glycine max
agctgcgggagaaactaaatttcagaccatttttattgttacagtcgcgcaacaaatgaggaagactttccttctctatgccgcacttgtgacaagaaaaatgaagacaaaggtgtcgttgaaaacatactcgattagttaaaggttgtcctcaaagacaagccataagaagtgtttgacaattttgggtaattggctcttccaagttgatttccattccctcgtagaagtattatgaagagtgggctcggtagtaatccacgcataagatgaggttgtggtgtccatcggttggagaagggttccaaataacaacatcatccaactggtcatctagaacaatgctcagtaacttattcttaatatcattggacaaaggagttgctaacatggtgaaat

SEQ ID NO: 236997 - DNA, 463 bp, Glycine max
  unsure (1)..(463): unsure at all n locations
atccttatagtcacctgcggcatgcaagcttctgcatgtcttgaaagttctagagatatatatgtccaagttccagagagttagagagaatctgttgtgtgaagatctgtatagaccagagctggaagaggaagctgtcctgagagcttgagatgagtttgtgagcgattgtgaggtccaagaggtggaggagacatccccgctacttgtatttctgcaatcttttatctttctcttctctctgtnngaaaggaagcttcccagttatggaaagctaaatcttctgttggatcttccttgtaggtacttgatgtaaatatctttctctatttatttactgatgttttgtgtgttcactgtgctatcataacttcattctgccatgcttatgccttgatcatgtagatgcatcgtgttttaggatcattcaacagtgtaaacccgtcttgatcttataacttga

SEQ ID NO: 236998 - DNA, 482 bp, Glycine max
actaagcttaagataaagatggcctcagcaaattccttatttccattttggcttgttatcaatattcctccaatctttaatggagagggttaccactactggaaaacccgaatgcaaatttttatcgaggcaatagatctaaatatctgggaagccatagaaatagggccttatatacccaccacaatataaagagtctcaatagatggttgttcatcaagtgaaagcataaccatagaaaaacctagagatagatggtctgaagaagatagaaaatgagtacaatacaacttattagccaaaaacataataacatctgccctaagaatggatgaatatttcagggtttcaaattgtaagagtgctaaggaaatgtgggacactcttcaattaacacatgattgaactacagatgttaaaagatctaggataaatgcactaactcatgagtatgaattatctagaatgaatgcaaatgaaaa

SEQ ID NO: 236999 - DNA, 406 bp, Glycine max
  unsure (1)..(406): unsure at all n locations
agcttgctaacccatggaagctcctaatatctcccacacnttttggggagggccattcttggatggccttgattntcccagggtccacttggaccccatttctaccaactacaaaccctaagaaaactatattatctacacaaaaggtacacttctctatatttgcatagagggtgtttttcctaaggactgaaagaacttgcctgagatgtcctaactgatcatctaggctcctactgtacacgaaaatatcatcaaaataaaaaactacaaatctacctatgaaatcccttaagacatgatgcataagcctcataaaggtgtttggtgcattagtaagcccaaaaggcatcactagccattcatacaaaccaagcttggtcttgaaaagcggtttcactcatca

SEQ ID NO: 237000 - DNA, 406 bp, Glycine max
gctttggtggacatcttgacttgctttcaatctgacattctcctcttatttgccttcttctattttcagattgggaatgcctctaacagcacctttgtcaatgattttcttcatgcctcttaagtgcagatgtccaaatctttgatgccatattttgacttcatcttctttggaggatagacatgtggaggagtaactggtttcttgaggtgtccataggtaacagttgtcctttgatctgctgcccttcattagaacttcactcttctcatttgtcaccaagcattctgactttgtgaagtttacattgaatccttcatcacacaactgactgatgctgatcaagtttgcagtcagtcccttcaccagcagtactttgttcagactatgaagtccatcatggact

SEQ ID NO: 237001 - DNA, 416 bp, Glycine max
  unsure (1)..(416): unsure at all n locations
atcctctaagcacctgaggcatgcaagcttaacaatattacagatctcaatatacattgccaagtgtgagtatggatcttcatttggtaaaccatgtaacacattgctctgtattagctatatcaatgaaggtgggtaagttaagttttgtgcctgaacctctggccgcgcaacacttgagaaatattgcagcaccgaagtacttgagtaatcttcgaaggtcactcttcgaggttgctcttcagccatgacttcggcttcaaattctattgttttagattccctggatgtaggtgagttagaagatgatgactcacaaaagtgagcctgatgcaatccatccccccaagggtattggatagaagactccaagaggattgtgctaaagctgctaaagaaggccctgnggttctcat

SEQ ID NO: 237002 - DNA, 461 bp, Glycine max
  unsure (1)..(461): unsure at all n locations
tgctctattcaagctctcccanaatctttttgttaatctaggatctctatcagatactatgctagatggaacaccatgtaacctgacaatctcacttatatacaatgtggtcaacttctccaaggaaaatctgatattaataggaatgaagtgagcagacttagtcagtctatctacaacaacccagatagaatctaaacctctatgggtcctatgtagtcctaccacaaaatcctctatggagcaaaagatacaagtatcattcaaggtaagctaagtggtcaaaagagcttgtgtctatacaattcatggccttcatcatgttctgagttatataaatcattctagagttcagagatttatgaaaagatcattactcacagttagttgttcattcacagaataaggtcgcactnttaccagtttttggttcaagcttttctttcacaatcagtccgtct

SEQ ID NO: 237003 - DNA, 449 bp, Glycine max
  unsure (1)..(449): unsure at all n locations
agctngttagtgagaaaatattgaaacttatattcaccccccttcttaagttattgaggtcacttatccaacaaaagatgctagtatatggctcctgtgctttttaggcccaatgatatgacctaatagtaatagttggccgactctattataaaagttcctttcacagcacgtatttgactataatacccttgtacctattcttcttaatgttaaaccttgtcattaactcaatggatcctcttgtaggcattctttctccagcaaatttgaagagcggatcatcgtggggctaaagtattgattcaggtatgtctatctgcttaaatgtactccaaaataagatatccaccgacgcttcttaatgaatgagggttttccataccaagtagttggttgataaatctggatntgagtgtattttggtgtgaattttcatgtcatattca

SEQ ID NO: 237004 - DNA, 378 bp, Glycine max
ctaagcttgatggttcagtttgaatatttacaacttttattttccatctagcagctgatgctctttccaataagtattttgatgacccaccatatatgtttctctctcatctcctatccttgagttgtgtgagcattttgcagtagttttatttctcacattaaaagggcaaaaagttaataagaagcttatcacagactcatctatgaaggagaactcgtattttcatgaccaattactttattgcaaggggcgtctattcaatacctgatcatagcttcaggctagaaacattaacaagggtttatgtgaaacacatggcttcttgtggggtaaagacgtgagctactaacatatacttgttccttactaccctat

SEQ ID NO: 237005 - DNA, 360 bp, Glycine max
  unsure (1)..(360): unsure at all n locations
agcttccatcacaagataccttggacacgcatgtatatggcaaaatagctcacaaaatatacgtatgtttaggtagcaaaatacctcanaaaaaaagagagagagcaaaaagagagcgagcaaganaagaataagaaaaaaataataataaaaagttgtctagctaaaaaacaacatgcttgtgaaaagagataatttccaacttttctttgaaagattntactgatcttaaccagttttttgaaaaaaaaaaatgtgtgtacatatttgaagggtaaatgctgtgaaaagtttttcgaacacccaagatagactcagatgaatgcacaaattgatagatgaacatattttggaaacact

SEQ ID NO: 237006 - DNA, 456 bp, Glycine max
  unsure (1)..(456): unsure at all n locations
gtgtagcccaccatcttttcatagtttatttctgttaatgngtcttctatcattgtcatcatttttttctccgtcattaatgtgccacttgagctgctaggtctctccacctttgggcgtattcttttgaaagattcgtgcccccttttttgcacatgttctgtagttgcatcctatccgaaaacattatactgacactgcctaacgaaggcaaccactatgtccttccaagaatggactcgggaaggttccaagttagtgtaccaagtaacagctaccccagtaagactttcttggaaggaatgtatcagcaattcctcatgttttgcgtatgcccccatcttccgataatacatctttatatggttcttggtgcaagtagtccncttgtacttgtcaaagtccaacaccttgaacatgggaggggtgatgatattatgtactatgaacaactct

SEQ ID NO: 237007 - DNA, 414 bp, Glycine max
  unsure (1)..(414): unsure at all n locations
agcttcaattataatcttgaacaatacaaatctgtttgacagcctcagccgactcactccctgtaaaacctatgctcactgccagagtacttaatagcacgccatagtgttgctatcacgctggtgcatcatatctcatgatggccccactccttgcaactgaatcacgttgtacctggctgtcttaggcggagtggcacaatttgcagctgctatggcagctgttcacggctgctatntacaatatggggccgaacacttttttgcccttgactgagtgctgcttcaatgcgaaaattggctttttggggggagttaaaattggacagaattttaagttaatttgtttttggtttcccttacatttattcatgtgcccttgcaagtgcaagccccctcaagagagctctttac

SEQ ID NO: 237008 - DNA, 429 bp, Glycine max
  unsure (1)..(429): unsure at all n locations
gacacttaaaactaagcttgaagtagcagaattaagtgaaaaattcatcttgcgaatctagagtgtaggagacctaattaaggttcctaacaatcactgattatcctaaggaaaattacctaaaattattacacacaactggaagtagggtgatctattggaggctcccaacttccaatgaaagacctttttgttacaaaatttgaaagcaaagcaaattgccaattacaaaattacaaaaacaaaaaaagtcctcaattgtggtggctattttctctttggtgtttcacttaatttggagtgcttcttagtccaatagctcttaaggtggttggccacttgcttcttgactcanattcttcaaggtatggcaccaatcctcctttccaattccctatatggcaactcacaagcaaggaaacaaagaca

SEQ ID NO: 237009 - DNA, 462 bp, Glycine max
agcttgtctcagcgtttatgcgagacggagaccaacatgctagctatcatcgccaagtaccaagaagagttaggtctagccgcggcccacgagcataggattgcggacgaatatgcccaagtatacgcggaaaaagaggctagaggaagggtgatcgactctttacaccaagaggcaaccatgtggatggatcggtttgctcttaccttgaacgggagtcaagaacttccccgattgttagccaaggccaaggcgatggcagacacctactccgcccccgaagagattcatgggcttctcggctatggtcagcatatgatagacttaatggcccacataattagaaatcgttaggaaacttgtatggtcgctcagatcttgactagttataactttttgaataaaatgagtttatcccatggttttactccaaaaatcagtgcgaatcatgtcactcccgca

SEQ ID NO: 237010 - DNA, 462 bp, Glycine max
  unsure (1)..(462): unsure at all n locations
gcattacggacctataatactaagctagtctgcnatgcccaacaagaatgtctttttctcaacttgaagagcaaacttaaagacaattatttgaagagcaaaatgagcccatgagtttatattcaagatgcaactgtggcctagagtttatttggatgattacatagcttttgggctaaagaactaattaaagcccattttctaattttcctttaatttttgtatttattttcttgtaataagttcatatggctcttgaaatattttaggtcagtttttatgtttttaggctgtccaagttattatagtggttagtggggttttatttctagaggaatttaatgtaagtgggaatttaattctaagtgaaaatttattcttagtgggatgtttataacgaggcctagcctataaatagttgaagccttgtagttctgaggcagattgagtctaaatgaaaat

SEQ ID NO: 237011 - DNA, 433 bp, Glycine max
  unsure (1)..(433): unsure at all n locations
agctngtaggattatggggtacccatcacatgtggtactaggtggcggtcgggcgatggtgcacaacaagttttccacatccacaatgcgcgcataaacccaccatcccctgttgcccacctccaactgagctcacgtactcccacgtagcccatatcctcgtttctctcaacaccgggtccccatcaatcctctcaagcttccacaacatccaagtaaaacaacattcaaacagcacaagctatcacagccaagcaaaagcagagcatagtcagaaaactctgctcaaacaccaaccaaaatcacagctnttctcacttaaagaccacagtaacaattccttcgatccaattcgttaaccgttggatcgactcccaaaatttactggaagtctatagtgcataagcctacattgtgacgcgtgggatctact

SEQ ID NO: 237012 - DNA, 389 bp, Glycine max
  unsure (1)..(389): unsure at all n locations
ctggtgcggagatgatggtacagcgggtgaaccagatacggaagtttcttttggtgatgtagccatggaaaagcagagcgtttggaatgattttgtaaatctcagaatactattgggaaatgctggtaaaaacacgaatgccaagcagatataaatctgaatgaagaatgtagaggggcgtgtgaagcaacggtcgaanttgctttgtggtgaacgtgctattaatgttaagtgattcgtttgggcacgttcagattgcagtagctgctataattcctctagcagacaaatgcccatcttgcccctcattttttaaactgatttgatccaaagctttgtgatatatctgcttttgtcctcatgtcacatgctcatttgatcactttcat

SEQ ID NO: 237013 - DNA, 104 bp, Glycine max
  unsure (1)..(104): unsure at all n locations
agctagtccacaaaaatatgggtttgaaagtttatcatttcagcctcttaccaagtaaaatggatcatttttaaggncccacaccctaaaatgagcaccggtca

SEQ ID NO: 237014 - DNA, 391 bp, Glycine max
ctataaaactaagctttaacatatgtcttcacttataatcatcacacagcagttaactaacaaaactacccctcatatctcccataaccccatacccacgaaaatcaagagggaaagaagtccacccaaacctgaaatttcgaagtcccactcgtagccacgcacttcacgactccaaaaatgctctcctttcacgatttggggcagaaatggtggccaaaggttgaagctttgcttgaagcttcaatggagaatgaagaagaagaaagctacgtgagagagggagagaaaaggcttctgaatttctgctttggctgagtgaggagagagaaaagctttttggttttaaaaaaaaataaaaagggttttcccttttttttccattatttta

SEQ ID NO: 237015 - DNA, 363 bp, Glycine max
  unsure (1)..(363): unsure at all n locations
tttgtcactccactcatatctggccttcacattaaccagacttaacaccgccgacaacaaccgtaaggaaattctgcaccccaaatacaaaagtttctttgaattaattgccatgtatcatacataggggcatgtgcttgctgaaaagactctngtccacagtcacgaatcatatccttcaagagatcttccatttctacattaaacggttcaaattgggacccactctgcatgtctgtcaattcactatgtcatatccacgccgtataattcttcttaatttatcacacaacataactctatcaaaatgctcaatctcaactagagcatgtgtttttgnttattttctccatagctcattca

SEQ ID NO: 237016 - DNA, 252 bp, Glycine max
tgttacaaccaacattctgttctaccatgccattgttggttctaacctaaatgttaggaagattcgataaattctatttagatagggaaactcagatgatagaaagggaagagagatattgcacaaaaattgttgtaaataacagaatttacaatgaaggggttcaaaacaatctcaagctctctaaacctagaatatagagctccttataaaggagacaactattatctgtctaaccaaaaatagttacaa

SEQ ID NO: 237017 - DNA, 444 bp, Glycine max
  unsure (1)..(444): unsure at all n locations
agctnttgtaaagntaaagaaatttttgtatgctttcagctttttgtgatgtgtataacccaatccagccttttcgataacacattttttttgtgcaactaatgcttccaaactgtccctccccttgtgaacttggataaattttttagtaaatattctaccttggcttctaaaactttacatccttcataaggggaagtggcattagtggtgttaatgcaatagcaagaagattcattcttttctttttccaaaactttttttttcttccaacaaatctttttgaatttccactagcttatccacatgccacctcagttttccctttagaagattatttgaaacagacaacttttatgcttcttgatgcactttattgaaagcgtctagtagcttatcatagttattgtcgacttccgaataaaaaatgtttacctcactttt

SEQ ID NO: 237018 - DNA, 430 bp, Glycine max
actcacgcttctagacaatgggtttgtaaattctcaacaacattaattgctaatggtttctctcagtcaaagaatgactattctctctttaccattggcaaaggtgctctcttggttatcttgttagtatatgtagacgatattctacttgttggcccaagtgttgcatgtgttcattctattctggccaaacttcaagctctgttcaaactaaagatccttggtcccttaaagtactttctgggactagaaattgcaaagtccagcaagggcattgtactgactcagaaaaaatatgctctttccctgttagaagatactggcttccttggctacaagccatcttctcttccaatggatccaaatttaaagcttagtatgcttaatggtgagttactgactgatccctcaatgtatatgcgtttacttg

SEQ ID NO: 237019 - DNA, 224 bp, Glycine max
  unsure (1)..(224): unsure at all n locations
agcttgttggttacagtgacaacaattgggctggagatgaagatgattggaaaagtaccagtggatttgtgttnttcataggaaacacaaccttcacttggatgtcaaaaaagtagccgatgttcactcttttgactcgtgaggcagaatacgtagcagctacttcatgtgtttgtcatgcaatctagcataagaatttattaaaagaagtgggcctgtcacaa

SEQ ID NO: 237020 - DNA, 444 bp, Glycine max
tgtaaggcgtaattgtttaagtccttattatagtccttcttgttacctatctcgatgggtcgatccacaaccccacaagcattgagcttgtaaggcgtaagtgcttaagtgtattgatagagttgaacctatgaatttatcttggttagatggtacaatttcctaccaagaacttagcatgtaggagtaagtgcttaagtactgtcataagctaggtctcaaagacttacctcggtcaaataatccatagtacaacaagtacttatctagataggcataagtgcttaagctttcttgatcaattgttccttattaacatgagatttactttgatgagtttgacaccctaccccaacatgcatataaatgaaataaaaacataaaatgcggaatctaattaaagtcaatttcattcaataaaattgtaagtaaatccacatggat

SEQ ID NO: 237021 - DNA, 463 bp, Glycine max
  unsure (1)..(463): unsure at all n locations
agcttgacacagaccatacgaagattttgtgagnttacaaaccatgttgtcattcttgacaagataaccaagaggcatgtccatgtatactccctcaatcaaatcactattgagaaacacattatttaaatcaagctgaaacatgttccaatttctgtgaggtgcaatggaaagaaacactctcattgccgtatgcttggcaacaagtgagaaagtgtccaaaaaatcgatctctgcttgttgtttgttgtgtgtaccctcttgcaacaagacgagccttgtatctatcaagggagccatctgctctatacttgaccttataaatccatctgcaactgatgggtcttttatcgggtgtgagaggttgaacaacccaagtgttgttcatttgaagggcctgaattactcattcatggctgacgccattatgaatctaatgctgatataaactgaactcataatt

SEQ ID NO: 237022 - DNA, 398 bp, Glycine max
  unsure (1)..(398): unsure at all n locations
tactaccacaaacccttgttctatgggaaatgggcagtgacatatgcagtatgtaaccacaaccattgcagtgcttctgtttanaattaaggagtgagagtactttcgaaaacattgtaattttgtttatgttaatgtgaattaacaaaatggctatattttgatccaaaacatgcctgctttcttcttatcttccacttcccattttgtcatgcattcaaccatcctgtcctctctaattatggttagcaacaagttgcagttgcaaccttattcagctgtctgaatttatgaactgtataccatggttcttaagtgtgttttgtcatattgtgattgatttaacaacctatgtcccatactttcctactgtgaccacattaaacttcttgattaat

SEQ ID NO: 237023 - DNA, 330 bp, Glycine max
ctgcagcttggataagttttgttaaatatgatttacgtacagatgtgctatcaagctacaaaaacaagtaatgatgtttttcagataaatgggatatataccttttgctattccacatatttattggatcatctatgaagtgataggatgaacaaatacaattctagtagtggataaaaaataagcttcagcatacctgtgatgcagagtgggatgaaagcaaatggatggatacttaagtcggaatgcttaagtatgaattgaaagaaaggctacagagaaaaaaatggcgtggaaaagatgtgaaggggtgattcttaaaacaataat

SEQ ID NO: 237024 - DNA, 484 bp, Glycine max
  unsure (1)..(484): unsure at all n locations
actaagcttaccctgcattgagcataccaaagttagcatcctggacacangtctctcatgcaaaacaaagatcaaagaaccatttattttctgtactcaccggaaccttcttctatgtaacaacacaaatcgaatcctttcctcagacaccaattgaggtgatttcagtggccttaacagccttgaaagcatactctgtttcaacatgcataaaaattccaccactcagaacactacagcctaacaaactagtcaactcttttccaaacaagtcaaacaaactgcaatgaaattttcttaaacctatgctgatccagtggggggagttataaatatagatgataccctgtgacaacatagttccttgtttaacaagttcatacaaaatagacagagactagctatgtgatcatctcctctcattccccaacaactaaagccaaataaagaaaaaaaggcatataatgatgatgtcaaagatcac

SEQ ID NO: 237025 - DNA, 474 bp, Glycine max
  unsure (1)..(474): unsure at all n locations
agctntggagtaaattagggaaaacatcaattatatgagaggttaagagagtagaatgatcaaattaaaacaatgccttgaaaaaattggtgatattgatgcatcaagtgggttgtgtctagatgtttctataagatgaaactcaacttattttatgcttcaaggtgctcttgaatatcaaggtatttttggaagcttatgcttggttgatgaaaattacaaatattgcccttcataggaagaactagaaagggaaggaaagaattgtagattcttgttatcattntatgatatttcagcccgaatttttgccacaagttatcctacttcaaacttanattttttttttcaagttttggaaactaaatgccttttaattgaaagtgtaaaagaagaggatgaagttgtaaaggatatggctaanatgatgatggtgaaatttgatattttacattntggtgtatatttaaacat

SEQ ID NO: 237026 - DNA, 413 bp, Glycine max
catcaatgccgagtgtatactatttctcttccatgtttcagttatacgtatcttgtgtctgctttgcagataatgcatgcatggtggcccttaacactacatccactcaaattcccgtatgttggaaagtcattaatggttcaaaatagcattgcatgcaacttgaatgtctcatttcgatacccatcaaacacatcaactccctcgtcccacaactttgtcaagtcttcaatcaagggactgagataaacatcgatgtcattttttagttgtctttgacccgatatcatcatagacaacaccatgtattttgaattcaagcacaaccaaggaggcaagttgtaaattactagcaaaacatgccacgaattgtgctaagtgcttaaactgccatatggattcatttcatcaat

SEQ ID NO: 237027 - DNA, 387 bp, Glycine max
agcttctttgcagatcaagtggattcgtattatagttgcggatcaacttgatctgcaagcttattgcggatcaacttgatccgtaaatgtgtattttaattttaaaaaatgtataacattctttgatatttgagcatatgtttccttctattttactgcacaacccgttgccttctattttactgcacatctttgatatttgagcattcccatatgttgtacattcttttcactgtggtactttatttcccatgcatgaataacatgcctataatctggttaaataatgaatggaacgtatgtcctctcttaaggaacttatgttaaacctatttattgtgaaagacattctcttcgcatttacatgtgttttacattgtatatacc

SEQ ID NO: 237028 - DNA, 394 bp, Glycine max
  unsure (1)..(394): unsure at all n locations
tgcccaacatccaggtaattcaacatccaaatcttctctttctaacaaaccttgcaaaacagggcataggcagataactctgcccaaaactcaaaccaaaatcacagctttttctcacttaaagaccatattaacatttccttctttctaattcgttaaccgctggatcgactcgcaaatattactggaagtctctagtacataagtctacattctgaccgttgggatctgccagctaacatctagaactcattctgcactactctttgcacaaccagcaaaacatagcatttttctgcacttatgcaaaattctgctgccaatttcacagcaaattctgcataagtgcagatntgaaaacccacgttctgtgatcagtcttgccaaatcaaat

SEQ ID NO: 237029 - DNA, 469 bp, Glycine max
  unsure (1)..(469): unsure at all n locations
agcttaaagtatgcccgagtcattcatccctatgagatgttgttgaagtattggcgatcagaattgccattccttggattatagggttgaaccaagctcatgcttttacaaaaaggttcatcaagtcaagttgaagtatggaagtaaccatcttgcaaaaattggggcaaaaaatgaatcgagttacatcactgcttcatttactgccaaacacatttaggactgttgatgtccttgttacttccagtttcaccttgaccaaaatgtcatgaaccatgttgaaaaatctaaattgattcaaccccatgtcctgcgtagaaattcgcaatacttcacctgtgtatcattcacatacatccatgcttttcattggttgcattgctcattgcattctttccttgaaaaaagagaataaaataaaaaaaattaaataaaataaataaantgaacttaatcattggtatcaaaa

SEQ ID NO: 237030 - DNA, 373 bp, Glycine max
  unsure (1)..(373): unsure at all n locations
tccatcacaaatattgaatgactactaatgagtgtgttttatctattaatgggtggtaatgactactaattggtggtaatgactactaaatgcattcttgatggtagaatgtctatatatagcatatgtgtttggttcttgagctcacatctttcattttcgtctgatattgacatgtgttttgttttgttgtttgtaacctcacatgtttgatacttgagtcttacatttggcattaaagccacaattgcctttgccttgtccatgtacaattttcggtatttttccaatctaatttcgttgttgatgtttaaagcctcatttgttaaaaagaaaattanaaatccttattttgggtgatttccttggtttt

SEQ ID NO: 237031 - DNA, 463 bp, Glycine max
  unsure (1)..(463): unsure at all n locations
agctngctcaaggagattatgcttttaatagttgggggtgtaactattagcccatgcaattntttcaattccctcatacttttgcattttgctaacagagagagaatggtgttttgatgtatcatcctcaattatttggttgatgataatcccacctaggccttacattntattgcttgcaatcatctctattatatccatgaggaccatgttactactatcagtttcattatttaaacacaaatagatngacagtgcataggatattatatataagtattttatgtctcatttatatngttntatggtatgcattcatgttaaaaaaaacactccaaaaattaaagggataacattaacattactttgttttgttttcggatttgtaatggttagtgaattangaagggaaggaaaatagtcctataaaataattcattacattcttggcatgcttgatatc

SEQ ID NO: 237032 - DNA, 424 bp, Glycine max
acaacaaatgaatggatgtctatagttgtgtcatttgtttatttattgttattatgtatcttatccatcatatataagtttttttatatttctttaactgtggtttttttacataattcataaaatttatttaatagcttgcattgcatgttgcacaaacaatttaacaggtttggttcataagtactgacacaaaaaaggcttgtaaaaatatcaaagaatttactgattttttgtcaattaattctccttaaatcaattaaccataatttcaatgtagtttttcttttttactaaagggataagtgtcagtggattttccctatcttaaaagaaaatatattattttaacaaaagttaaagaagttatcaatatatttccatatatatacaataaatttacacttcttacaattcttgcgtg

SEQ ID NO: 237033 - DNA, 419 bp, Glycine max
  unsure (1)..(419): unsure at all n locations
agcttgcacttgttcacccaacctgactttgttggggcaattatgtagtatatcttacatgaagtcgaagagttctgtgtagctcatgttatgcataatgccagtcgtaaagctgttttagttaaccacagttagttatataaggttctaacttctaaggttctggaatttgttgtaacagacttcaaacacttacaaatctgacaaatgtctctgtagctatatgtggaacttatgtagtcagataccttaggaatcagttcagaaatacaaaatcacaaattaagtaactttccaaattctctccaaaaaatntctgtatttctaccacccctttccttttatctttctaatntctaatcagcaaggacccagctggaatccataatcaagacaattaacaaatcaagtttaaacac

SEQ ID NO: 237034 - DNA, 433 bp, Glycine max
  unsure (1)..(433): unsure at all n locations
ttatgttatatacgtattntagcttgttcaccaatttacattattatgttaaacctttaataaccctaattagccaaaccatcataatttatcatgtaacactaaaccacaactagtgaaccctgtgtagtaagctaaccctaaaccctaattagttaagcaatcataacccctacctagtaaggtagcccaaaaccccattaatcaagtgaccataaaccttagatggtcaagtaaaactaaaccctaattagtcatgtaatcctaaatcctaattagtgaagtagccctaaccccttattagtcaaataactttggcataaaaacactaaaacataaataattatataccatttgaagcttaataaaagacataattatatgaacgtccaatgaaacacgcatatattatcgtattacataacaaccacat

SEQ ID NO: 237035 - DNA, 417 bp, Glycine max
  unsure (1)..(417): unsure at all n locations
agctngagacacacaacaatcagtattttgtactaagcaggaatagccacaaaaaccatgaaggataaacaaaatcctaccttcaagtagatgtctatagctctgtacagaccatcatgatttggtctagcaaaatcaggaatggattgtgacaaatcaacaaaactagagagaccaagattaggatcatgtgcaatttctccaagataaccatccaccaacttgccgacattcaataaagacctacgtgctaaaatatatttatcttctcctccgtgtttctcctcaacaacctccataccacagcttcccttttcgtgattcatatattgattcaaaataccttgtaccaaatgaacatcatatgtggtaatctggagagaccttgctggaatcagtaaatctttgacacaagct

SEQ ID NO: 237036 - DNA, 326 bp, Glycine max
  unsure (1)..(326): unsure at all n locations
gacacttaaaactaagctgattagtttactagacaatcattgctgtttgttttccaggatgctgcatgccatttgaatggtcttatgcaacaaaactgattcggacttttgagaacaggcattgggagctgcagaaagctggaatcgacatagtgtacaagatcagattggaatgtttgtccatctacaaagcggatcccattgttgcggacgacttatacttantctctgtttcctctatgtgatactctatctagatagaaaaccccgacatgctgtaactttataatatatcacaaaggagggtgcacacatttctaacatcc

SEQ ID NO: 237037 - DNA, 199 bp, Glycine max
atgccttcttgtaggcggaatgtttataaatagcatatgtgattgggtctcgaactctcatctttcattttcgaccggaatggacaagtgtcttgctttgttgactgaaacctcacctgtttgatacttgaatcttacactcggtattaaaaccaaactctgccttttcttgtccatgtacaatcccggtattgctacc

SEQ ID NO: 237038 - DNA, 446 bp, Glycine max
  unsure (1)..(446): unsure at all n locations
agcttgncgntaacttcgttggctatatcttaatatatagnagngcaaactttggagacttatttgccaaaagtaggaggcttccaataagatgatgaccttgaccatgtaggcggaatgtaagaggccctcttcctgtattataccttgtgtcaagttggagactgggtgatgtgaatgcaaacattacatcatatgatcgaatgttttgctggaagttcttagcttgagagtcgttagtatcaaagagtagttgcctcaacggttgtggagcatcttgtaacacaagcagttgtatttttccatcaccacaacataatgcaaactntgggtttttggtttgtttgtctttgtaatcctctcatcataccacatcatagctttacagtgtctgcattgccaaacttgatctccaacatcttttgaacctatacgtgtacattaat

SEQ ID NO: 237039 - DNA, 372 bp, Glycine max
  unsure (1)..(372): unsure at all n locations
tanacaatattttgaagacttcttttggatcttggtgttttcacgaaatattgctaaaaaggtaacattgccagagatctacatttcccatcagcctaagaaaaattcatggcaagtgaagcaagttctgactttcttaaaaccatgatttggaagcttctaacaaatattagtgaatacccaaaattatttaaaacttgagaaagagaaaaatcttcaccaatagcaagattctcttgagtctcataatgggctaaaactagatgagcaaaacatgtgctacagaaaaggtgtcagggtattgaaaccatcaagggaaagaaaccgtatgcgagcaaacaacaactgcataagaattttttttgaaaatct

SEQ ID NO: 237040 - DNA, 413 bp, Glycine max
agcttcaacattcaatttcgagcgtctcgatatattacgagactcaatcagacatcagagaaaaacgttattgtcgtttgaatttgctcagagcttcaacattcaatttcgagcatctcgatatgttacgggactcaatcagacatccgagaaaaaagttattgtcgtttgaattagctcagaagttcaacattcaatttcgagcgtctcgatatgttacgggactcaatcatacattcgagaaaaaagttattgtcgtttgaatttgctcagaggttcaacattcaatttcgagcgtctcgatatgttacggggcttaatcagacatccgagtaaaaagttattgtcgtttgaatttgctcagagattcaacattcaatttcgagcgtctcgatatgttacgggactcaatc

SEQ ID NO: 237041 - DNA, 447 bp, Glycine max
ttcagccaattcacccgacaataactttgtactcggatgtctgattgagtcccgtaatataacgagacgctcgaaattgaatgttgaagctctgaactagttcaaacgacaataactttttactcggatgtctgattgagtcccgtaatatatggatacgctcgaaattgaatgttgaatctcagagccaattcaaacgacaataactttttactcggatgtctgattgagtcccgtaatatatcgagacgctcgaaattgattgttgaagctctgagccatttcaaacgacaataactatttactcggatgtctgattgagtcccgtaatatatcaagacgctcgaaattgaatgttgaacctctgagcatattcaaacgacaataacttttttctcggatgtctgattgagtcccgtaatatatcgagaacgctcgaaatgaatg

SEQ ID NO: 237042 - DNA, 442 bp, Glycine max
ctcagctgaaactccaagcaaatgttgttttcaaatgtgttaaaacagctaatgaatagtaagtttgagaataggctatctttaaccaaggttattgaaataagaaggtgtaattatacccaaacttttgctcatgttagtcgtctataaacaatacatattttactatcctttactgctcatcatggtatgatattttgtctatagaaaaaagaattgtattttttctatattttgaacaaggcacaatggtgtgtataaatagggttacaagactgattctatacactaattttgagctataaataaggaaccaaaatccctataattgttgaactatgaaaggaaagaaataatagcgaatcctaattatagttgtacaattagaattgcatgattctgtctaattccacaatcatctaccatatcaaatggacataaa

SEQ ID NO: 237043 - DNA, 453 bp, Glycine max
tactaagctgaactgtggatgtctgtcaacacatgcgcgaataccttttttgtatgatcatgctctccaccgttcgccaaagactatcgatacaagagatccccatgtgcatagatttatagtcgactgcattatactcttcagagccgatcgccaagtagaaccatcgattctattaccaattgctgtgtatttgatgacgggtaaacatcagggaaattttcaccagtggaccatgatgaaccacataagtgatctggacactacactttaacccaaaacattaagactcatgttcatgtgtctttccctcacttatatggtgcttaactttctcattcctactcgatgtcaaacttcacctcacacttatactacaacagtctcccccttaagtgtgagtatcttccacatagtagcctcccccttgagcgagagctattgttaattcac

SEQ ID NO: 237044 - DNA, 431 bp, Glycine max
  unsure (1)..(431): unsure at all n locations
agcttgtataatcttatatagaagtatgatattattttcctgagtggaattntgatgcaatcctcccatggagggggcccatcaccagagtcatggttaagagactccaggaagattgggccagggatgcaagagaatgccttagggttctcatgagccttanggtagcttttgggcccatgggttaagtatgtgcccacttatctntgttcatattagattatggtttcattatttttttgggccttgatttagggcaccacagtgtagggagggtaccccataagtttagggtaccctagtaatgtaggaattttcagcccttgtatttagggctcacagactagttnttgtatcacggatagttttgtaatttcacatgcattaagtgcactatctgatgtgtgtgttgggagagaaaacttattgaa

SEQ ID NO: 237045 - DNA, 468 bp, Glycine max
tctccaagggcatggttatttccagtttcctgaaaatatctatttatcttgtcaaatggcgatccttctccttcttggaaggtacaacaggatatggtactttcgtaccttcattcacaactttttctcttttcttctctctagcttgttcacttctactcctctcttcattcttattttttttcatcttttttcatttttttattttctttttctttttctacttccttttatttttcttggtcatttaatttctttttcttgaccattagttgtttttctttttccctattgctttcacctttcacaacatctttattttcatcagtacctttcttttctgcagctttcttcttggatacatcactatcctcatcctccgcctccacaaacctcttactccttgtcatcacagctttacattcctccttgagattcttttctgtattcgccatgaaactgttggat

SEQ ID NO: 237046 - DNA, 350 bp, Glycine max
  unsure (1)..(350): unsure at all n locations
ctgcggcatgcaagcttgagatgaggaagtgtagaagggtgattcttcttgctntnattcgttaaccacagagaggtacctgcagatatgtctcggtggtcaagacaccttcgggacgtcaccgtgggtgctattgcccataacctatcttgaccaatcccgacccatcccgaggatagtgccgtagacataaactgtgatgtacctaaacaggtgagctcctggcggtcagcggattaatggtacgaagaccgcttagcccagaggcttgcggcggctggtcagctgngaattttgtgtgatatatgggttgtggcctctggtaatcgattaccaagggtgggtaatcg

SEQ ID NO: 237047 - DNA, 373 bp, Glycine max
taagcttgtgtatcgatacacttatatggagtcgatgacctgtgttttgaacgtggattttcaaatctgaaagcgatgagtcgcatgatatcactcacacgctttgtgtaatcgattacacttatgttggtaatcgactaccagcgtttgtttgtgaaaaagctaaagatgtgacgctccataaaggttatgaccatgtcaaatggggtgcaagcctttctagaaagctataactctgctgaatggccttcttgaccagacatgatgagtctatagacgcaacgcgctgctctgtattctaaatcaatctttctaacaacaatcatggatacctgtgcttgtccaatcaatcctttacaagccttgaaataac

SEQ ID NO: 237048 - DNA, 358 bp, Glycine max
  unsure (1)..(358): unsure at all n locations
agcttgatgatatgagtcgttactcttgatttggatcnaaagngggtctaaaaaagaggcgaaatctgatcatcatgnctttgatacaatggccaaaaagactagtggcataatgatagaggggtgagtaatgaggggagaaagtcccatgtgtgtgaactggccattcctatacatgccaagtttcccaccaacccaacaatgtcattactcagccaataacaaaccttctccttacccaccgcccaattattcacaaaagcaatccctaaaattaaccacaaagcctacctaccgcactttcaatgacaaacaccacctttagcgttaaccaaaacaccaaccaagaaatgagatt

SEQ ID NO: 237049 - DNA, 407 bp, Glycine max
  unsure (1)..(407): unsure at all n locations
tcaaaaattattntgatgatgccgtagacatatttttatctttcaagaatgaagaaagcaagatctcaagcataggcataggtctcatgaatagaattaagataggttttagatagactattagaaaagattttgaaaagcacatatgattggccaagagagtttttatcttaagaataatttttccaagcttgttactttctggtaatcgattaccaaaaggctgtaatcgataaccagaagcccaacatttctgacaatggtttttcaaaagtgtaatcgattaccatgagttcgtaatcgattactagtgcttataacgctcaaaatatttgaaaaaccttgtaatcgattacacagaacatgtaatcaattaccagtggctctgaatgttggaaattcaaatt

SEQ ID NO: 237050 - DNA, 361 bp, Glycine max
  unsure (1)..(361): unsure at all n locations
agctntgagaattaagaggaacatgttatattattaaggttatgggtttgcanaggaaaaaagagataatgaagatgaagataaaaaaactcaccctttgtgatgattgttatctggcaatatttttattttattaatgatgttaactttagacggatgaaatgatcattttgaattaatttaaaaagataaaggattaaactgaaaaaaagaagataaaacactaaacaagtcatttggccttattattatttntaatatttattattattatgttaaaagtgaaatataatanttggtttcataatacaatgatttcaagtaaatttattttatttgattatctctaaattttaaaaaa

SEQ ID NO: 237051 - DNA, 447 bp, Glycine max
cactcaacgctggaaaaagagtggaggatatcacttggcgtcttcaactatagaaaagtttattggtgagatatatgctttgcagatacataaattttggagatcaatttcagcataagagacagccctaaagaaaactattttgaatcctgcagaccaacctagaagaatccaaatcacaagagatagcaaaactgaagaatgcactgcaggagatgcagaacaaagttgatgaatccaatgcattgcttataaaggagagagagaatgcaaagaaggccattgaagaagcacctcctgttgttaaagaaattcagggtattgttgaagacactcagaagattgaatcactaacattggaagttgagagtctaaaggtaagaaaattcgggtttacaacatttaatctttggtgggcaaccccaatttcaatcatgcttctatttc

SEQ ID NO: 237052 - DNA, 382 bp, Glycine max
actaagctgtggatacttgcaaaagtaacatgtgttttccttatcatgatatttagcggtactgctgcatgcctccttgcaaaggcctgatacttattgattctctttaattcttaccaaaagaaaatcctttaattctcttacccctacaactgcatcattgaaaacatgtagccatgttggatagaatttatgatccctcggcgaactttgctctttgttttttagtggtgtcttcatcactttaatattatcacctgattatcaaaatggggccttgaatctatatgctatttatgttcttttactaattgcaaccattagtactattgagcccatgatatgtgacttattcgggcgttgaacaaaaaatgtataaaaa

SEQ ID NO: 237053 - DNA, 242 bp, Glycine max
aagttgtctcatctttcagtttttgcatcaattttcctccaaagcacttggaatatacttcttttgaaacttggtgggaaaaaattaacatgacattaaattcctcattatttcattataaacaacacgtatagcaaggaattcttatcaatcataggcaaaattggctatctattaaacctaaattccacaaaatcatgcctataacatagatattttttaatctaaatccatttctattc

SEQ ID NO: 237054 - DNA, 460 bp, Glycine max
  unsure (1)..(460): unsure at all n locations
tcacacacacacacacacactcaagaaatcaaatcaaatctagcatgcaatctgtttacatcctacaaaagcctccataacaccatcctcgattctcaaaccttaaacaccaacagctaaacaacatagcaacccccccagctaaacacatcattccagaagtaagataatgtcataatccacaaacctaagaaaccacaaaacccaaccaagcaacaacaaaacccttccaaaaccaaaaacacctcacaaaacattcacacacaacaaaccaaataaaaaacacaccccccccccccaccaattcacatccaaatgccaaacaaacatgaaccaacaacaccacattgaacatccaacatatccaagccaatacacagccatcaactactacaaaccaaccgatttcacacatgtagtaagataatccagaatcacgtngaaacactaactaccacga

SEQ ID NO: 237055 - DNA, 369 bp, Glycine max
  unsure (1)..(369): unsure at all n locations
agcttgcgccgccagcaccacatcctctgtagtcggtgcgagaataatcgccgccggggaggcacaaatggcagcagctgcgccacgactgataccaacgtttaccatcaccggaaatagggttgccatcagcaaaacacccacaccggttgcggaagagacggccagagacatcagacaggcgacaaaatatgcggcaatcatcagcaggtaaggggagttaatatactgcaatggttttgacgccagcttgaccaccatatcattcgcgccgatatgggtcatgtaagcggcaaatccacacagcatcataatcatcatgccgagggtcgccgcgcggctcattantaatattttaacgtattcaac

SEQ ID NO: 237056 - DNA, 453 bp, Glycine max
  unsure (1)..(453): unsure at all n locations
ntanngaatttttattatttacttgtgggcctgtatactggaaaaattatgctgacattcattgagctccttattgnggttgtggttattgtgggtgtagctcgctacatcattaaagggtattccgccactggtgtgttatttgtcggtggcctgttattgctgattatcagtgccattatggggcacaaagtgttaccgtccatccaggcttcaacaggctacagcgccacggatatcgttgaatacgttaaaatattactaatgagccgcggcggcgacctcggcatgatgattatgatgctgtgtggatttgccgcttacatgacccatatcggcgcgaatgatatggtggtcaagctggcgtcaaaaccattgcagtatattaactccccttacctgctgatgattgccgcctattttgtcgcctgtctgatgtctcttgccgtctct

SEQ ID NO: 237057 - DNA, 426 bp, Glycine max
  unsure (1)..(426): unsure at all n locations
agctagcatgattttaatcttcctctttctcaagcaaanncttcttgatatcatcaaaatcttcatgacctacattctccccctttttgatgatgacaaccacctgtaggttaggagcaacaacaaagaaaatatctatttgcatatagtttactcccncttggttttacaatgattgcttatatgagacaattgaagatttcatatctttcatatataaaaagttgtctcataaaacaatagataatatttcttactattttatcttttatctttctctccccctttgtcaacatcaaaaacaaatcatgaatagagaggagaaagatgttaccactcgttgcaatgtatgagaatcaagtgatatcaaaaggcattaatacaatcattcaatatttatcaagcagaaacaagtacaataacaca

SEQ ID NO: 237058 - DNA, 434 bp, Glycine max
  unsure (1)..(434): unsure at all n locations
acttgatatcaaggctaaaattatggtcacagattgttttttaaaatcctaatatacccattaaacaacttcacttaatattaaataattttaaaatgaaatttagcatatttgactgctttgaaggcttgtggaggggattctacatgaaaatggaggacaaaacctttgtttgttgatccaactattgtgaggtttatataggtgttccatttcttatgcgaataatacattgttattggttggcagtgctgcaatttatatcatgtgatgattgggaaattgaaagatatataatgacatgaggacaagattgcaccaactgagaaaaacaaaaggagatttagtatttggactagaattntggttgtgcctgaatttagtaataacaactatccccattgtacgtgcgaaattatgcaaagttatgattc

SEQ ID NO: 237059 - DNA, 453 bp, Glycine max
  unsure (1)..(453): unsure at all n locations
agcttagccctagaagggatggaccttnttangtctcggagaggatcaataacaatgcttataggttgaacttcccagaagagtatggagtcaacaccacttttaacatttctgatttaattccttttgtaggtgtcataccctaattttatatggggactattgttcattgatcttttgatccttgctagttgacttacggtgtcgaacgctagttatagtgcgaaacaaatgatcattaagtgttttgatcaagaatgcaaaaaataccaaaaaatggggcaaaagggtcttttccttggttttcctggaccctagctcacctaggctagcctctgtctcgcctgggccaccaaatagcttcatgataaagaaaccagttcgcctgggcaaagcttttgcttcaacactaaagtttagctcgcttgggtgagctgcaactaccccaaagtg

SEQ ID NO: 237060 - DNA, 371 bp, Glycine max
tgccacccagctcgcccattcgagctcagcttgcccagtctatcatggttgcttcctccataagcaacagccttctggaggaatcttctggagggcccaagtgggcctggttgctatttgcacccctatttttactaagtacaccccctgcctttttttggtgattcttttttcataaagttacggaaacttacgaatttcgtaacgatacttgttttctttccgtaatgttacggaacctggtggattacataatcatcccttttttgacttacggaatgttacagaacctcactaattgtgtaacgatgcttccatttgatttccggtgtgtcacggaaccttacggattgtgcatcaatattttcttt

SEQ ID NO: 237061 - DNA, 471 bp, Glycine max
  unsure (1)..(471): unsure at all n locations
agcttcggccattaggtgaatccccatgattttntattaaaatattacgtctctagcatgtacactccctcatgcaagagtcctttggatttgaacattgacaatgcataggcctatctagcttgttctgaaattcaaccatttattataagagtgagggaggcaaggatcaaattctagaccaaagtcacagactttgaaaccatgagatgaactaactatcccaataacttaagttatttgatggaaaaacatgagtggcttttttgtattgcatctctaatacaaaacaaaaaaaatcgttattacagacgaaatatttcccacaaaaagtattccatcggaaatgttcggattatcgacggaattgatcaatggacagtttttcggtcgaaaagtataaattacagggcggattttagccatggatttatttctactgggaaattaaaattttaccacataatatgg

SEQ ID NO: 237062 - DNA, 414 bp, Glycine max
  unsure (1)..(414): unsure at all n locations
cgcggagattgttacaaattaagataatgatattcatgtttttttattntattttctataatatactttgtttttcatctgtctctctttttactttgctattacattttgtttttacaaggcaaatgaagatgaagttaaaaagagcacaaaaagtgctataacctatatacagaacacaaccttcaaggactccctgataaatcggccgaaaaggcttctaattaataggattaatacactaatcaaatataattgtacttatatgaccgaaaacccctcgatcatatattagaaagaccctcaaacataaagtcaaatagatgtcggtgctttgaaaacataactatccaaacaaaggttgaagaatctgagttatgctaatttaatcattatatcaaaagctgttatcac

SEQ ID NO: 237063 - DNA, 362 bp, Glycine max
  unsure (1)..(362): unsure at all n locations
gagaaacacaaattgattattggttgaaataatgaaggataacaaaatatgatgtaatgattgtgaagtgatgccttatgaatgtttaatcaacccaaataggataaatgattctagatggacatgtgatggattatgcctctgaaagatgaaattgaaaatgcgtttaaaagttaagaagcttaatgctggcatttcaaaagtgtcaaggaccagctctagagaaatctaaagttgttgttaggtgaaaaggctcanggttgtgaatggttttgacatttaacaagctccctcatgtaaagcagtatgagctggagatgtggacaatgcacacaagctcacctatcttgcatttgaaattc

SEQ ID NO: 237064 - DNA, 463 bp, Glycine max
ctagcttagcaaaggccaattatgagtgtatagcagttcattgagaatgtggcctggcctggagcccgaccttcttttgtgggggataatgaaagttttacagcccaggcacctcaacagcatgagccagaaccagaaaacgatcactcatctgaagccaccatccctagagttgttgattttgcaaaaagaagattagagacgagatccaatgaggctgctcatcctggaccaatgccagcatcagctgatgcaccatttccaggagtagatccatcttcacctcagcacgcaacagactcttccactcctgtcttagagatacatgagggccagaccataccagtcctgactgtggacacttctcctccagctactccagtatgacatctaatagatgatgaggatgttcagatacaagacaaccaggaccagtcacaggaattgtgattcctgatgatac

SEQ ID NO: 237065 - DNA, 417 bp, Glycine max
  unsure (1)..(417): unsure at all n locations
agatttctttgactatgaactctcattaaatgaatntcctcttagggaaaggcaaactctaaaggggggaaaatgttcatttgtgttcacttccaaattaacaagggtgtgcctttgattttgaagggttgaaaataaaattgatactaagaaattgtgttaatatccactggtttatatatgaatgattaaggtggaacacgtacaatggtatatctttctttccatttaattttggagggtttttagatttaatagctattagatacaggttaaaacatttcattttttaaagtgaaaattcattgagtgtgcagcgtgtgtaaagttaaaatgaagctaaatcttgctatatttctgagggaggctgaaagacttatggatattgtttactaaagtgacattttactgtcttgt

SEQ ID NO: 237066 - DNA, 304 bp, Glycine max
ctaagctttatagataagtaccataatgtttacatcgttcaagcattcaaatttaaagtaccatagtacacaacataaactagtacatactgaatataaattagtcatatccaactacacatcctaataacaaaataaaacaagaaatgggtcttcacttttcttcatttttatattggatctttatcagcaaccttccttctagtgaaccttggcgctaacatgaaaagtaagggtgttgttggtgggtcatccacaacaggtgcatctactattgaagtgtctaaaatgttctttttgtttg

SEQ ID NO: 237067 - DNA, 412 bp, Glycine max
  unsure (1)..(412): unsure at all n locations
agcttanaccaccgaacacaaaatcatttgtccaaaacccctcaattcaatggctgttctaagctngaaaggcggactctaaaatgaggtaaatttggagcaaactctcacctcacacaagtctataacatcaatctaaacttgctcaaactggatttacacctaaatttccaccgaatcaaaatttgactcctcaacacccaattttgccctagaaatggctcttggttcactttggtcatttgtttttctctctagctcagcctaacctttctcacatgtcctaaatgaacattcaagctattattaactcactctaacctccatttaccacagaattcagacttagccttccaactctcanagtctcactctttttcactcataacatcacattctcactttctaacct

SEQ ID NO: 237068 - DNA, 446 bp, Glycine max
  unsure (1)..(446): unsure at all n locations
tccggccagttctctactgtatgatggtgtgtgcttatttaatgtacngtatcgctcatacttgttatcacattatgtatcctttatttgaggcaaaatacagtaacttttatactacaatcttatgctatagcaagagacaatttagaactactaagaagcatttccttgtgtataaaagttttcacaagcacagggtttattaatggcctgtctctggtccaactccagtccatatctcgattatctattcttaacctatgttatcaatagggcactatagtggtggagcatagtagccggtggccactatttgggcactgtagggttgcagcttaatgtcatggctctttcaaccgctatatcaacatagattcacgccctgtcacatgcaatttggccaagactgtgaactctctctaaaatttttaaaatggccgaaaatc

SEQ ID NO: 237069 - DNA, 449 bp, Glycine max
  unsure (1)..(449): unsure at all n locations
agcttccatcatgttgttattagagcacattatcttcaagtaggtgctccttaaacctccattaattttttttgctttaccttctcttccattgttgtttcttcatttttctccattgtatctcctcacatgtcttgtgctaaatgttgttaacatgattctttaaaatttccaccgattgatcttgctatagaagctagatttcattttctatggttcaaatttcttgttcatgttcttgaaccatgagttgtgttgagtttaggtgagttttgtcttgctattttttgtggctgaaccctaaaccataaaattcttacaaactaaagtagaagaaaacctcacaaatctttagtgacttgttcacctattgtagttttgtcatagaagtcatgtctagtcatgaaactngtcacataagatttctttatgtgtgcctgaatttattt

SEQ ID NO: 237070 - DNA, 443 bp, Glycine max
cttgtatgttgcacaaatgcatgtataatattattaacattaaggcaaattattctagaagtcccatctataaaccaaatgcaaagatcataactactcatgttactccaagaatcaattaacaagtgatcgtccagacctaacaactattttggaggcttcattggttaatttgttgactcaattgatttatgtttaaaataatttttagatgggattttctaatacaattgagatgtttaaaatttgatgacaatgggattttctaatacaattgagatgtttaaaattaaatttaaaatttatcattttctttattagaaaaaaatgtaataacaaaaaaaaaatgcatacacacaagtacaacaaagtcatttcattcacctttttctttctcctgcttttcagggttaatcaataggaaaaaaaaataatgcattata

SEQ ID NO: 237071 - DNA, 413 bp, Glycine max
  unsure (1)..(413): unsure at all n locations
tctgatattaatctttcattgtatataatatgtaaataaaaagaaaagggatgtcagtttgttagttttagtcagctactgttgtttcttggctgttaggttattgggtagctgtctataataaggcaggtctgtcgtattttagagagaccaaatgataatcacatagtgcagagcatatttccttgagctctttgtttctcttcccttctatcctctctattccttttcttctctctttgcctctttctttctctgncattctgtttctttctctctcccacctaaatcctataacagttggtattcagagctggctgtctacggccactagaccagaatcttttcattcatgggcacagaaataagatcacagacagtgatgcgtgaaatggaagaaagaattgtcaaat

SEQ ID NO: 237072 - DNA, 452 bp, Glycine max
  unsure (1)..(452): unsure at all n locations
tcacaaagagaatcatcttgatatgantaacttggaagttctcttacaaggctatgcttttgaagctttgagattaacctcaagctagcatgaccaagcttcttatgtcaaacccaataatgctctttgactgagagtaggcatgaaacttttggactagacagatcaccaagtttaatcttatacagatttccttgtctcttagcctagaagagtgaagagttttccttgttctcaatgatacacatatccttgttaaaagtgacattgtatccactatcacataatttacttatgctaagcaaattatgcttcaaccctttaacaagcaaaacattatctatagaaggataaggaggaatacatactttacctacaccaattatcagacctttctgattccgttcgaaagtgaccaccctactagacatagggcttanggattgaaacat

SEQ ID NO: 237073 - DNA, 473 bp, Glycine max
  unsure (1)..(473): unsure at all n locations
agctngntcttganttttcctcagttcttttactatctttgaacaatatacttgtccttcatttaactatctttgggctgggcagccacgctcaacaaagtactttcgacacctaatgtacgttgatttcaccaatgctgttatgggaatgttgcgacaatcctttaaaaccttattgatacattctgagaggttcgttgtcatgtggccatatcgacgtccttctctatcgtaagtcatcgtccatttttcctttgaaatgcgatcaatccatgttgctatggctggactcagttcacgaaatttttctaaattttgatcaaaaatgtgtttgcaaggagtgtaggctgcataaaattagttatgaataacaactttaagtataaatgaaagttaaataaacgtgaccatcaaatatgaaatcttaccccaattcttcaacatttcttttttgtttggcattattgaaattt

SEQ ID NO: 237074 - DNA, 400 bp, Glycine max
tgtacggatgtaagagacatcttcttcgatcttggtgatccttgactccatctcattgaatcgcatgtccacttgtaactccaaagtatcaaaccttacaccaataaaggtttgaagaccattaaacctgtccaaaatcttttgaagaagagaggaatcttctccaccatgtaagtgtccttcttcatcaatggtttgagcaccctttttcacccaagatccatcatgctctttactgtaaccaaaggatgcaatcactgcagcgcctattagaaaggatctcttgattgtaacataaggttcagaatcaagagggatgttgaagtgttgaagaaagaaggtgactatgtgtggatatggcaatggagcatttaatcgcaatgccttatgcatgcgatat

SEQ ID NO: 237075 - DNA, 378 bp, Glycine max
  unsure (1)..(378): unsure at all n locations
agctngcattnnggtaaactaatagataatttactataatagccngncaagnagatttaagagtaaattatattgtattttcttaaaaataatattgcagcatgttatattcctctttcaaaccctcattcactccaacagtttctcaattgtcgaaatcctaattttttttcttatagatttgaatgtgactaacttatattngatcctcattttttttatacatttgaatgttacttaattgntatgactctatctctcttttggcaggtattaactcatgactatcttatattaagaagataaagatactgtagttacgctacttttttaataaactttttacttatgacacaacattcttcatatgggagaaaa

SEQ ID NO: 237076 - DNA, 446 bp, Glycine max
tactaagttatgcatatggaaatgagagaatctttttttttaagtgccattgttaagcacttgtgttcttcttttgtccaacgcgtgtattcgttgtgacgaactgaccaggatgaatcttgagattaagggaaagaatcttgagaggcagtaataatgtccaagagctcatcgtagaaggatgcaatctttcatctttgtccttcaaccactcttgtatctcctcatcgcagtagaaagagtgatcatcatggaactctgacattctttcttttcgctttgtggctttctggaattctattagtgatcactcccaagactccttcacattattagcatggtgaatttttaaatttataattgtattttggaaaattcttaaaattgtgagagagagaatgccattggttgaattcttatgataaaaaggatttatgtataaatct

SEQ ID NO: 237077 - DNA, 381 bp, Glycine max
  unsure (1)..(381): unsure at all n locations
ggttaatcaacgaatggagaatgaatatatacacatcaccattaaaaatagtgactaaagaatggtcttttcttcccctttttttggttaaactacgaattattatatttaaaataatgtaagttattggtacattaaaaaaacaaaaaaatgtaattatcttataatattcgtttaatgtcagtgggaatctatatctgatngagaatatcaataaatacagtagattatgattctcagtagctattntttgattttcaaagagagcaatttttgtggtgcttatttgtttctttgatccctcattttcctttttaacatatgaaattggaagactattattaactattatatttaatttatgttgacaaatttgcttgt

SEQ ID NO: 237078 - DNA, 461 bp, Glycine max
  unsure (1)..(461): unsure at all n locations
acacattcttctatcaccttgtgttcctcctcttttagtttctcatggngattaagtaagactcgatcaagagaagaatgagtatgcaaatggattctagcatcttcttttatctcatcaagcatatctacctggaagcaaccactcatatcatttgggtgatccctagcatcaaataaattgaaagtaatctcctcattctgaatgaagagcttgaattctcctttgccaacattaattataggatgttagtgaacatgaaaggttctcccaaaatgatgggaatgtcagaatcttctgccatgtccatgatgacaaaatttgcagaaaaataaatttgcctactgtaacatgcatattgtctactatgacatagtggtgcttgatggaacgacctgcaagatgcattgtcatgcatgttggcttcaccttaacaacgttaacttgttccaacatatata

SEQ ID NO: 237079 - DNA, 473 bp, Glycine max
  unsure (1)..(473): unsure at all n locations
actaagcttcanacaacttatgtaattgattacaataagtgtggattctattataaatagagaattttccttttgaagaaacttttctaactttagaaatttttcttctcactcatgatgatgcatgatgcataaaagatatgatatggactaagaagtaacattcaatataaccaccaattcaaatgccactcatgggagttggatatgtaaaatacaaaacatctttaagcttttctccaagcttcaagctttagtcttcatgttgtttatgttgcttccactatctctaatagatttttctaagctaatgcaaacaaaattcaaaataagcatgatgggagagcttaaattcttccttgtgctacaaataaagcaaacaagttgtggatttacattcatcaaaccaagatgtgaaagaacttctaatatagtcaacatgaatgatgcaaaagagatgaagacacttatgc

SEQ ID NO: 237080 - DNA, 453 bp, Glycine max
agcttcttcacatagttcgacttttcttgttcttctttatgcttaaaaacagaaacattaggcataggcaaaagatcaagaggagttagtgggttaaaaccatacacaacttcaaaaggagaacaattagtggtgctatgaacagctctattgtaagcaaattcaacatggggtaaacaagcttcccaagtttttaaggtcttcctcaaaactgtcctaagcaaagttcccaaagtcctattaacaacttccgtttgcccatcggtttgtgggtacaagtggttgaaaataacaatttagtgcccaacttgctccacaaagtccttccaaaatggcttaggaacttagagtccctatcactaacaatgctccttggcaaaccatggagtctcacaatctccttgaaaaaaaatcagcacatgggaagcatatcaattttttacatggaataaa

SEQ ID NO: 237081 - DNA, 370 bp, Glycine max
gcattcggacacttaaaactcagctgtctacatggcggattgccggggcagtttgtttccagttcgattagtctacgcacccaaatgcgataaagaagcgccttgcagattatttggctcatcacctctcaacgactatcagcccatgcatcccgaagcccggtgatgacatatgccttgttgatgaaagctatacaggaccgggacaagggatcggtggttgatggacgtcaaagttctagccatgggttggacaatattggtctttcgacaataatgttacctttacatgcggctggggttgactgcccaacataggctgatatgaatggtgcttggcgccagcacgattgctcatgtcactactaag

SEQ ID NO: 237082 - DNA, 417 bp, Glycine max
agcttcttcagagagtttctgattctgcactcgcaacccactattctcttctgacaagtgaacttgccctagctttagcttttcattttcaatttcctgaaagtagggaagagaagtgtcaatttagtacataatgcaacactgaagccttgaatgacttataatatcaaccctaaaagcggatttcattaataactattgataaaaggcggaggtacaaaaatcatataaacgaaggaaagagaaacaaacagaaaccaaatgaatggaattaaaaaacatataaaccattcaaatgtgctacttcaaaagcaacaaattcccagttacctgggattggattttctttttcatgtcatcaatgtgttctcctgatgcacactgttcagaagacactgacgatgtaccactggtaac

SEQ ID NO: 237083 - DNA, 443 bp, Glycine max
  unsure (1)..(443): unsure at all n locations
acactcaagctntgatggtgtcgagaagaaatcacatgtttgtcttcatcttaaagggggagtatgtgaatgtatgtatacatgatgtttatgatgtcaaagaagaatctaacaaggctgcttcaaatgataagcatttgcttcaagaataattcaagattgcttcaacaaacaaagccttgtcttaagattcactaaagaccaagccttgccttataacaaagtgctttcaagacatgcaaggctctggtaatcgattaccaggaagtgtaatcgattaccagataacagggttgagaaatagctgttgaaaaaggttttgaatttgaattttcaacatgtaatcgattactagcaacgaaactttggaaattcaaattcaaaagtcataacccttcaaattataactgttgtatcgattacacatacattgtgatcgatca

SEQ ID NO: 237084 - DNA, 436 bp, Glycine max
  unsure (1)..(436): unsure at all n locations
agctngcctcctctaccattgaagttccactctaaaggcaaccaaggaagcttgaaacaaacattactctcctaccttatcctcgtctctttatctcacggatcacacctaagtacagagaatgaatgttggntctttctttctttcttatcttatatgattgatggtaaatttctaaatttttgctttgatttcttattatatgttctttaactttcattttttttacttgatattggtttgtaatatttgttttcttaattctcaatggtgtttgataattttcccctaaggagagagactatggacactttttctcatgaatgctngattaaaaatcacacactgacaaacttcttttaaagcattgagtcacttgaagtaaatggaaccagannatattgttttttcttcttcccaccctctctaaagctca

SEQ ID NO: 237085 - DNA, 453 bp, Glycine max
  unsure (1)..(453): unsure at all n locations
taagctccttcaactgcacaaggctggtatgttttcttcttatgtcanggttagcattattttgaaaattgtgactaaatttcgacagcatttcgcattggtctccaagtacacaacatgacatcggtgaaattaatttctcgataatcaagtatgcactcaaagaacaacttgaaatgcattgtaccgaaatttcatcaaattaatcaaaataataataaccttaacgaatgaatctaacataaaaataccagtctccccaaactgtccaaacggacaattaaagactaaatacaatgactaatgcaaattgtccgctagaattattgcattcagtctcatacgggaatctaaggtgcactcatcatgaagacaatttgtatagcatatattagttggcattaatggaagtgaacaagtaanaataataattggtagcaaacatttgtatat

SEQ ID NO: 237086 - DNA, 454 bp, Glycine max
  unsure (1)..(454): unsure at all n locations
agcttccacttgtatatgtcatcagtaatagtatgctntctgttntccttcccgtggatgtagccttactcaaggtgaaccacgtaaattctgtgtgtgtgctctttctcatatctctctccctttcattttgctgcaatctgcgtgtgtgacatanctctttgttgtttctggtgctgctgttcttgcttgttcttcatcacttccataacatcatactgtcttctacggataaggatatgaagctgatcttagatattttctgggaatttgaatagcttatatgtcaaggaaatgttaccgtttctgatgcaacctggactatgaggaacatggagaacataacaacaaagtgaaccacatcagacccagtaggaccatcagaaagcctacctgcttcanggattttatttgaaccactatcccatccgcaataaagatgtttcattctgta

SEQ ID NO: 237087 - DNA, 410 bp, Glycine max
  unsure (1)..(410): unsure at all n locations
taattagctcatttaaatgagttaagtacttatgtgttgtcaacctttctttntcaggagccaagcttgaacttcaagtgctcaacttggctagatagacttgtttgcacctttactaatagacaactaatcagaaaattaaattcacatacaggaatacaatcattagtactaatgtattggtaacagacacacctcacttctgcatttaaccttgtagactgcttctctgaatgatgagacaaagctgttattaattctgatctgccaaaaaagggcaagggaaatgaaaagtattagttgtgaaatttagaggtgagaataagaacagaaccaacctgtgcatgatgaagatctggctcaatgtgtttcctaaataatggaaaaatgctatctataaggtaatccag

SEQ ID NO: 237088 - DNA, 446 bp, Glycine max
  unsure (1)..(446): unsure at all n locations
agcttaagcatagattgtaatgataccgatcttgttgacatcatagcatacccaagtcaaagcctttgtgaataaatttgtaagttggtcaatgcttaacaccaaagaacaaaacgcagagaacactagggagcataaacatgaaaacattatcttaatgggttcctaaatgcataatcaatgtattaagttgttacacaattttcccagatcaattcatagttagaagtcaatttctcattaaaatgatgataatgtaatagcgatgacaaagaatagatggtcaaatattcttaaaattatagaatttggttntatcacaattaactagtataataggattctattttatatacatttcctgttattntaccatgtttacaaacatgtgtatttcaatgatntcaaatcagtacttcgacaanaatatcataagtgtgaattat

SEQ ID NO: 237089 - DNA, 422 bp, Glycine max
  unsure (1)..(422): unsure at all n locations
tcgtcgctgcaaaatttcttccttcaggggtagtgagattggctgatactggttgaataatgacattgtgtaggtggtgggaaacttgaccgcataggaatggcagacatagcatgggtttctccctccttctcatactgtttatttgccccagttttctcattcgtccaagcaggataattaaatacgcctctttatagacccactccgatctacgaaaactaatttagcaaagcttgaaggtgcgtagcccaccatcttttcatagtagaacacatggaacgtgtctactatcattgagataatctctttctcgggtattaagggcgccacttgagcttgcatatccctccaccttcgggcatattccttgaaagattcatgctcgactntgcacatgttctatagttgcatcctatccg

SEQ ID NO: 237090 - DNA, 239 bp, Glycine max
agctgtggtcttgttctcacatgtacgcgtttatcactgacaagacacactcaccagttgcatgcactctgctccacagaaatatgaactaaggaatcgcttgcagcgctccttaaacgcatagtgtgatctcataagacactcactcttttggtgctaagcacaaccatgacatggtggatcggcgatcatactcctatgaatgactcgactacaaaaagcattgattgtcctttatc

SEQ ID NO: 237091 - DNA, 444 bp, Glycine max
  unsure (1)..(444): unsure at all n locations
tgtgaacaacctaacatgattagtgtatgnagtaatactttctaacattgtacgtaacacataaatatgtataaattttctgtaaaacttagaaattatgcaaagaaaattgtgtcttaattagtcccggcccattcattgtttcatgatctaatggggtttataacttagtacgtatcaaagacgtacacgtgagtagaacggcaatacaggtcattcaaaggggagaatttgacaacatggtttgataaaaaacaatggaaactatatcaattaaagacacaaggaagcagcctaggaaaagagtaaatgtatatatgaacacggtctgacccaccgatcagcagctcatcaaacaatatccatctttttcttcttcacggtcttgcagtcgtacatgaccattctccttcgcgaatatatatatatattcttttgctttga

SEQ ID NO: 237092 - DNA, 428 bp, Glycine max
agcgttttcgattcattctatgtacccgtggtggtccacattgtggttcgtgtatttttattctcggtttatttactttttatacctccttttgacgtgcttaagccattttatttaagtcatttctcgcttaacctaaaaataaaataaatttccaccgatcgtttgaattgtattatccgttaacttcggttaaaatgaattccgaccgttcggtcgtgccgtaaccacgttggaaatcaaaaagaggtaaaataataatataataatcaaaaaatataccttttagtaaaataaagcggaaactaatcgaacgtttctctttgggattctcattcttatcgaattgactataactaaagtgagactatgctaaatcactcgcctagtcagctcgccataaaataggtttttgaagttttcatttc

SEQ ID NO: 237093 - DNA, 458 bp, Glycine max
tcaagccaaggcgagattcttgtgcttgtagaggcttcttctgaaaaaatgccaaactcccacaaaaaatcgtatttcaagcttaaatagatgggttggtccatacttgcatgcttagcgcaaatctgaatcgcatagcgcacataagtggattttggcttatcacggctctctcgcttagtggatgagttgaagtggtgcgcttgatgacctgtagcgatgcactcatcgaacctgaaaactcatcttcttctggattcttccttgtgcttagccattgagtgtcgtgcttagcgaatgctcgctaagccagtagattggcttatcgagaaggtgaaaacaacacttttgccaatttgcctaattaaccagaaattgagagaaattgattattaaacacacaaaacaaaagtataaattatctattacctatatttaacagaaagtacgtataatat

SEQ ID NO: 237094 - DNA, 456 bp, Glycine max
  unsure (1)..(456): unsure at all n locations
agctnggcaaaattactgtatagggtttcttttaaaaacaatttacgaaacagggtctgtttcgaaacaaattacaataggggtcttttatttacgttgattccgccattcctactggcgacaagcatgtatcgccattggcagcagcggcatgaaggcggtatcgccagtagcacgagcgagataggtgctgactgggcaagaaggtggtatcgccagtagcacccgggcattccgccagtggcaccaacgagaccatcacgcacgcgccaggcaccttcttcacgtccttcttcacgtcttgcatagcttctggcttacacacagcttatgccactgttgtttgcaggaaaggttacatccaggctagggttctattcatttgcaggttagggctctgctcattgcatgtanggcatggcatggtagngtcacatggatacagttcattcacat

SEQ ID NO: 237095 - DNA, 451 bp, Glycine max
  unsure (1)..(451): unsure at all n locations
tcatctatgtttcttggtttaatctaagaaacaaaagccatgttattgcataaaatcctgagtctagagctagtagaaactgcctttgatatttcaccaataatgttgtccaaagataggtcttcttgtgttctccattttcttgggagatctttangaggtgtggtagtaatttgtttgctttgttcaagctcttcaactttggtttcatcttcaagagcaatatccttatcctgaaaaactacatcttcatcttccaaagaattttcttgaacaatagaattagtttcatcacatacaacatgtacagattcttccacccattaagttctcttattaatcactctatatgttttgctttgcaatgaataaccaagaaaaatagtctcattggcttttgcataaattgtccaagagattctgtaccattatttaaaacataacatttaca

SEQ ID NO: 237096 - DNA, 413 bp, Glycine max
  unsure (1)..(413): unsure at all n locations
ctattatataactacataattaagcttgttagccgaaactctcttttagngttactatcttatattttattattgattaaaatttattaaaaaaatacaaatcatcgataatgaaactagctggttaaataaggagggggcataatttttggtgattttcaattaactaaaatcaataatagagagtattttaaaaaaacaacttataaaatatgtatcataatattctccaagttacgaattatgctctgatgcattatatagatatagatatttatgaatacttgatacaaagacacatatagatatcttaatgaaatattgtgaaatgcgagatgaacagggtcctagacaaagatgcatttataaccccacaagactgcatattacacgacggacctgcgtatatactt

SEQ ID NO: 237097 - DNA, 458 bp, Glycine max
gtcacctgcggcatgcaagcttagtggaagaagtccgctaatctgctcctattatagaagaaaagagaagaaggaacagacacatggtaattccaagagaatataattccttataccaggcatatgctaaaagaaggataactaagcattgggagtcattccttccctccattccccttcttatcttttccccctttactaaatattcccctcttgcaattgtaaaacctccatcgacatgagaggctaatacccctttgttgggaactaggcagccaactactcttgatgcaatttctcttcctatatatctatgaatattacatttgcattatcttttcatgtgcttaatattattggttgtgacttaatcacccatttgcatgtgtaagtttaggggtagcattgagaaacgctattttctaatagaatcggtgcaaaccctaattcatccggga

SEQ ID NO: 237098 - DNA, 436 bp, Glycine max
cttgtccctcttatcatctacgctgaaccacatgtccatgtatgcttttccacacgacgatgatgctccatcacgatgatgatgatgaccccattcatcaattgtcaaagacacattgtgaaacatggctagtagggttgttgtttcttgttgaagagagaccaaagttgagagcttttgattgttgtggaagagtgaggcgttgaaggaagcgtagttgatgctcccttcaaaagggtttgtggtttccacgaagaaactcacacccaagttggctgtgaagttgttttgtgtgatgttgagaactgaagcggtggttgagtgcatagtgaatgcaggggtgaggggaatgaagaacaaggcaattgataacgtgatgaacaagatcatccattcgccgacaaatgcatacaaagtggtggtggtggtggtggtg

SEQ ID NO: 237099 - DNA, 459 bp, Glycine max
  unsure (1)..(459): unsure at all n locations
cttatagtcacctgcggcatgcaagctntgagcaaattcaaacgacagaaacttnttactctgatgncngattgagncccgcaatatatcgagacgctcgaaattgaatacagaagctctaagcaaattcaaacgacaataactttttactcggatgtctgattgagtcatgtaatatttcgagacgctcgaaattgaatactgaagctctgagcaaattcaaacgacaataactctttactcggatgtctgattgagtcccataatttatcgacaagctcgaaatagaatcttgatgctctgagcatattcaaacgacaatacctttttactcggatgtctgattgagtcccgtaatatatcgagacgctcgatattgaatacggaagctctgagcaaattcaaacgacaataacgttntactcggatgtttgattgagtcccataatatatcgacac

SEQ ID NO: 237100 - DNA, 451 bp, Glycine max
tcctctaccggtgataaaacattgtctgccagcgcttgtttatttttctcgcaatgtcggctgaaaaacatcagttggggctgtttaactaccgatgctggctactgttttttctattccacccctgaataatacttggacgatgtcgatttggaaatgttcgatcggggtcatccggtcatgcttctttttaagacctcgatctgtcatcttttactggccgacgtcggctagcatttttttcgatcaatatcggtgaatcatgctttttgccaaggtgggctaacgttttcgtggctgatgaaatgagagcatgccagtgtctgccgaaacacaatgtcgcacgataaaccctagccgacctacattgtatattgtgtatgcaataccgaacagcaaaacttcgtctaccataaagaaatattatcgaccaatgtttgtaataaaattc

SEQ ID NO: 237101 - DNA, 329 bp, Glycine max
agcttaaccggatgtaagatacatcttcttcatccttagtcattcttgactccatttcattgaagcgcatatccacttgcagttccaaagtatcaaacctctcaccaacaaaggtttgaagaccattaaacctttccaaaatctttgaaagaagatatgaatcttctccctcgtgtccttcttcaccaatatttctagcacccttctttacccatgatccatcatgctccttaatataaccaaaggatgctatgactgaagcgcctataaggaatgatctcttgattggaacataaggttcagaatcaagagggatgttgaaatgttga

SEQ ID NO: 237102 - DNA, 247 bp, Glycine max
tccatctgtcggcaccgaattggtttatcattccagcttcatctagctttcttgttgagataatgtttaaacgtatctcaagcacatgtcttacttccttcagcacaagcttgcttccattttcagttatcagagtcaccttccatatgccaacaatctatcttgtgacatggttgcccatgttcactgtaccaaaatcccctttttgatatgacgagaaaaatccttcacgaggagtaacatggaa

SEQ ID NO: 237103 - DNA, 438 bp, Glycine max
  unsure (1)..(438): unsure at all n locations
agcttaggaacccaaacgttgtaagcttctttgcaaganaatatactcatgactagggacccaaaatttggttttagaattagaaaagcatgaaaatagggacttgtttgtaagaatttgggctgccccatgtttgatactttacatagaggtagcgtggaagaagccttgcaatagtatgtgtacataggtaaatataaggagcatgaaattcctagcaaagtgtgaatgattgtcttcctaaatgaatgtatggtagcacggaattcccttttgaatgcaagtgtgtgcataatgtaaatagcttgccaatatgaataaatgtgaatgaaacaataaaaaaatgttaggtagtttgtgatagcaaaatgtttaagatatataataggtgtaaagntcgacgcaacactctgagcatgaaagtgtgttttctttttc

SEQ ID NO: 237104 - DNA, 435 bp, Glycine max
cccatgaataaaatattatcgaatctagatgagataaaataagagcgagatgagataatatccagacgagatcaaatctaaataatatctagatgagatgaagtctagataagataagattttgtagaataaaatagtctgccctcttcaagtccaatgcccaattctggattcaagcccaatgcttcattaattcctaaaattagatgaagaacatcaaattagcttaatgggcccaaataataaaacttcctaattaatgtgacaattaagactaatcagtacttaaaatggtgcaaaaagggttaagatataggagaaaataatggcacatcagaaccccccatacttagccttttgcactcctgggcaaaatgaaataaaaaacaacatccaaggatatgcaagagagataaacaaaaacatttacatatt

SEQ ID NO: 237105 - DNA, 424 bp, Glycine max
  unsure (1)..(424): unsure at all n locations
agctnggttcccaacgctctgttcaagctctctccaaaatctaaaggtaaatctaggatctctatcagatactatgctagatggcacaccatgtaacctgacaacctcacttatatacaaggtggtaaacttctccaaggaaaatctgatattaatgggaatgaagtgagcagacttattcaatctgtcaacaataacccagatagaatctaaacctctaggggttctaggtagtcctaccacaaaatccatggaaatactgtcccacttccactgnggtatctctaagggttgtaacttcccttaaggtctctgatgttctatcttagccttctgacagactangcatgcatacacaaactcactaacctctctcttcatgttgnggccaccaaaaatcatctttatatcttgatacatcttg

SEQ ID NO: 237106 - DNA, 427 bp, Glycine max
  unsure (1)..(427): unsure at all n locations
tttaatctacgcttgttaccaagtttaggagttcaatattctcttttattaaaatttcagccagcaattcattcaccataactcaaattcacaatagacacaatcataaggaaacctaaaagttcaagaaatggatcacaatcaaagactctctaagaattttgcatgaacatgttaagaactaattaacatgaaagatttgactcaaatcaaataataggataaaagaatttcatacactcatgaacaaatgagttagacaaagaaacaagaaaaataaaattcagcacaacataagaaatcttatgtgacaagtttcatgactagacatgacttctatgacaaaactacaatatgtgaacaagtcactctatatttttgaggttntcttctactttaatgtttttgtaagaattttatgggttat

SEQ ID NO: 237107 - DNA, 356 bp, Glycine max
  unsure (1)..(356): unsure at all n locations
agcttgcacgatattggtaaggaaaagattatatggaagattaagagccccttaccaaagcttttatggaagaaacctcaagagcacttgtatgaagcttgtaagaagaaagaaatagactcatctctcctttggttgagcttgtgcaaaatggagaagaaagagctccaatttgttttttaaagagacatgatgatgaggtttaaggcttaagttgacaagcttaattgacaacatgaatgactaataaccagcccatggttaacgtgccaagccatgcaattttagtgcattatgccttttgaaattttaagcaaaaatggctaaagtaggtntataaccaaaaatgggaaatt

SEQ ID NO: 237108 - DNA, 430 bp, Glycine max
  unsure (1)..(430): unsure at all n locations
taagaaaaagcttaacaaacttagaaatcaagtgatcatgtattccgcaatatagggggagaaaaacggatgcacattttatctatatacaattgtttgttgcttgcttgaatcttgatttcaggtattgtattgtcatcatcaaaaagggggagattgtagatgcaattggctttgatgttttgatgatgatcatgatgatgtgttgcaattgatgcaaatgggcttttcaagattaaaattcaagacaatacttcaagattacaaggcacaacatcaagatgatcactagaatattaggaagggaattcctaattgaattagcaaaggtttggccaagtgatttaaaataaaaagtgtttttcaaaggttntactctctggtaatcgattaccagaggatgtaatcgattaccagtggccaaatacgt

SEQ ID NO: 237109 - DNA, 458 bp, Glycine max
  unsure (1)..(458): unsure at all n locations
agctngagaagctgtttggacaaattgatcttatactaggagacatcatcaatgaacacaaagaggcaaagtcaaaagccaaagaaggcaacggcaaagcagaggaagatctgttagctgttctccttaaatacgaggagggtaatgctagtaaccagggatttagcttaactattaacaatatcaaggcagttacctcggtaaggataacaaccacatttgttaatccattcttttatgaacatagctcatttctatgacactttggtcttgtttgaataaatttctttataagcacaaaaaaaaggtacataagttgattttagcttatagagaagttaaatataatttatcttattntcttctcttaaaaatgtttaagagatctatgtcttgactcttgatagtattggccttcagttggaggtctttgttttatttggttaagttggatattc

SEQ ID NO: 237110 - DNA, 383 bp, Glycine max
  unsure (1)..(383): unsure at all n locations
tatgtttccttcatgagtntattgtcaatatagtagtttttacattaatcaatcagaaatcatgttaggtatgacttttaaagagttattgtaaaagtcaacaaacatactatgcatggtgatttctgattagttgacaaagtaaaagcaaaatttaagttgaattagtaattttgcagaggggtgtttatgatggtcttgtagatgcattcctganaatagttagagaggaaggtgcaggagaactttacagaggccttactccgagtctgattggagtaattccatattctgccaccaattactttgcctatgacaccttgaggaaagcatacagaaaaattttcaagaaagagaagaatggaacattgaaacccttttga

SEQ ID NO: 237111 - DNA, 359 bp, Glycine max
  unsure (1)..(359): unsure at all n locations
agcttggatttccttttattgggaatctatccttcctaagatggagccaaacccagtcaccctcattaagaactagctcttttcttcctctattgcctttagttgaatacacctttgtttggttctctatttggttcttaaccctctcatgcatcttctttacaaattctgacctagattccccttctttatgtataaaagaagtgtccagtgggaggggaatgaggtctaacggtgttaggggattgaacccatatacaacctcaaaaggggactgcttggtggttctatgaacccccctgttgtaggcaaattctacatgaggaagatactcatcccaagacttatggntgcctttc

SEQ ID NO: 237112 - DNA, 434 bp, Glycine max
  unsure (1)..(434): unsure at all n locations
tgtaggattatggngtacccatcacatgtggtactatgtggcggtcgggcgatggtgcacaacatgttttccacatccacaaagcgcgcataaacccaccatcccctgttgcccacctccaactgagctcacgtactcccacgtagcccatatcctcgtttctctcaacaccgggtccccatcaatcctcccaagcttccccaacatcaaagtaatacaaaattcaaacagcacaagctatcacagccaagcaaaacagggaaaaggcagaaaactctgcccaaaacaccaaccaaaatcacagcttttcacataccaataccccagaaacatttccttcgttccaattcgttaaccgttggatcgactcgaaaattttactggaaatctctagtacataagcctacattttgaccggtgggatctactataaa

SEQ ID NO: 237113 - DNA, 313 bp, Glycine max
agcttcaataacatatagccactgacccgtttgcagcccactcaaaaatgcatcaacttcttcatcaacaagtcatccatgacatgtgcgtgtcttccctgcaacgacaattaccaaacatcaccattaaaagaaattacatggaacccgcgacctttcttcaacagtacacgaaccagttaacctaaaacaaggttaaaataagcttaacctagcaaaattagtaattgactaaccaatctctatcttcacgaaacttggagccgagaagttggagcgatgaagtcgaagaggtgaaggagcttcaatggaa

SEQ ID NO: 237114 - DNA, 251 bp, Glycine max
gattgcaactctatgtattctcacttgacagtaaatatgtaagcattgtacaatatgcttataagaatgtacacttgtgggtgctgggtatatgatccatgcagaatttaagatgaaaccgcacttttcttcaaaacgaaatttgacgaaccaaattgggacagaccgatgctggatgggggcagattcaattctattgatcagtaacacagtgaactgttggttgctcaatttgaaaacgagaaagtgat

SEQ ID NO: 237115 - DNA, 471 bp, Glycine max
  unsure (1)..(471): unsure at all n locations
atcctctgagtcacctgcggcatcaagctacattctactatagaatattctgtgtctagngaaaaattctataagctctagatgttaggctatacccgataaatatgtcagacttcgctcttttgcccaacttgtctcacttaacctatggtacattagtaaaacacaaacaactgacaactttcagattttttaattgtggcttaaagccataccaggcctcaaaaggagtgttcccatcaactgtttttgtgggaagtctgttcaacaaaaatactgtagtatttgctacctctgcccaatgttctttgggaagttccttcacatgaagcagacatctagtcatttccattatgggtggaaccatcatttcttaacttcctttaaataaataaagacaataagataggtcatcaattcactcattatttaaataacgtttaacctagacaactttacaaaacacattct

SEQ ID NO: 237116 - DNA, 472 bp, Glycine max
  unsure (1)..(472): unsure at all n locations
tgtaattacttataagccaagacttataaaattacatttatcatttcccgctccctctcgtccatgcccgagacaagacattagagtgagaacaaatattgacaacctagtggcaacccttatgcatgaaaaataggcaatccactaatagatttagcgtaagctctgatatgatttttgaatgtaggtataagaactaattcaacatcataaaaccaatttgtaccgtgagaactgtgcaaacgttataagaactacatttgatttatttctagtccatgtgaaatctcaattaccatttattccttatcctgcctacatatcttttttggtatgtaatgcttcctccagctntggtgtctgcaggagttgaatctagcaaagccaaagaaagttaacttgttcctgatttttcttgcagcatgcactttcatagataattagatatatgtgctaaatttttttcgttcac

SEQ ID NO: 237117 - DNA, 313 bp, Glycine max
  unsure (1)..(313): unsure at all n locations
agctntatatcacgcaccaccgtgcgcgcgtggcgtttattgaggatgaanaactgcgaccccacgcggaaggaggagaagggtacttctgggagcatcgcgtgttcgccacgcgcggtgtagcggtcgaagaggttgggttcgttggagagaatctcaatgaagcttttatgtgggtgagtggggtttttgaagagaaagttgtgagtgaattgaagggagtgaagagggatgcactgttgggagagaagggcgaagtattggttgagggggtcgtctaagagggcggcggctaggatgcggctggcggcgg

SEQ ID NO: 237118 - DNA, 457 bp, Glycine max
  unsure (1)..(457): unsure at all n locations
aagcttctaacaaggtatctctattattcacgacgatgtttattcttctgggctataataataaatttttttggttgtgcaaatagttaaacttattggtaatgcctgttactgaactaaatagaaacaaaattttttaagctgagatctgcaggagcaatagtggccttagattttgaatctgtgaaagatggtgatttaactgtaatgtcaaatggagctcctaagaggactttcaagtttgatgttgtctttggtccccaagctgagcaaggtattgatgctttcatgccatgaattctttaaaaaatccccaacctgagaacaagattttgcaaatccaatccagctttactattgttctttgctggagctatggcaaccttgttacattcggagtcaatgcgcttatactcttggtggtgggacagncacattagcccaaagaattcaaaat

SEQ ID NO: 237119 - DNA, 475 bp, Glycine max
  unsure (1)..(475): unsure at all n locations
gaccttaagtcacctgcggcatgcaagcttcaagaaaaagatggcctcagcaaactccttatttccagaagggaattctatcaatagacctccaatctttaatggagagggttaccactactggaaaacccgaatgcaaatttttatagaggcaatagacctataatattgtgaagccatagaaatagggccttatatacccaccacagtagaaagaagtacaatagatggtagttcatcaagtgaaagcattacaatagaaaaacctagagatagatgatctgaagaggatagaaaatgagtacaatacaatttaaaagccaaaaacataataacatctgccctgngaatggatgaatatttcacggtttcaaattgtaagagtgctaaagaaatgtgggacactcttcgataacacatgaaggactacagatgttaaagatctaggaaaatgcctaactcatgagatgaacta

SEQ ID NO: 237120 - DNA, 381 bp, Glycine max
  unsure (1)..(381): unsure at all n locations
nnttgaaagtgtntgttttcaccttctcgctaagccaatctgctggcttatcgagcattcgctaagcgcaaggaagattctggaagaagatgagttgtacaggttcgctaagcgcaccacttcatctcactaagcgcatcgctttattccatccgttaagcgagaaaggcacgcactaagccaaaattcactaatgtgcgctaagcggtccataattgcgctaagctcacgagcacgaacaaggccacctatttaagccagaaattagattttgtgaagggagtttgggttgggatttaaagctttgcatgtctagagattctagagagagaaagacccaagttccagtgagttttgagagaatttgttgtgtgaagatct

SEQ ID NO: 237121 - DNA, 456 bp, Glycine max
  unsure (1)..(456): unsure at all n locations
ttaagtcacctgcggcatgcaagcttattgcgntattagtttagaatttatttatgttcatatttctatttacctaagtataagttatttgtaaatccttattgtaaacatatttgttntattttgatagggtcatgggaacaccaccaccgtcacccccgcagtcagatgttcggtcagagggtatgtctaggaatacgagataatccacatgactcaaacggttgactttaagaaccttggatcagcccagaccaattgtcactattaatgctactactgggcgaggatcgggcccacataaatagaagtttcacagctatttatgggtcttatccagagaaaaaattccaattgtacataacacctggaaagatgtaccggacgcgctaaaagacctagtatgggatgacattctggtaagtgacgtcattgttaagcagtgtatttttgtat

SEQ ID NO: 237122 - DNA, 423 bp, Glycine max
  unsure (1)..(423): unsure at all n locations
tgagtatgtttcaaggggttgcaaataagctgccaacatcatgtgttcccaccatagaggttgatatacatattctatgggggactatcataacaccacagatcatgcctagatgttgtagtacggtgaacctcatgcacaaactgacagatgcaacattggagatcattgaggctatggcttctaatgcttataatggcattagagaaatggatcaaaaaaggatcttagagaaaactgtgagtgcgtctcanaaaaattggtcattgaagttggacgctacactctgggattacaaaacaacctttaagactcccattgggatgtctccatttaagctattgtataggatgaactatcattgtcctggtgaattgaaacacaaagccatgtgggctctgaaatttctataacttgattatg

SEQ ID NO: 237123 - DNA, 238 bp, Glycine max
ggctgcaacattcaacttcgagcatgtcgttatatttttcgactcaattagacatccgagtaaaaagatattgtcggttgaatttgctcaaagcttcaacactcaatttccagcgtctcgatatatgacgggactcaatcaaacatctgagtaaaaagatattgtctcgccaattggctgagagcttctacattcaatgtcgagcgtctcgatatgtgacgggactcaatcaggcatc

SEQ ID NO: 237124 - DNA, 303 bp, Glycine max
ttccgtaatatatcgagacgctcggaattgaatgttgaaggtctgagcaaattcaaacgacaataactttttactcggatgtctaatttagtcgtataatataacgagacgctcgaatttgaatgttgaagctctgagcaaattcaaacgacaataacattgtactcggatgtctgattgaatcccgtagtatatcgagacactcgtaattgaatattgaaactctgagccaattcaaacgacaataactctctactcagatgtctgatatagtcccgttatatatcgagacactcgtaattg

SEQ ID NO: 237125 - DNA, 463 bp, Glycine max
agcttctagccaaatagacttaccttgaattatattccttgatagcccctttgagccttgtttccctttccgtgttttgaagctcactacaagccttaagtgaaaaaccatgatatcaccatatccttaaggaattttggagctttggaattgttttgggaataagtatggggggtttttgtttcattggacaacttgttttgttggctatgcttcatgatgtattttgggccatacttgatgtacattgtatattggttaaattttggacatgctgaatgaaatgttgtttctcataggccatagagtaaaaaaaaaaaaatattcgaaatataaaaaatcgaacaaagaacaagaaaagcactcaagttgagtgaataagatcttaaatggcacaagaatgagtgaaactctgggtctactcttcaatgttaattttatacttacttcttttcatttctta

SEQ ID NO: 237126 - DNA, 434 bp, Glycine max
acttgctgatttagttttcgccgatgaaaggatcgtattgttgtctaaaaagacgcaaatctgatcatcatgctttgataaatacaaaaaaactagggcaaatgaagatggtgagaataagggagaaacccatgttgtgactgccattcctatacagccaagtttcccaccaacccaacaatgtcattactcatccaataacaaaccttctccttacccaccacccagttatccataaaggccatccctaaatcaaccacaaagcctgtctaccgcacttccaatgacgaacaccacctttatcacataccaaaacaccaaccaagaaatgaattttgcagcgaaaaagcctgtataattcaccgcaattccggtgtcctatgctgacttgctcccatatctacttgataattcaatggtagccataaccccag

SEQ ID NO: 237127 - DNA, 467 bp, Glycine max
  unsure (1)..(467): unsure at all n locations
actcagctgatatgtatattctcaccaccagaacaagtgatgtcgttatcnacnacttantggatacgacatgacttgcagcggtaacctctgtcattcacggaaaatttacatttgatattaaactatactatatgattttactcctccaaaactcttacccttagttgctacactcgtagtggagaatagatagatttataactatgacgcaagagctgacatcaccaagtttatcatgagacacgctattcgcaattagttggacctggtctaacgcatgctctatttattatagaaaggtgtacgtgtatatatataccgtcaacaatggtaatgttccacatacttcattaatgatgcattgggggcttccttaatcattctagagactacttttaagacaatgatgtgagtttgataatgtgctatgtacatactgactatctcaaaatatatatagatat

SEQ ID NO: 237128 - DNA, 306 bp, Glycine max
cacccttgcttgcatcctgataaattgaggcaatctaggggatatatataatggccagctgattcatggtcttgtacctaagcctggtctggtacctgttgttgcttcacagacttcatctcttaccatgtattctagatggaacatgatcgaggattctataagagcagtcaatcagcttgaatatgcaaatcacgcgacctgcacatctttcgtactgggtctcgtgccaaatgccgataggatgctgctgtgccactattcagggaaaagatctcgcgttcaatatgtacaaattctttcaca

SEQ ID NO: 237129 - DNA, 454 bp, Glycine max
  unsure (1)..(454): unsure at all n locations
tcaagcttgtcccaccagcccaataacattctggattgtgtctngtgnttcctgcatcttaattcgaaatgtaatttacattctggattatattttagaaagactaatttgtaatgtaaaattaaatgttgaattaagctttttcggaaggttaaaagggtacttgaaacaattgtcccacatcttgtgttaagtgggttcttatattaataaatttattttgttgaaaaattttaaatgaatatattgttgtaattaaaagttcataaacaaacagaaaatttaagtgttaagataattgaaatataaaatagatttaaattataagatttggaaattgtatttaactatattatatactcaattagtatttttatttaaaatcttaggaaaatgttagtcttttaatgaaaacttaaaataattaatgtttgaattctctaaagtgaataat

SEQ ID NO: 237130 - DNA, 413 bp, Glycine max
  unsure (1)..(413): unsure at all n locations
agcttgttaattgatgtcatagataacttgtcattgggaggaaaaaataaaacaaagaacacttaagcttcataatggaaatttcctaataccataaatttattgaagaaagtagaaagcagagagcttcttcccactctaagtttcaagattacgactggtttagtttataataaatcaattgcagatgtggccaaagtggaaatccttgtcattctcaaatctcactatacaaaaccgagagattaggtatatattatattaagattaaagctaaagcttctttaaccaccataactgtgatatntattgggctagtgcagttaattatcaccgactgcagcatgctggcttagtaagtgtacaactntcgctaaatgaacgtgatcatcgcaaggatgtttctattaata

SEQ ID NO: 237131 - DNA, 463 bp, Glycine max
  unsure (1)..(463): unsure at all n locations
ttttcacctgagtacagtgttatattcaaagccagttctttccaggaagggcaacttcttcttttaaataaacttttcatgcaacaatatatataaggggtgtttggtttggctattttttgtttttatttttactgaaaatagaaaatggtgatagaaatgcgtttggttggatttttaaaaacattttcagtgaaaatattttttcaaacgaaccataatctggaaacaataaaatctcgttttcagttgaaactaggaacctcattttggataaaatgaaaacgcaatggtaagaaatataattttaagcaaatctaaaaatatgttttcttttgaaaacgcattttcagtttttatttcttaatagaagaaaaaatgaaatcaaacaaaacatgttttcagaattttaatattttgaaaatganaacaatgttcagaaaataaaaataaaaaattaaaa

SEQ ID NO: 237132 - DNA, 384 bp, Glycine max
  unsure (1)..(384): unsure at all n locations
agcttgtcagtattgtgtatgttaatccattttgaggcgccggcnagacagccaaaatttcaagctgaaacagatatttcacaatccacttatgcaatacttcgatttgacaggaaagtacacatactaaagcatgaaatcaaatacttaaggcacgccgtttaaagaggctgtgaaagttaatcatcatcctcgagaacacttctacgcctctggttcttgaaaggcacataatggcaggtaatataatacttccgataatatgaatagaaaatgtaacaaatgttctacaacttactggaacatttgtctgcctctgtgtttgggtgtttatctgtcccagcaaggatatgatccttctctcagaaacctaaatatgccatt

SEQ ID NO: 237133 - DNA, 392 bp, Glycine max
acttgcacaaaggtctgaaagtcctttttactatgcaaattttggatcacatcgaacatttctaacataattttgaagttgatgttgcaccaccacttccggcacatctacaaaatcatttggataaagttcaaccatcctcaacaattttttcacatcaaaagcttcaaatgatgatgagggactcaaacataaaacatattgtaaaagttcagtattatcttcatcaaaactatcattgcgctcatgcaactgcaaatccaaaacactaaataaataatcatgcttataatgtgcaaatcagaaacactagaagtgatagcatgtcgtctaaggttctttccttgcacatacagtgcatccaaataatgcacatcaatatcatgcttatt

SEQ ID NO: 237134 - DNA, 389 bp, Glycine max
  unsure (1)..(389): unsure at all n locations
agcttaagctaaattaggctaaactttcattagctatttaagctaagtctagtccaacaagagggatctgaggatgaagcttantttaagttagtctaaacctaggagggctgtctaaattgagcctattccaacaagagggatctaaggacgaagcttggattgattcagtctaactagggatcgaggtttagtaacttaggctacaacatagaacacgaaagtatgattgattagagaaatactgagaaaagctgctttagtgctaacactgagaaaaatccaaaggaagaatttaaagctgtcatgacaaggagcagaatggcaacccatgtggatgaaagaaaagctgagaagaagatggaggaaaataaacaatagctggcagc

SEQ ID NO: 237135 - DNA, 360 bp, Glycine max
tccaattcttcttcaattccacacttaatttcaagctatatctatttttggagcctatgaacctacctctatatcaagggaccttcaattccaggtatgggtggacttctcctcacttgaaatctgagggtgttgggttcttgggagctataatgggtagttctactaggttatcgcatttaggtagttgtttgtgaaggaaattgttgtaaatcatgctaaaacttgatatgtttaatttaagcaaactgcccatgttgattgatggttaaataatgatgttttgatgtatatgtatgcttaaaatgcagttagtaaactggtagagaagattggtagagttagcttagagttaaatat

SEQ ID NO: 237136 - DNA, 455 bp, Glycine max
ctgcaagcttagattctaccctaagttaaattcctttcagttaagagacggacagtctcttaattacaactgagtttttgaaatgtacagaaagatttctcttctttaaagtagataatacaaattgaaggttttaaaagaattcttaatagatttacaaatatttgaccaatttgttttgagagaatttttacaattaaattctctaaggatattctttatatcttctaattaaagacatacatatatataaacctttttgtggctgttcaaaaataatttgaaaagatgtttttttgagattctttcactagtaatgaattactttcctgctaatcaattactgaaaactttgtaattacacaattcattagttaatgattgaaattcattcttccagtcatgatgctgatatgacaaaacagaatcgtaagtcaccctgcgttcatggcata

SEQ ID NO: 237137 - DNA, 457 bp, Glycine max
  unsure (1)..(457): unsure at all n locations
tatgctgtntaagcagccaactaatcgatagtagaaaacttcggctgttcttcgtatttttggcaagtagaaagcttaggatacaaaattgtgaaaagaaaaaagataaaaagatgtcccgaaatgctattttattagatgaatgattttttttttttctctaaacacacgaactcatgaagcacaagcacagctcagcatcttgtgtttgaatgtgtgtatagtgacattattttgttacgggggaagggttaacagatgaactttgcgatatttttttcttcttattggggttgtccgataaaatggtaattttaaaaccatcccttcaaactttaagaacatgaagtaatgatcttttaagaaattattgaatcttttatttttttaaatttaatttaaagacaatattgtattttatcatttaattgtaaaaaataaaaatattgttcatata

SEQ ID NO: 237138 - DNA, 469 bp, Glycine max
  unsure (1)..(469): unsure at all n locations
agcttgcttcaaatctcgccactgttttcttgccttactactttntaaataatcgtgaatcatctaagtaactgcactaggcccttgaattntaacttttgatttcttctcttttgacatcttgttcgaaacttctttnttgatatatataagatcttcctaacaacattatttgaatcaaaaaccacactttcgatcttatactacttttcttcttttagccactcacatttctattgaattttgataaatagtaaaaggtctccccttttatatattaaatgacaatcaaaccaaatataattaaaatcaattatctttaaaaactcttgaatgacctcaacaactccttattgcaatttcataacaatatcttcatttgctcctcattcgntaaaagttaatctcaattgtcaatagcttgtatcttgcaacaattcttaatttgtaacaactaaacaagcaatta

SEQ ID NO: 237139 - DNA, 408 bp, Glycine max
tatcacgaagaatgcccacgaagaagcccataggcatgcttatcgcatatcccgtgctaacctcatgatcaccgccatacttgctaagctcaaaaggcccggttagtgcgaggtcgcgtgaattttaagctacctaatgaagacatccaaagcctgaggatctctcataggggaaaacctcttgttttagccattctcccttcttcctttatccatccctcttcttcttccatccacattagtcccttaagtgtatagcctctcatggcaatgagaggctaaaccctcattgttgggagcctaacaaccaatgcccttgtagtgtaacttgtccttactatctattaaatgcaatgccaatttttattggttctttcctgcgctttattggattggatgctctaatca

SEQ ID NO: 237140 - DNA, 458 bp, Glycine max
  unsure (1)..(458): unsure at all n locations
agctngtccanaagcttcttagtttattctatatcatctntagatgtgtaaattgctcagntgtgcaccacttatatataaaaggcactgcgcatgcaaatgatggattttgagagaaattngacaaaactacaaatgtattagtgtaatttacatagacaaatctaataccaaaagtcaacagaacattcaaatagcatttagcaaaatgacttctctttatttttagaacaatttacaatcatataatagtatttagctatttctctttgtactatttggaaaaagttgactcggtataacaaatatctatgccctttaattttaacactcgagtgtctgtggaccatccaagtgaggactctttagaacgggtaggcctcttacccttcttaatcacattcaatgaataggcaatattcctttggatcatatacactangtcacatggagagagc

SEQ ID NO: 237141 - DNA, 475 bp, Glycine max
  unsure (1)..(475): unsure at all n locations
ctctcatactattcatcataacaaaaaacttctcgacgcanataaaattatacattattcaacagtgtcattcatgtatcaaaaaatagttcagatggggcaagacgaaaattgtatccaaccacttgtgcatttttataattataataataacccttaatcagtgtgaagaagaaaactagtacagtagcatagattccttttgtcatttgaatccaacaggttatgcatatctaataatggaggaaaataatcccaaccacaaatgcatatgtaataaatccaacaagctatgctcgaagtgcaccaatccatatatgaataacgtgaaaccattaccaccatgaacataaacttccttagtactctaacttaagtaaacccttttggcatatttaacgatgacattgntagggcaactcaacaagtcgataatcacattttaaaagtctgacttaagtaaacccttaatact

SEQ ID NO: 237142 - DNA, 407 bp, Glycine max
  unsure (1)..(407): unsure at all n locations
agcttgacaaatcaaagtagaaaatgaaatgtcggtccacaataaatgaaagtgaaaaaaagagttctttattgcagagataaaacagagtcttattacagataaaataataaaacatacatggtgaaaatgacatatataaggaaaatactttgtaaatgataacattgaactaaacttcaactggaaaatcatattcataattggtagtttgcaaatgataccattattagttgcaagagagtatgccgtatcttataatttaaatgaggcagttgcagtgggtaaacaattgaaatgctgaatctgtttgtttgacactttntatttgattggtaatctacattactaataatggctaccattattagttgcaagagagtatgccatatcttatatattaaatg

SEQ ID NO: 237143 - DNA, 398 bp, Glycine max
tgaccatgaatgttagaaaaatattctctgatgctgaccaggctctttttgatgaatgcttgaagagattccaagaagaagaaatcaatgatagggagaagcaagagaagcgagaatccatatggaaacaactggaagatgttgctgcagctaatgctgtaagcaatgaggccatccttgtctcaagatttgtgtcctctgttgcaattgctaccagtgctaatcaattggcaactgcaggtggttgagagccatcagagatccaaattgtttgttctgaccccatgatgaggaacaaaggtgaatggggggttgatgtggataccagactgctccttgtttctgggactttttatctcatcatttgttctggaatcatgggttgtactatgtaccat

SEQ ID NO: 237144 - DNA, 294 bp, Glycine max
  unsure (1)..(294): unsure at all n locations
agctgtaacctcatcgtttctcacagnctttatatnngggagccaatccaatcctagtggtcggactctcagccacttatgatagccaccgatgatcccattactgcttcccctaagctctctgtactttcttgatgccgcatcccatgccttgcatactccttggagtaccctcgcattgtggtcactaaaaccccgtgcgatgaaaggcgtgatgctttcgtctaatggcgctcctctcatggcgtagccaagctgtcttatggcgagaacgggattataattaatacaacc

SEQ ID NO: 237145 - DNA, 426 bp, Glycine max
gtggaaggatgcttcaatggttgattttaagagggagtttatgagagaggggggagcacgaaattgaaggaagataaaaagggagagaagttgaactctgagttgtgtctcacaagactctcattcatcaaagttacaacaagtgttacacatgcttctatttatagactaggtagcttccttgagaagctttcttgaaaaaacttccttgagaagcttctttgagaaaacttacttgagaagctagagcttatctacacacacccctctcataactaaactcacctccttgagatgcttgcctaacaagattcctaaagaaactagagcttatctacatatacctctctaatagctaatctcacctccttgagatgagaagctataatttatctacacaccccgtattattcttatctcacccct

SEQ ID NO: 237146 - DNA, 444 bp, Glycine max
  unsure (1)..(444): unsure at all n locations
agcttatgagtcataaaatataggccagtagtttactttctggagggaggaataaaactgtaaagcagagataatctgtaatgatgtgtttgtcattatataaaatttaagaccattttgttaggccaataaccttaataacaatgtatgtatgttgatacattagcatgttattgtgttggcacaggtgctcccttggactttttttgtcaacgatgttttatgttgcctctatatctggaattgtctatctgtacacatcatatgcctcaagaacttcatgttctctcaatatatttttcatcacatggacagtaattctacttgcagcaatgatggttatatccttaaattcaaaggtacactgctttgattactttgtgcagctagtggtgtttttaatagtttacagtgacaggatannaactgactttcatgttctta

SEQ ID NO: 237147 - DNA, 473 bp, Glycine max
taaagaaacactcaaactgagtgtatttacccccattgcctagactccgaataatctattatgacctcaccttcttgattcaagtccaacccctaaaataacttttgcatgtagacactactcatgaattatgcaatacccacgaccttacacatgttttcaaacatgtttaacacattgtgctacaatttaatacttcaagttcctaacttggaaccctacactttccttttaacacctcacgcataaaacacttttctcaaagtaaacaccattcgggttattgtataattcataactcacaacacaagcaatatcacaccaagtattaatcacacacttattcacaatcatatcacaatgtcacaatccaccatcacatgttcacatgtatcccacatattaatacatactcaatctcaatcacaatttcataatcccaaaatgatatgtcattacgcctcatgtttatt

SEQ ID NO: 237148 - DNA, 437 bp, Glycine max
  unsure (1)..(437): unsure at all n locations
ttgtcacccaatgttgtgacccttgttgagcaagtatttttctccaacacttcttcctttttccaaaggtttgttgagaccttgagttactacactgctatgtttgagtccatagatgtggccctccccagagatgataagcaaaggatcaatgcagaacaacactgcgtggctcgcgacatcagcaacatggtagctcgtgagggggatgagaggctggaaaggcatgaactcttatggaagtggaggtcaagattttcaatggctggttttgcaccatgccctttgagttcctcagtcacagctgcggttaggaatatgttgaatgaattcaatgaaaattatacgcttcaacatagagatggcgctctttatctatgatggtngagtagagctatgtgtacctcttctgcttggagatgtaccgactcattgtc

SEQ ID NO: 237149 - DNA, 355 bp, Glycine max
agcttgagatgaggaagtgttgaaaggtgaaacttcctgcttttattgttgaccacagagtggtacctggagatatgtcgcgggggtcaagagaccttggggacgtcaggtggggtgctattgcccaaaaccaagcttgaccaatcccgacccaacctgggcatagtcggtcagtgagaacctgtgatgtacctaagcaggcgagctcctggcagtcaacagataaaaggaacaaagaccacacagcaaggaggcttgtggtggctggccagctgtgaaacttgattgatatgtgagatatggtctctggtaatcaattaccaagggtgggtaattgattacaccgcttaaaatt

SEQ ID NO: 237150 - DNA, 412 bp, Glycine max
  unsure (1)..(412): unsure at all n locations
tctgcaatgcgtacganaagattgtagacttgaccatttcagagatatccatggaagccgttgtatcactcacccaatactatgaccagcctttgagatgcttcacgtttggagacttccaattagtaccgactgttgaagaatttgaggagattctaggatgtcctcttgggggaaggaaaccgtatcttttctccgggtttcttccctccttgagcaagattgtagttgtggtcagggattcggcgagaggattggatcgcgtaaagcaaactcgaaacggcatagtgggcctaccacagaagtacatagaatgcaaggcaagggatatgacgaatcgagatgagtgggtcccgtttttggacgtattatcattgctaatctttggggttgtcctctttcaaacatggat

SEQ ID NO: 237151 - DNA, 358 bp, Glycine max
aagcaaacataatccataaaggatgctgaaaagggcagaagaggaagaaagccaccacaaatataaaggcatcatatgctactatactctgcgtgtgaatcatacctgatggtgaagaaccacctgattgtaaccctgatcagtacatcaatagtttatttaccagaggaagctgtgccccatcttttcgtactcccaacagattttggctgctcaacaccacacaacatacatgcatatgttattaactactactaagtaaaaatctagaagatgacaacatgtaccatcaaaagaatgttcaaaatgatgaaagatctacatcgccatctgttttgtctattgcgccattaaggtg

SEQ ID NO: 237152 - DNA, 461 bp, Glycine max
agcttcaacaaattagctattgggtgtaatttataaataaaaaatagctaatggttaactagctgaaaactcattttagcatattgaaaaactcatctcattctcttctcctagaagtacttctaaagaagcttagccaaacagatcctatgaagggaaaagggacataggcttaacctgtttgaactcatcattggagctatagcgataaccacttccacacccaactcctccataaggcactgacgcgaagaacggagaatcaccaagaatgcagccatcacgatgacatcattgtttttttgtttcgtttgtttctgaccccctttactgtccctacttatcattaatgatgaagtttgattgcatcatgggaactactataaagaagaaaggttgtctttctcgtatagtcggtatctcaatcttgttttcattcttagaattacacaaaccatact

SEQ ID NO: 237153 - DNA, 429 bp, Glycine max
tgttcgcacatcgttcgtgtgtactatatccactcgactttgtttgaagtagaggagaccttcaatcctatcacgcaacgtggcggacaaaaatgggcagttaacttgaatggccattattgtcaatgcggaaggtattctgtgcttcactatccatgttcacacattattgcagcttgtggttacgtgagcatgaactactaccaatatatagatgttgtttacaccaatgaacacatcttataagcatactccgcacagtggtggcctcttgggaatgaagcggcaattcctccttctgatgaggcatggacactaatccctgacccaactacaattcgtgcgaaaggtcggccaaaatcaacaaggataaggaatgaaatggattgggtcgaaccatctgaacaccgaccaaaatgtaatatatgt

SEQ ID NO: 237154 - DNA, 395 bp, Glycine max
agcttgtaagacaaccacaaagaagattgattccagttatgaaggaaaaagtgcagaaggaagtacttaaattgctagaagcaggcctcatttatcccatttcagatagtgcttgggttagtctcgtgcaggtggttcccaagaaaggaggcatgacggtaatcaggaatgagaaaaatgatttaattcccacaagaaccgtcactagctagaggatgtgtattgattatagaaaattgaatgatgccaccagaaaagatcactacccacttcccttcatggatcaaatggttgaaaggctggcagaacaatcattctattgctttttagatggatactctggctacaatcagattgttgtggatccaaatgaccaagaaaagacaacattcact

SEQ ID NO: 237155 - DNA, 449 bp, Glycine max
  unsure (1)..(449): unsure at all n locations
nttgagtgaaacaatgtgtctcttcacatttaaatttgtatttcaacgttcaaggacactggtaatcgattaccaaaacattgtaatcgattatagccttttgaaaatatttggaacgttgtaaattcagtttgaaaactttttcaaactcttttagctactggtaatcgattacaacaatatggtaatcgattaccagagagtaaaagctctttggtaaagattgtgtcaaaaactcgtgtgctattcaacgtttgaaaaaacctttttaatacttatattgattgagtcttttcttcattctcgaatcttgattcttgaatcttgatcttgattcttgagatcttgagtcttgattcttgattcttaatcttgatctttgattcttgagatcttgaatcttgaatcttgatacttttttgaaagctntcttcttgagtcttgaattc

SEQ ID NO: 237156 - DNA, 348 bp, Glycine max
  unsure (1)..(348): unsure at all n locations
agctnagggcctaggagagaaggaggcatttataatcttcggaatattcatacattccttgcactacttgccctttatcttacgcactcagctttcatacatgaatttatatcattcacacatgataactttatttatacttacagtttttattttgaccactgagaacagaaccaatgggtttatacgatattctgtgataatttcaatcttacccagggccctccccaaatttggaacacatttaccctgatactacctcccccaaatttgggagaagattgccttgaaccatctattgtggatgattctctcctacaacctaaaataaggtggcagaagatacaa

SEQ ID NO: 237157 - DNA, 405 bp, Glycine max
tcttgctcgtggagcttctatggaggccggagctgtgagcattattgatgttctttaatggtgactttccaccatggagatgcagcggaagacaactgacatgatgtgagaggacgcgccatccactacggcaataaccatggaagaatgagcttcaccaaccgatatgagcattggataacaaacttggaacgatgctccaatggaggaaaagaccgaaggacagaaagacagagggcggagcacgatattgaaggaataaaagagggagagaagtcgaactttgagttgtgtctcacaagactctcattcatcaatagtacaacaagtgttacacatgcttctattatatactaggtatctttcttgagaagctatcttgagaatacctgcttgaaaagcttc

SEQ ID NO: 237158 - DNA, 311 bp, Glycine max
  unsure (1)..(311): unsure at all n locations
atgacttgagaaacaaaggtgatccaataacaaacagaaattaaaaggtactaggttgtctccaagtaacgcttctttaaccgcttgagctagacgcgtgatgactctgtcggcacgaacctagaacttttgctcacctttggctttggactttggcgcctgctggtcggccacaggtcgtaggcaacgctccaaccttngtagatgagctaaggggctctggaggtggcggcggtgcgtctattgcccactatcggccaaccccaggctgctatggtgtctcgccctgcgcctgcctgggggcgcaatac

SEQ ID NO: 237159 - DNA, 377 bp, Glycine max
  unsure (1)..(377): unsure at all n locations
agcaccgcagctcagctgggctacacagaacgattattanttttngcaacgagacacactcatatgacttccttaaaaaaaaaccaccttatggcttggaatcctgacaatcatcgcacacttggcttctgttgctactattcaaaacgaccagatcgattgggaattgaaggagaaaggcatatatttaaatcttgtcgcccatttggtatgaatgtgagagggaagcatgactaaaaaagaacggggggcccactgtcgcactaattgtccattttaggagagataaaagagaaggaaaagcgttttattgtagcaaaatacacaaatatccttacctcattggatactctttttttaattaggatggtgctatc

SEQ ID NO: 237160 - DNA, 365 bp, Glycine max
  unsure (1)..(365): unsure at all n locations
agctttggaaagggttgttttcaccttctcgctatgtctatctganggcttancgagcgtctgctaagtgcaacattcctgggctaagcgcaaggaagaatccataagaagatgagttgtacaagttcgctaagtgcaccgcttcatcttactaagcgcaccacttcagttcatctgctaagcgagaaaagcgggctaagccaaaaatcactaacgtgcgctaagcggtccataagtgcgctaagcacacgagcacaaacaaggccacctagttaagcctgaaatcagattttgtgaagggagtttggactaggattcagagctttgcatgtctagggtttctagagagagaaagtccaagttct

SEQ ID NO: 237161 - DNA, 422 bp, Glycine max
  unsure (1)..(422): unsure at all n locations
tattcttanaggactcgctntcccgttagatatgtggtgtagttgagtccggccgggagccatgtcagagttgtactgatactgcctaaggaaggcggtaatcagatccttcccaatgcggatgcgggaagcttctggattagtgtaccagatgaccgctgccccagccaggctatcttggaagaaatgcatcaataacttctcgtccctggaatacgcacccatcttgcgtcaatacatttttaggagattctttgggcaagtcgtccctttgtacctattgaagtcgggtactttgaacttcggagggatgacgacgtccggtaccaggcataggtcggtcatgtctgcgaacggataatcactgaacccttcaacaacccttaatctttcttcaatgagatcaagttttcccatttctt

SEQ ID NO: 237162 - DNA, 357 bp, Glycine max
  unsure (1)..(357): unsure at all n locations
agtcacctgcggccatgcaagcttcaaanttactagaataagaaaactgtttcattattcttaannaaaacngaaagctaaaaacatcaactgaaagtaaaatgtatcaaaagcagaagaaataaatccaaatcctgtcatggctcgtcttgtgtcgggtgggcttatctacaagtgaggagggatcatcctgggctggctgaggaatatcctaagctgtaacaggccatgggtcccaggtgctctgtgctgcagtcatatcagctgcataatccgcatcagcagcaccatcctcctcctcagagacctccaaaataggtgaagtaactgtggaagcctgtggagtagcctctgtag

SEQ ID NO: 237163 - DNA, 305 bp, Glycine max
  unsure (1)..(305): unsure at all n locations
atgtcntatgancacattcacatgcgttaagtcattcaggactataatacataaagttatcacaagattacctttattggctgggaacgctgtggtttttgacttcgactctacaatcattgagtgtgacagtgataattgagttcttgacgagttcggtttaactgaaaagttctatcagcttcttctaacatgccttggaaccctctgatggctattctctaattcttatatactccctgtgttgcctaattaaacttatttcttcccggatagggaaataatttttgtctgtcctaaaattt

SEQ ID NO: 237164 - DNA, 401 bp, Glycine max
cttttctttttcccaattctttatgatgcagagatggctgtttatatagatataatatatcgaacagaggaagaggtgctcactgagctggataaattcagatcacatatttttggatgcaactcatgacatcttgtagaaactataactttcaactcatgccaggattgagtagaatgttactcgatctaggttacaagaaaatattataatgtaaaaaacgacatgatacatccttcatctgagggaaactctttaaacatttcgatgttctattcttgttgtaacgtcagctctcacccaagcaaaataggaaacacgttttgcatcttttgtttggaatataacgtatatgatcttaacgcgaacaaaataattacaacaattcttctattgagcgt

SEQ ID NO: 237165 - DNA, 395 bp, Glycine max
  unsure (1)..(395): unsure at all n locations
agctntagttcactgcttcaagtagttcacatcatgtcttccaaaggaaaacacatttcctaaaggttactataaagcgaagaaaatattgtgtcccacgggtatggagtattagaagattcatgcttgcccgaatgactgtatattgtacagacatcaatttcaagaaatgtcgaaatgccctaggtacggngtatcacggtacaaactcaaggataatgagaagtgtagtagtgatgaaaactcaaacaagggtcccccaacgaaggtggtgtggtatcttccgatcattccaaggtttaagcggttgtttgctaatggagacgatgcaaaagaccttacatggcatgcaaatgggagaaactgcgatgaaatgcttctttatccggcttatt

SEQ ID NO: 237166 - DNA, 469 bp, Glycine max
  unsure (1)..(469): unsure at all n locations
tgctntggaattacagaagaaaagcaacagcttgaganatttttctttacgaagaaggaaggtactgatccttatattgttggtttcatattgtttacaatacgtgagattcaaatcaatgctggtacatgattntcaaatgtcgggcttcaagttcatgatggattggctaaaatacatccaagtataaatcaaccaaacactccctaatagtaattttttgattgtgagagccttataatacaacatgtttgtcttcctatagataaaatatcaccctaagtaaacctgctcattggatttccaaagggcggtgcctttacaataatatatactatcatttattgtagtgtacttagaaaacaaaggctaaaatacgctttcaagccttaataaactccttgataaattttctttacattgagtccttaataaaanaataattttattttttatctttggcattaat

SEQ ID NO: 237167 - DNA, 453 bp, Glycine max
  unsure (1)..(453): unsure at all n locations
gacctataaaactaagcttctcacgatgtgagcttacatattagaggggtgtgtgtattctaagctctagcttctcaaggaagttntctcacagaagcttctcaaggaagttttctcaacaaagcttctcaaggaagctacctagtctataaatagaagcatgtataacacttgtcgtaactttgatgaatgaaagtcttatgagacacactctaaagttccacttttctccctcttttattccttcaatttcgtgctcccaccttctctctttcttttcctccattaaattatcctcttcaagcttcttatctaaggaacattcttggtggagaagctccttcttccatggcttattccctagtggatggtgtctcccatctgctcttnttctatgccttccgctgcatctccatggtggaaaatcacccttgaaggacctcattgaagctc

SEQ ID NO: 237168 - DNA, 354 bp, Glycine max
  unsure (1)..(354): unsure at all n locations
agctngagagataccttattgcacttttttatattancatcccacttgaatcctatggaaacagccaatcgcaacactaataaccaagcctaacacaactggtgggataaattacatgaatcaaaaccaaaatcccagtataagccatagaaagacaggtcttgttttaatggtttctcctaaagctttcttatgtctttcgctacttttaatcacacgaattgcaaaatttctgtctctctgcatgtctaatgagggaacacttcctatgtatacaagccgaacataataaaatgctgaaacaactctgatatgactgtaccagacagaaacttctgtattaaaatctggcac

SEQ ID NO: 237169 - DNA, 395 bp, Glycine max
  unsure (1)..(395): unsure at all n locations
ctcgcanagccgtcaaaagaggcatcttcaattttctcccaaatgttatctgtcaaaataatcacgttcaaatgaaacgatagttaaagtgaccagggaaataccaacaaatacacattaaagaactattataggttagtggcacatatcaaagcaatgtcaataatgtatttttaaaacagaaatttgaatgtatgctatccgatgatatttaaatggtaaacacaatcctcctagtccacaaagcttccccaactacattcaagaaaaagtcttacacatgcatgaaaaatagcaaagttatatcaagtgtcgcctgttatagaaaaaagcaatcttctgtcaaattgaatcagtgtgcctgctataaagcanacctctaacacttttatata

SEQ ID NO: 237170 - DNA, 272 bp, Glycine max
aaactctgagccaactcaaacgacaataacgttttactcggatgtctgattgagtcccgtcatataccgaaacgcttcaaattgaatgttgaagcttcgagccaatttgaccacaataactttttactcggatgtctgattgagtcccgcaatatatcgagaccctcgaaattgaatgttgaagctctgagccaattcaaacgacaataactttttactcggatgtctgattgagtcccatcatatatcgagacgctcgaaattgaatgttg

SEQ ID NO: 237171 - DNA, 398 bp, Glycine max
  unsure (1)..(398): unsure at all n locations
taaacattcactttcgagcctcacgaggattacgggactctatcattcatcnctttanaaaagntattgacgcttgaatttgctcagaggttcaacattcaatttcgagcgtctcgatatatgacgggactcaatcagacatccgagtaaaaagttattgtcgtttcaattggcctagagattcaacattcaatttcgagtgtctcgctatattacgggactcaatcagacatccgcgtaaaacgttattgtcgtttgaattggctcacaggttcaacattcaatttcgagcgtctcgatatgttacgagactcaatcagacatccgagtaaaaagctattgtcgcttgaatttggtcagagattcaacattcaatttcgaacgtctcgatatattac

SEQ ID NO: 237172 - DNA, 340 bp, Glycine max
  unsure (1)..(340): unsure at all n locations
agcttagagatagagacgttgttttatnttttgcgaaaatataacatctacgcaatacttcctcggtttcaaaatcatatgttccagacaatataattatagtaacttatgtatctaacatttctttaaaacatatataaccttccttaaatatatatatatatatatatatacctatatatatatatatttattacataaaacacaaatgatctaatacgaatgaagtatctcacgtaaaaattcgaggtatagattgctgctcctgtatagatagcagtatcattcactctctagcgagcgctatttgaaaaaaaatactactaattactcacattat

SEQ ID NO: 237173 - DNA, 385 bp, Glycine max
  unsure (1)..(385): unsure at all n locations
caaaaagcccacggagaagcagcacaatanaacatagacaactctgtcttgtgtttgacctaaaaaaatatctggtatgtttgttttggctgtaccaaaacccttcacttgtttgatatgttcaattataccccttatcctcatgtcaatcttcgcgatgtgttgtgaaactgagatgtcctcctaaaaaactctatccatgtctatgatgactctcacaaccgtggctgcattcaagtcccttacaatggcggaatcgtgccttctatacctcactttcctctttacgccaaaacaatacactatctctctaattccaccaagcccctcaactccatttncatgctccaactcttgtctttccctcaccaaaaaacacgcgcac

SEQ ID NO: 237174 - DNA, 392 bp, Glycine max
agctgtaacatcagaccatttctttgttgttgaactacttcacatggacttgatggggcctatgcaacttgatagccttggaggaaagaggtatgcctatgttgttgtggatgatttctccagatatacctgggtcaactttatcatagagaaatcagaaacctttgaagtattcaaagagttgagtctaagacttctaagagaaaaggattgtgtcatcataagaatcaggagtgaccatggcagagaatttgaaaacagcaggttcactgaattctgcacatctaaaggcatcactcatgagttctctgcagccattacaccacaacagaatggcatacttgaaaggaaaaacaggactcttgcagaggttgctaaggtcatgcttcatg

SEQ ID NO: 237175 - DNA, 398 bp, Glycine max
  unsure (1)..(398): unsure at all n locations
ttacgtgacactatactactcagcttgagccaaatcctaactgacattagcttgacccctgtgagaatgncaacccttaccctcggaagccaaaaagaagagaaggaaaatttccaatcacagaaaaaaaagagaaggaaaatttccaatcatagagaaagctaaataaagagagaatgaaaatttccaatcaaaggataaaagagaggaaaggaaattcccaatcaaagagtgggagaaagcgaaaagaaaagaaacaaaattcccaaccaaagagtgggagaaagtaaaaggaaggaaagaaagcttctgatcaaggatcgaaagaaatcagaagaaatgtgcagaaaggtctttggaccacacaatatctgaacagttcagaattgtcaccaaat

SEQ ID NO: 237176 - DNA, 306 bp, Glycine max
acctaaacatctgatggggtgtcaataactgaaactagaaaaggacgtggacttcatactgtgcattataagaagagtgggagtttcacgggaaggcgagaaaagtacaaaaatagtgaaccactcctgaagtgaggaccttcatctcttgttttaaacaaactttctggtctcaacgagtaatcctgtgaaagactgtcccgtccctgaactgacaagaatctaaaattgatcacaacccacaaacgtgtgggtcccaccctgttcataccttacacttccttgtgctgtcttcctggcttcaaa

SEQ ID NO: 237177 - DNA, 166 bp, Glycine max
ctgctacgtgatgggtagataagtatggctcactgaccatggtgctccctggtgtgcatatgcgctggataacacaccctccttttatacataatacacgcaaatgcggaaagaacttgcaaggaacattctatgtgcaatctatgatgtctgggagccacatatc

SEQ ID NO: 237178 - DNA, 483 bp, Glycine max
  unsure (1)..(483): unsure at all n locations
gacctgcggcatgcaagcttcacgatgatgaatcaagggagacatattttttgatgatgacaaagangatgacaaanagctcaaaagaatgatttcaagattgagtcaacaagttcaagatcaagattaatttcaagtttcatgagaagaaatcaagaagattcaagaatcaagagaagtttgatttcaagattcaagagaagatgaattccagattcaagagaagaaatcaagaagacttcacaaggggagtattgaaaagatttttcaaaaaacaaacatagcacagttttatttttcaaaagagtttttctccaaattttctaagttacaggaaactggtaatcgattaccagtggcaaagtttggatttcaaagctttcaactgaatttgcaacgttccaattggattcaaaatggtgtaattggatacaagatattgggcaatccataccagtgtatctgaacgtgaaattaaaatca

SEQ ID NO: 237179 - DNA, 207 bp, Glycine max
cccccaccaggacaccgcccgagacaaaaaggaagtgccacaacagaacggactaccaggaccgaaaaccactgaaaaagccataggccaaacgcaggaaagccacacccacgcgggagggcgcagcaaggagaccgcacaatccagagaagtgacccagcccacaaaaacccgaacacacacgcggtgggcacacagacaacagga

SEQ ID NO: 237180 - DNA, 369 bp, Glycine max
  unsure (1)..(369): unsure at all n locations
ctacaaacccnannaaaactaacactgccttctattgggtaatattatgcttttcctcttgataagtatcattttcaacatactgcaatgcaatctggattgtggataccagctgaagtctttcaattcatcatacagctaataacaacattggtgatctggcctctgttgactcattaaacttgtttcctaatttggtggtaaggtttatacttgaagcgttgattatatttgcgtattctatttataatcatggcatggatgctttgctgcatctgtaatgatgaatctaagactggtgcctgctatgactttgtttggataacctctcataagtcttaaagaatgattcattatgtgcttacccac

SEQ ID NO: 237181 - DNA, 345 bp, Glycine max
  unsure (1)..(345): unsure at all n locations
gtgttaagccctctgcacaggccaaagctgagggaacatatgcactactgcgctgatcatcccgaagagataagccagctcgcacaggtgaaagctcaagtttctgaagctaacggcgtcacganggagaatattgaaaaggtacagaggcactacttacctgcattaatttaagaggataataccctagaaactgaaaagatcagctggcaccagaatcattctcgccaataaaataaataaacatgattgtgactgtctgggaaaaaaagatggccaacgcacgggagtacgaatgaaaatcagaaaccaatatggtctccattcccactttcatattgaaca

SEQ ID NO: 237182 - DNA, 373 bp, Glycine max
  unsure (1)..(373): unsure at all n locations
gccaaaaggggagagaaactaanggtagattttatctaaaaactaggccattaattccaattttaagggggagtaaggatgagtgtacacattacaaattgcatatcatttatcttgttttcaaattgttgtcatcataaaaaaggcggagattgtagaagcatattctatatgaagcttttgatgatgccaaaaagatgaaagtcattcaagattgatcaaagtcaagatcaacaaatcaagagaaacgattaacaaatagtccattgtatgttaaaagaatcccttataagagactgcaaaggtttggccttaagttaatcattcaaaacaccttacaaagtttgtaactaaaatctattttaacaatatg

SEQ ID NO: 237183 - DNA, 395 bp, Glycine max
ctctcacgcaagaataactgaaactgagtttcgtccgcacatgcctcttgtaagactagactcagctcaagcagcttacgaaagtttaacctaattaagcctaagcttcatccgcagatccctcttgtaagactaggcctagactaaacagcattattgtaacaacataattaaaaccaaaacttaattcgtatatccctcttgtaagattaagtttcgatcccgcttcaatcaagttctaaggcagcagtacattttccaatgctaaagtcatgtaactatgcacacaaatggatgatcagaccaaaagcatacaaacattaagcattggaggaatgcatgaacacagagaacatgatcaattagatattacgtatttacatcagttgttcatt

SEQ ID NO: 237184 - DNA, 360 bp, Glycine max
  unsure (1)..(360): unsure at all n locations
gaccttaacaccgagctgcagctaacttaagctagatgttaatattttncatcagtatatgctttattatgcatataacaagtattacaacttataatttttacatttatatctacatgtcaatagccatgctattacatgctgtcaacgaacctgtattatattaattcacttaaacttatattatattaattgcaatgcaaaagctattatttgaattaccatacattttattattacttatatgcttatcaaatacactaatggttttaacttggtactacatactttaggcatactttatagctatcactatattttgctacaactatgatatggtatacattaatacagactgac

SEQ ID NO: 237185 - DNA, 471 bp, Glycine max
  unsure (1)..(471): unsure at all n locations
tctggtgggacatcttgacttgctgtacaatctgacattcatcacaaattctgccttcttctattttcagattgggaatgcctctaacagcacttttgtcaaggattntcttcatgcctcttaagtgcagatgtccaaatctttgatgccatattctgacttcatcttctttggaggatagacatgtggaggagtagctggtttcttggggtgtccataggtaacaattgtcctttgatctgctgcccttcattagaacttcactcttctcatttgtcaccaagcattctgacttttgtgaagttacattgaatccttcatcacacagctgactgatgctgatcaagttttgcagcagtcccttcaccagcagtactcttgtcagactaggaacgtcatcatgaactagctctcccattccaatgatctttccttcagagccatcttcacatgtcacatagctagtggagc

SEQ ID NO: 237186 - DNA, 441 bp, Glycine max
  unsure (1)..(441): unsure at all n locations
agctngaagnttcatgtggattgtggaactttggtatagncnaaagccctatagctgggatctttaacctccaattgtgtgtgtcaaagaatattttagagattaataaaaattgtgtagtcatttcaaaagcaggtgggataaattacaaatgttatgtgccaaagatactacttatccactttttgatatgatccaggttagcaaagttgaaataggttatttatatttataatcacatatttatccttttttatggatttgaagagacttttaaaaagaaaatggaactttatggattctacattgttattaatatcacacataataacatagaacgatattcatagtcatattcttttaattctaacgtgaatttaattaattgaactattctcaaacatcataaaaaaaattcatatcttttaaattaattgaact

SEQ ID NO: 237187 - DNA, 477 bp, Glycine max
  unsure (1)..(477): unsure at all n locations
ntacncttaggttgttcactatattgctgatggtgcctctctatctctaacaactttggcacaaagacttggagaactcatattctttgcgaagcatgtcaacaatggaaacaaatcaaaacgtctttcatatccaactacaacattgaatctggaaggaaagaggtatgactctatcatagttgatgactattctagatatacttgggtatacttccttgctcataagcatgagtctttcaagatctttgaaatattttgtaaaatggttccaaataagaaagaattatgtatctcttttatcacaagtgaccatggaactgagtttgaaaatgctgagttgagatcattctctgaaaagaatggtattttccacaacttctcttcaccgagaacaccataacaaaatgggttagttgaaaggaataacaaaactctgcaagagattgctagaaccatgctatgtgaaaactgact

SEQ ID NO: 237188 - DNA, 292 bp, Glycine max
gaccttaagcactgcgcgcactaaaataggctagtttttatttcaaagaataatcaatagactcatcttatggagaggaccactacggaaaccaagcaatttatgagcataacttaacattggaagcataaataggctattccccccagaaagaacccatgaggaaccacatgaaacctaaatgaggctgaaagtataagatcaatataaaaccaacatatacttgctggaagaaaatgaggttaatgaaaggtagaagggaattacatacctaagcccaagtaaacagata

SEQ ID NO: 237189 - DNA, 445 bp, Glycine max
agcttaggctgacaattgttttttatttttgcacagaagggcaaaggtctgtgtggtggtcggtagaggagcataaaccacagagtctggcgacaggtgcagaattttgattcatggccagttgggttaccaggttaactaaggcatctagtttaccttcaagcttctttgtctcacttgatgaattcatggctacttcatgcactcctctaatgacaatagcatcatttctggcactgaattgctgggagttggaagccatcttctcaattaaatttctggcttcagcaggggtcatgtctccaagggctccaccactggcagcatctatcatacttctctccatgttgttgagtccttcataaaaatattggaggagaagctgctctgaaatctggtggtgacggcaactcgcatataatctttaaatctctctagtattcat

SEQ ID NO: 237190 - DNA, 425 bp, Glycine max
  unsure (1)..(425): unsure at all n locations
tcaatggagcttacatcacacggngcctccatttttgtagcaacttcaagcttttttctgcacatttgcctcaattatttttgcattcctttcattccattcaattaagtgccatctccatctaattttaccttttccttgtgatatttggttctttgattgttgctttctttgcaatgtttgtgagatgagttgtgtgtaaacccatggatcaaaatgcttggattggtggctgtaatggatggctctaggcctatctttgattcttttataggtttgcatgttgcgttgctccttatctctcatttatacatgtattaacatatgcataccaactatttgatgaaatgtcacaatggttattctatgtgttattttgaagtttgaatgggtaatgatctttacagatgttcagccattatttt

SEQ ID NO: 237191 - DNA, 371 bp, Glycine max
  unsure (1)..(371): unsure at all n locations
caagctttgggggacatgtttcttgttnttcatcngacantcaccacagattctgccttcttctatnttcagattgcgaatgcctctaacaacacctttgtcaatgatgttcttcatgcctcttaagggcagatgtccaaatctttgatgccatattttgacttcatcttctttggagaatagacatgtggaggagtaactggtttcttgaggtgtccataggtaatagttgtcctttgatctgctgcccttcattaggacttcactcttctcatttgtcaccaagcattctgactttgtgaagtttacattgaatccttcatcacacaactgactgatgctgatcaagttcgcagtcagtcccttcacca

SEQ ID NO: 237192 - DNA, 440 bp, Glycine max
  unsure (1)..(440): unsure at all n locations
tcttgattaatatttatataggagaatgatatatgtaggataacagtttcttcagaaaactaaaattaacttatgcattagttaaaatcaactttttttcaaaaagttcattttaacttatgttaagttaattgtaggttatgggagacaatttatttcatctttcttctttntattttcttttctcataagtgcttatggagaaacttatccaaacatggtcttaatgaatgacatttcgtttgattggaagacaatattagatgtacatgatctgattaaaattgggtagttaataggatggtttgcaatcaatatcctctctctcttatatatgtatgtgtgtgcgtgtgtgtgtgtgtgtgtgtgttttgttgttctggatcttgaagagtgtctacccactactcaatgaccgttctcaattctatggctgagtc

SEQ ID NO: 237193 - DNA, 434 bp, Glycine max
  unsure (1)..(434): unsure at all n locations
cctgagggcatgcaagcttngngnnntctcttgcatgctggaatctactttctgtatctttcnngcnncttcttgcattccatcacaatccaagtaagtagtgcttcatttccattttcattgtcatactttgaaccttaggatagatgatttcttggctttgtagcttgcattgctgtttaagttagggtctctagctttagggttagtcattttaggattttaggtaacttaaaagcccattacgggcaatgtggctgaaaggggcgaagacccttgtgtttctgtttggaaatcgcgatgaacgcgctaagtgcgcctgttgcgataagcctgttcatncgaactgttaaatttttggattccatatgatcgcactaaacgcgttcatccctgctaatgaacgaaaatgatgaacccgctaagcgcgtcta

SEQ ID NO: 237194 - DNA, 478 bp, Glycine max
  unsure (1)..(478): unsure at all n locations
tgggctatgtccaattcttacccttcaagatgagatgtcactattacaaccagncataattggactagctaccattggatttcaacaacttgtcaattccccaactggactntaattctagcctcaactagaccaacaaccccattggattttagctttgtcaaccactgttagacttagtacaaaaaagaggatatgtgatttactatacaaactatagctcttcacctcgaacaagggatttcactcaagaattagatctcttgatgttgctattntggaacgcttcaacttgtccatcatgttcttcgaaaatgccaagaaggtcgttgaggtggactccgctcaactgacaagcttctagagcaagtaggtacattntacagttgtcatgaactgacaacatgtaaaaccattntgaggtagtcattttgaggctgtcattatgaggaacctttctaatggacattctgaagaa

SEQ ID NO: 237195 - DNA, 404 bp, Glycine max
  unsure (1)..(404): unsure at all n locations
agcttaaacattcaatttcgagcgtctcgtttttttcagtactcaatcaaacatccgagaaaaaagntattgtcgtttgaatttgcacagaggttaaacattcaatttcgagcgtctcgttatataacgggaatcaatcagatatccgagtaaaaagttattgtcgtttgaattggctgagagcttcaacattcactttcgagcgtctcgatatgttacgggactcaatcagacatccgagtaaaaacttattgtcgtttgaattggctcagagattccacattcaatttcgagcatctcgatatgttacgggactcaattagagatccgagtaaaaagttattgtcgtttgaattgtctcanagcttctacatttcaattcgagcgtctcgatatgttacggg

SEQ ID NO: 237196 - DNA, 447 bp, Glycine max
ttgagcgcattcaaacaacaataacgttttagtcggatgtgtgtttgagtcccgaaacatatcgagacgctcgaaattgaatgttgaagctctgagccaattcaacacgacaataacttttttctccgatttctgattgagtcccgtaatatatcgagacgcacgaaattaaatgttgaacttctgaggtaattcaaacgacaataactcttttctcggatgtctgattgagtcccgtaacatatcgagacgctcgaaattgaatgttgaacctcttagctaattcaaacgacaacaactgttttctcggatgtctgattgagtcccgtaatatatcgagacgctcgaaattgaatgttgaacttctgagctaattcaaacgacaataacgtttttctcggatgtctgattgagtccccgtacatgtggagacgcttcgaattgaat

SEQ ID NO: 237197 - DNA, 450 bp, Glycine max
  unsure (1)..(450): unsure at all n locations
agctngttcttttttaaaaaagaaacacgagtgggttttattttgcaaanncaaacggcacaaaattcactcatgcgttgctatctactatctgaataaagaattgcgagcttctcctcgatagaggatttagatgaccactcattagcagttgctgcatacagtgttgattnttataatatcattctttttactactttaagcaacttaaataattttttctccaatccaataattttacaaattacataaatagaccccacaatctaatcctaaaaattatttcatatacaagtgagacccgaaaattgtaatttggtagagcaatccattattttcagtctctctctactgatgtatgagactatgaattattatatgaatggctacattcgaaataaagagagagtaattgtgatacccttacttccatatacgcatttatataat

SEQ ID NO: 237198 - DNA, 413 bp, Glycine max
  unsure (1)..(413): unsure at all n locations
actaagcttgtcaattgcaagcacaaaagtacctgtcaaaagactttatggagagcatcaagaaagncgcaactgattcatacagatgttgcacagcctcacagaacaccttcattcaaaggcaatctgtattacactatatttatcgataacttcaccagactgtgttggatttttttcttcaagttcaaatcacaggtggctgaaattttttggaagttcaaagtcaacgtagagaatgaaagtggcctcaaaacttaaattttgagttcagacaatggcaccgagtacacatctgcaaaatctaatcaatcttgtgaggatttcgacatccaacatcaacttactagtccttatatnccacaacaaaatatggttagtgagaggagaaatagacatatcttggagatgac

SEQ ID NO: 237199 - DNA, 401 bp, Glycine max
  unsure (1)..(401): unsure at all n locations
agcttcatggngaataaagaatgaggcacagttgntttgatgataacaatgacgataacaaaagatgatgactaaggtgatgacaaaaagctcaaaggttaatcatagaatgagttcaaaatgttcaagacggaaccaagaacaattcaagactcatgaggaaaagttgaagaacacttcaagattcaagaggaaagttgaattcaagaatcaagattcaatcattaagcttcaagaatcaagatcaagattcaagattcaagaatcaagagaagacttaatcaagataagtatgaaaaggatttctcaaaaactgagtagcacatggattnttctcaaaacatgtttaccaaagagttnttactctcttgtaatcgattaccagattattgtaatcgata

SEQ ID NO: 237200 - DNA, 475 bp, Glycine max
  unsure (1)..(475): unsure at all n locations
actcaagcttcagatagagntaagggcctattctgtatatgtgaagctgtcagttttttacttcatacncgcgcaccgcagggntctcaagatcttcgcataatcacattttattctacacaacttcctggtccaaattaccattgccgtgaggtacaattgtttgagaatgtgtttgtaaaacatgtcacatgttgtgtttaagtattctcttaactactgcaaataacatatgtgggcaagatcttttattattattttctttagattcttaaatttttagactacttaatgtatcatgcagggttctaaacttgccacattaccccgtccagatagtgtccttgaagtgctattgattaattgtgagtatacattatcgtattggagttgttcatatttgatgcctatgtatttgttttggtgctcatttcaattatattatgtacagttccacctggcgtggtctatggat

SEQ ID NO: 237201 - DNA, 305 bp, Glycine max
  unsure (1)..(305): unsure at all n locations
gaaacaagctgagtatcacaggatgacacgctcctttccaaaatgaatgtttctagggagattttacaacttcctgccgtctatcgaggaaaacatgatagaatagcatctaatattttttgttcatgtgagaagaagaccattcanagcattgctaacaagagctaattagatggaggataacccgatagctagaggtctagaataaccacaaaaactgtgagagaaaccattaacaaggactgaaatttcactgacttggcttttacaaaacacaatggtgtgatttctcatttgatctatgt

SEQ ID NO: 237202 - DNA, 392 bp, Glycine max
  unsure (1)..(392): unsure at all n locations
aaacaaaaaccacatcacatgatacacaacattaaaagtctctggctgagcacaagagccttgaccatctcttaatttccttgccgacacactttatgattcatcttttgacaatcgaggctcagaaccttctatgccttctaatgaagcaattccaaagttcaggtatttattagaagaattgattttacttttaaaaataacagaccctgtcattacaatactggtgaccagactaatgattgcagctatttgcttaatagagcttttgcaccaacatggaatgtangacggcaatagcccactggaaaccttgatctgagtgagatttttcacgctcgaaatgaaccacatatgtatgcntcggggtatgctctctatctctctctctc

SEQ ID NO: 237203 - DNA, 336 bp, Glycine max
  unsure (1)..(336): unsure at all n locations
gaatttttctttgagtcttgtttttaatttgtcaatctaatctagtgccattctaggacttcctttgtgttccaccttggcttgtggtgttgtcctttcgctttattnttttttcttgaatctcattgaattaatgtcacattaaatttactttgggtttagttctcatttcatattttggcttcttggctttggttttggtttaagcgttgcctacaataaggattggaagaggaaattggcgcgttgcttgaaagaatattnttgagtcttggaggtaaaccatcctatgagcaccattgtatttgaaacaaccacagcctcaacacaatttga

SEQ ID NO: 237204 - DNA, 475 bp, Glycine max
  unsure (1)..(475): unsure at all n locations
gaccataaaactcagcttttatgcaggcactctcttatgaggaagcgtcttcttttatgactnattccctaggggatggtgcctcctatcacctcttctnctttatcttccgctacaactncagggttgaaaatcaccattgaaggacctcattgaagctctaagatccaacctccatagaatcttgtcaagcaagcttcgatcacattgttagaaagaccataacaagatgttgagtaaggccaaattgatgagccatgatttgtgggttgtaaggctcgacataaaatttgatatacctggatccacggtgtaacacgctaaaggtattatcataattacactttggattctaaaatatgaaaaataaaaatatttatacaacaatctcatgcgaaagctaacatataaacattacaacttgattccattgataatatcaatacaacttatctctcatagctctcacactata

SEQ ID NO: 237205 - DNA, 426 bp, Glycine max
  unsure (1)..(426): unsure at all n locations
ccttaagcaccgcggctgcacttaaccccccccccttttaatttattgcttagaatgcagaagaagaagaagaagcaatcaatttaacaatgttcttttaaatgcgtaggataaaattgattgcaataaaataaatgagataagggatgagagaaatgcaaactcgatttatactggttcggccacgccctgtgcctacgtctagtcctcaagcaacccacttgagattttccactatctttgtaaaaatccgttttacaacttctgaacacccaaggaatccctttcccttgtgttcaggaaactcacaattcaagagacaaccagtctcttgattacaattgactttntgagaagaacataaagatttctctcctttagagtggataatacaattcgaagttcttggatgaactctcaaataaa

SEQ ID NO: 237206 - DNA, 464 bp, Glycine max
  unsure (1)..(464): unsure at all n locations
nganaagttgtatttcactaaactctagaaggaagggttccaaggtaataatcccttcaactatccatattgngatactctacttgaagaagaagaagatgcacttggagtgtatggagaaaaggaactagtgctcaaagaccagggagttttctaccgtgtatgatcgcaccttctcatttgttgtgcatatgccccaattcagatccatcttcactcgtcacatgaaacctatcattgaagaggtggattttgatgttgatgcctcagttgatctagatgcctttgttgttgaagtttatgatccttcacccttcagagagtatgttagactcatcgaggctgagcttcttaggatgagaaaagcctctgcccaagctcttgaggatcatgcccatgttgagatggaagttgataagtggcatcataatggagatttcttttacaagaaggtcagtgggtgg

SEQ ID NO: 237207 - DNA, 431 bp, Glycine max
  unsure (1)..(431): unsure at all n locations
agcntataacatagagaagaggggttgngttctttncacccnccactactgagaagntttgattaaagaaagcaccaataactagttccacgcataaaacatcaattttgttctgaaaattattcctgaatttggcaccacccatcagtttggaccttgatggtttcgaaaagcaaaatccatttgatccccaaaagttactggcaatttggtcttaccattatcaaatcagtcaattagtccttgaatttgacaatcattagtcaatatgctcccttaatgtaggaaccaaattgattaataattgcaatactaaaaaactatattctttgtaatgtcaagaagtatattgattgatattgttaaagtaaaggactaaatctccttttccggaatggcaaaggccaaattactcatggtgccaaccatga

SEQ ID NO: 237208 - DNA, 390 bp, Glycine max
  unsure (1)..(390): unsure at all n locations
ccccaccggagaagaaccaaancgcccacccgataatccacctcccgaccctcgtgatcagcttgcttcttcatctggacttgtgcctctagcaattacttacgaatggcttgaaaagtagccgctctatcactcagcaaatcctcaacaccctcaatgcccgacgtgccggagatgtactccgggaaatagaatggcttccggccaaacgttacctcatagggggatgaccctgtccctgcaccccacgaaatattgcgggaccactctatccatggaagaagctcaccccatctctgaggacgtcggcgcaccaacgcacgcacgtatagttccacaaccctactgatgacttctgttcgaccatcactctgacgatgcgaagcagaa

SEQ ID NO: 237209 - DNA, 450 bp, Glycine max
  unsure (1)..(450): unsure at all n locations
agctncngaattccaccgctgggacccgngtgannttttcttnggcagaccctcnnngacgnggcatgccatcacattggacttggcagccattcctttccttggagacattactcatccctacaaaagtacacgtccactcatcacaacaacacgtaaatatattccaactcaaaacgtgtatatatatatatatatatatatatatcctcataccatatacaattgtagcaccgatcgaaaagtttccttgacaatctaattctgcaaaaatggcaagcaataaggagtctaagtncccagcacagagccagataactcagccaggaaaagaacatgttatgaattcactctcacaagccacagatactgatcacaaggccgccaataaactccaggtatattttaacacacactatattatgatcgctactataagcgcacgtcttt

SEQ ID NO: 237210 - DNA, 460 bp, Glycine max
  unsure (1)..(460): unsure at all n locations
gtggcacttccatatacgggtaagggaagagaggccctccatgattattcattnactcaggnaactcagccataataaagatgacaactccatacgatatcagagtatcttatatctttaacataaaaattcaggcttcgataagacacttgcaaaatgtgacagccggaaactaaatgtatacagaagtacagaacaagaaatccacttttagcatgacaggcacaatagcaacctagtacgaaaattgggattgcatagaaatcatcgatgcatgaagtggcctgtcacacattcctggagataatgctttttcccaacaataataagtcactgctcaaccgatcggctttcattatgaattattaatgataattcagtggatttaaagtagctgtccctggtgtggcattccacttctcatcattgcacagaactcctcatangttattctcccatc

SEQ ID NO: 237211 - DNA, 457 bp, Glycine max
  unsure (1)..(457): unsure at all n locations
ggaccttaagcaccgcggctgcagcttacatgctggtatgttngatatagtttatactgcanaaaggcccatgatacatattggtggataaggtctgttcatctttccttttaccaataaaggtttttcctaaaatatttattttacaatttactgaggcacacaatgatttgtctctatttcaggtatcatacatttataaaattacttatatatcaggcaaccagagcagcccagccagaagcaccctgaatttagtattggctgagagcttgagatcttctttgatagtcaacattactccttgtagagtgacacaattttttcagttgtacctaggcatatatttngctaaatgtttgtgtctattggatacactgcatcacttgaactcacagctgcagtatcagtgaataatgcaaatttggacttgggcatatttntttcttacaataac

SEQ ID NO: 237212 - DNA, 456 bp, Glycine max
acactatgaaactcagctgtcttgagtcagtagcttcttgtagtacacattcttgggaaacccttgtattttatatttatatgaagacccttctaccttcaaaaattcaaaattgtccccaaaggaatatagtatacttcttgcaaaaacttctatatattattatataataatgatattctcgatatatgaaactaatacttctatggaaaactcaataatgggtaattgccttaccacatgttactgtgcagggaaagtcattcagaaaaaccaagctctccccattaataccatattcaagcttcctgtacatgttacaaattcttggcctccaggtaaacataattagattggcatattctctcttattgtgaataaacctattaaataagtttggacttgtcaattcaaatttaatttagtcataaaaaagttatacttttatccttatta

SEQ ID NO: 237213 - DNA, 385 bp, Glycine max
agcttatgtgtgaagaagttgtgtttatatatccatgaaacgaacactatgtatatgtataagatgcataaaatgagtaagaaatgcgatatatgtggataattcttagatctctctgctggtggaaggcagcaactgctgcaagacatatggtgacttgcaccgaaatggtgccttgaattttgattgattttacgatgttaaattgcaggagagttgggacaacatatcaggcagtgcatatggcctctggagggtcgttacgctagcaattacttgtgtcttcttcattttcttattcttactaattgcaaatgtgagaagaacaacgtccaaacgtaacaagtgaaagtcataaatcataatatgtgagatcacagagtct

SEQ ID NO: 237214 - DNA, 393 bp, Glycine max
acacctttgtaaccttgagagcaaagactaaacatgtgagtatttaatccgactataagacgatcacgtattagtcagtgtgcgatctttcaacaaatcttgttgatttatttagagttagcgatgacttggtatgacaaagaatattggattaagtcaagcttgtggtaaaatttgcatgtgtaagagccaaaagtgacaatgaagaatatttgaatacttgtagctgtgtgataagttagtaaaaacttggtggtttgtcaagaactggacgtagtcttgtggtagacacaaatcagtataatttccggtgttatcctttactgctttaatagacaaaggggttgaatttatttttaatcgtatatcttggttcgatatgtcaagaaaact

SEQ ID NO: 237215 - DNA, 463 bp, Glycine max
  unsure (1)..(463): unsure at all n locations
gaccttaagcaccgcggctgcaacttctaagcctatacgagattttcactcattacgnncncncaaaaaaagaaagaaggataaagggaaggtagtggctgttcctttaaaaattaccttttagtggagtatttataatgtatatgatcttacatggtatttatttgctctagtgagtgtagacagaacaaagagttagttgagcaattaagttcaccacctccaaactccagagttttgtattttccatctcattttccacaaaatggttgggaacagtttaaagcatgcttgtggaaacaacatttgtcctattggagaattccttcatacaacttgatgcgcatcatatttgtggttgtctcatctcttttgtttgggatatngttttggaagcaaagaaagaaaatgttagtgatcataattctattctacttatgtctccattaacaaaactttatac

SEQ ID NO: 237216 - DNA, 443 bp, Glycine max
  unsure (1)..(443): unsure at all n locations
tgggcatgtctanagagtgctagagagagaaagtctcttttccagagagcncgagagatcttgctgtgtgaagatccacagagaccgaagctcgaagaggaagctgtcctaagagcttgagataagtttgtgagtgattgtgaggtcttagaggtggaggagacatccccactacttgtatttcttcaatccttcatctttctcttctctctgttggaaaggaagcttcccagttatggagagctaaatcctctgttggttcttccttttaggtacttgatgtaaatacctgtatatctatttgatggtgttttgtgtgttcatttgttagacaagtggcctcacatatcttataaaagagggtgtgaattaagatattccaacctgcctcccctattaaaaatctattcactcttactcaagttatgaatcccttatgacca

SEQ ID NO: 237217 - DNA, 415 bp, Glycine max
  unsure (1)..(415): unsure at all n locations
gatccttaagtcacctgcggcatgcaagcttgaaatgaggaagtgtagaagggtgattctttctgtctttatncgnngaccacagagtggtacctggagatatgtcgtgggggtcacgagaccttgtggacgtcaggtggggtgctattgcccaaaaccaagcttgaccaatctcgacccaacccgggcatagtcattcattgagaacctgtgatgtacctaaacagacgagctcctggcagtcaacagataaaaggaacaaagaccacaaagcaaggaggcttgtgtggtggctggccagctgtgaactttgattgatatatgggatatggcctctggtaatcgattaccaaggggtgtaatcgattacaaggcttaaaaatgaagacagaagactaagatggtctctggtaat

SEQ ID NO: 237218 - DNA, 475 bp, Glycine max
  unsure (1)..(475): unsure at all n locations
tatcgtaaggattaatctataatatttatatttatacctttatatatgtagtatattctatggattaatctttatacaaatacatgaatcagatcagcttaataaacaacaaaagtcagcattattgtgtttgcccgttaatatttacgtggtttttgcgaggaataaaattttgtattcctctgtttatttatatggcaatgtttcgtaatttgaaaaatacgttgttgcttttaaacgttcacatttgagagatataattattctcgatgttttcttcggtgttttaaaaaaagatagcgcggtaacgcacggtttcatataataaattatgtatcagatttaaaaattaatttaaaattcaagctatagttcatagaatgacaagttgacaataactaagcttgtgaaataatttaatttgggcacggaacttcatttttntacaacaaanaaaaacanattcactatttat

SEQ ID NO: 237219 - DNA, 367 bp, Glycine max
  unsure (1)..(367): unsure at all n locations
agcttctctaaagttgtggatgtggaaatttttattttttaattnncaatcatccactcgctcagcatgccctgtgcgctaagcgagtaaccactcgtgctaagcacgccaacccctacccattggctgaaggggtttcgctaagcgagacagttgcgttaagcccaaaaacctctctggaagtgcatttattagaattgggctaatcgagacatctcgctaagcacctctgtgcgctaagcacaattatctctctgtctggaccctcatgccaattaggcctagtaggtcatacccgctaagcccaattccttctcgggaatggaattgcgctaagtgagaccatttcactaagcgtgaccccact

SEQ ID NO: 237220 - DNA, 461 bp, Glycine max
  unsure (1)..(461): unsure at all n locations
actaagctgacgacctacttggacgggtcagaggaatagcattgctctctcacaaagggaggagccgacttccccatatacgaatcttgaactcaagaacgctgtgtggaggtgtggcggacacaaatgtcctgggccggatggattcaattttaatttcataaaggagttttggggggctctaaaaccagatttcatgaggttcgtggatgagtttcatgtcaatggaagctttcctaagggcaataatgcatcctttctggccttaattcctaaaataaaccatccacagtcatttaatgaatacagacccatctgcctcattggctgtatgtataagaaaatagccaaattactggccaacaggctaagaatagtgatgcctggcctcattgatgagagacaatcagccttcataaacgatatatagacacattcntcatggcacgttgatacttaat

SEQ ID NO: 237221 - DNA, 366 bp, Glycine max
  unsure (1)..(366): unsure at all n locations
cacaccttctggaggggccaagngggcctggttgctatttgcacccccatatttactaagtacacccccctgccttttttgtggggaatcgtttttcgtaaagatacggaaacttacgaaattcgtaacgatacttgttttctttccgtaatgttacagaaccttgtggatcacataatcatcccctttttgacttacggaatgttacggaatctcactaattgtgcaacgatgctaccattngatttccggtgtgtcacggaaccttacggattggcatcaatatttcttttgtttccggccgtcccggaatttacaaattgctaagatggggccaagcacttacaggaccaacaaaagtccatg

SEQ ID NO: 237222 - DNA, 459 bp, Glycine max
  unsure (1)..(459): unsure at all n locations
ttgatcaagccctagctgccactccgagctatagtcgaccattttgataactntntaccaatctactccgactaaagctttntttgtgtcaattgaaacaaattaaatctcaccaggtacttgtacgggaaacaaagcccttgggtggagacaagatttgagggtttcatgcttctatgtgaaaggatttgaaggattcgaaggcttcgtgtttgttcagttatatttcaatcttcattctttgtttagtctcttcagttatatttcaatagaacttngtttgagtaggtgattcatacctcgctgttggtgctgatgttgtgtgaacgaagataaagtctgccttcaaaaatattattcagtccatttttaacttcccataaggtgcttgtgaaaatgctataatgaggaggaaactctcgatgactcacgaagatatcttcctttatcttcaacttt

SEQ ID NO: 237223 - DNA, 389 bp, Glycine max
agcttacaaatctctgtttaagtgcaagcctctaatttaaataaaataaaattagcccaaataaaataaaattggataaaataaaattgtgtgctctcttcaagtccaagccagttcagcccaatttcggatccgagctcaattgcttataattctcctaaaattaaattaaaaacacacaataagtcaagtaggcccaaatgataaaactgcataattcatttgacaattaaggctaattagtaattaaaatggtgacaaaaatgtttaagaaataggagagcataatgacacatcaagtatcttgtgaaattcgtgccatgttcacatatgtatagacaattgttgactcttgataagacacgttaaagttgtactcttggcaattc

SEQ ID NO: 237224 - DNA, 497 bp, Glycine max
  unsure (1)..(497): unsure at all n locations
ggacctataaatactaagcttgtactctnggcaatttctttaaactagtcacttaaaaaagttatgactnttgaaagaatctttagaaacaagtcacttgaagaattgtgacttttggaaatgtatttttcgaaatcagtcactggtaattgattaccattatggtgtaatcgattacacatcaacagatgtgactcttcattttgaattttgaaaatcttaatgttttaaaacactggtaatcgattactaccttctggtaatcgattagcagagagtaaaactctttggtaatgattttgtgaaaacttcttgtgctagtcaatgttttgaaaaagattataatacttatcttgattgagtcttcttcttgattctagaatcttgagtcttgaatcttgatcttgattattattgaatcttgattcttgaaacttgattcttggatctttgcttgaaactttgcttaactcttgattctttggcatcatcaaaat

SEQ ID NO: 237225 - DNA, 285 bp, Glycine max
ataaaccacagagtcttgcaacagggtcaaacttctgatcaaggccagctgggttaccaggttaaccaaggcatctattttaccctcacgctttttaatttcaactgatgaagatgatatcaaggctacttcatgcactcctctaatgacaataacatcatttctggcactaaactgttgggagttggaagccatcttctcaattaaatttctggcttcagcaggggtcatgtctccaagggctccaccactggcagcatttatcatacttctctcatgttactg

SEQ ID NO: 237226 - DNA, 449 bp, Glycine max
  unsure (1)..(449): unsure at all n locations
tgaactaaagcaaatattgagggtgaattgagctctgcactattaaactatntgaacaaaagtaaaatattcaaaactataaagtgtgacaactatcaagttaaaagcgttgggaagtgtcctactaaatttctcttgctatataaaatgtgtttttctctatttaacgttatcctagtgttcttacactaagaaattactcaaaccatgattcctcacatgaaggaacctaactctctttagcctttgttcttgattcctcaacaaacttgttctaaaagagttgcactaagtctatagtgtaaaatggactagatcactacactccatttttagacatacagatttctagctcgctctatcaagttctaagggtttaaagcattntccaatactaaaaagcctaactacacatacaaatgggtgatcaagcctaccaacatgtgaat

SEQ ID NO: 237227 - DNA, 373 bp, Glycine max
  unsure (1)..(373): unsure at all n locations
agcnnngaaaagaggagaagggcagctactctccaagccaaacngctagcttagcgagcgtccgttaagagcaacactcatgggctaagcgcaaggaagacactggaagatgatgagctgtacatgttcactaagcacaccgcttcatctcactaagtgcaccacttcagttcatccgctaagcgagaaaggcacgtgctaagctaaaattcactaatgtgcactaagcggtccataattgcgctaagcgcacgagcacgaacaaggccacctatttaagcctgaaatcagattttagagagggagtttggattgagattcaaagctntgcatgcctagagattctagggagagaaaggtccaatgtccatag

SEQ ID NO: 237228 - DNA, 440 bp, Glycine max
  unsure (1)..(440): unsure at all n locations
tcagccaagcctcttgaaatgtgtgcattgcattttattgtatatacagatgctnctattacagtaccaacttggcaacttccacaaaatataataagtataataaaaaaatacaataccaagtaccaacttaagataacaatttaattagaattatttactgtcattcaattacaagttgctatgtgtagtaaatttatcatttttttattcaaatttatcaatttttatcataattactataaaagttatatttatgatgatttctaattgattgatattataaattttttaacacttaaatgtgtgtgcatataatgtattgaatttaaaaacataatttatttgcatatttaatagcttcacaattaanatacgttttctatacgttaaaaagatactatattaaatactaggtggtgctgagatcactgattcca

SEQ ID NO: 237229 - DNA, 434 bp, Glycine max
  unsure (1)..(434): unsure at all n locations
agctnctgttttcaattgcgagcgtctcgtttatttcaggactcaatccggcatccgagtaaaaagttattgtcctttgaatttgctaggagcttctgttttcaatttcgagcgtatcgatatattaggggactcaatcggacatccgagtaaaaaattattgtcgtttgaatttgatatgggcttccgttttcaatttcgagcgtgtcgatatattacaagacataatcggagtaccgagtaagaagttattgttgtttgcattaggtacgagcttccgttttcaattttgagtatctcgatatattacgggaatcaatcagacatccgagaaagaagttattgttgtttgcattttgttcgagcttccgttttcaatttcgagcgtctcgatatattgcgggactcaaacggacatcccttaaaatagtatt

SEQ ID NO: 237230 - DNA, 455 bp, Glycine max
  unsure (1)..(455): unsure at all n locations
taacacaaggcatgcgaagngggtggaattcctagagcaattcccttatgttatcaaacataaaaagggaaaaggtaatattgtagccgatgctctttctcggcgtcatgcattactttctatgcttgaaacaaaattgattggtcttgaatgtttgaaaagcatgtatgaaaatgatgaaacttttggagaaatttttaaaaattgtgaaaaattttcagaaaatggtttctttagacatgaaggctttcttttcaaagaaaacaaattgtgtgtgcctaaatgttctactagaaatttgcttgtttgtgaagcacatgaaggaggtttaatgggngcatttggggtccaaaagactctagaaacattacaagaacatttttattggcctcatatgaaaaaggatgtgcagaaattttgtgaacattgcattgtatgtaaaaaggcaaagtcta

SEQ ID NO: 237231 - DNA, 362 bp, Glycine max
  unsure (1)..(362): unsure at all n locations
agctntttggtggagagcagaaaggtgtctttggatgttcttcaatacgctgacgatacgatattctttggagaagcatctatgtgcaatgtcaaaactgcgaaggttactctcaggagttttgagctggtttctggattgagaattaattttgctaagagcaaattcggagctgttggtcaatctgaggagtggtgtcttcatgctgcaaactacctcaattgtgctttgctccaatttcctttctgctatttaggtatttcgattggtgtcaatcccaaaagaaaggtggtgtgggatcctataattaggaaatttgaggataggctgaacaggtggaagatggtanggctgaccaaatc

SEQ ID NO: 237232 - DNA, 478 bp, Glycine max
ttagtcaacgaaagtaacccatatatgagtaagaatattgttttgaaagagcataacaagactttcctaaattggtttaaagatataaccttcggtgaccataatgcatctgaaacattaaggaagttagtatatgcgcctaaaagaaatgttataacttggcaaggatatgatatcaataagtattcattctacacgaaatcataagacaaaaagagtacaatgcaaaatactggtgttagtctaagggctgaatcttaacactttgctactatacatgatgacaatcctcgcatagctttcatgccttactttggagtcattgaagaaatcttagaggctaattatgtaaaatctcgagtctgtgttttcaactataagtgggtacatagcaatatcggtgtgcaaaccgatgatttcggatttactctggtagatctgaagaagctcgcttatcagaatcagcctttcatcatga

SEQ ID NO: 237233 - DNA, 404 bp, Glycine max
  unsure (1)..(404): unsure at all n locations
ttaagtcacctgcggcatgcaagctttaactgaattacaacgtttaattgtttttttttggcgcaancgaccacaacgaattcggaatcgattaccagcgtgtttgaatgttgaaattcaaattcaaatgtgaagagtcacatcctttcacanaaatgctttgtgtaatcgattacaataatttggtaatcgattaccattgataagttttgaacaaaaatcaaaagatgtacctcttccaatggttttcaagtttttctaaaggttataactcttctaatggtgttcttgaccagacatgaagagtctataaaagcaagtccttaacttgcattttcaagacattgattacatcctttgaatctctttgaacatcctcttgaatttcttcttcttcttccttt

SEQ ID NO: 237234 - DNA, 434 bp, Glycine max
  unsure (1)..(434): unsure at all n locations
ttattacgagtcttgtangaactaatataagttttgatttaatatcacgaaaacatattaaaattgtaatttaatttatatatgttgtgatttgtgaatatacatactttacaaattatattaatgaatgagataacgtatgtgtttgaaatggactaacgtcttaggagataataatagtagtttatgcatcttttagcacattttatatttaatttttagctccaacgtataacacacaggtacaaaaggctactctaaatgtttattaaaaaaaaaggctactctaaacaccaagggtctgataaaatattaaagtaatattctatttacatgctcatcatacanaaagtctacatataaaatatattctattctattcctaaaaattatgataattaagaagtgagaatatgcanataacatttgaatga

SEQ ID NO: 237235 - DNA, 433 bp, Glycine max
  unsure (1)..(433): unsure at all n locations
agcttctcgatatgttatgcgctgtttcgtcatgttagtgaaaaannatganccatttaatttcccgagagcttccgttgttcaatttctagcatctcgatacgctatgtgcctgaatcggacatgcgagtgaaaagttatgaccatttgaatttctcgagagcttccgttgttaaatttctagcgtctcgatacgctatgcgcctacatcgaacatgcgagtgaaaagttatgaccattttaatttctcgagagattccgttggtcaatttcgagcgtctcgatatgttatgtgcctgaatcggacatgcgcataaaaagttatgaccattttaatttctcgggagcatctgttgttcaatttctagcgtctcgatactctatgcgcctgaatcggacatgcgagtgaaangttataaccatttgatttctc

SEQ ID NO: 237236 - DNA, 434 bp, Glycine max
  unsure (1)..(434): unsure at all n locations
ctgatgcaacattcggagagggtcatgagacaacgagattatgctctccatgagaggtcggatcaaatggagaatagagatcatactgaacaataaaggaggagaagagggaatgatggtgttcctagacaaaaccgaattgatggtattaaactcaacattcctccttttaaaggagagaatgatccggaggcctacttggagtgggagatgaaaatagagcatgttttctcatgcaacaactatgaggaggaccagaaggtgaagcttgctgccacggagttttccgactatgctcttgtgtggaggaacaagctacaaaacgagagagcaagagatgaagagccaatggttgatacatggacagagatgacacagatcatgaggaagcggtatgtgccggctagttactcacgggactngaaattcaagct

SEQ ID NO: 237237 - DNA, 446 bp, Glycine max
  unsure (1)..(446): unsure at all n locations
agcttgtgcaaagatattgtgcatcatattttgacatcatcgctgcaatcatcaaaccactaattgatggaagtagtggttaaacaacataatgatgttagaacaatctattttttcaatattgagtttcacaattaatatatttatagcttgcagcaggtatctaaccttaagctcagcttgagtggcaatcacatgattttgaacaattagcaagagagtacctctggttcccttggaaagaacatctacacctcctccacttgtttaagctagatgtatcagaagtttcatctgcaaagaataatggcaagcataagaacagacaaggatttttggcttatttggatnttatttatcactgacatgaaacatgtaanacatggaacaggacaactcataacacctcaatattagaaacataaactgagattaaatatgaatta

SEQ ID NO: 237238 - DNA, 467 bp, Glycine max
  unsure (1)..(467): unsure at all n locations
tagcanatggacctgagtgttgcccagtttcatcatatctttcgttatacttatcacctctatcatatctaataatttccacatttatgtctaattgccattttacttcattgtagtaaatatctaaggcatccattgcctaagaaatctcgggcagtaagtagacataaccataacgtgaataatcatcaataatggtgataaagtatctttcctttccgaaagaactaacatcaaaaggtccacaaatatcaatatgcacaatttcaagaagctgagtgcttcttgtagctcctttctttgtatgctttgcttattttcccttaatacaatccacacaaatatttagatccgtaaagtctagataaggaagaatttcattctttattaatctctccatcctttctctagaaatgtgacctaaacgtttatgccacaagaaagcagatccgtcattcactaaacta

SEQ ID NO: 237239 - DNA, 416 bp, Glycine max
  unsure (1)..(416): unsure at all n locations
agcttaatgaaatcacttataacttatggatgnttaaaccattnncgcaaagctcaaataaactcccctaggttcttccaaacgctatgcttaattaagctggttagcatttttagtcccaaacaaacagatataagtgagttgcacaatctttttctcttctgattttacgtcacaatattaactgaatccacatatatttaattctcttcatttccaagcattataatatttatgtatccattctccaacgggccaaaacataatgtgaccaagaatgtatatattggcccacgtcctacatgaacatccacccatgcacatgggattgtggaagcaacagaaagggtattaaatgcatacttggtctactatgcatagataataaaatgtaaaatgaagcttagcatgatgac

SEQ ID NO: 237240 - DNA, 471 bp, Glycine max
  unsure (1)..(471): unsure at all n locations
ntgacaaagctaaccgaacatcatcaaaatcatttcgtggtccggngatggntgagggattgaaggttcatatttctgctactttgttgcgataatatctccttgtgatttgtatcttgaggattctaggtgttgtaattgttcaataagatgagactgtattagctctgctaaattttcatgacttcagttaaatatgagtaatataaagttgtcttatcctaactaaccgccaaaggtagctccagagggggtgggggtggggtgtgttagtttccaaatcattgtaagggggtactttagccatatatctcgctaatgtgagattatgaaagggtcctttatattgcttctggttccatctatccctagagattctagagttaaatgtcgtcagagttggaggtagcatctgtataccttacggcanggcctagaanaatcttatctatgggtcaaatgtcacctctt

SEQ ID NO: 237241 - DNA, 423 bp, Glycine max
  unsure (1)..(423): unsure at all n locations
agcttaacggncatgatatcttggacatactatatgtgtggttcttcaacatagagaangcttactacttaattaataaagtgaaaatggatccaatagtagtcatggtgctagtaaggagggttaagcttgcgtttgggcctaccataagggacaatggggttgtctttgggtaagggaaagtgggcttgtatcatcactccgccctttgaagaaagtcgttgttctcaatgaccaacgaatcagaatagaagccacgattgtgctttcaggaaacgttggagatgtaaaaactatgattggttggttgggaaaagaagtggtgatcgaanggacattaatcttgggtagtgtctcttgcaaaaggagacacttgacggatacgatggttacgtggttgtggttaagcaatgtagataagga

SEQ ID NO: 237242 - DNA, 452 bp, Glycine max
gctttttcataatagcgttttagcacttttatgaagacatcttctatcactacaatctatatcccgtgcatgtcatcccatatgtggctagaggtttgtattgtgttgtggtcaacgctgcttacgcactagtgttcctgatgaaacactacaatttctacagttgccactttagaattttggaaaatcaactaatgttgttagcactctaaattaggtgaatatttatttgcatgcttgggttgatggagtatgaactcctggtcatgttaccttgttaaaatatttttcagtgcattcttctgcataatgggtagattggttcgtcctatgtcattttgctatgttttacttcaattgaactcattaacctattgtatttccttttttttaaataaaatgacatcacagtaaagacaaacattccaacaaatttgacatccctgcgacat

SEQ ID NO: 237243 - DNA, 301 bp, Glycine max
tatgtgggccatcatcgatgagtgcaaagagaagctaaatctagcggcaactcacgagcaaaggctagaggatgagtacgccaagatatcaaaaaaaagggaagcaagggaaagggtaattgattcattgcaccaagaggcagcaatgaggatggaccgatttgctcttactttgaaaaggagtcaagaacttccccgattgttagccaaggccaaggcattggcggacacctactccgcccccgaggagatccacagacttctcagctattgtcagcatatgatagacttaatggactat

SEQ ID NO: 237244 - DNA, 428 bp, Glycine max
  unsure (1)..(428): unsure at all n locations
ctaagctagaaaataaatctgattctaaatagaattttctctccgctcttggcaacatcaaaaagccaaagtgcatgnaaaaataaaatcatacataaataattttaaaacatacaaaacatatatcatatgctcacaaacaaagaaacaagacaaaaacacaatgaatacctatttatctaagtcactagcatctaaaagaccaagttctcttctaatggcaaagaatgtttcctttgggagaggtttggtgaagatgtcagcaagttgatttttagtatctacaaattctaaaacacaatcacctttaagaacatgatcccttaaaaagtgatgcctaatctctatatgctttgttctagaatgtagtactgggttnttggatagattaatggcactggtattgtcacacttaatgggtatgtgat

SEQ ID NO: 237245 - DNA, 449 bp, Glycine max
  unsure (1)..(449): unsure at all n locations
agcttattacggcgagtgtgaacaaaaaaattattatacatttattntgaatacagagggtnattagcatttcacttgttttcaacacaagaagattggtttattatgaaaaaaacaattttatggtcaggctgtctgcaactcacatggtagtgggggcagtttccacgtgattcaaaaccagactgccaatggaatctgtttacttgggccatccttacgttgggattctaatctcttttttttttctgtctttagatctcctcgattaacttcttttctttctattctatttaatgggcattaatgcaacaaacttttaaaatataataatactattccattatttgtatcactctcactattntgtttcttcttcttataatacaccttaaattcatgctccttggtgaagagaaaaaaaagagtaatgtaagttaacgtgagag

SEQ ID NO: 237246 - DNA, 485 bp, Glycine max
  unsure (1)..(485): unsure at all n locations
tactcagcttaaggtatttccttgctgcatcttgatgatggctacatatgtgtaactgatgcccagaaataaggataggaggcacacaatccacaaactttccttgcataccacgtacaaatttgtaatgtcttgtatctcggttttccaatctattaaccacgataaaacaagtaaatgaaatttacaaagccagatcctttttttctttaggtcataaatctatgtccaactccaactattacagcaaattagatagcctaaccaacgttttgccaagaacccatggttccttgcatccacaaattaccttgagataaccttgtagtagcaattccaagctgcaacactgtgtggatgttgctgaacaatgtattttacacaatcaaacncatgtttcggatctgtggtgtatatgccatttctgtggagaacatgtatttgttttatcagcaagatatatattttccctcctaaaacaaatt

SEQ ID NO: 237247 - DNA, 426 bp, Glycine max
  unsure (1)..(426): unsure at all n locations
agctnnngcctgatttagacatgagtgaacatgatttaggactngtaggattncaattgggcaaaattggatgagggcaagtgtgaattcgaaaatttgcactttatgcagaattttgctgtcaaatatgtgcaggaaaattttggctttgtgcagaaaatgttgtgtatttgctggttgtagaaagagtattacagaatgggttctggatgttttgtagcagatcccaacggtcacaatgtagacttatgtgctagagacttccagtaaaattttcgagtcgatccaacgggtaacgaattggaatgaggagaatgttactggggttnttaagtgagaaaagctgcgatattggtttgtgttgggcagagatatctgcctttgccctgttttcctttgttttgatagttcatgaatgttgggatg

SEQ ID NO: 237248 - DNA, 421 bp, Glycine max
  unsure (1)..(421): unsure at all n locations
gggcgaaggcgcacaacatgttttccacatccacaaagcgcacataaacccaccatcccctgttgcccacctccaactgagctcacgtactctcacgtagcccatatcctcttttctctcaacaccagggccccatcaatcctcccaagctttcccaacatcaaagcaaaacaacattcagaccgtacaagctatcgcagccaagcaaaacagagcaaaggcagacaactctgccaaaacaccaaccaaatcacagcttntctcacttaaagaccccagtaacaattccttcgatccaattcagtaaccgttggatcgactcgaaaattttactggaagtctttagtacataagcctacattgtgaccgtggggatctactagataacatgcagaactcattttgtactactcttcccaca

SEQ ID NO: 237249 - DNA, 347 bp, Glycine max
ctgcggcacgtaatgtaaagcctgcaacacatctagtttctgcttcagtgaaacaaaatcatatctcacactccatatcgtatattgctaatcacaacggtcaaactgtggacagctgtcctaggaaccatcacaaaaacgtttaagaggatccaacggttaatgaatccgggagactcatcttactgaaataggatgaagtagcttcattgagaaactttcttgagaggcttctttgagaagcctccttgagaaacttctatgaaaagctagagtttagctacacacacccctcaaagaactaagttcacctccttgataagcttccttggaactaaacatggata

SEQ ID NO: 237250 - DNA, 481 bp, Glycine max
  unsure (1)..(481): unsure at all n locations
gacctatgatactcagctttttttgttgggatagntttttagcatatcttgttgataagaaattaaaagacaagttctacagagaatattataatattgtttgactaaaaaatttaaattttaattcaattgtgcaacatgatagtggagttgaagttgctaggtattgagtcaaatataggagctcaaaataaatggttataaatattgaaccataaattatacttagttggttatataataactcggttattaaaaatagttacaaaaagtatgtgagtgagtattataatcaatccataactactataaaaaaataatttttatttatttttgaaacttgttagtgcggtttctccctttanacatcattctcttccatccacaaggatcgaacccgagacctttgcttaggggaccgagtccaataccaatcaaatcaatgactcgtttggtcacatattgggtatctcattgttat

SEQ ID NO: 237251 - DNA, 407 bp, Glycine max
  unsure (1)..(407): unsure at all n locations
agctntataagtgcgggtgtgggagacgattgtcatgtgttcgcgaaatgtgaagatgatgttccaagtacttcggatttggtccgaccatgccctcctgatttccagctgggaaattggcgagtggaggaacgccccggcatttacgcaacaagcataatgtaaacctttacggttttaaaagctctatagttgggcctgggctttaaagttttcattatgttaaggctttgtgtcttttgtttttgaatttataatacaaggatctttcttcatctgttcctggnctctacccattctcattcatttgcatgtttactccttttttaaaacggcagattcgatgacgagttccccgaaggtactaatacctgtgacccgtctatctacttcgagccagaaatgaa

SEQ ID NO: 237252 - DNA, 368 bp, Glycine max
  unsure (1)..(368): unsure at all n locations
agcgggcttatagcctaaaccatacttcccacgatttccttgggtttntatcaggctagttatgccgccattgtctttgcctaaacccatcccgggttcataaccgttccccaacataactcgggccatcattaccgccgcatcggacagacaaggttgcccaaagagggagtccacggaggaaatgctgaccacctcaaaagactggaaagcggtttctaacgattcttctgcggcttccacataaggcatggaggatgggcagcttaccaagatatctttctcgcctgacacgatgaccaagtgcccntncactacgaattacagcttttggtggagtgtagaaggcacaactcccactgagtgga

SEQ ID NO: 237253 - DNA, 314 bp, Glycine max
  unsure (1)..(314): unsure at all n locations
cataacacaattgttaaaatgttaaggctatgtgaagattagctcgctgaggcatcatgttcttatagtcttttatatattggttgctgatactgatgactctcttatctcactagagatgctgatagtaggaatattgaatgaggagtgttgacagttcaatccgttataactgtttgaccaggacaaccggagggaggggggagctgtcngtatggtagacatccatccaccttgtggacaaacaaaataaaaacaaacaaatctcatgtggttttttaacggaaaacatctacaaatgaattctgtccgta

SEQ ID NO: 237254 - DNA, 371 bp, Glycine max
  unsure (1)..(371): unsure at all n locations
agctnttcaaatggataataggctcacattttctttcttctacatcatattcaaacttgtccaaataaataataaagtcatctcgactcaaagaaaatcatataagtctcatacaattaatatagaacctatatcctaatgtcacatcctatcagagcgtggtgttcccgtgtcctctagcatgaggttcttcatagtcatccacctattcatctgctcccccgaacacaagttcaagatcatcacaggatccaaacataacaacacacagggagtgagttatcacattcctagctaatagagaaacaagacaatcaaatatacatattatataaatgagataccacttgcttaaacatagctcacgtaac

SEQ ID NO: 237255 - DNA, 384 bp, Glycine max
  unsure (1)..(384): unsure at all n locations
tgagaaggtggcnnaaagcttaaagatactntaacatgtagtatttattatggagtatgaaaagagaggacttgaatacaggtaagtataaaagatagaccagttntgtggtgaaagaaaaaatgaaatatctggctcaaacttgattcaatgacctgaatagctcaaggaaatataagcacctatgatggttatggcacgtacttcaacaattaattcattttagaaactataataattgatacgaaataaaatgtgtggaaatattgagaccatactgcaaatgagcaagtaatattcatcttgaggttccaagtatatattgatggctacacagattaatcccttgaagttaaaatactaacaagcaatttgaagatcaac

SEQ ID NO: 237256 - DNA, 453 bp, Glycine max
  unsure (1)..(453): unsure at all n locations
acctgcggcatgcagctactagagtggggtagtcgatctaattgtgctcacacagngaaactagccaaacttattttctaatgtttttcggaagcatgacggtttatggcgctcgagtatatttctcactcggagatcttgcctcaatatttattgctaaacgcttaatcacacatagtatattatcccctttccattgcatattgtgacttgtttctaattgaacaactgaacaaacttttaacttgaactttctctgttgtaaattgtaattgtacccttgatctcctatgtgctgcggactttcatcactgaatggtatgagggaaacgctgcctgtgataaactactatcaacaaagaaatctgcccaaatgtatgaaaacatttgcacagcctgctgctaattaagctttgaccggggctgtaatcatctttcacctgctggactata

SEQ ID NO: 237257 - DNA, 346 bp, Glycine max
acgacgacggacgtggaacgggcacctaagctctcaagctcggagtagccagtccaagtaaattttaagcaagatactgaacttcctagagtgccgtaggtgcacccagcattatatagaactgacataattatacgtgataggtttgaaggtgaaccagaacaaaataaaatttacgttaattatacctatcataccaagacactcatatcaatcaatcataagcatcattcaggctcattgaccgataatgctaattcaacataaatgcctaaccgatgatatatctagtcatagtcataattgattctaatcaatcataagactgtgaaagatgacatatcta

SEQ ID NO: 237258 - DNA, 435 bp, Glycine max
  unsure (1)..(435): unsure at all n locations
agctngtaacgnngnctagatatctttacattgtttattaagacaccagatctagtttggtcatcacgttgtctaattttctttacgttgcaaatttcactgcttgcacaatttggactatttcttgggtggnttgtcaagttgacctcttataatattgtgtcccacaggccaatcaatctgcatctaggcgtgatggtggtagtgatgtatgctttgggagatttcctaacacattatagaanaaaaagaaaaagtttataacatttattggtgctcctaattaaattattttgcttacttgtactgactagtgactcctctccatttcttattcttttgttctttggggcaattcaacttggcctttnntttaatagtgattattcatgataacactcgacggtcaccaaattgattattcgtgataacaca

SEQ ID NO: 237259 - DNA, 463 bp, Glycine max
  unsure (1)..(463): unsure at all n locations
tatctaggtcaacttagaatctagttaaaatcagcggtctcatttctaacacattaaaaattaagtaatcaccattatccgttcaaaaaaattatgatgacttctctttctgcacataaatgaaccaaatgaaatcaagatatgcaagtaagagaactagaaattttagtcacgttcaaataaaatattagcgtacagttggctacactatacaattctagttatataactctcaattgtatcagttntatgattcataatgaaataattntcctccttttaaaaaagaactgtatagtataatttatcgtttatggaataagggtatatattttattatgagaattattataattaattttttataattaagtattttagcataatgtgtgtgcattaccttaaggcttacaccataaataaaacgagacaaanagagtaactggataatttacangataca

SEQ ID NO: 237260 - DNA, 445 bp, Glycine max
  unsure (1)..(445): unsure at all n locations
ttaatcaccgagctgcactgaagcataaatagtagattttttttaaagtacaaagcttcgattctataattttaaatataataacatttcctgtggtagatatataaaaacatattgcgaaattaaagatattttacatatgatatttgacgtagagtaaaacttgtattacctgttttggctagcataagctacattggtcaccaaatgtgctacttctgagtttactgttcatacatactgtcggtacaatttaatatttcatgtagaattcttcatttttgaaaattttgagtagcatgctttgagcaccatatagtttatgaggaaaaaaaaaacattttgcggccagaggcacgtattctactaagatatatggaccattttagaaataccatgtactagattactttgtccccgatcatagctatntttcgttttccat

SEQ ID NO: 237261 - DNA, 335 bp, Glycine max
  unsure (1)..(335): unsure at all n locations
agcttaaaggaagggaacggagtagcacggtctcatttgtctttgcatcgannggaaaatctgatcctcaaattcctgaaaaatgcaaagatccaggtacattcagcataccttggatcataggaaatagtaagtttgacaatgccatgcttaattcaggagcttctgttagaggtatgcctctggctatctttaatactctatctctagggccccttgcagtcaactgatgtggtaattcatttagctaatagaagtgttgcctaccctgttggtttcatagaagatgtcttagatagagttggtgaactgatttctccctgtgatgtttatat

SEQ ID NO: 237262 - DNA, 291 bp, Glycine max
aaaatagaagcaaaccaccatcctcacaagccacaaaagcgcttcataaccacatattaaaaaccaagtaaactgagaaaacgcggcagacaaagccaaccaatgaaccataaataaaactaacaaaaaggaatcaccgtactataaccataattaaaacaataatacagcaaagagcaaaaagtatcatcacgaagcaaaatccctatggctgcgcctgcgggcctgagctgaccaccccccatctgcagctgaagcacacagacgcaaggagaagggccaagcaggacc

SEQ ID NO: 237263 - DNA, 473 bp, Glycine max
  unsure (1)..(473): unsure at all n locations
agctngttgagggggtacataactactggcttccttctctgtagnatttctaatctgcacttgatttttaactgatgtggatggcttaactgcaaccatttaaattgaagttattcaaatgccttacatacgattgaaataacattactagaacaatgaactataaataatgaattttctttgaagtggtaatcttactacaacagggagctataaaaacattttctaaaagattcatgagcataccaccttgtacttttgtcactcaataatacacttctctaactagcaattaaataaattaaataatcaaacacttcattatcaatatcgaagtttataagccatacnaaattcaaaataaataaataaaacccatcacataatatatgataaattaataatcttgagcaagagaacatacattataattgaaaagtgataggcactaggtatcttattagatagaatat

SEQ ID NO: 237264 - DNA, 325 bp, Glycine max
caccagacatatactaaaccacaaaccactgcatgaggatcaagttcatttcaaatcccaggttatacattcatagataaacagttaatgcacctgtccgagagtataggaatagatctcttgcattcgatcaagtcattccaaattccacgttgacagtcatagatacacacgttaatgcaaccgatcagagagtatagaaacatacctctcttgtattgacgagagctctgctatatactgtacattctataggtcaaactgaatggaatactaaaaacctgcaatgtcacagtaaggacttgcatttcatggagtggaaact

SEQ ID NO: 237265 - DNA, 228 bp, Glycine max
gttttcctctcaaactctgaaattgcgattatgggctcctcttctggtagctcctgatgcctaggtttacatatgcattccttttcattctccctattcttctgaacttttccttcctgcacgcttcttgggttttttttctacctctactagcctctgtgggtatgccttccattgattgtgcgatctgaacaggataatagagtgagacaatatgattaaggagcc

SEQ ID NO: 237266 - DNA, 405 bp, Glycine max
  unsure (1)..(405): unsure at all n locations
acgaaaccgaaggaagagaaatggagagaagtcgagctctgacgcgcggcccacaagactctcattcatcaaagttacaagtgttacacatgcttctatttatagactaggtagcttccttgagaagttttcttgataaaacttccttgagaagcttctttgagaaaaatttcttgagaagctagagcttagctacacacacacctctcataactaagctcaccttcttgagaagcttccttaagaggattcctaaagaagctagagcttagctacacatacctctctaatagcagagctcacctccttgagatgagaagctagagcttagctacacaccccctataatagctaagctcacgcccatgacaaaatacatgaaaatacaaaaaanatccctactac

SEQ ID NO: 237267 - DNA, 300 bp, Glycine max
ttcatcacttcctttaatactacaacttcaacattcaaatagcaatgactgttgtgaaatcagaaaaattactcttttgcactcatttagagtactatatccacataaaacaagcataaaaagttgagtgaaaaaaaaagacagcggccaagattgacagagggacagagacatagatgaaaatgtgaatggagcgtagtgaaagagacttaatcctataataactgcgctatcctctacgagagaaaaagacacaagatatgtgagactcacctgatagatatggcccacttatttcat

SEQ ID NO: 237268 - DNA, 416 bp, Glycine max
  unsure (1)..(416): unsure at all n locations
ttgagcncgacgggcacgatcaacaaagtactttcaacacctactatatggtgatttgaccaacgctattatcggtatggtgtgataatcctttaataccttatttatacattctgagaggtttgctgtcatgtggtcatatcgacagccttctttatcatagagtccttggtccaatctgttccttctgaaattgtgatcaatccatattgctatggctgaactcagttggcgaaattgttctaaatcttgatcaaaaatatgtttgcgaagagtgtatcctgcatgatattagttagcaacaataatttggagtctacatgaaacttaatataacgtgaccatgataaatgaaatttactcaatttcttcaaatttcttttgttcggcatattgaattgcgataaaatgcttgt

SEQ ID NO: 237269 - DNA, 426 bp, Glycine max
  unsure (1)..(426): unsure at all n locations
tgctntaagactggatatggatctctgtagtgatcacactatgtgttcctttccttcaacggaagaccccattggttggtccatataaacattctcttctaaatctttattaagaaagacagctttcacatccatctgatgtagccctaagtcataatgggccactaatgtcatgataatcctgaaagaatactttcgtttataatcaatgtcatctttctgagtaaatcccttagcaacaagtctagccttgtaacattcaacgttgccatgagagtcatgtttagtcttgaagacccacttacaaccaactctcttacaaccctttggtaatcgtacaaggcccccaacatcattatgntccatggaacttatctcttctatcatgtcatttaaccacttctcagaactatcacaacttatagc

SEQ ID NO: 237270 - DNA, 449 bp, Glycine max
  unsure (1)..(449): unsure at all n locations
agcttagtcttgatgaggagcaagtgcacctattggaggttacagagaatcgaggagaccatttggacatgtcattcgaggagatcaaggagtattagatacttttgaagttgttggaatggacgtcttaggaggagagtgacggttcttctgaggacatatcttagttagttcactactcttggtgtgataaatcatctgctatggtcctagttttctttactgattttgatatattttgagatgggtttctccatagatatgtattttgttaaaggatggatgtaaaaaaattattttgcttacattcatactatcatgnggtggatctgtattatttcttttgtgacactactgatgttatctacttatgtataaagactaaggtattctatacatgcatttattttaattccatgtgaaggtttatcgtttctgattgacacatt

SEQ ID NO: 237271 - DNA, 474 bp, Glycine max
  unsure (1)..(474): unsure at all n locations
tgctatattgatatggnttagctaagatgtaataaaagatatatgttacatctacatgttgagtaataataaatctaatgcatttcatcacacacttgtagctagctagctattccctgtttacaaagacatttggaagttggaaattaaactagttttaatcttttgtgtctggctttaactcgtaaaggttcagaaaacgttgcatgtatacagagcaagtggccgctactataccatacggaactttatgcatacgtggactgctctctatggttgaaagttaaataaagaagcagtctaattaaggaaatagaaaaacagctctatcacggttatgtagatataaaaacaacaccgtggcagacagcttaaccaaaacaaacaaatataatgcacaaaaaccaagataaattattaggtggtcttaaattactacctgtttatagtgtcaaccaatattaatggttatat

SEQ ID NO: 237272 - DNA, 430 bp, Glycine max
agcttgacaataaagttacgactgctaattattactctatttagcaggcgaaactggatgtttactcggcatatatccatctttagaataaaaaattaaaatctcttaatccataaatggtatggcatgtgcaccgtttgaaacgagatcatatttaaattgtatgtaagttacaatgctgaataaaaaaaaaattattagtaaaaatgccatcggaagaatttgatgaaaatacgttaaggtaaaagattttatacaattaagtaattgaaaataaactctcgtgtgaatattaaagtactcccttcaatgttattataaggttgaaattaaaataatagctcagattaatagatatacattggtaaggtaaagattttatacaatttaattatggagaactagctgtggtgtgaatattaaacttctc

SEQ ID NO: 237273 - DNA, 326 bp, Glycine max
tatgatactaggtaggcaaacaactgacagtgctatatggtttaatatcttttaaggatcacggaccttagaatctgattctattcattctaaagaagtcaccgacgcatcagatctaatactgatatgcttagtaaatgaaacacgggatttagtaaatggaacatcaaaactagagaagatttgggttgatctgacacgtctgaggaggtatactctctctgtctctctctatatcttgatctacttgattgtgcatctggtcagagaaactagatgttgtggcctgttatctaccgcggatgtactcggttgagtatacatga

SEQ ID NO: 237274 - DNA, 325 bp, Glycine max
  unsure (1)..(325): unsure at all n locations
agcttacccattatgttgtagggttttatgtttattcttgnganctttgngtgctgaaattgctgatggaaaactgatagaaatgaagggtagagttaacatacggttaaaaagtgagaatgtagtgatatgagtagaaaagtgtgatgctttgagggtttgaaaggctaaatctggatttagtgggaatgggaggttaaagngagttaatcctaatttaaaatgtcatttatgacttatggaaagcttgggctgagcaaatgagaaaaatgagtgaccaaagtgaaaacaagagtcatttctagggtaaattgggtggtgaggg

SEQ ID NO: 237275 - DNA, 419 bp, Glycine max
  unsure (1)..(419): unsure at all n locations
gaataaaaactcactcctcactctgggacgatgcttgtaaaggctgttatatattaaaccgagttccaaccaacgctgnctcaaagacaccttttgagttattcaaaggttggaaaccaagtttgcgacatatacgtgtttggggatgcccgtctgaagtaataatttataatccacaagagaagaaactagaccctaagactattactgggtatttcattggatatgctgaaaggtctaaagggtataggttctattgtgcatcccacaacactatgattgtggaatcaaagaatgcaaagtttcttgaaaatgacttgatcagtggaagtgatcaatctcagaacatttcttctgaaagggatcactattaagctgaaccttctgggacaagtaatacgttggtaatcattcccacc

SEQ ID NO: 237276 - DNA, 466 bp, Glycine max
  unsure (1)..(466): unsure at all n locations
agctatacagcagatgcctttttattccatgttcttgaaggatatgttaacaaggaaacataagtatattcaccaggaaaaaattgtagtggaaggaaattgtagtgttgtgattcaaaagatccttccacccaagcataaagaccttgggagtgtaactattccttgttcaattagagaagtcactgtgggaaaagctctgattgacttgggagccagcattaatttaatgtcattctccatgtgcagaaggttgggagagttggagaccatgcccactaagatgactttacaactggttgaccgctccattaccagaccatatggagtaattaaagatgtgctggtcagagtgaaacattntatcttcccgacagactttgtggtaatggatatctgtgaagatactgacattcctgtaatatcgggaaagccatttcatgtaactgcaagctgcatagttgat

SEQ ID NO: 237277 - DNA, 390 bp, Glycine max
  unsure (1)..(390): unsure at all n locations
gggagcacacaattgaaagaagaaaaagagagagaacgctgactttgagttgttgtctacaagaatctcattcatcaaaggtacaacaagtggtacacattcctctatttatagactagggagcttccttgagaagctttcttaagaaaacttccttgagaagcttctttgagaaatctttcttgagaagccagagcttagctacacacacccctctaataactaagctcacctccttgagaagcttccttgagaagattcctaaagaagctagagcttagctacacacacctctctaatagctaagctcaccttcttgagatgagaaactagagcttagctgcacacccnctataatagctaagctcacccgcatntcanaaatacatg

SEQ ID NO: 237278 - DNA, 388 bp, Glycine max
agcttgaatcccctccctgtgatataaagtttatcagccaactcctgaggatcagacctcaggagtgcaaatctggaataagtacacaagttctccccctcttccagcactacaggggtatttagaaatgtattaagagtatcttcatcgaatttcactaagtgacctctcaccctcacctgcttaggtgatttatcctcggggtcatagaggttcgcataaaattccttcacaatagcaatgtctatgctactgtcagcaaaatcggtcaacttctcgtcccaatgtcttctctcgagttcctccttgaactcctcaaactcggtgtaataaaccaccacattcctctccggtagcaacttccgaggcatcgcaatgtctgtatacc

SEQ ID NO: 237279 - DNA, 458 bp, Glycine max
  unsure (1)..(458): unsure at all n locations
agtctcacaattgtcacgtgctcatgcatttcttgttagccatggctatacgagacatcttgccaaacaaagtcaggttaacgataactcgcctgtgctttttcttccatgctatagttagcaaagtcattgatccagtcatgtttgatgagttggaaaatgaggccgcaattatactgtgccagttggagatgtattttccccctgctttctttgacatcatgattcacttgattgtgcatctggtcagagaaatcaaatgttgtggtcctgtttatctacggtggatgtactcggttgagcgatacatgaagatcttaaaagggtatacaaagaatctatatcgtccagaagcatctattgttgagaggtacattgcagaagaagccattngaatttgttcagaatacttagagaaggctaaacctgtgggcttnctgagtctcgacatgatgaca

SEQ ID NO: 237280 - DNA, 339 bp, Glycine max
  unsure (1)..(339): unsure at all n locations
ttgttttaaagggtagcatttcttggtaaaactaactttccaaatgtttgccttcgcaggaaatggccccgaggaagcttgcctcaaagaggtccaggaaggacaaggcggccgaaggaactanttccgctcctgagtatgacaatcaccgctttaggagcgttgtacaacagcaatgcttcgaggccatcaagggatggtcgtttctccgggagcgacgcgtccagctcatggacgacgagtatactgatttccaggaggaaataaggcgccggcggtggacatcactggttactcccatggccaagttcgatccataaatactccttgatgtttatg

SEQ ID NO: 237281 - DNA, 404 bp, Glycine max
  unsure (1)..(404): unsure at all n locations
tggaggctgngccatgttctcagaatgtgcaaaatcagaatgctcagaatcagaatgctcaacaatataatgctcaagatcaggatgttcaaaatcaccaataacagaatgcacagattcaccagctatggaatgctcataatgatcaaaaggtataaaatgatgcctaactaatctatgaaatgtcctatctatctcaggatcaaagggttgtaagtcagatggattgcctctagtcatacactacattcagcatgcacacaactagttgccttgtcatgtaaataaaggtgtaggtttgaactacagctaccctccaaatgacttgaaattttgtgagcaaccttataaaatgatgagaagatagcacacaanatttcagaccaaaattcaaagtctaacta

SEQ ID NO: 237282 - DNA, 367 bp, Glycine max
  unsure (1)..(367): unsure at all n locations
ttaagtcacctgcggcatgcaagctngagctcnccctttctctatataggatttatttactatccagtcgttctttcacccctcagttgtaagccctcaatggccatgagtggtaatcccctataagggcctggcgggcctaaaaagccaacgatgtatggtgtacttcaagattatcaatgcaaagaggattccttccaggtttttattggaacaaagtggccttggaataattaagagggggggggggtttgaattaattatgaacgtatcttgactaattaaaaacttatcattcttaatgttactagattcaattacgctttactactaagttatgagaaagtaaagaacagaaacaatgact

SEQ ID NO: 237283 - DNA, 464 bp, Glycine max
ctctacatgtctagagatttctagagagagaaaggtccaagtttctatagagtttgagagaatttgctgtgcgaagacctgcagagaccggagcttgaagaggaagccgtcctgagagcttgagatgagtttgtgagtgattgtgaggtcctataggtggaggagacatccccactacttgtatttcttcaatccttcatctttctctcttctttgttggaaaggaagcttcccagttatggagagctaaatcctctgttggttcgtccttgtaggtacttgatgtaaatatctgtatatctatttaataatgttttgtgtattcactatgctagcagaacttcattctaccatgcttttgccttgatcacgtagatgcatgtgtttttagaatcattcaagagtggaaactggtctgattcttagaacttgatacttgggctgacaccatataacacatgagc

SEQ ID NO: 237284 - DNA, 425 bp, Glycine max
  unsure (1)..(425): unsure at all n locations
gtcacctgaggcatgcaagctncatacctngatagaggactatccatggaggattacttttctnaagngggcacaacatggatggaccaatcactagagcaaggagtatgagatttctagaaaagcttgcccgagactaaattctctcatggaggagagagaagaagaattgaagttcatttattttagccaacttttagaataagatttattttcatttttaattatatttttgggtctatttttggacttgcaatgggttgctaccttttttattattgttttcaagtcttttaattagtagattaattatttgaccttaggcctaatttaggattattagtaggagatataaatagactccttaaacactcttgtggcaacttttatgaaaacttcaaataagagagtgtctctcttaattc

SEQ ID NO: 237285 - DNA, 413 bp, Glycine max
tggacctggagatatgtcgcgggggtcacgagaccttgcggacgacaagtggggtgctattgcccaaaaccaagcttgaccaatcccgacccaacccgggcatatttgtgtcagatgagaacactgtgatgtcacctaatacatgtcgagcctcctggcagtcaacatatcacaggaacatataccacatatcaagggggcttgtggtggctggccagctgagaatattgtgtgatatgtggattatggcctctggtaatcgattaccaagggtgggtaatcgattactaggcttataattgaagacaggaggctaagatggtctctggtaatctattaccaacgggtgtcatcaaataccaggcttgagaacgaagtcacgaaactaagggagcctctagttatcgattacc

SEQ ID NO: 237286 - DNA, 290 bp, Glycine max
  unsure (1)..(290): unsure at all n locations
aaaaccaacgacacaagacacgacttgggattngaggtctctgctggctgccacacggacttagttctaattgtactaaaacccatcaactagaaagcaaaagttacctggtttccttccacacttaagtgatcctacaaaacactaatcctagagcatatgacaaagaaaccacaatcctacaagcatttaagccatcaacaaaaacataacacaattgagaattgtcatttaaaatactattgcatatacacactctcatatgtatgcttgatggggtgcatgtaaat

SEQ ID NO: 237287 - DNA, 385 bp, Glycine max
  unsure (1)..(385): unsure at all n locations
gagaaggacacgggagaggactggcccaacatagctcacattctccatatttcaccgggcagcaatctttatgatcatatttccgattgaggtatattgtcgatcctattccttccatcctatatatatatttccacaaaatttttggattctatgcattgaaaactgttaaacaaatatttggatttctcgtgtatttcattccctttatatgtattggagaacagacatattctatctttcttttgtcgcctcgtgagtcctaacatcaaaaaacaattcatatgttgcaacttgcaagtattaatcaaaacccaataatcatcctctatttttcaattgaaaattcagaataccttttccttcaatngaactcctacatctt

SEQ ID NO: 237288 - DNA, 396 bp, Glycine max
  unsure (1)..(396): unsure at all n locations
aagagcatccctggggaaccttcacctgacgaagacactgacaaaaacttatcttctccttcttggacaaagtatgggaagctgggggcaagtaaattttcctcccatcataccttggatgcaactgtgctcttatacccatatcagctagatcttgacgggtatccaagccatccttcgtcttgccttgaatgttaaggagcgtcccaataacactgtcacaaacattnttctccacatgcataacatcaatacaatgtctaacgtcaagatcacaccagtacggaagatcaaagaaaatggacctgcttttacatatgcaactctgactnttattcttctttggcgacttcccacaaacagcgttcaaagtgatgaacccgctgatatacctgc

SEQ ID NO: 237289 - DNA, 402 bp, Glycine max
  unsure (1)..(402): unsure at all n locations
agctngctctaaagttacattgatgtttgtatttatgggaggaggttatatgcccattttgctttaagagtaacgtcccactggtaaaactaactttccaaatgtttgccttcgcaggaatggccccgaggaagcttgcctcaaagaggtccaggaaggacaaggcggccgaaggaactagttccgccccggagtacgacagtcaccgctttaggagcgttgtacaccagcagcgcttcgaagccatcaagggatggtcgtttctccgggagcgacgcgtccagcttagggacgacgagtatactgatttccaggaggaaatagggcgccggcggtgggcaccactggttactcccatggccaagtttgatccagaaataatccttgagttttatgccaatg

SEQ ID NO: 237290 - DNA, 461 bp, Glycine max
gaccttaagcacctgggctgcagctggtcaggactacccgtgaatttcttgaatgatgaagaacgaatgaagaacgtcgaagaacggttgaaacctttgcgaaattcctcacggaaaacgttacagaaacgtttcggaagcgcctcggcttataatttcttcacggaaacaatttttccaagcaaattcgaaagagagaagtgccaaaggggctgaacccttttcttcttcacttcctttcctatttatagcaaaataggggaggtggttgccgcccagctcgcctaggcgagccaggttgcttcctccagaagcaatagccttctggaggaatattctggagggcctaagtgggcctgggtgctatttgacccccattttactaagacaccccctctatttttttggtggtctgtttcggaagtacggaacctacgatttcgaacgtacttgtttctttc

SEQ ID NO: 237291 - DNA, 407 bp, Glycine max
  unsure (1)..(407): unsure at all n locations
agcttgaaaggggagagggttggtctttttgatataaggnggnngaaaatggagaacaaaggtattaataatttggcaaacaagtaagttttgcaccatatacccaacaaagataataggtgcggcattaatgaggtatgccatgaacagtatcatgaatgcacgttgttccattcactatttatttattttatgcattttcccttatgttgtgaaagatattttagtttaggctagctggatatggcacaactctcggtgaataaattaatgacatacggtggaagaaaatgattgtaacaaatgtggagcatttatataatttgaaggcaaaatagaagaaaagtaaaatactacaatactaaagcgtgtgtgtgcatgaacatagttaccttgacagggtaatg

SEQ ID NO: 237292 - DNA, 389 bp, Glycine max
  unsure (1)..(389): unsure at all n locations
aaccacacttattaactctagtaacctttgtcagcaacttctttgtggcagatgatttatcacctgacatggctgatttctttattctctgggaaataggaatatcatcatcatcatcctctaccttcagctcatgtttcaccgagactggcttagttttgatagatgcaactggatctgagacctttggcttcttaacagaggcatgcaaggaatcactattatctaggggtcttttagctggcaatggagatggcctatcttttttattactcaagccagcaccattttgccgctctttctgagatttagaaataggcttcttctgatcagagtcgtcacggttactgctatgtgttcccaaattgngattacggtataactttttt

SEQ ID NO: 237293 - DNA, 419 bp, Glycine max
  unsure (1)..(419): unsure at all n locations
agcttgtgatgatagggactaaattatgactttcatgattntttgcctactatatgattaatgagctatgatgtacaaattatgaaaaattgttatgttttgaggtttaaaaccaagtgagtgtgtgaccacctaacaatggatgttgcttgattatgattatgagctttactaataatatattattgtgaattattgcgatttgctattaggtttgggggtgtctaaccctcgacaaagtatatttgttttagagtatgattgatgttgaatgggtgtggtgtgcagtatcgtgatagaaatgtgaagtaggatattgtgagtggtgtatgccaatgaacctcacatggcggttatgtaggttatgcatgggacttaaagaatgtgtttntggcttctgacggatggagtacttgact

SEQ ID NO: 237294 - DNA, 431 bp, Glycine max
  unsure (1)..(431): unsure at all n locations
tgtccacataatctttgactgtatccgaatctttcatcctttgcatctcaagttctcgaatcagattcaaagcttgcattcctttgattttctcactgccttcatactcttccttcaaaaaattatagattttggagtcgttttcatcatcattattctgttgaaaatgactagagatacaactgtgaacaaaattgatttggctttggactttcgaagcctcctttctttgtgacttttcatttgggcaacagtgggattatttggcaaaggaggaacttcgtagtcctcttctactacttcccatacatcattagcatcaagatatgcttccattntgacaacccacatttgatagtttagtccatcanatacgggtacagaaatggtggtaaggaggtttagatntcatcttatgtgtggtggtattt

SEQ ID NO: 237295 - DNA, 450 bp, Glycine max
  unsure (1)..(450): unsure at all n locations
agcttgtgaaagtccgtttgtantttttttattcaatcttgactttatggcatgagattaagtgtaaagactggacctcttgctagttgttattgatgaaaagcttaaacacttgtgcttgagtgaaacagtagtcgtgagactgtggtttaagctactttccttgatatctgtcttatccctaactccaattaattgtacaggatacattatatccttataacatcaggcacctaataggaagaccaacacgttgtctacttgtctttacacatcattactcacatgattttcctttntaatagntagtttacatacctattcatagtccacacatatctttgtatacaatacacctattcactgaatatagctttaccaagtaacacaagttcgccgagagttcgatactcggttcttaccatattatactacttgtgcgatctggtg

SEQ ID NO: 237296 - DNA, 440 bp, Glycine max
  unsure (1)..(440): unsure at all n locations
tctgactntcttgaggtaattgtgggagtttctcactgattatcctttcaacagattcaatctcttcttgcccagtcagaaatactagtatatcaccagggccctcctctaaatgaatctacaaatcaagaacatatgactttaagttcaagcagcaattttatgaacttcatttctcattcatcacaacaatgttaagcatgaaacaaaaatatcataaccaagaaagattgaggcagtgcacaaacaagaaagaatagaatgggatgctcagtgatatatgaaactgtacatacgaaaaatgaaaacgcagaaccaatgcaccaagactaataaattgtttggtatgcaaaatctctatctaacaatagaatgaaaattaaatcacattatattgaattacaggactgaataaaccaatgacctggaatattggtatc

SEQ ID NO: 237297 - DNA, 414 bp, Glycine max
  unsure (1)..(414): unsure at all n locations
agcttaacaaaaggcatgcgaagtgggtggtattcttagagcatttcccttatgttatcaaacataaaaagggaaaaggtaatattgtagccgatgctctttctcggcgtcatgcattactttctatgctggaaacaaaattgattggtcttgaatgtttgaaaagcatgtatgaaaatgatgaaacttttggagaaatttttaaaaattgtgaaaaatttgcagaaaatggtttctttagacatgaaggctntcttttcaaagaaaacaaattgtgtgtgcctaaatgttctactagaaatttgcttgtttgtgaagcacatgaaggaggtttaatggngcattttggggtccaaaagactctagaaacattacaagaacatttctattgcgctcatatgaaaaacgatgtgc

SEQ ID NO: 237298 - DNA, 408 bp, Glycine max
cgagcgtcacgatagatgatgccgctgtttcggacctccgagcgaaaagttatgaccatttgaattgctcaagagctttcattgttcaatttcgagcgtctcgatatattatgcgcctgaaactgacctccaagtgaaaagttatgaccatttgaattgctcaagagcttccattgttcaatttcgagcgtctcgatatattatgcgcctgaaactgacctccaagtgaaaagttatgaccattagaattgttcaagagctttcattgttcaatttcgagacgcatgatatattatgcgcctaacaccgacattcatgtgaaaagttatgaccattcgaattgctcaagagcttccatgtgtcaattcggagcgtctcgatatattatgcgcctgaaaccgacctccg

SEQ ID NO: 237299 - DNA, 398 bp, Glycine max
aagcatcaacaagaatcaagccaaggctattgtgcaagcaatcaatggggcaaaacacaccaaatgattatgatgatggatggctcaaattctcacacaggtaaactcatcaccttcaaattaagctttcaaaactatcatgacatgtagaggagaatcaaaaatttcaagtcacaaaatgtcaaaaacttttattttcaaaacaattacccatttcttgaacatatcatatgattcaaagaaaaacatgctaagtcgtacatgcgcacagaattgacccaaaatattaaacttaaaatctgacgaaactaacaacattaacaaagtaacaccacttacagattacaaaaccaacaaactaacaaaaccaaagaacactcccccatattaaatacaca

SEQ ID NO: 237300 - DNA, 365 bp, Glycine max
  unsure (1)..(365): unsure at all n locations
cttattgctcaagctcatttacaataaaggacaaccactttcttatgtttaccaactcaagaaataatcaaagttaatagaagttattcaattataaactaacagaaagattatgatggcagacccccaattaataggatgtaactagaaagaatacaaaggagtgttataaaaaacctccaattgaagaaagttataggagaaggaataggctaggctgaatagaatccatttctttaaagcaantttcctagagttgtgacaaaatgctacagttggttagccaactaagtaatgactacagtcggtagttaacagactatggtgacgatgtttaatgagaccttgctggctacatggaagtg

SEQ ID NO: 237301 - DNA, 329 bp, Glycine max
  unsure (1)..(329): unsure at all n locations
gcattgggggagctgatgctactagccagccgctagagaaaaccactattctcataaacttggttcctcaaggagtgatgtttgatgatacaacggcattgttaatatataataaattctggccgagagagattctcaatgatgcttctgcctttggggactatgaagtgctctatgttcattatccaggatatacattaacataagnttcttaagaccattttgtgtttgtattaatatgaagtcaataaaagcagcatatttgggtttatatatccttttggataacacacgcatgcctttcaccatctccacctttaaatgttcat

SEQ ID NO: 237302 - DNA, 358 bp, Glycine max
attcccacatcatcggctgatatgaaagtatcgccatcgctggaagatatgagcaacataacaccatccaaatttgatcagtatctataaaaccatgaaattaaaaaacaaatgtgcacaaaatcatgtagacataaagcaataccccagaaagaaaataactagccatcctttttagaaacatcacaataagagaaataaaaataatatatgcaagattgacactgaatacccagagggttctcaattcaaccaaaatttgctagactatggcaaagtacaaaataagaaaactaaaatacctgttatttgaaatagaactgatgtgataatcatgagcatgcgcatacactctacg

SEQ ID NO: 237303 - DNA, 417 bp, Glycine max
  unsure (1)..(417): unsure at all n locations
agcttgtaaagagtattgtatgattattgatttttatgttgaacatactgtggaaaatgttcatatactcataagagctaaaatgttaatattttctttgggacatgcaatcttgcttatatgactctcttgataatgacatttggatgaaactctctgaaggaaataatntgcccaacaatgcatattcttgagaagcatattctttatggactaaaacaatcaagtcacatgttgtataatgaacttagtgagtacttgctaaaggaaggataaaaaaaatcctatttgtgcatgtattttcattagaatatgaaaatagattctccatagttgttatttgtgtagataatgtaaatactatnggaactcttgaagggctttncaaaactatggattgattaaagaaataatttg

SEQ ID NO: 237304 - DNA, 405 bp, Glycine max
  unsure (1)..(405): unsure at all n locations
tgcttggtagaagtccagactctctgcatatcattgncgtgcttactttnganntgccttgacggttacagtctcctcggtcaaggtggggaatttcattcttagatgcggtgtggagactatggctccaagctcgttaagtgtcttcctgccaatcaaaggaaaatatgatgtatctgcatcaacaagcaaatatcttattgtgaagctcctggagagctggtcttaaccgaaagtggtcattaagtccacgtagcctctactctcttgcctgcaaagccaaggagtggactgacgtgaaggtggacagtgtctggggagacctcaagcctctggaaagtctccatatanatatcaatggagttccctgtcgatgagaccttggcccatgagttgcgatgacat

SEQ ID NO: 237305 - DNA, 413 bp, Glycine max
  unsure (1)..(413): unsure at all n locations
agctngcctaattaacctaagaatttagatattgattattaaacacacaaaatggaagnactaagtatttattacctatacttatcagaaaatacttataacactacaaaataaccataaattggacgagtttgatacaatttacacaagttttattcaccgactgacacacataacagagggtacccctaagggtacatagatcacattcaatccctaaaaataaaactaatcgacggtcgcacgaagaacacaaaacaagagaacaatgtagggaatgatcacggtcacaattcgatagcgcctcggctttngtttctcttctttctcaattccctcaagtactaaacctttgaacccgttaaaacacccctaggatgcctatttataggcaaaaggccactttggggccg

SEQ ID NO: 237306 - DNA, 469 bp, Glycine max
tctattctggatctttcttctcagaggagaggagcctttattcatcagttctaggacaatccttccatggtgtatcaaagttataaaagactcattcaatacctagttgagcttgctctagatggaggaaaagagtcaacttacgttgtgattccaacactgtctttcgtcctcaacctatcaaatgacaataaaattacaaattacaaatatttcaatacacatttattttagtcctttcagagatgctattagatatacaatacataggaatatggctttaatgatagagaagcagagtagaaaaattacgatactttatatatgtaaaatgaaatatgctaaggaactcaagaaaagatatcaaatggaacacttacagcatatcatcagtgataaaataagatatacgaatgaaatggtaagtctcaattgtccacttcagtctaacttcagtccacttacacct

SEQ ID NO: 237307 - DNA, 401 bp, Glycine max
  unsure (1)..(401): unsure at all n locations
agcntttttgttcggtgtgccaaataanttacattgtangtcggctagggtttttcgtgcgagctcaaccgaagctgtgtttcggccgacactggcgtgttcccatgcactcggccaagaaaacattagcccagatcgaaaagaaaaaaaaacattaatcaccgatattgatcggaaaaaatgctggttgacgtcggccaggaaagatgaccgatcgaggtctaaaaataaaagaatcaccggatgacgccgatcgagcatttcctaattgacatcatccaaatattatccagggattggatagaaaaaacaatagctgataccagtcgttatgtagtcccgactgacanttttcagccgacattgcgcagtatttttttcaaacgctggccgataatata

SEQ ID NO: 237308 - DNA, 469 bp, Glycine max
  unsure (1)..(469): unsure at all n locations
ttgttgaaatgccatgtnnggatgagttagacatacttattctgtnttatggtntncgcgacgatgctggtgatgtttatatgctgaaattgctgatggaaaactgttagagatgaagggtagaactaacctatggttagaaagtgagaatgtgatgttatgagtggaaaaaaaaagtgaggctttgagagttggaaggttaagtctgaattctgtggtaaatggaggttaaagtgagttaatactagcttgaaatgtcatttacgacgtgggagaaagcttggactgtgctagagagaagaacaaatgatcaaagtgaacaaagagccatttctagggcaaaatttgggtgttgaagagtcaaattttgattcggtggaattttacgtgtaaattcagtttgagcaagtttagattgatgttatggaccattgtgaggtgagagtttgcttcaaatttacctcattct

SEQ ID NO: 237309 - DNA, 219 bp, Glycine max
aacgaagatatgctttgaccacagacactactgccaattggcaagcactgtcgcccataccaagctatacctactatcaataacacccatattcgaaccctggtttggagacaaggaaaaggcctacacggaccaatatgaccattctagtactcaaattccgctcctactaccataaaaggtgcattcatagactgagccacctatctgactacagga

SEQ ID NO: 237310 - DNA, 472 bp, Glycine max
  unsure (1)..(472): unsure at all n locations
gaccttaagtcaccgcggctgcagctttaattaaattcaaaatttaatttgtttcataaatcaatntagccactagtaatcgattacatcttctggtaatcgattactagagaggtactatcatatttttgaaaagataattgttcttaaaaaacttttgtaaaatatttcctttagccaaacttgtgcaacatcaattatggatttctttctaagatcctaactaagtacatcgttcttcttgcatttttgaattcttgacttgaatcgcgttcatctttgacatcatcaaaacttcatatcatatatgcttctacaatcaatgagtgactgatagacaaatttgcaacattgtaaaattntaggaacaaaatttgcacaaaaataaataaaattatctagcacagttcttatgacaaagctaaccttgagagcaaanggtcaattaaactaaaaaaatcttattatcatt

SEQ ID NO: 237311 - DNA, 395 bp, Glycine max
  unsure (1)..(395): unsure at all n locations
accaccangccacngggggggactaagcaaaaacactggctagccacgcgaaanncaaaaactagncaaaagatatttgggtgtaagataaagttgcaaaaattaagattaagctataaaataaaggcttaattaagattttcatatttgaaaaataagttcttttttaaattactaactaacattcatttttttcaactaagtacttgaaaaaaatttatgtttcaatttagtacctgccgttaatcctctttcgttaagtgatgatatggcaaacaaggtgtcacgttatcaagccttatcactgacacctcaatgtcacgttatcaccttctttcccttcttctttcctttttnaccttctntcctttcttcaacgganaccaccaccactg

SEQ ID NO: 237312 - DNA, 471 bp, Glycine max
agcttcatgatgaatcattattgtttcatttatgtttgatgataacaaagatgatgacaaaaagcttaaaagtcaagaacacttcatgataacaaagattaaatcaagtttcaagttccaagaattaagatcaagattcaagactcaaaattcaagattcaagaatcaagagaagactcaatcaagataagtattaaaaagttttttcaaaaactgagtggcacatgaatttttctcaaaaccttttaccaaagagtttttactctctagtaatcgattaccagattattgtaatcgattaccagtagcaaaatggttttcaaaaaactttcaaactgaatttacaacgttccaattaatttcaaaatgttgtaatcgattacaagtatttggtaatcaattaccagtatgtttgaacattgaaattcaaatttaattgtgaagagtcacatcctttcacaaaaaagcttt

SEQ ID NO: 237313 - DNA, 444 bp, Glycine max
  unsure (1)..(444): unsure at all n locations
tagaggtctngtgttcaaatccgagcagcatcacttcaatattttgcatcactnttggaaaagcaaaagttgggtgcatgtggataggttgaatatttaaagaaattaaattttgcatttgttgttttcatgaaagttgattatagactaagtttgtgattgtcctaatcgttcttcagctccttgtcatgttcttggtaaagcaaggagaataggttaatttcacaaacaaaaacaaatgagaacacaaattacactggccaaatctttttaacacaaaaaacccaatgtgaaatggtactaagcacttagcaacggtaaagggtatgttcggacacagtaattataaaattccaaacaatgaaagaggatttgacagatcaagagagaaaaaacgttgaaaaagaaaatntatagagaagggaaggcgagagggtaaatatg

SEQ ID NO: 237314 - DNA, 458 bp, Glycine max
agctttaggctgctcaatttcttcttgttgttgtatggaagggcaaaggtctatatggtggtcagcagaggagcataaaccacagactcttgcgacaggtacaaatttttgattcaaggccagctgggttaccaagttgaccaatgcatctagtttgccttcaagcttcttagtttcagatgatgcagatgagtttgtagccacctcatgcactcttctaatgactataacatcatttcttgcgctaaactgctaggagttggaagccatcttctcaattaaatttctggcttcaacaggagtcatgtctccaagggctccaccacaagcagcatctatcatacttctctccatattactgagtccttcataaaaatattggagaagaagctgctccgaaatttgatggtgagggcaactggcacataagttcttaaatctcttctagtattcgtata

SEQ ID NO: 237315 - DNA, 460 bp, Glycine max
  unsure (1)..(460): unsure at all n locations
ntgtacttcataaatactgttttgaacctgcgaattccttctcaaagactctcccctcttttcgattcgagcaggtcctaaccagactcttgctctgtaatacgcttcgaaactcgagacgacatctaatgcatacttagagcatattttagctcgtcgaaaatatgggctaacacaaggtagcaagacacatggcagaaaacaaaggcaagctagcaaggcagctagcagaaaactaaggccaaaacaggaggggtcaaataggcaaaaacccagcaaaagggccacatgtcagagttccaacaatggctataataggcatttcaatggcctccttgttttacttacacatccaataaatgatccaacaaatggccaagcaaggccacgacaaaccaaaaagttaattgatctgtcagaaacaaaacatngcagtgtaaatggtgtaacaataaccaac

SEQ ID NO: 237316 - DNA, 388 bp, Glycine max
  unsure (1)..(388): unsure at all n locations
gcagctgcagctggactctgtgttggacctcacttctcagtgtcccaacccatcacctggttcaagcacgactttctntctgcttttgttggctcgccttgcatagctcgcattattcttttcaatatgagccttcacttgctcatgcagcttcttcacatactcagctttagactgtgcgtccttatgcttaaacatatcaatgttaggcataggcaacaaatcaagaggagtcaaaggattaaatccatacactatctcaaatggtgatacatatattgtgctatggatgatacgaaatcagagggtggtaaccggaacaaacaaccaataacgaaggtctatgtaccacccttattagcgaattccttaaagtattttgtatttg

SEQ ID NO: 237317 - DNA, 125 bp, Glycine max
tattaatccaaatgaaacaattcgaatatgaatataacgcaataataataaatggagataagggaagagaaaatgcgaactcagttttatactggttctggcacacccttgtgcctactgtcagt

SEQ ID NO: 237318 - DNA, 203 bp, Glycine max
ttactaaaaaaagagatgggaaaaccaggccataatagggagatcacaaggactggacctgtttaaaccaaaagagcgttaactttacaaccgcaagggtcaaagaaaagcgaacacgccacagaagacacaaggaatccaagacatgaaacgaggaaaaaggataccaaagtctgccaaaccccacaaggggggggagaaaa

SEQ ID NO: 237319 - DNA, 141 bp, Glycine max
aaacaagagaaaaagggaaaaaaagcaggacagggaaaccaagaaaaaaacaaaacacccccgaggaacccaagacaaacagacaaaaaaaagagaaacaaagaaaaagacaaacgagaggacggaaagaccaaagacaga

SEQ ID NO: 237320 - DNA, 71 bp, Glycine max
accaccgaagattaaacccagccccgaccgcctttctttgatcccaagcgcaacccgggaccgcccgggaa

SEQ ID NO: 237321 - DNA, 76 bp, Glycine max
acgttgaaataaaagcacgcaacttgagaaccgaacacaaaagaaagttacatatcaagcccacatcatcactaac

SEQ ID NO: 237322 - DNA, 355 bp, Glycine max
atataaactaagcttctgcggaccgctttgggcacgaaaaccctattcttttttcctctataacaaacaatttcgaattctatagatcctgagagacaaacttcaaatagttgctcggtcccctctttcctttctgcgaaacaaaaaatcacaaagttcgtcaaaacatggatgaagtcccatgaaaatcaatatcgtagaaaacatggatgaaatcacaattaaaaagcacacttcctatctttcagagacccttgaataatatgacctagctccctatgtggtgggagttcgttaaaaatattatactcttgccttccaaaacaaacgtatcactaatcctctttacattaat

SEQ ID NO: 237323 - DNA, 259 bp, Glycine max
acggactcttaccacaccgccgctcgggttgagactaattgagccatggggcaagccaaagcgggggttgtgagggggttgcagaactaacagcgcgaaagacaggtttgcatttgaacttttttaaaaaacaattcagtttttgtcgaaactgatgttacatcatggtttaaaaaaactgatgttaacgacattatgttaacattcggttcgacaaaaccgctgttatataatgacactactaaaaatatgaggttta

SEQ ID NO: 237324 - DNA, 185 bp, Glycine max
  unsure (1)..(185): unsure at all n locations
aaatgtgtgggacaagggcactattccctaaaccaacggaatcattagatagtccaccctcatgtgactatttctgaccacttcccattaccaccttatataactttttataatgntcatcccctacccctaagatggagagacctaacctgattatcaccatggtaattatatatgttgtacac

SEQ ID NO: 237325 - DNA, 286 bp, Glycine max
  unsure (1)..(286): unsure at all n locations
ttctcttgagccttanggtagaatttggtcctatgggctaagtatgagcccacttatctttgtacatattagaataaagttcactaatttttggcctggntctaaggcctccatagtgtaagggagggtaccctataatgtaatacttttcagcccttgattttaaggaccctaaatatattttcgaataggggtagttttgtaattcacatgtatangtgcactattgatggtgtgttggaaaaaaattaattgaatgggaaagcccgtcaataattttggatac

SEQ ID NO: 237326 - DNA, 410 bp, Glycine max
ggcatctattacaacacatgagagatcattgttctcttgtattcaataccgaggagaaagatgaacagcatatctgcatgccaaccgcatataaagaaagtccgaagaaacccaaacccttggtgatacacttcaccaggggcactgactcccaaaagcccagagtcccctcggcggaatcgggcgttagacttgttactctcacttacaaaaatagcatcacagtcccatggaattacgcccctccatgcgatatgaaaggagaagctaccaacatcggctcactgtcagccaaagtaaccaacatctctggcttaagtggcacaacctgcaacggtcgtgtgtgcgacccaccgactaacaacgcacccatgaacgctatatgaatacaaggtgacgaggacaaacat

SEQ ID NO: 237327 - DNA, 120 bp, Glycine max
cttcgaccataacttgggacgtgatcttctcaccatcaagatttttctttcttaacaatatagcccacttatctcgccactattttatctttcatgctcgaactaaacttctaacccata

SEQ ID NO: 237328 - DNA, 204 bp, Glycine max
accactttaggaataggcacattcaaatctttctggagtgacagttccgatgaaattgatgagccaacaaattcaaacaccacaaaaaaccagtaggctaccacgagtaaaaggtggcaaattgtaaacaacactaacagaagaacggatgctgccagagccacgttgaagaaagacggctgaaagcacagagaaaaggtcagg

SEQ ID NO: 237329 - DNA, 197 bp, Glycine max
  unsure (1)..(197): unsure at all n locations
taatcaggcccatgtatnggtcatagccggtaatatacgaatgacttccttatatatattccacctcgtatgactcccaaccacctatctatatcttatgagttatgactcattccaacccttataatattgtatgttatttttattaatatatgctatgtcaaatcccatctcatatgacaagaagtctacgtagt

SEQ ID NO: 237330 - DNA, 286 bp, Glycine max
  unsure (1)..(286): unsure at all n locations
aatagatagaataggctctataaactatatatntgacattaacacaatnttatgttattattaaatacttgtgattgcaatggaacatgtgtgatcaacaggaaacaaaattatactaaatttgagcatgctggcaatgagtgtcaagaggatctgcttatataatatatagatgcatggttacgagataggcaatctgaagggttagattctcgattatatatagatacagttggctatgtatgtatggatttcatatctatatggatgtataacaataacttta

SEQ ID NO: 237331 - DNA, 438 bp, Glycine max
tgcaccttatgacataccattaatatgcatttgtggttctgtttcttgtatacacaccacagtcattaaaaatatgatcaattaaactttcaatcaccacggaaagatattcagtttctttcttaccaataccaagtccacggtaaggtgccaaaacacctaacgtcatgatgttaacccgaacttgccccccaccttccttcttctccagccggcatgcaatcgctccaacacaaatatcactatatgtagctgaaaggcaaagtactcaacggtgtcagacacattctatatgtcccttgtatacccatcccttctttctgtatatccatattcaagcaaactgaaacacagatatatcaaacatgctggttcaactaaagaaatgttatatgcttgcatgctaactctatatcaaatgctttaaaaacacgtgat

SEQ ID NO: 237332 - DNA, 273 bp, Glycine max
  unsure (1)..(273): unsure at all n locations
aaccacaacagaacaannatgacctttccagcaacagatacaaccctggaaggaggaatcaccctaatctcagatggtctagccctcacaacaacaacaacaaccgcccttcctcaaaagctgcggccaacaacaacatcctcacaccacacgaaacccaaaagcaagtgagccccactcccaaacggagaaacgcaagcgaaaaacacccaacacacagaaagcataacaacaacaacgccatgcacaagggctagggaagagcacgaccag

SEQ ID NO: 237333 - DNA, 182 bp, Glycine max
tttatactcagctgctaggtatgggataccgaatggaccttgcctttttctcaacccttggctctgagtgcacaaaagcatgaaaatgatagcatgttcttgaagattcccttgttatgccaccacttgggtttggctataccatgattatttcattgtacctagattgggtgaaaatagtt

SEQ ID NO: 237334 - DNA, 243 bp, Glycine max
tacctggagatatgtcgcgagggtcaggagacctttgggacgtcaggtggggtgctattgcccaaaaccaagcttgaccaatcccgacccaaccctggcatagtcagtcagtgagaacctgtgatgtacctaaacaggcaagctcctgcagttaaccgataaagaacaaaacccacacatggggcttgtgggggctggcaacatgagcttgagtgaattgtgatatgctctggaatcattacc

SEQ ID NO: 237335 - DNA, 367 bp, Glycine max
  unsure (1)..(367): unsure at all n locations
aagaaaagtcaacctttataaaacggattatatcatcattcccataaactataatcttcactggagtgtgattgtcatttgtcaccctgctgaagtcatgacatgctacagagatgaagaaactaagggatctcccaaagaagcttgcatcttgcacatggattcccgaataggaattcatgtacatctccagaatgttgtccacagntatctatgtgaagaatggacagagaggcacaacaatgtgagggatgatgttcctccaaatctttgatcttccatcgcgcacttgaccgctcacaacaaatgatacaatgggatctttgctcactatggaacattctgacaactcataacttaccgcacc

SEQ ID NO: 237336 - DNA, 275 bp, Glycine max
  unsure (1)..(275): unsure at all n locations
cgcctcggcttaaaattttcttcacggaaacaatttgtccaagcaaattcgaaagagagagaaatgccaaaggggctgaaccccttccttcttcacttcctcccctatgtatagcaaaatatgggaggtggttgccgcccatctcgcccaggcgagctcatctcgcctatgcgagccatgttgcttcctccagaagcaacagccttctggaggaatcttctggagggccaagtgggactgggtgctattngcacccacatttttactaattacac

SEQ ID NO: 237337 - DNA, 352 bp, Glycine max
tctcaatatgaaaattagtacttgaatgctcacaattgaatattctgaatcaccagcaacagaatactcataatgctcaatatgctcacaatgttcgaaatgcacagaatgatcaggatgaacactatgcctaactaatgtatgatagggtctatctatttcaagatcaaatggttgtgaatcccctgtattgcccctagtcatgcattatatgcagcatataatgtgttctcaaacaagcaccatgggagggttaaaactacaactatagtcccatgatatccaaatgagctaaaattttgtgagcatcacccttaaatcatgataagatatcgccaataattttcataca

SEQ ID NO: 237338 - DNA, 200 bp, Glycine max
gattttatcacagggtaatacgaaggggtgattgttttcaaagattgctcgaaaaattctcctaaaaggatcgtctaactgagaagcgagccaatgaatatttgatagatcgcttcctatccgcatcatatcctaaaaacgggatgtaaaagcctgttaaccttttaaataagggtatgtttgcggattgtccccggtta

SEQ ID NO: 237339 - DNA, 281 bp, Glycine max
agccacaccagaacaattgtgacctctccagcaacaggtacaatcccgggtggaggaatcatcccaaccgtagatggtcaaatccttcacaacagcagtagcaacaacaatagccttgttttcagaatgctgctggcccaagcagaccatacgttcctccaccaatccaagcagcaacaacagcaacagccccagaaacaacaaatagttgaggctcctccgcaaccttcccttgaagaacttgtgaagcaaatgactatgcaaaacatgtagtttcaaca

SEQ ID NO: 237340 - DNA, 58 bp, Glycine max
tagactggcgactatatttaactggttgtatcatttttactttatggtgataaggtta

SEQ ID NO: 237341 - DNA, 425 bp, Glycine max
  unsure (1)..(425): unsure at all n locations
cttatgaaatattacacttacatatatttattttcaacttacctangcttaatggtcaagctcttatacacaccttattaagttgtccactcaaaaacattctatgtcttgttctaataattgtttcaataaacattcttatgtgaagaaaataagaaagtaaaataaattgagtttctctcgtaaataaaaatcatcctatgcactcaactttatataaattctctaactggaaattgaaatgtataagtaatttaactatggaaaaacaaactcctctatcaaacttcttttttataatactcatggaaattattaaatggataaaaaaaatgaataacattgttaatagcacatgtgggggactattacataatttttaagctattactacaatataaaacaagatgtctaccttctttttt

SEQ ID NO: 237342 - DNA, 228 bp, Glycine max
  unsure (1)..(228): unsure at all n locations
ttcaacataatcagcctctgtgaataatatctgttgacatatatcccagcaatttgacccatctgaagttgtgcaaattctcttattgctgtatgagcttgtatgcctttgctaatcaaatgcttttccttccattagacataacataaatcttngtcctcattagagctttgtggtgtatttctgcaattcaaagaacctatccgctttggctctccattcgcaata

SEQ ID NO: 237343 - DNA, 197 bp, Glycine max
cattttgtggtatggatatcttgtagatccaaaaatgagagcctggatttactcatgccatctgtggtttttaagggacaagattgtaaatattatttgtgactaaggaaacctgcggcttgacataagtttacgcctgcatgttactgatataaatctgtgtgtcaccggtgactcatttttaaaagcaccatttt

SEQ ID NO: 237344 - DNA, 397 bp, Glycine max
gtgaatggtaactgcataccactaatgtatgtgcatgctcaatttaatatctcatgcaagagttcatttttatacatcaaaagacactttaagcacaaagcgtatcttcattatatcaataaatgcatgtgaatattaccttttgctaagaaaattctgacctagacagcctctcctctatagtataccaaataccagcacaagaataactactacaccatccacaattgcagccacagtacctgcagacatgctacttccattttctgaagaaggatgaagctgcttgaaggtatataagacattgtataaaccttatatggcatttttaattgtcctggaatataaaaatattcccactaatttatattaaccaacacatttttataaatactta

SEQ ID NO: 237345 - DNA, 432 bp, Glycine max
tgatacaactcattattacttgtcttaccaagccacttatggctctatacaaatcagaaaaaatttgtgtttgtttttgcacaatgactaattctatgatcatcttaccgaaggatatacaatcaacatgtagtcttttctctcaatatgcccaaagtgttttgaaagcttttctatactttacaagaatgtacaagtttttttataaaaaagttgaataaatgcgcataagggtcatattcttgttcttcaaacatgtggtatttataggctttcatcttcaagtgtttgttgtcttgcaatgagagaatttctccacttgaactctggcttatgattatgattgttggagcatttaatgcgggcattaaatgcatggtccttcctcatatagaaagactactctgatttgactttatgaagtactctatc

SEQ ID NO: 237346 - DNA, 379 bp, Glycine max
acttacacaattatatgaccatactatatttatacctatgccctaaccaaggatataacatactaatgactggtgtactgaattgtggaaccaaagtaccccacagcacagcaccccttgctcaaagtgaccagtgcatttgctatacactgacaaaccttattataccaaaattttggaccaattacagatggccatattaacaacaacacttaaatgaataaggggcattaatctcattggcatatcactacacttgactttccctgaactggctgattcaaagaggcacactgtgaaactcctgcttctgcttacctgcatagcctcagtcctcaatgacctgcctgtctggcagtctatatcttctttgaaagat

SEQ ID NO: 237347 - DNA, 239 bp, Glycine max
aaccatgtgataactcgtgcgtatgtcatccatccattaacagtcactttctctcgggattgggtttccacagaatcttataagctatatatacacattccatggtcttcagtcaacacatgccattgcaatcctcaagctaacttcgacattgttcttcttctttcaatcaagtagaaaaaatgggttgccgtttacctgctacttgacagccattattcacagcttcgccagcagct

SEQ ID NO: 237348 - DNA, 99 bp, Glycine max
ttctgcgctccactatccatgttcacacattatagcagcttgtggttacgtgagcatgaactactaccaatatattgatgttgctacacagatgacaca

SEQ ID NO: 237349 - DNA, 340 bp, Glycine max
actacacattgcaatgaaaccattatctatgcgtaatcatgttaggattcatggtgtatcacacgaatgcaaaaagacaaatcaataatgtttatattacaatccacaacaaagtaaatatgttcatatgcactacaatagtacgttaacctctaagtctaaaacattgtatggatgtgcatacactgattcctgacactattattgagataatgctaaagcactctcacaacggggatagccaagaaaaacggctgtaaccctcgatttttgaatatagaaatagcttaaaacctttcttaatgtcaaccctacactttggatttatggaaccaatctt

SEQ ID NO: 237350 - DNA, 465 bp, Glycine max
  unsure (1)..(465): unsure at all n locations
tatggaacatacatgggcaatttgaatcaatttaatagctgttgtaatcatttttggccactggtaatcgattacatcctatggtaatcgattaccagagagtaaatctcttcgaaaacactctttaacttaaattacttggccaaaccttttgctacttcagttaggaattcccttcctatntaatatacccttcctaagactctagagactgtcttgatcatccatcttgaatatcttaaatttctttgtctcgaataaagctttgagaagcatgtgatcctttggcatcatcaaaacattcagcttgatccattgtctacaaatctcccctttttgatgatggcnatccctaaatcaagaacagctatatcaagatgatacacgttacacaaccctactcccctatctttggatgatgcctaacttactgattaatgattctaacccagtctaagtctgccc

SEQ ID NO: 237351 - DNA, 204 bp, Glycine max
tcatctgtactttcttttcaactgcaaatcaaggtctgatttaattgttaacctatttaacgaagcgccggttaatccagctctttcttaatggaattaaccacgcgaataagaatgcgtcatctatcatacgtgaaatggatgaatgcatgaagaaatgtgtatggcacacatgcatttcttggataccatagcccgggatat

SEQ ID NO: 237352 - DNA, 216 bp, Glycine max
  unsure (1)..(216): unsure at all n locations
aatttttgtcaaaaacaaaacaagcgaaccctcnactgacaagctctcagtataccacttcacgaactaatgtgtcttgggacccctgcagaacaggactgttgcagggttacagacacgggttgggcactagacaaccgggcacgaggagaaggacagcggatcctgcaaaaaaaatgatatttaaacctgattgatatccgacatctataaatc

SEQ ID NO: 237353 - DNA, 298 bp, Glycine max
ataaactcacttatacggtgggaggaaattaagacctagaatttattctacatcgatgctgataaatccttcatagcaatattccgtcgataagcattcaattcctgtattttaatctccccgcgtggacaaaactattcataccaatgaaattcacatttcattttctaatacttatattaagaaccacaaggctccatatctgaatgaatacataacacgagtcattgtttaaatagtgaaacactcaaaataaacctaatgtcatgaaacatataacaataaacttttcaaatat

SEQ ID NO: 237354 - DNA, 295 bp, Glycine max
  unsure (1)..(295): unsure at all n locations
aatagaaggatagtaaatgagagtaaataatctatgcactgatagngtaaagggtttttacacagntacattgccattcaatcacaaactaacatacantggtaagttgttgacttttatataagttatcttaaaaacatataataatggttctgattagtactaagaaattctttacctataggctaaaatacactaatgaaggcctcatatcaatagtccttactattatgcaatctctaaatctcatttgatctgcacatgatcactgtactggatataagccattgtttga

SEQ ID NO: 237355 - DNA, 234 bp, Glycine max
  unsure (1)..(234): unsure at all n locations
tcttctgatcagtgctttctttggattgatattgcatatcatcattggatgaggaactaaactactgttaacttatacttggaaagttgtgaatnntgtgaccatcactcgcctttcaagttgctctttataaataatacaagcangctaacacgtgcttacatactgactcatctcctctgttctatcacgagctcaagtttatcccattctgtgatatatgatcattgacag

SEQ ID NO: 237356 - DNA, 348 bp, Glycine max
  unsure (1)..(348): unsure at all n locations
cgcagcagcaagcagncaccacgaacagcaaggaccagagagttatttccccgaggaaagacnccgcacacaagaacactgagtgaaactcaaaggccacgaaccacaaagcccgttctcggagagatcaagctcacaagagcttcacaaggccccaagcaacccgaatttacccggaaacctggaggggcgaaaacaagacccaaccccaaccgacaaatcgaggacccaggcaccaggaaaacaacccaacgcgatgccccccgaccgcaaaagggcaaacccacaacgcaccacacaacaaaggaaaaagcccgggaacccacccgaagaaaagaaaagccccaa

SEQ ID NO: 237357 - DNA, 367 bp, Glycine max
  unsure (1)..(367): unsure at all n locations
tgcagctatctacctatcatctacagatgctgtgcatgattgtatagataaanacatgaagttctaattcaagatggtttctttggtgcatgggcataatgcaatcactctatgtctagcattgattttattaagatgtccctacctttgagttctacataaaattatcctctctcaagcgactaatccctaanactgatgcatataacaccttcaatgtatttctactaagggattacccttttcaagcgccaaacccctaaagatgatgcaaggatgaagcatataatacanttgttggcattttaggccttccaagccctaacctaaggggttagccttccattgcatgagagactttacactt

SEQ ID NO: 237358 - DNA, 344 bp, Glycine max
tacccccactattacccactatcaccatgcatacctatttatgttattatatgacactcgcacaatagcatctgtaaagagaatagggcccatgctctacttgtgatgacaagttttcccctaaccatccgtgtcctaataatcaatatgttgttccacagtgggaagaagaggatgaaactgcattacaaccatatccaccatacaatgttgtgacagctggtgaacccatgtgcaagacatcatttgtctataagcttttaaagctcatcatgcttgggaccataagtttcaagatcaaaataggattgggagtgttaatctatatatagtgggaagtcgat

SEQ ID NO: 237359 - DNA, 261 bp, Glycine max
tttttatctgacctgaacaacaccgagctgcatactgcgtattatgtaaacaaccattaattctggctgaatatttctctggtatctgacttgggttaattaattgctttaaatcattttgaaagtcgatcacgttgaatgcattgaaaattatattgattcaagcatttcacacaagttgtgaacaaaaaattatttttaataatacatttatcattttgtgtttattttcacaaaagaaagaactctcctatcatggcc

SEQ ID NO: 237360 - DNA, 331 bp, Glycine max
  unsure (1)..(331): unsure at all n locations
cctgaagatatctttctacatgtgtatctccgtgttctctgacaacccanataatgcacaacttactcctgtgtctgttgatcaacttccagggcttaacacgcttggcatatctttggctcgcatagaatttgcaccaaagggtataaaccctccccacactcaccctcgagcctcggaaatccttatagtccttgaaggtactctctatgttggatatgtcacttccaatcaagacggaaatcgtctctttaccaaagtgtggaacaaaggtgatgtgtttgtgtcccaattggctcattcattttcaatcaatggggctatggaatgc

SEQ ID NO: 237361 - DNA, 406 bp, Glycine max
aacttcttccataatagattcactgagcagatgcattctagacctaccttggatggagttcacttcaaatctatttctcagaggcaaagagaacagctgactgtcccattctctgaccaagagatcaaacaagcagtgtggagttgtggaggggataagtgtcctgggcctgatggccttaacttcatatttattaaggaattctgggatgtgttgaatcctgagtttaaacgaatcgtggatgaagtctatgctcatgaaagctttctagaggctccagtgcttcctttgtggtttaattcccaaaaagtctacccacagtccctagatattacagacccatatccttgatagctgatgtataagtatagctagctttatctatagataaggtctatatgataac

SEQ ID NO: 237362 - DNA, 274 bp, Glycine max
tgcctgcactgcaaaacgtatacttgacagaatatgtgtgtctgatctccttacatgcccacgcccaataataatagtgatgaaaatattcccaatctcgtattattatctacacaaaaccaaatgtgtatgtctcactgagatatgtcgtgggattgacacatccataattttatttgtatgtcttaaacattaccctaattagatgcatttacaaattggtgttctatccattcatacgaagatgctggacaacttaattttattccacacc

SEQ ID NO: 237363 - DNA, 366 bp, Glycine max
  unsure (1)..(366): unsure at all n locations
aacctagaagaactcatgattgactattgtctttttgtgaaaagatccggttaaaactaatctctttgatcttcctgtatgacctgatgtaaatatacttttatctatataatggcgtcttgcgcattctctatgctatatgcttctcactccagtatgcttttaccttgatcacgtagatgcatgctntgttagggtcattcaatagtggaaactggtctgattcttaagtccttgatagtatatggctaaagtatcgtattatcacgaggaatcagggcgcgatattaagttgtgtatgtgtgtctatatgcaagcctgatgaagttatgtcaacagaggaattacgaacaatgcttgatctga

SEQ ID NO: 237364 - DNA, 443 bp, Glycine max
aaacatttgcaaatgtgcatgttatttatgaagcattcacaagaatcatagccatgctttcgtgcaagcaatctatggggcaaaacacaccaaatgattatgatgatggatggctcacattctcacaaatgtgaactcatcactttcaaattgagctttcataactatcatgacatgtaaaggagaatcaatgattctaagtcacaaaaagtcgagaacctttattgtcaatacaattacccatttctggaacatatgctataattcacagaaaaacaagcatagtcgtgcatgcacacagaattgaccccaaatattaaactagaaatccgacgatacttacacacttacaaattatcacatctaacatattacataatcgacaatctagcataaccatgtcactctcccttacttaacaaacattgtctcacgagcacaat

SEQ ID NO: 237365 - DNA, 56 bp, Glycine max
acttcccatttttatggggagattgttggtacctaaccttttttcaatgtaaaatg

SEQ ID NO: 237366 - DNA, 303 bp, Glycine max
tatttttaaataaaactactaaagaggaaatgatcttcatgcacaaaaccgctgacaataacaaaaccttaccgggacttgttccgttaacaaacccgaatcaacaatcctaaaaatcacaataccttaccagttcgatggtccgattatcaacgctgaataaattagctctacgaataaaaaattaatttacacgattacgtgtgcccgaaattaagccaaataaaaaacttgcaaattaatatacttactggtgtcatggcccagtacaacctaaattgaaaactcgcaaaaaacaaactt

SEQ ID NO: 237367 - DNA, 315 bp, Glycine max
  unsure (1)..(315): unsure at all n locations
cttcccggacacagaattcaccatcgacatactctagtaccccatcttcattgtgtatgaatctaccatgggggtgcaaaataagactgatntcatcagacatcctacagagaaacatcacacacattaagtgtgtattcacaaaaagagaacataaaatgttccataatagagaagagaagatgtttgggaataaagaagagaacacatgagaagatgcttgacgatagattccagatggacgatgaccaccacgacaacgcgatggctttggcgtcnttacggtcattgttgaaaccccaaacaaccgtctgt

SEQ ID NO: 237368 - DNA, 430 bp, Glycine max
  unsure (1)..(430): unsure at all n locations
gcagcagcagctatattatatattaggacagactatgcctttaatctttttaatnttgcagttattatgtagacgcatcatgagtgttgaggtaatatagcagcatcctatcttgcaagatgtgaacgaggtggcacatacatgaaaaatgagagacatttatataatattcggatatatgctcgaagacgaaattgtgttaactgaaactatcaaaaatgcattctaaagtaaagggacccatgtaatccactccctttattgatagactgagtatatatggaaaccatacctgcacggaagaggaataatttaacaattatcgccgtaacaattttctttagaacgctcataaatatcagaataagttcgatcaatcatccatgaatccaactgtattctattctaaaaaaacatttaacagcacaat

SEQ ID NO: 237369 - DNA, 255 bp, Glycine max
tcagatggtattccatcactattattatcattacaatgaatgcttactacttcatacttactaagaaatcaatgttgtttgtgaaattatattaccctgccctttggattaaatgataccacataaccctgaagtcaaggatgtgtttgcttcttaacatataggactgccttaaacgaagcatggagcttatcaagaaaagagcctctgtatttttctttccatacggaacactcgatacagatggtataatat

SEQ ID NO: 237370 - DNA, 141 bp, Glycine max
gtctatcttaacgactaaagaaaatagtattgccgtagccatgacccatagattgtgtgtagtacttagctgctaaatgagctttccaacggtcaatatagccattatggaccaacttcaactataaacctcccacttgac

SEQ ID NO: 237371 - DNA, 350 bp, Glycine max
  unsure (1)..(350): unsure at all n locations
actaaaatgagaaagtatttatagtggaaatcatagaaaagcgttaaaaaagtcatggataaccataatttgtgcatcccaataaatgtctttcttcttttagttccttaactaatgtgccaagggcactggttagcatttgtcatattntaaacaagcttctcattgtcaagtcctgacgtttatatttaactcatgaatatataanatgaactctaagatgctgtaaatccatattgattgagatgctactgacaaaagacaaaccaacagagctagcagtgagaacaagttgactgaataataactgatatattacttactaccactaataataaatggaccctccc

SEQ ID NO: 237372 - DNA, 293 bp, Glycine max
atatcaactgagaatgcaggacaactaaagacaaaatttagaggcacacaccttgttcttagatcttaaaatctcattaaatagctttatgagccaaatggtaccttcttcttttatatatttcctaatttcaactggaatattatcaaaaccaactactctatcattatacatcctcttaggaagagctttctttatttctccaacgtaatgctgtgatagaacaaattttttttataacatctttatgtagcggattacgtaagatggtatataattgatctattgtaatt

SEQ ID NO: 237373 - DNA, 273 bp, Glycine max
tgagagaaatgctatgtgaaaatctgttgagaccagacttgataagatgtttctgagacctgatattagttgtgaatgggtgtgagatcctagaggtgaataagacctcctcaccacttgtattttggcaatctttcatccttatcctctctttgtggaaagaatgcttcctatttatggaaagcttataacctctattggatcttccctgtatgtacttgatgtaaatatctttctatctattttatgatgttctgtgcgttccttgtgcta

SEQ ID NO: 237374 - DNA, 207 bp, Glycine max
agtcccttcatatatcgagacgctcgaaattgaatgttgaaactctgagccaagtccaacgacaataactttttactcggatgtctgattgagacccgtaatatatcgagacgctcgaaattgaatgttgaagctctgagccaactcaaacgacaataccttttactcggatgttgattgagcccgcatatatcagacctccaatga

SEQ ID NO: 237375 - DNA, 291 bp, Glycine max
  unsure (1)..(291): unsure at all n locations
gctccatcactcctacttgcttacataatggttgactcagtgactagaaaacaaactcatctaagaaaaatataggttcggattctattatcgatataaggaatttattagtaggtaataggtaattaattttgtagcacttttaagccttnaggcgtgtcaactctcaaactaattatcaaattttctgcaaaaaaaaaaaaatcatcaagccagttagggtacgacagtccccaccccaacactagacgacaatataaggcaacctacacacaacacactataacaacc

SEQ ID NO: 237376 - DNA, 358 bp, Glycine max
  unsure (1)..(358): unsure at all n locations
tgtcaaaggtcataaagatagttgaccaatcagttaagtagaacataagataatatgttgacagtcatcgaccagtataaagagaaggtgaacctatctgctagtcatgggcagaggctataggatgagcatgtgaaggtatcggctttgctaatggaaagggaagcaagagagaaagagtgatagaatcattgcatggngaggcgatgaaatggatggatagattcgctctcactctaaatgggagtcaagagctttcaaggctgttagccacagccaaggcaatgtcggatgatacccgattccgatgaattcatgggcttgngattattgcacacatgatcgagttgatgccata

SEQ ID NO: 237377 - DNA, 80 bp, Glycine max
taaatttgcatgttttctttgattataggatatgtcagtaatgggtaatgtctgaaataaagcctgactttttattgaac

SEQ ID NO: 237378 - DNA, 424 bp, Glycine max
gcttaattgtgaaaatccttgtaattttgttcggaaaactccatcggtttagctttcatttaatattgttcttgtctttggctattgcttgtctctttgtttccttgtttgtgagttgccatattgggaattggaaaggaggattggtgccatcccttgaagaatttgagtcaagatgcaagggaccaaccacctttagagctattggactaagaagcactccaaattgagtgaatcaccaaagagagaacaaccaccaaaattgaggacgttttgtaatttttaatttgaatctattaccttattgtgtcaagtttgttacaaaagccttattggaaggggtagagccttatagtaccaacttcattgtggaaaatttagcaattttcttggaatgaggttgtgggaactgacacgcatcaaa

SEQ ID NO: 237379 - DNA, 277 bp, Glycine max
  unsure (1)..(277): unsure at all n locations
ttctatactttgtacaagaatgaagctctgataccacttgttatacatgcggcctcagatatcttaagaagggggggttgaattaagatattccaaactgtgtcccctaattaaaacaactatttcactttttactcangttatgaattcccttaacgacaatcttcttaaatattaattcaaatgaagcaacttgaattatgaatataaagcaataataaatataggagataagggaagagaanatcaaactcagtttatactggtcggcacccct

SEQ ID NO: 237380 - DNA, 417 bp, Glycine max
  unsure (1)..(417): unsure at all n locations
tgtcttgaggcactaccangttacatgggatgccaccatgttctttgtctttaatccatactgtccgctctacataaagcacgaagacctctctgtaatcctacacgtgctaatcatgaagatctggatgatatcaagaacaatctgctcgtgaaagagggagatggtcatcatgcaagctgtgatggtgacgagaagaaatcacacgtgtgtcatcatcaaaaagggggagaaagggtatggatgaatacatgattctgatgatgtcaaagaagaatccatcaaggctgctgcaaaagataagcatttgctcgaagaataatgcaagaatgcctcaacatacaaagccgtgtttaagaatcactaaagacacagccttgccttaaaacaaagtgcgttcaagacatgcaaggctct

SEQ ID NO: 237381 - DNA, 429 bp, Glycine max
  unsure (1)..(429): unsure at all n locations
cacaacatagtttccacatccactaagcgcgcataaacccaccatcccctggtgcccacctccaactgagctcacgtactctcacgtagcccatattctcgtttctctcaacaccgggtccacatcaatcctcccaagcttccacaacatccaagcaaaacaacattcatacagcacaagctatcatagccaagcaaaacagagcacaggcagaatactctgccataacaccaaccaaatcacagcgtttctcacttaaagaccgcagtaacaattccttcgttccgggtcattaaccgttggatcgactccgaaagnttactaggaagtctctagacaataaccctacattttgaccgttgggatctactggcatacatccagaactcattctgtactactctttccacagccaaccacacacaagca

SEQ ID NO: 237382 - DNA, 327 bp, Glycine max
attaaaagaagactcgcaaattaaatgatcgggtgaaaccaacgttatatcattaacgatcagttgaatttttatcttacaacgattaagtgagattacgacacaactaattgatggaaactcgcttttcgatgataaaaatgagattacagatcatataattgtgcaaaactcgatttacacaaagaaatgagatcactgatggcagaataatggagatgaatatgcgaaaagcaagagtggacaccctaacggtgcatataatgaattccaacttcgaaaatataactaaccggccaatgaacgaggatcgatgaataacagatg

SEQ ID NO: 237383 - DNA, 195 bp, Glycine max
aaacaagtaaaaaatccaactaatcataatctaatacaagtagaaggataagaaaaaccagtcaatgatctaaccaaactgggttttattcatattccatgtagacctagatacatggaaatttgatcacatgaaccccattattctagaccctttttttgacacaagttaattatacaaagacaacatttagtg

SEQ ID NO: 237384 - DNA, 245 bp, Glycine max
ttgccattgtctcttccttgtctaataaattctcttgtttatgtaataattcttttcttacttttattggtaataagacttgatccatcttaatttaatcaaatatacaatggtaaccatatgtgaatatttggttaacctaggcagtgaatgttctataccacattgcatgaccaaactgtttgggtaaatttcaatagattagttcatctttaaataagtcatccggatccctagaactttat

SEQ ID NO: 237385 - DNA, 396 bp, Glycine max
  unsure (1)..(396): unsure at all n locations
ctcaatgtgggatgaagtgataaaatattngaagcagttgctttctctttgctcatgatgaatangatcaacatgtcatctatgatgctgccattgaccatgcaacatcaacttcaaatgtcgatgatgtctccaatgggcatgggaatatggatgggaatggggatgggatgggaagggaaggatataatccatgaccggctacatacctggatcctcaatctcacctttgcttatgccatggacctctggatccctgtgcgcctgtgtgagcaacccttcaggactcgttcggagctaccttgtcaatttggagcatgcagtaaaaattactatctacaggtaattaaacttataaatctcaatgaaagtgataaaattatattaatatttttt

SEQ ID NO: 237386 - DNA, 440 bp, Glycine max
  unsure (1)..(440): unsure at all n locations
taactgatatatacgcaacagatgtgcttaagtctctattgtctatacaaccacaatgaataaatacataatttanaaatgggttttctattattttcccattggcgcatcatgagaagtaaaaaataaaaactttctattcagagaacagtatctattattatattaaaatacaaagtcatttagtatttctattatttaatgggtttaattaatgttctcacactaagtgcccaaaagaacataatataacaccccataaagaatttcgggcatcgtggtgatttaaaatatacctaagattatggtctatcgtttatattaacccaaaccagttcaattgaatcccaattgaattcgaaatctaaaagattttttagaaatagctaagtcttaatgataatagagaggacaacatctaaattgagtccagtatgagt

SEQ ID NO: 237387 - DNA, 96 bp, Glycine max
aaaaattgatattaataatataaagagaatgtctctcagaataaccctaattaaatgaaagtttttacaagaagcattataaaaaagcaccttacc

SEQ ID NO: 237388 - DNA, 408 bp, Glycine max
  unsure (1)..(408): unsure at all n locations
cacccacctgaacattntctctcgtaagactaaattatatacacatataacaagtttcataaaggaatttaacatgcacacttctcttttattttttattcagagaaatttctgttgttctcattcttgcaagtctgaattctaaaaatgcactttttttaatttatattattggcatttagcaacacaatntctaattaatatatttttctaagaattctaattaatatattaaaaataattattactctatgattcaagatattgcaatctggactaatctttatagtttttctattaatgttggatgtcgactaatctctatctttatgtaatacgtataaatagttacgcntctaacttattataataattaataacatactccatgattaattgaattatatg

SEQ ID NO: 237389 - DNA, 148 bp, Glycine max
tcttattaatattaaactacctgtttgagtgggccttttgtcgacgtcgttggaataggcgaactctggttatcaaacaattttttatttttccacgacacagatagaacattaatctatttattgtatgcatgttatgccataaatg

SEQ ID NO: 237390 - DNA, 299 bp, Glycine max
  unsure (1)..(299): unsure at all n locations
anctttaacattcatgtcgagcgtctagatttattactggtctcaatcaaacataccagaaatatgttatcgtcgtttgaatgtgctctgagctttaacatatcaattctagcgtctcgatatattacgggactcaatctgacatccgagtaaaaatttattgtcgtttgaataggctcatatgttcaacattcaatttctagcgtctcgatatattacgacactgaatctgacatccgtgtaaaacgttattgtcgtttgaataggcttagagcttcaacattcaatctcgatcgtgt

SEQ ID NO: 237391 - DNA, 285 bp, Glycine max
catctaaggatctcctgatcatccaagagcgaggagcaagaatatttccaagaaaagaatactactttcaaaaactttgcgtcagtcattatcaatgcttaatcaccacaggattttttccaccaatggatcccatagctcctttcaagacctctatacataaagacaaacggaatgttaggaactaaaatgtatgcttgggaagctctcatggacgtgttattatcaaccacttaagaataatttaattcaggtactctggacaccttttgagactctacagga

SEQ ID NO: 237392 - DNA, 233 bp, Glycine max
actgaggagatcatgcataggaacaatcccgaaagtgtttctttggtcctattacacgttcttggaggaacaggaatagcccacttcacgggaaagcacaaacaactgaaactatacagcaaccaggatatgtctacccacacaagggaacactctagtcgattaactttcaaatccatcagggaagggacaataagaacaatcatcccgatgacaaccaacctggggaatac

SEQ ID NO: 237393 - DNA, 256 bp, Glycine max
  unsure (1)..(256): unsure at all n locations
atattatctcttttgtaaaaaacacttgctagcattgccacacctcttgggcttgagtttattcctcaagtaaagaagttgttggatgagggaatggttcacaaaagcttatatccttgtgctttgttggtgcccaaaatatgtattattatgcaccaagtccctaaaataggtggtatgatgaatgttntgagtgatgcaacccttctttggaatgatcacttgtacacctaacatcttcatggtgtgtgtacat

SEQ ID NO: 237394 - DNA, 315 bp, Glycine max
  unsure (1)..(315): unsure at all n locations
acagcagatttatctatgacccactaaccgagaatgaaattttcttattgccattaacccanggaattataaaaaacttaatggctgagggaaccgaaattgtggcaaccaaaagtcacccccaacagccaacaagtcagtcaccatttggtctcccaaaaggctgatgcctaaggtgccaattgtgcccttattacaacttgaactaaacctaactaaagccccttgtagttgattaacccacaacatatttatggtcagccaactttacaaggattgggccattatttagacaaactaaacactctaaaattg

SEQ ID NO: 237395 - DNA, 277 bp, Glycine max
  unsure (1)..(277): unsure at all n locations
atgcttgaagatcttggaagcaagatacgcacattgtgtatttgaaagatgcggctttctanagccaatgaaccggcatgaagccttccggccatatctccttggttggtgcaaaccaaccggcgggcatcatgctcagagaagccaaatttccaatcatcattcagtgtaccttcaaatggtacaccttcactagataattgggtcaagtcatataataaggattggtcaatgaccattgtcattccataaacttcagacataaagtgccttcttg

SEQ ID NO: 237396 - DNA, 354 bp, Glycine max
  unsure (1)..(354): unsure at all n locations
tgtaataagcacaacagttgcagaaatagatacatacctcgttttatgatgactaacaaccacaacaagggcggagatgcaggaaaatgggacaaaaaaatataagttgtgaaaaggagatacaatttggagcatgaatggaggaaagaatcataacaagaagtaaaacaatacaaaggcaaacacaatgtaagcgattaaggcaggaatgggagacaatatgtgngtgatgcaaacactacaatcatgggagaatgtctcaaaacaacagaaacggggggatataatcagatgataggggaacttgccaaacatcacctatncattggtggtaacactgtataaatgaaaaaa

SEQ ID NO: 237397 - DNA, 437 bp, Glycine max
  unsure (1)..(437): unsure at all n locations
gaacgtcgatgaacggtagataaccttcacgaaattcctcacggaaaacgttacggatacgtttcggaagcgcctccgcttagattttcttcacggagacaatntttccaagcaaatttcaaagagagagaagtgcctatagtggctgaaccatatttccttctcacttcctcccctatgtatagcaaaataggggagatggttgccgcccagctcgcccaggcgagcatggttgcttcctccaaaagcaacagccttctggatgaatattctcgagggccccaattgacctggcttgtctttgccccccattttactatgacacccctctgcttgttgtgatctttttcgaagtacggaacttacaattcgtacatactgttctttcgatgtacaacttgcgatacatatctccttttgctacggatgtacgaccc

SEQ ID NO: 237398 - DNA, 221 bp, Glycine max
aaaaggaccaattaggagaaaagggagaatgacttggttggtctacaaactctcttatcaaagttcaataagtgtacacatgctttatttatagactaagtactctcttgagaagctttcttgagaaaacttccttgagaagcttctttgagaaaacttcattgagaagctagagctcatctacacatacccctctcataactaagctcacctccttgaga

SEQ ID NO: 237399 - DNA, 337 bp, Glycine max
aacaaatcacttgaagaattgtgacttttggacatttacttttcgaaatcaggcactggtaatcgattaccattaaggtgtaatcgattacacatcaacagatgtgactcctcagtttaaattttgaaaatcaaaacgtttataagctctgataatcggttacaagtattgtgtaatcgattacacaagtcgaaaatgtgtaaacacaagttgtaactcttgaaatttaaatcttaacgctttaaaacactggtaatcgattactaccttctggtgatcgattaccagagaggaaaactctttggtaatgattttgtgaatacttcttgtgctactc

SEQ ID NO: 237400 - DNA, 221 bp, Glycine max
cacaatctctcacaatcttatctaaagctctgtaagatggcttcctcgtcaagctcagctctctctcagtctctccatgaccaacaactctcaaaaagctcaactccctttagaaatcgtgatttcagctaaataggcaatcctgtcggtgtacgcacgctcagcggaagatgatctcacttagtgcacataagtgactactggcttagcgccagtcacac

SEQ ID NO: 237401 - DNA, 417 bp, Glycine max
ctttgacaaaatcatcagaaaagaactgtgactttcggaaatgtattttttgatatcagtcactggtaatcgattaccattaatgtgtaatcgattacacatcaacagatgtgactcttcattttgaattgtgaacattaaaacgtttagaagctctggtaatcaattacaaatattgtgtaatcgattacacacagttaaaatacttttaacatgaatataactctcgaaatttgaaatcttaacagtttaaaacactggtaatcgattactaccttcttggtatcgattaccaaagagcaaaactctttggaatgatattgtaaaacttctgtgctactcataatttgacaaaaaattagacttatctgattgagcttccttaatcttgacctcgagcttgatctgatattcttg

SEQ ID NO: 237402 - DNA, 365 bp, Glycine max
  unsure (1)..(365): unsure at all n locations
ctaagcttgttatcaaaatggatacctcgatacatgaaagataagaacctgttganggagaaactttccacaaaggtggagagaaaaccttanatatgggagggcaatctcctaaaagggctaaaaaggtgaacccttaaggtgttgggcgacgtaaagggaaaaaggacattgttaagtggaacttaggaaccaaacaaagggagtttgcctgccaagagtgaccattgaaaatagtcaaagtcctagtgactataaagagaggaatacatgtgatggcaactttttgcatcaattgaagtgcattgacaattaacatggatctatggtgttggattctctatgtacaaagatccattattcta

SEQ ID NO: 237403 - DNA, 423 bp, Glycine max
  unsure (1)..(423): unsure at all n locations
gttctcctttttgttcaagaggccacagcggatcggtgatagaggtgccttatatntagaacctttatcactgcataatcaatcctctgcgactcaagcttttattcttcgttcatgatggagaataactctcagctctttctaagactcttttcaaactattgggatggcggaattctattctcgaatgggaggaaactcattgggtggaggatcatgagcaacaatggtatcaccttgctcgttggctggatgcctggtcccttgtgcaccattcttcactctcttgctggtgcaatgtggagtcggaggaggaagagcctgaggtgttggctttacctttgtccttgaggtgcaaaggtgccatctccaggaggacaactatgcgcttctaacatcaagcctcatcccatcatagtctac

SEQ ID NO: 237404 - DNA, 453 bp, Glycine max
tctatatatgctgaacccatttatcaatgaacacaggttgagtgttattcagaacattaaagtctatctcttttatcttagcgagagtgattctcctaaattcttgagtgattcaagaacaccctgactgtatcaaaggactttcacaacctttgtgtgttgccctcgctggatagagtgatacttttcttcctttcatcttcacccttgttctttcaaaccacaattccagaaaatccacctctgcccacaattatctcgtggccataactcccattttacgcactcaaattaagtgattcttgagcctcaaatgactgtcataacgagacctttcacctcgttctggaatcacctcatttggagccctgtagcttcagttatagccatttctatatttctgtccagccccacttaacctaccatttaccatcccatcatccatttatgcaa

SEQ ID NO: 237405 - DNA, 357 bp, Glycine max
gggcgacaatgacaggttttgagtcggagtgcagaatctttgttttattctcgaagatgaacctggctcgctcaatggagatttgaagcgactcaaagattggcgctaagtcgactcattggttggaggaagacttgagaagcttctacttcagtggaataagggtgtgcgccacgccaaagaagatgagacgcacgattggcaaaaggccatgcttgaaggattcccgccttgggtgaatcatggtggttgggtcccttgccaatgaagatggcatgcacgacaaaggaggtcgaggagcttggagggggaaaagtctacggggacaaggtggtatgtggcggaaatggaagatga

SEQ ID NO: 237406 - DNA, 354 bp, Glycine max
gggattgattcggtctgatgagggagcgatgtttagtattttatgctacaacatataacacatgagaaattgattaaagaaatatattgagacacacaatttcgtgctccttctctccctctccctccactcatcttctccttccttcaagctcttatccatggcttcctatgggggtgagcttcttcttgactcatcttctgcttgaagaggcatctccaatcatctttctttcttctttattccactgccattaaactacgagaagcaaaagactccattgatgaagaagatccaaggcctacaagctccacatggaagttacatcatgctgtatcaagagcatcttcgtct

SEQ ID NO: 237407 - DNA, 269 bp, Glycine max
cctccagttagggcagagctccaagtgcaaggcgtgaatgatattacattaactgacgaaggagtaattgattctaattgtaagtcattggcaagtgtaccaaattatcacaagtagtatagttaaaataaaaatccgagtgccgagtctacaggaactctgtttgtacttagattggtgtaaaccaaatttttaaacaatagacgaagtagaagaaataagacattgtagtgaaataaagagaaaaatagaagatatgaaaaataaat

SEQ ID NO: 237408 - DNA, 378 bp, Glycine max
  unsure (1)..(378): unsure at all n locations
atacttttgaagctttgagatttacctcaagctagcatgactaagcttcttatgccataccaagggaatctctttgactaagagtaagcacgacaccttttgacttgacagagcaccaaggttaatcttttaaagatttccttgtgtcttagaaaagaagaatgaagaattgtccttgttctggatgagacacatatccttgntaaaggttacattatatgcactatcacataattgacttatgctaagcaaattatgcttcaaccttttaacaagagaaacattatcaataagaggatatggaggaacacagatcttaccttcaccaattattatgacctttttatttccttcagaagtgaacaccccaccaaacat

SEQ ID NO: 237409 - DNA, 410 bp, Glycine max
ttgtttatggccaccaagcgcattgtgtaagacaatcatgaactttggtattgcaatctgaacccttcaactgacagcaactgccgaaaacctttcccaccaacattattccaatgacattcgcgcggctccaaccagtaagcctttccattgcagtgttccactctaagcaacacgtgttatcatccgatgcaaaaatgggagggatcaaaggatttggattatgtacaatagccttgtagtcgccttgtatgttgatgaatatgtccatcacaatttttgaccacgaacatactgaccaacgaagcacactccaactacattatattgtatatcctcgctggagcaagcattaccactacaaaactgcctattttatgtttgggcaacggcccattttatacaacatc

SEQ ID NO: 237410 - DNA, 471 bp, Glycine max
  unsure (1)..(471): unsure at all n locations
tnctcattgttcttcactgtcattcagatacacaaaacttattgatttattttaaaggtagaagaagaataactcttgagtccatctatcagcagcaccataaataaattactcaatcaagttcaaaacttttgacatgcaatgtgatgatccctttcttattgtgcaacaaagacacaaaaagaagggcttggaacagggagggtcattgaacaaagtttatgaattgcccaaaagagaatgacataagatgaaaggcaacttaggtattgtatcagtgcatcatataaaactaaatgaaaagtttcttcaaagggaaaaaatggcagaagaagcgacagtgaagcaaggagacattgaataaacggggggaaatggtaaaaaaaaaaaactaccagtacattggtntccttggtggatgtcccagctaacttgcaaagaagcgacaagagagaaagagactatgacaaa

SEQ ID NO: 237411 - DNA, 422 bp, Glycine max
  unsure (1)..(422): unsure at all n locations
aagcttagncaacagaataatcccgaaatgtcagagaattgtttgtngattttatctaacaagaacttttgtgattggtttaaagatacaatctttgcagatgagaatgcttcagaaacattaagaaagctagcagatgggcctaaaagaaatgttataacctgtcaaggatacgacataaataggtattcattttacacaaaagcacaagatgacaaaagtacaatgcagaacagctgggtcaccctaagggttgaatctcaacactttgcaagtgtcaatgacgccaatccctgtgtagcttccatcccttactttgggttcattgatganatttgggagcttaattatgtgaaatctacagtatgtgttttcaaatgtaaatgggttgacagcaacaccggtgtgcgcaccgatgatat

SEQ ID NO: 237412 - DNA, 405 bp, Glycine max
ggatattcaagatgacacagttcttcgagtatcatgcttctccagatcatgaaagactcaccataacatctttttacatggaaggctcagcattagcctggtttcaatggatgcacaggaatggtcaattatcttcgtggtccacctttttacacgctattcacgcaagattctcatcttcaacctatgaagatccaacaggtttgctctgtaaattgacgcagcgatcaacggtctccacttacctctcggaatttgaagctcttgccaactgtataattggtctgccgacaccgtttgtgctaagttgctttgtgtcaggactgaatctagcgattcgttgggaggtgtaagttatgcagcctcactcattggttcaagcagtctcctttgctagactacatg

SEQ ID NO: 237413 - DNA, 468 bp, Glycine max
  unsure (1)..(468): unsure at all n locations
aacatagaatactaagctgaaggaaactagatgcctggttaacctattaactttcttgccttgaatcagaaagctgtacctgtcgcaagagtctgtggtttatgctcctctgccgaccaccatacacaccttngcccttttatgcagcattctggagcaactgagcaacgtaaagcttatgctgcaaatatttacaataaacctcctcaacctcagcagcaaaagcaaccacaatagaacaattatgacctctccagcaacagatacaatcccgaatggaggaatcaccgaaatctcagatggtccagccctcaacaacaacagcagcctgctcattccttccanaatgctgctggtccaagcaggccatacgtntcttcttcaatgcaacaacaacaaatactacagcagtcacagccacaaccaccgcaacaccactaccacaacaacagaagcaacaatcaactg

SEQ ID NO: 237414 - DNA, 357 bp, Glycine max
  unsure (1)..(357): unsure at all n locations
tgctgcctttcataaaggcatatccattgtatctccattttgatttctcanaacacaaacatccgctctattaaggaaatgcagaacaaaattaactaaatatccgtcatttatcaatatcattatgttgtatttggtgtaacatattcgccacccataaataaaaaactatcacatgtatcttatcgtactcaatattccgactagtatctctttaatacatggtttatttgtcacagctatttctttttaccttcagcacattgtgttcatcaataatttatccaacatatgcgtgtgcctaaagnttacctaaacttgtaaatggaaatgatcgctccagctctggcaatagat

SEQ ID NO: 237415 - DNA, 377 bp, Glycine max
aactccttttttttccataggggagcagaagctattgatgctaatgttaaaacgtggtcaagtgtgaaaaaggaaacttgagggtgttaccaaaaaaattactatatgtatgtgtaaagattctaaatgtgtttaagctcactgcatatgttgagattgttatgccttgctagatatgaacttgccatgaatctttcttcttttttgctactctcttgaaaatatatcatttttaaaattgagcttattgctgtaagaatttggttgggtaccaacaaacaaaagggtaatatttttgtgaaagatacttgctattggaagaatttggttggtattttgacctggtaatttatagagaaggtacccttccccaaatg

SEQ ID NO: 237416 - DNA, 422 bp, Glycine max
  unsure (1)..(422): unsure at all n locations
tgaaacaggccttgataaagggcgattggntntgcaatttttaaagccagatatgcaaggcaatttctttaactccacaaagctatttctgaaatatgctgaagatgaaattgtaaggattaaagcagatgagagaaaagccttgtaccttgtaaaagaagttacagagtactttcatgggaatgcaacaaaggaagaagcccaccctctcagaattttcatgattgtaagagactttctgaatatcttggatctagtgtgcaaagaagtggaaaagatgcacgatagaatcgttggtggttctggcagatccttccgaatacctccaaatgcatcattacctgttctcaacagatacaatcatccaaagcaggatagaagctcagatgaggagagctcatccccctagtgttgtgaatatg

SEQ ID NO: 237417 - DNA, 369 bp, Glycine max
  unsure (1)..(369): unsure at all n locations
ctatcaagctctagataccataacagaactctaagagaagatactntgagaacctaaagagaaaagcaatctgagaaagtgaaagggagtctcattaatcacttgacttgagtatacatttttgtatttatagacagaactgatattagatcagctgtttcaactaactaacagctgtcataactgaacagctgttaactaactaacaactaactatcgtagttaaaactaactgagactgcagtagaataactgcatatctctttacaatactctaatacataatgtactcatcgggttgtctgacaagttccctacattgaatatctaatgtagactagcgtgtagaaatgctttcactttgaagtt

SEQ ID NO: 237418 - DNA, 323 bp, Glycine max
tagcaaaatggattcttgtcggaaaagaaaaagcaggtgaagtagtgcctttatggagtcaaaggatcgcattggacagcacatggcagaccattacaaccttagttggagactattttatggacatggcaaggggatcaatttggtttatgtcatggatgaagttgatgggtgcacatgtggatatggaacatgcaatttatattgaacaggcgaggtatgcgccagcttgtcatttgtgcaatcacaaatgcactctttcaaggtattggaatgaacaactagctagctctcttactagaagccgagtcattattaggtac

SEQ ID NO: 237419 - DNA, 412 bp, Glycine max
  unsure (1)..(412): unsure at all n locations
ttctatgcatccttaggggtccattcgtgcttngaatgttttcatcatcattcttctactttcggtattctttttcttcgttttaagcgagtttcaaccgatcgtttaagtcataacctcacttaattaatgtttaaatgaatttcaaccgattgtttgtgttggaatctcatttaatcgcctttaaaataaaattcaaccgatcgttcatgctgtaacctcggttaaataaaaaataataataaaataagtgtcaatcggacattttactttgaaagtcctctttaatgagttgagaaataaccaagtgaaactaaggctaaaatcaacttacacatcaagcatttgcccgcaaaaagggtatttcaaaccgtttgaagggtcaacaccttaacgatcccttttactttta

SEQ ID NO: 237420 - DNA, 271 bp, Glycine max
  unsure (1)..(271): unsure at all n locations
acactctgaaactcagctgtgtnntcaattggagcgtctcgatgattacgggtcttcatttgtcttccgaataaaaagctatgtgcgcctttgaatttgcttataacttccgctttcacattggagcgtttcgatatattactggactcaatcagacatccatgttaacagttaatggcgtttgaattatatacgaagttgcaatttaatttggagcatctcgatatattagggactctattggacatccgataaagagttattggcgttt

SEQ ID NO: 237421 - DNA, 452 bp, Glycine max
  unsure (1)..(452): unsure at all n locations
cttaaaactcaacttttgacatgaaaatactggcactctgggtttttctcccaagaagaaacatcattctgctcncatcattctgaaatgttggcttttgtttcaattaattaagcaaaggaggattcttgaaaagacaagcccagccaagacctggaggtaactagtgaataagaactgacaaatggttaacttgtttggcttgattagctgcttgctactagcaacataccatcttggctggactttttttcttctataaattttccttcagatatcctttaaaattaaggtctctgtcacctaccatgtgtcactgattgtttgaaaatatataagaaaatcaagaaccacagatgaagggcttaaggcaaaagttaaatgaattgtaaaagatgctagtaataaaggcatcatacttcgaacccatagcctttgaattccaataaatg

SEQ ID NO: 237422 - DNA, 415 bp, Glycine max
tgtttgcattctaatctttttcaaactgatttgtgacatgttacccagacaaatcaataaacagggggcacttacaactgaagatccttgatcttggagagcacggatttagctgctccctcaatgtgctttttaaacagcttcagtttctcttcgtcaagcttttgacaagaaactgcttcttgtcaaaagcaggttgctcctacctacaaagataatatgaaaagtaaaacaattatactacgaacttggattatcaaattcctcggtcacccttcttatggattttctttatttaaatatcatccaatcttttcttgggtgatataaatatgatttaatctaatgtagaatagttataggtgtaacttttttgaatttatctgattttatcctttacataattactatatat

SEQ ID NO: 237423 - DNA, 420 bp, Glycine max
  unsure (1)..(420): unsure at all n locations
aacaacaatatattctgcttcatatgttgtctaagcaactacactctgcttctttgagcaccaagagattggtgatgttccaaatttgaaaacatacccagcagtgtttttcctatcatctttatcaccacaccaatctaaatcactataaccaaacacttctccttctatattcttttgattgtaaggatataaaatgccaagatccaatgttcctttcacatacctcagaatcctctttgctgccaagaagtgaggtgtctttggtttctccataaaccagaatctgtgtttctgacataaactccatgctcagtagttcacttggtgaaattctgctggactangaatgtgacaccctctacccctcacatatatactaacaaaggaataaaaattcacatattaattaaaagtatt

SEQ ID NO: 237424 - DNA, 468 bp, Glycine max
ctcagcttcattcctctttgatgaccccttaacaagagagtggtgttacgaattatcttgaggatcgcaaggcacaggctacggacgtgttaacgcaaaatttctataaaaaatattaatgaaatatcaattattaacttttatattaatcttctcatttgtcccatgcaaaagaaaattatatttagaaagatatttaactatagctataattctaagcaaaactttttctcaatgctttttttctttgttaattagctcttgcaaacttttatctattgacttctttatcttttcaatctttcttctagttcaatccatttggccatattagtaatatgttcatgacttgtctaatgacctttgagtattgaactaagatctttctaatctctagtcccttcatttactaattgactaataccactagaacaaaataacttacaacaaaaacaatacactttatct

SEQ ID NO: 237425 - DNA, 396 bp, Glycine max
tttggccaaactcatcctcccaagtataccattttaaacaacagatgtttttctataggatatagttgaatgctttcgaaatataaagatgggtccaatacaaaattcactgtcacatatatcaacatctcatgggttcactatacatagaacatcttagtcttctcaatgacacattacatacaacaacttctcatccacatcccatttcatttactcaaaacatataagtatggcctcttcaatagggaaattcaaattaaggttcattaagaaactacattattcaaggtacaagaggatttggcgcttaggtgcctctatttctcgcttaagtgtgaatactaaagtgcaattccttcatctgcatctaatcctagtcacgtgtaagctcag

SEQ ID NO: 237426 - DNA, 460 bp, Glycine max
  unsure (1)..(460): unsure at all n locations
ggacacaaaaactcagcttttatccaggcaattcttgagggagaagctccttctttcttggcttattccctagnggatggtgcctcccctatcctcttctccttttccttccgctgcatctccatggtgaaaaatcaccattgaaggacctcattgaagctcaaagatccagcctccatagaagctccacaagcaagcttccatcagtatatatggccaccaaatataactacacctgtcaacatatgctgcattctaacctttttttttcttgagcacttttttattggaatcttttgcatatttttaaacatcagtgacttttttgttcaatatgctgcattctaaactttttttctttacattttattgggtctttgcatttttaaactctgcacttttttcttgagccatgcaaacggcccattggctattataatatatttagaggagaaatacc

SEQ ID NO: 237427 - DNA, 405 bp, Glycine max
  unsure (1)..(405): unsure at all n locations
cttcattcttctttgatgatcctttaacaagatattgtgtgttatgaattaacttgangatcgccacgcacacgctatggacgtgttaacgcaaaatttctataacaaatattaatgaaatatcaattattaatttttatattaatcttctcatttgtcccatgaaaaagaagattatatttagaaagatatttaactatagctataattctaagtaaaactttttctcaatgttttttttcttttgtaatttgctcttgtaaatctttatctaattgccttctttatctcttccatcttttttctagttcaatccatttggcccatattagaatatgtttatgacttgtctaatgactcttgagtttgaactaagatttcctaatctctagtccctcatttact

SEQ ID NO: 237428 - DNA, 446 bp, Glycine max
  unsure (1)..(446): unsure at all n locations
ttacataaatgtatcttctgtttttttggtgataaatgtatatcatgctanttttactcttttgctattggatgaactaaagaaatttatttattttattatctgatgaatgtactgtgtttttttaagtgatgaatgtactgtgtttttttgtctttaatgagagagatgatctgttactttttgtaatacgttgaattgctgagggataggaaatacttcttccaatagtgcactattatattggagccggtggattcaaagttgttgaaaattctgactcatagtgcactataacttangttatttgtcataatattaggatagagaattttcttctaaatacaaaatattgtcataactgagtaatctatcatgaatattngttctacagactcactttgtaaagaagtatatgaagcttgtgtttagctaccgatacagtt

SEQ ID NO: 237429 - DNA, 309 bp, Glycine max
attcattatgcgatataaattgttgccaacccggtcttacccaataatattatcaagtgcttcgttggttaagcaaggaaattgttggtccaacaaaaatcatttacgcgtgcatcatacattattgtcattattgacaacacataatgacatgcatgcgtattacagtttgagcgcgacaacacattggctgacttgactacacattctgaaactagcagtcgctcgacaacacattggctgacttgactacacattggcgacgacacattggctgacttgactacacatttacgcgtgtctattttt

SEQ ID NO: 237430 - DNA, 484 bp, Glycine max
  unsure (1)..(484): unsure at all n locations
tcaacttgtgctttcagattatttaatagttgaatcggaatttattggtntttatgccaatcaatcacaaactgagattgaaatggtgccctgaaagtagagaaaatncatggaaatgacatgtaacacagttattttttcttgaaaaaaatataatgatacttcttgacactacattagatttctttatcacccttccatattgaatatatccaatatgttggtggttcattgttttcttcttagtatctgaagatatgcttgtagttgtttagcttggtatattgacagcttgctcaaattcttatgcagtgtttgttggtatacttggtaaatatgcgatgaaaaacatacagcacgtaattgattttgaatattctaattacctcttgggttctatgtgattactagtattctatcatgtcgatctatagttatataagatacatgtttattttatataatattaaaacatgtataatct

SEQ ID NO: 237431 - DNA, 334 bp, Glycine max
tcttgctcaatcttcacgcaggagtcctatatatctttctggctgaccaggacatttcaaatatgacattctttacttatccagggcactcctagtacgaaccctttggaatctgcaatgctccctccatgtctaggtgaccatgaatgaactacccgaacacctttctacgcaaaatgtcggggttttcttctatgatatctaagctacaggtcataactatactcgcatcttcaccattcggaagtacctttcgcttcactttcttagggacactttaacctgcaccactctaattgtctgttttcccagaactgattacattgctctgcca

SEQ ID NO: 237432 - DNA, 264 bp, Glycine max
aaccccagctgagagagaaggtgagggaggaccaccgattttagttatttttttggcacccggaatgtccggggtatgagacctgagacgtaggagccggctctgcccaaatctacttgaccatcctgaccacccggcatagcggtcaaacaaatgtgagccctaacaacatactgtggagtgacagatataggaacatgacctctatcaggaggttcggggcctgcagtggaatttgcgtggttgagatatggcctggaatca

SEQ ID NO: 237433 - DNA, 367 bp, Glycine max
  unsure (1)..(367): unsure at all n locations
gacactataaaactcaagctcgtcaaactgtcgtgacacgatccacttgttgccactttatcttcacagacaaaacgagccacatatgggatagctgcattgcattactatcgatatcacacaaatgcttttagcctaagttcttgagggaaagaaactgaattaatctcctagcatattaactgccattctaattaagtaattattccgtcagaggacggtggatataaaaggtcattgctttatacccctatgcattcacttttaatcataaatcatatatgtcattgacagttgtcgacctgcanaatgaaatatgcagcagttactactcattccatggcttacttagtagttagcggccatc

SEQ ID NO: 237434 - DNA, 388 bp, Glycine max
  unsure (1)..(388): unsure at all n locations
aactcaagcttcacctctaatcgctcctcacggattcaaacattgcaatactttggaaccnatacgaacgaataagggaaaaattatttggagatccaatgatcataccaccaactggccctaactatggctctggctcttacttttgttgctgctggcacttgtcatcaccaccgatgcgtgcagacatagttacccttcgatgtctctctgnacattttccctttcctatgatgggccttcatgggaggggccacatactgcattgtacgatgtttgcttcgtgtgagccatctggaaaaaaaatgataaaataactcactaatccttataataacaattatattgacaagacaatnaataaaacttattacctttgccaacagta

SEQ ID NO: 237435 - DNA, 328 bp, Glycine max
tcatcccaaccttagatggtcgaatccttcacaacagcagcagcaacaacaacagacttattttcaaaatgttgttggcccaagcagaccacacgttcctccaccaatccagcagcaacaatagcaacagccctagaaacagcaaatagttgaggcccctccgcaaccttcccttgaagaacttgtgaggcaaatgactatgcaaaacatgcagtttcagcaagagaccagagcctccatttagagcttaactaatcagatgggacagttggctacacagttaaatcaacaatagtcccagaattatgatagaataccttctcaatct

SEQ ID NO: 237436 - DNA, 469 bp, Glycine max
  unsure (1)..(469): unsure at all n locations
aagcttntattagtctcttgaanaacccagcagtacagtagaggtgaagaactttatttttattaagcaccattntataagagactatgttcaaaacaagacattggatcaacaatttgtacccagtgatgatcagcttgctgaccttttcaccaaatccctcacggaagaaagattgattttgttaagaaattaacttagaatggtttttataaaagaatgacttaatactttatgttgtccattgtaaagcatcgaaggacctatcattcaatgtctctaagcacacacaacatcgttcaacatatggacactcacataacacttgtattaattaagttaaacatagcattttgtacgtgaacattgtagcatttgtgctgagtcatctcttgaatggcagaccttatggttgccttcataaagcctatataaaccctatgcaattccatagaataataacttatca

SEQ ID NO: 237437 - DNA, 432 bp, Glycine max
aaactaagctaatcagcttagaaatattgggtacgaagttatgaaatttttactctgcgaaatcctcatcctttaatgattgttaatcctattctttagtttttaataaaacttaatcaattagaaagactttgttagagagtgtgttcttattacttctcacaattatttataacaaaaaaaaatatctttaaatatataaaatatattttgaatttacaatgaataatttaaattagaatttcaaattatttttaattatagacaatttcttaaaaaaaaaatagaaaattttaatttagtgatgaagattaaagattgtaaactgaaaggaatagatagtttaaaatatgatacaaatgaagaataaaacatataataatggaagataattcttataaaaatagtttgagataattgagagaacttttt

SEQ ID NO: 237438 - DNA, 346 bp, Glycine max
  unsure (1)..(346): unsure at all n locations
gtcagaacctctgcacttgaataattgggctacgagtttggactctgttttgtgtaattagtttagttaggtatattagatggacctaatcaaggcatatcacttccttttgtgtagtcactctatatattaatggaagttaagtagttagttagttacttcattttgtaaaaaacaaaattagttacttgttgtgcaaactttctcttttctctcaactattctttattcttcttccttttttcatttttgttcttccattntcttgcacaaaatttcatgtcttttccattgatgatgatcatggaaggctaaacacttcatcaatcccaggattcactccaag

SEQ ID NO: 237439 - DNA, 241 bp, Glycine max
gaagcatgtgtaacacttggtgtaactttgatgaatgagagtcttgtgagacacaacttcaaggtcaacttttctccctttttcttccttcaatttcgggctccccctccctctttctctccctctttcttttccttcattgaagcatcctttccaagcttcttatccaaagctcatcttggtggtgaagctccttctttcatggcttaatccctaatggatggcgcctactctcacctat

SEQ ID NO: 237440 - DNA, 442 bp, Glycine max
tgtttgagaagcttctatggaggctggatcttgagcttcttgatgtccttcaatggtgatttccaatcatggagatgtagtggaagataaaggagaagaggtgagaggaggcgtcatccactacggaataagccatggaaggaggagcttcactaccaagagagtgtcttggataagaaacttagagaggaatcttcaatggaggaaaataatgagagagagagaggggaaggggggcacgaaattgaaggagaaaaagagggagaagcaagagcttaactatgcacacccctctaatagctaagctcacctccttgagaagctacaacttagctacacatacccctctaataactaagctcacctccttgagttgagaagcttaagcttagctacacacacccttctaatagataagatcaccctcatgccacaatacatg

SEQ ID NO: 237441 - DNA, 384 bp, Glycine max
accttgaaactaacttaactaccttgcaaacgagcctttaattgtatattcgacagaacacaggtgaaggtgatggtgaagcagttcttggcgatgagaaaaggataatctacactggtcctaatcctttgcataacagataagtggaaatttatagttctgagggatcttttttttttttttgccttgtttatttcaagctctctctgtaatccgagcatatataattttcttcttttttgaggtttttacttatttacatgttctttctcccatttcttttcttgcgaaagtttgtgacgtattttcatggaccagtttcttctggtgtattgttaataaccatatgtaagaatgtaagttatgttaccacaaaatatctca

SEQ ID NO: 237442 - DNA, 438 bp, Glycine max
tccccataaccttcaacggcttcaaaacaagttatggtttagtcaatgtcattagatataggggatcatgtacatgaggatccaacctatatgcaggttttgctggagtcacaggttcctgttaatccaacataattaattgacataatttaatttcattgatcccaatcaactcaaatgtcatcaacttaataaatgatccaacttacaattaccatatgtttaaatgtttaattgcagaactacattgaggtaccgacaacttatcataggcaatgggctctagattaccctgcttatgtgcagatcaaatacaatggagacaaccacttcaacaatgcacggttaaaccttcaacaatgcaagaatgctgacgttctaatgcttgtacacatatacaaaatcgctttagtaaatatcattttaaattctgcggat

SEQ ID NO: 237443 - DNA, 472 bp, Glycine max
  unsure (1)..(472): unsure at all n locations
ntgcgcctatactagtggagggttgtgtgttccaagcttatatgtatctggntctgatatagacaataatgtaagctgctaatatattactatgaaaaagaatatacatcttatcggcctcaattgctctggttctaataaatgcattntttacaacaaatgaaatatgctctgcaagacaggtttgtaccaaattgtgatgaggcaccctgtttacatctttttttgtatgccataaaaatatttttttttttaaaaaaagtttcacttttttgataaataaaataaagtgtcattctctagagtttgcctcctcctatatgctcattcctcacttaatcattcctccctcatccacacgtcatagatttacatgaagtggtaaatagtaaccatttctctcacgtggatactttcattctcatagatactctcatcagtcattttaaaccaccatttttcattctttcac

SEQ ID NO: 237444 - DNA, 312 bp, Glycine max
  unsure (1)..(312): unsure at all n locations
aaaagatgatgacgaaaagctcanagatcaatcaaagaacaactcaagtgaatcaagaacaattcaagagttcaagataacaatcaagaagaattcaagactcaagaagaaagtttagagtcaagaatcaagattcaaggttcaagatctcaagaatcaagatcaagattctagaatcaagagaaggcttaatcaagataagtacaaaaagtttttctcaaaaattgagtagcacatgatttttcttataacatgtttaccaaagagatgttactctctggtaatcgattaccagaatgttgtaatcgatta

SEQ ID NO: 237445 - DNA, 418 bp, Glycine max
  unsure (1)..(418): unsure at all n locations
cgaaatgccgaagagaggagattacttttatggtgatgacatttgntgggccttggcaacactatgctttgataactatgctgaaccaatgagaaggtacttgcatagatatagagagggtgaggtagatcataataaggtcaatcttcaagaaaaagggaatagtcctgaagagaacgacgatgaattatttaaattgagcaatagaggggttgggctttgaccaattattatgcttatagtagacaggaactcgttaatccattcatactcatcactgattactgattagatgaattagtaattttaaggtttttgtgaggatgagataatatatgtaataattctcttgtcttaattggagattatcgagcttagaacaagattacttgtttcgctttcttttaatatatacatt

SEQ ID NO: 237446 - DNA, 388 bp, Glycine max
tttttatcaaccccacaggcctccacacattggcctggctctatgtactctgccattctctacaccaccacttccgacgtccggcattggtactcgacgcaaccgtcggccaccttctctgtctccaacaaacacctcttccctgatgaagctaatgagaaagcacacacttcctttggcaggtcctcacacaccatctcagctgccatttcataaattccacacagctcatgagaaaacttggaacaataacaacaaaagtcttatctcatgagataatttatcactacatttcagttgctaattcataaatttcattcatgccatgagaaaacttagaacaataacagcacaagtcttatctctatctatcaagtggcgtctggta

SEQ ID NO: 237447 - DNA, 426 bp, Glycine max
  unsure (1)..(426): unsure at all n locations
tcttaggttgtatgcttcgtgtggttatctggatgatgtccacgatctgtttgatcaaatggctaagagggatacgtctgcatttccctggaattcactcatctcaggatatgcccaagtgggccactacgatgaggccattgcactctacttccaaatggtggaagagggtgtggaagccgactngttcactntccctagggttctcaaagtttgcgcaggaattgggtctgttcaagtgggggaagaggtgcatcgccatgcgattcgtgctggctttgccgctgatgggtttatcctcaatgcacttgttgacatgtattctaagtgcggtgacattgtaaaggctcgaaaggtctttgataagatgcctcatagagaccctgtttcgtggaatcaatgctcacagcttatgttatcacggct

SEQ ID NO: 237448 - DNA, 357 bp, Glycine max
tcgcagatccgatcatggaaggactaggcgactgccttcattaggtagttccagcacaatacggatatggctctcgatcggaaccagcttcacagtatgactaagcgagagcatgaggcaattaaggaatatgcgcaaagatggagagatctctcagcccaagtcgtaccgcccatgacggagagggagatgatcacaattacggtagatacgttacccacgttctactatgaaaagctgataggctacatgccagctaactttgcggatctcgtcttcgtcggagaaagaattgaatccggactacgaaaaggcaaggtcgaatatgcttccaatgtggcccccaacaactacaga

SEQ ID NO: 237449 - DNA, 362 bp, Glycine max
tgcatttcaaaacaatcaaagtcatcaataagagtcttgagaacatgataggacctaaagagagatgcttctttggtttgatatttgtatgcaacttgtccctaaactagttgtaagtcgctataacacctgagctttcttgctcccacttcctttgtcaattttaggcctgctatgagtgcttcatattcagcctggttatttgatgctttaaaatcaaagggcctgctccaaggtaacattattgggtccttcgaggatgatgcctgcctctcttcctttcatattggatgcactatctacatataagctccactagacaagggtggcttggacattaccaatgaactctactataaagt

SEQ ID NO: 237450 - DNA, 436 bp, Glycine max
  unsure (1)..(436): unsure at all n locations
tcatgcttcacctaaggtcttacacaacattttcatactattggggncnatagngagaaaagctttcaagaactcaattctctaatggtaagagtgtcgattgatgaaaaaaacccccccacaaagaatcgtgtataccttagataggatgagggttctccttatatagaattatagatatacctctgtctcataagtaacttacaataaatctttggcacttgtattatatctactctcttgcccgtgattttcttcatttggtaatttctttgttgttttaattcaaaaatgtttttaaatcataaaaaataatcttacaaagatggattgtgatcatttttttatggcacatattagttggtaaaactttagtgaagatttaaactcataatctgtttatnnntttttacttttaagcctcaagccaatctta

SEQ ID NO: 237451 - DNA, 225 bp, Glycine max
atataatgcctaaaggttatcacttggaaataaacaccattaacctttattttggtccaacaatccgctaaatgtgacgctctctaacacgccagggaccttagatttaatttcatctcaattaaatttgaagtaaattactaaaggaaaaatatatcagctgagtatgtatgtaatctcaactatgtattaattttatttttataagacacgtttttccacact

SEQ ID NO: 237452 - DNA, 439 bp, Glycine max
  unsure (1)..(439): unsure at all n locations
tatatagagccaatatgtttaagctcaagcgagcatacgtagggaattattaaaagagtcatattacaaatatatatttatctgatgtgcaataaaaattatattcttttactttttacttttttatccaactaaatatgtaaatagagttcattcttttaatttactttttatatatttgtcctttttactttcttggccaactataagtaaatacttttaattcaaatagtaaaatgtatacatttttaatctttnttgctttcttcttttccttctatttttttcagtcgaatttttattgaagaaagctttttttcttgtttgcctaacatactatgaaatattaaatgtcattataccaaaagtaatttttagtcgcaattattntaagtcttagcgacaatatattgtggactaanatatttaccagcaatta

SEQ ID NO: 237453 - DNA, 371 bp, Glycine max
tcaagttgctcattgactccagattgctgcaaagaaggacaaagatctaaatggtgatctgcagaagaacatagaccacagactcttgcaataagtgtagattttctattcatggcaagctgggttactaggttgaccaaggcatcaagttttcctttaagctttttattttcagtagatgaagatgaatccgtggccacctcatggactcctctaagaacaatagcatcatttcttgcactgaattgttgggagttggaagccatcttcttaatcaaattcctagcttcaacaagggtcatatcaccatggattccaccattggcagcatcaatcatacttcccttcatgttgttaagtccctcatagaa

SEQ ID NO: 237454 - DNA, 357 bp, Glycine max
  unsure (1)..(357): unsure at all n locations
aagccgntctcacctaattaataattcataaaatgtatttcaaccgatcatttgtgttgtaatctcgtttaatcactgttaaaatgaaatcttggttaaaccaaaaaaggtaaaataataataaaataatcaaaatatctttgaataaaataatcaaaaaaatcaattgtacgtttttctttgaaagtttccttgaatgaattgactaataaccaaagtgaaactaaggctaaaattaactcacaaatcaagctttgtccgcaaaagtcactcaacaccgttttaaggcccaatgccttaaacggtcctctttgcttttatcggttaacatgtgtcgcaacgtgccctttcgcgggc

SEQ ID NO: 237455 - DNA, 317 bp, Glycine max
  unsure (1)..(317): unsure at all n locations
cagctgtgaattgcgttcacatcatcctctcaagatgagagtgtgagttnttaaagtagaagatgaacacccactttgttttcagttatgggttttggcgccccatgtgttccctcacccatcccaattctcatgggctacctctcttgcaatgcccactcctcaatcgccacctgccacccccaccacaaaacccttgtcggaacaccaatacgacacttttcctacgccgacatcgtcgccgccgccaacggcttcttctccgacacctttctgggccgaggcagccacggcagagtctacagagccaccctgga

SEQ ID NO: 237456 - DNA, 463 bp, Glycine max
  unsure (1)..(463): unsure at all n locations
tccccttgtgtgaaaagtcatgaatgaatatttgctaatattctttggncattaaccatcaactttcccattggggcccatactgatagtatagacccatgacaaccaatagttgttttgtcaggagccaagcaaagaaaatacagatatattaaaaacaagataaatggtgataattcaaatgacagacaaagttagaggtctataagtagacttgatattgtgcaatgctatagtcagttctagtcagttttagggcaggaggtggagcaggagattttcactaagatgagaatgaagtctgggaactgaattggtaacaaggagaattggctaatcaactaggtctatcaacaggtttgagatgtgattgcattgcctcatgatatatgagcaagaaggaggtgagacaggtctgatactgagcagctgataaagagtgacaactggactgggacataca

SEQ ID NO: 237457 - DNA, 435 bp, Glycine max
tgatgcagttggccatcctctttataagcttctgcaagttgttaatacgattccccaagcaaaagaacaagcttccacaacttatgatccaacttggatgttggaagccattctcggatgtcacaaacttcaatacagtcagcatctccacaggcacaaacagaaacattaaaagatgatggtctatcacgattctcattgaattgatccatcacctccggttcagtgctctgaagctgacgcatccatctcagagacttaatggcctgtgaaacatgatgtacggcagctaacttggatgagattggatcagcaactgtctgaaccacaggtgtggaaactggacatacttcacaagccaaagagctatcatcaggatacaagcttggtgcatccccttcttgagtgctcaattctgtgctactgacagctata

SEQ ID NO: 237458 - DNA, 466 bp, Glycine max
  unsure (1)..(466): unsure at all n locations
ngtatagtgcntttgaaaatggcattacagcagagcattgttgtattggaaaatataaattntagtgtgtaatatctgcttttataatatgatacttggtttttgcagatagatggtaatgatttatttcttgctatgcttttgctaggaataaggggcctagtactaaactgaattctagaaggaataggaagataacaaaccgactgatccacaggtcaataagtttagtggtcacacacatgggcacaataagtttaggtaaaaaaaaaaaatcaattttttaggtaaaagaaatcgagtttttagacaaaaacagaaacgattttcttgggcacaaaaagtattatttctattntattttanaaaaaccaaacaacacaacatataacttcatttttaatttatctctctttaattttatctattctattgttcttttaatcaacacacctatacaccaatg

SEQ ID NO: 237459 - DNA, 255 bp, Glycine max
tatcaactcaaggcttccaatcaagaccttttttgtttaatgtaccacaatcatttgatcaagaacaatctatgccatccataaatttggataagtgccataaaagtgaagaaggagacagaaacagaaaactccctctatcatggcggaagagaaagatggtgaagtaaggagggttcctccatcactacatccactaatgagggatctgtgaggaatggttcccactggtgtccattgaccctgaagccctta

SEQ ID NO: 237460 - DNA, 419 bp, Glycine max
  unsure (1)..(419): unsure at all n locations
ttgtcattgttcaatttaagtttctatggtatgtcatgttctaattttatttccaagncattgctgtcttctttgttctttcttggtaaaatcgcaatgcatatgctttgccttactcctattcaggtgaaaatcatttgcttgtagtagctgttatctacattgccaatacatgagaggtaactgttatctacagacttaattgtttaattgattcgcggtcccagtttatcctgtttggattgataactgatttggttgcagtttatgatgttcggataactgatttggttagcttctactaagctatgatggttggattgataatactaggctacattctttcccttgcttatacagtttctgttaatagtgatgttcatgtggctgaaatagataaatggtctaataataatgga

SEQ ID NO: 237461 - DNA, 426 bp, Glycine max
  unsure (1)..(426): unsure at all n locations
ttcgatctaatgggaggcttttgttattactaanaatttttaccatgggggagttgagattaaaaatgaaggtattggaaaaataattcaagtgaacagtcaccaactcaataaaatcttcaagctttttcatgagagcccctaagtagaggaaggaattggggggaacctctctttggtcttgccaccaattttatgttatgatgtcccttgaatggcacttgaggaatttcccttcccttttcttttatatgatgggtcttttgttgcatttcattacatgctcacattgaggacaatgtgcatttctgtatggggggagggttagaaacaattggttctggtttctattctgcttatgtttctatttggtggattgtctggtgagtggttaccggtttacataaagaaaaaaataattctgaa

SEQ ID NO: 237462 - DNA, 459 bp, Glycine max
agcttgtggatttaaggattgagggctgttttggtttgtgttcacgtttgagtttgtgtttgaggttcgtgtttcggaagaaaaactcgaagaaaaagttttgggtttagttggatgtttctcttcatagagtttggccaacgaaattgttctgaggagtcatgtaggtgattgtgcaatgacatcccttctgatatcaggttttaatcctcccacaaagcaatccaatagagctttttgtgtaattccttgtactcgattagctaaagccgtgaactgcacgtaatatgactgaactgaaccaatttgagcgagtttaaacaactgagatctaagacattcatacggtgatgggccatattctgtctctaaggctcgcgtaaaagcaattcatgttctgaatgagatttcacgagtcatcatttggtagcagggcacaacctctttatccaagtgaat

SEQ ID NO: 237463 - DNA, 429 bp, Glycine max
  unsure (1)..(429): unsure at all n locations
taaccacctaataaatgtataagttatcaaagtttaactcttcaacaataaatcactctagacaaaagctgaaccagaagtccaatgattaaccaccatataaggcagaaattaaaactattaaagtcaacaagcaaaacttaaccactaaacaaaagccaaatggagatccagaatttaaataactaaaaaaggaatgatagatctttgatggtgtggacagtttcaccaaaaagaatccaagtgaaattccacgggacctgcatcccccaatacataccttcatgaaaactaaagaaaattaagagtgaagtagtaacataatgagactacttcaaaaaatgccaagtagatctattacaaaaatatgtgcccttacatacttntcaataattagaaaagtcgtgaataacaattataaaaataaat

SEQ ID NO: 237464 - DNA, 422 bp, Glycine max
  unsure (1)..(422): unsure at all n locations
agcttagactaagttcagcctaccacccttatactgatggccaatgaatgaaccattttgtcgctggaggaccttttaagggcgtgtgtcttatagcaaaaggggagttgggagagttttctgccgttgatagagttcacttataataatagttttcactctactattggcatggctccctatgaagctttgtatagtagaaggtgtaggacaccgttttgttggttagagcccggagaagacctcaccttaggacctgaagtggtacaacaaacaattgagatggtcaagttgatccaagataggatgacggctgctcatagtacgcagacaagttatcaagataagaagaggaaagacctggaatctgagggtggtgatcatgtattcttgagagtcactccatggactgnngttggtca

SEQ ID NO: 237465 - DNA, 480 bp, Glycine max
  unsure (1)..(480): unsure at all n locations
ttcttgagacaacttccttgagaagcttctntgagagttcttcctccagaagctagagcttagctacacacacccctctcataactaaggtcacctccttgagaagcttccttaagaagattcctaaagaagctagagcttagctacacatacctctctaatagctaagctcacctccttgagatgagaagctagagcttagctacacaccccctataatagctaagctcacccccatgacaaaaaacatgaaaatacaaaanaaatgtccttactacaaagactactcaaaatgccccgaaatacaaggctaaaaccctatactactagaatggccaaaatacaaggcccagatgaaggaaaaacctattctaatatttacanagataagcgggctcatacttagcccatgggctcgaaatctaccctaaggctcatgagaacactanggccttcccttggatctctagcccaatctac

SEQ ID NO: 237466 - DNA, 437 bp, Glycine max
  unsure (1)..(437): unsure at all n locations
agctngngccaancaaatcactgctacagtttatctntagtattcattcgcngctggcctcgtcctttgtcacgggaagccggaaggtccatatcaccttcttaattgtcacatggggcactgcgcccccaaatgcacaagtaagaagagataattctccggagtctcgtgtccgcaaaatgcattcatatcatgcatcgcataagcatctcttcataacatcataatggacatatcctgcattngtccgttaacatattccagcctcacattttgcatgagtcatggcatcatcatgcgtatgcgttcaacaaactntgtgatctgcaaaattgcataccatttggtttcatgtctgctcatccttgcgctntcctctacaaaacaaaaacaaaaaagggggaagcgtggacttcacactacattcttagtttcat

SEQ ID NO: 237467 - DNA, 490 bp, Glycine max
  unsure (1)..(490): unsure at all n locations
gtgaccttagaaactcagctntntatgccctctcncctcggcggtgatttcttcttctgttaaggcgatataatntgtggcagtgatattattgaccagcccttcgaaaccttctaccgagatgtcttgggccacatgggcctcattcaaaaccttcactagcagagcccgatgaggctcggagctcatgagtaactctaacagcgagaccctggccagggttttattgagctgttcgataaccttgaattcgctctgctgaattatacggaggaactcgctggcttcctctagtgacacctcctttttaccatcttttctctccgtaagacctttcgccggaatatctttattcacagtgaggggtgcttcgtcatcttgttcctccaccacctttagctttcccttgacgttcgcgggttggactggtangtccaggggtgcatacacacgaccgctacgggtcacaccactcggtcccgtgatattt

SEQ ID NO: 237468 - DNA, 467 bp, Glycine max
  unsure (1)..(467): unsure at all n locations
agcttatatgccattcggaataagggctcgtgtctgtgttggacaacactctaccatgacagaactgaaggtgattttgtctctcattctgttgaagtttcacttctctctctcattaagttactgccattcacctgccttccgtttggttatagaacctggccagggagttgttcttaagatgacaagaatttaagcaacaatgtaacagatgaatgatgaaaacatgcaggtaatgggatggttgatatagtcataagacatcatttctctagctgatgaatgctaataagtttttttttttatccaaattagataataatattttttttttatgaaaggaagatattctcatacttcgaagttatgagacgaagatgatcaaaatttatcatttgatgaattttttaaagattaatttaaataaaaaaaacttaaanaatgaatacgcatataacttttagtat

SEQ ID NO: 237469 - DNA, 404 bp, Glycine max
  unsure (1)..(404): unsure at all n locations
gggtcttgattngaagcaaagttganaattgtgaagcacaagttgtatactttatacaatgagtatgttaagttgtattcgcaaaaagaaacaacctgcaatgttgcttcaagtcaaagttcatcacaagggacttcatctgttaatacttttgctagtggaaagtcatcaacatcacaatggcttattatgaatgtaagttcatgtttttctttactgttttagtctttttattntgtttactttactcttttttttacctttacttactatttttttttaaatagcgtaggagtttatacaatatgagaatgaaactttgtcagatgtggataaatctcatctagacacatatttggaagaccaaaaactttcttctcaatatcatccaaatttggatcttt

SEQ ID NO: 237470 - DNA, 401 bp, Glycine max
  unsure (1)..(401): unsure at all n locations
agctaggttcgaggtacttacccgttgattatcgtataacgttgaagaacgaatgaagaacgtcgaagaacggttcaaacctttgcgagattcctcacggaaaacgttacggaaacgtttcggaagcgcctcggcttagattttcttcacggaaacaatttttccaagcaaattcgaaagagagagaagtgcctaaggggctgggatccttttcttcttcattttctcccctatttatagcaaaataggggagatgcttgccgcccagctcgcccaggcgagctcatctcgcccaggcgagcagggttgcttcctccagaagcaaccgccttctggaggaaccttctggagggcccatatgggcctgggtgctatntgcacccccatttttactaagctca

SEQ ID NO: 237471 - DNA, 444 bp, Glycine max
  unsure (1)..(444): unsure at all n locations
ntataagtgcgggtctgggagacgaaggtcaagtggtcgcgatatgtgaagatgatgttccaagtactttggatttggtccgaccatgccctcctgatttccggctgggaaattggcgggtggaggaacgccccggcatttacgcaacaagcataatgtaaacctttacggttttaaaagctctatagttgggcctaggctttagagtttttcattntgttaaggctttgtgtcttttgtttttgaatttataatacaaggatctttcttcatctgttcctggtctctacccattctcattcatttgcatgtttacttctttntctgaaacggcagattcgatgacgagtcccccgaagtactaatacctgngacccgtctatcaacttcgagcaagaaatgaatcatacggaagatgaaggagatgaggatgtgggactttct

SEQ ID NO: 237472 - DNA, 409 bp, Glycine max
  unsure (1)..(409): unsure at all n locations
agctnaaacattcaacggcgagcgtttctttatattacgagtctcaatcaaacatccgagaaaaaagtcgttggcgcttgaatntgctcaaaggttcaacattcaatttcgagcgtctcgttatattacaggactcaatcagacatccgagtataaagctgttgtcgtttgaatttgctcagaggttcaacattcaatttcgagcgtctcgttatattacaggactcaatcatacatccgagtataaagctattgtcgtttgaattacctcagagcttcaacattcaatttcgagcgtctcgttatattacgggactcaatcagacatccaagtaacaagttattgtctgttggattggctcatagattcaacattcatattcgagcgcctcgatatatgacgggactc

SEQ ID NO: 237473 - DNA, 363 bp, Glycine max
  unsure (1)..(363): unsure at all n locations
ctatcagatactcaagcttagagcgcattccaacgacaataacgtgttactcggatgtctgatcgagactccgaacataacgagacgctcgaaattgaagggcgaagcttagagccaattcaaacgacaataactttgtactcggatgtctgattgagactcgtaatataatgagacgctcgaagttgaatgttgaagctctgagccaattcaaacgacaataactttttactcgaatgtctgattgagtccctgaatataacgagacgctcgaaattgaatgttgaacctctgagccaattcaaacgacaataaccntttacacggatgtctgactgagtcccgcatatatcgagacgctcg

SEQ ID NO: 237474 - DNA, 317 bp, Glycine max
gaacaatccacttggcctgtatttaactgtctttgggcttggcggccactctcaacaaagaactttcaacacctactgaacgttgactgcaccaatgctgctatgggaatgttgcgacaatcctttaaaaccttattgatacattctgagaggttagtgggcatgtggccatatcgacgtccttctctatcggaagaccatcgccattcgtctttggagatgcgaccaatcaatgtcggaatggctggactcagctcacgaaatttttctaaattttgatcataaacgtgcttgcccggagtgtaagctgcataaaa

SEQ ID NO: 237475 - DNA, 262 bp, Glycine max
  unsure (1)..(262): unsure at all n locations
tttggaaaanccgctttcatgagatcctgcttatttcaagacatcttaatacttccaataattgagttgcctttgcttgcagaatttacaatatacattgtattttgccctgaggcgtacttatctacagaattgcaccacacaccatttcctatatgagccttagaactggcttccttctagatactctatatcaatatttctcggcctttaattctcccatgaacactggctaaggtggcttaacatactcatcaaccgg

SEQ ID NO: 237476 - DNA, 468 bp, Glycine max
  unsure (1)..(468): unsure at all n locations
agcttcttagtatcagctgatgaatatgatttcgtggctacttcatgcactcctctaatgataatagcatcacttctggcactaaattgttgggagtttgcaaccatcttctcaattaaatctctggctttagcaagggtcatgtctccaaaggctccaccactggcagcatctatcatacttctctccatgttattgagtccttcataaaaatattggagaagaagctgctcagaaatctggtggtgaggacaattggcacatagtttcttaaatctctcccagtattcatataagctctctccactgagttgcctaattcctaanatatcttttctgatggtcgtggtcctgcaagcagggaaatttttttctaagaatactctcttgaggtcatcccagctcgtgatagaccttggagcanagtaatatagccagtccttcccactccctctaaataatgaagaa

SEQ ID NO: 237477 - DNA, 389 bp, Glycine max
  unsure (1)..(389): unsure at all n locations
tgaagccatgtgcttcacattntcaatatttgaatattatatgctgaaaggatatctgaaatcagtaactcataaatattacttggaaatctattcaaacatggacctaaatcaaatttaagcttctaataaaaccttattcattgcttttttgtttttatatttctaatttgaaaatttgaattaatctcacaagtgaattcaatttttcaggaagtttgctgctgttggaatagatcctgcagtcatgggtgttggccctgctgttgctatcccagctgcagtgaaatctgctggtcttgaacttgcaacattgacttatttaaatcatgaagaaagggtttacagctgcattatagtcatattggataacttctcataacactata

SEQ ID NO: 237478 - DNA, 421 bp, Glycine max
  unsure (1)..(421): unsure at all n locations
agttcaaatattgttttcttgagcttcaaaggatgaaaaacaaattctggaaccaaatataagaactttgcacaaaaatggtggagaaatgagaagaaaatataggtttaagagcttctttccaaagctttgagagaagaagtctcagagacaccaatatggagcttctaagaataagaagagaattgtggcatctcttcccttgaaagtctcatgcaagaggaagaagatggaggttccaaattttggttttttttagagaatacaatgagatatgatgcaaggctagtgatgtgctcaaatgaagcatggcgacatgccacanatgagtgttttgcttttcaattttagctnagatggatacagtgacataacaaaatggtacattgctttgttgaactggaaatctatcttatcattt

SEQ ID NO: 237479 - DNA, 471 bp, Glycine max
  unsure (1)..(471): unsure at all n locations
agcttatctcatgttagacaccctaatatcagcatttgcaaacaatcacagtttacttggtgccaacttaaagtggaattaaacaacgaatatacttaaagtgcataaaaaagttaaataatgctcaaaataggcaatcctagcttaaatcttaccctttccttgatgtcacccaaagtcggcaagtacaacttatagaattcctctctgaatgcaaccacaaacctaaataaagtttagaaaccaacaagaataagacaattagaatctgtgtgatttgtataaatttaagggacaacaagatacatgtactatattatagtattttcacttttaaaggactaaagacgaattattgaccataattgatatattagcattngtatatcactaactcgctcttacttagtatgtctctcaacttgcaattacaaattcattgcaactcagcatttgtatagggtttaaata

SEQ ID NO: 237480 - DNA, 427 bp, Glycine max
tgaaggaaactagatgccttggttaacctagtaacccatctggccatgaatcaaaaatctgcacctgtcgccaaactctgtggtttatgctcctttgtcgaccaccacacagacctttgcccttctgtgcagcaatctaaagcaattgaacagcctgaagcttatgctgcaaacatctacaatagacctcctcaacctcaacaacaaaatcaaccacaacagaacaattatgacctctccagcaacaggtacaatctcaggtggaggaatcatcccaaccttagatggtcgaatccttcacaacaacagcagcaacaacaacaacaaccttatttttagaatgctgttggcccaagcagaccatacattcctccaccaatccagcagcaacaacaacaacagcaacaacccagaaacaacaaacagt

SEQ ID NO: 237481 - DNA, 419 bp, Glycine max
agctaggatagattcagtcttattacggatcgaggctcactaatttacgctatagtatataacacaaacgcatgattaattaaacacacatctttatctacatcagctggtgtgttagaaagacccaacatctttacctacaactgtcaatattacttgcatttttactatttctagcctagatttactttaatcatgttcttaaccatcaattatcaatgtttctttcaacaatgccttattttagaattcaaccctagctaagactagcttcctgagttcgatactcagattcatccgttttaattgtaaatactcgacgatccggtgcgctttccagcaaaccgaatttcccttgaacatatttcgataaagaaaaagtggaccaataagtaactacacgggaaatccaataatct

SEQ ID NO: 237482 - DNA, 416 bp, Glycine max
  unsure (1)..(416): unsure at all n locations
ttagcanattctatgcaagatactttcaagaatatctgttgngtgttgngggatatattaactaagaggtgcttggaattaatcacatgtataagcatccagcatacaagagatttgaaatgtgtttctatttctcaagaacattatttcctactataagaaacacttgctctatggctaagaaaatttgtaacactaattntttcctttaagtgttgcaggcttgcattgagaattccccatatgaaggtccttntaaaaaaagtgttcatgcatggtgctatgctcattntgagctaaagagatggaatcgtggagtgcctttacgcagcgagatcggctttgtcaaggtggtagagttgcaatggtgacacccgcagataaaccanaactcagagcaatctaggaaatatgag

SEQ ID NO: 237483 - DNA, 451 bp, Glycine max
  unsure (1)..(451): unsure at all n locations
agcttctcaagaaagttacctagtctatatatagaagtatgtgtaacacttgttgtaactttgatgtatgaaagtcttatgagatacacttcaaagttccacttctctccctcttttattccttcaatttcgtgctccccccttctctctttcttttcctccattaaagcatcctcttcaagcttcttatccaaggcaattcttggtggtgaagctccttcttccttggcatattccctagtggacggagcctcccctatcctcttctcctttgccttcctctgcatctccatggtgtaaaatcaccattgaaggaccttattgaagctcanaggtccagcctccatagaagctccacaagcaagcttccatcaagtggtatcagagcacaagagcttcaagtaggtgctctttanacctccattaatnttgtggtttaccttctcttcca

SEQ ID NO: 237484 - DNA, 489 bp, Glycine max
  unsure (1)..(489): unsure at all n locations
ttaagtcacctgcggcatgcaagcttggaataagggttgttgattatgaatggataatgactacagagccgacaactagaaactttaatcagctggaagaagatgctgaagctgaagctccacaagagcctgtacatcaatggagtccttttaagtcacctatgattcaaaaaatggaggctatgcttcaccttcatcaagagcactcagttgaagttcatagttcgttggagaatataactacccgactggaaaacattaaactaggctgacccttaacaacctacttaaccctgatgaggataaagcttagttgtgttttaagtgctttcttttgctatctgantgtcctgtttaactatgcttaattatggttttatgtctctgatcancttgttcatgatgtttgattaagtagttatgctttcttataatagctgtaatgatctaagtgtaatgtttttctatgaatgaaatgctatgatcttt

SEQ ID NO: 237485 - DNA, 471 bp, Glycine max
  unsure (1)..(471): unsure at all n locations
agcttgatttacatactcgtgcctcgatggtcaaaatatcttaggagcctatgtttataaatgacatgaagtaataactaactggtttcagatctctttgatgaaacttgatatcacaactgctgcatcattattcctaaaagttataatctcacatctgtttgtttccatttgcctctcatttaggtctatcccggagcgtggacaacaattttggtttcccttgacaacgtangagtttggaatatcagaacagaaaatcttgattcatggtatcttggttaacaaacatatgacagggttgtgaaaccagaggtcaataacaagactgacttgcccattccagacaatgccctcttctgtggtgcccttagcaaaatgcagaagtatgctacanatccttgtctcctaactaaaccagcattaacttcaaattatgtatggttctaaattntaaggcaattatgtatg

SEQ ID NO: 237486 - DNA, 472 bp, Glycine max
  unsure (1)..(472): unsure at all n locations
agctntaatttgtcattgaaaatgttctgttatcttccaaaagaatctttgctcagtagttatcaccttatttttaagcgctcttgtgttagttataaaaattcagtttgatatattactaaaatacaaatggtagacgggtagtagttagctactaacattagtatttaacaatacgttactgctgttttaaagagtgaattcatcaattatctcatgattttaagttgattgaatttattggacattgatcatgttaatactaaaagccttggaagaattaatttaaaatgctggacaatgaatggagcagagtctattgatgttgttaaggtaactgactaattcatgcaactgttatattatactcttattgatgagctatatttctatcttgttcatgcactttcttgatagataaagagaatagcagtcaaagtcgttaaatgatgcaagactatttttgttatat

SEQ ID NO: 237487 - DNA, 285 bp, Glycine max
  unsure (1)..(285): unsure at all n locations
tgcacttcaaactcgctttatagtnttatagattaaaggaggatgatcttagcacttagattggagtctcgggatccgattgtctgaaacttgattggggaagacttagtattcacctgtcaaatacctagcttagtctgaaaaatatcaaccttggacgacagagcacaatatgctagtattggctgccgaaactgggcctataaaacaaattacttggaggaaggtacatgactcggattgacatgtcaataccgaaccttggaggatgcttggtctaagtta

SEQ ID NO: 237488 - DNA, 468 bp, Glycine max
agctagcttctacagtacataagtagtatcttgatgtcgatcccttatatccgatgacattgaccatctcgcagctttttctcaagcctttgtaagtgtcgtgggatgctactgtatttgtggtgtataattataatttccccttgtacataaatcatgaacgatattttgaaatagcacacggtggtcaatgtctcaacatctttgctatataactatggattctataagtcactttacattattctatattaactaactaattgttttaaattcatgcataatttacttctatttatcaacattatgcatatgaccgagacaagtatgtgagtggcgaatgcctctgtgtatggattcctctagccactatccatacaaagatatgggcaatcgcaatttgaactacaagattatataaagatatggatgccgaattcacagagagatgtctacctacgagtctac

SEQ ID NO: 237489 - DNA, 439 bp, Glycine max
  unsure (1)..(439): unsure at all n locations
tgttgagatcgtactcatatagatcaagccactatggtattccctgganaatatgggatgagaacatatctagtaggaattcaaaatcaggtgtcatgtggctgatatctaataagaattcattatctcaagtaagattaaggtctgatttgtgaacttgatttatcaatcacttgatctttcttttaaaaaaaaaatgagaagaaatttacatgataaggaaatctcataccccgagtccatattcctaacttccatgtcaggaataaaatatgtgaaatcatcattattaatttaaagcagttgttaatcacttttgctttatggattaacatattggttaaaaggatttgggaatcataaagacctattcaaaacttgatcacttttgattttgctctgatgtggttaggatttttccgctgtctatttggagtat

SEQ ID NO: 237490 - DNA, 461 bp, Glycine max
  unsure (1)..(461): unsure at all n locations
agcttcatgagagatcaaagataaatttttatttttttaaaagttatgctaaacaagccaacaaagggagaaagaaaggtgtcttcgaacccggagattgtgtttgggtgcacatgaaaaaagaaaggtttctggaacaaaggaaatcaaagcttcaaccaaggggagatggaccatttcaagtgcttgaaagaatcaatgacaatgcttacaaagttgagctacccggtgagtataatgttagttccaccttcaatgtatctgacttatctctttntgatgcagatggagaattcaatttgaggacaaattcttctcaagagggagagaatgatgaggacatgaccaagagcaagggcaaggatccacttaaaggacctggaggacctatatcaagggcaagagcatggaaagcaaaggaagctcttcaacaagtgttgtccatactatttgaatacaag

SEQ ID NO: 237491 - DNA, 458 bp, Glycine max
  unsure (1)..(458): unsure at all n locations
atagctttttctcaacatttaacataattatatatctaagatgtatgatgaaatcttatggttaaacaaatgattttacaccaattgatccatgctttcagtgtaattgtaatgatctttttttaatagaatttttatgtatcatttatttacaaataatattgtttaagtcaaatatgaaatactattatgaataataataaaatttctacaaatatctcatataattatatattcaagactcaaaagttaaaatattttatttaataaataattttatttcacttaatctatgtcttggatgataaccctgatcccttatttgcttattggacggataagacataagatagagcatagaccgacctgaattccactccatggtgtgttctgtnngtgattggacattggtgatgcatgaaagtaccctttcctatgtcaactattgctaactacta

SEQ ID NO: 237492 - DNA, 413 bp, Glycine max
  unsure (1)..(413): unsure at all n locations
agcttattatagtttccttgatggttatttttcgatacaactttttatntgnctaccccaaagaccaagagaagatagctntcacttgtccttagttagcatgacatgtttttatttttttttctcatatttgataccagagggagaaagtaattttaggatctcgtacattaattatgatcttgatctgtgtcaaaacactaaaatagtgaatttaattatgtcaagaggaaccacctcggtgggaagttggcaacactaactgatttcagataaataacacatcagagattaaaataaataacagatgtaagccagtttgttctcactaactcaattatataatcttgataaacaaaagagaagtatataattactattcaatagtcaaaattatagagattcaaaccgga

SEQ ID NO: 237493 - DNA, 437 bp, Glycine max
  unsure (1)..(437): unsure at all n locations
tcttgcgtagccgctctcggtgctcagaanatcccacaatcaaatccctcttattactagctattttgaattctttagttcctgaatgtacaaccttcaaatttttgctcgttcccctctttgttttatgcaaaaaaaatcgttattattactcgaaccataaggaataacatctaaacaagttatgcataaaatgttacttttttattttttggtatttttttaattacaattntacttcaatatctattgtctttcatctacttaggtcattntttaatataaatatgaatttaaaggtgatatacttataatataaattacttgctaatgtacttaaggctttcctttcagatttcaatgttgattntaagttatcaattggtacctcaccaccttctatatcacttatcacagttccatccaatcacttatca

SEQ ID NO: 237494 - DNA, 468 bp, Glycine max
agcttagatttccttagttccggttacctttcttttctcatgtgcacccaaacccaatctctgggttcgaagacaaccttctttctccctttgttggcttgtttagcatagcttttatttttcctctcaatttgatctttgactctctcatgaagcttcttcacatagtccgcctttgcttgaccttctttatgcttaaaaacagaaacattaggcataggcaaaagatcaagaggagttagtgggttaaaaccataaacaacttcaaaaggagaacaattagtggtgctatgaacagctctattgtaagcaaattcaacatggggtaaacaagcttcccaagtttttaagctcttctctcaaaactgtcctaagcaaagttcccaaagtcctattaacaacttccatttgcccatcggtgtgtgggtgacaagtggttgaaaataacaacttactgcccaacttgct

SEQ ID NO: 237495 - DNA, 397 bp, Glycine max
  unsure (1)..(397): unsure at all n locations
tcgctattcaatttcgaacgtctcagtatattacgggactcaatccgacatccgagttaaaagttattgtcgtttgaattggctgagagcttcagcattcaatttcgagtgtttcgatatattctgggactcaatcggacattcgagtaaaaagttattgttgtttgaatttgctcagagcttcggtattcaatttcgagcgtgtcgatatattacgcgactcaatcagacatccgagtaaaaagtttttgtcgtttgaatttgctcagagctttaccattcaaatttcagtgtcttgatatattacgggactcaatcagacatcagagtaaaaagttattgtcgtttgaatttgcaacgaccatcaacattcaatntcgagcctctcgatatatta

SEQ ID NO: 237496 - DNA, 472 bp, Glycine max
agcttatatgcacaaaatagccttaatcatttccaaatatgcatgtgaattaggaagcatcaacaagaatcaagccaaggctattgtgcaagcaatcaatggagcaaaacacaccaaatgattatgatgatggatggctcaaattctcacaaaggtaaactcatcactttcaaattgagctttcaaaactatcatgacatgtagaggagaatcaaagatttcaagtcacaaaatgtcaaaaacttttattttcaaaacaattacccatttcttgaacatatcctataattcaaagaaaaacatgcaaagtcgtacatgcacacagaattgacccaaaatattaaactagaaatccgacgaaactaacaacattaacaaattaacacaactaacaaattaacaaaacctaacataactagcaaaaccaaagaacactcctcctccatacttaaacaacacattgtcctcaatg

SEQ ID NO: 237497 - DNA, 334 bp, Glycine max
  unsure (1)..(334): unsure at all n locations
ggacctatgatactaagcttttgcatccctaaaaccattttaaatgtccaacgccttgtattggtcatcttcgctnttattggctaaacgtggatttgttaaaagcttaaaatcaatacatagccttgtcacctctttcaaaaaaccaagagatcattaatggtccaatgccttaatgttttctctcccttcaaaagaatcaaaagatcgtttaatggtccaacgccttaaatgaccttttattcaatcaaaatatatcttgcanaaaaaggaataaaacaacttaaccaacgtttagttcttgaagaactacgtaggtctgatttccttatca

SEQ ID NO: 237498 - DNA, 461 bp, Glycine max
  unsure (1)..(461): unsure at all n locations
agctngaacaaaacattgctctatctcttttaatccactcaaatcatacaatgtctcatccaaaccattctcaaacactcatttcataccaaacaatccactgcatatcattttcaatcaattcactgttcaaacatgcttttggtacaagcaaacaactcatagtgctgaaattttaaataacttaaacataaaaactgacattgactganattaaaataattgaacataaatcataaaataactaacaataaactaaaatgttcaagatgcacaaatttaaatgtcctgctcattatgtagttgatcttcattaagatccagtgcttgagctattgatgaatcctgtataggctgctctagctctgtgactggtgtagatggctaggtctcctcaagagcaagtgcaaaagatggctctagtatttgatctgtggaggtaccctcctcctgagccatgt

SEQ ID NO: 237499 - DNA, 411 bp, Glycine max
  unsure (1)..(411): unsure at all n locations
tcattgctaagggacattcctganatagttgttttgcattatcaacactagctccacaatgagaacaaatagaggcataagaaaaaaaaccctacgttcaaattatcatctgtaggtgaacaatcatgaatccatctccaaaacaaaaaggattttgatggcgagattccttttctccgtaagatcttatgccatgataatgactacaagttagtttggaagacagaaaacactcctttaaaagtcatgtttcctaaatttgaggggatccaaatgggtttatctatgatctcctctaaaggaataataacaacattaatgtcttccgctagctaggaaaagatagtgtgaactcttgaggaagcacccaacatttattcctatntatacccttcaccatgggctggaatg

SEQ ID NO: 237500 - DNA, 463 bp, Glycine max
  unsure (1)..(463): unsure at all n locations
cgcaagctttcatcttacagacagcatataattttnttatacggataaccactagggtatctccgcccgtcaacgtgactcaaatgtcagtatgacagatcttgtgagcgcggaaaatcatgtaaatctctgcgtgtcaacaggcttgtcaaccgcgattgacgaagggcgcataagacgacgttagtctctgcgtgctatcaggcttttcgttttacagacagcaaaacagaatgtttatacggataaccactagggtatctccgcccgtcaacgtgactcanatgtcagtatgacaaatcttgtgagcgcggaagttgacgtaaatctacgcgtgtcaacgggcttgtcggccgcgattgacgaacggcacagaagacgacgttagtctctgcgtgctatcaggcttttcgtcttacagatagcaaaaaagaatgtttatacggataaccacttgggtttt

SEQ ID NO: 237501 - DNA, 346 bp, Glycine max
gctatatatgagccgcctgagtagacccacggcgagcgatcttaataccctatgaagatattccgagctctccgggttcggtaccaccctgctctactgatgatgcgcctggatactgagctacggaggaacgccccgacctttacgcatcctgcagaacgtacacctgttcagtttcaacagctctatatatgggcctacgctatacagccttcatgttgataaggctgagcgtcttaagttcttgaaagctaacacagggatctttcagcagctgttcctggtatgtacccatactcattcatttgcatgataacttctacctctaaaacggctgagtcgatga

SEQ ID NO: 237502 - DNA, 453 bp, Glycine max
agctggggatctagggcgcaccattatttgtggcccattttgatcaagaattttctttattattggttttaatttattttcttttagtttatttttttaatttatgcaatttaattacaatagttaaattcagtcatttaatagtttcaatttagtttgatgcatgatagagaagtaggtacttattgattggttgcaacatattttgagtgaatcaattgcatgagtgagatgaattacgtactaatggatatttttgtgaattgcttattcttgtgcaagcagacgtcagtgtaattgatgaagtgtgaactaatagtacaagagtgaaaaggttagtttttctgatagaatagcatggaataagaacccttatacttcaatgaaaatcggtaagtttgtgatcttctaattgtgacagaacaacttagtttaatttccttggtttgtatt

SEQ ID NO: 237503 - DNA, 427 bp, Glycine max
  unsure (1)..(427): unsure at all n locations
ctacacagattttagtaatgacccactatcctagaattaaaataacttaatgccattaacctagggaattaaaaaaaacttaatggctgagtgtaactgaaattgtggcaaccaaaagtcacccccaatagccaacaagtcagccaccatttggtctcccaaaaggctgatgcctaggttgccaattgggcccttattacaacttgaactaaacctaactaaagcccttttagttgattaacccaaaacatatttttggtcagccaactttacaaggattgggccattatttagacagactaaacactctaaaattgaaacaaagtggtgtcatttagtcctcctccatttgggccatgatacaactcacaaccttggacttttctccttgaaacttgngcttgtattcanatagtatggacagcac

SEQ ID NO: 237504 - DNA, 463 bp, Glycine max
  unsure (1)..(463): unsure at all n locations
agctaggctattaaaggacatatccatcaacaatttatccatataggagaaatctcccgttatgtctccttcaatgtgtggcaactctctcgacataaagtcaacatcacaatccttcctcttaaccttttttgtggagtgactaaaaaagtcccctacatggtcgatatcgtttggcaaaaccctgacaccgctctcaatctctctccacctccatctctaaagaagacctgagatgtttatttaaatctaactaacattctcttgaattttttagtattgataattgtaatgacccttctttgatactaaaacacatttattctttaattatttttaaatttgaagatttttatttaatatatatatatatatatatatatatatatatatatatatatatgtgtgtgtgtgtgagatcccgttataaaaaananaactggaacaaagtagtcacgtgagt

SEQ ID NO: 237505 - DNA, 449 bp, Glycine max
  unsure (1)..(449): unsure at all n locations
tccatcaataaagncataccttttctgtattntcatgtttattattcctaccaaaaggtatgacaaacctaaggtgtcccatatgagtacctaagtctgtattgaaactaaaaataagagcaaacctacctaatgagtccctatgtacacaaatcatgaagatgttgggtgtacgagtgattttccaaaagagtgttgcactactcaaaacattcatcataccacctattttagggaagcctaataatacttattttgggcaccaacaaagcacaaggatttaagctcttgcgaaccaaaccatcatccaacaactcctttacttgaggaataaactcaagcctaagaggtgtgacaatgctaacaagtgtctttttataaaggagaaaatgtggagggtgtctaagaggggaaatttctttatatttgatttatttcaaatgctttct

SEQ ID NO: 237506 - DNA, 428 bp, Glycine max
agcttcttatccaaggctcatcttggtggtgaagctccttcttccatggtttattccttagtggatggcacctcctcttacctcttctcctttgtcttccactgcatctccatggtggaaaatcaccattaaaggaactcattgaagctcaaagatccatcctccatagaagtcccacaagcaagcttccatcaagtggtaattagagcacaagagcttcaagtaggtgctccttaaacctccattaatttttttgctttaccttatcttccattgttgtttcttcatttttctccatgtatctcctcacatgtcttgtgctaaatgttgttaacatgattctttagagtttccaccaattaaacttgctatagaagcttgatttgatttctatggttcaaattcttgttcttgttcttgaaccatga

SEQ ID NO: 237507 - DNA, 400 bp, Glycine max
  unsure (1)..(400): unsure at all n locations
nntgcggattggtcttcaccagtgaaaggatcgatgtgtgtccgaaaagaggcaaatttgatcatcctgcttatacgaatgagaaaactggggcaaatgaagagggtgagaaagagggagaaacccatgctgtgactgccattcctatacggccaagtttcccaccaaacccaacaatgtcattactctgtcaataacaaacctcctccttacccaccacccagttatccacaaaggccatccctaaatcaaccacaaagcctgtctaccgcacttccaatgacgaagaccacctttagcacacaccaataaaaacaccaacaaaagggaatttgcagcaaagcctgtaggtcaccccaaattcgtgcatatgctaactgaccctatcactcataatcat

SEQ ID NO: 237508 - DNA, 462 bp, Glycine max
  unsure (1)..(462): unsure at all n locations
agctngtagcacggctggacatgatatatgtcatggtttggttaggttcaaagataaaaggggatgtcccacattatttccatgacacaaaggcaacaattatgatttggaaattgtatgcaaaactagtcatgcatgcacctatgcggacactcaagtgtcaaaaaatctttggtcgtgtgatgctagggctcataattcattttctctattttagtcaacccagtgtttccaaaatatgttcttttatcaatttgtgcattcatccgagtctttcttgggtgtttggaaaaactttcacagcatttacccttcaactgtgtacacacatttttcanaaactagttatgatcagtgaattctttcaaagaaaaagtggaaattatctcttttacgagcatgttgtttttagctaacaacttttattctattatttcatttttcttcttatcattgttattc

SEQ ID NO: 237509 - DNA, 470 bp, Glycine max
  unsure (1)..(470): unsure at all n locations
tctctaaatgaaggatacaatngaccattaattgtacgaatttattcataagtgtgttggcctttaaccacaaccaacatcatcctaagataatacaatttttcagtacttggagccaccctgttaaggcttctaattgtatagcctcctttacgtggcttctaacatctattcttggccacacatataaactttgttatgaattgtaaatacgttagatcttttccttcatggaaaatgatattagtttgtagccaagaagtaaacatggactccttaatagttggcttggacagcaaagcatcaatgtcatcatcatcttcaaatactattgaattttcaccagacaaatgaaagtacaatctttgaacaacaggtgatctcatgtgaatctggaatgaatatattctccagcaagcttcacaaggagaaatatacctaccatngagatagtacttaaccttataaat

SEQ ID NO: 237510 - DNA, 61 bp, Glycine max
  unsure (1)..(61): unsure at all n locations
aaccaacaaccccagtcgaccacacccaggagctgactgaactgaancaacagaaaacggg

SEQ ID NO: 237511 - DNA, 454 bp, Glycine max
  unsure (1)..(454): unsure at all n locations
agctnntttatttcagtagataaagatgaatccgtgtccacctcatggacttctctaagaacaataacatcatntcttgcactgaattgttgggagttggaagccatcttctcaatcaaattcctagcttcagcaagggttatatcaccaagagctccaccactggtagcatcaatcatactcctatccatgttgctaagtccctcatagaaatattgaagaaggagttgctcagaaatctggtggtggggatagcttgcacacaatttcttgaatctttcccagtactcatacaagctttctccactaagttgcctgatgcttgaaatgtctnttctgatggcagtggtcctagatgcagggaagaatttctccaagaacaccctcttaaggtcatcccagctganaatggacctgngagcaaggtagtatagccaatcttttgccactcctc

SEQ ID NO: 237512 - DNA, 455 bp, Glycine max
tcagaccaaagcaactcagaatctaagcatctaacacctctcagttcagtgggttttcaaggcttgagaagtgaatatgataatggggtaaacttggagcaaactctcatctcaaacaagtctatatcatcaatcgaaactcgctccaactggttatacgacgaataccctaccgaatcaaaatttgactcctcaacacccaaatgtaccctacaaatggctcttgttttcactttggtcactcatattcctcattagcacagtctaagctgtctcataagtcctaaatgacattataaactaggattaactccctttaacctccaaataccactaaatccagatttggccttccaactatcaaagcctcactctttttccactcataacatcacagtctcactttctaacgctaggataactctacccttcatctctagcagttgttcataagc

SEQ ID NO: 237513 - DNA, 481 bp, Glycine max
  unsure (1)..(481): unsure at all n locations
ttaagtcacctgcngcatgcaagcttgtcccncactaccaggcaagcatcattcattctaaaataccaagctaaattcccatctcgccccttatacataatctctcaggtactatggtttaataactgttcttttgggcctatttgctaattgtaccctctgttctgttgcctctgcattttcatcctgttcctgagttgctgccattgtagtagcttgttcctctgttatattagattgcagtggttgctcctccgtatcatgattagtgggatggatgcggaagggatgggataatactcttacttatatttatgggcattgtgattctttgtgggttaaccatcattatttggcgtgttgcacttacaccttaacatgtttatgttgtagtctggtggcaacaggtgttaagttgattacaagtggtggtaggggttggaggtgtgtaattgtgtgaaatgcgtattcaaatctccat

SEQ ID NO: 237514 - DNA, 453 bp, Glycine max
  unsure (1)..(453): unsure at all n locations
tgctccanataccaacaatggtcttttcctttgagaactttcacaatattcgatttccaagattcaagatgatggcactatgtgccttgtccacgattgtcttcctttatgcttcaaacattttgttttgaaaagctttttctccacccaatatctgatcaagatcttgtgtaacaagcaacacctacatcttcaatctctatattccaaaatcattttttcctgcgaatttctccacatcagactttgtagttgccataatcaccttgttgaaccaagcttttagatacaatgtgttgtgaaaacttgtccaaaatcacaactatctgattaacttcacccacaaaaatcttactctacgataaaaanaagaagatttatgaacaaaaaacatgatgacaaagaattgagtggataacatcacaattgaaaatagaaatcatattttctgtg

SEQ ID NO: 237515 - DNA, 409 bp, Glycine max
  unsure (1)..(409): unsure at all n locations
cgctngctcgtctggctgatatttatcatgcagacttttcttatgatgaccgaggaacaattagggatcaacttgaaacttatgtgcttcgagtgagaagaaatgcttctttttccacttgtgaagatgttcaaagtttggctatgaagacggttcaaactgagaaacatttggtatttccattggtttataaacttattgagctacctttgatattgccggtgtcgacagcatccgttgaaagagcttttcagcaatgaagattatcaagtctaaattgcgcaataagatcaacgatgtgtggttcaatgacttgatggtatgttacaccgagcggaagatattcaagtcacttgatgatattgatattattcgaacatttaccgcanagaagtctcggacaggacac

SEQ ID NO: 237516 - DNA, 370 bp, Glycine max
ggtgcattcaatatcctgatgagagtgttccatatgttctcaagactggactaatacatttgctgcccaagtttcatggtcgtgcaggtgaagatcctcataagcatcttaaggagttccatattgtttgttccaccatgaagccccctaatgtccaagaagatcatatctttctaaaggtttttcctcattctctggagggagtggcaggctgtactaccttgctcccaggtctatatttagctgggatgaccttaagagagtgctgttggagaaattctttcctgcatctaggaccactgccaccagaaaggacatttccggcattatgaaacttattggagatagcttgtatgagtactgggaaaga

SEQ ID NO: 237517 - DNA, 472 bp, Glycine max
  unsure (1)..(472): unsure at all n locations
agcttcctcggagccatttcctgttaatgttaacatttggaaagttagttttaccaagaaatgctactcttaaaacaaaaatggcatacaacctcctccaataaacacaaacatcaatgtaaatttagagcaaactcatgcacatacttccttatgaacattcactcgcacaagatattcttctacctaaaaaaaaatgcacccatgcgcaatcaaggcacctttgttacctagatttatctatgtgtacttccaaggtgtatttgctacctacatcacatgcacttccttggctaaatntacatacatgcatactcaaagcatcttggctaccaaaaattgcacacgtgcacattctggtatttctaatacctatgcatatacaaactttgtgatgaatcttggctatctacacaataaggagctacatttcatgctgtattcaagtggttttgctaccttaaaaccgcat

SEQ ID NO: 237518 - DNA, 380 bp, Glycine max
  unsure (1)..(380): unsure at all n locations
ttgaatggacattgctatcatttggtcgtctttgactatcttactcaaagggttgaagcggcttcgtacgccagtgtaactaggagtgtggtggttaggttcatcaagaaagagataatttgctggtatggtttacctaggaagattatcaccgacaatgccaccaatctaaacaataaaatgatgaagggaatgtgtgaggatttcaagatccaacaccataattctacaccttataggcccaagatgaatggggcagttgaggctgctaagaagaacatcaagaaaatagttcagaagatgaccgtgtcatacaaggattggcacgagacgctccnctttgcgcttgcatggtatcgaaccttcgtgcgcacattcac

SEQ ID NO: 237519 - DNA, 457 bp, Glycine max
  unsure (1)..(457): unsure at all n locations
agctngttacaacccaattctttgtccatataagccattactgactctatacaaatcaaacatatttgttgtttgcttgcacaatgactaacttttaatcgtcttccatacggatatacaatctcaacacttaatcttttctctcaaggtgttcaaggtgttttgagaccttttccgaactatacaacaatttacaaaaagtgttttacaaaaaagaanttgaatgaaagtgcatagattcgtgttgatatcttcaaagcttctaatatttataaatctttttcaacaagtgtttgttgtctctaaatagatagatttcttcacttgagcttatgtttgaagattttggtcgttagagcatttaatgcttacattaaatgcatgtactctttcatgctagaaaatctctcttgtgaactttngtgttgatcactacaacaganaatcacttgcttta

SEQ ID NO: 237520 - DNA, 432 bp, Glycine max
  unsure (1)..(432): unsure at all n locations
ntaagctntgagcacccacgagtgtgtctacaccctagtatcatcagtgtatgtagggttttcttcgagcgaggacagtgtgggttctgtggggttcgagcgacgacaatgtgggtttttcggcagtgtagggggttctgtgggttccagcaaggacaatgtggatttttcggcagtgtatggggttctgtgggttcgagcgacgacaatgtggatgtcgagggagcggtttccgaaagatttcaggcgggaggagaaacagaagagcgatttcaggcaggaggatgacaaagagaagagggagggcaaggttttcgagcgcgcgcggcttgtgaaatctcaatttttattaacttataaacatacaacatcggnttttatggatacccatgtaactgatatagtaacatccgtttgaaaaccgatgtacat

SEQ ID NO: 237521 - DNA, 414 bp, Glycine max
agcttatcctatatcagccaaaacatgatctttatgcaacctcaaataatgtcaatagtccagttggagaacaaaatgttgagtgaacaagcaagcaataatatagggatacaaaattcgctacccaatatggaattgtcttctagctaattccttttattttatatgtttttcatgtctttcagtgctagtagctagtataactactaattggaatctacttatataaaataacttcaatttttatttatgtatatttagaaaaaaatatcacatattggttagatcctcaaattcatcttttctataaataaaggaaaaaaattagtgtcttatgtctatccactacaagaaatatgtttttttacgacacctattctacgacggttttttatggaaccgtcttagaaaatg

SEQ ID NO: 237522 - DNA, 395 bp, Glycine max
  unsure (1)..(395): unsure at all n locations
taaggcatgtttccatgttcaaatcaaatcagtgttttgaaagttgttcttttatcaagtccatgcaaaaacatatgaattcatttggtatttgagaaagtcattcattgttttcattctcaatggttccaaaaatcattttgttgtgttctgatccaatcaaaagtaagttaaaaaaacactagttgctaattctttccaaagcatattatgtccaagattttcttttttgtttaagtcctaaaagagttatatataatctataactatactaacggaacataatataccanagcacgcataaatcagtcaaaaacacacactcacataagtttccaaacaaanattccaaaatagtaaataaggcgataaagtactaaattntaatacataac

SEQ ID NO: 237523 - DNA, 466 bp, Glycine max
  unsure (1)..(466): unsure at all n locations
agccttggagtttccaagagcctattcgtcttcttctttagtccagtcttcttctggcttcaattcatcagtgggctttccttctgtgtccagcatcttgggatgttcccagcctttgatgacagctttccaggttctgctatccagtgatttgaggaaggccaccatccttgctttccagtattcatagttggttccatccagaattggtggtctgttcactggtcctccttctttctccatgttcatcagaatntatctccctagatctcactcagtgatttcgagtgcctgctctgataccaattgaaattctgatactgtggacagatgtcgtacaggatgtcacgacatcacgcttcagaacatgcagaatatatttgacagtgtgtacagtttaaacaagtaaataacacaagagaatngttaacccagttcggtgcaacctcacctacatctgggggct

SEQ ID NO: 237524 - DNA, 374 bp, Glycine max
  unsure (1)..(374): unsure at all n locations
tgcagccattagaagagaaagaacatgtgattagtagtataactganaatgttagtcaatttatcagattagttgtgaaggaatgcattaaccgtatcccggtgagagtgtgatccttatattttgagagaaacgactatcatttagtactgatttttgcatgaatctctgaagtatggactgaatggatgaaattgaggatgatgaaggccatgtttgattgtgatagccacttatccaaaaagctgaccacgtgcttgaatgatttatcccttgcacctagttttgagctgaatgattgatttattgattgaaccttgagcctatacagntttatctcctgctaccttgtcttaggttgtaggagagcatca

SEQ ID NO: 237525 - DNA, 445 bp, Glycine max
  unsure (1)..(445): unsure at all n locations
agctatataagcgcgggtctggtanacatttgtcaagtggtcgcgatatacgaagacgatgttccgagtacattagattcggtacgaccatgccctccagatttccagctgggaaattggcgagtggaggaacgccccggcatttacgcaacgagcataatgtaaacctttacggttttaaaagctctatagttgggcctaggctttagagtttttccttttgttaaggctttgtgtcttttgttgttgattttataatacaaggatctttcttcatttgttcctacgtctctacccattctcattcatttgcatgtgtacttctttttctgaaatggcagatccgatgacgagtcctccgaaggtactaatacctgggacccgtctatcgactccgagcaagagatgaatcaaacggaagatgaaggaaacgaggatgtgggac

SEQ ID NO: 237526 - DNA, 414 bp, Glycine max
  unsure (1)..(414): unsure at all n locations
ntacagcagattgtagtaatgacctattaacctataatttatataacttatgccattaacctagggaattaaaagaacttaatggttgagtgtaactgaaattgtggcaaccaaaagtcaccccaaacagccaccatttggtctcccaaaaggctgatgcctatgttgccaattgggcccttattacaacttgaactaaacctaactaaagcccttttagttgattaaaccaaaacatattttggtcagccaactttacaaggattgagccattatttagacaaactaaacactctaaaattgagacaaagtggtgccatttaatcctcctccatttgggccatgatacacctcacaaccttggatgaccttcttgatcaacacagcccaatccccacattgaagcatacactc

SEQ ID NO: 237527 - DNA, 428 bp, Glycine max
  unsure (1)..(428): unsure at all n locations
agctagaaggtgtgtaattcctctttttctatagtagaacactggtaacatgtctactatcattgngataatctctttctctatttattgggggcgctacttgagctgccaagtctctccatctttgggcgtattcttttgaaagattcgcgccccttttttgcacatgttctgttgttgcatcctatccgaagacattatactgacactgcctaacgaaggcaaccactaagtccttccaagaatggactcgggaaggttccaagttagtgtaccaggtaacagctaccccagtaagactttcttggaaagaatgtatcagcaattcctcatcttttgcgtatgcctccatcttccgataatacatctttagatggatcttggggcaagtagcccccttgtacttgtcaaaagccaacaccttgaac

SEQ ID NO: 237528 - DNA, 351 bp, Glycine max
  unsure (1)..(351): unsure at all n locations
tgcccacagctcgcccaggcgagcagggttgcttcctccagaagcaacagccttctggaggaatcttctggagggcccaagtgggcctggttgctatttgcacccccatttttactaagtacaccccctgcctttttttggtgattcttttttcgtaaagttacggaaacttacgaatttcgtaacgatacttgttttctttccgtaatgttacggaaccttgcggattacataatcatcccctttntgacttacggaatgttacggaacctcactaattgtgtaacgatgcttccatttgatttccggtgtgtcacggaaccttacggatggtgcatcaataatttcttt

SEQ ID NO: 237529 - DNA, 470 bp, Glycine max
  unsure (1)..(470): unsure at all n locations
atcctctcagtcacctgcggcatgcaagctataacacgcctctgttgatggatatttatattagaatgcatatattntaaatcccattctcaaatatctataagcatgatggtatctagcccttaattagttaatatatttcagtattaatgtcttgagccaccaagatagcaggtttcaaatattattacattggaataagattaagtaacaagatattattatcatttgagtttatttcagattcagaaaaatattatgcaagaaaagaatatcaagatagacctgttaatcattgaggaaactaccaatgaaattagaaactgaagcattagaacttgcctcagttaaacatacagggctgccagatggagtaggaggaccaacgaaattgagtgggggatcctctggagatgaaaagtcagaactatcataagttgatagcgagacacactcatcaaaataagcct

SEQ ID NO: 237530 - DNA, 396 bp, Glycine max
  unsure (1)..(396): unsure at all n locations
ntagatctaaactnttcttcccaaaatattgattagaatttataacgcaaaaatctaagtgtaaatcacttattccatgttgtcttagagtcatgtttagtcataataattgtcacattatattctaattntgtgttgaattttgatttttttgattgaattatagatacattttttcatctattcttgtcattcttagcctatcttttgaattttgagtctaatccatgcatgttatttagttcataacatgttctaaatcaattcctagaagtagtcttgttgtttaactntgttntgttttctaagtttcctacatgatacatatgaagaaattaagttgtggtgctgagttgtggctggatttgtgaatcaaaataagtcttaagctctctt

SEQ ID NO: 237531 - DNA, 468 bp, Glycine max
  unsure (1)..(468): unsure at all n locations
agcttataaattattaagagagagagttgtgtcctttgcaaagattntatctcaaacaatgcttttaaaaaataatcataaatgtcatattagaccttaaaaatatgtttatatcatataaataagtaagacttgactattataaagtttaatatgcctattttgacttttattttaattctaaattaccttctaaatagatccttaatcagacttgttcattatatcaggctttaatataagttaaaccacatccttataaaaaaaatctgcctatgacaagtgaattgatgaagctgagaccaagtcttttttaactaaggtgatgctcaaatctagtctatttctactccaaaggagaatgtatcaaatgcgaatccatgttattcgagagatgagtatcataaactcggaatattacattatatacgtaagatttacaaataaattctaatcgagacacacaca

SEQ ID NO: 237532 - DNA, 389 bp, Glycine max
  unsure (1)..(389): unsure at all n locations
ctataaaactaagcttagggtgtgcttggtgttggaatcatcggaagacagatttactatggtgtgcactggtntgatcgaaagaggtgttggctttgtgacagaagcagctatataatggcttcctctgacaagaaagaacctaaggttggagcttggaatgtccaaagtgacaccaaggtcactgtaggatgagattacacggttttgttggtacgatgagtatcttttagtggcagagatggtgagatctggcacaaacgcttggtacaacagtgctgtggtgaagaggagaagagggtatgaagctgagagtgaacagtttgatgattggatgacgtaacggtgaatgtactcacgttgtgtcccatttggaataacaacagttt

SEQ ID NO: 237533 - DNA, 389 bp, Glycine max
  unsure (1)..(389): unsure at all n locations
agcttgagttgtagagatagaagtgacagttttcattttgtttgtcactnngngaagttagcagaacttggtcattatccaagaattgagcatactctcggtgatatagacaaatctgtttaaatctttgtgtcttatatgccttatgtttatttcctgctttaaactgacctcaggtttgaatttgattcagtttaaaacacattctggttttgcaattttctttctattgttcgaacttgcttttgtaaaaatctattattagttttacaaagttatatttcagatgataactttattttcacgaacaaggctttaaaaattctacaattacaattcaacatttccttcttgtgatattttgctttacagaaattgagacccatgag

SEQ ID NO: 237534 - DNA, 258 bp, Glycine max
  unsure (1)..(258): unsure at all n locations
ttgcatgtntagagaattctagagagagaaaggtccatttttcagagattnttgagagcttttgctgagagaagactggcagagaactgagcaagaagaggaagccatcctaaagcatgagatgagtttgtgagtgattgtgaggttctagaggtggaggagacatcctcactactggtaactcttcaatcggccatgatcctnttctctttgatggaaaggaagcttcccagatatggagagctcaatcctctatta

SEQ ID NO: 237535 - DNA, 470 bp, Glycine max
  unsure (1)..(470): unsure at all n locations
agctntaggggtaaagtaaatagctcatatggatgttaattatgacgttccaaatggtaatgtaattgtgtgtaattgtaaagaaaaaaaaaaagaatttccaattaaatacaagtcaaatgtgaatgctgatttccatgccgttgctatcaaaatgatagcaccaaaattgtgaattatgactaacaattaacacaattaatgagagcctaaccatttaaacaaaacaatttattcgttacatctttttcctttctctaaagtctcaatgttggtgagagtaggagagcggatccaagagcgattattcaaattgaagtgaaacgatccagattaattgcagtgactngacgcaagaatgaaaaaattaggtgtgtatcacattcttgtttctccaaaatggcggactagtgattcaagacaacgtggtttaataggaaaaaataaacttattcacgtcgctaatcatg

SEQ ID NO: 237536 - DNA, 429 bp, Glycine max
  unsure (1)..(429): unsure at all n locations
tgtcatagtccgacaatntagtactgatcctttttgcctctaaaatctgtttatgagagtaaagtttgacataaactcagtcgctgacggtgacttccttcctattagtatcaatattgttcgtcatagtttgttgtgcccatgatatgttgtatttgatctacttgagtgcctcatatgtatccttcacccaacatcttagcaacaacagtagaactgctagttaagcctctagtggtattattcccatactctttatattctagcaactactattaaatatccaagggttccaattaagccaaaaattaggcttgctattgctatcactcttgtgtgttgggctgttgagagctgtcatanagctgaccattgattgggtttgtttggtactattcacaatcaatgtggcacataaataaacaaaaa

SEQ ID NO: 237537 - DNA, 452 bp, Glycine max
  unsure (1)..(452): unsure at all n locations
agcttgtaaatcatatataattagggaagtttaatcatgttctctaactggcttacgaaaagtagaaaagaaaaaaatatgtacactgaaatcgacagcgaggcatcggcatgcaccgaaaccataaaccagcagcgcataaattttccctttcatgctatattagttatcactactacatatgtaattgttaataacacttttaataggtgttagaaaaaaaatattgttaaaaatcatatgtaatgtatcaattgaaagaaggaagatgatcttntatctttttcatgagtcatttcgtcttcccatattcttttnttttgtttaattcttcaaaactagcaagacgctaatgcgattgcatgggcactctagcatattatgcatgctntaaacggctatgttaaaagcaatatatattcaatcatcaatgaacatacagcataagtaat

SEQ ID NO: 237538 - DNA, 303 bp, Glycine max
  unsure (1)..(303): unsure at all n locations
ngctgttgatgtttaactngagaagtgagagaattaagatcacccatttctttttcaagcccatctctgtcaagttgtcgtcttgtctacaggataaatttcaattagatcagccaaatataattctggaacaggatcatacatgaagattcatgagaagtgcacataatgataaaaaaatggcaaagaacaatgatgttggttttttacatggtctcaatacaattttatttaagctggtcaattttccaattccaccatcaaagaaagaaacgaaacctgctggtgagaaaatgggtgtgt

SEQ ID NO: 237539 - DNA, 485 bp, Glycine max
  unsure (1)..(485): unsure at all n locations
gatccttaagtcacctgcaagctgcaagctnggataaagactaactattttattattcaatatctaaaacaaaatatcatggttctgttaattcttttttctacaaaaatattctagcactcaggtatatatggattgagaagggagttgataatccctacaacgttgttgctttgaaggtgtctatacgtctactctattcctccattgtagattcataatctcagaatcatattatgtcctcgtgaatagctgagagtgtttgatgattattacatatcagagtatacaccaaattcaaaattgacaaggatatagttatacacttactcccatccatgagatattgattcaaggaaaaattcatactatatctcaaagaaggagaaaaaacactaaagctgatagaatcttagtcaacaattaatataaaaaaccaaaacaaataaaaaagggcgttggaacctttaccgacacaccacatc

SEQ ID NO: 237540 - DNA, 314 bp, Glycine max
acttagcaccgagctgcacttgacaaacttacatttgtctttaaactgctcacatctgctccgaactagaaatgtctggtcctctgcataatgctttatccataccatatcttttcagttggtttcataaggcttcctagctgctaacaaaatgcttatttaatcacctaccaaatatttgcgggaatttcaccttatcttgccacccatgtgatacccaatatgagtacccacattgtggcaacaaattctgtatatgtacatcaaatagaaattctgcttaatgccctaaataatgcttttgacactcaatg

SEQ ID NO: 237541 - DNA, 389 bp, Glycine max
  unsure (1)..(389): unsure at all n locations
tccttaagaagattcctaaagaagctagagcttagctacacatacctctctaatagctaagctcacctccttgagatgagaagctagagcttagctacacaccccctataatagctaaactcacccccatgataaaatacatgaaaatacaaaaaaaatccctactacaaagactactcaaaatgccttgaaatacaaggctaaaaccctatactactagaatggccaaaatacaaggcccaaatgaaggaaaaaactattctaatatttacaaagataagcgggctcatacttagcccatgggctcgaaatctaccctaaggctcatgagaaccctanggcctttccttggatctctggcccaatctacttggagtcttttatccaat

SEQ ID NO: 237542 - DNA, 447 bp, Glycine max
agcttctcgtatccgtacttggaaggatcttattactgccttcctaaggcaatatcagtacaattccgatatggctcccgatcgcactcagctgcagaatatgttcaagaaagagggcgaaacctttaaagaatacgcacagtggtggagggacctggcggcacaagtggctcctcccatggttaagagagagatgatcaccatgatggtagacactctgccagtgttctactatgagaagctagtaggttacatgtcgtccagctttgcggacctagtattcaccggggaaagaatcgaggtatgattgaaaagaggaaagtttgattacgtttcctccacgagtgcgaatgccaaaagaatcggggcaacaggggcaaaaaggaaggaaggagatgcccatgctgtctctttaatgcccgcgtgggtcacacccccgcagacacc

SEQ ID NO: 237543 - DNA, 428 bp, Glycine max
  unsure (1)..(428): unsure at all n locations
tgcattnggaattgcgaaagtccccctccatcattaggatttgttcctgccatctcaaacaaacaaatcaaacgtaacaagacaattatagttgctgtttgaatacctcacccactcaagtgtatcacacaattatggcttttctctaatgaaacactcttgccttttaccactctaattccccttgagttcttaggcaattcaagagattatggccacaacaaagaacaattcaccaatatgtgtaaggtaaggctagagagacaaggaaaaggttaaccaagaaaaaggctaacaatgtttttaggcacaaatgaagganataaaattcagaatttaggaattcaagtaacaatccttcatgcaaccaataaagaattcacttaaagaattnntttttaaaaaagtctttcagcatgaaccatttc

SEQ ID NO: 237544 - DNA, 465 bp, Glycine max
agcttgagatgaggaagtgtcgaagggtgaaactttctgcttttattgttgaccacagagtggtacctggagatatgtcgcgggggtcaggagaccttggggacgtcaggtggggtgctattgcccaaaaccaaacttgaccaatcccgacccaacccgggcatagtcggtcagtgagaacctgtgatgtacctaagcaggcgagctcctggcagtcaacagataaaaggaacaaagaccacaaagcaaggaggcttgtggtagttggccagctgtgaaacttgactgatatgtgagatatggtctctggtaatcgattaccaagggtgggtaatcgattacaaggcttaaaaatgaagacaggaggctaagatggtctctggtaatcgattaccaaggggtgtaatcgattaccaggcttgaaaacgaagtcaggaagctaagggagcctctggtaatcgatta

SEQ ID NO: 237545 - DNA, 419 bp, Glycine max
ggaaattgaactatgaaagctcttgagcaattcgaatggtcataactttcacacgaaggtcagattcacgtgcataatatatcgtgacgctcgaaattgaacaacggaagctctcgagaaattcaaatggtcatacttgtaactcggaggtccgattcaggggcataatatatcaagacgcttgaaattgaacaacggaagctcccgagaagttcaaatcgtcataacttttcactcggtggtccgattcacgcgcataatatatcaagacacttgaaattgaacaacggaagctctcgagaagttcaaatcgtcataactcttcagtcggatgtccgatttatgcgcatcacatatagagacgctcgaaatttgataacggaagctctcgagacattaaatggcataacttttacacg

SEQ ID NO: 237546 - DNA, 403 bp, Glycine max
  unsure (1)..(403): unsure at all n locations
agctntagtgatagtgtgcaaccatagattttacattgactatcctcattgatatgttctactatttattttacatgaatttctaattgtcataacatataattcatggatatgaattagacattctttctttttgtacattttaagccactggccaaaaagctatcccaatgtatattgttttaccatttgcaagccctttgagccaaacactttatattttgttggaacagtaacctagaataaaagtttcctatcttaccataggataggagagcaaaggtgttttgttggggatttctatcatttggtggctaatatgatgtaaatacctctattttaaatgagggtattaaggtaaattaaatattaaattattgaatagaaaagaaaagaaagaaaa

SEQ ID NO: 237547 - DNA, 460 bp, Glycine max
  unsure (1)..(460): unsure at all n locations
tgtatgttattctatagggaagattataaacatgttgtgatcaaagttataaataactagtgctactataatgtagtgtacaagacatgacattctatggaatgatgatgcaatgggacatctaacgaaatttatagttccatgaaaaggactctttggggcaaaagatctctttactatttaataataataatgacgacgatgatgatgatggtggcgatgacgacataataataataacaagcttgcaaagcatctgtgaggtagcatggatgcttactagaaggccaatgtgcgaggatgctgactntgtttcaaaacttttatacatgtaaatagatgatccatgatgttggtatctctcttgattcanggctacttataactaatatcacactataactatctaaatgagccctatcacgacttacatatggcaatgatcgaattacttccttga

SEQ ID NO: 237548 - DNA, 463 bp, Glycine max
agcttaagcttcaaagggccgatagagactattcgagaatcgaaggcatgatattggaagacaagttgaaggcttgtcaaaggtcaaagagaagtttgtccgaccaattgagcaagacggaagaaaccatgtgggccatcattgaccaatacaaggagaagctaagtcttgcagcaacccatgcataaaggctagaggatgagtatgcaaaggtgtcggtcatgtaagcagaaagagaagtgagagaaagagtaatcgattcattacacagagaagcaatgatgtggatgggtaggttcactttcaccttgaatgggagtcaagagctttcgagactgctagctgtcgcaatgtgcccttttgcgggcgagcgaaagcgaggctcacgggtgcgctctccaaaggaggaaagatgcacggagtcgccaacaacgtttatttgtgggaaacgtcagaaaaaccg

SEQ ID NO: 237549 - DNA, 341 bp, Glycine max
ttgaaaagtgctatttttcaccttctcgctaagccaatccgctggcttagcgagcgtccgctaagcgcaacactcattggctaagcccaaggaagaatctggaagaagatgagttgtgcaggtttgctaagcgcaccgcttcatctcactaagcgcaccgcttcagtccatccgctaagcgagaaaggcacttgctaagccaaaattcactaatatgcgctaagcggtccagaattgcgctaagcgcaagagcacggacaaggccacctatttaagcctaaaatcagattttgctgtgtgaagatctgcagagaccagagcttgaagaggaagctgttctg

SEQ ID NO: 237550 - DNA, 470 bp, Glycine max
  unsure (1)..(470): unsure at all n locations
agcttctatattaattgtatgaatacattatgatggactgatctcctttaaaacagagatgtgccaaccaatagcggctntgtgacttttcagaatctgtaccagttgatcctcttctttcttctgcaaggagctgctaattattatatgtttagtctcattgtcctccaagaatacatactttagatgcactagaagggtcttcaattctactttgggcttttcttttggtctattgttttccaattcttcaaacatcacatgaccaacagactcatcttctggatcatccagctattcaatacaagctagcatttctcctccattttcactgactaggcatcctgtcacattgtcaaattgtntctccaaaggagtctataataccatggttgaggctgctaattctatatcctgcttcaacgtgttttcttcaaacatgctcactatcatctgggcgtttcattgct

SEQ ID NO: 237551 - DNA, 453 bp, Glycine max
  unsure (1)..(453): unsure at all n locations
tgtaggattatggggtacccatcacatggtggactaggttgcggncggtcgatggtgcacaacaagttttccacatccacaatgcgcgcataaacccaccatcccctgttgcccacctccaactgagctcacgtactcccacgtagcccatatcctcgtttctctcaacaccgggtccccatcaatcctcccaagcttccccaacatcaaagtaatacaacattcaaacagcacaaactattacagccaagataacagagcaaaggcagaaaactctgccaaaacaccaaccataatcacagcttttctcacttaaagaccccagtaacaattccttcgttccaattcgttaaccgttggatcgactcctaaattttactggaagtctctagtacataagcctacatnttgaccgttggatctactagcacacatccacaactcattcttgac

SEQ ID NO: 237552 - DNA, 468 bp, Glycine max
  unsure (1)..(468): unsure at all n locations
agctnttgaagaatcaagaatatgagggttatctctcaagatcgtgtcaaacttcatgaggaaatcaaaaccttaaaaactacattagccaaatttgataatggaacaaataatattaacaaactattaggatattgtagaagttcctcagaaaaatttgtaaatggaaatgatgagaaggtatatgttcatgatgaggacaacattatctattacttttgtggaaaaactagacacatgacatccagatgcagggatcgaccaaagtagggtgcaatcaataccttcatggctaacacaaaagaacccaaaaatatttgggtacctaaggaaaatgttattcttattgcaaatgtccttgataacaggaagtaaatgcctatcatggtacctggacaatggttgttcacagaacatgataagagaaaggtgtatgttccaatgcctgactcctcatcatggtgtaac

SEQ ID NO: 237553 - DNA, 439 bp, Glycine max
  unsure (1)..(439): unsure at all n locations
ngagttcctatgactaagtcacaattgggcatntacctctatctntcacaagctgcccacgcatccaaaaatggcaaccatgtatgcacaaaccaattccataagcaaaattcacaaatttatgcgcgaatgccattgaggcatttcaccgcacacttggtgggcgcacttttgggtataaacaggaagggaatgggggcaatgtggcctgcccaatcatttcagaacacgacctaggtctaaggccatcccctacaaccctccaattcagacaaacaagcgtaaatccaagcatacattgtctcatgaaattggcaaagattgaacaactaaggcactaaaacacatcaatggagggccaaagaaataagggggagtgcacttacctgtaaggagtgaattaaagtgcanaatggggagcaaaaaaccaacaatggaa

SEQ ID NO: 237554 - DNA, 468 bp, Glycine max
  unsure (1)..(468): unsure at all n locations
agctttaacctcatcatctctcatagtctttatgattgggatccaatccaanccttgtgtccggactctcagccacttatgatagtcgccgatgctcccattactgcttcccctaagctctctgtcctttcttcacaccgcatcacatgccttgtgaactccttagagtaccctcgcattggggtcactgaaaccctgttcaatgaaaggcgtgatgcttgcgtctaatggcgctcctcttatggggcagccaagctgtcttatggcgaggacatgattataatttatacaaccccttgttcccattaagataacatttggaaatccttcgcatgaagatagaatcctgattcttccttccttctagcgagggaaccaattaactgacgcccctctatgctagccaagagttggtcccaattcgtctttcttttctcgacgcacgagcggtgaccttgtagcggatag

SEQ ID NO: 237555 - DNA, 198 bp, Glycine max
agctcgaatgcctctagaatggccgcctttttatgttgcactccttaactccttgttacgttattccaactcattcatgagattttcctgggaacgtgttctataaggatgttcaagggaacacactctccttattgatttatcgccctcttctctgtagaagagaaaaaaatgtgaggatcaaggagtgaatatgca

SEQ ID NO: 237556 - DNA, 399 bp, Glycine max
ttccttaagaatgaaaaaagagtttttgagttgacatcttcaacaatacagctgtgggtattattcttttacaaacaaattaactttaaaaataaaattaaaataataatatattaagttaagataaaatgtaattgaaagaattaaaatactaaagacttgaacatatttataaattataacaactagtccagtaaataataattggtaaaataaagacttggttacagcttactaattcaatactcaaattaacttttgcttaattaatttatttaattcttctgtcatgtactagcatcagtccctgtaaatcacattaactaaagtggatctcatcaaatttgaactaactactaagaatacttgttatcatcgactataaaataaaatatagct

SEQ ID NO: 237557 - DNA, 387 bp, Glycine max
cagtggctaagcacgaagaagaatccagaggaacatgatctggtaagttcgctcagcgcactgctccagtgcatcaagcgcaccacattgtctcatttgctaagcaaaacaagagagctaagcctaaatctactgtatgcgcgctaagcgatccaaatatgtattaagctaatgatcgcaagcaaggccacctattaaagcctgaaatcatatttgcaaagggagcttggcactttttgtgagaagctctgcatgcacaagagccctagagagagaaaggtccaagttccatagagttctgatagagtttgctatgtgaatatctagacagacgcgagttcaaagcgtgatgcattctgagagcttgagatgagcttgtgactgatc

SEQ ID NO: 237558 - DNA, 426 bp, Glycine max
  unsure (1)..(426): unsure at all n locations
tgtagaattcaccccaattccagtgtgctatgctgacttgttcncatatttactgcgaaattcaatggtagccataaccctacccaacgttcatcaacctccattattcctataatacaactcgaacgcaacgtgtgcttgtcactgataagccccggggcgttccattgagcatggctgggctttgatacgtaaggtgcaaggtctaattgatgcgggctggctgaaatttgaagagaattgcgcgtaaatcctgacattgacaagagatgccacacatggggcaattttgaaagctgtagttatgtgtccctaatgactcatcaaggtttccaagtttatgctcatattgtaaaccacagctacaatggttaatganatggatatagctgatatctttgtccctcatcctctcaccaacgcatg

SEQ ID NO: 237559 - DNA, 429 bp, Glycine max
  unsure (1)..(429): unsure at all n locations
ggaccttaaaactcagctggtaaactattgttctatgagttttacaattccaaagagtatagctctagtagtaagagtatttgcatattactctggagatggaacgcgacacactaacatgcttttatttaggacctttttgctcataaaaaagtgcccaatttcatatgctttgtcctgcagtgccaaacaagattgtgtgacagattgtactaacgttgtaatagtagatctttggagtctgaacaaactcagaagagattgaatccataggatttcagatgcagtactcagcctcaattctggactatgccgctaaatnttgtctcttgagccactactacattaaattcgggttaagatatatacaagcatctaaagaggaccttttatcaatcatctataaatgacggctagcttgcatcacat

SEQ ID NO: 237560 - DNA, 465 bp, Glycine max
  unsure (1)..(465): unsure at all n locations
agctngagatgaggaagagtngaatggtgttctttctgcttttattggagaccacagagtggtacctggagatatgtcgcgggggtcaggagaccttggggacgtcaggtggggtgctattgcccaaaaccaagcttgaccaatcccgacccaacccgggcatagtcggtcagtgagaacctgtgatgtacctaaacaggcgagctcctggcagtcaacagataaaaggaaaataagaccacaaagcaaggaggcttgtggtggctggccagctgtgaattttgtgtaatatgtggattgtggcctctggtaatcgattaccaagggtgggtaatcgattacaaggcttaaaattgaggacaggaggctaagatggtctctggtaatcgattaccaaggggtgtaatcgattaccaggcttgaaaacgaagtcaggaaacttagggagcctctgggtaatcgata

SEQ ID NO: 237561 - DNA, 425 bp, Glycine max
  unsure (1)..(425): unsure at all n locations
tcggaattccatttcgagcaactcgatatattacgggactcaatcttacatctaagggacaagttattgtcgtttgaatctgctcanagcttcagaattccatttcgagaaactcgatatattacaggactaaatcagacatccgagtaaaaaattattgtcgtttgaatttgctcagagcttcggaattccatttcgagcaactcgatatattacggaactcaatcagacatccgagtaaaaagttattgtcgcttgaatatgctcagagcttccgtattcgatttcgagaaactcgatatattacaggactaaatcagaaatccgagttaaaaattattgtcgtttgaatatgctcagagcttcggaattccatttcgagagactcgatatattacaggactcaatcagacatcccagtaaaa

SEQ ID NO: 237562 - DNA, 345 bp, Glycine max
caagctgtagaagagatgctgaatttttttctgtcacgggctgccgactacagcgatggagtatttaaaactctcgggttctgaagaaccgtctcctgaacttacaatcttaaaggatcgaattgcactctctacagaacctggtaaaagatttcttggactcaaaggggtgctgattattatcaagcgacactttgcatgccaatttagcatgatgaatacttatttcttctaatagaacagtaatcttgtgttatgaataaacttactatagcacagctctatcttatggttaaagcgttagtgcatacttctatgctgctatgttttaagaagacttaacca

SEQ ID NO: 237563 - DNA, 296 bp, Glycine max
tgatcctgggaagcgaaactgcaatctacatggagtccttggatttatgggatgctgtgaattagattatgaaatattatcgccgcctcaaaaatccaccattgtcccaattatgaatcacatgggaagaaagattaaataagccaaggcgatgccatgtttgtcactggtgtttacaaatgaatcttctaaatcatgactttaactcccaaagcatttgggttatctgatgagaataccttcaatgataaaaccaacatgcagtgctaattaacgaggatttgacctcaaggatg

SEQ ID NO: 237564 - DNA, 346 bp, Glycine max
  unsure (1)..(346): unsure at all n locations
agcctcgagggagacaagagagttatcattttatggtggacacngccaccgcctgcatacatcgatcttgatgatgtcaaaacaacaatcaaacaaggcccatctgcttcaacactaataccagatcgtttcaacaaacaaagccctgatccaagatttctttaagaccaagccttagctccaaacgataggtgttcaagtcatcctaaggcacatgcaatccgacaccaacccacgtgcaaatcatgcacgctttgatgatgtcgagaagaaatcacatgcttgtcatcatcaaaaacggggagaacgcgaccgcatgtctacatgacctcgatgatgccaaaag

SEQ ID NO: 237565 - DNA, 461 bp, Glycine max
  unsure (1)..(461): unsure at all n locations
agctttagagttcaacaagaactctttgtctttaagtgtctatccaaaaggttcgtggaatgtcattcagttgatcatccagtggtatgtagttgccatgttctatgatgtcccatagatctatatgaatattgtaaaaatgagctatcatacattccttctagtagtcatgtttgacgcctttgaatagtgggggcttgtttgtggaatatccctcttccatatctttttgttttctctgtatttgtgaaaatactcaacctaagaaacctggctctaatgccaaccgaaatacaacaaatcacactagaaggaggggggttgaatagtaggttagtcaaaatataaaaccttntccacctggaagatgttataataaacaaggttataaagccctcatccagtgacaaaagatggattatcgtctcgtgagatgaaaacttgcttcaatanaacctatg

SEQ ID NO: 237566 - DNA, 97 bp, Glycine max
tttttaatggccctccaggcattcaaaaacctaccctaggacttgcttgaccagtttaaaaaaatatgttaagggggaatccaaaaggaaacccttt

SEQ ID NO: 237567 - DNA, 453 bp, Glycine max
  unsure (1)..(453): unsure at all n locations
agcttcattctcattgtttttttattatttatagaactgtagaagggtgtgtttgaataattagaacaaacaaaaaaaaaaactaacaaattatgtgttgttggttcttccccttgtgtccggtatataaggtctgtgacactacgtacatgcacatgcaatgagctcagcctcgtgctcaatcacaggccaacctcagatggattcgactgcatgatagcggtgcatttaggatggatccaaaaacataccataaagtcttttaaaaaaaaaaaaaaaactgtaattggtttgtccggaatgaatgaaaccttgaaccggaatngatgttatggagggttttgttctgtttttactccttgaaactggattgcacaagcaatcatgggcacccgcaaaggtactctgatgctcaatcaacttggtaaattgtagtatataaatttgggtcga

SEQ ID NO: 237568 - DNA, 411 bp, Glycine max
  unsure (1)..(411): unsure at all n locations
tgaagaanagataaacaatgaggggaggacagttatggtgcttatgattntacttttcactgctctatgatacataacccactgttgagcatgtactcatcaatctcagaggcgtggagcagccaaccccaaaaacactatagcagttagtagatagcaagatagccgttatactgaaaattatggatacaagataaataatttatactgcatagtgtatacacatgaatgctaaagaaaacccaaaaaaaagatattcataattgataatcaaaagttacagtttanaagtctacacacacaatcaccacttttgcagcttaattcctacttcggtaacaagatgaaaagggccaaatcacaattattacaagatattcttaagaatgattctattaatgcaacatacac

SEQ ID NO: 237569 - DNA, 459 bp, Glycine max
  unsure (1)..(459): unsure at all n locations
agctngcacttctcaaagaagtcaacaatgttattatttctcggtcaccatggtaagggtcaatgtggaagccagacttgccgtgcacaatgatctcagcaggaccaccattgcatgtggcgaatgttggcaagccgcaagtcatggcctcaaccactgtcaaaccaaaagcctcgtatacagcaggctgcacgaaagcacccctggtgtcgcagatcacgcggtagagctctccattcctcacacggttcatctgcgatgaaatccatctgaattggccgttcaacttgtaggtctcgatcaggccgtacatcttcttcatctcggccttttcttccaagtcctttgactccttcctcctgtctccagcaacaaccacaaggttcaccagctccctcagcttcgcgttcttaccgtaccactccacaagtcctgtgatgttcttcactcgatccaacc

SEQ ID NO: 237570 - DNA, 496 bp, Glycine max
  unsure (1)..(496): unsure at all n locations
ggacctatgaaactcagcttctgaatattacaagctggttntcagccaatgtgttattacanaagaagcttacaaatatctttgaaggagtttgtataaatttgatgatatgatatgttgtaacattcagcccagtaaataaaatttccaataatttatttcaactttctcagaagaaaaataccgtagccatccatgcaatcagaaaataaacacaggtaatagtttaacaggtgcaatgcttagaacataaatttaaagaaaaaaatctgggaagtgagaacaataactcaaaaccgagtttttaataagtacatcaatccagatgcactattttagactattttattttgcagaagtcctggaaaccgatcactaattatcaaataactctctaccaattcctgggtccaagcccatctctcccagaattggtatgccagcatccttagccttattatttagcattgacatggagctatcaacatagctagca

SEQ ID NO: 237571 - DNA, 436 bp, Glycine max
  unsure (1)..(436): unsure at all n locations
agcttataatatatcgatacgctcganatttacttcttatgctctcgagaaattcaaatggtcataacttttcacacggatgttcgattcgggcgtataagatgtcgagaggctcgaaattgaacaacggaagctcttgagaaattcaaatggtcataacttttcacacgaatgtccgattcaggcttataatatatcgagatgctcgaaattgaacaatggaagctcttgagaaattcaaaatctcgtaacttttcacacggatgtccgattcaagcttataatatatcgatacgctcgaaattaaacatcggaaactctcgggaaattcaaatagtcataacttttcacacggatgtccgattcgggcgcataatatgtcgaaaggctcgaaattgaacaacgcaagctcttgagaaatagactggctaacttt

SEQ ID NO: 237572 - DNA, 378 bp, Glycine max
agagctccgtgagactactgaacagcctctctagatattatgcgtcccaatcagacatacgagcgataagttatggccatattaatcgctggagagtttccgatgtttaattttgagcggctcgatatattatacatcctgaataggacatccgagcgaaaagatatgaccataggaatctctcgagagcttccggcgttcaattacgagcgtctctatatatgatgctccctaatagaacatccgagcgaaaagatatgaccatagcaatctctgaagagcttccggtgtttaattatgagcgtctcgatatatgatcagcccgaatcggacatccgagcgaaaagatatgaccatatgaatctctcgagagcttcc

SEQ ID NO: 237573 - DNA, 473 bp, Glycine max
  unsure (1)..(473): unsure at all n locations
agctngtggactataccttcgaccgaacatgtctgtgtttctgtctaggcccggattcaaggtgggctgcagcaccggctccgcttccctaactgtactggaggcggttgcggtggctttatcctctatggttttctgaagttttaacatgacctccgagatggaagccatttgatcttttaaggccgatagatcggccttcatctgttcctgcacgccctcttcattatccatttttctggatcgagtgttatagaggtgcgttggtgttttcttagttatgatgaaattcctaaagaaataaacaacggtgagtatgctaccaaaacatgagtatgcaaatggatgatcggagcacttggatccaccccaagatttttagataacgtaatgagtccagaacttctctttttataaaaagaacaaagctttcatctagccaagaatatacanaggtgttacaaaagaaccta

SEQ ID NO: 237574 - DNA, 382 bp, Glycine max
ttcataagtaaaatcaggtgcagccatctccttaagagttctctcatgaggtggaggttgagccatgttctcagtatgaaaggtagtagttgaatgctcaaaatcagaatattcagaatcaccagcaacaaaatacttaaaatgctcaaaatgctcacaatgctcaaaatgcacagaatgatcaggatgcacactatgcctaactaatctatgaaaggttctatctatttcaggatcaaagggttgtaaatcacctagattgcccctagtcttgcactatatgcagtaaataatgtgttctcaaacaagccaccagggaaggttaaaactacaactatagtcaatcgatatccaaatgagctgaaattttgtgaggaacacc

SEQ ID NO: 237575 - DNA, 471 bp, Glycine max
  unsure (1)..(471): unsure at all n locations
agctngtaatgtctcgatagtagttatcattatcgtcatatagtgntactatcatgatgtggttgggttgagtggtcagtgatgtgtggctgctgaccactataggaaacacattgcaccacgtttctttgttgtgggaatggctatttcctgttagcactttgacccctcccttatctggccaggctctgataggctacaagctcgccctaatttggcctgaacaatccctttagctggcctagcccattcattttcttccaaacctcaataattcacagattttttcccgacctgagggcaagtgcaccccgagcttatactttggatttctatctttttccccccaatctanaacacttggacaacttattataagacattctgtcccaagtcaacttctcataagacattgctatcctcgttttttggagggagggggttgatagacttcattgtctctttacatct

SEQ ID NO: 237576 - DNA, 426 bp, Glycine max
  unsure (1)..(426): unsure at all n locations
tctntctccttcttcgtgctctgtttctcccttatttctataggtgctatacctcgaactctagctcttgatactagactcctaacaccaagtattcttctcttgttttgcagtaatatgggttgtttagagttgtattataccatgggcatcactctnttgtgtaaaaatggaaaagtataatgcatgttctattaatttggactgagagcatttatgttttttcaaaaattaatgaaagcatgttttgagaaaagttgaaccattctcatantttggaccatcgtgatgctatgaaaattnttaaaatttattctaagcacttctaactaatttgcttaaatttgctctgtttttttattttttaaaaaaacaaatttcgagaccttatcttggaaaactgggttagtgcgtttcatacacata

SEQ ID NO: 237577 - DNA, 478 bp, Glycine max
  unsure (1)..(478): unsure at all n locations
cgctgcaagcttctattgacagagactcatgacacatttttcttgtgcttcctccttagagagttattgttgcaatggcatgtcggcatgacatccctacatcaaagttgtaaaatcagcacacatgtaggttaggaatgaaaaaaaaaactataaagaacacaaccttgttagttgccatactccacaagtgcatgtccattcagctaaattgacctcaaccttattcccccacatgtggacctcatatctcaagcccatgttatcaccacaccaaatgggagtccattgattaacaaaatgaattttcttttctagtcttttatactgcactggacataatggtccaggctttccagaaaagttaaccttgcgagcaaccatggttatcatgatataacttctaatttcttcacactttgtgagagtaggctngcatctatactgcagaattctggaattgaatacctcacagtag

SEQ ID NO: 237578 - DNA, 398 bp, Glycine max
  unsure (1)..(398): unsure at all n locations
aagcttcctctgttgctttacacattcttctaaatgtcttatacactctctcattctttattattctctaaaacttcaaggttttatgggcgaagatcttttttagatactttttaagaggaatttatcagagagaacaaataacaaatgttattcaacctccaatgaattaaacacactgaagaataaacactaagtgaagaaaccaaaattctaatagaagaataaacaaaagcacctacagtgcagagttggttcctaacacatttgtaaaaatgcccacagtacaaattaacgaaatcaaacaatgagtacncacaattcaagacctatgaaatctaacaactaaataagatataaatcagaaattaacgaacaaaatgaacacaccgtggcat

SEQ ID NO: 237579 - DNA, 428 bp, Glycine max
  unsure (1)..(428): unsure at all n locations
gacctataatactcagcttatgcagtaatttgcggaggcatcgtgatacgatctnttccgggaataanggcgcagaatctcttgaactaggaagatgttgaccatcatctttctgtctcttagtgaaggcactntgagattccccaataatagtctcaagcactggggctatgcggttcacaaaatttttagacacattcttgtctaacataatacagcacgatatgggtctaaaatggttaacctgcgaggcctgatcatgcttacgaatcaacgcaataatagcacggttgatctgctttacaatatttccagctgaaataattcattataccgcgcacagatatcatcaccaatgatattccaagcctcttgaataataaccattgaaccatctggccacgagattattgtatctatccaaaata

SEQ ID NO: 237580 - DNA, 461 bp, Glycine max
  unsure (1)..(461): unsure at all n locations
agctnttaggagtagaaacaaggtatcnatttcttttatttcaaaaaggaagtcatatctagtcaaggtctaagagaccttacaagtttcctaacgatttctaattatgtgggccattaagtctatcatatgctgacaatagccgagaagcccgtgaatctcttcaggggcggagtaggtgtctgccatcgctttggccttgactaacaatcggggaagttcttgactcccgttcaaggtaagagcaaaccgatccatccacatggttgcctcttggtgtaaagagtcgatcacccttcctctagcctctttttccgcgtatacttgggcatattcgtccgccatcctatgctcgtgggccgcggctagatctaactcttcttggtacttggcgatgatagctagcatggttggctccgtctcgcataaacgctgagacaaacttcttttggaccttgaac

SEQ ID NO: 237581 - DNA, 438 bp, Glycine max
  unsure (1)..(438): unsure at all n locations
taacacactnntattttctcaaacttgagttttggaatatcaattactaagncctttttaactagatgattaagatgatgcatgtttatatgtgcagccctacgatgccataaccaagtatcatcaatcttacttactaaacaactaagttcacaaaatcaagcatgttcaatattcaacatgtagatattgcttattcttttacctatgtgcacaacctcactagagatagcttcacaaatgaaacgacaattcttgttgaattcaattttgaagcctntgtcacatagttgactaatgctcaagagattntgctgtagcctattaacatgtaggacatnttttatttgtatcctgtgttgatttcaacatctccttttccatattcttccttattgtgtctccacagtggacatcttcttttttgatcaaagcagt

SEQ ID NO: 237582 - DNA, 292 bp, Glycine max
  unsure (1)..(292): unsure at all n locations
caagctaacagtggagaggagaatttgcgattatattcccncacccagaatatgaacactataatatatcacattaccgaattctattgggcagatacgagctaaataatcgcttaaaggatgggntgctctacacgtgtatactctaccttctttttcgctctggctcatttatagtctgcacagcatagagtgtttccggattttcggccgtatatacgtgcttaaatgatatcctccccaagagactaattggattcttgcgttttccaaggaaagggccgcatcgaga

SEQ ID NO: 237583 - DNA, 293 bp, Glycine max
aatctatatgagccatggagaaaacgagaaccccaactgcaatatcttaaagtgtgggggtgtctagtacagggtaatatctctattaataagacaaggaaaatttaacaacaaaacgctcattgcattttgtccgatattagttacataaaactacttatagatccgtaattattaattcacaagtatttgaaactcctaatggcactatattggaccctatacatgtgactatctttgaaaatattatgtgttgaaaaatacaatagctaaatcctagtatagttcgaaac

SEQ ID NO: 237584 - DNA, 460 bp, Glycine max
  unsure (1)..(460): unsure at all n locations
agcttagctggcaggttttagaaaactgaatttattagtatttaattgtagactttaattctaattgctgtttttaaaagctctatatttccttagtcaaaaccctttctatagagcataagccataaaaaatgacttggtaatgagtaaataattgggataatctaagataaatttttgcattttaaagtttaaactattttgcttacgcaggtggagggaagtgttgtgcatatcatgaaagctttagcgagccattcatcaacagcacagagtttaatagatgatgattcacttcagttgctttttcaaatggttgccaagggatctttgattgttttctctcgttataaggaaagacttgttccattacacaacatacaactntgcaaacatgctatgcaggtaaactatggtacatttgtctgcagtgaaagtagtattgaaaatgatgtaaata

SEQ ID NO: 237585 - DNA, 473 bp, Glycine max
  unsure (1)..(473): unsure at all n locations
ntacatatgaatctactatataaaaatgtattcttgaatgggatacggtcacacctttaatgaaaaaagtgagattttcatgcacaaaataactttttgtgtatcacaaagttattaattagatggacaaaagttagatgaatgcaagtcgcatgatccatgtgtatgaggaaggcattgaacaattattggaatttccctccgaaagaagtcgatcagatgaggatgttatatttttatccttgtataaactggttgaatcgaagacaacaagtactagatgacatacgagaacatcttttgtgtgatgaaattaagaagaattatacgacatggatatgacatggtgaattgatagacatgcagaggggatcctgaattggttgatgtagaaatgggagatngattagaggatatgattcatgatctttggacagagtctcnttcacaagcacatgcccctatgtatgata

SEQ ID NO: 237586 - DNA, 431 bp, Glycine max
  unsure (1)..(431): unsure at all n locations
agctagctctaaatntacattgatgtnttatttattggaggaggttgtatgccatttttgttttaagggtagcatttcttggtaaaactaactttccaaatgtttgccttcgcaggaatggacccgaggaagcttgcctcaaagaggtccaggaaggacaaggcggccgaaggaactagttccactccggagtacgacagttaccgctttaggagcgctgtacaccagcagcgcttcgaggccatcaagggatggtcgtttctccgggagcgacgcgtccagctcagggacgacgagtatactgatttccaggaggaaatagggcgccggcggtgggcatcactggttactcccatggccaagttcgacccagaaatagtccttgagttttatgccaatgctttgccaacagaggagggcgtgcgtgacat

SEQ ID NO: 237587 - DNA, 429 bp, Glycine max
tccacaacatccaagcaaaacaacattcaagcagcacattctatcacagccaagcaaaacagagcaaaggcagaaaactctgctcaaacaccaaccaaaatcacagcttttctcacttaaagaccccagtaacaattccttcgatccaattcgttaaccgttggatcaactccaaaattttactggaagtctatagtgcataagcctacattgtgaccgttgggatctgctagcaaacatccagaactcattctgcactactctttccacaaccagcaaaaacatagcatttttctacacttgtgcaaaatcatgctgcacaatttcacagcaaaaatctgcacaaagtgcagatttcgaaattcacactttctctcatccaatcttgccaaatcaattcctacaagtcccacatcatgtatcaatcat

SEQ ID NO: 237588 - DNA, 449 bp, Glycine max
  unsure (1)..(449): unsure at all n locations
agctagcctgtccgatgcagcantaatgttggcccgagttatgttggggaacggttacgaacccggaatgggtttaggcaaagacaacggcggcataactagcctgataaatgccaaaggaaatcgtgggaagtatgggttaggctataagcccactcaggcagatataaagagaagcatcgcgggaaggaagagcggtagtcaaagctcgcggttgagacaagaaggtgaaggaagcccaccctgccacataagcaggagctttataagcgcgggtctggtggacgaaggtcaagtggtcgcgatatacgaagatggtgttccgagtacattggatttggtacgaccatgccctcctgatttccagctgggaaattggcgagtggaagaactccccggcatttacgcgacgagcataatgtaaaaccttacgggtttaaaagctctat

SEQ ID NO: 237589 - DNA, 384 bp, Glycine max
  unsure (1)..(384): unsure at all n locations
nttaagttntaaagaatcagggaatcactnttcagcagtcgtgattagngatgacacgatctaataactntgtaaaagatcataaatttaatattaggttaaatatgatattaggttgaatatggcattatttagttttaatacttttaacaaaaatattagtttttgctctcgtggataagtttttaaattactgtttatcaccactttgcaatgccatgatcgatatgcataatgcatcatctaaccatatcacatcatatattatgaagatcattntaaaaaattttaacattgtaaaaattaaaaataacaaaaaatataaattactaaaggtaaataaattcatatttaaaagaataaaaatatatttaattctttaat

SEQ ID NO: 237590 - DNA, 377 bp, Glycine max
tgcggcagcaagcttgccttaaggctagaccacagacttttttcatttcttaacctcatcgcccatcacagtctttagattccggagccactccaatccttgagtccggactctcagccacttatgatagccgacgatgatcccattactgcttcccccaagctctctgtcctctcttcacaccgcatcacatgccttgcgaactccttggagtaccattgcattgaggtcactgaaacccccgggagaggacaggattataatgtatacacccccttgtccccattaagggaacattcggaaatccctccatgaagatagaacctgatcttccttcctgcagcgagggaccaataacagacgcccgttatgctacc

SEQ ID NO: 237591 - DNA, 424 bp, Glycine max
ttaacaattaagtataaagcccttgattgcctatggattttatatatgtgcttaagatatctaaggaaatgcacccgaacctctcctagcaatctcataatgcatctcaaagttgtcactaattgttgtatgaagaacctatcctctattcattattatcgttttcctttccaccctggtatggatatgaatctttctaactatttttttttttgctaaaaacatggcattagttatgttgtttgtttccttacataaataagttagtgtaatgtacaaaatcactacgtgttggttgctaatttctttgcatagttagctcggctgttgtaatttgatatggccctatataaactctttacatataaaagggagggaagtaaccaagagcttattgttttctattgttgtaaattggaatcat

SEQ ID NO: 237592 - DNA, 441 bp, Glycine max
  unsure (1)..(441): unsure at all n locations
agctagtgaatntcaataatcaagtagcctatcatatatcttcaccaaatcttgttgagctccaaggataactttccatatgtaacaagcttgatgcatgagatatatgaactagcttagcttcagggaggggagtcttagggagtgtaaatagccagatcatgttaattttctttgacttcattcagatattcttcacatggaagtatctcaaaggaaaacctgngcatgggattctttacatgaatattgttcattatagagtttagggttttgctgatgcagattacgcaaggtttctattgataggagacttatgactgattattctgcctttgttggaggtaacatggtgtcttggaaaagttagagctctagttggaaacatggttacacatatttgtaacatcctggtatgatggacatctgtcctatatatct

SEQ ID NO: 237593 - DNA, 398 bp, Glycine max
  unsure (1)..(398): unsure at all n locations
nggatgttttataacaaataanaaaagcaatataagtagtctacatcaaatgagttcatgatggtcattgatgcctggatggatttgaaggagtacgaactaagaactgtctacagggtcaaatgtgtccccaaaccttcctttctttttccttcttttgaaagttatcaatcacataaaggtgattaccggatagcccctggatgagttgagaggggtttcccttctatatgccattggtggtaaactgttaattggatcatacatacattatattgtagatgttgggaagtcccacatcgctgtctcatatatctgttggacaacttcacttagtgccaattggtntaaaatgaaatctaatatggtatcatagcctatagcacttcttcatgaat

SEQ ID NO: 237594 - DNA, 456 bp, Glycine max
  unsure (1)..(456): unsure at all n locations
agctntagccttaagttgttcactatgttgttcctcctatctctaacactttttcattgcatatttagctcttgcagcaaaagttatagtagtgccaccatcctgattgatggctttaattggttaggctttgaagtggcagctgcatcaagttaaatgcttgtttattataaggttttctccgcctataaattgtgccccaaactaccttatagattctaaatcaattctagtacctttttttgttaacatataataaattttgtgtgcttagataattattactactttattagttcaatttcagtagttttcttgattttgagcctcattagtttcagtgtacactgccatatgtttgagagggtactgccatccaattaatgggttctaaaactaatgcatcgagctatagaggacgaaggccactgtcaatattctctgggcttaatctac

SEQ ID NO: 237595 - DNA, 453 bp, Glycine max
  unsure (1)..(453): unsure at all n locations
actaagcttgtaaagaacttacaanaaatcaagaacaagcttgctctcacatcgttcgcgtgtatgatatccactcgacaaggtttaaagtagaggagaccttcaatcctataacgcaacgaggcgaacaaaagtgggcagttaacttgaatgaccattattgtcaatgcggaaagtattctgcgcttcactatccatgttcacacattattgcagcttatggttacgtgagcatgaactactaccattatatagatgttattcacacaaatgaacacatcgtagaagcttactccgcacaatggtggcctcttgggaatgaagcgacaattccttcttctgatgacgcatggacacttatccatgacccaactacaattcgtgcgaaaggtcgagcaacatcaacaacgataaggaatgagatgggagtggctcgaccatctgagcaccgac

SEQ ID NO: 237596 - DNA, 370 bp, Glycine max
  unsure (1)..(370): unsure at all n locations
aactcncacatatgtgggtagtgacaaagaaataatcattttcaatgaagggttcctttgcggcttaatgatgttctgagttattcgaataggactctttggaagagcagagcacacagggcagctttgtgccttctggacgtgacgatcatttgaacatggctattggaagactcgagcatccaagtcgggtacctgtggctgggacaggagttacagttagccagtactntggtccagcatcatgtcggtctacgacttcgtcaaactcgataactccagaacagttggctgatatcattagtaacttaaacgaagaatggcgaacagaggttgaataaaaaaacataaacagagaggaggggtggat

SEQ ID NO: 237597 - DNA, 443 bp, Glycine max
  unsure (1)..(443): unsure at all n locations
ggggaccgntactcagataatgtgcttgccatgaacattctgtcagaaagaaatgtcaagttgtatatcaatgagtttgatgattttagaagagaattgattataagaaactggcataaatagctaaccaacttgactgagggaagcattgatgtggcaattgtgaaggaattttatgcaaatctatatgtccctaaggacaaagaaccaaagcaagtaagggttcgagggcacctgataaaattttatgctgattccctcaacacctttttggagactctagtggtcgtggagcaaagggggatcttgccctcttactccaaggttgctagattaaggcttgatcctcaagagcttgcagcccggttgtgtctccctgggagaggatttgtacttaatgtcgagggtctgtcatggaagctcttgaggaaagatcttactac

SEQ ID NO: 237598 - DNA, 389 bp, Glycine max
tgtccttcacggaaaacatgatagcactgttatgttcttcgacattgcctataatcgaaagcaagatgaccaatataaaagcctcagacatattcaatgactcaaatgtcatatttccttttctatggaagactttcaaatctcccattaatcacattttgttatatatcatgggtcaatggggacaggacatgtattccttttgtcctcttctctcatcacccaaaagatattttaaattatgattgtaaaacaaatagaatagcagtcatttagtaatatgctataatgtttttcggggtgacacctttgcgccattattgaatactatgattacgagagtgtatagcccttaaacactcaatttttgttcttgccatatcttaata

SEQ ID NO: 237599 - DNA, 449 bp, Glycine max
  unsure (1)..(449): unsure at all n locations
agcttcttcttctccatcgcgcttgagactatgacatgttgccaccttacctaggtacgtttcgtgactctttcttctctttaacatgttctattgaatacctaggtctttttggggaactcgtgctcactgcaaggacctttgtttgtttctgctgcaaggatttggtttgtggaactcgtgctcactgcaaggtctgtctggggtgctcactcatgctcatagggtctcattttgattgaggtaagtcgtgctcactttgcagtcctttgaatgcttaatggctagctagctaggtgtctgttgtaatgcgtatagcaccatggcgcccacttctcactttgagtgtgctgttccaatacttgtgaccactatagttntggaggagtatccaaaagtagaatgggatggaaagtaagtgattgatgtgtaccatagtgatgttcatt

SEQ ID NO: 237600 - DNA, 351 bp, Glycine max
  unsure (1)..(351): unsure at all n locations
tggagctgctgttttcgtagttcccgcgatctggttntttgaaaaaagaggggggagaggtttgggtgaagaaaaacccaccctcccctctttttaacctatctcgtgcagggggtgctcgcccaagcgagctaaccctgtgcatttttattttttttttgcaaaattatgtctaacccttagggttggcgcttttttattttaattactaggattaaaaataaactaggcatatttaactacgactttagaaaaataaacgaatagataacaagcaaaaatttaaagtgtacaagggctgcctcctagtaatgcttctttaatgttttgagccggatgcgggatgatgat

SEQ ID NO: 237601 - DNA, 457 bp, Glycine max
  unsure (1)..(457): unsure at all n locations
agcttgttgagtatatgcttgaaggagatgtctttgttgaaagctaaagttattgatttttggaaagatggtgtatgggatcttcctaaatattgcggattccattagaaacatcattattctagtcccttaattatggggaagatcacattatttggaggccttcttaaatgggtactctctctttgaaagattcttatctttttttggtttctagatcaaatgaggttagttgggctaaactaattttcaataattttatccctcctttagaattgttttcctctagcatgctctttataccaagctcccaacagacgaaaacttgaagaaaagatgtataacaattgttttcaatgtgttctaattgttgcaatagcgacgagtcaacataacacttgtttcttaattntaagttttgaaatacaataaatcacactagaaggggggttgaata

SEQ ID NO: 237602 - DNA, 406 bp, Glycine max
  unsure (1)..(406): unsure at all n locations
tcatgatgaatcaaaaatgattcataggtgttttgatgataacaatgatgacaaaggtgatgaacaaaaagctcaaaagatcaaagaataactcaagtgaatcaaagaacatctcaagtgaatcaagaacaagtcaagagttcaagaatcaagaagaattcaagactcaagaagaaagcctacaatcaagaatcaagattcatgattcaagatctcaagaatcaagatcaagattcaagactcaagattcaagaatgaagaaaagactcaatcaagatatgtattaaaaagttttttcaaaacattgaatagcaaatgagtttttgacaaaacctttaccaaagagnttttactctcttggtaatcgataccatattgttgtaatcgattactagtagcanaatga

SEQ ID NO: 237603 - DNA, 438 bp, Glycine max
agcttatcatgccatcttcattttggcctctacccattcatacccatcttttagtatgactcgagccaccaccatagaggcatcacacaaacttagttgtattagaggagactccacataagcattgttcacaatttccaatccctgaaatgacatttctaatgactcctccattacttcaacataaggagtagacaacggacgactaactagtatgtcctcctcgccttatactataacgagctgacctcccaccatggatttcaatttttgatgcaaacatgatggcaccaccctaggagaatggatccagggtcgacctaactaacaattgtaagcaggagttatatccatgactctgaaggtgatttgaaacgtgcacgggccaatctaaatcgggagatcaatttctcctttcacatcatgttgatggtcatc

SEQ ID NO: 237604 - DNA, 410 bp, Glycine max
  unsure (1)..(410): unsure at all n locations
ntgagggtgcgcagcccaccatcttttcatagtatagtactcgataatgtgtctaccatcacgattatcatctccctttccattattgggggtaccacctgtgccgccagatccctccaccttttaggcgtgttctttgaatgatccgtccctctttttgcacatgttctgtagttgcatcctatccggaaccatatcagaattgtactgacactgcctaatgaaggcaaccattangtccttccaagaatggactcaagaacgttcctaagttagtataccaggcgacagttgtcctagtaagactttctcangaaaaatgtattagcagtttctcatcttttgcgtatgcccccatcttccgacagtacatctttagatggttctttgagcgagtagtccccttgtac

SEQ ID NO: 237605 - DNA, 443 bp, Glycine max
  unsure (1)..(443): unsure at all n locations
agctagtaatgtattacttgacatggacatgattgctangntgngggantttgggcttgcaaggttgcatcaccaggaaaatgtggctgacacaagagtgatagggaccctgtggtacatggctccggaactagtccgaatcgggcgaccgtcaactgcgtgtgatgtgtatagttttggagtattggttttagaagtggtgtgtgggagaagacccatcatagcagatcagccaccactgattgattggttgttttcccatatggagaatggggaattgagttgtgctattgatgaacgtttgaagggtcaaagtggatacaatgctgaagaagctgagaggctgcttcatttgtgtttgttatgtgtgagtacagaccctgttgttaggccaacaatgaggcaagtggtgaaaacattggagggaatataatgcactgagt

SEQ ID NO: 237606 - DNA, 434 bp, Glycine max
  unsure (1)..(434): unsure at all n locations
tatattatagttaaaaatcacatataaattgaactaacacattagtaagagataaaaatatatatatgttttaacatgctttgtaatcgaacaaattttaaatagttcactaattaacctataacacatgtccatatccagtcataagttaacacagtgcctaactgcgtggcaacttaacaataacgaaagcacaagttgtgtaatggaagtggaggtaaaaaaatgggcaatgcaagcaagttgaagctaattggtttaccatgattgttcaacctttttatttttcatgcatggtgaaatggattgcgcctacataataataggccttccacagaagtcactagataaattattagcacaaaaaaccaagtgtaccgcgtaagaaactaaaataatntatattttcaaagcattaacctttttatttgact

SEQ ID NO: 237607 - DNA, 493 bp, Glycine max
tctcagtcacctgcggcatgcaagctttaaaagtagaccctcaacaatttttattgttataattttctcaaaacaagagaaacccaactgataaaaagtcaaaaaatgggcaactaacaacctcgcagagggtttctcctaaatctattggtatgaaaacttgttcctcacttatccttttggtagtcttaaccactatgttttatgtgcctcaatcttagaacaaattattgctttccttcttgtagttctattcctcattttttcattctatcggggcgataaatgaaagttgttttagttaaaatgaaaagcttctcctttcactactatttttagaaatggattcaaaatatttaatggaattgaaggaggattcacttgtaccttttgatgcggtaacaaatgtgtaatattccaaccaatcaacgatttgtatgcatgtgcacctagtatcaacaattagcttttctaacaattgaaactcttacat

SEQ ID NO: 237608 - DNA, 470 bp, Glycine max
  unsure (1)..(470): unsure at all n locations
actaagcttacaactttgtttgagaatgtaaatatatgcagtgttttagtgtcctatatatgtcatatccaagcgtcctatattttggacattaattggttttgtatccatgtccgtgtcatgtctgatatgtgagtcggtgcttcataggtggaatgtcattgtatgacataacggcatggaattaggctatttcaaattgtaggggttntgtaatttgactttaggtagctgacctatgtagattagagttgctgcagtgatccaacagtcaagaactgagacagctcccaatgtcactgtaacctgcagattaatttcttgtcagagaaaaccacatggcactgttgacaacatgagtaagcaagcttaggaggatgctgaanagcaccaagagaanattcttcanatcttgtccggaagctacgatccccaatgttatgagtagatggtaagtatacgtgttactg

SEQ ID NO: 237609 - DNA, 434 bp, Glycine max
  unsure (1)..(434): unsure at all n locations
agctntctcccaagtgctaaaagacatgtttatgtttgtattaactcactntaacctccattaaccacagaattcagacttagccttccaactctgaaagtctcactctttttccactcataacatcacattctcactctctaaccctaggttagttctacccttcgtctctaacagatttccatcagcaatttcagcatataaacatcacaaacatcatcacaaaaaccctaaaacagaatgggtatgtgtaactcatccaaacatggcaatttcaacaagctttcaacaaatgtcttcacaaataatcgtcacacagcagaaccctagcaagattacccatcatatctccccaaaaccccatacccacgaaatttaagagagaaagaagtccgcccaaacctcgaatttcgaagtcccactcgtagccacgc

SEQ ID NO: 237610 - DNA, 473 bp, Glycine max
  unsure (1)..(473): unsure at all n locations
actaagcttgccgaatctgacccagattatgttttgccgactttgtgcaatttttntaattntcaccaacgccgggcaataattgttttagtacgatcaagcaaattttccttgttgatttcgctcaataataggtttaccatcgagctcgcctgtggtatttcgcgggaactcaaccgccgttgtgtttcggtcgacattggcctgcgttgataaaagaggcaaagaaaaatatagccgaccttggcagcaaaaaaatattctcgtcaaacatggataaaaaacaattctagccgacatcggccaagaaagattactggtcgctgtatcccgaataaaatcactggatgaagccgatcgaacatatccttatcgacatcatccaaaattattaagggattgaacagaaaaagcatagcccanaacggtcgcaaactacacccgacggatatttatggacagacctcaccgga

SEQ ID NO: 237611 - DNA, 451 bp, Glycine max
agcttcttatcaaagcacatactaggagttgtatttccttcttccaaggctcattccctagaggatgttgtctcccctctcctcttctcctctgccttccgctgcatctccatggaggaaaatcaccattgaagctcaaagatccagcctccatagaagctacacaagcaagcttccatcactaatcatattttcgcgattccaataccagtttataacaatgaccagtttttaactactcagtcatcaacccaaagttgcaaccacaaaatggaataaatatgtgaaagaaaatccgagaagtataccaattaccaagtgacactccacaatcaaataccattctgaatgacaattcaacaaaaatgacaagtcaaaatcactaaaatagatctatacctacaaatttacaagcataaacactctcacctaacatatccacatgcccaca

SEQ ID NO: 237612 - DNA, 386 bp, Glycine max
  unsure (1)..(386): unsure at all n locations
gctgccccacaacgctccacggaatttgtcacggtcgtgctcttccttgcgagccctcatgaggtcttgttcaacgtcttttgcggtagctgcattttcttctcgtaacccggcacactctttccggacgtctgtagcgaccaacttgaatttttctttggcgagtctcgcttttcctagttcgggtttcagagctcggacttcttcatcctcttccgaagcttcgaagttctcttcggtgataatctntaacttggagagccaatctaaacctcgtgtacgaacttttagccattcatgataaccaccaatgatgccattatgaatgccgcctagttctttatctttccttaacaggctttcccacgccttatggactctttgat

SEQ ID NO: 237613 - DNA, 375 bp, Glycine max
  unsure (1)..(375): unsure at all n locations
cattgtatatacatttaaggttgtttatgtatatatcgtactaaatattaatatgcatattacaggatgaacttggtgaaaaaaagatacattaacatatgcacaaaaaagaatgagttttgaaatgttgaagtctaacaaaaagaaaagaatgctaagcataaccttaaaataacaaaatgatgatacaacgagagcgtgaatcaattggtacaatgttattgtatcgtataaaatatggcaattaaatctactgcaagaatttgttagagttcacattcacatactataaatggactgttgtttactcgttctattcaaagcagaaatgctctccacatgcatcannataatgaaatcaccaatcttaaactg

SEQ ID NO: 237614 - DNA, 410 bp, Glycine max
  unsure (1)..(410): unsure at all n locations
tggaggccttgantgaattacactatatgactgttacctttgcaaggaatattcagcacttattttctgtttctgatgtccggcttttaatggatgtgcttaaatctgtgtacttgccttatgaatcgtttaaacagaggtaaaagcgtattttaatttaaagcataattgaaaaaaaatgataaattaagtttggctgattatgccttttggcatttggcttcagtattatagaagaattgggtgggtctatgggagagagcttcatatctcacaatttatgtctcanaatgtagaagtatgaaataagaggaacagaaagataaattntaataaaccactggccttatgatatgtcatgcttgttatttgagaaatgctagcaacatgctctnttgatcacactctat

SEQ ID NO: 237615 - DNA, 409 bp, Glycine max
agcgttgtgggagaatgttatattcttgatttctttgctgagagggtttgaaatggcctcgggtctgaagattaattttgccaatagccaatctggggtggtgggggttcggcctaattggattcaagaagcagccctattcctaaattgtagacagatggaaatgcctcttaattatttgggcatgcctattggaattaaatcttccagcagggttgatggggagcctctgatttctaaatttgaagccaaactctccaagtggaaccagaagaatctatctatgggtgctaaggtcacactcataaagtctgttctcaatgctctgcccatttaccttctatcctttgtcaagatccctcaaaggatagttgattaggtggtgtctcttcacaggaacttcatgtgg

SEQ ID NO: 237616 - DNA, 360 bp, Glycine max
  unsure (1)..(360): unsure at all n locations
tgttagaactatcatcacatgacactttattggtacataataagttgctttctaggcaacttgagattttaacagaaacacttggtaagtcgccaactaaactgtctattagtcaacctacacattctactgttttgcaggttacaggttgtaccatctgtgatgtggctcatgaaacaggccaatgtattcccattgaagaaacactcaagaagttcactatatgggaaatcaacagagacaaggatatactcacggaggattctcangcttcctgcanggtccttataaccacaaggatagtggagatcacaccttggcaatcaattcaacaaggaccagggtggaagataaaatttt

SEQ ID NO: 237617 - DNA, 468 bp, Glycine max
agcttcaacatcagaccacttgtttagtgttgtaactacttcacatggacttgatggggcctatgcaagttgaaagccttggaggaaataggtatgcctatgttgttgcggatgatttctccagattcacctgtgtcaactttatcagagaaaaatcatacacctttgaagtattcaaggagttgagtctaagacttcaaagagaaaaagactgtgtgatcaatataatcaggagtgaccatggttgagagtttgaaaacagcaagtttactgaatactgcacatctgaaggcatcactcatgagttctctgcagccattacaccacagcaaaatggcatagttgataggaaaaacaggactttgcaagaggctgctagggtcatgcttcatgccaaagaacttccctataatctctgggctgaagccatgaacacagcatgttatatccacaacagagtcacactta

SEQ ID NO: 237618 - DNA, 443 bp, Glycine max
  unsure (1)..(443): unsure at all n locations
tctcaagaaagcttctcaggaagctacctagtctatatatagaagcatgtgtaacacttgttgtaactttgatgaatgagagtcttgtgagacataactcaaagttcaacttctctccctttttcttccttcaatttcgtgctcccccctctctctttctctccctctttcttttcctccattgaagcctcctctccaagcttcttatccaaggctcatcttggtggtgaagctccttcttccatggcttattccctagtggatggcgcctcctctcacctcttctcctttgtcttccgctgcatctccatggtggaaaaccaccattataggacctcattgaagctcaaagaatccagcctcatagaagctccacaagcaagcttncatcaatgcacacacttgcagnntattgaaaggaattttcatgcatttatttacac

SEQ ID NO: 237619 - DNA, 469 bp, Glycine max
  unsure (1)..(469): unsure at all n locations
agctngagggaatcttaaattcatataattttttgttcagctaaaggacacgaaataggaactgaaagatgttttgtgttacaatatgatagttttgccctcttttttgcacttcttgtaacatttgtaatcgaataaggatttgccacggggatttccgaaggttaatttgtatgtttaaattaaaagtctcaatttggtcttaaaaaaatgctcaatctttttcaaaaagatccagtttctgcaaaagttagaaaaggaaagtttcaattttatttaaaaaacggtttaatcattttttataatttttttttcaagagtcacaaagtatatataggtttcagcttttcaagaaaagatcaattttttttataagagtttacacggtaaaataattntaccttattatntaattactcntaattttttttacactgttgatccatagggctatctctcttaattattt

SEQ ID NO: 237620 - DNA, 441 bp, Glycine max
  unsure (1)..(441): unsure at all n locations
tctcacccttttcaagagattgtgagggcaacaaggtgttccttggatcctttaaagtctcccataacacaccttgatggttttcatccacaagcacaaagttgccattgtccttttagaaaccaagtgaaactttaccattatggttatcatttttccacaatagctcaccatttagggcagtgagcactaatccatcatcagcagtgagttcaacctttgacccctttgaagcaggagtctctccattggtataccaaacaacaattttctcaggaatcttagcataccaaatganaaccaagaaattattagtgtcctcaagtaggacaaatccaaaggcaaagtcaccaagaggtgaaaccacccatgatgaggggttgttattggttgctagttgtttggctaaaagagaatcaccaacaaactatgttcttcttg

SEQ ID NO: 237621 - DNA, 429 bp, Glycine max
  unsure (1)..(429): unsure at all n locations
cccaccaaacnatttaaaagaaggaaaattagtattattaaaaaagtttataattataaaatgaacaacattatcaaagaaaataattttttttatcaccatgacatcagtgtggagtatccgctaattttattgataactaatcttcaccagggaatctaactgaccactttagtggagtctcctcttccaaatacgttttcatccataaggctctaaccaaagaccttgcttaagggaactggtcctggaccattcaaaccaaggacttgttggtatccatgaaaatgatcttaggatctcactaattaatatattcttcacgtgtacacctaatagttgttaatcgaattatctcatataactctctaattgcttagtatctgacgctcacatcaacacaaaattatccangagacacattcacct

SEQ ID NO: 237622 - DNA, 367 bp, Glycine max
  unsure (1)..(367): unsure at all n locations
ctagaggctggcaatctacttcaatacttttatgcatggntatcaaactctcaagataactcattaactcttatgagtttacgagtctacttaccctatatgaattgatttgtgtgccaactttccttataatagactctgtgtcaactaagttgattctatacaaatataatagactctcgaatttaccattgagtcaatgagtcaacacgataaaagattagatcagaactgtggtagtatttggctattctatgtgcatttatggttcaacatacctcacattggtgcgttgtacgttcctaaatcagataaccttcacctctaacactatcaaactcttattctcaacaacatcaactctcat

SEQ ID NO: 237623 - DNA, 467 bp, Glycine max
  unsure (1)..(467): unsure at all n locations
agctngcaagaaatttagagncaatgcatttgttggggtgttncaaaacaccaagaaccctcacttctcccaagcaagaacccgttctgtgtgtgtagttacttgcttacttgcatatgtgcatctggggtctgtttcacgtcaatggtaaggtaaaatgtaaaagctacaatctgaagcttctctcttgacgaggatccaacactgtgaaaagtagaaacaacatgcactaaacagagctaacaattttcaacaagttaaagcattcaattttctactcttgccaatgcttagaactctaaatgtagaggtcagccacttaattcagcatttatctttacaatttattttggcttanactaatcggtattaggcagtcaacaatcctttgggtatctactagaaatattatcttccatttacacaaaatgattccaagtaacatgaacttaatatacttcctacaa

SEQ ID NO: 237624 - DNA, 417 bp, Glycine max
  unsure (1)..(417): unsure at all n locations
tcgggattgaaattacttttgtcctgtcctttgttaatttttctgaagtattattatttctttaattgaaaggataggaaagaggcagaaaacataaaataatttgaattccaactggaattgataaaatattactagttgtttaggatacatatatctttgtgctgtgcagcgggcaatgcgccttctagcaaaaaaaaagagaataatattatctttatttaaaattctggcgacactttntagtttttacgggtacataattgggtgactaaactaggtattttatatgctagattagttggttttgttcttgtatcctgtagagtacattacaaatggtttgtgtcaagctaaaactaaaactgattacaccaaggtgtcagcaccttaaaaggtgaccctactcacacgtat

SEQ ID NO: 237625 - DNA, 461 bp, Glycine max
  unsure (1)..(461): unsure at all n locations
agcttagctggcaggtttttgataaactgtttttattagtatttaattgtagactttaattctaattgctgtttttaaaagctctatatttccttagtcaaaaccctttctatagagcataagccataaaaaatgacttggtaatgagtaaataattgggataatctaagataaatttttgcattttaaagtttaaactattttgcttacgcaggtggagggaagtgttgtgcatatcatgaaagctttagcgagccattcatcaacagcacagagtttaatagatgatgattcacttcagttgctttttcaaatggttgccaagggatctttgattgttttctctcgttataaggaaggacttgttccattacacaacatacaactttgcaaacatgctatgcaggtaaactatggtacatntgtctgcagtgaaagtagtattgaaaatgatgtaaata

SEQ ID NO: 237626 - DNA, 425 bp, Glycine max
  unsure (1)..(425): unsure at all n locations
ntacatatgaatctactatataaaaatgtattcttgaatgggatacggtcacacctttaatgaaaaaagtgagattttcatgcacaaaataactttttgtgtatcacaaagttattaattagatggacaaaagttagatgaatgcaagtcgcatgatccatgtgtatgaggaaggcattgaacaattattggaatttccctccgaaagaagtcgatcagatgaggatgttatatttttatccttgtataaactgtttgaatcgaagacaacaagtactagatgacatacgagaacatcttttgtgtgatgaaattaagaagaattatacgacatggatatgacatggtgaattgatagacatgcagaggggatcctgaattgttgatgttaaatgggagattgatagaggatatgattcatgatc

SEQ ID NO: 237627 - DNA, 464 bp, Glycine max
  unsure (1)..(464): unsure at all n locations
agctaggagcatccncttctaggttgtcttatttctgagctactgacagctataagttccccagatgtgggtttgtatgcttcagagaccatctttgcaggacattctgattctaagtgctcaatcatatttccatgttcggctgatttgtcattagcatgcagataaaatagctcatgtgcacctcgttcagaattactgttttcagcatcccaagatgactcttcgacttcagtaacagttagttcacattctagggccagagattctgaagttaaattcaactcatcatcataatttaaaatcagcctcgcaaattgttcatgagcaactgctcgtactgcctgttcagcaaaacaatatcagaaatgcagtaatctcaaaagaaaataaatggaaacctcaggaaaatggggttggnggaatacatcaattgtaatttgttgttcaaaaacataccagat

SEQ ID NO: 237628 - DNA, 441 bp, Glycine max
  unsure (1)..(441): unsure at all n locations
tgtttggactatctgggtatgtgtctttaaaattatggttatccaccaaccttattagaagaggtgtcttgcctacgaattctatatatagcgatataattcctatcattttcatagntgaataatatttcaagcttactccattgtgaatgtgagtagagcattgactcctttgtttggttcttggattaaaaccctattcgaatcttatcaaatgtttccatacctttgtagagattcctcacttagcttatcactcttttgggtgtgacacattcccttccatttcttgtttattctatcntttcctttcggtattcttttccatctatatttttgtctatttcttacatttatggtatctaaacctaatgccttgctatagcctatgatcttggactaattncactttcttctattttggcttaattcctcaacatg

SEQ ID NO: 237629 - DNA, 403 bp, Glycine max
agcttcaccacacatggtataacccgtgacctttataatagaataatgtgtgggttgtccaatcaacagtttagttggcagcttaccaagtgtttctgttaggatctcaagttgcttaaatagaaacttgttctgtgccaacaaagcatcgtgtgatgttagctccaataggctcttctttgtgggttgatgagttatgtccctcagaatggcatgattattggccgacatgttctctatgagctcagctgcttcttttggggttttcagctttatttttcccctagcagaagcatctagtaattgcttggtttgtggcttcagcccatctatgaacatattcagttggattggctcagagaatccatgcgtgggagttctcctcagtaagtatttgaatctc

SEQ ID NO: 237630 - DNA, 477 bp, Glycine max
  unsure (1)..(477): unsure at all n locations
tctaaggaacaagctgctatganaagccaagctgatgggaaatctttctaagtgaactaccagataggagattgcgttctccttaagcttcaccctcgttggaaggcaacgacaaagggatctcagatagtttcaggcaagcttgccaagcggttctatggacccttccaagtcatagaatgcattgggctcgttgcatataagttacaattgccataggaagttaaaatacaccccgtattccactattccaagctgaagtctttttgcggttcaccagaaaatatggcgggaattgcctggcacaaggagttactcaacgaccaacccctcgtgtttccattaggtatcttggattaccgtagagcattcaccgaggatccctgngaggtgctagngcaatggaatggtctctcacctgatgatacctagtgggaggattggaatcagctgtgtgacaactaccaccttgacgac

SEQ ID NO: 237631 - DNA, 449 bp, Glycine max
  unsure (1)..(449): unsure at all n locations
tgcacgcatgcaagccttatcattggcccgagatcgtagataggttggcgctgtttattgtgattggtgacctctnggtaagccattgccaacgccagagcctggaaataaaacatgacaaattgatgatcaagtcatagcttatcctagtaaaaaatctaaaagacaactaacatagtaacatacaatgtgatcacggttagggggagcataaatgcccgtgggaattgccgttcttcttctagtgccaccaggagagggatcagagatatttttaagtcctgttggcactactatgactggtaagccaacaaagatttctaggcaaactttcttccagtcagttgcattgccaatgaatgcatccacgctgaaggactctcttatttgctttattagcctgtcccgtgctcttngtgcctgcacacaatattngcanataatataac

SEQ ID NO: 237632 - DNA, 187 bp, Glycine max
  unsure (1)..(187): unsure at all n locations
tgaaagaaaanngaaaaacagaggggtgattggagcggcgtaagaagcaacagagaggacacacaaaaaagactcaggtcgaagggagtcgagatgcgcagaaaaagacaaaaaagtcaaaaacacactttaaataaaacgcaagactactgcactgcgggaaaagacagagggcaaatatagcaac

SEQ ID NO: 237633 - DNA, 398 bp, Glycine max
  unsure (1)..(398): unsure at all n locations
ttgaaaatattgctagagaagctagttcttangtacacttacctcttttattcgcagctcacctccctgagatgaaaagctagaactgagctacacacccgctataatagctaagctcacccccctgacaaaatacatgaaaatacattataaaagtccctactacaaagactactgataatgcctcgaaatacaaggctggaaccctattctagtagaatggctaaaatacatggcctccacgggtgagaatacctattttaatatttacaaagataagcgggttcatacttagcccatgggctctagatctacctctacgctcatgagaaccctaaggccttcccttaggatctctggcgcaatctacttagagtcttctatccaatgcccttatg

SEQ ID NO: 237634 - DNA, 447 bp, Glycine max
  unsure (1)..(447): unsure at all n locations
cactctctatactcaagcttcttatccaaggctcatnctggtggtgaagctacttcttccatggtttattccctagcggatggcgcctcctctcacctcttctcctttgtcttccgctgcatctccatggtggaaaatcaccatttaaggacctcattgaagctcatagatccagcctccatagaagccccacaagcaagcttccatcagtatggatcctcatgatccattccgacaaaagggtgtgaaccaatcagattgagcagtgcttgcttcaacttcacaacctttgtggaagcaaagcttcatgatgaatcaacaatgattcaaaggtgtttgatgataacaatgatgacaacataagatgatgacagaggtgatgaacataaagctcaatagatcaaagaacaactcatgtcaatcaagacaagtcaagagtcacgaatc

SEQ ID NO: 237635 - DNA, 407 bp, Glycine max
  unsure (1)..(407): unsure at all n locations
agctttgtgaagnacccagagagcgatgggagttcggtnacctgtataacaaaacacaaacctctttatgacagtccatcaaccaactccatatgcacatatgcctctaaccaacttcaacacttcagggagagtccacatcccctgatgctctcgcccatcttctcctcgagatcattgtgatgccgaacattcatcccgagattccgagggaaataacaccctgtcatactcaacgttctagaaaagaaatatgtcttatcaaatgacggagaatagattagatctggacacgcgaaccatgggtattacacacgtcaatcaatacgcacgaattgcccgtaaatgcacactctccactaacacgagaaatgaatctctagatacataagtacaatcctcaccgc

SEQ ID NO: 237636 - DNA, 445 bp, Glycine max
taaaagagacatcatctaggaacaaatcgacgacaacagccttagtatccacgtcttctttccaattattcgcgcattctgttattatcattatatacttatatacatatatatatatatacatactataaacactctactcttccatggatccatgcattgtgcattattgcattattgcactcacatgcttgtccaggcccctacggccctactgcacatacgtacaatgaaagcgctttgctgcaatattcacaccgcaatatatcatatgtatatgtgagataatcataactaagagataacactacaaacatgtctaccaatgagtgaacactaagataattaccagtcatgaaggccatcgcacggcaacgcctctcctatcttttgtgagtaaattgtaatagcatattcatgtctcagaatttgactcccaataatg

SEQ ID NO: 237637 - DNA, 349 bp, Glycine max
  unsure (1)..(349): unsure at all n locations
gccgctgcaacttttactctttagacttgcttagtatgggcccttttatgccttttattgtgncctgggcttccttctgggcttaggtctggtctttgatatcctcctcacttattcacaaaggaccctaaggttgggtaccttactatctttttctggggtaagaactgagactgtttgtgaatccttgtaagaaatctatatgcataataaaaatctaattcacgttggattagataatcggattaccttctcaacagaaaaagtggtgacatcttctcttgatcttatctttggtctaatattctggtcttgatcacattactgaacgtacaagaaaatatctttt

SEQ ID NO: 237638 - DNA, 410 bp, Glycine max
agcgagactcaaatgtcagtatgacagatcttgtgagcgcggaagatgacgtaaatctacgcgtgtcaacgggcttgtcggccgtgattgacgaatggagcatatgactacggtaggctgtgcgtgccatcaagcttttcgtcttacagacagccaaatataatggttatacggatcaccactcgagtatgtccgccagtcaacgtgactcaaatgtgagtatgacagatcttgtgagcgcggaagatgacgtatatcttcgcgtgccaacgggcttgtcggctgagattgacaatggcgcaaagatacgtttgtcttgtggctataggctttcgttttacaacagccaaaaaatgttatacgataccactcggattccgctgtagcggcttaatgcagattacgacttg

SEQ ID NO: 237639 - DNA, 356 bp, Glycine max
tggaacttagtggtttgccatggacagaactgagtcttggtgattgagacgaatgaatataaatttcctacggcctattcttattattttctcttctgctattagaattgaccaagggtttgaacttgatctttgtatttgacaaactctattcgtcttagatagatgtgaaagtatcatttgattcactctgcaaagtcttatactattttcttaagttatacttcatcagacaataactctgttgattttgaaaggatttaaattgtgaatatataatccacccccattgtgtgatattgcatttacacatcaatttcagaaccaaagaataagtaggattgtgtagattgact

SEQ ID NO: 237640 - DNA, 457 bp, Glycine max
  unsure (1)..(457): unsure at all n locations
ctttatctcacagncacctgaggcatgcagcttaagaatatggcctttaaaacttcttattccatattgaaattcaataaataggtctcctatttttaatggagagggttaccactactggaaaacccgaatgcaaatcttcattgaggaaatagacttaaacatttgggaagccataaaagtaggaccttatgtacccaccatggtggctggaaatgcaatgatagaaaaacctanagaagagtggactgaagatgaaagaagattagtgcagtacaatttataggctaaaaacatcattacttctgccctaagaatgaatgaatattttagggtttctaattgtaagagtgctaaggatatgtgggacactctacatgttacacatgagggcataactgatgttaattggtaaacgatctangataaatactttaactcatgagtatgaatattt

SEQ ID NO: 237641 - DNA, 398 bp, Glycine max
  unsure (1)..(398): unsure at all n locations
acctgtcattggggatgtggactcatgtgtgtatctcttgagcatattgccaaatagagacctttgttttacctctagggtctgggagagattacaagaagccatatagactaaagtggaacttagttcatcctatcaccctcaaatagatagttaaaccgagagaactatctaatccttagaagaccttcttagagcttgtgcgatggaaccaaaaggcagttggaacgagtgtttagcccttgtagagnctacctataataataatttccatgccagtacagggatggcaccatttgaagccctgtttgggcagatgtgtaaaacacctttgtgttcgatgagatnatgaacctcttctgtacgtctcagcgtggtgtgaaagacactaagcaagt

SEQ ID NO: 237642 - DNA, 373 bp, Glycine max
  unsure (1)..(373): unsure at all n locations
agctntataagtgcgggtctgggagacgaatgtcaagtgttctcgatatgtgaagatgatgttccaagtactttggatttggtccgaccatgccctcctgatttccagctgggaaattggcgagtggaggaacgccccggcatttacgcaacaagcataatgtaaacctttacggttttaaaagctctatagttgggcctaggctttagagttttcgttttgttaaggctttgtgtcttttgtttttgaatttataatacaaggatctttcttcatctgttcctgggctctacccattctcattcatttgcatgtttacttctttttctgaaacggcagaatcgatgacgagtcccccgaggtactaatacct

SEQ ID NO: 237643 - DNA, 396 bp, Glycine max
  unsure (1)..(396): unsure at all n locations
gctcggtcgaagacctacccgctgaagagcggtgaacgatgatttacgaatgaanaacttcaagaacggtcgaagaacggtcgaaaccttcgcgaaattcttcacggaanacgttactgaaacgattcggaagcgcctcggcttagattttcttcacggaaacaatttttccaagccaatttcgaaagagagagaagtgcctaaggcgctgaacccttttcttcttcacttcctgccctatttatagcaaaataggggaggtggttgccgcccagctcgcccaggcgagctcacgtgcttcctccagaagcaacagccttctggaggaatattctggaaggccaagtgggcctgggtgctattagcacccccaattttactaagtacacccactct

SEQ ID NO: 237644 - DNA, 338 bp, Glycine max
  unsure (1)..(338): unsure at all n locations
agcttgaatgggaagtgataaagggaaatttctgctttntattcgtgaccacagagtggtacctggagatatgtcgcgggggtcaagagaccttggggacgtcaggtggggtgctattgcccaaaaccaagcttgaccaatcccgacccaacccgggcatagtcagtcagtgagaacctgtgatgtacctatgcaggcgagctcctgacagtcaacagataaaaggaacaaagaccacaaagcaaggaggcttgtgtggtggctggccaactgtgaactttgattgatatatgggatatggcctctggtaatcaattaccaaggggtgtaatcgatta

SEQ ID NO: 237645 - DNA, 403 bp, Glycine max
  unsure (1)..(403): unsure at all n locations
tagcanatggacctgggtgntgcccagtgtcatcatatcttttgtaatacttatcacctctatcatatctaataattttcacatttatgtctaattgccattttacttcattgtagtaaatttctaaggcatccgttgcctaagaaatctcgggtagtaagcagacataaccgtaacgtgaataatcatcaataatggtgataaagtatcattcctttccaaagaactaacatcaaaaggtccacaaatatcagtatgcacaatttcaagaagctgagtgcttcttgtagctcttttctttgtaccgtttgcttgatttcccttaatacaacccacacaaatatttaaatccataaaatctagatacgaagaattcatttttattaatctttcatctttctct

SEQ ID NO: 237646 - DNA, 285 bp, Glycine max
aaaaaagcgagaagtggtgacccacgggctgcaaactcgtaaatcccgtgggtatggctcttgaaaggggggaaaataggtttttgaatggtaaacgcccccccctttcgccatttttatatcttggtgcagaggtggctcacccatgcgagctaacctgctcttttttattttttttttgaggggaacattaaccatgtgccctcccttctcatggattaacgatttgcctaacttgaacttacttatggtaaaaacaagcgctgaaaacttatctattattac

SEQ ID NO: 237647 - DNA, 420 bp, Glycine max
cgaagcacaaaagccttcatcaagaacttataaatgcacgtgggacaattggccaaacaaatggttgaaagaccctctagtagctttggagcctacactgaaaagaacccctctgaagagtgcaatgccatactgaccaaaagcttaaagagagcaccaggagaggcagaagctgataaagaccagtctgatgaaggaatgacagactgagatgaagaaagagtaaattgaagaggaggaggaagagaagacggtcttacttcctaagaacaaaagccagatagcccgagatgctaagaaagaagaaccaccagtccctctagaggagccctcatatactttagtcccgtccaagaagaacatggagcctacttaaagcgtctctcgtatatattcataggggttggagataacaatgtc

SEQ ID NO: 237648 - DNA, 182 bp, Glycine max
ctggtggagcttgcgtgcttatcgcaactcccgattgcttaacccgcataaatgaacaatcggcttggcgctcagtttttcacttataagatgcacgcaagtattgacgctagtgggatgaacccatacttactgcgcggtgacaacgcattcttctttaaaaacttccatacgctcaaacg

SEQ ID NO: 237649 - DNA, 358 bp, Glycine max
  unsure (1)..(358): unsure at all n locations
agctntaacctcattgtctctcatagtctttattattgggagcctttccaatctttgtgtccggactctcagccacttatgatagccgccgatgatcccattactgcttcccctaagctctttgtcctttcttcacgccgcatgccatgccttgcgaactccttggagtacccttgcgttgtggtcactgaaaccccatgcgatgaaaggcgtgatgctttcgtctgatggcactcctctcatgggacatccttcgcatgaagatagaatcctgattcttccttccttctagcgagggaaccaattaacagacgcccttccatgctagccaagaggtggtcccaattcgcctttactt

SEQ ID NO: 237650 - DNA, 504 bp, Glycine max
  unsure (1)..(504): unsure at all n locations
caccaaacatgacaagtttaacatgctctcgtcatatttcttcacaaataaccatcacaatgcataaacctagtaaaactacccatcatatctcccagaacccaatacccacgaaaatcatatgagaaagaagtctacccatacctgaaattttgaagtgccacacgtaaaggtgcgcttcacgactccgaaaatggcttcctttcgtaatttggagcagaaaaggtgtgcaaaggttggagctttgatggagcttcaatggtggaggaagaagagagaatagcaacgagagagagagggagaaaagcttatgaattttctgagtgaggagagagaacatagctntctatgagaaaatgctttccttttcctattattntattntttttcanaagcacttgccacttgtcccattntgagtggaacaaanagggcccacctttttctcttgatgtgactcatgcacagccacaagaagagaaaaatctgaccttctaaaatgat

SEQ ID NO: 237651 - DNA, 418 bp, Glycine max
  unsure (1)..(418): unsure at all n locations
agcttcttaatgaagcttctggaggaagccttttattgaagcttttatataaagctacatgnagctgcctcgagaaaaacacttcccagccttcgttaaccgttggatcttctcgaaattcggtctgaaactttacaagacaattgtccatgatctgaccgttgggatctttcacaagatgtctggggtgttctcgaagcttccgttcccgagagcatttcttatttaagcacttcagcctttgctttcgtgtagcttaagaaaaacgtcatttcttcttctttctttcttccaaagccatttctaaagttccaagaactttctccatcacccacagccaccattagccaccacaaaccatcgttgttctccattgaaactccacaacgagaggaacccgtcgattagagcagaatct

SEQ ID NO: 237652 - DNA, 257 bp, Glycine max
  unsure (1)..(257): unsure at all n locations
aaaaccacgacaaccaacngccacaagcgacggtttaaacaaaaagcgaaacgcctccaaaaggacgccaagggaaacacccactaacactcccagaacacgggcgaacaaaccttagaatcaaaggcccagaaaaagaaaaacggaaggcggaagcccaacccacaaaaccccaccaaacatgcccacgggtccacagcccgaagcaagcaaaaataagcgcaaagagccaagccacaagaacaagcagagaacga

SEQ ID NO: 237653 - DNA, 416 bp, Glycine max
  unsure (1)..(416): unsure at all n locations
agcttatcgntgcaattatgtatcatgtgattgttacttgtgattatcataaaccttcattcgcgggagtagatgaacaacagttaatgacgaggaaggagattctttttgtgggagccgtcaagccaatatgatgancgttgagattattttgggagagagttatgcttttttttatcaagtcctccataatggtcccgtgattttttttatctgggcatgtaaatctcagatttagatacatgtaaaaactaaattattttctgtcatgtgaatggcgtataatggtttaagatatacatatatatgtgtatattaagtgctttgtgtgctgtttggtgattgtatatcacaaacaatttactctcattctccaaatcaaattaatggagatttcattaaaaattgagattatg

SEQ ID NO: 237654 - DNA, 479 bp, Glycine max
  unsure (1)..(479): unsure at all n locations
gattatttggtgatgccaagatttttaaacatgatttatgatatcaagaagattcaagtgaagattcaagagaagactcaagatatgaaagatatgcaagaacctcaagaaaagcatcaagataagtataaaaagaatttttcaaagataagattgaataacacaatttggccaaaagaatttgtcaaagaataatcttttaccagagttgttactctctggtaatcgattaccagaangcccaaaacagtttataactgatttacaaagtagtaatcgattaccatgggcatgtaatcgattaccaatgtttntgaatgttgaatttcacatttcaagagtcacaacttgtgataaaacattttcatacttgtgtaatcgattacancacatttgtaatcgattaccagtatttctaaatggtggttntcaaatctaaacatgaagagtcacaactgttgatgtgtaattgattacac

SEQ ID NO: 237655 - DNA, 382 bp, Glycine max
  unsure (1)..(382): unsure at all n locations
acctgcggcatgcaagcttctaacttaaaatcaatatatagtttatttcatttttannaanttgtcaaacataacctaacaaaataaattaaccttaagactatgtttgatgtttttttaatcttgttaatatataaattatttattaattctatcattaattaatattcatccaacttatcacttttagtagatttgtttctttcaaattatattttttcattcaaaaaattcatataagatttttcttagaatgtgagtttgagcctaactcaacctcaaaagctagctcaaggggtgaggggtgtccctcacttataaagtctaatatggttgtattgttaaccgatgtgagacttggattatttccaacacaccccct

SEQ ID NO: 237656 - DNA, 505 bp, Glycine max
  unsure (1)..(505): unsure at all n locations
ctgatggtgcttccgtgcctgccactnttacgactgccaataatgtgtattaaaaggtgtcaaggggttcagtggatggatcaaataacgaacgggttgtgcttaaccgaaataagtatgtatctgtcattcatatccatgatgcatctatatagtcctttgctataaacagcttttaattctctaatataacattatattacaactttataactaatctcattnttttttcctaggattaatggtcgcaacaataattatacaggtggtatccatactctgacaaaaggaaaagcttcaaggccacctcgaactggtgctntgatggctggaaactcatcttctgttccttgttcttctgaaatacttgatgctgaagaacaaccttcacatgtgaacaagcgtcattcagtaagtggtactatatatcgtaagcgttctttgcctgaggatcatcttcatctnctatgngcccatgggttggacagagacctcaaaaatttct

SEQ ID NO: 237657 - DNA, 497 bp, Glycine max
  unsure (1)..(497): unsure at all n locations
agttttgatgcagcaagtgagggataacaattcttaattgttggtacaaaacaaaaagcagcggattcagtagcacgggctgcaataagagctcggtgtcattatgttaataaaaagtggctcggcggtatgttaacgaattggtatactacagaaacacgacttcaaaagttcatggacttgagaatgcaacaaaagacggtgagactctatatttttgcgaagagagatgccgctatattgaagagacatttagctcatttggaaacatatcttggcggcattaaatatatgacggcgttacctgatattgtaataatcgtcgatcaacaagaagaatatacggctcttcgagaatgtataactntggaaatctcaacatttgttaatcgatcatattgtacccggacctcccgatatgtaattccactaatgatgatgctatagctcagtcgattattcttaacaaatagatttgcaattgtgaaggccgtcta

SEQ ID NO: 237658 - DNA, 392 bp, Glycine max
ataaagggtctttacaattggctttctgggactaatcttacatgaaagataatccaaggaagggagagacatgagaaacccaacatggggaggggagaggaataaggactaagaagatcatcatattctgagactaacaaaaagacaaagcataagtggacaatacactggtccttgtaatgcggttgatactaaatcaatggcgcataattcttctttttctccacgaggacacacaacatagacaaatcttgaagtgaatgagaagcccaaggcgtatcatgacataatagtgacataaaaaatatgtggcttggtatgagttcgagagaaaactcccacacaacgcgtgagagaggacaaaattaatatctggtcggattaatatctag

SEQ ID NO: 237659 - DNA, 308 bp, Glycine max
tagcttataagtccgagcctcgacctatcctcttggaacgaggtaaattactgtaagtccttacataaagtactctgcatacatcaacacgtttctttcaacggcattggaagaaaccaaaacacaaaaatatcatatcatgcttagagcctacattcaggcaatcgaagactaactacaaacttccacatgggctaccaatctgtataaaccaatgatgtaaattgcagctgttgcaattatcgcataatccttgatattgccaaaaactgcagataatatgactaaagtagctacaattgtgaaaa

SEQ ID NO: 237660 - DNA, 305 bp, Glycine max
  unsure (1)..(305): unsure at all n locations
ttacnncacatgaagaaagaaaattcaaaaacacaaatagttataaacaataattaaattaggaataatgtatttttaagtaatcatgtaagtgttagtaaaatagttgtcgcatcctcccctttgtagcttttaaagactaattnttagtaattgtgaaagtaatagaaaagtattaaaaatgctaagataattagaaacgtattttctaactgtagcagagtaacaggtaagttagaaaatttactaagcatgatttgaagtatcccatattatagttggaaattggttacccttggctaact

SEQ ID NO: 237661 - DNA, 472 bp, Glycine max
  unsure (1)..(472): unsure at all n locations
ngatggctntactccgaagagagagctttgtaaggtgatcttttatcgccatatatgttcataatgtgtatagagtggttggttgtaagaatccaggccttagttaacgatggtgtgtgggaacctatttatttttcgtgtaggggccttcctttgtcccatctcctttttgttgataatgtcatgattttttgtaaagcaaatggtgatcaagctaaagttgttgtagtgattcttgataagttcaatgaggtgtctagattaaaagtcaatttggacaagtccaacttcatttgctcgaagggggttcttcacgtggctaaaggatgagattgaagaaatctacggaatgagatgcaccccttatactgngaaatatttgggttcaaattaantctaatagagtgacttcggtggatttaatgatattgnacgagtgcaatctattggcatcatgaaacgaaatactaat

SEQ ID NO: 237662 - DNA, 291 bp, Glycine max
agcttaaagatcaagaacattttatgataacatatatgatgatctcaaagaatcaagattcaaggttcaagctttcaagaatcaagaatcaagattcaaggttcaagtttcaagaatcaagattcaaggttcaagttccaagaatcaagatcaagattcaagactcaagattcacgaatcaagagaagacttaatcaagataagtatgaaaaaagtttttcaaaaactgagtagcacatggatttttctcaaaacttgtttaccgaagaagttttactctctggttatcga

SEQ ID NO: 237663 - DNA, 369 bp, Glycine max
agctaaggtcaactcggtgaatgagaagctagagcttatgtacacaccccctataatagctaagctcacccccattccaaaaatacatgaaaatacaaaaaaaagtccctactactaagactactccaaatgcccagaaatacaaggctaaaaccctatactactagaatggccaaaatacaagggctcaaagaaggaaaaacctattctaatatttacaaagaagagtggatccaaccttgacccatgggctcaaaaatctaccctaaggttcatgagaaccctaggggcctctttagtagctctagcccaagcctcttggagtctgttatccaatacccttggggggtaggatcgcatcattccctc

SEQ ID NO: 237664 - DNA, 380 bp, Glycine max
gagacggtatgggcatctcctctcttcctttatgcccctgttggcccgattcgtttggcgttcaccgttgtggaggaaacgtgatcaaacttatcctctcttcaatcaacctcgattctttccccggccaacaccaaaatccgcgaagcttgacggcatgtaacccactagcttctcgtaatagaacactggcagagtgtctaccatcatggtgatcatctctctctcaaccatgatgggagctacttgtgccggcaaatccattcatcgctgcgcatatctttaaaggttcacctcctttttaaacatatctgcagtgagtccgcaggagcatatagaaatgactgaactgcctatgaagcggaatcatatcttcaaga

SEQ ID NO: 237665 - DNA, 351 bp, Glycine max
  unsure (1)..(351): unsure at all n locations
agctagaccagtccacataagtgaggcttctatttgccaaaagatgaagagttgcttccatttcaagaagattgatttcttctttctttggctttgttcatctaatatcaataatattaggatccataatcaatttccattcaatcatatagtgtactgaataaaaactaacccgataaaagcctaacatgtgtagcctttcttgacatgcttttcttgacatacatgtcctacaatcaatgaaagcctgacagcttgcgcgactttcagtcaatgaaaattgcgttagacccaatgaaattgagtgaatgaaatcgatgatngaatttgcgtcactcattngcagatcat

SEQ ID NO: 237666 - DNA, 515 bp, Glycine max
  unsure (1)..(515): unsure at all n locations
cggttacctaacgaagaacttggtccctttagtgaggatgtttatgaagatntacgcaatcaaccctaggaagatggtgaggaagaaactgagcttgtttcaccaataacaaccgtaccaccatactacatatcaccacacatgcataattttgaagattctgaatacggctatagcttggatcgtgaagaagtccaacatttggtggggactctctntgaagggatgtgtttctaacagaacaagaagtataacatgttttgcagcaatatcatgtgaacaaaggagctaattataagaaacaactatcgaacccaacaaagctaattgtcatttgtgatgatgatagttgtgcttagaggtgcanggcaacatacatccttacaagtaagctgtgggaaataagaaagctntatgaaacccatacatgttcaaatccatcaatctcacaagatcatgcannagtgtcgtatctgctcatcagtaaaagcatncacacgtctgattaaaaatat

SEQ ID NO: 237667 - DNA, 297 bp, Glycine max
aatatataataataataatgcctactggtttattatatacaataataataataatgccttggacaactttaatatatattattgttcagaatataatattataaatattcttatctattttgtgaaagatataatgtaatgtaccttcttttaaaaaaataaaaataaaatgtagcatacagaaatattatctaatttactattaatggaagaaatacttttttaggataactatataaaatttatatcatttttagaaattcaaactaactcatttaaatcaactttttaaatctt

SEQ ID NO: 237668 - DNA, 378 bp, Glycine max
agcttataaaatagggagttatttcttatactttcattattgcttcctgcacttctcattacatttccaaaaacccattctgaaatataaatttacattctggaatggcctttccaaaatgcaatggaaagtacacgaaacaatagtaggaatgtaggaaactttagcctataaaataaggtctaagtttggtaaaaacttagtttgtgtagactctatatttatatgggttaagcctatatgaagcaataatcaatcaagataaaaagttccacaattattctttgcttaaaaaattaaagttcaagtcctacatttcactaatttgagtatgtgtaggactagtcatgaaattcatgcacggcacaagcaataaaa

SEQ ID NO: 237669 - DNA, 266 bp, Glycine max
  unsure (1)..(266): unsure at all n locations
tctactaatatatggagtggctggtttgcctgatgatgacaatgtgtaaactataacaaagctactagtggtaagggacaatagtcttttagaaaacatattcaaattatcaaaacattntttttttacaaaaattacacaaacagaatgatcatgcttttaccttagccaaatgattgtcgtacacatgactgatacatataacacgatgcacagaacaatatgttggtagttgaattctaagaaaaaaaaacgacatgcttttt

SEQ ID NO: 237670 - DNA, 412 bp, Glycine max
  unsure (1)..(412): unsure at all n locations
agctnngaatttaattatgtcatccttgagtttttttgcttccgcacccttattctgttttttacaaagataaatctgtgacaacttgaaaaagtgctacgaattttgaagattattctagtgaaaatccttttattgcagttgtcaaggaagaaatgaagagaaggagtttacatatatggaacaaaattaatgttaagttatacatgacattgaaaaaagacatgtagaatagctagacataaaggatcaacattttttttgttagcaaataacatgtatgtgtacaatggctacacatacacctatgtgacccgcactagttacacctttaatattagaaggacataagagtctccttgatatcaatataacaaccatttgttattttttttaatataagtaattaata

SEQ ID NO: 237671 - DNA, 441 bp, Glycine max
  unsure (1)..(441): unsure at all n locations
atggctcatgtgatatgggccgattgaataaatgcttattgaagtcatttaaagagagaattctgaactgaaactntattgataatgtgaaaatgtacaaaactgatgagcctctgttagactgttacaacccctatatacaatgtagaagctcttcaatgagagatgtcaattataactgtctaactgacacttgactaacaacagatagctaaaagcttagagagaataatgagagcatatatgatacagttatcaagaaacttatgctcttgcaatgcttaattaaacaaacacatgctaaatctctatctangtatggtatggatgacatgcagtgctttaatttcaaatgggcactatggtgtttagagtanggccagccatgggaacttcaggatctgattcaataaacaattagttccacaatcaatacagaca

SEQ ID NO: 237672 - DNA, 412 bp, Glycine max
  unsure (1)..(412): unsure at all n locations
acattgtatgaagagaacaacgatcaaccaaattagacatgaaaaggaacacatcttttcaacgaacacaagttgttttttcaaagtggataacactattagagaaaaatgaagctcgagccctaagatacaaattgatctagaacaaaggcaaaatacaccttggtctattgcaaataccaaccatttatcactgacataattaatgcactcttgttgccacacaatttcctcacaaagtagactgcagtcatcacgcaagtctttcatagtggattatcgaataagcaantaatacactgatcaagttaacaagtaactgatatctcttggtataaatactgagaagggcacctcgttcttgctttcttaccacacaaacatagtaatgaagcacaggcaatctgactac

SEQ ID NO: 237673 - DNA, 382 bp, Glycine max
  unsure (1)..(382): unsure at all n locations
atcctacgcttgagtgagacacaatattttttatcccacctagncctttttgactctanacaaaccaacaagatttgtggaagattgctcactaactagagtatgatcttttaacaaatggatatatatcacttagcacttttagtcttttctctcaaggtatgcaaggtgttttgagaactttgtatttttataagaatttatagaaagcctttcaagaaagaaagattcacatagacgattagtatcttgtttcttcacagcttattctatgtataaggttcatcctaagtattccttatttctgaacacggggagtcttcatattattcttccttgatgccttgaacctgcgtgaacatttaatgcttgcattaaatgc

SEQ ID NO: 237674 - DNA, 436 bp, Glycine max
gatgccattgaggatgacattattcacatcaagctgctggagtttccacttatgagtaatggcaagagtcagaagaattctgacagtaacaggcttgattacaggtgagaagggcttattgtaagcataccatagtctttgatgaaagcctttggcaacaagcctggctttacatttactaactgtaccatcacggttttctttgccctgaaaacccattccaactaatgggagacctggagggaggtaaatcaaccaagagtcatagtctgattatttagaagtgcatcgtattctgctgtcatagctgtgtgccagataagattatccacggctgactttgttggtttggttctacatatgacgagtgtcgctcgatttggtgttgacattgccacttaactcttgtgcacatggatgagattatcaagctgac

SEQ ID NO: 237675 - DNA, 403 bp, Glycine max
  unsure (1)..(403): unsure at all n locations
agctagagcgtgantatatgttagncctttatctttgccanaacaatatacctgcccttcatttaattgtctttggacttggcggccatgatcaacaaagtacttttgacacctactatatgttgatttgaccaacgttgttatcagtatgttgcgacaatccttcaaaaccttatttatacattctgagaggttggttgtcatgtggccatatcaacgtccttctctatcataagtcatcgtccatttttcctttgaaatgcgatcaatccatgttgctatggctggactcagctgacaaaattattctaaattttgatcaaaaatgtgcttgcaaagagtgtagcctgcataaacatagttagcaacaacaactttaagtttgtataaacttatattaacg

SEQ ID NO: 237676 - DNA, 487 bp, Glycine max
  unsure (1)..(487): unsure at all n locations
ggatcaaaacaattatccaatcattgcagtgcgctcatatgatatattttctcattctattcattcgcaaacactcatttcatacaagacaatccactgcatatcattttcaatcaggtcattattcaaacaagctgtttatacaagcaatcaactcaaagtactgaaatgtttaaagactggaattaaaacaactaaaatataaagcaagctaaaaagcaactaaataacccggtaactaaaatgttcatgctttgcataaattacactaaacacaatttaaacaattgaacagaatttatacatcctgctcatctcatggctgatcttcattaagatccagcgctggagctgctaatgaatcctgataagctactctggctccatgactggcgaacatggcaaggtctccttangaacaggtgcaagagatggctctggtatctgatctgtaaagtctcctcttgaccatgtgacatctgatcaa

SEQ ID NO: 237677 - DNA, 445 bp, Glycine max
agcttgttgatttcacattttatggtgaaacatactgattctgaatctatgattcttagagtatgtttagattttataggaatatataaattgatatgcttgaaaaaataggagaagtatcactgaattgctagcctgttattacattaataccttcatataatgaaatctaactatcttgagggttttgaagagcctgttagtgctactttattgttatctttcttaattttttaaccacttagctattttggttaaaaataactttatattaaaaattagattattaaataaaaatttaaaatatattttatatacttagatgaattattttcttataattagttacatattttataaattaaaacacatgcttatataaatataattaggtatatatttatatacttaaacttgtggtgtggtattgtatacaatggataac

SEQ ID NO: 237678 - DNA, 494 bp, Glycine max
  unsure (1)..(494): unsure at all n locations
tctcttttgaatccaaattcacattctgagtttcttcatactacaatagcaaagagaaacattttttatttataatttctcataatgtgcaagacaaccaagaccacttacaaataaatagatggttgaaaatattactgaatatgcagaattatttttgggttcaaaagtaactccagccacataattcattttgagcatacttgcaaaattatatttaagaccaaaaattaactttggtccacccgacaaacaacaataaaaagtggcatacagttgcttttggatcaaaatgtgatttggatccccataaggccatcaatagttttgaagtatcaaaacagaagcactaagggactgtgaatttatttttgtgtgtcctttctacttgagcagtttctagttaaactttcaagagattatggcagaaataatgaaacaatgaatttaagagagggtgcaatntatacaattctttggtgattcagttggga

SEQ ID NO: 237679 - DNA, 313 bp, Glycine max
  unsure (1)..(313): unsure at all n locations
gcaagcttaagagccataagcgattgtcctagggtgtctctgcttattagcttcagctatcactatgtctggctaaatntagagttaaagttttgcatgtccttttagtatatgagttcttagagcctctatagtgttgagtcgtttattaagttgcttaagtgaatttttggtgggtcatatgcaccaccacattgcacttggagaatatgtactatttgtttctttaacatgataaggtgcttaaatgaattcaattgaaattattaattggaaagtaatttttctacctataatgttgtttaataaacaa

SEQ ID NO: 237680 - DNA, 335 bp, Glycine max
gcgaggagccggatcttcaaaaggcaaggacaatccctggcctatgagatccagtgcccatactctagagtcacgccccaaatctctcagttgcttctcataatggaaagagccaacaccaaaaccaggaagatagagaacatgtggggaatccacgttcacacaccctgccttctcatagtacacgttaagcttaggcttccattcccaaaagcaactacttattggagcaccatttgacccatctggcagacctggaatgacaatcttgttagtagcaagttcttctaccactgcaatatctgctacattctcatcaccaccgatcacatagc

SEQ ID NO: 237681 - DNA, 281 bp, Glycine max
  unsure (1)..(281): unsure at all n locations
agctnccattattaccctagaaatgtnggatttttcacccttgtattctagggaacctagactagttctagtattaggggtagttttgtaatttcacatgcattaagtgaatattcgatgtgtgtgttggaaaataaatttgtgcatgtcctttatgctttacatgcctcatctcacctaagtacacttagtggagaatcttggacttgatcttggattagtgggctgaaccataactaacattcactaatcataattagtgaaattttggctccaaaatt

SEQ ID NO: 237682 - DNA, 427 bp, Glycine max
  unsure (1)..(427): unsure at all n locations
tggagagaatatgttaaagagccaactacttattcaatggtatttttgctgactggaaaaggctttcttgggaaataccacatttcgatggccaacttagcttttactttccctggcagtgtgtatagaagatacacatacaccacactctgtctattctcccaattaacctagctgatgtaaataatacgtcttatgttaaattaaatttagctctgtaaaaaaaaatgtcactgctctagtttctactaatatgtgagcacgatataaaaagacaaaaataggcagaggaatagaatcaaaataattcgatagatgttattctcttnttttctgaagataatgactaaatttaacattaaaatatatttttcgttttataaattttttttcgactgggatttatttaaattttactaactcaatt

SEQ ID NO: 237683 - DNA, 352 bp, Glycine max
  unsure (1)..(352): unsure at all n locations
gcttggccaatcgcataggtggactgccgttattcgttctcctcacntgcttcttctcccggttcgaccccgaaatccgccgcgaggtgcaagcgcttcagccgctcaccttggttcacgtcgcgggtctggcacatcttcaggaagaaaaactcaccgagacacgctcaccgtcaaaccccactatttttcctccgcgctcaccctctccaccaactctaccattgttacccaccccgcctaaactgccacccttgcctttcaagcgcctcacccccgccgagctggctagctgccgggaatggggcctatgcttcaactgcgacgagaagttcacgagagggcatcattg

SEQ ID NO: 237684 - DNA, 462 bp, Glycine max
agcaacaatgtgaacatgtctggctctcataataatcaaacaaatgctgctccagaagcatctcctgtctccgaaaataggtataggagaactaatcatcatggtgagaataacgtccaatctaatgcacacgtgcctcctgctgtgactgagaacaggtacataagagtagagccaagaggcatgatccaacaaacatcaaataatgcaggtatgaactatcaaggtcccggaacaagagatgcattcatgtcaccactgccgaattggaatcagacaaggcatgcgccggtaaatgctaacgttaatccaagaatataatacaacaggcaagcttttacactttctggatcaagacactcaatgacttaccatgagaatatccggagtcctccttctagtgctcctaatactcctagaccctgttatggcaatgttagtacgccacacgagagtatccct

SEQ ID NO: 237685 - DNA, 443 bp, Glycine max
aaaactctaaagcctatgttcaactatagagtttttaaaaccgtcaaggcttacattatgcttgttgcgtaaatgccggggcgttcctccactcgccaatttcccagctggaaatcatgagagcatggtcgtaccaaatccaaagtactcggaatatcatcttcgcatatcgcgaacgcttgacctttgtctcccgaacccgcacttataaagcttctacttatgtggcagggcgggcttccttcaccttcttgtctccaacgcgaactttgaccattgttcttcctttccgcaatgcttcttttcatgtctgcctgagcgggcttatagcctaaaccatacttcccacgagtttcttgagtatttatcaggctagttatgccaccgttagtttttctaaacccatctcgggttcaaaaccgttccccaacataactcgggcc

SEQ ID NO: 237686 - DNA, 332 bp, Glycine max
gctgcacagagatcaaagtcatagactcatcacaaaaccttctcacaagtagcataccaaggagctttggcaacctttcaaatctccaagagctctcaactagtgtcaatcagctctcaagtataatccctcctgagatttcaaattgcacttctttgaatcaactggaacctgacaacaatgctctctctggtgagattcctgatcttattggcaacatgaaagacttaactcttttccttgcatggaagaataagttaacaggacacattccatatagtcgttctgagtgccaagaactcgaggcatatgatcctctcttacacaacttg

SEQ ID NO: 237687 - DNA, 472 bp, Glycine max
  unsure (1)..(472): unsure at all n locations
ctcaagcttatatattctgctcaacaactgtgtacattgcaactgtnttctattgtaacccagcttatttctttcgtaccaaatagttggtgctaccgcaagttgcaaatntaaagctctaccatcatcatccagtagtcccaaccaagcataagaaatccagagcttaaaattatcaacacttatcctcactaattcaactttagatcttgctgcccataacattaatntaatgcatatctaaaatatcaccaaggtatttaaaataataataacaatgttgattaatatttataatatatatatagcattaatattataatattcataagatataaagtaaaaataatacagggttgaaaaatattgacccactccacaattgatcaaaggcacaaaactgaccatagctatgctgaaatatggatattaaaagaaccattgcaatactaagaatgtaagataaagatat

SEQ ID NO: 237688 - DNA, 169 bp, Glycine max
ttagtgcatgaaaaagatatcaaggaaaggcggaaggcgtatttccacaacttatttaattatggatatggatatgaccctagcagtctagacacaagaagaggaccggaactataagtattatcgcccgattcacaaacaggaaggaaaggaagcactgaaaagaatg

SEQ ID NO: 237689 - DNA, 365 bp, Glycine max
  unsure (1)..(365): unsure at all n locations
cgctgaatacaaagcacaaaggccatcaatttcttctcataaacagattttgccagaatcccatcagataaagctgtactgaagaaagcaataagtcctcctctgctgcattaaaacaacacctatacctctggcaagcgcatcacacttaactttaaataggtaataaaaatttggaagaattagcacagggggagaagtcatgatcctcttcatctcctcaaaagccttgacagcttctattccccaagagaaaatggcttacacaattccgtgagaggctttgctatnttaccataatcctggaataaccttctataataccctgtgagacccaaaaaccacgaaccccttacattctttgg

SEQ ID NO: 237690 - DNA, 371 bp, Glycine max
gacctctaagcactgagctgcagctgtcagctagctttcttctggtttatttgtaaattctaaaactaaactttttagttggatctatacaattcacctagcagttgtaaaaagtccagggggctgaaaaaggatgattatataatgcacaatattgaaaatattgttgtatgattgtgctaatcctaattgtattgagaatattgctacatgattgtgctgatcttaattgcatctatttgtattaattctgattgtatgtattaattcttattgcattttaattctattttgtatcttgatctctcgattattgagaccacttatttttaagatagatagttgtatcacatatgtcacgaaaaactata

SEQ ID NO: 237691 - DNA, 252 bp, Glycine max
  unsure (1)..(252): unsure at all n locations
agatactcagcttgntacccatgttgaattgcttacatagagctgttcatatcaccactaattgttctcctcttgaagntgtttatggctntaacccactaactcctcttgatcttttgcttatgcctaatgtttctgtttttaagcataaagaaggtcaagcaaaggcggactatgtgaagaagcttcatgagagagtcaaagatcaaattgagaggacaaataatagctatgcctaacaatccaccaaag

SEQ ID NO: 237692 - DNA, 371 bp, Glycine max
agctagttgtactagcatatataaagagttgatcatctgcttctgctctagggagtcatggcaatcctttggcaggaaaaactctaacacaaaatcagcggagtcactcaggagtggaatggccaccgcagcatgcaagccaaacatgttagcatggtgcgccagaggatattccgccttgctgaaggcagttatgtcatttgcaaaacaaggtttggtggttgtgaaagctgtcccaactactccttgcccccccaaaaggtgacactcagagcacgcttccaggaaacccagtacctctacatccgccacaaaactagcaagatccacaatcgacacataattctcatcgtttgaatgcccacatccac

SEQ ID NO: 237693 - DNA, 496 bp, Glycine max
  unsure (1)..(496): unsure at all n locations
actcaagctgaatcttaaaatggccttaggttcttctctgtgntgtagacccactgcaggacaaatccgaagtttaattttcacaagtacatgattcgtgccctcgaagatgatttcaagcaagttgttggtataaggtaagtgcttttgtattattgcttctatgcatatcacacatatacatcatttaattgccaagaaaactttatcccattggccatttgtgtcaattgtgtaaagttattgattcgttgtgataacaattatattttgtggttgcagttggtatctttggctctttgtggttatcttcttgttacttaatatcaatggtatgctacaagatatgaagttatgccttatgtatgtcatcatttaattggttctgcctaggctgacactactttgcagatcaagactggcatctanaacccagtttaatgttntttcttgtgccttgtgatcttgtntataggacatggagcttatagatctt

SEQ ID NO: 237694 - DNA, 349 bp, Glycine max
  unsure (1)..(349): unsure at all n locations
agcttctatttcttctttggtggaccttatgggtcataantttggcacaatcagtcagacaatctgtttcttgattgttctttctgttttacttcattcatttttccccccctaaaaccttttttttcctggcaggaatctatattggccatcagctttagcaacaaggcattcagatatgtatgttcatgaggaactggtcaagctgtaaggatatgggatttgcaaaggaaacgctgtattaaatggctcaagggtcatactaatactgtcacaggtgtaatgtaccatcgtaaggatgaacatttggcatctatcagacttagtggagacctaatgcttcataacc

SEQ ID NO: 237695 - DNA, 423 bp, Glycine max
  unsure (1)..(423): unsure at all n locations
gcatacaaagagacattgacgacaagaagccggaaccaatgttgacaaatgttgaagcgatgagtggatcaactttgtacatacaaagagatctcaaaattttgaatgggcaaatcacaatcctgcatagtataatcaacctctactctcccaattccaaactctatattcaacctctttctccttaccattgaattagcagagcgtcacttaagagttgatgaaacatgagagagagtgtggtttgtacaaactgttacgtgtgttggtcatggaagaacacaatgagaaggggtgtggcttacacgttcctganaacgacacgcagtagttgaggaaaaaaacgataaatatattnttgattctcataataaaatttagtatgtttttgtcttacaaatcgaataatgaatgattatttta

SEQ ID NO: 237696 - DNA, 357 bp, Glycine max
  unsure (1)..(357): unsure at all n locations
agctaggatagattcaatgtatctagggatctttgtttantcatttaagctacaaaatagaacacacaagcatgattgatcacggaaacatctttatatacatcagctgtgttgttagaaagacccaacatctttacctactggtgccaatcttacttgcatttttactgtttttagcctagacttagtttaattatgttctaaatcatcaattatcaatgtttctttcaacaatgccttatttatgaatttaactctgtctaagattagttccctgagttcgatactcacaattcattgttttaattttaaatactggacgatccggtgtcgctttcagcaaaccagatttccttg

SEQ ID NO: 237697 - DNA, 418 bp, Glycine max
  unsure (1)..(418): unsure at all n locations
cactataaaactcagctgggcttccaccattntatttattggtgatattcatatgttctctcagatcaattcaaaagaaanatgtccagattatttatgacattattcttcacttatgcagctcaaatcataatatatatatatattacaatgcattttctacaagaattttagctagctaagcataaaaaagggaaaggcatatattttgtctgacatatatactttggaaccataaagatattaaggcatgtatctgatatgcttggctctgatcaacattntgatcccatttttgcatcccaacaactcgaaacagtatcaaagctctaactagtagtttgtggatgctagtatctattgctgccaaaataatggtagaatcaacatggatatgataataatatataatatctac

SEQ ID NO: 237698 - DNA, 169 bp, Glycine max
tatttttcttcttcatgacaaagcttgatattgattgaaatattttgtaaaacttcttaggctgttgcgaactggccaaaggaaaaccataaactgtctattcatactcctgtcaggtacctctatatttatctgtgtcacattaattccatgatgacaaaatataatc

SEQ ID NO: 237699 - DNA, 481 bp, Glycine max
  unsure (1)..(481): unsure at all n locations
cggtcgcacatcgttcgtgtgtatgatattcactccacaaggtttgaagtagaggagaccttcaaccctataacgcaacgtggcggacaaaagcgggcagttaacttgaatggtcattattgtcaatgcggaaggtattttgcgcttcactatccatgttcacacattattgcagcttgtggttacgtgagcatgaactactaccaatatatagatgttgtttacatgaatgagcacatcttanaagcatactccgcacagtggtggcctcttggaaatgaagcggcaattcctccttctgatgaggcatggacactaatccctgacccaactgcaattcgtgcgaaagggccgccaaaatcaacaacgataatgaatgagatggattggctcgaaccatctgaacaccgaccaacatgtagtacatgtggagcagaacgggacaatatgccccgatgtccaatgcaatctgaccgtggga

SEQ ID NO: 237700 - DNA, 368 bp, Glycine max
gttgctcaattagctattgagctttggtcacaatacatggaaacacgtgaagctgtgggggtaccgaaaattcgtcatgaccggacaccaggaggttaagggacacgatgcttcaatgttgttaccatgagtcaacaagatgtgttacaggcgcatttgtatatcttgaataacacacaggaggttgttccatacatacaaactcacaaacaatatctgacatctattaacccaaaattgaacatgatgaaattgttacaagagcataatagaactctcatgaactggtttaaagaaacaataatgactgatgacaatgctttcaaacattaagattgttggtatcggtccgaatctaaatgccctac

SEQ ID NO: 237701 - DNA, 436 bp, Glycine max
  unsure (1)..(436): unsure at all n locations
accttatacactcaacttctagcatattagcaattctaacatactcattgacactatttatangggatctatatgccaatatacaaaatgttgcagtgcacttctgcaatggtgaaagaccctttctaccatatgcatcagatctcatttggaaatacagatcataattactaaaaacgtctacaaatcaatagaacaacagctttcgcattcagaaccttcgagatttcacatgattcaatgttctttatagcagatcgtcacaaaagttattgtaattttttgttactctcgtccaaaaatggtttcttgcttgaccatcaccgacaattggattcattaagacattaagctatanactaatgaaatgtgtcctcttcaatagaaaagaaaacttgtgatttattttttgtacaaatctctctttgttcctctg

SEQ ID NO: 237702 - DNA, 412 bp, Glycine max
  unsure (1)..(412): unsure at all n locations
gtcacctgcngcatcaagcttacggatttggtcttcaccgacgaaatgtatcaagtgggtatggaaaaaggcaaatctgatcatcctgcattgatgaatacgaaaattggggccaatgaaaaggatgagaatgagggagaaacctttgctatgactgccattcctacacggtcaaatttcctgtcagcccaacaatgtcattactcagccaataacagttcctctcacccaataatccacaaaggccatccccaatcatccacaaagcctgcccgctgcacatccagtgccaaaacaccaaccaaaaaggaattntgtagcaaaaagcctgtaggattcaccccaaattctagtgtcatatgccaacttgctcttatatctacttgataatgcaatggaagccataacccct

SEQ ID NO: 237703 - DNA, 461 bp, Glycine max
  unsure (1)..(461): unsure at all n locations
tataagctngaaccatttatcaataaagacaagttgagtttttattcagaaaatagagttnatctnctttatcttagtgagagtgaatctcctaaattcttgagtgattcaagaacaccttggctgtatcaaaggactttcacaacctttgtgtgttgccctcgctggaaagagtgattctttccttcctttcatcatcacccttgttctttcaaaccacaattccagaaaatccacctctgcccagaattatctcgtggccataactcccattntacgcactcaaattaagtgattcttgagcctaaattgaatttcaaaacgagaacctttcacctcgtttggaatcacctcanttggagccctgtaacttcagttattgccatttctatatntctgtccagccaccacttaacctacgtttaccatgccattcatcctgttatgccaagaccacctta

SEQ ID NO: 237704 - DNA, 295 bp, Glycine max
  unsure (1)..(295): unsure at all n locations
ancttgtattcttagcatatgcttttgcaaatttatatcatgactttgtaacattaactatatgaaagcatctatattgtgcagcaattcccgtttctgttgatgacatatcgaaatcaatggaacagatagatatcgcagatatagagcccccgcctctaattcgagaaaactctggctttagctctntgttgccacgtccagattgacagcttttggtgtagatttgatccaccggtattcttacccacatccatggtgttaccaactcacatcacttaaatgttatcatgga

SEQ ID NO: 237705 - DNA, 493 bp, Glycine max
  unsure (1)..(493): unsure at all n locations
ctcagcttgaggattatgggatacccatcacatgtggtactaggtggctgtctgtctatgatgcataacaagtcttccacatccacaatgcgcgcataaacccaccatcccctgttgcccacctccatctgagctcacgtattcccacgtagcccatatcctcggttctctcaacaccgggtccccatcaatcctcccaagcttccacaacatccaatcaaaacaacattcaaacagcacaagctatcacagccaagcaaaacagggcaaaggtagaaaactctgctcaacacaccaaccataatcacagcttttctcactcaaagaccccagtaacaattccttcgatccaattcgttaaccgttggatcgactctncaaatctactggaagtctatagtgcataagcctacattgtgaccgttgggatctactagcanacatctagaactcattctgcactactctnttcacaaccagcaganacatagca

SEQ ID NO: 237706 - DNA, 454 bp, Glycine max
  unsure (1)..(454): unsure at all n locations
gtcacctgcggcatgcaagcttcaggttgctcattgatgtctagatgctttttataaaggcagagatctgtatagtgatctgcagaagaacatataccatagactcttgcaacaagtgtagatttctgattcatggcaagctgagttactaggttgaccaaggcatcaactttcagtagatgaagatgaatctgtgcccacctcatggactcctctaagaataatagcatcatttcttgcactgaattgttgggagttggaagccatcttctcaatcaaattcctagcctcagtaggggtcatatcaccaagggctccaccactggcagcatcaatcatactcctctccatgttgctaagtccctcatagaaatattgaagaaagagtcgctcagaaatctggtggtgaggatagctagcacacaatttattgaatcttntccagtactcatac

SEQ ID NO: 237707 - DNA, 488 bp, Glycine max
  unsure (1)..(488): unsure at all n locations
ttcaccttctcgctaagccaatctgctggcttagcgagcgtccgctaagcacaacactcatgggctaagcgtgaggaagactttggaagaagatgagctgtacaggttcgctaagcgcactgcttcatctcactaatcacatcgcttcagtccatccgctaagcgagaaaggcacgcgctaagccaaaattcgctaatatgcactaagcggtccataattgcgctaagcgcacgagcacgaacaaggccacctatttaagtttgaaattagattttagagagagagagagagtttggattgggattcagagctntgcatgtctagagattctagagagagaaaggtccaagttccaaagagttctgagagaatttgatgtgtgaagatctgcagagactagagcttgaagcaggagccacattgagagcttgagatgagtttgcgagtgatcgtgagatcctagacgtgaacgagacatcctcaccac

SEQ ID NO: 237708 - DNA, 341 bp, Glycine max
gcttatatcctttttcaaagagcataaagtttattccaacttatgctttgcctgaaaaacaaaatgaaaaataaatcagaactgggttgcctcccaggaagcgctctttttacgtcattagcttgacgcatatacctcaatggctgatcaaatgcaagatggttgttggctttttaaactcttcaccatggtacaatttcaatctttgaccattcaccacccatgttctgtcggggtcctgtgattgtgggtcatacagctctattgcattctaagaccgaactttcttaatgacaaaaggtccaaaccatcttgacttcagcttaccaggaaataatttc

SEQ ID NO: 237709 - DNA, 502 bp, Glycine max
  unsure (1)..(502): unsure at all n locations
ntatggaatttgcaatgtgtagctgcacatgaaagaaatttttctttcctcgtcagtcttttcttcttctttttttcgttatgtaagtgtggtgtttatagatctcttctaggtttttgatgtaaccacttaatcccactcatccacctatttctcttcactattcactatctatcaattacacaactaacttatctcttttatatttatttaatattttaaaaagattaaaatatctttctggataaaattggttattcacagttgtccctttttactggtgtcttatcaaataatataataatgatgattattatggtaagagacaagtaaagaactgaatcatatttattcaggaacccaatatgtggtgatgatcaagtagaaactctttgaagttgtcgagcaaatgataggctcgagttcaggtgttgaaatacatttccaggtagatttgggcttctagcaagtgtcaagttggatttgagattgaatggttgtg

SEQ ID NO: 237710 - DNA, 393 bp, Glycine max
agcttctgaggaatatggccaattatcctttgttataagaagaattgttattggttaagagagtcttcatcaagctataaagatgcttatatgtcattgaatcttccactggttttctctccatatgtaagattggaacttctgaggtgggacccacttcacacgggtctagattttcaagagatgaaataggattgaactattcccctgtgtgctactattctttctggaaactttttagatgcattatagggggttgcagccttgtttttattagccacttaattgcacttcttagcttgattagtaaagatgcatattatgtgagtatctctctcctttcatcaatttattacgtgtggagatttgtttctctctttatattcaggtata

SEQ ID NO: 237711 - DNA, 423 bp, Glycine max
  unsure (1)..(423): unsure at all n locations
gctngggtagagaatgatttgnggagtcagaagtggtcataacatatttcttataactcgtgaagttagtagaatttggtggtttgtcaagaacttgatgtagcttcaatggtagagacaaaccagtatatcctcatacgtcttatctctatttcctttcttttttctttaattgacctgaggattgaatttacttttagacattagaaaatatattttgcttatcaaatcatctttaattatctgactatgttttcaaaattttgttatctgttttacaanaattttcttttcaatgatcactctatttgatttagaaaaggctctaaaaatttctaaaatcataattcaatcccttctcttgtgatattattcttttatgtcattgctctttctctctgacacatgttgacaaactcactt

SEQ ID NO: 237712 - DNA, 202 bp, Glycine max
tgaacctcctccataaacaaacatcaacgtaaattatagcagcttatgccctatttctacaaacgtttcttgcacaaaatttaccgaaaaatgcaccctatacatcaggcacttcgtaccacatattacaccaccttcaggtggattgtactacatacacaatcttttggtaacaacaacatgctctcaagcttagggccca

SEQ ID NO: 237713 - DNA, 410 bp, Glycine max
  unsure (1)..(410): unsure at all n locations
atagaacacncaagcntctagccnaatagacctaccntgacagaaatgcgttgatattcctttagagccttgttttcctttccttgatctgaaactcactacaagccttaagtgaaagaccatgatatcaccatatccttaaagaatttaggagctttggaattgctttgggaataagtgtgacgcgtttcgattcattggataacacgttttgtaggccatacttcatgatatantttgagccatacttgatgtacattgcatatatggtaaatggtggacatgctgaatatgatgttgtttctcaaacgctacagagtataaaataaatcganataataaagaatagcagcaagtaagtgaataagatctaaatgacaaataatgatagactcttggtctactcttat

SEQ ID NO: 237714 - DNA, 392 bp, Glycine max
accccaagacactaacttaataatatagataaaccagcgctcaaacactgtttagctcctactatccttataactctaacccttaaacaatgtcattttaaattggcgccattaaagtgattatgttaaaagataatatgatactaaagaatcacatcattgcctcatatgccattcatgtagacatatgtgtcacacacatatcacatgttattatgttcacacaaagattaaaatgacaataattctacaaaaattaacatgacaatctccaacattgtacgagctaaaccaactttaaatatggggattctcgagatattttctcacaatctttattgccgctgaaggaatacttcgaaatataaaaagatataatgtcttaccggcaa

SEQ ID NO: 237715 - DNA, 523 bp, Glycine max
  unsure (1)..(523): unsure at all n locations
tacgtgacactatataaactcacgcgctgatatgtatatattgaataacagtaatggaggttgcctttcttttatgtcacgaaggtttagtgaaggaaattaatccaaaaatgtccaagagcagggtgttgaaagagcataacaagactttcctaaattggtttaaagatacaatctttgctgacgataatgcttttgaaacgttaagaaaattagcagatgggccgaaaagaaattntataacttggcaaggatacaatataaacaaatattcaatctacacaaaaatacatgacatcaagagtacaatgtaaaacagtggggttagtctaaaggttgaatctcaacactatgtgagtgtacatgatgacaatcctcgtttagcttccatcccttactatggagtcattgaagacatttgggagtttaattatgtcaaatctcctgttgtgttataagtgaagtgggtgaaaacaatatggtgtggaatcgatgattcagattaaatggtaattgaaaactc

SEQ ID NO: 237716 - DNA, 347 bp, Glycine max
cctgcggcagcaagcttcgactcaaccacttacaggtgctttttctcttttttggattcgaggggcctatgcaggttgaaagtcttggaggaaagaagtattcctattgtgctgtggatgatttctccacacttacctgggtaaattttatcagagagaaatcataaacctttgaagtattcaaagagttgagtctaagacttcaaagagagaaagactgtgtcatcaagagaatcatgagtgaccatggcagagaatttgatacagcaggttcactgaattctgcacatctgaaggcatcactcatgagttctttgcagccattacaccacatcatgaatgggata

SEQ ID NO: 237717 - DNA, 468 bp, Glycine max
  unsure (1)..(468): unsure at all n locations
cggacctatgatactcagcttttgagtggaagaattgcatttcgaagttttgtttaagccctgtgcaagtagtccctaaaaagggtggaataacactgataaagaatgacaagaatgagctgattcccacaaggaccatgacccggtggagaatgtgtatcaattatcgccttctcaacaaggcaacaaggaaacaccattttcctctccccttcatagatcaaatactngagaggttagccggccaagccttctatttctttcttgatagatactcaaggtataattaaattcttgttaatccgaaggatcaagagaaaacaaccttcaattgcccatttggagtctttacctatcggagaatgccctctcgaatttgaatgcactagccacattccaaaggtgcatgaatgccatcatctctagcatggtagaaaatgcatagaggtacttatggatgatttcctt

SEQ ID NO: 237718 - DNA, 244 bp, Glycine max
  unsure (1)..(244): unsure at all n locations
ttcatccttaccctaagataaatactcacaacatcttacttgttcgttagcaagcataaccaattgaatctagtgtgagaatcaacacaggtcacataatacttataaatcgaactagaataatatgttgtaaggcccccaatatcattnaaagaagtcataatgtatttaattttgtcctcacaaggagaaagaatacaaatagactttgccaaatatcatgtgttcactaatcataaaaaaa

SEQ ID NO: 237719 - DNA, 360 bp, Glycine max
tcagcttgtgtacacatctaggcctttgttggtgtcttgttttatcttcaaggtgtctcctatccgacacccgcgaggggaggaatgcatgatgcttagctacgctgatcgggactggaatacggatgatggccctacggcttctattgatgcaaaaggttggaacacgatcttttcgagaaatgtcacatatttggctatgtaacgatttcgaataggctcaacccaaactctacaagtctaatatcctccttaacgatgaatgagatatgttcggttatggatagccaaatgacatagtctactttggtatgcattcatccaaagtacttatgtcctttacgcgaatatagacaatat

SEQ ID NO: 237720 - DNA, 440 bp, Glycine max
cgatcaacaccaatactctctgttctatcaagtcattggcttttttataatcaacaaacaatttgatgtttgagtttgcacactaactaattatgtgatcttcttatagacggatttacaatcaacacttagtcttttctctcaatatgttcaaagtgttttgagagctcttgaactctatgagaatatatagaaaagctctttacaaaaagaaatacagaatgcttctacacaaggttcgtagtgttgttcttcacaggttctagtatttatagctctcattttcaagcgttcgttgtctcacaacgggtaaatttcttcactcgttcttcatttgatgataatgagcattgagatatttaatgcttgcattaaatgcacgtcctttctttcttcatgtagagagttcactcttgctggcttctgtgttgagcacctga

SEQ ID NO: 237721 - DNA, 210 bp, Glycine max
  unsure (1)..(210): unsure at all n locations
tttccacccctaatcacgtgagaaatatgataatctaggcaaaggtgctcctattggaggcgtgatcctgagcagtgccccttctaagtgaactatacaataggtagcgccaccctatgcatctccaccgaggaggcaccttatgcaactccgntaaggagagtccatactgaatcatttctcctgtgcattctttcccaacgctgatgc

SEQ ID NO: 237722 - DNA, 193 bp, Glycine max
ctcattcaagtcattcacaaacactcattttatatcaagcacaacacttaatatcacatctggaatctaaatgactgaaatataaatgactgaaacataaatcaactaaataactaataactaaatcgttcatgatttgtacaaattaaaccaaaaccaaatttaaacattctgctcatactgtggctgatct

SEQ ID NO: 237723 - DNA, 472 bp, Glycine max
  unsure (1)..(472): unsure at all n locations
acgttcaataactgctagtaatcgattactatccaagngtaatctattacacaatttaaaatntgaattcaaatttctaatagctgttntaaatagtttcaactgctggtaattgattacaatacttatgtaatcaattacatgctttcaaaagtattcaaaatcattttaaaagcatttcatgaagcattttggccactagtaatcgattacatcctctggtaatcgattaccagagagtaaatctctcgtaaaaacattttaacttatattctttggccaaacctcttgttgtctcaacttggaattcccttcctaagtctctagagattatcttgatcatatatcttgaatntcttggattcttgtgttgaattaaacttgagaagcgcagcatgatcctcttgaataaacttgagaacacatggcctttggcatatcaaacatcaaaagccttgtttacaattatctt

SEQ ID NO: 237724 - DNA, 493 bp, Glycine max
  unsure (1)..(493): unsure at all n locations
tgagaaaaatttaagaaaataagtactagctcaaagtggtaatatttttctataattngaaaagtataatgtacattaacattagtgacaaaatagtaaatggagtagttatacccgatccaagaaatatttagcaacattgggaagattatgtaattccttttttgtcttgtatgtttcttgaacagcaggatctttccagatttcatctaccataggagcatactcacgcgttgcagcagggaagaaggcctccaaatcttcgatggccataatatccagtaatcagtcagaaaagtgcttgaatctttgattatagagtaaacactcaccttgttttcgtcagctgctgtctctgctaaacttattatacaattagattcattcacataactctagccttcgctttntattatacaattagagacaaaaatntacgcacaatatatatatatatatatatatatatatatatatatagacacttgtcata

SEQ ID NO: 237725 - DNA, 368 bp, Glycine max
  unsure (1)..(368): unsure at all n locations
tgcagctttaacttatacaagaagaagctctgttacccttgtttacaagtgttttcanatatcttaagaaggggggttgaattaagatattgcaaactatttccccaattaaaattctatttcactttctattcaagttacaaattcccttaaaaatgaactcttaaataatgagtcagatagaacaatctgaatatgaccttataagtataataaataaaagagttcaagggaagagaaagcgccaactcggatttatactgtgtcggccacacccttgtgcctacgtccattccccaagccgcttgagagttccactatcttgagttcagaattctcttacaacaagagaccctcggtcttctaat

SEQ ID NO: 237726 - DNA, 362 bp, Glycine max
  unsure (1)..(362): unsure at all n locations
cttatacaagaatgaagctcttataccactagttatattagttcctcagatatcttatgaaagggggggggttgaattaagatatcacaatctctttgttaatacaaactcttatttcgatgttaacccatatcccaagaattcttacaaaaatgaactcctaaataactatgcaaattaatcttactgcatagaaataataagcactaagcagtatacgctataagagtctatgggaagaaagattgcaactcagattatactgattgtccacacccttgtgcgtacagnccccaagcaacccgttagagatgtacactatcttgcataagcccattacaagatctgaaccacacaatgac

SEQ ID NO: 237727 - DNA, 415 bp, Glycine max
tctccccctatttgctataaatagggggagaagtgaagaagtttatgtgttagcctcttaggcacttctctctctctcaaaattgctgaggaaaattatttccgtgaagaaaatccaagccgaggcgcttccgtaacgtttccgtgagtaattacgcgaagattctcgaccgttcttcaagattcatctttcgttcttcattttcttcagtcttcaacgggtaagtacctcataccgagcttttcaattcattctatgtacccgtggtggttcacattttggttcatgtatttttattctcgttttcattcgctttttatacccccttttgacgtgcttaaagccattatttaagtcatttctcgcgtaatctcaaaataaaatagattttcaccgatcgtttgaattgtatcat

SEQ ID NO: 237728 - DNA, 359 bp, Glycine max
  unsure (1)..(359): unsure at all n locations
agctnntagtgttagtgtcaagtcttaaggtttattgtgcantgtcttatccttaaggntnaagatttacggtgtaagggttatggtttacaatttataggtaatggtttagggtcaagtcttaccgtttagggtttaagttctacggtttagggttgaaataaaattactccagactcatatgcatctaatgaaataaaattacatttataagttgaaataaatggagtggatcaagcccggttgagtgactttagttatccataagtaaaccttaataaactgaataccatacattacgtcgtgaaattcaatgagaaatatcaaccaaatattttaacggagacatgcacatcatt

SEQ ID NO: 237729 - DNA, 451 bp, Glycine max
  unsure (1)..(451): unsure at all n locations
ntctctttngttcaactatctcatcctcctttgtaggtgtagaatgtatctngagaggngtcgcaacctaccctttggcgggagggcaacgcgtgactcgcgggtgcgtgttccaagaaaggaatacgtgtggagtcgccaccaacgtttatttgaggaaaatgtcggaaaaaacgaataagacgtggtctacgaactttaaatgaaaggttcgggagttgtatttacgcacggngaaggtattagcaccccacacgtccgtcacaagggatgacaacctttaatcaaatgtgcaaatatgacttcaatttatgttatcttccctctttacgttcttatgtatntttatgcctttntatatttnntgctttttgtggtcgacaagggtgtttccctttgctcctacgtattcctcaattgtgatgagaaaatcagacctacgtagttcttt

SEQ ID NO: 237730 - DNA, 506 bp, Glycine max
  unsure (1)..(506): unsure at all n locations
gaccataaatactcagctaccaaaaaaggtgtcttcgtttctgaagattttgtttgtacaaatntaacaccaaccaaatagcccttgaactgatactcctcctctgccctnctcatcaacccattcaagccttcagcaacaatattaaagagaaagggagctaaaggatccccttggcgaaggcccctttgaggaagaaattctaaagtctgacttgcattcaccaaaacagaaatagacgcggatttgacacatccttcaatccacttaacccagagcggactgaaacctgttctcctcaggatataaaacaaaatacttcaagataccgaatcatatgccttttcaagtcaaccttgaaactaggcatgatcgattgcttctcttaacttcatcaataacctcatgtgctatgactacactatgtagaaagttgcttccctcaatgaacgcagattgagactcattaatgatagacagcatcaccttctttcatctcattggca

SEQ ID NO: 237731 - DNA, 338 bp, Glycine max
  unsure (1)..(338): unsure at all n locations
cagcttgttggaaagagagtatttttcttgtcttgtttcccttgtgaganaggaatactgccttctacacaatgaccaaaatcttaagagctcctataagcatcttcactcttcaagatggagatgttatgcttcactctagatcttattcgacaacacattgtccagttctactccaatttatttgcttctggcaatgactgccgaaccaattaattaatctctcctttaattcagaaacctgtttctaaagaagataatgctatgctctctaatcggctttctctggaaggaaagtaaagctgcagttttttccatgagttactttagtgctcctg

SEQ ID NO: 237732 - DNA, 407 bp, Glycine max
  unsure (1)..(407): unsure at all n locations
ctccaaggagccaagacagagcagggccatcagaattacaatcattttcacaatctctgaaatctaaactgaatgctgtatcaacaacgtagtggactatcctctgtcacaagtgggtgtggcgcagtacaattgacgagttctcccattgcaattagaacttctatttttcttggctttcaaatacaaggagtcaatttccaagagcacaagagggtggaaggagagatggttctctccgaacaacactatgtctgaccttggatctgaagttaggcgagaagttaatgcanggattgcaactgtgtcacgcatgatggaacgcctggagaccagcgacaataatagaagcaatagccattctgcctccagtaatatagatgatggctcagttcaggaatataatg

SEQ ID NO: 237733 - DNA, 451 bp, Glycine max
  unsure (1)..(451): unsure at all n locations
agcttgtgacggatgttgcatttgaataaaatatatctaaaattaatccttattttatctattctattcttataatgtttattacgccgattttttgaatagcttttcataaagcctatattatttttcatataaaaaaatattacattgtcttttgcacatattgaaaataaaattgaatcgccactgatgatatatgagaaaaatatatttatattagaatatgaaaaattattttctaacatagttataacttccatttttatttttacgtactttttatcttaataattttgaatttaaaaaaatatttctaataattctaaaatcgaaacaaacgtatgttcaaatttacttaactganatatcctaattaatatatcttcaaaatgcatttaatggtagtatataccttacaacanataccattaaaatacaagtcataactacc

SEQ ID NO: 237734 - DNA, 496 bp, Glycine max
  unsure (1)..(496): unsure at all n locations
tggagttatctatttggtttatggtgtgagagctttatatggtgtgaaagctcgccctgctgaaggattgcttgtaactagaatgccaagaagcattataagtagaaagtatggcaattactctattgtaccatatctgacagtagtagacaccaataattaacagtttaatagaatatcactggtcttaatcctaacttaatctttatatttttctgtcaatgcatagcatgccaatgagacgcatataactaatcaacacacatataacacataacacataagagcagaggcaaggaggcaagatgaagaggtggcagatagccagaagcaatagaagttgcgcttataacacataaatgaatantgttaggtaatgataaatacatattaatacaaatatatttaattgacatggngttaggtgaattgataaactacatnttttcccttaattagaaacatcaancaatcaacaccataaagataaccatta

SEQ ID NO: 237735 - DNA, 241 bp, Glycine max
acctctaaacgactgcagctgcaagcttaggaaacaacacactaatcggtattcatcccattgatcgctctgaaaaacaaaaaatgtaactcttcaatggtccctgactctttcaaactggtttagagccctctaaaaaaatataactctccttaaaggtcctcttggccagacatgaagagcccatacaaacaaggcttagatctgcctttcaacaaagcagttttccaaacaatcttat

SEQ ID NO: 237736 - DNA, 493 bp, Glycine max
  unsure (1)..(493): unsure at all n locations
tctaagaatagccttgataacactaacagtatacatatatatcttcttctaacgagatggtgccctccgcaaactggagaatattcactgggaccttattctctcctaccaaagagctctgaaataagtttctagacactgcttccctcatcaaacctgttaacccttcagcaaccaagacaaataataaaggggccaagggatcccctngtctcaatcctcattgaggcttaaattcctcagtcggactttcatttacaaggatggatattgaagctgatgaaaggaagcctttaacccaaccaatccagccttcatggaaccccattcttctcatcatataaaataggaattgccaggacacagagtcataagctttttcgaagccactttaaacaccgagctagattctttgtgctcctagtcttctcaacaacctcactagcaatcaagactccatgtaccagctgtctatccttaacaaatgctgact

SEQ ID NO: 237737 - DNA, 461 bp, Glycine max
  unsure (1)..(461): unsure at all n locations
cggaccttaatcacctgaggcatgcagcttattgagaaaaatgaagctcttttttatctttttaagactactcatatactccaatttagaattatatagtgtcttatgggccttgcaataggtagatatgttaagtaactacaaaatctgaaaataaataataattattaattaagctcaattaattgcctaaaataaaaactaaactaaggtgaaaaaataagaatataagaaaggtaaaaaagttaagaaaaatacaaaaatactaaactattcaatcaggggaataacaaattcataatacaagtacttgaaaccatgcgaagcaccttcaaattgagttgaatatgtntgtaaatatgattataagtccatcggtggaaataaatttgagcctgtgattattagcataacattgtatggtaagtatatatactgaatttttatatattttgtacatg

SEQ ID NO: 237738 - DNA, 253 bp, Glycine max
aggagagaaaacacaagcgcggttacgctaccacaacaaaaaaaaacctctgtcacaattaaagagacaagcccctaacaaaaaacaactggtgaaaaaaggcaaggcctcaaaagagcacaatactttagaattatacatcacccaaaaaaaaaaaacccataaatgatcaagcaaactggacacacccgtgacagttacaaacaaattataagataacacgacaaaaatgacattaccccagcaccataaa

SEQ ID NO: 237739 - DNA, 419 bp, Glycine max
gaaactcaagctgagacacacttataatttatatcattcctagagaaattttgtgaaaaatcccgggtctcaccgaaaactaaatactctaattaaatgctatagtgcatgattgaaaaaaatctatttttatcacatgaactttgtcataattaattatattttttatgataaaactaaacccaaaaattaataatataaacaaagagagaattcatacactgtcccacaacatattaatgcaatctaaatctttttaatagatttgaactatcaacagtaacccacaacaaacaagattaggttcttatacaagacgtggaaatcatgttgatctctcacgagggaaaaaatatatgaataatctattaaattgatgatttacctctataaatgatacgactgaagcacaagaaacg

SEQ ID NO: 237740 - DNA, 333 bp, Glycine max
  unsure (1)..(333): unsure at all n locations
agcttgccatccatctcgcccaggcgagctatgttgcttcctctagaaggcaccgtcttctggaggaacttcctggcaggcccaaatgggcctggttgctatttgcacccacatgtttactaaatacactcctaccccttttttgctgattcttttttcgtaacgttacggaactttacgaatnttacaactatactcgttctctttccataatgttacggaaccttatggattacgtaattatccctttttttggcttccagaatgttacggaacttcacgaattgtgcattaacacttcctttngacttccggcatgtcacaaaactttat

SEQ ID NO: 237741 - DNA, 303 bp, Glycine max
  unsure (1)..(303): unsure at all n locations
tggcgaaatagccatgtttgggtgagttatgacatacccattcttgtttagggntnttgcgatgatgtttgtgatgtttatatgctgaaattgctgatggaaatctgttagagatgaagggtagaactaacccaaggttataaagtgagaatgtgacgttatgagtggaaaaagagtgagactctgagagttggaaggctaagtctgaattctgtggtaaatggaggttagagtgagttaatactagcttgaaatgtcatttacaacatgtgagaaaggttaggctgagctagagagaaaaac

SEQ ID NO: 237742 - DNA, 364 bp, Glycine max
  unsure (1)..(364): unsure at all n locations
agcttaactccaacaccgccaacaagcagccgatttctagtgcatatctctanaacagcctcatctcgtgtggaccccacaacttcacaagtgctttgtcgacactatcacatagctcaacagaaaaaacgacgctcccaagaccataatgcaactcatgagcatcaatgacactatcagtgaagttgcattcatcgtggatagaaagaaacatacaacaagaagttgtagaggaaattatgtgtaggatctatttattactatgaaccttaaattaatctaaggattaaaaaaaaattgtgcatcatacacaaaaattttatttcctcattgtaacttgagcctcatcgcactaagtgaaaaa

SEQ ID NO: 237743 - DNA, 429 bp, Glycine max
  unsure (1)..(429): unsure at all n locations
agtagaaacatgggaccactcatttatttcaatatgttttcatatctagtttatgtctgagagaccatacaagtttcctaacgatttctaattatgtgggccattaagtctatcatatgctgacaatagccgagaagcccatgaatctcttctggggcggagtaagtgtctgccatcgccttggccttggctaacaatcggtgaagttcttgactcccgtccaaggtaagagcanaccgatccatccacatggttgcctcttggtgaaagagtcatcacccttcctctagcctctttttccgcgtatacttgggcatactcatccgcgaatctatgctcgtgggccgtggctagacctaactcttcttggtacttggcgatgatagctaacatgttggtctctgtctcgcatatacgctgagacaagct

SEQ ID NO: 237744 - DNA, 134 bp, Glycine max
  unsure (1)..(134): unsure at all n locations
aaaaccaagccgggagccncaaggcanancaacaaagaaagaagctatgttgctccaccccgagcaaacgcaagaagaaaccccaagacaccctccaacgtgaaaacactggggcacaaacgacccgctaccgc

SEQ ID NO: 237745 - DNA, 273 bp, Glycine max
  unsure (1)..(273): unsure at all n locations
anctttatgtacaagggaagatgttattatgtattttaaacacaatatgcacccgttataacttgaacggcttaaaaaaaagttgagggatggtcactgtccataaatttaggggatcaatatcaggatctaacttatctataggttcctctgagctcttagttccctggttatcctacacatttaataaacataattcaaagatagtgaacactctatttgctaaaaatccttttttaataatggagtaaagcaacaaaatgaaatacttgt

SEQ ID NO: 237746 - DNA, 408 bp, Glycine max
tcgagccattcctgcgaagcaaacattaggaaagttttcttaccagcgggacactactcttaaaacaaaaatggcatacaacctcctcccataaatacaaacctcaatgtaaatttagagcaagcatatgcgcatatttccttacgaacgatcacttgcacaagacatcctaataactaagaagaatgcacccatatacaatcaacgtagcttcattacctagagtattcacaagtacttccaaggtgcatttgttattgacatcacacacgcctccttggctgaatgtacacacatgcatactcatagcaatttgaggtaccaagaaatgcacacgcgctcatcttggcatttctaatacctatacatatacaaacttcacgatgaatcttgactacctacacaata

SEQ ID NO: 237747 - DNA, 176 bp, Glycine max
agcttctagacatacatagaaacgttgaaactgttgtggagcattgggaataggaatacaatcaatcttagttgttgaccccgggttactcctaagtaactcatgagcatagtcccaaatctttgcgtattgttggttaacatcaccttccaccaactgtcttgcttcttttaatg

SEQ ID NO: 237748 - DNA, 508 bp, Glycine max
  unsure (1)..(508): unsure at all n locations
tgngagatatacttagttaacgatntattgttcttaattgtgtatctagtaactcgcacggtaagaaaaanaatgtcttgattctttntatgttttagtatttcnttttatcctttaagtttaaaaattcatattttttaaaatttcattttgataattatttttgaatggtttctgttaataatattaattagtgtaagtcagtattttaaattttaaaataattaatttaatataataactactaaaaacagtccgtgtgagtaataatattttcttaagaaaaacttgggattatattgaattgaatatgttaacagaacaatattatctgaacaaaaagggattatattgctatatagtcaaatgatcttatntatagggtattaagagcccgcataaagttaattaanggatttcctccattngatcgatcatggcacggtaaccacctgtaaataacaagaaagaatanataattataactgctgatgagtcatgacatata

SEQ ID NO: 237749 - DNA, 263 bp, Glycine max
acctgcggcatgcagctttgtgttcaggcgggaatggagtaatcttatgataaattcttgttatatcacaagctagagttaaaaatagagttatattggttcactcaaactcgggagctatgtgcagttctctttcaaatccttgaagattcctctaatcacaaaactgattagaaacaagcattacactctaccacttctggctacaacaagagttcatgatgcaatcctccctaggaagggaccaatcactataaccatga

SEQ ID NO: 237750 - DNA, 500 bp, Glycine max
  unsure (1)..(500): unsure at all n locations
ntatctctctctctctctctcttgccattctaactaactcctatatatataggagtagaaactaactgagaacaattacaacagagaaacagttacaaaacataacttgttatctgaatcatctatcaactaactaagagaattggacgagttccaccaaatagtctttggacgaccatacagaagagaactggactagatggtcacagtagtatcgtccaaccacctcatttgtccaacacatcacattttcatgaatccccatagaagataaatttcctagcttaaagtcattnttgtcacattcctagcctcttctcttaatctatacttttgtagatttcactttgactaaaatagagtatataagtggaagacaaccctcattctatgagctagttttggagttgagttaggcaagcccaaattngaagtaggaatcanagtctatcataaatacattattgggacacttgcattgcatccttcaagcccatacc

SEQ ID NO: 237751 - DNA, 451 bp, Glycine max
  unsure (1)..(451): unsure at all n locations
tgccttgccnctngatatatttgagggactgcatggctctatttatgacaaactccttgggataaaggtagcgctgccattgtttcatagcccgtactaaggcatacaactccttatcataagttgaatagttaaaggtatgaccacttaacttttcactaaaataaacaattggatggccttcttgcatcaacacagccccaatcccaacatttgaagcatcacactcaatttcaaaagattctngaaagtttggcaacgcaagtatggnggcattagtaagcttttgcttaagaacattgaaagcttcttcttgtttctcttcccatttgaaaccnacattcttcttgagcacttcattgagaggtgctgccaatgtgctanaatccttcacacatcgtctataanaacttgctaagccatgaaaactcctcacctcngtcacagactt

SEQ ID NO: 237752 - DNA, 404 bp, Glycine max
agcttttgtgttcggtgttgtcaaaaaatatattatgtacgtctgctagggtttttcgtgcgagctcaaccgaggttgtgtttcggccgacattggcatgttcccatgcactcggccaagaaaacattagcccacatcgaaaagaaaaaaaaaacattaatcaccgatattgatcggaaaaaatgctggttgacgtcggccaggaaaggtgaccgatcgaggtctaaaaataaaagaatcaccggatgacgccgatcgagcatttcctaattgacatcatccaaatattggtcagggattggatagaaaaaacaatagctgataccagtcgttatgtagtcccgactgacatttttcagccgacattgcacagtatttttttacaaacgctggccgtatatata

SEQ ID NO: 237753 - DNA, 445 bp, Glycine max
  unsure (1)..(445): unsure at all n locations
tgttgaaattgccatgtttggatgagttaaacatacccattctgttttanggntnttgtgatgatgtttgtgatgtttatatgctgaaattgctgatggaaaactgttagagatgaagggtagaactaacctagggttagaaagtgagaatgtgatgttatgagtggaaaaaaaaagtgaggctttgagagttggaaggttaagtctgaattctgtggtaaatggaggttaaagtgagttaatactagcttgaaatgtcatttaggacgtgggagaaagcttggactgtgctagagagaagaacaaatgatcaaagtgaacaaagagccatttctagggcanaatttgggtggtgaagagttcaaatttgattcggtggaattttaggtgtaaattcagtttgagcaagtctagattgatgttatggaccattgtgaggtgagag

SEQ ID NO: 237754 - DNA, 342 bp, Glycine max
aattcgattcgaccatgatatgggcacttgcaccccaaaaggatggtgcggacgacactgcctgtgaaaaatatgacatcagccaggataaatgggcccagttttgtcagacccccagagatccctcgtgagaggtatatactctttaattcgaatagctatccactacaaattcagatcttataatagattgccgtattcttttgttcattaatgtccgatttttgcaggatgtgcgagaaaaagcacaggccatccaacagcataacactcgcccccacgtgtgtagaagcaagcttcatgatgatgaatcacgtatgattcaagtagtctcgatgatga

SEQ ID NO: 237755 - DNA, 369 bp, Glycine max
  unsure (1)..(369): unsure at all n locations
gatccttaagcgactgagctgcagcttgactganttttgttagtttttaactaacnctgaacaatatacttgcccttcatttaactgtctttgggcttggcggccacactcaacaaagtactttcgacacctattgtacgttgatttgaccaatgctgttatgggaatgttgcgacaatcctttaaaaccttattgatacattctgagaggttggttgtcatgtggccatatcgacgtccttgtctgtcataagccatcggtcatttttcctttgaaatgcgaccaatccatgttgctatggctgaacttaagtgacaaaatgttttctaaatattgataaaaaatgtgctcgcaaggagtgtacgctg

SEQ ID NO: 237756 - DNA, 412 bp, Glycine max
  unsure (1)..(412): unsure at all n locations
tgtatgctccattntgcagaatgtgtcagaccttgatatgttcttcccacttggcggccaacttactttcatttgtggccttttgggcttcacctttgaccctccgtacctttggctgaccccaaccgctntttcaattctggtagaattactttgatggctactttgacttggccatttgtttgtgggtgttcctcanatgtgacccgatgcttaatgtcaagtcctatcatgaactcattcgacttcttatctataaattgtaatccattgccagccataatgacacattgaatgccgaaacaggtgattatgtgtttccaaagatactnttggacattctgaccactgattggttgcaatggttcgacctcaacccatttagtacagaagccgactgctactaacataa

SEQ ID NO: 237757 - DNA, 75 bp, Glycine max
cttatacgagagcacttgtgccaatttgacttctacaagccgagaagccttttgattcacatttatatgacattc

SEQ ID NO: 237758 - DNA, 312 bp, Glycine max
actcagctgctctgagacataagctatttttttataacgtttttaggaaacattcaccacattgatagagaacaatctaaaatcatacatcttaggcaaataatgcatgctagctcccaacattattgcattttgattccatctttggacattgtgattttgaaaattagaaaacccaaaagttattatggcattttatcaaacatacaactcccaactgatctggctaaagaaatagtgagtagaaaatggaacttgcagacaaataacaaataaatgaaagatgattttctctttatcattcgcagaaaa

SEQ ID NO: 237759 - DNA, 322 bp, Glycine max
  unsure (1)..(322): unsure at all n locations
gcacccgagatccttctagtcacctgcggcatgcaagcttcaagaataatggccttatcttactttttttcccgacgggaattctataaataggcctcncatttttaattgggttaccattattggaaaacccacatgcaaatttttatagaggctcttcatcttaataatagagaagccataaaaattggaccctacatttccactatggcggcgggaaatacaaccatagataaacctatggattaatggagtgaggaggaaaagagatactccaatacaatttaaaagcgcaaaatatcattacatctacattaggaat

SEQ ID NO: 237760 - DNA, 338 bp, Glycine max
  unsure (1)..(338): unsure at all n locations
tacccattcagatgtaggggatttatgatgatgctngngatgtttatgtgctcgaaatgcttatggaaaactgttagagatgaagggtagagttaacctatggttagaaagtgagcatgtggtgttatgagtggaaaaagagtgaggctttgagagttggaaggttaaaatctggattctgtggtaaatggaggttgaaatgagttaatcctagcttgaaatgccatttaagacatgtgagaaagtgtggactgtgctagagagaaaaacatatgaccaaagtgaacaaagagccatttctaggattaatttgggggttgaggagtcagaatttgatt

SEQ ID NO: 237761 - DNA, 247 bp, Glycine max
cttatttgtaatcacccttggcccaccctagatgtcgatttttctggctgacttgattgcagggtagataggggtgggtcattcctacctggactacatatataacttaataaagctaataaagtgggacaatcctaaccctaaatagaatgaatatcttctcttatctttaacactatatatctctctttcttctctcttagatgcacttaattctactacaaccaactttagccacaatagatca

SEQ ID NO: 237762 - DNA, 368 bp, Glycine max
  unsure (1)..(368): unsure at all n locations
ttcatgttcaaatccattatccacatgttgtgcacaacagctattatgtgttgaagncatttaacagctcaccacatgctactacaatactcacataactaccagaagcttaacgctagaaaaacaaattccaatatacagcttccaccacttacaaagcctgatgtatctgatctgaccattttcactatatcccaggcaaagtcttgcaaaacctttcaataaacttaattgtacccatcatatctcatcacatctccttgaaagaaaccttcgataagactgcttaatactcgatgtaaagagatctctggagcttctcgtgtcctagagaataaaccatcaaccttattaaccctgacaagaga

SEQ ID NO: 237763 - DNA, 216 bp, Glycine max
  unsure (1)..(216): unsure at all n locations
atccatgatgagcctttggtgatctaattattcaatctgaatagagaggagacgtgagagtgtggctcaattttccctgttcattttctttctttggattggatctgcacattttgcctttgcttcattgctttttttattcttctaaancaatattttgacatatattcagcttctggtacttgtgacttgttaggcgatggattctctttctct

SEQ ID NO: 237764 - DNA, 208 bp, Glycine max
gctctgctcttccagcccacacagggagaaagaaagttgtctctcaacctcgggattgggtttgggtgcacatgaaaaaagaaaggtttcccgaacaaatgaaatccaagcttctacccaggggagatggaccatttcaagtgcttgaaagaatcaatgaccacgcttacatagtcgagctgcccggtgagtataacgttagtctcac

SEQ ID NO: 237765 - DNA, 362 bp, Glycine max
  unsure (1)..(362): unsure at all n locations
atcgatttcacatatactgtaatcgattaccagagcagattttctgaanatattatcaacagtcacatctttttatgtggttcttgaatggctatcacaggcctatatatatgtgactcgagacacgaatntgctaagagttctttagaacaaaaaggtcttatcctcttaaaaagtaaaatccgtttatcctcttacaaattccttggccagattacttgtgattcaataaggaattatttgaattctcaaattgctcaatctatctctttcaagagagatttcttcttttcttcttcttcattctgaagagggattaagagaccgagggtctcttggtgtgaaagaattctaaacacaaa

SEQ ID NO: 237766 - DNA, 480 bp, Glycine max
  unsure (1)..(480): unsure at all n locations
agcttagctacccacacctctgtaatagctaattttacctccttgagatgagaatctagagcttaactacacaccccctataatagctaagctcacccatatttcaaaaaacatgaaaatacaaaaaaaaattccctactacaaagactactcaaaatgtcccgaaatacaaggctaaaaccctatactactataatggccaaaatacaaggcccaaacaaaggaaaaacctattctaatatttacaaagataagcgggctcatacttagcccatgggctcgaaatctaccctaaggctcatgagaaccctagggccttcccatggatctctagcccaatctacttggagtcttctattcaatgcccttgccgagtaggatagcatcaacaagcgccatatatatatctaagaacaccagtcttcactctagaaccnacacatagaaattaggcattatntcttagagacatgtctaaag

SEQ ID NO: 237767 - DNA, 486 bp, Glycine max
  unsure (1)..(486): unsure at all n locations
ttggtctttatacatgtccaactcttagtgtcattatgtagaggtagaaagattggttctaaagttagaaacttcttcaatgtttaaaactctttgttttaatcgattacaaggctgatcataatcgattacacaagtgtctgtagcttgtagagagattctagtttcggtttaatcaattaccagctaactgtaatcaattacgtaattcaattgagaccatgtctgtgttttcatgagtctctgctttaatcngatattagataatcgtaatcgattacttcattcttaaaattgttcccagaagtgatcaagaacactctaatcaattacatcaataatctaatcgattacatagttcttgaaagttttccagatgttgggaataaccatttaatcaattgatatgataatataatcgattacttcttcgaataatcgttacattgatattaatcgatacagaagctatactatttctctata

SEQ ID NO: 237768 - DNA, 365 bp, Glycine max
acagtcttgtgtaattgattacagcctgctatattatggtaatcaattacaaggagtggtagtcgattaccagaccttaaaacatagctgtttctataaaaactaaccattgtttactcataaaacctacacactcattgtaactattatcaacaacaatcaaagataaaaagaaacatcataaacttcttaactacattcatcaagcacaattataagtacaatatcattcatctatacacacacaaagacaatcaatgacaatcattgaaccacactcgataataaccatcagagacaaactcaatcataaagaaagagaatacaatcaatcgagttactatttatctaagtcattgatatct

SEQ ID NO: 237769 - DNA, 280 bp, Glycine max
atgaagaaaaccagaagggaattaaaagcctacagcaagggccattaaaaaaatggttggaattaatcaaaggtccgaatttaagtgtggtactttcaggtttttagtgtactttctctagctaaaacagttttatcttagtaactagtactaatctttaatattgagtattgaccttcattgtgtaggttattaaggtgtaacttttaattttttttctcagagaatagtactaaaactctaaaaacacctaaggtaatgtatctatattttttgtcat

SEQ ID NO: 237770 - DNA, 478 bp, Glycine max
  unsure (1)..(478): unsure at all n locations
ggtgggatacctcggattctagggtgggtgaacananttaattactattgaagtgcatgcgaaagaacaaaatgaaaagagaaggaagaggaagaagtaaagccaacccatttgaagtaggacggccattgccaccaagagcgacatcaacgacagagagaaatctacctcggcgaccagcatcatgagctttgatagcagcgaggttttcaacgggacctttgaatttgcgcacaacggggaacaccaaattcgcattggcattgcaacaaaattgcacgacgaacgaccccacaagaagaagtaccaaactttctctcagatccatctcgggttgagctagcttcgagagaaagcaacaatgaagaaacaacacagaaacactaattgaaaaccatttgccgacccagatagaaaacaagggtcggtgaatacagagaagagggaaaggggaagaaacanacacaaaaataaatcg

SEQ ID NO: 237771 - DNA, 353 bp, Glycine max
  unsure (1)..(353): unsure at all n locations
agctaggatgaaccatgagcaacggttaacgttattncaattgtttatcctcccgcctctatgaagagatatttctatagtttattgtgcgagccgtagcaccataaaaattccaactatccattccaattggaaagttgtctcgggatctcttaacaacctaataagggaagacattgtggtaagtgcagctaaccaatcattcgtatttcattgtgtttaattaaaatgaaaatgtccgcattgactaactattacataacaatttctaaatgcacggaaaatttgaatccttgacgttcgaatgcgaacataaagtgatgtccacgataccactagatggaggcttttaa

SEQ ID NO: 237772 - DNA, 406 bp, Glycine max
  unsure (1)..(406): unsure at all n locations
gcccctacttttgaagggcaactcccaccttatgaagactatcccggacaagacgatggggaaggagatacccatcttagccctctgctccacctcaaaaatccatccccgcatgaactaccccagccgaacatagcccgccatattccagccttacccacacccgtaaaagaatctgttccctttgcggaagataaaggaaagattgaggcgcttgaagagaggttaagagcagtccatggcctcactaattaccctttctcggatttggcagaattatgtcttgtgcccaacatcgtcatccctcccaagtcaaagtaccagactntgataagtacaaagggacgacatgttcaaaagggcatctccggatgtattgcctgaagatgaaggcgtattctgcgga

SEQ ID NO: 237773 - DNA, 390 bp, Glycine max
cactgcgttgcccgagaaaacaactgtctgaccacaacaccgctggaggcggcaacggacaatggtctcttaaataaacctgctgtacatgaacaaacattatatgatgcgctgaccgtgccaaacgaaccagcgaaagccatggcataattgttacactaactatattcaatggacctgaacaaaatgatttccaaacacgtgaccgacacatatgatgcggtggcagaagagcacgggtggttgactttaaagggaaaatgcatgcttgttgtaggacaccgaacaaagttacttacacgtgaacaacactattcatgtctgtaatccacccttgccacctacccgaagaccaacataccatgtagtattaactctgtttaaacaata

SEQ ID NO: 237774 - DNA, 431 bp, Glycine max
aatataaatcaagcattcaagtcattggttaacatgcataacaacatattcttttttgtgaactgatcctgatatttctttattagatgacccaattataagcactaggtgtgccaataattaagccgaaaatcaacatataacaatgcttttacatatacatcacaaaataattcgagttaataaaagattacgtacgcacgtgatatttttttgtcgatcaataaaatatgaatattataaaatataaacgtatacaggataccagaacagcttacagaaagagagtataaatacccagcttaagcagaaactacaatcctagtcgattctttgttgctggccaaatgaatttttggccgagtgttattaaagtataacagatttgccatatagaataccacttccatatgtcggagtggacaaccgaa

SEQ ID NO: 237775 - DNA, 252 bp, Glycine max
ttcccaccacaaaccagttacagaacatgcccgacatgttcatttaccctgaacttaatacaaaataccttttatcatttcaaatcccaaagctactgttaaataatttatcttctaaaacggatgtgatcaacaagtaaaaatgtgtgcgtatgtcaaactgaaaatgtgaaaccacatgtgtgcgcgaactttccacaccgaataatatagaaaagactttatagcccatactatggaggaaacctccca

SEQ ID NO: 237776 - DNA, 500 bp, Glycine max
  unsure (1)..(500): unsure at all n locations
agtattagtagtgttgtaggagtggagaacatctctccccttattgtagccccacaatatgaattattgcatgaataagaatgaagcatagaagaaaaacacttgataaaagatatcatcatcaaaatactatagaatatgatttatttaagccagttctgcttgagcaacagtgaaattgtctctcgcatgtcctagttcatgaaagggataaaatatttgataaacattaacttacaagcaatagcaggtcaaagaaaaaattggtggtgcatcattcaaaacttggatatttagttatatatttttaattntagtaaatacaccgaagtgaactntacataagttgatcatacatatagacaatttatattcaacataaacagaaaaatgtattaaaaaacacattaaatntacataggcaacatcaaatacaaaagaagattaaggacanatactcaagaagtanaataaatactaacatgtagcacatacacata

SEQ ID NO: 237777 - DNA, 205 bp, Glycine max
  unsure (1)..(205): unsure at all n locations
acgaagaccccagcggtaaggcgaacagctagcttcacgtttctttggttttgaagggagtgtttcttcccaccaggtgccatgttcaaatctgatgaaggcccccgtttcacgggcattgcattaaattttgtcactcatgcttattaaaatcggcggttggattgtcctttttaacttctccnctcatagattgtgtaaactt

SEQ ID NO: 237778 - DNA, 311 bp, Glycine max
aaatctaagaatctatctttcaatcttctctcaacatcattcaatatctttcaactctttctacacaaaattccgaggcacttttcttcatctttctaagagattttgttcaaacactttcttttccaagaagagtcctttgttcaaaaacttgaggtattcatcgttttcattctcttcttcctttgcacaagaacgaagaactaacccgccgaattcttatgtgtctctcttctcccttacaaaagaatcaaaggactaaccgcctaagaaatcttttgaatcctacatcttgagcgtgtcttcttctt

SEQ ID NO: 237779 - DNA, 375 bp, Glycine max
  unsure (1)..(375): unsure at all n locations
agctcgagctttttacttcacattccactcattagctttccggctcaatttacattttttttattataattattgataacaatagtcgtaataattataataacaataatcgttttaatttagtatgtaacttttttatttcacttaatattaaaaaagtaaaggcttattaattgaagttacgaagtggagcataatcgaggttaaaatattaaatccaattaacaccaagggtagtaataactaattagctcggaaaactcacttcanaaaagaaaaatgaattcgatttgttgttgaacttaagctagcctagcaagcataactcagcttagaaattcattaaaagctcactttccaacacatgacaccaca

SEQ ID NO: 237780 - DNA, 438 bp, Glycine max
  unsure (1)..(438): unsure at all n locations
gcttgacatatattggatcctcttcaatttttttttgtcacaacttccagaaatggctaaatggagtaggaacaatgcaaccgatccgagagcatatgcgaaggaaaaatntattatggatcaaatgccaaagtcaggtatatattgcggatcaaaaacatgtttaagcaaaaaaaaaatgaatatgtccatcaaaatttagacttcaataggcggtaaagataaaacatatttggataaccaatccatgtaccataataatctacatgctccanataccaacacaattttatgtagtttatgagtcaacataatattaaaaagaggaacctaattagcaacatgcttgtcacctggtagcaaggaattgaattttttgagagaatgatccagttaggagaacctttatttttgtaatcacacatatcaaaccgttcc

SEQ ID NO: 237781 - DNA, 164 bp, Glycine max
tcttgtttgaagctcctacagcctaaggaaaccatgatttcctatcttagaaatttgagctttgaattgttcgggaataaatgtgcgggggtttttgtttcattggacaagctcgtattcgtggctatgcttcatgatgaattttgggccatacttgatgtaca

SEQ ID NO: 237782 - DNA, 208 bp, Glycine max
ctgagctgcaagcttagaatattaatagaagaactatgtctattgttgaatcaattcatgttgcttttgatgagactaactctgttaggcaagaaaggatatacatggtgatttacagatactttagaagatattcatattcatgacaagtccacaaagacaaagaagatagaaatagttgagattttcaatccaaagaaaacaaata

SEQ ID NO: 237783 - DNA, 488 bp, Glycine max
  unsure (1)..(488): unsure at all n locations
cttgaatgctctattcaatggagttgacgagagtatcttcttattgatcaacacatgtacagtggccaaagatgcatgggaaatcctgaaaatcactcatgaaggaacctccaaagtgaagatgtccagattgcaactcttggctacaaaattcgaaaatctgaagatgaaggaggaagaatgtattcatgactttcacatgaacattcttgaaattgccaatgcttgcactgccttgggagaaagaataactgatgaaaagctggtgagaaagatcctcagatccttgcctaagagatttgacatgaaagtcactgcaatagaggaggcccaagacatttgcaacatgagagtagatgaactcattggttcccttcanacctttgagctangactctcggatagggctgaaaagaagagcaagaacttggcgttcgtgtcccatgatgaaggagaagaagatgagtatgacctggacactgatgaag

SEQ ID NO: 237784 - DNA, 90 bp, Glycine max
ataacacccaccattatcaaggatttaatgttaagcatcctgccccacactgccaacattcaaaatttcgtccactcagtcaaaattaac

SEQ ID NO: 237785 - DNA, 455 bp, Glycine max
tatacaagcaagagcggggggtgatgtataatttatataagtaagacttcaagtgagtggattattacaactagaaattatacattcatactactgattccatttatgctttatatgggaaacgagaccatgtatcccattttggttacgtaccaaaatcattttttcttgtcttgagataaatatcaatataggatgtgattagatgatttagacacatatgttgattatgtacaataatttgaaatttatttaatgaaaaccaattttaaaactaataggctttatatatgttacacgttgatagtagttttaccatctttccatttttacaatgtcaattgtataactcttttttattatacatactcaatgtgcatattcattcatttaccttttgtaacgttgagctaggtgtaacacactagtgtcattcatatgcaaatctcaagaca

SEQ ID NO: 237786 - DNA, 171 bp, Glycine max
  unsure (1)..(171): unsure at all n locations
tgcaagcgttgcgngatcatctacgcgcatggatcaatgctttccatcttctaatatgtgcatagtctcatgtaatgtatgttgngttaacaaaaccggacaacgtacgngagtactagtccattgttggtttctttcttcttttttttcttacatagcaaaagaatatat

SEQ ID NO: 237787 - DNA, 458 bp, Glycine max
  unsure (1)..(458): unsure at all n locations
acactatgaatactaagcttaagtttactcatatttaatcatttgaagagatttttatttatctgaatcaagnatattaaaatttgattgtcataactcaatcaaatttcacataacaaaaataacatatacccccaaaaataatatatttaagtaatatctttagaaaatgtaatgtttttttaacaaatattcatatattattttaatattttgtcgaatcagcatttaatgcacatcatcatggttacaattttcatgctaagagataggagatgattgcctattttatgactctaacagccaaacctattaatgtcataatataatatcatttttaagagatattgacattattcaaattttgaaacttttccccattctttaaaactctctatacataactcacagtcagtggcatttccattaccttctggtatcttcttacttgagctttt

SEQ ID NO: 237788 - DNA, 462 bp, Glycine max
tagacagaaatcttcactcgagctcgcgtttgaagattgttgacattggagcatttaatgcttgcattagatgcacattcttcttcatgttggaaaaccactctctttagcttccttgaagaacactttagcaggaaaccacttgctttttgtcacatcatgtctatcacagcaggatgtatcttttaatactatatgaaattccaaagatctgaactgtcgatatttttcttaggattttgacagatcctagaagaatgtcttgtaacatatttcctgcaaaacaaatctcacacacaaaatattaaatgaagtcttaaatgcattcttaaatgttgtatcagattgtaaagtatatctactttcaactagaacttcatatgcgaattcaagatgtatagtttgatatcgcataagaagcaactttaacctttgtattatctacatatagtaacataatta

SEQ ID NO: 237789 - DNA, 263 bp, Glycine max
agcttcgagttcgatgagaatgaaagagcttgttagtttattttataataagatgaccgagttgatggattagacatcagagtccaggtcataatgaatgaaattgttcatgtcaagaataatgacgaaggtggttcacaatttgatttcttgacttggtcaatgcaatgatagaagaaaaaaaaaaacgaatatctagctgaggcgcaaatgcaagagttgtacagacaaattctgaaacagtagtatacattatgatgatt

SEQ ID NO: 237790 - DNA, 475 bp, Glycine max
tacttacccgttgaagatcgaagaacgatgtttatctattgaagaacgtcgaagaacagttgaaacctttacgaaattcctcacggaaaacgttacggaaacgtttcggaagcgcctcggcttagattttcttcacggaaacaatttttccatgcaaattcgaaagagagagaagtgcctaagtggatgaacccttttcttcttcacttcctcccctatttatagcaaaataggggagatgcttgccgcccagctcgcccaggcgagccaggttgcttcctccagaagcaatagccttctggaggaatattctggagggcccaagtgggcctgggtgctatttgcacccccatttttactaaatacaccccgctctgctatttttttgtgattctcttttcgtaaagttacggaaacttacgaatttcgaacgatactcggtttcttccgtatgttacggaaccttgcggataca

SEQ ID NO: 237791 - DNA, 196 bp, Glycine max
tgtccagcaatgggcacctgctcaacaacaaagggcctcactcaaaactcggctcccacaaacctcgccttgccggcaactccaatcctagcacgccgccaatccgggaaagaatttcatgtgaagaaactgtggaacaccagcgacgattgaggctaggcctgagactagcgatcgtaaattagtgtatgactgt

SEQ ID NO: 237792 - DNA, 517 bp, Glycine max
  unsure (1)..(517): unsure at all n locations
tctacgagatttagagccttcatctgaggaggaggattgatttccttcttgtgtttatactttaggcgtagttaagtacttttagttggtagtgatctgttcttatcctagatcctttgtgatattttgatgtaatttgaggggcgggatcttcattgaaaatgttttttgatgtaacagatatgtatcgatcatttcactacttttacactttgggttgaatctaatttcttctatcgtgatactatttatttgttttatttacatacaaagacttcatattataaatatgtattcatttatttccggatttaattatgacatgaaaacctaacactttccaaaagacacgtttgttttaccttattntattttatcttatttataaaaaaaatgatgagatatttcgtcaacttaaaaatagaaattaaaagttaatgacacacgagaataatttanagtggtacattgctaatgttgattatgcatgatagctagcatanatatcagccatata

SEQ ID NO: 237793 - DNA, 523 bp, Glycine max
  unsure (1)..(523): unsure at all n locations
ntaaagcacagcaacacagaatctaggtgtccaacacccctctattcaatgggttttctaggtttgaaaagtgaaatttagaatgatgtaaatttgaagcaaactctcacctcacaccagtccataacatctatttagacttgttcaaactggatttacacctaaaatctcaccgaatcaaaatttaactcttcaacacccaaatttgccctagaaatggctctttgttcactttggtcatttgtttttctctctagcacagtccaagctttctcataagtcctaaatgacatttcaagctaggattaactcactttaacctccatttaccacagaattcagacttaaccttccaactctcaaagcctcactctttttccactcataacatcacattctcactttctaaccctaggttaactctacctttcatctctaacagntttgcataagtaatttcagcatataaacatcacaaacgtcatcacaaaaaccctaaaacagaatgggtatgtctaactca

SEQ ID NO: 237794 - DNA, 246 bp, Glycine max
ttacaatcctatcaaacaactcacccgctgcacagagcttctaacaacatgaaccgcgacagcgtcttgaaagccttcttgatggagatcacgttaggacttcagccaaagtggtgcattatctgaatctcccttcttacattctccacatccttattgtcaaagttaatgggtttcaagttacagaggcatgtgattgcatgatctagcgttgtgaaattgtaggtgattatggctgtgtggttg

SEQ ID NO: 237795 - DNA, 402 bp, Glycine max
  unsure (1)..(402): unsure at all n locations
tctggtgggcctttcagctagttgcttaactaattggccctcctgcacctccagattcttgatggctgactcaatgctcttgtggtttgacagggaaacttgcatgaactgcatcagcgtgtcttccagcttggtggttctctcatatagattgggcccttggttgggaagctgattggatggacctccttggtcttttttgaagttattccatggatgggatctccaaccttggccctgagagaaatttcctccctgatggtaccctgacagtcctccttgatggaatccttgacgattttgattggccatgtagttgacctcttttgatgcgtcgtcttgagccattcaaaagcctgactcatgaaccccaccatagatgtngcatcccctaatgtgcat

SEQ ID NO: 237796 - DNA, 548 bp, Glycine max
  unsure (1)..(548): unsure at all n locations
cttctaaatattganagaaaaaaaagataagtgccatattgtttataaatagcgccaagatagagtatgtaagtagagggcaaccctcacccagtgagctagtttttggggttgagatacgctcaaacccacattttaactctaaatatactaaaatatgacaataaaaattgagatttatcatcttaaaaagaacataccggaaaagaaaatatatcaccacttacaatacttccaaattagtgaattttccaagattctctggcaaggatccaataatgttgcaactcctcaatattctggcaaccaatcatacaatatgcaaagtgatagcaacaacacataagcatatctttattttcattccctgaaacactttcttatcaagacaataacttgaatagtaaaaataataatcataatcaaatcatctgactcacaagtgttaccaagttgtcatattaattaagtgggaaaccatgaataaaatcattcagtcagtgaccttctgctatcatatttaatcaatatacaataaaaagcatgta

SEQ ID NO: 237797 - DNA, 256 bp, Glycine max
  unsure (1)..(256): unsure at all n locations
agcttgcttacaagcatttaaacaagatggatgcctacccttgtattggtactttntagttagttgtgggggtgatgtcgcttttgctaccattgatggggcaaagaaaaaatttcctcaccccactgggacgcaatgttctttctggattggcaagatcttctcataggggtgttcctttataagcccctccacatggggcatgacctatagtagcagtcgcttgggaaaaacacactctaaggatgtatatatt

SEQ ID NO: 237798 - DNA, 506 bp, Glycine max
  unsure (1)..(506): unsure at all n locations
taaattgaattaggttnttttggcttgacctgctataacctataactagtgttgagtttgagattgacctaacttgaacttgattgatggattgtagggctttgcctttaaattgtgaacacatatttaattgggtcctttttagtcaaactgagtccaagctaaccatgtcttgttataggcttaacccacaaaagtccattcaaattaatcttagggcctcattttagaagtatgacttgaatgtggactttaacctaacacgctatagtcttgattgtctcaattgaactcatccgataaaatattggtcttaaacttaaattttgaacacaaataaaatatggacctcttaatccttatttgagctcggcttgcacaaagcttatacaaatatgattttccctatgcttgaagttcattntagaagtctaaaataaagttgactttttgtctagatctacctataacttgtggtttatcaagatatgaccacctattttaac

SEQ ID NO: 237799 - DNA, 236 bp, Glycine max
  unsure (1)..(236): unsure at all n locations
agcttaggttaatctcaaagctacaaaaacatatacctttaagaggattaccaagtatgtcatacaaagatgatttactntataggcatgtgaacaagggaaaaattaacaaactcttttttcaagaaaaaacattgttctcctcaagaccttacatattgatctgtttagtccaaccaaaagacatctatcagggaaaaagtcttacaataagagtatctcaatttagttattga

SEQ ID NO: 237800 - DNA, 557 bp, Glycine max
cttgtaagcataaattagaaataggtcactctcactatgatgtttcaagctaaaacatagatttttcactcatagatcttgcactcagtgttgcagttttggaatgcttcaacttgttcttcatgattcacgaaaaatgcttcaaatagctcccaagaagaccgctgtagtaggctccacacaaatgacaagcttctagaacaagtaggtgcactttacagttgttttgaagtgacagctgacataaccattctgaggaacctttgtgataagcatactataaaatcatcaaaatagtcattttgatgtttattgagaatatccatacttgatgatttcctttgatgaaatttatattgatcttttattctgaagtagcatagcttcatcactcttaacacttcttcacaacttcaagcattctgaagttgattacatcagacagacttactgaaagtttagttgttggtgagttagtggtttgtccaacgtcagactaagtactattcttcagtccttttatttaatgcttctcattagtgcctctcatggacaac

SEQ ID NO: 237801 - DNA, 278 bp, Glycine max
  unsure (1)..(278): unsure at all n locations
agcttggtgaaaaaatagtacatgacaaggacttcttaatattaaagattttgtttgatggaggtggaagagggagtcgattctaactctgattagtatcttaatcaatattctttctgtctaagactcaaatttaaaattgaaatgataatgaattgaccttcttttacctatnttattgtttttatgattgggtgtaattgagaagggagaatagatagatattttggatagagtaatgattgaagcgatcatattgttgttaataaaattaatag

SEQ ID NO: 237802 - DNA, 534 bp, Glycine max
aaaactcaagcttagcgtaccctcaacccctacagagatgggcctttttttataaaaccccagtggcaggtgtcaatccatcttctgttagtgacatccagtccttgataaatttctcaaactctcttcccacccccattcaccatagcccctagagggaaagcccactctgttcatggacaagccatgacacgaaacggggtggagttgaataatgactaacctcaatagttctcaaaatgggtcaaggatattggagtctgcccgagatggaaaaagtccattggtttgttatggcgatgcacgaggagggccaatgtggattgatgtgttccatgcacgccttcaacgcggactcacaccttcttgcttgaccgagatatatgtacgccactattgagggcacactatctaatgccgggatggatggcagggcctttcgatcagacctcagatctctaatgatcgtcgataagatgtagtacaggcatgaccaccaactctatgcggcatatatcattaatctattcatac

SEQ ID NO: 237803 - DNA, 164 bp, Glycine max
ttaagtgaatgagatgaagttatgaaaagggagggggggtgttatttggcaactcaatatgaattattggtgaatttattagaaggtgggaaagaagaggaaattgaaattatatttgttagatttatgtattattataattatataatagaaaaatattgata

SEQ ID NO: 237804 - DNA, 229 bp, Glycine max
  unsure (1)..(229): unsure at all n locations
cttgagactgtttataggatatatagcatgtggtaggaatagttatttctcagagaanactcggcanaggggaagataaacgcttaaacacgcttttttattattctgaaacgcatctagtaaatctatggaggtggattacacaggtcctggatattctgctaactatgacaatcctgagatgggatatgtgggaaccacatgcccttctgattcttatagcacgcat

SEQ ID NO: 237805 - DNA, 216 bp, Glycine max
agcttaccaaacattcattagtccaacacactctcaacttatagtcatcatccatccatagtaccaatcaatcatgctcagtatgatgcatgcacctgacctcaacttcaaatgcaatgtggtaccatccccaagaaaatactaagcgtgtccacacgacactctcacttaggaaaagatggcaataagtgtcgagacaccctgcgtaacactgaa

SEQ ID NO: 237806 - DNA, 84 bp, Glycine max
  unsure (1)..(84): unsure at all n locations
tctaaactntgtacaagaatgaagctctgataccacttgtttgacaattggcctcagatatcttaagaagggggggggggggga

SEQ ID NO: 237807 - DNA, 214 bp, Glycine max
gacctaacttgaacttgattgatggattgtaaggctttgcctttaaattgcgaacacatatttaatgtggtcctttctattccaactgaatccatgctaaccctgtcttgttataagcttaacccacaaaagtccattcaaattagccttatgcgctcattttacaaatatgacttgaatgtggactttaacctaacacgctataatcttgatt

SEQ ID NO: 237808 - DNA, 217 bp, Glycine max
  unsure (1)..(217): unsure at all n locations
agcttgccactgcagcagttaagtgaacaaattatttgtcgacagncattggatgggtgcttggtagagtacatgtttaactaataagatttctgcgtgttangttaattattagaagagcactatatatccactcttatatataaatcttattagagttttaacacaatctccactggtggttcaatttatgataaaagctagtcgctgatgttaa

SEQ ID NO: 237809 - DNA, 481 bp, Glycine max
  unsure (1)..(481): unsure at all n locations
tgagtagttagttcgntattagttagtgggaacagtggattcttntttctggtaataagcacgtgaaacttagttgtaataagcacgtaagactggtgtatataagctggaaaatgtacatattatgcatgcagatataaacaaagtttcattcattcaggaggagccttccctcgaataaggcaagcacatatctctctatctctctgctaccctaaagctaacactggtccgacttgccgacgccatcgtcatggccgaccacgcgacaaggaagaccacgacggacagactctaagacgccattacccgattgacccatagcaaggcgtccctctccgataagtacccagaattatcacgcaaagtcgattccatcttggatcatcttcgcctacgagacacgaattctaacaaccccaacacccatgcgtccaccgcccaaaggaaccatgtcaagtaagatattccgaggtttgac

SEQ ID NO: 237810 - DNA, 239 bp, Glycine max
tgtggagcttctatggaggcttgatctttgagcttcaatgagggccttcaatggtgatttttcaccatgcgacgcagcggaagacaaagagagaggtgagaggaggcaccatccattaaggaataacctggaaaaaaaaagttaccccaagatgacctggataaacttggacggcttatgaaagaaaggcatagaaaatattgtaatttatcagcagtttatgttattgattattgatt

SEQ ID NO: 237811 - DNA, 362 bp, Glycine max
tagtcgtaaccctcaaaccctttcactagattatggccacatagttcacataaccccagtggcagttttcaatccatcttctgttagtgacatcttgtccttgataaatttctcaaactctcttcccacccccattcaccatagcccctagagggaaagcccactctgttcatggacaagccatgacacgaaacggggtggtgttgaatatgactaacctcaatagttctcaaaatgggtcacggattttggtgtctgcctgtgatggaaaaagtccattggtttgttatgttgatgtaggaggagggcaaatgtggattgatgtgttccatgcaaaccttcaacgcggactcacaccttta

SEQ ID NO: 237812 - DNA, 225 bp, Glycine max
aagatcaataacggtgaaacaaaactttccttgttgcaacaccttgttgaaaaactggatcaagttattgagaagaatggtcccagaaccaatacaatgattaatcatgtggacgaatttactacacattttagatgcgaaaataacaaaaggcatatgttttgaagtatttatttagaacgcgaatattgcctgttctaaatttaggatgtatataaagttata

SEQ ID NO: 237813 - DNA, 489 bp, Glycine max
ctgcattgattggttactttcaacgtgatgcattggagattatagcccaaaggctacaacattttatggtgaatgaatgaaagctatggagataaaaataatacagtaacacatacattcaaaattcaatatataatacaaggctggaaattttcagtacagtaaattgcccgtgaccacatcaggggttcccaggtcatgttgaatgcaagaatcttcctgaaccctttcaaaaatcctgcttactacctttatggtacagaaaggggaaagaaatgcagcattgacaattgccatacctacactaaatatttagtcatcacctgtaccagattccacaagcagcattacaacaggccctaatcatatgtcaaataaacagccaaacataatcctaaagaagtcttcatttttataagcaaatagcccgatgtagaactactagtaggggctacacgactagatctatagtcaaaactgattgatgtc

SEQ ID NO: 237814 - DNA, 160 bp, Glycine max
  unsure (1)..(160): unsure at all n locations
attatccatactttatttattttctattctatcaagaaacattatggtaatttaattaattaaaacacatcacttaattatcattaaaatttatacattaattatatttttngattaaaataaataatataatatgaaggaactgaatttatacttaata

SEQ ID NO: 237815 - DNA, 424 bp, Glycine max
cgaccaatattgtatgaataatattcttgtgagcaagctaaattgtattggctaactctaataaaatagatgcaactcaagacatattgtagacatagctaaaaagtgaaaatgatcatgttggctgagaatgatggctctgaacttaatagtaggatttattaacttgtagatggaggaaaagactaggtagatgctgagaactatttacctttggatgatctcctttctaaacttactattttttgctctattatgaatgtcgttattactatattcattcagtatattctttgctttcataattaataggtatggcctttgtgaatttttttaatatatatgaccgagaatgaattttttgcgttgacctagttacaaattatacttccagttttgagtaccacctattctccatgatata

SEQ ID NO: 237816 - DNA, 456 bp, Glycine max
taagtgtcttgaagtttcatgagcatccccgactttttgtttaccatttccaaatgttgccaataaatatgatgtatgtttgtaactttccaaatatataaatatctgtaggtaaaactgaagcatcttggattgataagtccaaacttcttagctgattcaaattccttagctcacttagactcgcattgttggttaggcttttttctccttcaacctcccattggatattgcaattccccatatacatttcttccaatcttgttaagcttgataaaagattggcagggatggctttcagttgatatcaatttgctaaattcaacattcgaagacaaaatagttgtcttatatcttttgggaggtcttgaatttctgatctttccaggatgagaatttctaacctagtgagttctgcaactatagctatatcttccaatacacattcatacaaat

SEQ ID NO: 237817 - DNA, 182 bp, Glycine max
agcttggagaggatgctttttgtgtgaaaagatgagggacataaagagagaggggggagcacgaaattggcgaagaaaaagggagagaagtgaactttgagttgtgtctcacaagactctcattcattacggtacaacaagtgttacacatgcttatatttatagactatgtagtcttggtt

SEQ ID NO: 237818 - DNA, 506 bp, Glycine max
  unsure (1)..(506): unsure at all n locations
ntntgtaaaaagaatgtgactcttcacatttgaatttgaatttcaacgttcaagtacactagtaatcgattaccaaaacattgtaatcgattacaactttttgaaatcaattggaacgttgtaaattcagttgaaagctttttgaaaaccattttgcatactggtaatcgataacaataatctggtaatggattaccagagagtaaaaactctttggtaaacatgttttgagaaaaatccatgtgctactcaatttttgaaaaaactttttcatacttatcttgtttaagtcttctcttgattcttgaatcttgagtcttgaatcttgatcttgattcttggaagcttgaaccttgaatcttgattctttattcttgaaatcaaatttcctcttgaaccttgaagtgttcttgattcaatcttgaacatcttaaattcattctttgattcttttatcatgaagagttcttgacttttgagctttttgtcatcacctttggtatcat

SEQ ID NO: 237819 - DNA, 389 bp, Glycine max
  unsure (1)..(389): unsure at all n locations
tgaatacaaattgatgtgtcattattttctcctatttcttattcctttttgtcaccatttcaattactgattagccttaattgtcaaattaattatgcagttttatcatttgggcctacttgactaattttgtgtttttaatttaatttcaggagaattataagcaattgggcttgaatccggaattgggcttggacttgaagagagcatacaattttattttatcaaatattatcttatccagattttatttcatctagattntatttcatccaatcatatcttatcttgtccagattttattttatttcgtttatgggcttggacttaaaatagatatgtaagctttggggctgagaacatatataacaacaccagcgttttagttt

SEQ ID NO: 237820 - DNA, 220 bp, Glycine max
  unsure (1)..(220): unsure at all n locations
agcttttgattcagacgcatcaagtaacatgaatgatttattcccataccgnatagcactagctagctagctgccttcacttctgttcacaatgacattgattagtgggccaagcagtcaactcgggcagaacccaatcgccccgttgagttggtccacgttggccaccgtctgaatgataacggccacatgcattcctttgtcgccaaacaatgttgtg

SEQ ID NO: 237821 - DNA, 458 bp, Glycine max
tgacgaagatgctgctatgcgcccaatgccagctggatgattatctgcttatcctcgcgtaaatgattgatccaccgctacgttagaagattctgctgtttgaatacttgtaacgttttaatttcagtttggggatcttacgtcatacatgaatatattgcagtcattggcattaaaaattgtgtatgtactttaatcgaaagatatttgctgaaattgatattcattacctactagatagctcttccgttggttgtatactcttgtacaaagagatttgtgaatacagtcaccaattcttttcttggaccgactgttaatgtattctgttgcatattaaggtttaccatgccatgatgatagtattataagttagccctagtctgacgaccctatcatttatttcgattactaccaaccgctacaacaatattgtctttgctgctctgcttcattga

SEQ ID NO: 237822 - DNA, 206 bp, Glycine max
  unsure (1)..(206): unsure at all n locations
agctntataagtgaaatcaagtgcagccatcttcctatgagtcctctctcatgaggggggggttgagccatgttctcagtatcaaattagtagtcgaatgctaaataagaatattcagaatcaccagcaacagaatactcacaatgctcaaaatgcacagaatgaccaggatgcacactatgcctaaataatctatgaaaggtttt

SEQ ID NO: 237823 - DNA, 531 bp, Glycine max
  unsure (1)..(531): unsure at all n locations
tctagannaatgctatcatctccaagacttccagatgacttttaccctctgctgaagttgaaaatggcggcgaggaatgccgagaagtagatcccgtcggagccgcactaggaattcttcatcttgtacacatcagcgtcaccagaataatatcttttctctcattctctcttttcacttcactatttctctgccagtcaagtgttttttccattagaaaaaaattgtctttggtggaataacaaaagaaaagaaaaatggattaggagaggaaataaaaaggcttgtgtgagagaaacgttagaaccttgtttctgatattttttttgctcttcgattttgatttattttcttcgattgtagtttttgctgttgttgctctctctattttcaaaacaagattggagctntgactntgtggcgttttaaatttatnntttggaatgtttttccaagtttttgattaagcttgtaaatgaaagctnggntcctggtcagtgaagcttgaanggttgggttcatagtctatga

SEQ ID NO: 237824 - DNA, 230 bp, Glycine max
  unsure (1)..(230): unsure at all n locations
agctgagctgatacataacatagcatnngtttactttttttcaaacgaactcaatataaaacaactctgttacacggtaactggatcctaatcttatgcgtcaccatttaagaatttaaccctctattctctgctctggtctgctggatcgggataacactttatacctatattattctaattattcatcatatacgaacagagaatgacatcttctgacacatgacaac

SEQ ID NO: 237825 - DNA, 509 bp, Glycine max
  unsure (1)..(509): unsure at all n locations
ntaatgtgaaaggatgtgactcttcacattggaatttgaatttcaactctcaaaggcactagtaatcgattaccaaaacattgtaatcgattacagctttttgaaatcaagtggaacgttgtaaattcatttgaaaactttttcaaatccattttgctactggtaatcgattaccagagagtaaaaactctttggtaaacatgttttgagaaaaatccatgtgctactcagtttttgaaaaaaccttttcatacttatcttgattaaatctactcttgattcttgaatcttgggtcttgaatcttgatcttgattcttggaagcttgatccttaaatcttgattcttgattcttaanaccaactttcctcttgaatcttgaagagttcttgattctatcttgaacatcttgaactcattctttgattgacctttgagctttttgtcatcacctttgtcatcatctttggtatcatctaaacactctttgatcaatcttgagtcatcatg

SEQ ID NO: 237826 - DNA, 250 bp, Glycine max
  unsure (1)..(250): unsure at all n locations
gaagtanaaaagggttcagccccttaggcacttctctcttgtcgaaatagctgaggaaaattattccgtgaagaatatccaagccgagacgtttccgcgctgctttcgtgagtaattacgcgaagattctcgaccgttcttcaagattcatcgctgttcttgttagtagactacgctatatatgcgggcatgagttattatatttcctaggtactatagtctacaaatatcggtatgatcgatgaattag

SEQ ID NO: 237827 - DNA, 538 bp, Glycine max
  unsure (1)..(538): unsure at all n locations
tctcacattnntgcttccctgtgatgcatggaacaagctgttatgaatctaaatggttttatgtcaactgctggacaagcttcacatccatattctgttgcaaatttcagttaagaatgcttgtctttatagaactctttacatatcaaatacattcgttagaataaatgaaacaaattagataaagcagaagctcataataacactttcacaagttaagtatggtcaaataactgacatatctcacattagaaggtgaaacataacattttcttgcctccatatcctatcttgcatctaactctgtgatagaagcttcattgaccgaccacagtttgtgatttgccgacgaagaagttgcttcagatgtaacatttgttccggagtaaaagccaggagccattggctttggcaacaatttatcaccacttcaacattgaagaactgatgacatgtgtggcctatcttgtggtctntgttgcacacataataggcctacctgtatgcatcgtatgacttcatagggcttacattggtc

SEQ ID NO: 237828 - DNA, 156 bp, Glycine max
  unsure (1)..(156): unsure at all n locations
agacaaactgccaactaaagccaattngccacacaagcggcgttgagttacaagagtacttgtgccccttatgcaaaactgtggaagagctgcaagtcacttatttttccactgcagtaaagatagtcctctatggtgggagtacggtcttggaat

SEQ ID NO: 237829 - DNA, 398 bp, Glycine max
  unsure (1)..(398): unsure at all n locations
taacctgcattgtttctgcaatgtgatgttgcaatttgaatttggtgaaatcatgggaaacagtgacccagaagacatccttgaaagtcccctttcttttaatctcattcttgaaatgagttgccatgaatgtttttccaactccccccattccatctatgccaataatgaagacttcctcatcctccagaagatcccacatcttcttcacattttcatctcgcaactcccaaagcttctctatcaataaataaataaacttagcatgcaattcagaaggcttgggcaattcattagtcgacccagactgatgcagtgagtttttcacatcaataactctttntttcaggtcctttagtttatccgaccaatcgtcatcttgtctcttgcgcttaatg

SEQ ID NO: 237830 - DNA, 410 bp, Glycine max
  unsure (1)..(410): unsure at all n locations
ctcaacttgggctgcttgacacagcaaaaggagccgagtttttttatatgtcacaccccatgtgcggctagtcgaaagctgtcaaagactaccaaatatatgcttctttccaactcctaaaacctaaaataagatgtggagattgaaaatgtatggtccccatatgctgatgaaaacatgtaaagacatggctggttgggataatgaaatgctgatgcattgatatatatattacgactctaaatcttgtaatacctctgaatgcgtgccaccatataagtggttgtaaatgtgcaaatcatctgcgtcaaaaaaggagaaaaacctaaatctctataggtcgccctattaccaaanatggcaaaatgcagggaataccgctcaacaatgggacacctgcaaagaactcc

SEQ ID NO: 237831 - DNA, 432 bp, Glycine max
  unsure (1)..(432): unsure at all n locations
tgtatganactagaataaacattaactatcttaaagttgtgttcacagtccaaccacaacttcacctatttagtatttatcgtggtaaccaatgtttactttttaagatcttacatagcatttaaggatgcaacttatagacaacagtagagagttgaatccttggcccatgataggcaaccatcgatgatttaacacaaaggaccaaataaacttcacagaaaataattcctgatcattacaatttctaaaggtacaataataattaataagttgtaccattcccagtccccaccatgagcgaattggaacaacagaggactttttttcttccttttttcatggtgtccgataacaacgttgctatttatgcttttactccacttattatttggaggtggggtatacaatcgctcagaattccctacaaaa

SEQ ID NO: 237832 - DNA, 172 bp, Glycine max
tgacttattgagtttcctgcactcttaaaggaatccccgttagtgctcttcgtaccaatcgttccaataccaaatttggtacgtgtaaagaacttgttgcacgccaagggaattgtggttataatgaggaagattgggtgagtagagagaattgtattgaaaatatgtaata

SEQ ID NO: 237833 - DNA, 211 bp, Glycine max
  unsure (1)..(211): unsure at all n locations
ntgcgtggaggagacagaggggcgaggcaaggtgatgtcttgtctaggcggcggcggcggagaactgaaatcgcggctgcagcgaggggagtttctgacgacgtcgcgaagctcttggaggcctgtcgggcctgggcttgttgagcttgttgaaattgaagttaatgacactggtggcggcgcctcctcctccgccatgaggggggtggtg

SEQ ID NO: 237834 - DNA, 259 bp, Glycine max
  unsure (1)..(259): unsure at all n locations
agctttggagtttccaagtgccaattcgtcttcttctttagnccagncttcttctggcttcaattcattatgggtttccttctgtgtcagcatcttgggatgttcccagcctttgatgacagctntccggttctgctatccagtgatttgaggaaggccaccattcttgctttccagtattcctgttggtatatgggagctttttgatatattaagatacgggcatatgcgaaggaagcatgtatgagttgaataaata

SEQ ID NO: 237835 - DNA, 241 bp, Glycine max
  unsure (1)..(241): unsure at all n locations
agcttatgctgcanatatttacaatagacctcctcaacctcagtagctaaatcaaccacaacagaacaattatgacctctncacaacagatacaaccctggatggngaatcaccctaacctcagatggtccagccctcagccaacaacagcagcctgctctttccttacaaaatgttgctggcccaagcagaccactcattctcacaacaacacaactagcccatctaatagagtgaagta

SEQ ID NO: 237836 - DNA, 416 bp, Glycine max
  unsure (1)..(416): unsure at all n locations
tactcagcttctaaggaggtgagcttagttatgagaggggtgtgngtatcttatctctagcttctcaaggaagttttctcaaagaagcttctcaaggaagttttctcaagaaaacttctcaaggaagctacctagtctataaatagaagcatgggtaacacttgttgtaactttgatgaatgagagtcttgtgagacacaactcanaggtcaacttctctcccttttttcttccttcaatttcgtgctcccccctctctctttgtctccctttttcttttcctccattgaagcatcctctccaagcttcttatccaaggctcatcttggtggtgaagctccttcttccatggcttattccctagtggatggcgccgactcttacctcttctactttgacttctgctgcatctacat

SEQ ID NO: 237837 - DNA, 288 bp, Glycine max
  unsure (1)..(288): unsure at all n locations
ttaagtcacctgaggcatgcaagcttagcntcagtccaatgttgggaagaatgttgcttatttgtttatagttactaatttactcttattttngtttacttttgtttacatgagggactatgtcattttatatacatggtttttccttctattttctataccgcaaataagagaaaagaaaagttntaactttcttctctttcattttttntcctttaaacaaaaatattatattttaaacggtatatgttatatactcataatgaggtgaaactagtatgctggatt

SEQ ID NO: 237838 - DNA, 508 bp, Glycine max
tgagctaaagttagcctctttctggtatgtgactccgtttatattcttatataaagaattggttctatttgaactaatattattacttaaatgttgttggaaggaaatatatgtacttaaaaggacgtacttaataaagagttaaccttgaattgagaataataatgagttgatacaaagttgttaaagcagctacgtggcgttttgctttggcggataaaggaacgtgtggtttcatggttcactttttgagttgatcccattgccttttaaatgaagccctcaaaagtatgtctgtttgtgaatagtgatagatttgttgttttgagcaggaaactatagaatgataatatgtgctttcattttctatgatgtttttataggatgtcgaggatattgtggtggaagagaatgttaagaggctgaaaaaagacttaagtttcagagaatagagctggcataaataaggatgagactgtggctgatcaagagagaatcaacataagag

SEQ ID NO: 237839 - DNA, 272 bp, Glycine max
  unsure (1)..(272): unsure at all n locations
agcttcttgctgttcacctgcacaaatgagctgtatttctaaaagtcttttatcaaatggtgtcaaagattatgaccattcatctgaagttaataatctttgangtgcattgattgatggtgcagcagatccttccctcgctgtgggggaaaacaactgtagaagagaggtcacgaagtggtattggggtttgcgcntgtgtagataccagttctagggtgtagagtgttgtatatactagaaaagaatttattgagatttatagatatatt

SEQ ID NO: 237840 - DNA, 448 bp, Glycine max
tgtactccagtcatccataaacctatttttgacatcaatattgttaaccctttatatcgtcaagaatattcattatgaggtaataaaaaaaaccttgtaattcaatttactcacacaatccacagttgtagtatagatatgttcaaacacttgtcacctgatattatttcagttagatctgcatgtgtcatgaaaaaggatgcttgtacattaggaattccaaatttcatcccatcccacgacaattgaactggcttctagtaaacatcatacaagatcttcatcaattctcccaatggatcgtctccagcaactgtattgcacctttcaacaggtccaactggtttcaacacattattgtgtgaatcctatatagttaatgaaaataacaattacagtaatattatgaaacaaatattaacaatgttctgtggtgattgttgctgat

SEQ ID NO: 237841 - DNA, 286 bp, Glycine max
  unsure (1)..(286): unsure at all n locations
ttaagtcacctgagctgcaacttcagatatgaaagctaaatcttattggtttttcttgaggtacttgatgtaaatacctttatatatatttaatctgctttatgtgttctctgtgtatcagtacgtcattttagtatgcttttgccttgatactcagatgcatgctttgttaggatcattcaatagtgggaactggtctgattcttagacttgangagttataagaggaactagggtgaggtgatacaagacagatgtatgataaagtgtatagactaatctgaaa

SEQ ID NO: 237842 - DNA, 534 bp, Glycine max
  unsure (1)..(534): unsure at all n locations
tctttttctccatcgtgctcgagaccgtgacaactcgtttctttacctaggtacattttgtggtcactacaagtaccttactcaggtacatttcgtctaagctctcttgttttattgaatacgtaggtctgtttggggaactcatgctcactgcaaggactttgcagtccgtttggggtgctcactcgtgctcacaaggtctcattttgattgaggtaagtcgtgatcacttcgaagtcctttgaatgcttaatgtttgttgtaatgtgtagaacaccatggcggccacttctcactttgagtgcgttgttccaatacttgtgaccactgtagttttggcagactttctaaaagtagaataatgggtagcgtaatgtagcgtagtgtagtggtgttcattctgattgaggtagcatagtgttccaatacttctttagcacaacttgcanataagagtgtgtntctgggttggtcaacatggcttcgatcanggctcatggtgccgatgatagcagttctagcattacnccctaa

SEQ ID NO: 237843 - DNA, 197 bp, Glycine max
agctgtctccacatatttaagtacttaccggcacgaactggacaggtggaccatctggataaactccagagttaagacaatcgagcctgttttggaggaccagtgtttccgtgctgtgtgaacgaaaatgttgtgctcatatttaaaattactggagattatgagatgtaaaacaaacattgattgagtgcttatac

SEQ ID NO: 237844 - DNA, 363 bp, Glycine max
tagttgtgctccttgtactcatttctcaaggtaatgatttcttctattgtatgaaacataatttttttataaattgttgttagtttcttcatttaccatgatgtcaggctatagtcaatgttctttgaaagatctcactgtaaatcaatttccaacaagaaataaagtacaaggaaaacaagaatggagtgtaactatcaacaataagtgtccatgtgttcaaaagaatgtgatattaaattgtaaaggatttcaatctgttgaatccataaaaccttcacttttgaaggtcttacacaatatttgtcttgttaatagtggtcaagccatctatggaattcctatcaaattcagatatgcttc

SEQ ID NO: 237845 - DNA, 282 bp, Glycine max
  unsure (1)..(282): unsure at all n locations
tgcagctttaatcgagtgtgcgacgtgacttttaatttatttacttttccctcttatatatctttntattnttggggtggccgggtattgcccttgctttacatatactcaggtgcgatgaggaattcagacctacgccctctttaagttcaaatgtttgtgtgttaaattgattttatgtttttgaaagattcttttatgacagtagactatgtaatacgaatagtgctaatatacgaactgtgttaataattacattggttgtgatctactaatcctgct

SEQ ID NO: 237846 - DNA, 530 bp, Glycine max
cttttgcttacatactacagttatagatctgcccaatacctttgtagttttatcaatttgatttagttgttcttttcgggtgaggctctagggaggttctttaccctattgtcctattggacagagtatgtggggatcataaccttgggcccctgataaaggccagggaactaaacacatacgacttttactatgattttcgacatatccattaaaattaaactcgaatggggaagttaatactgcccaatgactattcacaagagatacaagttgatagatgcatttttggagagactggatatgcatttttttaccgagtatttatgcaacacagttgcgatgggcaataatatttgaagtgaccttttctttttgtagtattcaatatcagtgcttgctttcctgatttatcttcaaattttgaaacaggtattggagtcagcaaatcacataaattcttgcagaccagtgagttgtttagacccttcttacacggagacagatatgtaaatacctctataaaagct

SEQ ID NO: 237847 - DNA, 236 bp, Glycine max
  unsure (1)..(236): unsure at all n locations
agcttaattatcagactacggtgatgtaatattaaatatttataaaannnaaatattactttaactatatgcatacaaattggcgaacaaaaaatattcaaaattattatatatgtacttggcataattgagcgagaattgtaataaatgcatagaaagaaataagagctttaattttatttagacatcgtttgcaagataagatgtttatattgttgtacctgaactctactata

SEQ ID NO: 237848 - DNA, 519 bp, Glycine max
  unsure (1)..(519): unsure at all n locations
tgagctatagttgccttattcttgggtaggctcaattgtttcttctttatttagagtttgaatttaataagttcactaactctggtttttatgaactggtaggtggtggagatatattttatgctggcttgaatatcatttttctgtacatatgtcaacttcctattgatcagatgtgtggcacatatgtcaactcctgttatatgttctgtaacagacattttcagcttattaaaatttgttggcaggccatacgatcatgagatggtggacttgtagtttgagtgaactgtttttctgaaaatggagtatctacttgtaataatcttgcttggatactctttttatttgtttataattatgctaatgtaggatttattttcaactcttttcctcgtgtntaatttgccagcttctcttaattgtgacttgtttgacctttcttttcttcctttntatttagaaccaaccacacctattttatttgcccttcttttttggctntcctatgttttttta

SEQ ID NO: 237849 - DNA, 337 bp, Glycine max
cccaacccaaaccacgccgccaccgccaccggtaccagaaaacaaccaccgcaagaaacgagacaagccgcacacggaaggcacgaaaccgcgcgggaggaccgccaagaccaaccacaggatacagggccgcgggacaccagaacaggaaggacaaacccgtgcctcacccaaaaaggaaggcacagcactagcggaaaccagggaagaccaaaagagccaaacaccacccggccaaaatcgcaagcccgcaacaagggggcaccacacacgagacgacccacggagccaaccaagcacgacaaggccaacaccagaactgcggagcaagaccccc

SEQ ID NO: 237850 - DNA, 148 bp, Glycine max
taaacggacctatttgcttgtatcggttgactggaccgttcaaaagcataaataacctataactttaccgcttttgtaagaactacggatctgatttcctcacacaattgaggatacgtaggagcaaaaaccttgcttttctgaccac

SEQ ID NO: 237851 - DNA, 446 bp, Glycine max
  unsure (1)..(446): unsure at all n locations
tctgctgacgcgcgacgtaatgtatcttcatcattggcaacttctattctatttcctgctgagtcagattcatttctaatatctccaaattttttaaacccacaaagatctttactcccagtgctgttgattttcttatctgcccaagtaacagtgcgactaagtttcttttcacctgcagatttaagggaagatttgggtttagtctttaatgatccacctgctttttccacttggaatttctcttcaacattggcaggatctaaattggaagtggaagcatcatcattagcagtaactctactcattttccctttgacttgtacagatttcttagcagaatcattctgttccacatcacattgtctttctgatatggagacggaatanacatctttctttttaatagcacaatcgggagaggaattgagcgcagcttcacatga

SEQ ID NO: 237852 - DNA, 266 bp, Glycine max
agcttgtgagttagcgtgaatagtacccttgtgtgtgtattaaccaagaagcaactcagtcatggctgtgagcattcaatgcattaacttagatcttagtaagggatactgccaagtgttttgctctaactctacacttgatttttgggatatgagaagtaggtaggggaaaaaacttcattttggttttctgacatgacaataaataagatgggatgtagtcaatcacagtatagatgaacatgttcataaaatgtatatattct

SEQ ID NO: 237853 - DNA, 419 bp, Glycine max
  unsure (1)..(419): unsure at all n locations
tgagcaactctaataggggaaatcctccttctccaaccattctttccttcctttcttttatccatctcatcccttcttctatctacattagccctaaagtgtaaagcctctcatgataatgagaggctaaacccccattgttgggagtctggcagaccaacttttgtaatgtagctttttcttattatttatttaatacaatccaatttctgttgctcttttctgtgcttatttgtttattgattattgtatgatcatccatgttcatgtagtgcttaaaagataatgctttgaaaaatggttattttctaagaaataggaaaagacatctaaatgaaatcattgctagaaataaattgatatttggttattctattntatgcatatctaatcttaatgcaatttattggtttaatttt

SEQ ID NO: 237854 - DNA, 152 bp, Glycine max
  unsure (1)..(152): unsure at all n locations
tataacgnggaacatttggagaacccagctacacagctttagttccctacaatttattattccttcactaacactttctggtttttttcccccactcgtctgccttctacgaatggctttgcatctccatcttttctaactcgccgtgcata

SEQ ID NO: 237855 - DNA, 416 bp, Glycine max
tgtaagaaaaacaaccaccagaattctgagaatctttgattttcaacattagtgtcaaaggacagattcaaactatcatcttcaggagaacgagaggaactcgcttgagtaaggttcacagtaggcgcaaaggtattactcaaagaatcaagtttattgtacttcctaagtggcagttcttgtgcaagaataaagccttcaacttcttcttcaccggtgatatatggaagtcgactttgaataagagcaataacagaatcgaaatccctaggaagacctttaagaatggaatccatgtgctcgcgataggtagcaacatctcttacagatccaagcgccttaatgcgaggaaggaacttcgaaacgagatgattatcaagagtagtagtatgacaaaagtcccatcggagctaaca

SEQ ID NO: 237856 - DNA, 166 bp, Glycine max
agctttttggagtagaaacatgggaccaactcattttatttcaaaaagaaagtcgtatctagtcaagggttagagaccatacaagtttcctagcgatttctaattatgtgggccattaagtctattatacgtgacaatagcctagaagcccatgaatttcttcggg

SEQ ID NO: 237857 - DNA, 471 bp, Glycine max
tctggcagatgatctaactggattcctgcttatactctttcttgacactcttacagggcttctgctaattgatcttcctgatggtgctcttggtgaactcctacgatgactcagataaagggatcttacagggcttgcactgccatttctattaccatgagatcccataggacttctactgacacttttatcactgcaagttctcacagggcttctgcttattgatctacatgatggttctctgggtgaactcctctggcagctacgagaaagggatcttacaggacttgcactgacaattctatgatcacaagatctcacaggacttctactgacacttctatgattctgagttctcacagggcttctgctgattgatctttgtgatggtgctctgggtgaacttcggtggctacgagaaagggatcctacagggctagcactgacacttctatgaccacgtgatctcac

SEQ ID NO: 237858 - DNA, 270 bp, Glycine max
  unsure (1)..(270): unsure at all n locations
acctgcggcatgaagcttntgggctaattttatttcttttatgcttgttatatgangggttctggtgtcactaatttggaggaatgattaacatcttttgctgaacaattaagttgntctttatttattatgtaatttgaaagaatgaaactgtttaagttgctgatgtaacattccattnttcatatataaatttttttgttaacaaatagagaacgagtttataagataataaatagtgataagtattctggaaaagctaaaaaaaaa

SEQ ID NO: 237859 - DNA, 448 bp, Glycine max
  unsure (1)..(448): unsure at all n locations
tgtctaanaactttggggaaaataggatagagtctcctttgtatttgttgctctctcaaagaaaaattaaagcagaagaaagaagcaaagcatgcatgcaaactattctcaagacaaagtcacataaaatagtttctttccctagaaccaattttctcttcaattcaaaattttctgaaagcacttaaacggaggtcattacaaccaaggttaccaccttccaagggttgagttcacacaaagaaatccccacttagcaatggtaatctctacacaaaaattggaagaagaaatggtgaggatggatagcttcttgagctctagcaaaggcaccaacaatggaagcaagtgtgcataattaccttttctccttctcctctttgtctcctagccagaccatcgaaagggagcaagatgctgngcttttgttttcttctaagtgtggtga

SEQ ID NO: 237860 - DNA, 271 bp, Glycine max
  unsure (1)..(271): unsure at all n locations
agctngtaaaatggctagacatgatacatgtcatggtttggtttggntcaaggataaaagggatgccccacattatttccatgctacaaatgcacaaatgatgatntggaaattttatgcaaaactggtcatgcatgcacctacttggacgctcaactgtcaaatntctatggtcatgtgatactagggctcaggattttttccttataacagaagctaatggttacatggggatagtactggaattaaaatatatttaatgaattacggt

SEQ ID NO: 237861 - DNA, 465 bp, Glycine max
tgaagaggatgctgtaatggaggaaaagaaagagagaatgttttagcacgaaattgaaggaataaaagagggaaagaagtggaactttgaagtgtatctcataagactttcattcatcaaagttacaacaagtgttacacatgcttctatttacatactaggtagcttccttgagaagctttcttgagaaaacttccttgagaagcttctttaagaaaacttccttgagaagctagagcttagctacacacacccctctaataactaagctcacctccttgagaagcttccttgagaagattcctaaataatctagaccttagctacacacaccccctataatagctaagctcacccccatgccaaaatacatgaaaatataaaaaaagtccctattacaaagactactctaaatgccctgaaatacaaggctaaaaccctatactactagaatggccaaaatac

SEQ ID NO: 237862 - DNA, 400 bp, Glycine max
aactcaagcctggtatctttgaggccattatgtaggtgggcaacaccaagtattgattcttatatataacaacgctaaagcttagtatctttaggaccactatgtcggcggtcgacactaggatcaaagcttaagcataataatattaaagctttgtgttgctatgactattgtggcacctgcgatggacaccaaaattggagttgaaacataataatatagaagctcagtgctgtaaggactattgtgcctgtactcgatgccatcttggagttgaggcaagatggtttcctagtaaagcatgtaatttctctggctttcaagcacacaagagaaattatggattgacaaagaatatggcaatatgactttataaatacattgcgcacgcatgttcttg

SEQ ID NO: 237863 - DNA, 273 bp, Glycine max
  unsure (1)..(273): unsure at all n locations
agcttaatggggaatctctaagggaagntgtattcttgttgatcactntntaacttaaaatntgacaaagcatgattatccgacaaaactaacgaacatggtgtaattgatttgcagcttctttactgttcatggatagcaaaaatcatcaacaagtatgacaaagtctcatttggttctaaaagattaaattggctacagttaggtaaatacgatagatgaaattttggtgagaattggtgaagagagatttcattgtgatataaatatatg

SEQ ID NO: 237864 - DNA, 361 bp, Glycine max
  unsure (1)..(361): unsure at all n locations
tgatctggtaatagtgaagagaatgtgaaccaattgtcctttctgctctgntcaccaatatattggtatattctatttatttacatatatctcggggtagagagtgtcacatttagtggtatcatagcaggtcgaacctttcagccagtgagttatgcgcttaccatattctggagtgcactctgcgtggttacttattaatacttttgtttaacatgcttaaattattattttgtattttttatgtacgatcaaatgagacttaatataaatgcttgtgatgtgcgttgcatccctaatgtctgctatatcataaatccactgttgagtcatgagttatgagactaaccatctctataat

SEQ ID NO: 237865 - DNA, 242 bp, Glycine max
aaaccaacggcaaaagccccctcccagcgaaaacaggcgggaactggcgactaaagcccaagaggggacactgaccgatccacctagaggacaaggcgagtccttaacgcaggggcagtgataagcagaagcataggccacacatcaacaaggagtacacccacaaaccacgagcccgagaagctacgaccacggacgcactaccaggaagacgcacaacacccgaagggcgcagaccaccc

SEQ ID NO: 237866 - DNA, 502 bp, Glycine max
  unsure (1)..(502): unsure at all n locations
tgtaatcgattacacacatactgtaatcgagtaccagatgatantttcanaaaatattctcaacagtcacatcttttcgtttggttcttgaatgaccatcaaaggcctatatatatgtgacttgagacacgaatttgttaagagtttttcagaacaacaagtgtttattctctcaaaaagcaaaatcgttttatcctcttaagaattccttggccaattcaattgcaattcattaaggaatcatttgagtgctcagattgtaaaatctatctctttcaagagagattcattcttcttctctttctgattcactaagggattaagagaccgagggtctcttgttgtaaaagaattctaaacacaaaggaaggattgtccttgtgtgtttagaacttgtgaaaggaatttacaagatagtggaactctcaagcgggttgcttgggactggacgtaagcacaagggtgtggccgaaccaatataaattagaagttgcactttctc

SEQ ID NO: 237867 - DNA, 244 bp, Glycine max
cgctacccagcctttgataaccggtggatcttctcgaatctgggttgcaacttcacaagacactttaccatgatttaaccgttgggaatcttgaaaagatctggagtgtgctaaaagcttccgttcccaagagcatcccttatttaagcatctagccttgttgtaaagtttatttcaaatatcactttcatactcaacttgttgacacgagatacaatatgtgtgaaacattagtttgatgttg

SEQ ID NO: 237868 - DNA, 491 bp, Glycine max
  unsure (1)..(491): unsure at all n locations
tccattntcaatttcgaccatctcgatatattaccggacnctttctgacatccatgtataaagtgattgtcaattcaatttactcagggcttcggatcttaattttgagcgtctcgatatattacaggactcattcagacatccgagtaaaaagttattgtcgtttgaatttgatacgagcttccgttttcaatttggagcatctatcgataaattatgacactctgtcgggcatccgagtaaaaagtaattgtcgtttgaattttctaagagtttccgttttcaatttggagcgtcttgctatattacgggactgaaacgaacattcgtgtataaagatattggcatttcaatttgctcagagcttctagtctcaattttgagcgtctcgatatattacccgattcaatcggacatccgagtaaaaagttattgtcggttggatttcctacgaacttccgtttcaatttggagcgtctcgatatattaca

SEQ ID NO: 237869 - DNA, 285 bp, Glycine max
  unsure (1)..(285): unsure at all n locations
agcttctcaaggaggtgagcttagntatgaaatgtgtgtgtgtanctaagctctagcttctcaaggaagttttctcaacaagcttctcaacggatagtttctcaagaaagcttctcaaggaagctacctagtctataaccgaaacatgtgtaacacttgttgtaactatgatgaatgagagtcttgtgagacactctcaaagattcttcttcgccttttttttttttatctcagtttatttaggctctctctgtcatcggactagcatgcaacgctacacattat

SEQ ID NO: 237870 - DNA, 439 bp, Glycine max
  unsure (1)..(439): unsure at all n locations
tctccattgatggctgaagataatacttctcaatcatctgttggacatctgggngaacattaaccgcatcaagtgactcaagcagccctgaataagactgaagtgcaaaaatcagatgctgaggaaatggtgcatcagttcgatcacaacttctatccaatgtaaccacaatttttggcatgagctgcttcacaaagcgaaggaccaaaggtagatatgatgggtaatttgagaaagagccaataggcatgttaaccactacagcttcacagtcacgaagtggctggggccaggaagcagaatttaaagattcaaggctcagaatctcaagctcaaaggacatgtgtaactccccagcatattgcttcaaactcttctgagagaaactgagctcaatttcatcatggtgggagggtgacacaaatgcagngatcttgag

SEQ ID NO: 237871 - DNA, 171 bp, Glycine max
tttggaaagaagtcttttggtaatgggtggaggaatttaaagggaatttatttaatagtgacagtcattcagtataactggaaataagttcccaaataacaaggtatttatataaaggtgaaaagtataatgagataggggtagggagtaaaaagaataaattggaagggg

SEQ ID NO: 237872 - DNA, 443 bp, Glycine max
  unsure (1)..(443): unsure at all n locations
ctcagctttccttatttgtcactaggattgtaagcgtttaagttataagagaaaggattagattattcattgcactgtctgtgtgcaattagaatgtcttcatccactaacattattttgcaaatcccaacgatgtaaatgtgcgaaaatgaatttcgaaatccaatgtttaacgacgccgggatcatagttttactagaatatgtttgggtgtatgcgggaaaatgagagctatgtgtgagggacatttctctcaccacaggcattattttgaaaatcccaatggcggggatttgcgaaaatgagtttctaacccagtgttcgaatgtaatgatgatccaacggttaacgattctaggatcgcaattttactggcatangagggttggatgtatgcgggaaaaagaaaggttctgggagagagaggatggaaaaccaatttt

SEQ ID NO: 237873 - DNA, 198 bp, Glycine max
agctttatcaagctacccaacaactaagaactaataactgaaatttataactaaactgaaatttaaaaactgaaacattaaccacatctaaattataaaatgactaaagacatgataataataaaagtgtcaaaaagtcgaaataaaaatcctgatcctgtaacaatcttatgagagtccgtggcatgctctttaaat

SEQ ID NO: 237874 - DNA, 424 bp, Glycine max
  unsure (1)..(424): unsure at all n locations
tgtacagtttgggaagaggttntgattgataaaaaaaaagattctacttcaaccaatacacctttaggcacgaccatacataacatagaaatcacactcggaaaaggtggacaattagctagagcaacaggtgctgtagtaaaactaattgcaaaagaagggaaatcggccacattaaaattaccttttgggaggttcgtttgatatccaaaaaatggttgacaacaatcaaacaagtgggaaatgttggagtaaaccaaaaaaaaaattaggtagagctggatctaagtgttggataggtaagcatcttgtagtagaggagtagttgtgatccccgtatttatgaaccacaaaggaattatgattagtagtggcttttctttaggttctagactagagcaacaagttcccattctgtaatacc

SEQ ID NO: 237875 - DNA, 288 bp, Glycine max
  unsure (1)..(288): unsure at all n locations
agcttaaaaaaggcatgcagagtaggtggaattcctatatcaattcccttatgttatcaaacataaaaagggaaaaggtatctgcagccgatgctcttctcgggtcatgcattactttctatgcttgaaacaaaattctcggtcttgaatgtttgaaaagcatgtaagaaaatgatgaaacttttggagaaattttaaaatgaattatgtaatagtttaacatgtctagtaatgttanatagaatggttggcaaatataatttgtaaaggcattgctgttgagaataa

SEQ ID NO: 237876 - DNA, 502 bp, Glycine max
  unsure (1)..(502): unsure at all n locations
tgaagaatctcagacaactgctagagatgccactatcacnattataatacacacatgggcccgcttagaggcaagagatgaatttattggatgaaattggaatgaacatgtgtaggaatccttagggaatcaaattggaatttattttgggatgtttattgaattataatttttcctttgtgattataaatacgatattgttgtgtttgatggaccaattgatgtcctgatgcgaattggtggataaaattgagtgctcatggtgtttttgtgttttttgttagacaagtggcctcagatatcttaagaagggggggttgaattaagatattccaaactgtttcccctaattaaaaaatctatttcactttttactcaagttatgaattcccttaatgacaatcttcttaaatattaattcaaatgaagcaacttgaatatgaatataaagcaataataaataaaggagattaatggaagagaaaatgcanactcagtttta

SEQ ID NO: 237877 - DNA, 261 bp, Glycine max
gcagctggtcgggtctaggcgggaagattttattgataatacgaatgaagacgtcgaaaacggtgaaaccttggcaatttctcaggaaacgtacggaacgtttcggagcgcctcgcttagatttttcagcggaaacaattttccagcaaatttgaaagaagagaagtgcaaagggcggaaccctttatttaaaaggggtggtgagacggttaaactgaattggatgtggatgcatttaactgttgtttgagcaaataatgt

SEQ ID NO: 237878 - DNA, 534 bp, Glycine max
  unsure (1)..(534): unsure at all n locations
tggttcgaggtacttacccgtanaagatcgaagaacgngtttatctttgaagaacgtcgaagaacggttgaaacctttgcgaaattcctcacggaaaacgttacggaaacgtttcggaagcgcctcggcttagattttcttcacggaaacaatttttccaagaaaattcgaaagagagagaagtgccaaaggggctgaacccttttcttcttcacttcctcccctatttatagcaaaataggggaggtggttgccgcccagctcgcccaggcgagctcagctcgcccaggcgagccaggttgcttccttcagaagcaacaaccttctggaggaatattttggagggcctaagtgggcctgggtgctatatgcaccccaattttactaagtacaccccctctgctattttttgggattcttttttcgtaaaggtgcggaaacttacgaatatcttaacgataacttgtttctttctcgaatggaccggacctcgcggatacatatcatcccttttgactacgaatgtacgggacc

SEQ ID NO: 237879 - DNA, 232 bp, Glycine max
  unsure (1)..(232): unsure at all n locations
gagatgagcttgaaatgggaaattggtaaggttttactttttcatcatgcatttngatttgtatagaacctatcccaactgtttgcaaggagcattgtacccatgaaaaattaccaccagatttcttttcataantattctcaattttggtatcggaaaaattcaagtctacatagctaaaaatagtgttagatagagatcggatacattatgaacttaagtacttattaag

SEQ ID NO: 237880 - DNA, 512 bp, Glycine max
  unsure (1)..(512): unsure at all n locations
tcanaccccgcatataaatttgaataatctttgcttctgatcttgttatactatagctatttgaatattaaagtgtgatgggaaatataataactaaggttttatttaatttgtaaaccaaatcttttgcttagaatgttaaaaaataaaaataaaaaatacatgtatttcattgtttttgttctattaaatcttatcaaatttgacacaaatgagtttagtttaaaaacaagaatataaattaaccaacttaattatccatattcaataacctatttaataaaataaaatataaatttgatcttaaatttatttaaattctatatatcttataataaattgtaaataaataattttattttatatgaatacgactaaaacataaatgaaaaaaatacaaacaagcatgatttatgacattaaaggagattacattcttcaacataacccaaaaaaatctcataataaaaaaccataacacataaatgttcaatcatcacatatataacact

SEQ ID NO: 237881 - DNA, 148 bp, Glycine max
gaaaaggaagtagatatatttgttgccaaagaatatttgtgttttatgatagattgcttagaatcaaatgttaaaataagttgttgaattataagattagtggtaaatatgagattatatctagataatatataatcaggttttatat

SEQ ID NO: 237882 - DNA, 399 bp, Glycine max
  unsure (1)..(399): unsure at all n locations
tggatttcctttagtagggaatctatgcttcctaagatggtgnctcaacccagncaccttcattaagaactagctcttttcttcctctattgcctttagttgaacacacctttgtttggttctctatttggttcttaaccctctcatgcaacttctttacaaactcttacctagattccccttctttatgtataaaagaagtgtccagtgggaggggaatgaggtctaacggtgttaggggattgaacccatagacaacctcaaaaggggactgcttggtggttctatgaacaccccttgttgtaagcaaattctacatgaggaagatactcatcccaagacttatgggtgcctttcagaagagcccttaatagggttgataaagacctattcactacc

SEQ ID NO: 237883 - DNA, 224 bp, Glycine max
  unsure (1)..(224): unsure at all n locations
gcttaacatagagagtggagtgtgnttgttttacttcacatggactggatggggcctatgcaagttgaaagctcggaggaaagaggatgcctatgtgttgggatgattctccagattacctggttttctatcataaaaaatcggaacctttgaagattaaggagttgagtttaactttaaaaaaagacacgtgtgagtaacgttgtctagatagttgctaacag

SEQ ID NO: 237884 - DNA, 532 bp, Glycine max
  unsure (1)..(532): unsure at all n locations
ntgatgattgtgtagaatgcattaaagataaacagacatntttatgctatttcatacaccttcatggaatggtcaacaatattttatatcattcatagacgattactctagatatgcatacttgtttcttatacatgaaaagtcacaacctttggatgtgttcaaaacatttaaagttgaagttgaaaatcaacttaacaaaagaatcaagagtgtcagatctgatcgtggtagtgaatactatggcagatatgacggtttaggtgaacaacatcaggggctttttgccaggtacctagaggaatgtggaattgttctacagtacaccatgccaaggtcacctagcatgaatggtgtttctaaaagatgaaacagaactcttaaggatatggtaaaaagcatgatttgtcattctaacttaccagagtcactctgggcagaggcactaaagatggcagcttacattctaaatagagtgccaaccaaagtagctgccanaacacacactttcatgtatggggatgtccagctg

SEQ ID NO: 237885 - DNA, 226 bp, Glycine max
aatgcttggccacatggcacttctccctactggtacaaatatcaactttctgctggtggagtagtatagtgactggagcaggtggtgcaaggcaatcttaattacaagatgatgtttcatctcgctccacctcaacttctacaaataacttgtccatgcactcataatcacgagcagtgaatgatgtcatatagtgatctagaagaataaagtatacttatcataa

SEQ ID NO: 237886 - DNA, 523 bp, Glycine max
  unsure (1)..(523): unsure at all n locations
tgaaatcagctgggtctttgtttccagtgagtttgaagttttatgttatgggcacattgaaaagaaaaagatgggattagtactcaagcaaacagttgcaagttcagtgtccacacacagacatttggaaaacttcaagagctaatgaatgtccaaaaagtttttaatattctttaaatttagagaacttcaagaggacaagattgaatagtaccaccgtaatacatatgtaattcaaaaagatcaaaaccagcttgaataataagactacgaaaggacaagatatttttcaacccaaatctcaaattgaagtagcattttggttataaacttctcttaacaaataatgagccaatctcacagaaacatgtgagattgaaatgggaccacaactctaggtcagaagtgatgtgatacaaaaacaattatcacaatcatcgttgataatttgatgtaagaataaatagctnttaagtaaatagaatgagataatcatatcaaatcaaatctagtttgagctcat

SEQ ID NO: 237887 - DNA, 432 bp, Glycine max
tttgaagcacgagaaacaaccgcactaactttggggaatttttacttacctgagcgacccttgaaccctctctcacttactctatttcgcgattactttggtgtgctaagaacccctcactattgcttctgtgtgcaacgctctagaggtctacttcctaatcttgaaaagatgttgcattacttactattatcgcatttgagatctgtgaaatcttgtgccacatatagtgatgtaacaataccttctattactactcacaagcagcttgatctttttccagatatagcaaaggtgggtatgccatctattgacacatcaaagatgcgcggattcttgttgaattatattctaatggattccaggttgaattctcaagaaatgggtaaccgtaattttggctatattaaaaccggcaaaagatgaaccttg

SEQ ID NO: 237888 - DNA, 186 bp, Glycine max
ggagcccacgcaacaatttattgttaattgaagataggaacaatataaataagctgtaagttttataaatttctgaagttttggcatatataaatgaaatgtacttggtatggatgaggttgaaagtaaatgagaagcagtaagaatacattataaggtaaaattattataatcaatggtaagata

SEQ ID NO: 237889 - DNA, 399 bp, Glycine max
tcacatgcctcctaagtcaatagaggagagagggcacggtctatatgttctgcgaagaacaaactaagcgacttacctataatcatgttatcccaaagccaaagctaagaccacttaactttctaccaaagtgtgattttgaaaccccctggagatacttaaaaactcatgcctctgcggaacctattccaaaaagatcccctatgtccaaagtgattttaaacatatagcaatagcgtgccacatttaaataaacttctaggctgaaccgcgcttgccatctaacagactcatcaacatatactggctgcccaatagtattggcccattggagtttcttccttactatcccatcaacaagaatcatattgctcataaatcattgaataagaactcagc

SEQ ID NO: 237890 - DNA, 417 bp, Glycine max
  unsure (1)..(417): unsure at all n locations
ntgcagagttggtcttcaccggcgaaaggattgaattgggtctgaaaagaggaaaatttaaatcatcctgcttggacgaatgagaaaactggggcaaatgaagagggtgagaatgaaggagaaacccatgttgcgaatgtcattcctacatggccaaacttcccaccagcccaacaatgtcattactcaaccaatatcagctcttctcattacccaccacccagtcatccacaaaggccattcctaaatcaattacaacgcctgtctaccgcacgcccaatgcccaaacaccacctttagcgaaaaccaaaaaggaattttgcagcanaaagcctgtaggattcaccccaaattccggtgtcatatgctaacttgctcccatatctactcgataatgcaatggtagcgataacccct

SEQ ID NO: 237891 - DNA, 230 bp, Glycine max
  unsure (1)..(230): unsure at all n locations
aaagctcgcatgggcgagaactaaagccttaattccaaaataattacttgtcgtaaggntattttacatatgattaaaggaatttttattgataaaagagaatagtaattttacaaaattaaatttataccatcattaatttgtacaaatataaagagaatattatgaagcagttggtataattgaaaggatatagaataatattatcattggagtaattaatatatttt

SEQ ID NO: 237892 - DNA, 420 bp, Glycine max
  unsure (1)..(420): unsure at all n locations
ngaagcanggataaagcacgcgcagacgccgatgttatcatttgattnacaaaacaaagtaaggactgtgagaattgaaaacccccgacaactccatgacacggggcaaaggaaacaattcacccaaaactattaccatgtgaaagcatggagagaatgggtttctgaagtcagagaaaacaactcaagagctcattaaatagaagttcatgatgtgagcttatatagataagctacaccaagaaccctaatgaaaaaaagctcacgatataacggtggaacgaagacaacgtgaaaagtcttgagcccagatattaggcgaaaacacaaatgtgctgaattgatgcctctaatgagcacgctgccatactcaacagaccactcggcttacaaggctcagacccacctaccctggataga

SEQ ID NO: 237893 - DNA, 225 bp, Glycine max
  unsure (1)..(225): unsure at all n locations
agcttatcaatgaagtatgttgtgtgtgcttgagtaatcttngcaatgtttcgatacagcatgtttgattggagagaaacatgttttgatcaggaaatgcatggttacttttgcacaatgaaaggctcatctaacaactcaaaatctacagcaagaggagaacttttaagtttgaagtgctgaatttggattttttgctagtgttaaataggttttgatacagtt

SEQ ID NO: 237894 - DNA, 343 bp, Glycine max
tgtgagtggagccacgatggaggcatgacccttataaattttcgatagaaccctatgagaccaaggaaagcgcgtaattccctgatcgtcgccggggttggctttttcaccatggcctgaatctttgatggttgataactgctaaataattgtgaattaatagtagttaaatagtcaaattttggcttaaaattaattatttagcatttatttataattaaaagttgaaaaaattaattaaattgaatttctggttgcagatacgaaaaatgagggtacattaagcaaaaatggcaacagaaatgaagagaaagaaggaattctgaagtaggcctagcccaac

SEQ ID NO: 237895 - DNA, 193 bp, Glycine max
gggtcgtgaagtgcgtggctacgagggtgacttcgaaatttaggtttgggggacttttttactcttgattttcaagggtatggttccgggagatatgatgggaagttttgaagtgttatctgtgtgatgattatttgggaaaatgactgatattggtatccttagttgattagatgattaaatgaaggatata

SEQ ID NO: 237896 - DNA, 430 bp, Glycine max
  unsure (1)..(430): unsure at all n locations
tctcgnaaaatataattaaaggttcaagtacgaacagggttatttngttacatgtnaatacaagngactgtccagagatatattatatcttgaaactatgggcggagcaaaagaaattgaattggccattggaaagtttggaacaactctcgctgcaatataatcaaccgaaattcgatttatagtttgatcggtcgaaagatagcttgatgatgtgattccactgataaatctcataattaggttgtcagccattagatctgaagtctccgcaaaagtacacctgccacctaatttccctagcagtaatcattatcaatatcaagagttaagactaaatatcggggttcaataattcttaaattattattaggataactagatcaattccaccgcgcttgtaagtcatagaaaaaagctagacaccttt

SEQ ID NO: 237897 - DNA, 456 bp, Glycine max
  unsure (1)..(456): unsure at all n locations
ngctggaggagcttctatggaggcaggaggagtgagcttatatgatgtcctacaacggagataatgcaccatggagaagcaacggcgggcaacggagaagatgagatgggaggcaccatccactatggaataagacaaggaagaatgagctacaccaccaataatagccttggataacaagcgtgaataggacgctttaatggatgaaaagaaaaagagaaggggggagcacaaaattgaaggaaataaacagggaaagaagaggaactttgaagcgtatcacataagactttcattcatcaaaggtacaactagtgctccacatgcttctatttatagactatgtagcttccttgagaagctttcttgagaacactaccttgagaagctacttcgagaaaacgtacttgagaagctagagcttagctacacacacacctctcataactaaacaca

SEQ ID NO: 237898 - DNA, 315 bp, Glycine max
aactcaagctaagcctaagagtggagaaaaaagagagaagccaatattatctttgatcatatccccagcaaaacggacagtagcctatatcttgccaagacgagccactacataacctaatacaacacgagaagcgtccatattgaccaatagcagaaaaaacgaatagcgccgtatgccttagtcctactataacccatcaaatcaaaaaaagccaacatcgataaactcacagcagtcagaactcagaacctatgccactctctctataccgaaacacatatagttcgaacacaccgaacgtatcaggtcaca

SEQ ID NO: 237899 - DNA, 250 bp, Glycine max
ttaagtcacctgaggcatgcaagcttgaagaggatgctctaatggaggaagaaatataatgatagggggagcacgaaattgaagaaataaaagagggagagaagtgaactttgaagtgtgtctataagactttattcatcaaagttacaacaagtgttacactggttctatttatagactaggtagcttccttgagaagtttcttgagaaaacttcctgagaagttgaattatagtaacccctaaatatt

SEQ ID NO: 237900 - DNA, 458 bp, Glycine max
  unsure (1)..(458): unsure at all n locations
ntagcctttaggttgttcaccatgtttgtcatgttgctcttcttatctctaacaattagtagcccattatgacttggagctacatcagatggatgtgaaaactacctttcttaatggagatttagaggagaatgtttataaggaccaaccaatggggttcttagttgaaggaaaggaacacgtggtgtgcaaattaaagaatttaatatatggtcttaagcaagcttcccgccaatggtatttgaagtttaatgataccattgtttcctttagattttaggaaaatactattgatctatgtatgtatatgaaggtcagtgggagtaaggttatttttctaattcggtatgttgatgatatcttgcttgcaactaatgatcttggtcttcttcatgagactaagaattntctctctagtaactttgaaatgaaagatatgggtgagacaagctatgtga

SEQ ID NO: 237901 - DNA, 65 bp, Glycine max
  unsure (1)..(65): unsure at all n locations
ttgcatacactgngactgacagccactagtagaggtggtgatcatattccaaccacaacttctcc

SEQ ID NO: 237902 - DNA, 146 bp, Glycine max
ttaaaaaggcttcaaaggttgtttagtatagcattaaagtctgttaccagacaagttcccaagcagtagacctttgtgtgtcttaatttagaaattcctaccgcaagtatatgtacatggtatcaccaatcgaaaaaacgtggttt

SEQ ID NO: 237903 - DNA, 524 bp, Glycine max
  unsure (1)..(524): unsure at all n locations
tagccacaagggtccttgtgctanggattcaaggttggagtttaaaaagagagngaaatgagagtgtttagttatgtggctcagtatgggttaatttaagtatatgactcttcctcttctttatatgcacatcccatcacttcctatattcaactactttgttctcatcactcaagacccacttatctcaacctaaatactctaaaacttactattcacacccaatacaatattttcgcatatgtaaacataaacatacatataagcatcacacaccatcatctcataataattagttaattataaacacttatactaaatttaattcctcaatgaaattaaatcgcttgtaaacaattaggataaaacaatgttacacatgccacaatattaaaataaaataaatgctttaatactaatttatccacatctcaatcttatactgcctctatcttcaaactctgtcttatccctcttttctctcatgtcttgcttcaagctccatacttcactacctttctcac

SEQ ID NO: 237904 - DNA, 229 bp, Glycine max
  unsure (1)..(229): unsure at all n locations
agctntggaagtggaaagcgacgcctatgtcgtgtctcccctattgcaaccacgctcgtccagcactgccttgatggtgnccgcgtgaagttnaggacnagtacgagctcaaaaggtgtttaggttggaatgacgcggcatggcaacgcttggtggagttagaaaagaaccacgggaggttcgggctaggactatgcctacagtagagtaagcaatgaaagaatatgtt

SEQ ID NO: 237905 - DNA, 546 bp, Glycine max
  unsure (1)..(546): unsure at all n locations
tgtaggattatggngtacccatcacatgtggtactaggtggttgtcgggcgatggtgcacaacaagttttccacatccacaatgcgcgcataaacccaccatcccctgttgcccacctccaactgagctcacgcactcccacgtagcccatatcctcgtttatctcaacaccgggtccccatcaatcctcccaagcttccacaacatccaagtaaaacaacattcaaacagcacaagctatcacagccaagcaaaacagagcaaaggcagaaaactctgctcaacacatcaaccaaaatcacagcttttctcactcaaagaccacagtaacaattccttcgatccaattcgttaaccgttggatcgactccaaaattttactggaagtctatagtgcataagcctacattgtgaccgttgggatctactagcaaacatccagaactcattctgcactactctntccacagccaaccacgcacaagcanttttctgtgcaagccaaaatcctgttgcacctattntgacagcaaaattctgcataag

SEQ ID NO: 237906 - DNA, 90 bp, Glycine max
gttttttgttgctggggaaaggtatgggtgttctttgaccgggtaacaatgtatatggattatattaaatagtgagattgtgtttttgta

SEQ ID NO: 237907 - DNA, 469 bp, Glycine max
tattattgttagggtttcttctgtaatggctagctaaactcttttgttggggatttctactgaacagctaatgtaattattttcatatctaatcgattgtgtttcttgtgttcaatgcttctttcagtgcctaaattttgtatgctcttggtctgatcagccatttgtgtgcctagttaggtgattttagcattggaaaatgtattgttgccttacaacttgaatgaagcacaattgaaacttattcttacaagagggatctgtacattaagttttggttttaagtatgctggtacaataatgatgtttggtctaagtctaatccaacaagatggatctgaggacaaagcttatgctaaattagtctaaactctcgtaagctatttatgctgagtctagtccaacaagagggatctgaggataaacttattttagttagtctatacctacgagggttgcctaaattgag

SEQ ID NO: 237908 - DNA, 275 bp, Glycine max
agctttgagccaaaatgctgactcaccatatactttaccctctaaagcaaaaaaaggaaagaaggaaaggaaatttccccacagagaaagcaaataagaagaaaggaaattcccaatcaaagagaaagcaaaaagcacgaaaggaaattcccaatcaagagtgggagaaagaaaaataagaaacgaaactgaatccataagaaaaaaagattacaatgagaaaactcaagtttttcacactgcaattccatcacagaccatacaccacaaataac

SEQ ID NO: 237909 - DNA, 375 bp, Glycine max
  unsure (1)..(375): unsure at all n locations
ntgacttgagtcatcaagagattataaatatgtgaccatgtgtatgagttttacaacaatcaatcctcaatgatcataatcaatctttcaatcctctctcaacatcactcaatatatggcaactctttctacagaattttctgagaccttcctctggagctttctaaaagatgatgagcaacactgtctcttccaataaaagatctttgatcaggaacttgtgctactcatcgtctacattctcttatccctttgccaaaagaacgaaggactaaccgcctgaattcttttgtgtctctcttctcccttacaaaagattcaaaggactaacagcctgagaattcttttgattcttcccttccccttaagcaaaat

SEQ ID NO: 237910 - DNA, 346 bp, Glycine max
tcttatccaaggctcatcttggtggtgaagctccttcttctatggcttattccctagtggatggcgcctcctctcacctcttctcttttgtcttctgctgcatctccatggtggaaaatcaccattaaaggacctcattgaagctcaaagatccagcctccatagaagccccacaagcaagcttccatcacctttcttcatcaactagaggattgaaaagtctgtctttcatgacaacaatctcaacccgtgctttactctttgcagtgtccatctctactatttgggcttctgatgctttggccattttaagaacttcctcaacatcttcaactttcccttcacg

SEQ ID NO: 237911 - DNA, 134 bp, Glycine max
  unsure (1)..(134): unsure at all n locations
gcgctcaatgtaatgatatcatcccaccaatctctactttgacanattggatcanatggttctcttatatatatttaatcttcctctatctcgtcgagcatgattatgaaagaatcatgtgttggatgggatag

SEQ ID NO: 237912 - DNA, 511 bp, Glycine max
tagtgatattcccaacacttaaggggagtgaaccatttattctgtttctgctaagatccacttcttccaggtgagaaatttcaaacaaggattcaggaatttcaccattaaggtgattagataaaaggtatatatgcttcaaattttgcaagcttttgaagctctcaggtattcctccgctaaagatgtttacagaaagggtcaagtactcaagcatgctacaggtctctaattctggggggattttcccaaagaaatcattatatgataagtctatggtttgcaagtgaaccaaacgtccaagatcatgtcctaattgacccaaaatcgaataactagtgaggtttagagaaaccacattgttggcattatcacaatgcactcctgcccaagatgatcatggagtggaatcagacaacctccatgtggaagttatgtcactatgcacagtagtccaattcctctagagggaaacaaagccaaaccatcagattcaatgcataagcgccta

SEQ ID NO: 237913 - DNA, 340 bp, Glycine max
  unsure (1)..(340): unsure at all n locations
cgaaccaaaactggtgagagtgtgaccttaaactgttagtgttcactanctgngagagataatctatgcatgaatctctgaattttataatgaaatgtataaatgaggacatgatgaaggtcatgattgtacatacacaaaccttttgaccaaacaacttaccttgaatgataattgcatcctttgctccctttttgagctgaatgatattttcaaaaatttgaaccctgaacttaaataattatatcctgataccttgtttatattttacgagagcatatggttaaggaaaaattactcttaatatgggggaggaaagtcaattataatgaaaagaaaa

SEQ ID NO: 237914 - DNA, 258 bp, Glycine max
  unsure (1)..(258): unsure at all n locations
agctttatcttgattagagtagtatctaataattagtttgcatntaggacaatctagtaattacctctatttgatataaatcggtttttttaatgtttcactagttttgttttgttgatggacaattgggcttgagccttatgtaatactcagaaagtaagatctattgttccatttcacttagggtgattggtagatatgcaggtaaggtatatattgactagaaatatataattgtctaagcactcggaagtaagg

SEQ ID NO: 237915 - DNA, 515 bp, Glycine max
  unsure (1)..(515): unsure at all n locations
tgttcttgattnttcctcagttctttaacaagctgtgaactatatacttggccttcatttaactgtctttgggcttggcggccacgctcaacaaagtactttcgacacctactgtacgttgatttcaccaattctgttatgggaatgttgcgacaatcctttaaaaccttattgatacattctgagaggttcgttgtcatgtggccatatcgacgtccttctctatcgtaagccatcgtccatttttcctttgagatgcgatcaatccatgttgctatggctggactcagttcacgaaatttttctaaattttgatcaaaaatgtgcttgcaaggagtgtaagctgcataaaaatagttatgaataacaattttaagtataaatgaaagtaaaataaacgtgaccatcaaatatgaaatcttacccaatttcttcaacatttctttttgtttcgcattatcgaattttcgactgaagctgcttgctatgtgtcgcacgcaggatacatgataacc

SEQ ID NO: 237916 - DNA, 229 bp, Glycine max
cattattggatcaacatatgtaaaaccaaaactattccgcagatccctcattaagactagttcaaacctggttcattcaagttctaaggaaagtacattttccaatgctaaagtacctaactatgacacaaatggttgattcggcaagagtcatgctgatagaatatatttaatgatgtatcaaggaaataaactaaatataataagtaaaacttttaatattgaacta

SEQ ID NO: 237917 - DNA, 535 bp, Glycine max
  unsure (1)..(535): unsure at all n locations
tgcctcatagaggtccaggaaggacaaggcggccgaaggatctatttccgccccggagtacgacagtcaccgctttatgagcgttgtacaccagcagcgcttcgaagccatcaagggatggtcgtttctccgggagcgacgcgtccagctcagggacgacgagtatactgatttccaggaggaaatagggcgccggcggtgggcaccactggttactcccatggccaagtttgatccagaaatagtccttgagttttacgccaatgcttggccaacagaggaaggcgtgcgtgacatgagatcctgggttaggggtcagtggatcccgttcgatgccgacgctatcagccagctcctgtgatatccgatggtattggaagagggccaggaatgcgagtatggtcagaggaggaaccggtctgatgggttcgatgaggaggccatcgcccagctgttatgtataccggtgcatgattttgcccggactgctgcanggagacgagtgcgaatcatgcgcaccatatgaccaccctga

SEQ ID NO: 237918 - DNA, 276 bp, Glycine max
  unsure (1)..(276): unsure at all n locations
catgcaagcttccagatctgagaaataccagaaatgattatcagtgctccaatctttcattagncaatgttaccatcaaccatgaaaaaacagatttggctgcagtatacacttcttgatttgagagtaaacttcataatatgtaaacatatgtggagggcctctttctttcatgacaaatccaagttagatcaccttatatttgtataataacataaatgtattgattagagaaaatgagttgcattgaatttctaggtgttacgtttatactgt

SEQ ID NO: 237919 - DNA, 456 bp, Glycine max
  unsure (1)..(456): unsure at all n locations
ngttggagtagaaacatgggaccaactcattgtatttcaaattggaagtcatatctagtcaaggtctgagagaccatacaagtttcctaacgatttctaattatgtgggccattaagtctatcatatgctgacaatagccgagaagcccatgaatctcttcgggggcggagtaggtgtctgccatcgccttggccttggctaacaatcggggaagttcttgactcccgttcaaggtaagagcaaaccgatccatccacatggttgcctcttggtgtaaagagtcgatcacccttcctctagcctctttttccgcgtatacttgggcatactcatccgcgattctatgctcgtgggccgtggctagacctaactcttcttggtacttggcgatgatagctaacatgttggtctctgtctcgcataaacgctgagacaagcttcttttggaccttgaa

SEQ ID NO: 237920 - DNA, 181 bp, Glycine max
  unsure (1)..(181): unsure at all n locations
agaaatatncttacagtagctgcctacctatattttagcctacttgccggtgtgtatagataatatctcattcatttgttacctatatacattgtggtggcattaacaacagtgactatgtgaaatgtagtataagttttgattattttggaacaaatggagggacataaagatgggataa

SEQ ID NO: 237921 - DNA, 467 bp, Glycine max
cttgatggtgttgagaagaaatcacatgttggtcatcatcattttgtggagaatgtgaatgtatgtatacatgatgttgatgatgtcgaaacaagaatcacacacagctcattttgcttcaagactaatacattatcgtttcaacatacaaagccttgattcaagatttcttcaagatcaagccttgccttccaatgaaacgtttcaagttctttcatgcacatgtaatcgagtacccatccatgtaatcgattacccatggcttgaaagcgtgtaatcgattacacatcatatgtaatcgattaccacagactctgaacgttgggaattcaaattttaaatgatagggcacaactggtcaataaaacacctgtggatcgagtacactaattctgttatccatcaccaaagaggattcttcaggaattattgcgcacagtcacatcctatcattctgatcttgaatg

SEQ ID NO: 237922 - DNA, 436 bp, Glycine max
  unsure (1)..(436): unsure at all n locations
tcctctaccgtanaaaaaatattatcggccagtgtttntaataagaattgcgcaatgtcggcagaaaaatatcagtcgtggctatataacgaccgatgtcacgtatttttgtttcaattcaatccctgaataatttttggatattgtccaataggaaatgttcgatcggcgtcatcaggtgatgcttgctttttattttagacctgctggatcggtcatctttcctggccgacatcgactatcattttttttatcagtgtcggtgaataatgttttttggccgaggtgggctgatgtttttctagccgagtaaatgagaacacgccagtgtcggccgaaacacagcttcggttgagctcgcacgaaaaaacaaagccgacctacattgtaagttttggggcgacaccgacaacaaaaccaacctctctaccggaaa

SEQ ID NO: 237923 - DNA, 189 bp, Glycine max
  unsure (1)..(189): unsure at all n locations
taatatatcctacanactctntatagttagcgtccactcataagtggtaaatcatgcttaacgtttttattaagccaatagccaacatgctattatagaactcgcatcactattttgacctagcgtttttacactgagttctttggtacttatcaacctatctgacactcttgcacaacttatgtctac

SEQ ID NO: 237924 - DNA, 538 bp, Glycine max
tggctctggccatcagaaccatctcattcttaagttccttatcctttaaacaaacattccaatcaagtaagtgcttttctgcatcaaatagatcaaacttgatcttctgatcatccatgcccatttccagtttaccttttcccatatccaccacacaactggcggttaacatgaagggacgacccaaaatcagagggatttcagaatcctcttcaatgtccataacaacgaagtctatagggaaagtaaaatgctgcactttgactagaacatcttcaatcactccatatggtcttgtaattgatttgcctgccagttgtagtgtcattctagttggcataatctccaactctccaattcttttacaaatggagaaaggcatcaaatttatattgggccccaaatcaatgagagctttaccaactgacaccggaccaatagagcagggaatagtaacactcccaagatccttatgcttatgtggaaagattctttgtatcaccgcactgcagttcccttccactacaatgttatcact

SEQ ID NO: 237925 - DNA, 418 bp, Glycine max
tgtctacgtaaccaaaattattttccttgtacaacacatactatgggcaaccttttagagtaggcacctttgttgctcaaaatggtggcaccaaacctccatccattgcttgtctgaaaaaacaccaatgctataccaaaatacatgcataatcttacaacaaatcaagggaatgatgcaagtttactctctaactccaactatgtgcttgcatcctgatgaagaatacttgccatcttctgtggattggtttttcctccaatagggcactactaaacaagaaagggcaagagttaaatcttattcccatagcaccaaatggcacaaacctaccttatgatcataccaatgatggtgcctattgagttccaaattggaggcaacacagcattattctattcttcctttcatggccatg

SEQ ID NO: 237926 - DNA, 464 bp, Glycine max
  unsure (1)..(464): unsure at all n locations
actaagcttgtgatcttagtatcaatccggactgtgaggagatattatatggtttaaaacgactacatatgtcagcggctattatatatgaaccagcggcaatctactatcatntatcatttagttcaaacaaaataaaacacaacatacagtttctttcttcttctccacttttggcctaggcttcgctacatcctccggacgattccccaaaggttagtgacgagcctatgtaacacattataaattcggtctttggggaacctttaaatccttctaagatccctgagtatgcctctacaattccatttgtcaaacaattagtgtattctgtcattctgtcataccgccccaaaaaaagtggatggggccattatacttccaacccgtgttggttactatcttgttccggcctcatattcttaaatgagtactcctaatttatcggcccggaaaaataattt

SEQ ID NO: 237927 - DNA, 489 bp, Glycine max
  unsure (1)..(489): unsure at all n locations
gttagataagctcgtaggtcaagctaggcttntatgttagccgagtcaaaccttttaaaaaaaagtctatgacaggtaataagtcaaattcaagccttatgtattcaactcaagccgagctcaagcctaacaaagttcagctcgactcggctctgctcatttccacccctaatgacaatacaaatcaacaaaggaaagagaaaaaacttacatgcacagtactattctatcacaaagaanaggtgagagaaaaacaaaagaaaacaaggaaaaaaaaataaaaagatctataaaacacgaaaaaaccaacaagtcattggttcatgtaaaattgaacttcacctttttaagaaaagtcttagattcaaacattgtgaataaaataaatataattaaaaaaaagacttactaaaaataatcaatcagatgttatgatgaaaaataattagtcattgatgaaatgataaatatatactttacactaataat

SEQ ID NO: 237928 - DNA, 227 bp, Glycine max
  unsure (1)..(227): unsure at all n locations
taatattctgatatgatgtttcatatgttctcaagactggactaatacatttgctgccaagtttcatggtcttgcangtgaggatcctcataagcatcttaaagatttcatattcgtgttccaccatgaagccccttgatgtccaggaatatatatctttctaaaggctttccttattggagaagtcttgtcgctctgtctagttgattcttgactctaatagtgat

SEQ ID NO: 237929 - DNA, 456 bp, Glycine max
  unsure (1)..(456): unsure at all n locations
gtagtgactgtgtgcaaccacaaattgtacattgagtgtcctcattgatatgtcctacaattgattgtgcataaatttttaattgtcataaacatatgattcgtggatatgattttggctttctttctttcttacattttaagccactggccaaaaagctatcccaatgtttattattttaccatttgcaagcccttttgagccaaacacttgatattttgttggaacactaacctcaagataaaagttcctaccttaccttangttangagagcaaacgttgttttgattgagattctatcatttggtggctaatgtgatgtnatactctgttttatgggtatcaaaggaaattaaattttaacagaaagaaagaacataatcgaaagaaatgacagataacgattggaaaaggaaacaagtcttatgataaaaaaaagctgatatgtcatttat

SEQ ID NO: 237930 - DNA, 216 bp, Glycine max
  unsure (1)..(216): unsure at all n locations
aacanttagcccaataggatatttagtagaaaatcatgtaatattctgaaaaagggtagaccacataaacagagcaagctatataataaaagcgcctggaacccggatactttgtaacaaactggaattgaaatattcattaattatagaatataactgtaangaaattataatgaattattttagaagataaacaaatatctaagagagatgata

SEQ ID NO: 237931 - DNA, 391 bp, Glycine max
tcggctattattctgcccacattggatgccttggttatgttgtgctgaatgcactctccacaatgtttgctaaactttacaccatacgcccactggagttgctccttgttcaaacttcagagagtacatttgactctattaagtgtaatttgtggaaggaagagtccgagtgtctcaaatggttggattcacaggaacccaattcggttctctatgtgaattttggcagtgttatagtcatgagacaccaacaactatttgaattggcctgtggcctagcaaatagcaagaaaaagttcatgtgggtgattaggcctgatttagttgagggtgaggcctcaattctgccaccagaaattgtagaagaaaccaaagacagaagcctattggt

SEQ ID NO: 237932 - DNA, 363 bp, Glycine max
  unsure (1)..(363): unsure at all n locations
agcttctttgatataacttncttgagaagctagagcttatctacacacancacctctcataactaagctcacctccttgagaaacttccttaagaagattccttaagaagctagagcttagctacacatacctctctaatagctaagctcacctccttgagatgagaagctagagcttagctacacaccccctataatagctatgctcacccccatgacaaaaaaacatgaaaaaaaatatttaaaagataaagtccttattacaaagacaactcaaaatgccccgaaattcaaggctaaatccctatactactagaatgggcataatacaatgcccagacgaaggaaatacctattctatta

SEQ ID NO: 237933 - DNA, 439 bp, Glycine max
tgcatatgcgcatacatatacttacaaatgtttctcttgcactttacattctattaaccgaagaaatgcacccatatacaatcaatgcagctccattacctatattatttacacgtactcttaaggtgtatttgttacttacattacacacatctcattggcttaattcacatacatgcatacccaaagcattttggggtaccaaatattgcacatgtacaccctttggtatttctaatacctattcatacacaaactttatgatgaatcttgactatctacacaataaggtgctacattccatgctcctttcaagtatttgctacctcaaaccgcatgcaaattccacttatttgctttgctactaaaatgtattcaattaaaagatacatcttttgtaatgatcttcttacatacatgcacatattatgtgattttt

SEQ ID NO: 237934 - DNA, 398 bp, Glycine max
  unsure (1)..(398): unsure at all n locations
ntgatagctgagctcgaaaagacaagagtagcgtatgttaanctttaggtggcagccactatagttaggaaagaatgtgatgagctaaaagatatcaacatgaccacggatgaatcgctatagcgggaaatgaaaaaggccagataggaagaatggagcagaaacaagttctaatgggatttgttaagcagcagtaatgagctcaaacttagaaaggctgagagagacaaatcaaggatggagagcatgatgttagatgataagttaatgagttgtcagatgtgatcgaggccgtacccgaatcaaataaacatgaaaatgcagtaactatgaagtgatcctatgtccgtttccaacgagcaatgataaaacaattgttcataatatacttgcagtac

SEQ ID NO: 237935 - DNA, 346 bp, Glycine max
  unsure (1)..(346): unsure at all n locations
gccgatgcagctgcctgcctctgatataaagttgatcttggtctctagaagacaanccgtggtattagtatgttgccatgcctcaaagcccgtactaaggcatacaactccttatcataagttgaatagtaagggtatgaccacttaacttttcactaaaataagaaataggatggccttcttgcatcaacacaacccaaatcccaacatttgaagcatcacactcaatttcaaaagatttttgaaagcttggcaacgcaagtatggtggcattagttagcttttgcttaagaacattgaaaacttcttcttgtttctctccccatttgaaaccaacatttttctt

SEQ ID NO: 237936 - DNA, 413 bp, Glycine max
  unsure (1)..(413): unsure at all n locations
ntntgtacaagcaacaaacaactacactgctgaaatgttaatgttttaatnnaaaaaactaaaacatataagctgatatgtaaatgacatatatcacacaataactcgactataaactaaagttttcagaatgcacaaatttaaatgtcctgctcctcttgtaataggtccttattcaaatccactgttggaactgctgatgaatcctgtataatttgcttatgctccgcaactggtgcaacatccttacgtatatgtgcatgggatggagatggatgtggagtctgacctggaataagctcttcctcctgaaccgagtgtgtacctgcatcaaaataacacgtgtcaagatgagtgagctcatccccatactctgtcgctgctgctgctggtggctactcactatcatgctc

SEQ ID NO: 237937 - DNA, 376 bp, Glycine max
  unsure (1)..(376): unsure at all n locations
agcttaaccctcacaggctgattcacctttagtantgagaggaacattgntggtctgttgcatctgctcctgaattctattcaccaagccagtcatcccacatggacatttcaaatttgaaagccatatgttaggaacagaccaatcagcataccaacaacgcaccattggagaaaagtgaacagcccaagctctcttttgggtctgacaaagaanagtgaacagaccaagctctcttttggtgctccatgtattgagacaaaggctgaccagtgtctacattccacatctgaaccacaccatcataatcggtagatgccaaatgaattttatggagggctcaacacacataaataactttgatttattgacatct

SEQ ID NO: 237938 - DNA, 302 bp, Glycine max
  unsure (1)..(302): unsure at all n locations
agctntatatgacatagattctacaattttaagtaggacctcgttccacaagaagagatgttctaaagatggaaaggtacatagtcatgttttttgggtcaaagtttagatattagaagctgtgtataatcataggcatgatgttgggggtcgcttaagtcaaggattagatatcagaagttacacatggcttaaggatcctcataagttgtgtttcaagttggaacatgatgatagacatgtctcaatctccgaaagcacacactagctataacatgcattagtgtttgtacaatactaat

SEQ ID NO: 237939 - DNA, 416 bp, Glycine max
ttcaccgacgaaaggatcaaagtgggtctaaaatgatgcaaatctgatcatcatgctttgatgaatgccaaaaagactatggcaaatgaagagggtgagaatgagggagaagcccatgttgtgactgccattcctatacagccaagtttcccaccaacccaacaatgtcattactcagccaataacaaaccttctccttacccaccgcccaattatccacaaatgcaatccctataattaaccacaaagcctacctaccgcactttcaatgacaaacaccacctttagcgtataccaaaacaccaaccaagaaatgaattctgcagcgagaaagccttagaattcaccccatttccaatgttctatgctaactcgctcccatatctacttgataatttaatcgtagccatgacccc

SEQ ID NO: 237940 - DNA, 328 bp, Glycine max
agcttgcccagagaaggagtccatgtgttgaaatgcttaccacctcacaagactggaaagcggtttctaatgactcctctgcggcttccacataatgcatagaggatgggaagctcaccaagatgtcttcctcgcctgatacgatgaccagatgcccttccactatgaatatcaactttcggtggagtgttgagggaacaactcctaatgagtggatccacgggcgccccaacagacagctgtagggagggttaatatccattatttggaaagtaacttgacaggtgtgagggcctatctgtactgggagatcgatctctccctaacc

SEQ ID NO: 237941 - DNA, 247 bp, Glycine max
aaagacaataatagttcactagtgaaattttgacctttattttgtcaaattcgcaatatattatctttattatatatctataagacttggaatgtaggtttatgggccatgtccggcctttagataaacccttaatacatgaaatgctaatacaatttattaaacaaatgccgacttatttcgttggatctcagacttaaataaatataaatactcaaaatatgcgtctgaaaaaataaatacaaaa

SEQ ID NO: 237942 - DNA, 368 bp, Glycine max
  unsure (1)..(368): unsure at all n locations
gagacctctgaggcatgctgacgtgtgcaaatcagatcactcctacatctcatctctatcatgcatttnctttctttacccactcctcacgtttggttttttagggaaaacaccatatctaaacgcgccgcaagggatccctatcgcaccagatccaaatctataacgatgggtgatcaagaggagacacaggaacagatgaaagccgacatgtcggctctgaaagaacaaatggcctccatgatggaggccatgttangtatgaagcacctcatggagaaaaacgcggccactgccgccgctgtcagttctgctgccgaaacatacccgactctctttggaactacccaccatcctccctcaaacat

SEQ ID NO: 237943 - DNA, 363 bp, Glycine max
  unsure (1)..(363): unsure at all n locations
tgtaaagcattgatgagatactgctttcctcatcatgtggctcatgaagnttacaatttaatgatcctttgctaccctgcaatgatacacacatagattcacaaacacacacacattgagacaatcacacgcagacacaaacacatacactcacactcacacattatgatacacacactcacacacacatatagtcacacacacattaagacacagaaatagacactaacacactgagccacatgacacacacagagacccacacacaaagacacacacgctgagttataaacacacacatacacaaacacactctcacacatggacagacacactctcacatatagagacaaacacacacac

SEQ ID NO: 237944 - DNA, 305 bp, Glycine max
  unsure (1)..(305): unsure at all n locations
agcttccattaccgagagcatctcttatttaagcatttcagcctttgctttcgggtagcttaggaaaaacgtcatttcttcttctttctttattccaaagccatttctaaagttctaagaactttctccatcacccacagccaccattagccaccacaaaccatcattgttctccattgaaaacccacaccgagaggaacccttcaaccgaagcagaatcttccaacttggcttgcggtntccgtagagaacgaaaaccctaatctgatccttcgtttctttcaggaaaccatgggtctatgcct

SEQ ID NO: 237945 - DNA, 432 bp, Glycine max
acttaagtttctgcacacatatgagaacagtacatattgtattggcatgttatcagcaaataaaatccaataaatctataattaggtcaattaaaaatgtccctttatgcatagacccacccaaaagcatgggtaattactacgtgaaagctcatgaatgcatagacctaccacctactttatgctaaaattcaatatttaatcataagagggtgacaaaaagataagcatcccaacttaactttgatatcatgcaaaaaaaccaacatttcaattatatgttaagctaccagacaacaaataaattaaataaataaatagttaaaaatagctacttttaagtttctacacacagtataacaatacaaataatatatgcatgctatcggccaatgaaatgcaatatatctctcatcaagtcaattaaaaatg

SEQ ID NO: 237946 - DNA, 197 bp, Glycine max
  unsure (1)..(197): unsure at all n locations
tgttattggaacgtatggaccaaatgtttgtgccttatatttcctctgggatttattgactgtcatttccctctctggcatttaacctctacttaatgtactttcttggtttataaacctgtgtcttggcatagttcnncncggtttgggctcctcatacaatgatttgaaggtcggaacattttcaaaaacacctg

SEQ ID NO: 237947 - DNA, 420 bp, Glycine max
tgctatgaccctaaatgagccctcctgaggggtaccttgctctcctgctcaagggtcttttctggctttgcctcggactcgccacacgaggtcattgtgtagaaaggatcatggttgaacctttgtattgtatattcttcctgctcgaagcttgataacttcttctgtgaagtaatcaataacaactagtagatatttgactactcctgagcccttatgtgtggtctttgtatgtctattacccacatgaaaaagtgccaaggtgagctcataatgtggatgttgtgatgaggggtgcatggaatgtttgcaaactgttggcatcgtctgcatctatttgtgatatgaaaggcatcaaccttgagttttaactgtattacgcaacacgcacaccttgttgcatgggagcctccctggtat

SEQ ID NO: 237948 - DNA, 353 bp, Glycine max
  unsure (1)..(353): unsure at all n locations
agctagtagagaaattttgaatntatgtttaatcaaatntaatccagcattttggacaatcttgttcatggattggtgaaatagtaggggcgtccccttgatcactatttaaaaaattgatgaaagtaatgaaataaaatatacttttttctgtattttcatgttgattattcctaccanaaagtacaacaaacctaaggtgtcccatataagtacctaagtttgtattgaaactaaaaataagaacaaacctacctaatgagtccctatgtacataaatcttgaagatgttgggtgcatgagtgaatttataaaagaggatngcaccactcanaacattcatcataccacct

SEQ ID NO: 237949 - DNA, 381 bp, Glycine max
  unsure (1)..(381): unsure at all n locations
tgctcaccactactagaggagaagcctttattattgttcatataaaccctcctcctctaaatcaccattaagaaaggtggttttaccttcctttgttgtgaccccacggccaaatcaccgactcatgtccatatattaccaagagaatctctcttttatataagagaaaaaaagtgtgtatacaaaatcccctctttttaataaaccccttaacaaagagtctgtggaagcaatgtcttccaaggttactttgatgatggcaaagaatcaagagttaagcaaagttcaagcaaagattcaagaatcaagttccaagattcaagactcaagattcaagaatcaagagaagactatatcaagataagtattanaaaagtgttt

SEQ ID NO: 237950 - DNA, 280 bp, Glycine max
agctttaacctcattgtctctcacagtctttagaattgggagcaaatccaatccttgtgtccggactctcagccacttatgatagtcgccgatgatcccattactgcttcccctaagctctctgtcctttcttcacgccgcatcccatgccttgcaaactccttggagtaccctcgcgttgtggtcactgaaaccccgtgcgatgaaaggcgtgatgctttcctctgatggcactcctctcatgggacatccttcgcatgaaagatagaatcctgaatct

SEQ ID NO: 237951 - DNA, 430 bp, Glycine max
tgttaaagaacttagaaaaaatccagatgaagcttgttcgcacatcgttcgcatgtatgatatccactccacaaggtttgaagtatatgagaccttcaatcctattatgcaacgtggcggacaaaagtgggcagttaactcgaatggtcattattgtcaatgcggaaggtattctgcgcttcactatccatgttcacacattattgcaacttgtggttgcgtgagcataaactactaccaatatatatatgttgtttacacaaatcagcccatcttataagcttactccacacaatggtggcctcttgggaatgaagcggctattcctccttctaatgatgcatggacacttatccctgacccaactacaattcgtgcgatatgtcgtgcataatcaacaaggattaggaatgagatggattgggtcgac

SEQ ID NO: 237952 - DNA, 451 bp, Glycine max
agcttagtaaagctaagcactaacaatctccctctttggttatatttgtctaaaacatacttagacacttcctgagcaggtacgagcagttatgcaagtgggatcagcaactttcattatcagagtaatcaagcacagcggaaattctgcaagttgcaagtcgtttccaggatgtcaagacatctcacatgacatcagctttcttcttctgctccccctgtctccatgctcttactgcagcatcttctatcagctactagtcttttccaggatgtcaagacatctcatgtgacatcagctttcccttgtctccatgctcttactgcagcatcttctatcagctactagtagcttacatcagtcatcatcagcagcagcagtctccccctcaaatcatatacatacaaactccctcaaatcatgaatatgcatacatcgatctactctctaa

SEQ ID NO: 237953 - DNA, 253 bp, Glycine max
agcttgcccaaagaaagagtccacggagtatttgcttaccacctcaaaagactagaaagcggtttctaatgacgcctctgcggcttccacataaggcataaaggatgggcagctcaccaaaatgtcttcctcgcctgataccatgaccacatgcccctccactacgaaatataacttttggtggagtgtagagggaacaactcccactgagtggatccaccggcgcccccacaacaactgtggggggggaata

SEQ ID NO: 237954 - DNA, 417 bp, Glycine max
  unsure (1)..(417): unsure at all n locations
cttccggaccttaaatctaagcttctctttgtgcaactatctcatcctctgtttcatgtgtatattgaagcttgacaggttcaggtgcaggtgttactactggtggaggcacttgaatttggttgccatacctcaaggtgatggcactcacattttttggattctgcacagcttgtgaagacaatttgtcaaaattttgggactgagcttggttcatctgagtacccatttgccccatctgatttgtcagactctgaatggaggctcttgtctcttgctgaaactgcatattctggaaggtcanttgtctcactaactcttctaaggaaggttgaaattgcttgttgtctttgttgtgactgctgctgtatnggaggaagaacatatggcttgcttggaccacaacattctgaaaat

SEQ ID NO: 237955 - DNA, 350 bp, Glycine max
agcttcaccaatgtgattgccaacttagtctatttagaaataaaagcaaatataattttggcagcctcatacaaagccttatcatacaagcggtccctaacaaatgtaaaagttgaaaagaaattttttttttctagagattgagtcacattgagttaaactcaactaaattataaacacacaccttagacatctttaatgaaggatctcagagatggatcttgcactcaaaatctattcttgccaagatgcagcactagagatgcagttgggatctccatgaagaacctcactgctttcaaaaacaaataattttttaatggctatcaacctatcatgtaacagctttg

SEQ ID NO: 237956 - DNA, 443 bp, Glycine max
  unsure (1)..(443): unsure at all n locations
gtgannaaatttgttatatcctttggctcttactcttgtcaacattctttcatcccttgcaaatgatatttgaatgtattacagcttcatagatttatatcatatagagttaaagtgttggacaatatgttgttgaatcatctatgtacttgctatttgagtatatggtgtatgacttgaacgatatttttgtttcgctgcctaataagtggacttgttttaaaaagcacgatctgcaaatgggaaagttagatatgaatttaggtatatcccttgatgttcgtcggtcttgccgagctaatcgcttctaaatcagacattaaaaaagataaattttcttcctagtcatttgtcatatttcatattggctaaagttttgacagtttctgcgaaggctgaaccatgttcttaacataccatgaaaacaagttttgatacgaatt

SEQ ID NO: 237957 - DNA, 382 bp, Glycine max
agcttttagtctcttctgttgcaagctgtacatcatccaagtgttgtttagatacaaaatccaaatacatgatagaacgaaaagcttctggtgatagctaaaacagaaatcagatgtataggaaacataccaattaagcaaacaacaaaaattttggtttcactctttagcaaaacaatatgtttaaaaacagaaaataaagtaaaaacaagacattttggcgatcatttgggaaaaaaaatgttttctcaaaccaaataagccctaattgtctcatggtcacaatagtaagtatccggcacaataacacaagtgacaatgtcacataccttcccaacatcactctggaaacgtttaataagctcaatagcaatattcctga

SEQ ID NO: 237958 - DNA, 448 bp, Glycine max
tctcatagacttatgtaattgattaccataattggtaattgatttaagcagtgagttatatggcactgaagatgtttcttatcttagaaactatcttcctacttgtatatgatgatgcatgatgtacacacaaatagactaagaataaaaagcaacaagtaatacaaatgtcactcaacaaggagttgggcatgtaaaagttaaaaatattctatgttagtccccctatctctaacaatctcccccttttggcgttgatgatgccaaactttaattgccattgagtgcatttcaagaggctttaaagtatggacttctcttgatacaccacctaaatttttttgttaacactatggccaagagaagtgtcaaatcatgtcatatcatcatcatagtagagtggtcgaatgaataaataagaatgtatgtcatgtgccaatgcaatgac

SEQ ID NO: 237959 - DNA, 255 bp, Glycine max
agcttcggtattcaatgtcgatcgtctttatgtttacgttactcaatcagacatctgagtaaaaacgttattgtcgtttgaatttgctgagagcttcaacattcaatttcgagcatctcgatatatttcgggactcaatcagacatccgagtaaaaagttattgtcgtttgaattttctgagagcttcaacattcaatttcgagcgtctcgatgtattatgggactctatcagacatctgagtaaaaaaagtatt

SEQ ID NO: 237960 - DNA, 385 bp, Glycine max
  unsure (1)..(385): unsure at all n locations
tgcttgtgaagattctatggaggctggatctttgagctccaatgaggtccttcaatggtgattnttcaccatggagatgcagcggaaggcaaaggagaagaggagaggggaggcaccatccactatggaataagccaaggaagaaggagcttcaccaccaagaattgccttggataagaagcttgaagaggatgctctaatggaggaaaagaaagagagaaggggggagcacgaaattgaaggaataaaagagggaaagaagtggaactttgaagtgtatctcataagactttcattcatcatagttacaacaagtgttacacatgcttctatttatagactangtagcttccttgagaagctttcttaataaaactttcttgag

SEQ ID NO: 237961 - DNA, 396 bp, Glycine max
  unsure (1)..(396): unsure at all n locations
agctctggatggccaataaactngttattatggnnaattctaaccaaaaagcgagtatcaacgaatcaaaattaacgattatccatgagtttacacaattaccaaacttgcaaatttttgttgaactgaatgctaaaattgttcattttctacaaaactctgatgaagtgaatctcaaaaatacattgcaaaggaacagaattgacatttatctatcaatgaggcttaaccgaattagctataaagactagttcaagatccacctcattttttatcttcatcagccagatggactggactaaaacttataattgcctaaaattgaccctattcttactcacccagtttagctcgttaatgtacattcgcantagtataatcatttaattaattaag

SEQ ID NO: 237962 - DNA, 312 bp, Glycine max
gcaaaatttatttctatttatcactcgaatttgattgccatacctcaacgagatggcactcacatttgttggattctgcacacctcgcgaagacaatgtgtcaaaattttgggactgagcatggtgcatctgaaccgggtttttccacaagaaactaaaaatacaatgcaacaccgcctcggagaatttgtcatcaaccgtgattcatcacaatcgaaatgaagtcacccctttaccaaagccaccttcaaagaaggggccaagaatattccaaaaacattcaacacccgcttgtaaaccacaatctcgaaa

SEQ ID NO: 237963 - DNA, 297 bp, Glycine max
tggatccttaagtcacctgcggcatgcaagctttcataagtgaaatcaggtgtattcatctcccttagagtcctttcacgaggtggaggttgagccatgttctcagtatgaaaattagtagttgaatgctcaaaattagaatgttcataatcaccagccacagaatactcaaaatgctcaaaatgctcgaaatgcacagaatgatcaggatgcacactatgcctaaataatctatgaaaggttctatctatttcaagatcaaagggttgtaaatcacctggattgcccctattcatg

SEQ ID NO: 237964 - DNA, 374 bp, Glycine max
  unsure (1)..(374): unsure at all n locations
tgaattcctcattngaggatacgtatgagcaagagcctcgcttttgtcggccgccccataatttctgtcatactgacactggagtcacgtgacatgcggagatactcaagtggttgtccgcactttcgaaactttcttttgctatctgtaagacaaaaagcctgatagcatgcagagactaacgtcttattctgcacccttcgtcaatcgcggcccaacaagcccgttgacacgcggagatttacgtcatcttccgcgctcacaagatctgtcatactgacgtttgagtcatgctgacaggcggagatacccgagtggttatccgtataaactttcttttgctatctctaagactcacaccatgatagcaagct

SEQ ID NO: 237965 - DNA, 309 bp, Glycine max
  unsure (1)..(309): unsure at all n locations
agctngtccaaaatgtcctgtcttatgatatcattttgtcttaattgttgctcgaggttaggaaaaagatcaactaatgattgtggaactttccagctagctagatgaataatatttgccacattagcttgcatcttggagtgaatagaaggtgggatatctaatttgtccaccaacgctttccttaaccaattatcattccaaagatgaattgtagccccattgccaacaagccacttggattccctccaaactactaggataaaatggtttaaagcaacataaatcgaggatttatggtacctaact

SEQ ID NO: 237966 - DNA, 436 bp, Glycine max
tgtcagttgcacttagaaactgatttgagtgaacaactccactggctttcctgtttcaggccaatattacgcgcacaaatcatataatgtggacaatggggacagatttcaagtaccaatatgcacaaacctggtttcggcaattggacaagtttattcactatgttaatcaagttacttatcctcaactccttgcttaattgacaattttcttttttggctgtttacttaattattgcattttatgcatctaacattcttctccttgacctgctaagtttgactgatccaatccaagttaaatattcacttgtcatgtaaatgacattttatatgtttctttaagctgcctaattttccataatccatcttctcatgagtttaaatcaagctcaactaattttgttttggtggtttggcatactaatgcttattt

SEQ ID NO: 237967 - DNA, 340 bp, Glycine max
agcttatagaatatataataaaagaactttgacaattgttgagtctatacatgtttcctttgatgagtctaatgccattcttccaaggaaggattttttagatgatatttcagattccttagaagatacacatatacatggaaatgactctaaagaaaaagatgaaggaagcaatgaagattcttaagataatggagttagagcaaataatgaacttctaagagaatggaaagcctcaagagatcatcccctcgacaacattattggtgatatatcaaaaggggtaacaactagacattctcttaaagatttatgccataatttagcttttgtatctatg

SEQ ID NO: 237968 - DNA, 430 bp, Glycine max
  unsure (1)..(430): unsure at all n locations
gtaaaatgtgaattaaaacgttcagaaattgctggtaatcgattactatatatgtgtaatcgattacacagtgcaaactttgaattcaaattttaatagctgttgtaaatcagttttggccactggtaatcgattacatcctctggtaatcgattaccaaagagtaaatttgttgaaaaagactttttaacttaaaattcttggccaaaccttttgctacttcaattggaattcccttcctatttaatataccctttctaagactctagagactgtcttgatcatccatcttcaatatcttgaatttctttgtcttgaataaagctctgagactttgagacgcatgtgaaactttggcatcatcaaaacattcagcttgatcctttgtctacaatctcccnctcttttatgatgacaatccctgaaatca

SEQ ID NO: 237969 - DNA, 351 bp, Glycine max
  unsure (1)..(351): unsure at all n locations
agctataaaatgtgatgattngtttattttatacgttgtttctttatatcaaaataagcttgtttgatacataagtttatttatgtaacttaattttcataaactacttcaattagtttattttggtaatttacttaaagtaatttatggaaattaataagttagttgctactatgtttttcttaatcttattcttattattttatttaaatcaaatttaccattttatttaattaagaacactcattttacccttttattcgatttataaacactcattctttttgcttgttatctaaaaaaaccctcatattattatttgttgtatcatgccaaggaaagacatataca

SEQ ID NO: 237970 - DNA, 358 bp, Glycine max
tgtgatgagcttaaccctgaatgagcatctcatgcctttgtcaaagcataaaccaaccttggttataacaaccactcatgagctagaagtggaactatttatatactgtactttttttttttcagtatttcttctcaatgtttgcagcattgttagctataattctattttttttttaatcttcatgctttgagcttagaaagaataaactacaatggtcttggtcgttgttttcttgtgatttttgtcccttagtagacatctgcaggaccatatcacttgcatgcactgaatttcatgtgaaacaagtgtcataggaagaatattaatgtatgattcattacaaattattagtgat

SEQ ID NO: 237971 - DNA, 347 bp, Glycine max
  unsure (1)..(347): unsure at all n locations
agctgtatgaagatttctggtttttctttaccttganaacttgtgctattcatcttcttcattctcttctccctttgccaaaaagaattcgccaaggactaaccgcctgaattctttttgtgtctctcttctcccttttccaaaagaacgaagaactaaccgcctgaattcttttgtgtctcccttctcccttgtcaaagaattcaaaacgacacagtctgagaattcttttcattcttccctttccctaatacaaaagtgttcgaaggactaaccgcctgagaattcttttgatccccattcacaaagtatccaaggtttaatagcctgagatctttgtctcaaca

SEQ ID NO: 237972 - DNA, 381 bp, Glycine max
  unsure (1)..(381): unsure at all n locations
tnctcggggccattcctgcgaaggcaaacatttggaatgttagttntagtgggacattactcttaaagcaaaaatggcatataacctcctcccataaatacaaacatcaatgtaaatttagagcaagcttatgcgcctatttccttacaaacgttctcttgcacaagacattcaaccgaaaaaatgcacccatatacaatcaaggcagcttcgttacctatattatttacacgtacctccaaggtgtatttgttacttacatcacacacatcttcttgggctaattcacatacatgcatactcaaagcattttggggcaccaaaaattggacatgtgcacatcttggtgtttctaattcctatacatacgcacaacttatg

SEQ ID NO: 237973 - DNA, 418 bp, Glycine max
  unsure (1)..(418): unsure at all n locations
agcttgatcaaagtccatttaccagcgtttctcttcttggaaataatatgcaccaaatgctagcgaaattggatcaccctaccttactcctttagaagggaaaaaagaatctattacctcgccattaatctggatagccatagaaggagaagatatgcaagcgagaacagtttgcacaaagtattatgaaaccctatactccagagagtatcgtcaatgaaatcccatcgaggtctgtcatatgccttcttcaaatccaccttgatagctacaaaacctttctgctacttcatcccacgcatagaatgaaaaacttcttgagcaatgacaactntattcaaactatgtctccccaggacaaaactacactgatgtggagaaaccaactcgtccaaaacacccttcaaccttttaacta

SEQ ID NO: 237974 - DNA, 436 bp, Glycine max
  unsure (1)..(436): unsure at all n locations
tctcacattnttntctctgctttgtgatgtccatttcttcttcatttgcatggctatttatagaaaagagccaagaggtgcggaaaaatttgcctatgcgagctaaatttacccaggcgaatttgttgcatagctctaaaggtactaacttgctaatgtgagttgtagcttgcccaggtgagttgattatttatgcttgaagaaacttgattagcccatgcgagttggttactagcatgagcgaatgaatgtctaaaatcttggaaaaatgatcactttgtcctttcttttaacttggtttctggaaccaacaaacaaccatcaaacctacaaaatcatggatggatcttccatatttaaacagaaaacattactaaatgaacaatatatataaaacaactagtattatgggaaagttataagaaaacctattaca

SEQ ID NO: 237975 - DNA, 359 bp, Glycine max
  unsure (1)..(359): unsure at all n locations
accggatcttaagtcacctgcggcatgcaagcttcaataactnttcaggtccattactctgttgaaatctcacaaatgtctggacttaccttcttaaccttaacctacaaccagttctctggacctattccatctgaattgggaaagttgactcgccttatggcacttgatcttgccttcaacaatttcactggaccaatccctccaagccttggaaacttgagttctctcctatggctaaccctttcagataattcgttatctgaagaaatcccaccagagctgggaaactgctcaagcatgttatggctgaaccttgcaaacaacaaactctcgggaaaatttccttctgagctaac

SEQ ID NO: 237976 - DNA, 345 bp, Glycine max
aagatcaagatcatcataatgtctccaccatcaagaccgatataatgaatgacaaagatatcggtgcgaacaaaatggtccaagaatggaggtataagatctactgaagttgatagaacacgatcaatatgtatattggtttataagagttgacactcaatatgttgccgaagatataatgtgatctcatctagattccatctaactattatatgcattcccaacagtgttgatttgtgatactacttacaagacaaacaaatattgtcttacgatgttggagattgttggtgtgacttcaacataaatatattatttcttttgcatgtgcttatttacaatatg

SEQ ID NO: 237977 - DNA, 409 bp, Glycine max
agcttagaaatcaagtaatcaagtgattttgtggtggttaagtgatcatcaattccaaaacatagggggagtatgaaatgagtgaacgcagtatatcttgcatatacattgcttgtatcttgatttcaagaattaaattgtcatcatcaaaaagggggagattgtagaagcaaagactttgcctttgatgttttgatgatgccatatgatcgtgatgttttgatgccttatgaaaatgcgcttctaaagtttaatttaagacaaaaattcaagaatacaagatacaacaacaagaagatctctagtgtttttcgaaagggaattccaaattgaaactgcaaaaggtttgcccaagaaatttaagcaaaaatgtctttttcaagagaattactctctcgtaatcgattac

SEQ ID NO: 237978 - DNA, 389 bp, Glycine max
  unsure (1)..(389): unsure at all n locations
tctanagtctaacctaataaaagcgtacctgccagcatcttcatgttcatctaactcaaaagcatccaactcaaatctttctggtttagtaacaggcatacacaacgtttccacacatactaagccttctttgttgacgacaaatttgttgattttgacgagaacctcattacaatcttcaagcacatattcaacctttttatagaatattctgatagtgccaaaaagaagttagccaagcactctataggatacagcatcaatttcttgcaaaatcttgtctgcagaaggtaaaaatgaaatgaaaataatggcgaaacaatagcatatatcacaaatcttataataattggtgttggtagatacgattgcaataaatatatctgctt

SEQ ID NO: 237979 - DNA, 232 bp, Glycine max
  unsure (1)..(232): unsure at all n locations
agctgggacggcatacccccttgtcttctatattttatggngncaaagacgctaaccttctattaaaacctaaagattaattatccaagattatgagatccatcctttttcatatatatatttcttataagtacaaattacagatcaaatacaacatatttaaaggataaaattatttattaattatgtcatataccatgttcattagaatatatattattattatgctatt

SEQ ID NO: 237980 - DNA, 422 bp, Glycine max
  unsure (1)..(422): unsure at all n locations
cgatgagcttcgcncctngnatgcttatgactggtctgctattccttcctcgaagtcctattcagctagtgcttctgcattggagatgggttcatttaacccaattgcacttggttctgcatctgtcttgatgccacctacctcaacaccaccttttactccatctggagcatcttctcccattgctgaatccatgtggtctcaatctaatgttttcgtccctaccttgcagctgccctatagcagatcgtaaactgcttctactgtatgagatactgatttagatctggaactgcttggactctatacactctggcgtatacaacagctaatgatggatgagatatctgntctcttctctccaactggaaaattccatgcctaaataccacttttttcgttcctttgaagatcacactggg

SEQ ID NO: 237981 - DNA, 416 bp, Glycine max
  unsure (1)..(416): unsure at all n locations
agctnggcctcaaacttgctgataatatgctgccacacaacccagcttttagaactcacccctactggaattccaagataagagaaaggaatttccagttggctacaattaagaaattgagctgcatccctacaccaaccctctgatttgcccacataaccgaaatggctttccaaatattcagatagtattcttctatgtttcttggcatagctttccaatttgggacatgataagtgtatagaatgttgcttcatttcatgtaattgtagacctaatagggccagtgtgttgtctctggtatgcttttcctttgccaatatgtctatataagtttgtgggtacattaagtcttcaataggttcgacttgttaatcattaattattgtctttgtgatgttctgaaatctctggtt

SEQ ID NO: 237982 - DNA, 371 bp, Glycine max
  unsure (1)..(371): unsure at all n locations
tgattgacgcggngtggctaacattccaagaagatggcccgattgtgaagacaaattcacttgccaatcatgggggaccggcggtaaatgcaatatatgcgtgcaggctgcagatgcctaatcaaatgaaggacgtggtaacctcaagaaggtttatctttgaagctttgcaagaagcgggcatggtttcctttgaatggcccaaatgggactcatgtttgatgcatccgaatgcatcacatgacatataaacatgttcgatggtggaggagctattacagcaactgatggaccanggccggtttgagatcggtgataggaaccaaggagaaaaacacatgtgcattgtgtcagcgcacaaagagagcctc

SEQ ID NO: 237983 - DNA, 405 bp, Glycine max
  unsure (1)..(405): unsure at all n locations
agcttaagcgtgaaactgtaacttttcttattctntcaattagatatttttaatattgtctttttatttatcttttggaggttaattaacacactatctcacaattaaggatgaaaataagtctgtccatccaacaggcttatggcttaacctatatcatgctcaagtcaggcttgattttctttttagcaaataaactatacccatatttttattaaagagtatatggttaaaaaaaaaagtcaagcctagtccacttggtaagtcttttatgcctaacacggttgacttaattaagtaaatatgaataacacttaatttttntattagcataagtattatattaatgtttttatattgtaaactcatatatttacctatcatcatgtaacccacttaatagtc

SEQ ID NO: 237984 - DNA, 330 bp, Glycine max
  unsure (1)..(330): unsure at all n locations
gtacagacgtgagcatatactgatgaaagctgattgttccctngaacacaatatcacctagattcaaatattatctgttctccatcaaagttgatagtgtcatcaagatggtgatcttcatcatctgaacttgtgtctaatgctgattcatctttactggtggacgcataaaccattatacatacatcggcttcttactcactgtcttcactatacgatgaatcctctatgtcctcctaagtgctcatgaggctttattttttggactcaaaaaatttcctcttcttatcctttggcttgtgaaggtaaggacattctggcttgaagtgc

SEQ ID NO: 237985 - DNA, 400 bp, Glycine max
agcttctcaaggagaggcgcctagtgtattaatagaagcatgtgtaacacttgttggaactttgatgaatgagagtcttgtgagacacaactcaaagttcaacttctctccctttttcttccttcaatttcggcctcccccctctctctttctctccctctttcttttcctccattgaagcatcctctccaagcttcttatccaaggctcatcttggtggtgaagctccttcttccaaggcttattccctagtggatggtgccgcctcttacctcttctccttggtcttccgctgcatctccatggtggaaaatcaccattaaagggacctattgaagctcaaagatccagcctccatagaaactccacaagcaagcttccatcagaatctctctataaa

SEQ ID NO: 237986 - DNA, 397 bp, Glycine max
tgtaggattatggggtatccatcacatgtggtactatgtggcggtcgggcaatggtgcaaatcaattctccacatccacaaatcacacataaacccaccatccccagttgcccaccttcactgagctcacgtactcccacgtagcccttatcctcgttcctgtcaacgccgggtccccatcaatccttccacaacatccaagtaattcaacatccaagcatcatgaattaacacagccaagaaaacagggcagaggcagaaaactctacccaaaacacaaaccaatatcacagcttttcacactcaaataccccggtaatattctcttcgttccaatttgttaaccgttggatcgactcgaaaattttactggaagtctctagtacataaatctaca

SEQ ID NO: 237987 - DNA, 320 bp, Glycine max
  unsure (1)..(320): unsure at all n locations
agctngtacacatactaaggtttctccttatcttcaaatctaagtggatgcttcacatacacttcttcatttatgaatccattcagaaaggaactattgacatccatctaatagagcttgatgtctttatgtgttgcataggctaaaagtattatgatggcttcaagtcttgctattggtgcaaaggtttctttatagtcaattccttcctgttgactatacccttgagtaactagtctagccttgttttttactacttctccttcttcattaagcttgttttggaacacccatttgggttcaatcgctaaccgattctt

SEQ ID NO: 237988 - DNA, 419 bp, Glycine max
  unsure (1)..(419): unsure at all n locations
tctagaatcatcaacatgtagtgtatttgaatatactatcttttgaagatagcatttaatcttttaaactcggcttttgagtctcttcttcagaggatacttaatcattctcttattttatagagtgattcttgatcttctttattcagtgagatcttgcaactaaagtgaagacctcacaacacttgtccttagtaacaagtgttcatcattcatgaatgcttagcaaatcatttatcccatcaataggcaaagtcattggaactctttagagttccttaattatgtgtgctcttcctattgatggttggtggtgcatagcttttgttaactctctntgcttctttgagatcttttcctcctccactattaagtgcacgcaatctcaaaggttgagctatgataccaactgaaatgga

SEQ ID NO: 237989 - DNA, 337 bp, Glycine max
  unsure (1)..(337): unsure at all n locations
agcttgngctttagagtgtactttcatttgcgtnantttatnnnagggantggagacccttttggattctttgctttgagcttcgttttaatgatgttactgtatcttccttggcctaaagttcgtgtttttgatcgcttacttcgatttttctgttgccccaacttttaaagttttgggctttgtgctgggaaatcgagcatttctcggggttggtcttgaaggtgtaaaattttcaactttttgatcatcccagagttggtgggttcttattcatggtgggccagaaccccaattacctctggttgttttggttttttaaaggtccgtgggtttt

SEQ ID NO: 237990 - DNA, 158 bp, Glycine max
accctacacgagagcatgactatttacttgctgccctggacgaaatggattcttctgatgggaaacccccatccaagattggccccaaaccaaggttgtaaatctataaaggcgatacctttaggacctctttggggtttttgcggagatgccccaaa

SEQ ID NO: 237991 - DNA, 329 bp, Glycine max
  unsure (1)..(329): unsure at all n locations
agcttgccacccagctcgcccagtctatcagggttgcttcctccanaagcaacagccttctggaggaatcttttggagggcccaagtgggcctggttgctatttgcacccccattttttctaagtacaccccctgccttttttgatgattctttttcgtaaagttacggaaacttatgaatttcgtaacgatacttgttttctttccgtaatgttacagaaccttgcggattacataataatcccctttttgacttacggaatgttatggaacctcactaattgtgcaacgatgctttcatttgatttccggtgtgtcacggaacctta

SEQ ID NO: 237992 - DNA, 358 bp, Glycine max
tgtaggtctgatcagtttcagtttgatctaaaaatgatttcagcagtgtggagtaactgtagggcttgtaatccatcatgcttagctctgcttgtgatggcatctttaaatttcacgtatgtggttaattaaggataacgaatatatagcaacaagaactattgtttaggatgaaaatatgttaatgacaacacttgaggtatgtaggaacaaacaatatgaaaagagggtgtttggcctcttattcctttctagtgtaagtgggagagagagagagaaaaggggtgtgatgttgtttgtgaacacaacgaggatcgaggggggatcgtcttctttctacgagtgagttcaatggaat

SEQ ID NO: 237993 - DNA, 217 bp, Glycine max
agcttaatgcttgtttacttgtccaaatcaaatcaatcttccgaaagctgtcttgttatcaactccatgccataacatttgaattcattgggtatttgggaaagccattcattgtttgcattctcaacgttatcaaaaatcctgttgttgtgtgctgatccactcacaagtaagttttataaacatcggatattgatgctttccaaagcatgctatg

SEQ ID NO: 237994 - DNA, 352 bp, Glycine max
ctcaagcttgataatgcgggtctgggagacgaacgtctactggtctcgatatgtgaagatgatgtgccaggaactctggattcggtccgaccatgccctcctgatttccatctgggacactggcgagcggaagaacgccccagcgtttacgcatcgagcataatgtaaacctttacggtgataaaagctctatagttgggcctaggctttacagttttcattttgttaaggctttgtgtcttttgtttttgaatttataatacaacgatctttgttcatctgttcctagtctataaccattctcattcatttgcatgtttacttgcttttctactacgtgcgatgcgatgac

SEQ ID NO: 237995 - DNA, 374 bp, Glycine max
  unsure (1)..(374): unsure at all n locations
caagcttataggattatgtcttgaagttngattctacatgaacctcattgcatgtcacaaccgttatggtagtttttgccagttctaactgctgcttaattgtcggagcagagagagaagagagaaaacaacataaaaaatggaatatattatctatcgtggtgcaggcatagagttagtgcaaagaaatggacagactctgattgttaatatattattagtttgaagtttgaatatcagagagtcaaaatatgaaacggcataacgagagagagggaatatttggttcattcggcaaaggttacctatattttcagcaaaaaaagacaaggctactctctttagcttttgaattgaaagcgcgaccaccactg

SEQ ID NO: 237996 - DNA, 262 bp, Glycine max
tccttgtggttactcatagcccaccttatttgtggcctttatggaggcgtttagacccgcatatgactagaataatggcttaaataaaacttgggtaatacttaccttataagccaatttttgtgatgatggatcatacacttatccaatattttaattttttctaaggccatttcttcccttcagtggaacttatttccatttaacaaatttatgatggatgacataagaaaatactgcattcatcttcatgcctttgttt

SEQ ID NO: 237997 - DNA, 415 bp, Glycine max
  unsure (1)..(415): unsure at all n locations
agctnttctacctgcaaaatcattggtgtgtttgtgtattttgaaatttgagtacaaaaaaagaagagattttcagttgtgggtattagtaaatgataatgagagaagagttaatttcttgttttttctctctggttccttaaagattctaacccttataatttggggattttatttaactcaaccatttcttcttttaaatgtttatagtcacttataggcatcacagttgcctctcctacaaaaagcagtgaaattggttctccatagttgtaagtgaataatttaatgagtgagccttttatttaattattccttgtaccggaagaagaatctttttaaagatnatgggttctatgactccacaagtcttaattgtgaaaagataattaatattattatatgggctcatgat

SEQ ID NO: 237998 - DNA, 371 bp, Glycine max
  unsure (1)..(371): unsure at all n locations
agagtctaattagttaattgaagagtgttgtgagttattctaaactctntaatatttgttgttaataattcctgtggataaaaaaattaagcttgaagtgacaagaaattggattcaatgactctgaagaggaaaaatcatggtgattctctctcattttagaccattagataattaggtggttcatattttgccatttgttttaaaatatatatttaatttgactattaatttagttttatattgttttacactgtaaaacataaaaattactactaatgtagattaactagttgatgccgaaaaatatgttcgcactaagataaatatatcctatataataataacaatggactaaaagtttgaatatc

SEQ ID NO: 237999 - DNA, 190 bp, Glycine max
caccaaataggtgtgagccataaacgcatacatatatgttacactataactatgacgcgcgcggcaggacagataatatacatatatctttactcaccataatgtttcctatggataatgagtcatatccaaactcaaatgacctaacaggaattttgagtcccagtgtgattcttcttttgttttttgg

SEQ ID NO: 238000 - DNA, 368 bp, Glycine max
agcttatgcgcatatttccttacaatctttctcttgcacaagacaaaaaaaaatgcacccatatacaatcaaggcagcttcgttacctagattatttacacgtacttccaaggtgtatttgttacttacatcacacacatctccttggctaaattcacatacatgcatactccaagcattttggggtaccaaaaattgcacctgtgcacatcttggtatttctaatacctatacatacacaaacttcatgatgaatcttgactatctacacaataaggtgctacatctcatgccttttttcaagtttttgctacctaaagccgcatgcaaattcaagcatattttcctttgctgactaaaattggatt

SEQ ID NO: 238001 - DNA, 407 bp, Glycine max
tcggaagaaagtgatgaggtacaagccctatatgcatatcttgaaagagcctgggtagtcgaagagaagttcaagtccatagccatcaaagtctgaaaagagtatgatgaactaagggatgtcaatatggccaccgatgataccttggaatgataaaccaagattgcccgaaaggaagaacacggccaaagcaaagttttgaggggctttataaggcagcaatagtgagctcaagctccgaagaggtgaaaggaatcatcacgggtcataggcatgatcttgaaggacgagctaaatgtctgccttatgtcgaaaagaaatttgtcccaacagttaagcgagactgaatggaatatgtgggccatcatcgataagtgcaaagagagctaaatctatcggcgactcac

SEQ ID NO: 238002 - DNA, 344 bp, Glycine max
  unsure (1)..(344): unsure at all n locations
agcttatcttattataaagagtggaatttagtttatgcccatanagancctccacaggccacacatctacacgctgcatctcatctgttctccatttattggggacatcaaatcaatccatcaatagcaaataatgaattccattttagccttccaccaccaatttgatggcatcacttgtatctgaaagaccatagagatatatatatgaatgtccacaatgagcatttaatacaaaaacatttaaaaatgtgtaacatttggctaaatattaggcccttattgctacgggagctatccccttcttaaacaaatggtcccataggaatctccatcctttgttc

SEQ ID NO: 238003 - DNA, 84 bp, Glycine max
attcctcgcactgagaaaataataaccggatgtctctgcgcctaaaccgccacaggaagaaacagcggaggtgttaagccacac

SEQ ID NO: 238004 - DNA, 385 bp, Glycine max
  unsure (1)..(385): unsure at all n locations
agctntacagcagatgccgctntactctctttttatgaaagacatcctcaccaagaaggggaagtatcttgataatgagaaaattgtggtgggaggcaactgcagtgttctaatacaaaggaagctacccaagaaatttaaagaccccggaagtgtcactatcccctgtaccatagggaaatgagcggtagacaaagccctcattgacttaggggcaagtatcaacttgatgcccctctcgatatgcagaagaattgggaatctaaagatcgaccctaccaggatgacacttcagctagcggaccactccatcacacgaccatacagagtagtggaagatgtcctagtcaaagtcagccacttcactttcccgtggactttgtca

SEQ ID NO: 238005 - DNA, 258 bp, Glycine max
  unsure (1)..(258): unsure at all n locations
taaaacgaacacaaatgaggggcgaaattcaaacaaatacttgaaaactgaaacaccaatggttaaatcattgcaagaagaatatgcaaagcgtagcagcgacaatatgagagaaaaccaatcgtgcgtggcagataaaaattgggaggcggaccaagagcaatatcaccgtttgtacctgacccggaatggcatanggcgagattaagccattggtgtgcatgaccacatcagacagaggcgatcaagatcgagaac

SEQ ID NO: 238006 - DNA, 401 bp, Glycine max
  unsure (1)..(401): unsure at all n locations
agcttgtagaatggctggacatgatacttgtcanggtttggttnggntcaaggataaaagggatgccccacattatttccatgacacaaatgcaaaaatgatgatttggaaattttatgcaaaactggttatgcatgcacctatgcggacactcaagtgtcaaatttttatggtcatgtgatgctcgggctcaggattcatttcctctattttagtcaacccaacgtttccaaaatatgttcttttatcaatttgtgcattcatccgagtccattttgggcgtctgggaaaatcttcacagcattcacccttcaggtgtatacacantttttcaaaaactagttatgatcagtgaatttttccaaagaaaagttggaagtcatctcttttcaaaagcatgt

SEQ ID NO: 238007 - DNA, 399 bp, Glycine max
  unsure (1)..(399): unsure at all n locations
gtgcagagaggaaagggaccaatcacgagtattctgtttgatcttgaaagaagagnngaaggtttgctcaaggtccaaaatatacttgtctcagcggttatgcgaaacagataccaacatgctagccattgtctgcaggtaccattaagaactaaatctagccactgcccacgagcatatagtggtggacgagtttgcccaaatgtacgtgaaaaaggaggctataggaagggtgatcaactcgttacatcaagatgcaacgatgtggatggaccgatttgctcttaccttgaacgggagtcaagtaacttcccgattgctatccaatgccatagcgatggcgaacacctactctgccccgatgagatccacggacttctcggctttttcagcatatga

SEQ ID NO: 238008 - DNA, 341 bp, Glycine max
  unsure (1)..(341): unsure at all n locations
agctngcctcatagaggtccaggtttgttatgcagccgaaggaactagttccgctccagagtatgatagtcaccgctttaagagtgctgtacaccagcagcgcttcgaggccatcaagggatggtcgtttctccgggagcgacgcgtccagctcagggacgacgagtatactgatttccaggaggaaatatggcgccggcggtgggcaccactggttactcatatggccaagtttgatccaaaaatagtccttgagttttatgccaatgcttggccaacaaagaaggcgtgcgtgacatgaaatcctgggtaaagggtcagtggatcccgtttgatgccca

SEQ ID NO: 238009 - DNA, 326 bp, Glycine max
  unsure (1)..(326): unsure at all n locations
ntagctcgcctgtgcgagctgcaaccgccccataatggctntttctctataaatagccattatgggggggggggggtaaggggctgaaacgctcaccactcgatttatttgacagaaccgcgagaaccgagagagaagacgaagagagaccgaaagcgcacgacgaaagaagaagagacaaaggccaggcgctaccgaatcgcaaccgagatcaacccctacgcggactcgtgctctgagcacttcgcgcgacagcaggcacgctaatctctaaggattgaatgggatctatgtacccttacgggtccctccgatattatacgcac

SEQ ID NO: 238010 - DNA, 341 bp, Glycine max
tggaaaaaaaccaaattaaaagtgactcaagcttttcggttcaatttaataaaacattgaatgtaaaaatcaaattctttataccataaggatattctatacacctataaccctatagttacaaacagtgaaacagcaaaactgtgagcagttagaaccttgaagtatatatgggacatgttttatttttctgcaatttcagaataaactcttataaaagagggtacaggattttacccaaagcccatgcttgaacctggcagtttactacaaagaaagtaaactgatattattattttttttgataaaaaagtaacattgatatacgctataaattatga

SEQ ID NO: 238011 - DNA, 422 bp, Glycine max
tcccacaatttggatcatcctgcagactctgtgtgtcttgggctaccctacaaacctctccatcatgccagacaacagcatctatgacacgccccctaccattatatatataaatcacggaaccgcattcccttttcaatggaaggaatccaagttgaaaaaattctcagtgggagcacaaacacaagtataaatgtctcttttagttggagtcattgagacgagtcagagggagaaaaaacaagaaattcattgtttatgtgtggccaagcggaaaacaaaattcaacattatgtcatacagagacaatcattctattcaatatcctcattccaccacttatgagagtcctataatgatataaattcaaatcaattgttattaccgattccaggacaggaaagacacaatacccgagagca

SEQ ID NO: 238012 - DNA, 401 bp, Glycine max
  unsure (1)..(401): unsure at all n locations
agctaggaaggatgcttcttggaggatattaanaagggagagaaagagagagggggagcacgaaattgaaggaataaaagagggagagaagtggaactttgaagtatgtctcacaagactctcattcaacaaagttacaacaagtgttacacatgcttctatttatagactaggtagcttccttgagaaactttcttgagaaaacttccttgagaagcttctttgagaaaacttccttgagaagctagagcttagctacacacacccctctaataactaagctcacctccttgagaagcttccttgagaagattccaaaagaagctagagcttatctacacacacccnctgtaatagctaagctcacccncatgccaaaatacatgaaaatataaaaaaaa

SEQ ID NO: 238013 - DNA, 407 bp, Glycine max
  unsure (1)..(407): unsure at all n locations
tgttacttacatacttgaccttgacttgatgaaacctcttttcttaaaagaatgtgcttggttcaaccccataatccaaggaatacaaattttgattgtcaatacttcgacaacatatcataaagatgaattactagggcatacttatgctatgcatgacaaatgtaattatgagatcgacatgagacgcccaaagaatcatcatttcctggttaacaatgcattatgtaccatgttcacatgattttcaatcatcttttaaaagaaatgagtgtataatcccaacatggtttgtgtatagctatcatcatggtacccaatacatgtaactaagaatggggtgtaacttcattcttcattgggactatccttttggtacttcatttggttttgttnggttatttttt

SEQ ID NO: 238014 - DNA, 395 bp, Glycine max
  unsure (1)..(395): unsure at all n locations
agctntacagcaaatgccactctactctttattcttgaaggatatgttaacaaggaaacataagtacattcaccaggaaaacattgttgtggaaggaaattgtagcactgtgattcaaaagatccttccagctaagcataaagaccctgngagtgcaactattccttgtttaattggagaagtcattgtgggaaaggctcttattgacttaggagccagtataaatttaatgccactctccatgtgtagaaggttaggagagttggagataatgcccactaaaatgactntacaactggctgactgctctattaccagaccatatggagtaattaaagatgtgctggtcagagtgaaacattttatcttcccgggagacttaatggtaatggata

SEQ ID NO: 238015 - DNA, 431 bp, Glycine max
  unsure (1)..(431): unsure at all n locations
tggttcgaggtacttacccgttgaagatcgaagaacgatgaagaacgaatgaagaacgtcgaagaacggttgaaatctttgcgaaattcctcacggaaaacgttacggaaacgtttcggaagcgcctcggcttatattttcttcacggaaacaatttttccaagcaaattcgaaagagagagaagtgcctaatgggctgaaccccttccttcttcccttcctcccctatttatagcaaaataggggaggtggttgccgcccagctcgcccatgcgagctcagctcgcccaggcgagcatggttgcttcctccagaagcaaccgccttctggaggaatattctggagggcccaagtgggcctgggtgctatttgcacacccattnttactaagtacacccactctgctgtttttttttgtgattttttttcg

SEQ ID NO: 238016 - DNA, 373 bp, Glycine max
  unsure (1)..(373): unsure at all n locations
agctngaaggaaaacttgatgccttgtgtcaatttantaacttagctggccatgaatcagaaatctacacctgttacgggagtcaatgagcaacctgaagcttatgctgcaaacatttataatagacctcctcagcaacaaaaccaacaacagcagaataattatgtcctttcaagcaatagatacaatccaggttggaggaatcatccaaatccgagttgggcaagtcctccacaacaacaatagtctgtccctcctttccagaatgctgctggtctaagcaagtcatatgttcctcctccaatacagtagcaacaacatcaacagtcacaacaaagacaacaagccactgaaggctctnctcaaccttctt

SEQ ID NO: 238017 - DNA, 332 bp, Glycine max
acactataaaactcagcttctcaggaagctacctagtttataaatagaagcatgtttatctcttgttgtaaccttgatgaatgagagtcttgtgtgacacaactcatagttcaacttctctccctttttcttccttcaatttcatgctcccccctctctctttctctactctttcttttcctccattgaagcatcctctccaagctttttatccaagactcatcttggtggtgaagctccttcttccatggcttattctttaatggatggtgcctcctctcacctcttcttctttgtcttctgctgcatctccatggtggaaaatcaccatt

SEQ ID NO: 238018 - DNA, 411 bp, Glycine max
  unsure (1)..(411): unsure at all n locations
agcttgttgacacgcggagatatacgttatcttccacgctcacaagatctgtcatactcaaatttgagtcacgctgacgggcggaaatacccgagtggttatccgtataaacattctttnttgttgtctgtaagacgaaaagcctgatagcaagcagagactaacgtcgttttctgcgcccttcgtcaatcgcggccgacaagtcccgttgacacgcggagatttacgtcatcttccgcgcacacaagatctgtcatactgacatttgagtcacgttgacgggcggaaatacccaagtggttatccgtataaactttctctttcgctgtctgtagaacaaaaacctgatacacccaaagactaacgtcgtttctgtgcccttcgtcaatcgcggccgacaagcccatggca

SEQ ID NO: 238019 - DNA, 404 bp, Glycine max
tctttaagaagattcctaaagaagctagagctgagcttctctttcctctctaatagctaagctcacctccttgagatgagaagctagagcttatctacacaccccctataatagctaatctcacccccatgacaaaaaaaacatgaaaatacaaaaaaaaaagtccttactacaaagactactcaaaatgccccgaaatacaaggctaaaaccctatactattataatggccaaaatacaaggcccaaacgaagaaaaaacctattctaatatttacaaagataagcgggtcatgcttagcccatggtctcgaaatctaccctaaggctcatgagaaccttagggccttcccttggatctctagcccaatctacttggagtcttctacccaatgcccttgcggg

SEQ ID NO: 238020 - DNA, 365 bp, Glycine max
  unsure (1)..(365): unsure at all n locations
agctnctatataagctgagccatttattatttacacaagttgagttttattcagaaaattagagtttatctcttttatcttagtgagagtgattctcctaaattcttgagtgattcaagaacaccctggctgtatcaaaggactttcacaacctttgtgtgttgccctcgctggaaagagtgattctttccttcctatcatctccacccttgttctttcataccacaattccagaaaattcacctctggccaaaattatctcgtgaccataactcccatttcacacactcaaattaagtgattcttgatccctaaatgaatttcaaaacgagatctttcacctcgttttggaaacacctcatttg

SEQ ID NO: 238021 - DNA, 335 bp, Glycine max
cgagatgaggaagtgttgaagggtgaaactgcctgcttttattgttgaccacagagtggtacctggagatatgtcgcgggggtcatgagaccttggggacgtcagatggggtgctattgcccaaataccaagcttgaccaatcccgacccaacccgagcatagtcggtcagtgagaacctgtgatgcacctaagcaggcgagctcctggcagtcaacagattaatggaaaataagaccacaaagctatgatgcttgtggtggctggccagctgtgaattttgtgtaatatgcggattgtggcctctggttatcgattaccaagggtgtgttatcg

SEQ ID NO: 238022 - DNA, 348 bp, Glycine max
  unsure (1)..(348): unsure at all n locations
atcttaagtcacctgcggcatgcannnnntaagagaagttgcaagaganaattctttctcctcaatgtggntgaaactgaagtcattgtatatgacaaagtcccttgcaaatcggctatgcttgaatcaacagctgttcaccttcaagatgacagagtctagaacagccactgaccaattggctgatttcaacaagatccttgatgattnggaaaatattgaagcaaagcttgacgaggaggataaagctctcttgcttctgaataccttaccaaaatcctttgaacatttcaaggatgcatttctttatggcaaagatgaagacactaccttataagaagtcttgac

SEQ ID NO: 238023 - DNA, 325 bp, Glycine max
aactgttgattgacaccatgtgacaactacagttgagaaatattgtttttctacattcaaggacactggtaatcgattaccataacattgtatatcgatcacagacctttgataaatttggaacgttgtaaattcaatgtgaaacactttcaaactcattttactactggtaatcgattacacaattcggtaatcgattaccatagatgtaaaacttcttggtaaaggatttgtcaaaaacctcatgtgctatacaaagatatgaaaaacgttttaatacctatcttgattgagtcctttctttattctcgaatacagaaaactg

SEQ ID NO: 238024 - DNA, 386 bp, Glycine max
agcttaaggatggaatacttacttttttgtgatgaacaaaagcgcaaaacggaatcaaataacgcaaaaaatgatgatcctatggctgcaaattcgtaaatcctgtgggtatggcttttgaaaaggggggaaaagaatgttttgaatgcaaaacgtccccccctttcgtcatttttatattttggtgcagaggttgctcgccaatgcgagctaacctgcacttttttttttttttaggggaacattaaccatgtcccctccttccttgtgggttagaattttgcctaacttgaacttacttaaggtagaatttagcgctgattacttacttttaaacacacacatagtaaagaaaactgcgacacaaagatacgtgccgccttgaa

SEQ ID NO: 238025 - DNA, 325 bp, Glycine max
gaacttataatactcagcttggtgggcaaaattgcagcaagtgcaattttacttcttattgagatatgaatataagcaattcatcaattccgttggattctctgaaaaacgaatggcatttatgtgccatgcttattgggtatgaccaagtcctggcttggaatggggaaataaaatcctttcacctctcgtaaaatgtggggaacccaaattcacgtatgtggtaatctacaaataccatttgcagcctcttttggccttatggtttttataggggaatcttgaatttgattctgattcttcagtggtattcaaccaaaaccct

SEQ ID NO: 238026 - DNA, 378 bp, Glycine max
agcttaaacattcaacgtgtgagcgtctttatatatttctggactcaatcagacatccgagtaaaaagttattgccgtttgaattggctcagaggttcaaaattcaatttcgagcgtctcgatatatttcgggactcaatcagacatccgagtaaaaaggtattgtcgtttgagttggcttagaggttcaacattcaatttcaagcgtcccgatatattacgtcactgaattggacatccgagtgaaaagttattgtcgtttgaattggctctgagcttcaacattcaatttcgagcgtctcgatatattacgggactcaatcagacctccgagtaaaacgttattgtcgttggaattggctcataaggtcaacattc

SEQ ID NO: 238027 - DNA, 337 bp, Glycine max
  unsure (1)..(337): unsure at all n locations
ntaagccaattcatacgacaataactgtttactcggttgtttgattgagtcccgcaatatatcgagacgctcaaagttgaatgttgaacctttaagccaattcatacgacaataactttttactcggatgtctgattgattcccgctatatatcgatacgcccgaaattgaatgttgtaactctgagccaattcttacgataataactctttactctgatgttcgattgagtctcctattatatcgacacgctccaaattgaatgttgaagctctaagcctattcaaacaacaataacgttttactcggttgtccgattcaggacgtatttatcggg

SEQ ID NO: 238028 - DNA, 401 bp, Glycine max
agcttattggaaaaccattgcagattcttttcctcgtgaggttcccaacattgaaaagaaaagaggcaaaaaggatcatgacaagaagccatcaattacggtcatccaaggcccaaagcctggcaaacccacggatctgtctaggttgcggcaaatactgttaaagctgatgcatacaccaccacctcacatgattcctccaccaccggctcctgctaaagacgccaaagataataaggatggaaaagaaaaagcagcatcaaaagcaactggatctgctgcaaaagtgcacctgattcacaccaaagatgccaccttaaggcctccataaaacccagaaaaaactcttgcattagaacacctgctgatgaattgcatgaaacttggtccccccaattttt

SEQ ID NO: 238029 - DNA, 416 bp, Glycine max
  unsure (1)..(416): unsure at all n locations
tgcacctgatgcanagtaagtgggctgtctttgttatttctatactctcagatttccttgatgttgatgttcccatcctgtacattcgtgccatgacttatgattaatattaagctccatcaaaaaaaatttttgttagtcaatgtgtacaattgataactattgttattataaaataagaagtgcacccagacgaagagaagataattacaaagagtttgaaggattatggatcctctttgtttaaacgaaaacaaacaacacagaataaaagaagaaaaacatcaatgaagcaaagttgctgccctgatgtgtgtgtgttatgtgagtgcaaactcanaattatagtctatcatctgttcttacaatgcgttaatgctatttctatctgaattcatttgcttgccattttggtg

SEQ ID NO: 238030 - DNA, 309 bp, Glycine max
agcttgtagaattcaccccaattctcaatgtcatatgttgacttactcccctatctgctcgataatgcaatggaagttataagcccaacaaagatttctcaaccttcttttcctagaggatacaaccccaacgtgacatgtgcttatcatgggggagttccggggcattccattgagcattgtatgaccctgaaacataaggtgcaaagtctgattgatgcacgctggttgagattcgaggaggaaaatcactcgggagttttgattgtcgtgtgatgcaatcctaccccccaagggcattggataaaa

SEQ ID NO: 238031 - DNA, 420 bp, Glycine max
acactattaatactaagctttgcacgtatcggtcaagtgtgtggaccatatcgttctcttttgctcatcgataatggttccagtgtaaacgtgatgcctaagagcactctggagaaattaccattcaatgcctcccactttaagccgatttcaatggtggttcgtgccttcgacagcacccgccgagaggttatgggaaagatcgatctcccagtacagatatgccctcacacctgtcaagttactttccaaataatggatattaaccccccccctacagctgtctgttggggcgtccgtggatccactcaatgggagttgttccctctatactccaccaaaagttgaaattcgtagtggaagggcatctggtcatcgtatctagggacgaagacatcttggtgaactgcccatcctcta

SEQ ID NO: 238032 - DNA, 276 bp, Glycine max
agcttcagaaaactatagaagataatgctacggtggccacttccaatacagctagggaagcggaactggtgctacagcccgaaataaacttgggccgagacagaaacacgacagttttcggtcggaggtatagtcctcaagcctacccttatggttttcctccggacttcaccccccgtaccgctccagacgatttgagccaagcccctaccttcgaggggcaactccctcctcatgccgactatcctctgaagaagatgatgaaggagatgccca

SEQ ID NO: 238033 - DNA, 409 bp, Glycine max
  unsure (1)..(409): unsure at all n locations
tattaaaatgattggttatgattggatgatatataatataagaatgtatatagtattttgtcctcttttatatataatattatataattaacaaaattgaattgaaaaaatgagtgttgaaatttcttgtgcccaatccaggtttcattataaaaaaaaaatagcttttgatataatttaatttataatgatggtatatgagaatgaaaaattttgattgaattttggaatacttgtgattgttgatgtccgttgaccatatttttgagtatagattagcagataaagtaccaaattgcaaaggaagttttgccaaaagtgagagtattggaagctgctatcatatttttttcanaaaagaatctaatcattcatgagaccattgtttgtatgaagctttatctcttca

SEQ ID NO: 238034 - DNA, 350 bp, Glycine max
  unsure (1)..(350): unsure at all n locations
ggctgcagcttgaataaccaattgttgtctcttatcaggcttcatgtaatctgttatgtaacaaattaaagataatttaccttgcatagaattaataatgaagaaagagaatttaacaatttagaaaagagcatcccacctccacaacacacagaaacaaaaaagaagagagataccataagaattgaaacataattgtgaacccagtaagagtataagaaaaagaaacgagattcccttnaaatggtaaatgaaatctttataagtaaacaaatataagcatcagacaaagaagaaagaggaagagaaagcagatgtggagggcaaaccttctccatattccatgttct

SEQ ID NO: 238035 - DNA, 408 bp, Glycine max
tgcaagacattgaataaaatggtcatgtctttggcgttcccgacacagttacatacaacatggttattggtggcctgtgtaaaaaagtcgtgtaagatctgctcttgatctggtagaagatatgaccttgagtggttgctccccagacgtgattacttataattcaataattcgctgcctatttggcaagggaaattttaaccaggctgttattttctggagggaccaattgagaaaagggtcccctccttatctcattacctatacggtgcttattgagctggtctgcaaatattgtggggcttctcaagccctataagtactggaagattggcaatggaatgctgttatcctgatatcgttacgtattactctcttgtaaatttgacttctacaacaaggaaatat

SEQ ID NO: 238036 - DNA, 393 bp, Glycine max
ggatccttgagtcacctgcggcatgcaagcttcttatccaaagcttgcttgtggagcttctatggatgctggatctttgagcttcaatggggtcctttaatggtgattttccaccatggagatgcagcggaagacaaaggaaaggaggtgagaggaggcgccatccattaaggaataagccatggaagaaggagcttcaccaccaagatgagccttggataagaagcttggagaggatgcttcaatggaggaaaagaaagagggagagaaagagagaggggggagcacgaaattgaaggaataaaagagggagagaagtggaactttgaagtatgtctcataaaactctcattcatcaaaagtacaacaagtgttacacatgcttctatttat

SEQ ID NO: 238037 - DNA, 458 bp, Glycine max
  unsure (1)..(458): unsure at all n locations
tgacactataatactaagctgaccttcgcacgntgaactcatattctgtaatggttgatgggatcgacctaattatttaatgttagaaggttgttggaaacctattttattcggatatagaatgatactttttacagtattcagatataaaatgaaaatcccacctaataagtgatatttcatatatctaagactcaaatgtatatcattttttaagagcttaattttgcttatcattgtgccacaagttgtactcgtcggtgtcacgttcttcctttatatctatattaaaagataattaccttaaagaaaaataattctaagtgaaataggataagggattgttttagatatattttggtagaaataattgatcttgaaagaagaaatggttcgaaattaatttgtgttcgaaaataatattttaaaagttttgaagaattgatttaattaaatca

SEQ ID NO: 238038 - DNA, 449 bp, Glycine max
  unsure (1)..(449): unsure at all n locations
agctngacatgtactagacaatgatattatattttatttcatcaggtcaaatctatctctgtcgccagaagaaagttggctgcctattgctagcattctgttctgcattgttcacattcaggttcaagctgatcacgtttttcttatacttacatttcccatgccatgcccgtttacaagccgttgagattgctactattttttaaccttgattaagctaaaattattgcacaacaggcaaaagttaagtgcatgtntagattaaaatttgcaaacttaatgttgaatgaacttcattttgcaaaagcaacctttatcttccttccattttaaactgagttttttaaggcaaaactcagttcacaatcagatccaaccaaaaatcgaaccagactttttcaatttaacttttgaatgtactttttggaacctccaactgaaacccaaca

SEQ ID NO: 238039 - DNA, 447 bp, Glycine max
  unsure (1)..(447): unsure at all n locations
ntttctaccctaagtcattanttcaatgctgatatctttggctttaaagctcagatggccaagttacttatagtatattgctgcaagggtgatagataacttgccttgattattttctttgtaaagaaaagcaaatttagttctatttgtgcaatttagcaaatttggcagtgttcataaatcctccaagggattttaattcaaatgcaaaaagaagaaaaacaggtttagaaacggagctcagaaagcaaacataattgagtgcgcataggaacaccctgaaccaattgtgggttgtgggctgtgcacatcgatatataactgaaaacttgttacaccaatatgcttggcatgagatttcctttgtgtccatgaagcatanggatatatgaaccatattccacttcactatcctgcctgtatgtatgatttgaccactatttgggt

SEQ ID NO: 238040 - DNA, 432 bp, Glycine max
tgccagcttgctatgcgttattctcgaagaataaacactcctattacactggtataataagttaatatgcatgtgatcctctttcaaaatatatgacaactcgttaaaccaatcgaatacagtaaaataattttgaaccaaggaacatcatattctaaaatatatagttatagtaatataatataattgtataaaaaaaagaaataggcaaatgatattttggtggaggtgcatgcctcttcgttttttctttatttttccctaagaggaaactatataagcaaacaaaataaccatcaaatgtgcagtctaggtataactatcaaactacgtacgacatgacagtgaatcataaaaaactataaacttaattaaatttattctaaaaagtagaataaataatagaaatatttttttttctagaaaaaccga

SEQ ID NO: 238041 - DNA, 426 bp, Glycine max
  unsure (1)..(426): unsure at all n locations
gaagaggatgctntaatggaagataataaagagagattgggtgagcacgaaattgaaggaataaaagagggagagaagtggaactttgaagtgtatcttataagactttcattcatcaaagttacaacaaatgttacacatgcttctatttatagactaggtagcttccttgagaagcttttttgagcaaacttccttgagaagctagagcttagctacacacacccctctaataattaagctcacctccttgagaagcttccttgagaagattcctaaagaagctagagcttatctacacacaccccctataatatctaagctcacccccatgccacaatacatgaaaatatataaaaaaaaaaagtccctattacagagactactcaaaatgccctgaaatacatggctaaaccctatactact

SEQ ID NO: 238042 - DNA, 281 bp, Glycine max
  unsure (1)..(281): unsure at all n locations
agcttgttaaagaactgaggagaaatcatgtttttgcttgtacgcacatcgttcgcgtgtatgatatccactccacaaggtttgaagtanaggagagcttcaaccctataacgcaacgtggcggacaaaagtgggcagtaaacttgaatgatcgtcattgtcaatgcggaaggtattctgcgcttcactatccatgttcacatattattgcagcttgtggttacgtgagcatgaactactaccaatatatagatgttgtttatacaaacgagcacatctta

SEQ ID NO: 238043 - DNA, 393 bp, Glycine max
tggtaatagttggggctaaaagtcttgttgaagaatgctatgttatgcctcttctaagataacatgacacccatggcaatgttggaagcatccatttcaaggacaaacagaattaagaagtcaagtcgtagtaacacaggggtagacaaaattggcatcatcaattggttgaatgcaagtatggccgaggaatgccattcaaaattgtcgcggattaacaaggtagttaaaagtgttgctagatgaagcgccgattaaaccctgtgagacccaaaaacctatgcagggccttgaaggatttatgaaatggccattgtcgtgtagcttgtatttttgaagagaccagttctactccttgtgatgagaccatatgacccatatattccacttgcg

SEQ ID NO: 238044 - DNA, 326 bp, Glycine max
  unsure (1)..(326): unsure at all n locations
agcctatcatgtctatggtagaagttattgtgtaaantttttgcgacaatgtgcaatatatgctatttgttgatgcatttagttggggtcattgtagtcaaaatcaagattctacttaggatcaaaaggttagggaactataaattgtgtacttaataacactatcagtcaatcgcgagatcctacttaaaatataaaattgtgtttaaagatatacatatgcatagtaaaaagcattaatcttgcaaattatcttataataactaccaacattggaataaactcattgtcaaattgcacaagtcacaaactcacaacttaaacag

SEQ ID NO: 238045 - DNA, 399 bp, Glycine max
  unsure (1)..(399): unsure at all n locations
cgcctaattagcctganattgagagagaatgatgattttactttcaaaatgaaaatactaactattgattacctatacttaatagaaaatacttataacactacaaaataaccataaattgggagagcttgatacaatttatacaagtgttatacacaaaagtaagtcgtttccatcgactaacaacttccccaattacagttgtgcttgtcctcaagcaaaaagagaacagctcacttgtcctcaagtgacaatgacatgcagtgactatgtacaaaggtgtatgctataaagtactgattgcatgataagagagcggagaaaatgcactcatcacttgtctttcaaatgtatgcactaatcgaaagataagataaaatctaacctaaacacgtagat

SEQ ID NO: 238046 - DNA, 371 bp, Glycine max
agcttatacataatgagagaaaagtatcttttgaagaagctaatatgagatcagctttacaaattagattgtgcatgaatggtataactaaaaaagtgaggagagcaggaacctcactcttcaatctctcaaatttataatgtaatagtattgataaaatattcatttaaaaataagtattgataaaatatgaataagtaaaattcgggattgaaatgtcagattttaaaatttatgcacgaaacccatgactaataacaaggctactattatttcataattttcaagcaaacttcagttaataatatgttataaaaatgtcgagattatcatatagatacagttcaatacgtgaattcagtttgtataac

SEQ ID NO: 238047 - DNA, 411 bp, Glycine max
  unsure (1)..(411): unsure at all n locations
tatctatttaactntagtttgtcataccaactttattgtgttataaaaatggtccatcagctatatttccatcagagaaattcaaattattagtgctccaaagaaacataattaaaaaaaaaaaaaaaagtttcaaatggaaatccaagcaacagtctagctgtttctcttattccttttcctactttcttaacaccaacggacttgaatttttcaaaaaagtttgctaaaagttccactcagatatatctacttgaccaataaggaatgtgagtgaggtgtgaattggcactacaaaaccctccttcgtgtgatactatgacacagaaacaatgcacaaaatccagacaaatgctgcttatcccatantgactagcatgaaacacactagaaacaatagatgttcaaata

SEQ ID NO: 238048 - DNA, 362 bp, Glycine max
agcttccatcacctttcatcatggcaaggaaagcccggtcgtcaccattttggccatgtatgacacgttcgaccggggatgtgaaaagagtgacgcaagaattgtttgttgtgcactggctctctatgtgtggctggtttcacacctttttctccaagaaggtaggcccgtctatccgctacaaggtcaccgctcgtgcgtcgaaaaaggaaaggcgaattgggaccaactcttggctagcatggaggggcgtctgttaatttgttccctcgctagaaggaaggaagaatcaggattctatcttcatgcgaaggatgtccaaatgttcccttgatggaacaaggggttgtattaattataat

SEQ ID NO: 238049 - DNA, 445 bp, Glycine max
  unsure (1)..(445): unsure at all n locations
tatgagaattccaagctgtataagcaaaaagtaaaaatctatcatggcaaaaagctatcaaaaaggaatttttagcttggtcaacaggtattgttatttaattcttgattaagattgtttccaagtaagctgaaatccaagtggtctagaccattcatcatcaaagaagttatgccatatggagcagtgatattggaggacccaaccaccaaaaggacatggaccgtgaatggtagaagaatcaaacactacctangtggagatttcgagaggataatcactgttgtccagatgcaaaaggcttgaaccataacgaagacgtccaattataaagacgttaaagaagtgctcttgggagggcaacccagtgtttttaaactttgtcttaacttgtgttactttaatcttatgccttatatatctaaaacttacttttgagtcttta

SEQ ID NO: 238050 - DNA, 424 bp, Glycine max
  unsure (1)..(424): unsure at all n locations
agcttgtctttaaccaaacatggcacctttccatcggactggggattcccaagctgaccataaacagagcttcccattgtaaaaacttctccggatgttgtcaggcctactgtcaaactgtgcccgcaagcaattctatgaaaattggaatcaataagtaaagatacacaagttggttcaagccgggcatccttgtctccgtgtccaaagcgatttttatctccatcgccccatgtaaacaatttatctgatgatacactagcacttgattgtgtcacaataacctctacaacaagctgcagatgccaaactccacagcaacagctattggccttaacccagataaagattctaacttcttaagatatgaaacattttccctattttcatgggctangacaccaaatgtttcattaccaaatgt

SEQ ID NO: 238051 - DNA, 367 bp, Glycine max
tcttatatgtacatccgatgggtgcattaatgttttgtatgtggatgcgaatagagttgtctgtgacctcaacacaaccgaagcatttccaaggtatttcctaattatatattggcctaaatatgttgaaggtccatgcaaatatagtagtttttgtttttaatccctataatttttttataacttgcaatgtttgttgtttttggtccctgtcgtgaacttgctgttaacatgttttacatctttgcaaatatatctgtttttagttttatgtccctgcaaaatcataacaatttttgtttatggttcctacaaagatatcaatttttgtttttagtacctacttttacgtccctataaaatataa

SEQ ID NO: 238052 - DNA, 283 bp, Glycine max
  unsure (1)..(283): unsure at all n locations
agcttccatcaatgccccatgtggcgttttttaattaatgactggtttaatagtaataatttaaataagcaaaaaccatggnaaattttttttttctttttctttttcatttctttctcttttcaccaaaacaaggttttgaaggaaaatcctcactatagagtcctgaatggccagttcacaactctattcggagtcatttctttctcaccgctcataatctctaaactaatttgctttttcaaaaagaagaatgtactatccattactttatgtcgtcacg

SEQ ID NO: 238053 - DNA, 366 bp, Glycine max
tcagcctgatcgctaaacgacagctgttgcgtggcttatcgggatctattgtcgccaagcgcaattgcttacggctgtaattgatgaccatgacgctaatcgccagtcatggcagctaagcgagattctttgcagcaatatgagcgttaagcgagtacctctcatctaagcgcgtgctcctctgtacttaagatgcatcattttagctaaactatccacggccaggcttatcgagagttgcagcttctctaatctggaggtctcgctaagtggacgtaccctcgcgctaatccgagtatctgttcaaaaaataaaaaagaaaaaaaattgattgtgaatttgaaacgtcatgtaagcgcatgtgtt

SEQ ID NO: 238054 - DNA, 381 bp, Glycine max
  unsure (1)..(381): unsure at all n locations
ggatccttaagtcacctgcggcatgcaagctntgtccgtaaaagtcacttttatccgttttaaggtccaactccttaaacggtcctctttgcttgtatcggttaacatggaccgttcaaaagcataaaatcaacccataactttaccgcttttgtaagaactacgtagatctgatttcctcatcacaattgaggatacgtaggagcaaaaaccccgctttttccgaccaccccaagagatcgttaatgatccaacgccttaacatttctctcctttcaaaaacaagagatcattaatggtccaacgtcttaacgtttctaaaataagagatcgttaatggtccaacaccttaatgtttctgtcttttaaagatcgtaaatg

SEQ ID NO: 238055 - DNA, 414 bp, Glycine max
tctgctgacgcgccgacgaatgtatcttcatcattgtctacatctatactattgcctgctgagtcagattcatttctaatatctccaaattttttaaacccacaaagatctttactcccagtgctgttgattttcttatctgcccaagtaacagtgcgactaagtttcttttcacctgcagatttaagggaagatttgggtttagtctttaatgatccacctgctttttccacttggaatttctcttcaacattggcaggatctaaattggaagtggaagcatcatcattagcagtaactctactcattttccctttgacttgtacagattcttatcagaatcattctggtccacatcacattgtctttctgatatggagacggaataaacatctctctttgtaatagcacaat

SEQ ID NO: 238056 - DNA, 387 bp, Glycine max
  unsure (1)..(387): unsure at all n locations
agcttatagcatcctgttgtctttncctatctcaagaaggggantgaaaaaaaaggaaacaccactcatctccttaaacttttcatttgatccctttaaggtaaaaacttataacccattgtgttaagatgagtattttatagcattaattagttatgggctgcgtgaagaggattacacactaagtattagggattattatggtttcctcaaaaccccaggtttgctaaaattggggatgctctctactctcttgttcttttatcctaaatgcctagatcctgcggaaaatagggtaattgatcctcccaacaccttcgaaaaacattgattgcatatttattgagagtacctaatctattaaccgacaattttctaattctttta

SEQ ID NO: 238057 - DNA, 422 bp, Glycine max
ccacctcagcctgcgggcgctagaatgtatgtctaaagtaacgcggaattattctgcagatactccagggagaattgcaagggagagaaaaaactatagctgttggaaaccaaaattcaaaatgtacctgtccaagtaggaataaacataaagcttcctcatacttcaaatcaataccttctgaagctatcaaacattcacatatgccttttgctttgttaatctgcataaaattaatacaaataactagtatcaagatgaaggtcagaatgccactgtttgagaatgtatgccaagaaaacagtattaatgaaatatggactatggcgagattattaaaatatgcctacccgattcatagaaatgtattaccaactctctttgctttgctggaaaaccaattgccatatgagctcttaaaa

SEQ ID NO: 238058 - DNA, 379 bp, Glycine max
  unsure (1)..(379): unsure at all n locations
agcttccatcaagtggtattcatagctctttagctncaagnaggtgctccttaaacctccattaattntttgctttaccttctcttccattgttgtttcttcatttttctccatgtatctcctcacatgtcttgtgataaatgtttttaacatgattctttagagtttccactgattaaacttgctataaaagctagatttgattttctatggttctaatttcttgttcttgttcttgaaccatgaattgtgttgaagttaagttcctttgagttttgtcttttatttttagggctgaaacctaaaccataaaattttacaaaatattaagtagagaanacctccaaatctaagtgacttgtccctattgtatttgcat

SEQ ID NO: 238059 - DNA, 426 bp, Glycine max
ttaaatactaacttctaagcaagctgtcataaaaaatacacaaatttcttgttgttaggtatggatctagggattatcggagttagatactccaatgcaaaatcaaaccttttcgtcattcaaacactaaatttagggaaaaacttttctatttcatctttgcccaaattaagaaggaaaccctccaaataaccggaccaagtgatgatagggaggaaaagagagtgtggtccttgcgcataaacaatcgcaacacaacttatactcagcgatggtagtgagttccgacaccgtgttcatgcatgtgaacaagggcacgatggtggtgtgagatgatggaataggatgcgccatggtggtgtgttggcattgtgaattgtgggttggtgttgtgggtcatttttcgatggtggcagtggcacttgg

SEQ ID NO: 238060 - DNA, 388 bp, Glycine max
  unsure (1)..(388): unsure at all n locations
agcttattgtattaattaattgacaaaattacttttttttaaataaattttaacaccgaaatcaattgtatatgatataactgttgaaatttaagaagaaattgcaatgcttcttagatatttatatacttggaaagttcaaaacatgggtggtatttttttgatcatatgtatataactgttgaaatttaagaagaaattgcaatccttcttagatatttatatacttggaaagttcacaacatgggtggtatttttttatcatatgtattcttcatggaagataattttattcaaatcggataaatattataaataatcattnttttcttttaagtacttaatacaaccatgattattaaactcttgagttaactcgttaattcta

SEQ ID NO: 238061 - DNA, 432 bp, Glycine max
tgatgtcattcaaaacacactatgtagacctaaatgaatactaaacatgcattgtttatgtaattgtattcattatgcgatataatttgttgtaacccgttactaaccaattaatattatcaagtactcgtttggttaagcaaggaaattgttggtccaataaaaatcatttacgcgtgcagcatacatcattgtcataattgacaacacataatgacatgcatgcgtattacagtttgagcgcgacaacacattggctaacttcagtacacattctgaaactagcagtcgctcgacaacacattggctaacttgactacacattagcgacaacacattggctgacttgactacacatttacgcgtgtctattgttttgtaaacaaagttaaacaaaggctctgtcacaaccatctatatatatggcagact

SEQ ID NO: 238062 - DNA, 375 bp, Glycine max
  unsure (1)..(375): unsure at all n locations
taatcaccgcggctgcagctngggtggcgcttagctaaancttgtgtttgaaaacaatngtaggacaagtggcctcaataacttaagaggggggctgaattaagtttcaaaaattcttcactaacaaacttttaatccccttgtaaatgatacgctcagaatgcagaagaagaagcaaaagtaatcaatttaacaatgttgttttaaatgggcaagacaaagtaaactatagtaaaataactgagataagggaagagagaaatacaaactcaatttatactggttcggccaattcccgtgcctacgtccaatttaacaatgttctttgtaaaatcctttttcaacttctgaacacccgaggatcctttccttggc

SEQ ID NO: 238063 - DNA, 426 bp, Glycine max
  unsure (1)..(426): unsure at all n locations
aggatgcttcaatggaggaaaagacagagggattatatttacagaggggggagcacgaaattgaaggattaaaagaggttgagaagtggaactttgagttgtgtctcacaagactctcattcatgaaagttacaacaagtgttacacatgcttctatttatagactacgtagcttccttgagaagctttcttgagaaaacttccttgagaagcttctttgagataactctcttgagaagctagagcttagctacacacacccctcttataactaagctcacctccttaagaagcttccttaagaagattcctaaagaagttagagcttatctacacataccactctaatagctaagctcacctcctngagatgagaagctagagcttatcttcacacgccctataatagcttagctcaccccatga

SEQ ID NO: 238064 - DNA, 338 bp, Glycine max
ctatcttcagcacctgggctgcagcttgcataatctttgctaccaattttgtctgcttttcaatagaatcagtcttttgggtgccgcgatcttcataatcttgaccgcgaagccaaagtttgatatcgtaagcccaagagtcgcagttgttgccatctagtttgtctacgtggagaaagacagcagcgtagtcgctgaaaatagaaagttcaccctttggaggttgtgaacatgccatggatcaaccaagaaaaagagaatgagctgaaatgccctatggcaagctcggtgttttttatagcgagaactgccatcactggagatgggtccacaaaaaa

SEQ ID NO: 238065 - DNA, 434 bp, Glycine max
caaactaagctaagactgtctaaagtataacgttagttgctctgatgtgtgttagtgtttatagagaagtcagaaattatcttttgagaaagttaaggtgcatatggctaagagtaattaaacagtctgtgtagtgtgaagtgcttttaatctatcatcttatcataaattgagacgtaagggaaatttgttgattcttacaacaattaccataaaatgtatatctaacataatttctgattggttaaccgcatgagtatataggaattaaactctggctattggttaatcttaacttataccagaagtttgattcattctatgttatttttttccttttaagtggttgttcaagaatgtatccgaattgggactctgtccaatttctagtctatgattacaaaatagtatttgggtcatgagatgaatatgct

SEQ ID NO: 238066 - DNA, 281 bp, Glycine max
  unsure (1)..(281): unsure at all n locations
agctnttctntgagggttgatgagttctgtcttgcanaatggcgtgatcactggctgacatattctcaattagcttagttgcttcttccggggtcttcaactttattttttcccctgcagaagcatctaataattgtgtggtttgtggtctcaacccatctatgaacatattcaattggattggctctganaacccatgggtgggagttctttctaataaacctttgaacctctccaatgcttcactcaaagattcatcagggaactgatgaaatgaagat

SEQ ID NO: 238067 - DNA, 393 bp, Glycine max
tccatcaagtggtaatcagagcacaagagctgtaagttatcgctccttaaacctccattaattatttgctgtaccttctcttccatttttgttttttgtggctgaaacctaaaccataaaattcttacaaaaatattaaagtagaagaaaacctcaaaaatgtagagtgacttgttcacctattgtagttttgtcatagaagtcatgtctattcatgaaacttgtcacataagatttcttatgttgtgctgaatttttttttcttgtttctttgcctaattcatttgttcatgagtgtatgaaataaatgtatcctattatttgatttgagtcaaatctttcatgttaattagtccttaacatgttcatgcaaaattcttatagagtctttga

SEQ ID NO: 238068 - DNA, 383 bp, Glycine max
ttaagtcacctgccgcatgcatgctagcatgccactcgaagcgccatcttttttcggcttttgttctaaattatgaacgactactaatctagataataaactgagtctctttgtgcccaaaactatcaatcacctaattgtataccctttatccactcctaaataatgacatgatgtgaaatgaattcaacctgaacaagttactggttttcaagaaaggcaactactatcacattgagtcgatcttttagtcacactctactaataaactgattaagaattggcagacaacaaatgcacatttttaaagtaggtaacataacacataatgtatattatatacacaaaataaagattttgtatgaagtaccaattaacaaatc

SEQ ID NO: 238069 - DNA, 380 bp, Glycine max
ctggcacgagtattcatgtttcatctaggccgtttgagtatgttcattcagatttatggggaccatctagagtaaaaactcatggtggaagctcatactttctcaccatcatagatgatttctcaagaagagtatggctgtatgtgttgaaaaataagtcaaaatctttttcaaaattcagagaatgacatactcttattggaaatcaacttggtacaaaattaaaagttttaatgactgacaatggcctggagttcgtttcaaagtagttcaatgagttttgcaggataatatgcatcataaggcataaaatagtccctcacactccatagcagaatggttatgcagaaagaatgaatatgaccatcttggaaagagtg

SEQ ID NO: 238070 - DNA, 426 bp, Glycine max
  unsure (1)..(426): unsure at all n locations
agcttgcttctacaatctgccccntttgatgatgacaaccctgaaatcaagaaacacatacacattctttttcctagtcgatcactcacttaattctacatattctccccctttgtttttgagtttaagctttacttgaaattaagttattttgttatgtgagttcttgatttaatccctattttctctccccctttggcatcaacaaaaagccaaagtgcgtaacaaatataaaacatacataaatgactaatcatacacaagacattcattgaagaatctaaacctatcaagaagccaaaacatgaataacccaaattcaaatataaaccacatagtcttataacataaattatagatgttcagtcatactaagcaaatagtaaaagaatactaaatgttcaatgtctaataatataccaatac

SEQ ID NO: 238071 - DNA, 87 bp, Glycine max
tatcaggaggtgagcttagttattagagaggtttgttgttctaagctctaacatacttacgaatgcttttatggaagcactccatcg

SEQ ID NO: 238072 - DNA, 393 bp, Glycine max
agcttaggctaaattaggctaatttttcttaagctgcttgagctgagtctagtcttacaagaggaatctgcggacgaaactcagtttaagttagtctaaacctgagagggctgtctcaattgggactagcccaacaagagggatctaaggacgaagcttggattgattcggtctgacgaggggtcgaggtttagtaattcaggctacaatgtagaacacaagagcgtggttgattagagaaatatatttatatgcatcagcttgtttgtttgaaagacccaacatttctacctattgctgtcacttttacttactttgtattttaatagttttagcataaaaagtagtttaaatttgtgttgaaattatgaatcatacatgtcttttaacaat

SEQ ID NO: 238073 - DNA, 427 bp, Glycine max
  unsure (1)..(427): unsure at all n locations
tgtaatgaagatgaacatgaacttatgatcacttatttctggtcagatttcactcattgctcagtccaactcctcgcggcttggatttccagccctgattactgccttgtgcaatgcccgaggagtcacctcaaattctcttaccttcgagtcactcagcccagccattaatttggcttatattaagaagaattgctggaacctggatgacccttcggtaacttttctatggacccaaaaatccatggctagaagatctgaggccctatcttcttcagctactcctgctaccactacccctgctccctttacttttgctctcccttcagcaccagtaactccagttcttccaggtcctttcgctcagagcttagagcacttcatgtctatgctgcanagcttgcatcagggccaacttctgatcatg

SEQ ID NO: 238074 - DNA, 237 bp, Glycine max
taactgagcgaatagcaatcctatcggacaacttcgaattattataatctagaatccattgagcggacattcccttggaagaatacaaatcgttgaaagtctaaaatcgaacgttaaacaaccaaaaactatggaatctcaattcgcgtccaacaggcgagaaactgaaactctttttttataaaataatcttactaaaagttcgcatattcccttattaactgtcatcatctctcc

SEQ ID NO: 238075 - DNA, 305 bp, Glycine max
gatcttaagcacctgagctgcaactcatgaaaagatgggcttatctttcttttggccttcgagatagcttgaccacatgcacacacacacaagttttgataggaagaaagatcattgtcctgggaagataacaccttactaccaattttatccaaaatcaacagctgcaaagtccgtgaaagacccaataaccaaccaatgttaagagaatggtaagtggaagatcgtactttcatgatagtgatgttgaaacaacgcccacccattgattggtggatattcaccgaaaaatggatcacagtccc

SEQ ID NO: 238076 - DNA, 436 bp, Glycine max
  unsure (1)..(436): unsure at all n locations
agaactatatntactcaagctgtgaagtacatatgccgaatctatgagagacgattattgtctgagttacatgtgtcatttggaaagagaggttcatatagtgcatgtatctatgtatataatgctctggacaaatttggttcaacaccaaactataattatatgcattatatagatcatagactctgagatatatgaataaaaatattatgatgattgacagtgatcttggaaaaaaatattatgatgatctagacagccgaataaaatacatatgggattgacatgagatatattaaataagtgaatacctcttttataaataaactagtgaatggttgaattaacggctgtcaactcaattctaaaattgaatttgcaaaccaaccagcgtagtgcctctatgaaatcgaatttccaatcaaatttaatttat

SEQ ID NO: 238077 - DNA, 322 bp, Glycine max
ttaatcacctgcggctgcaacttgagctgtatgttaggctcgctcatgattttatacctacctcatctcatgattctcagcccacagtcgcacttcttagagctctttgggcttctaatgtaaacaatgcatagaccttacccgacttatcttgtactaaaattcagctatgatttggaagaataggaactgcaaagatcaaagtcttggtcacttggtcataaaaggtgtcacagacatgctctcgcgaaagtttagggaaggttttgccagttttatgaacctcaagtacataacacaatcataacaaaaacttgtagct

SEQ ID NO: 238078 - DNA, 288 bp, Glycine max
tgtatcttataataaaataatcatatgtcgcattcaaataaagcaatataggacaccaaggatgtatctatacagtgcacaatgatgaatactaaacctgatggcaatctctccttgttgggaaacaagagttgcttgttgattaaagatggtgctgagctcatgaatgggggactcaacattctgaatagcttcaactctgctttgcatgtaactgtcttgcaagggaactacctcttgctgctgctgctgctgctgttgcaacaatggttgaatcttcccatttac

SEQ ID NO: 238079 - DNA, 310 bp, Glycine max
  unsure (1)..(310): unsure at all n locations
agcttctatagaaggttcattcctaatttctctacaatggcatcacctctcaatgagctggtgaagaagaatgtggcatttacctgtggtgaaaaacaagagcaagcctttgctttgctcaaagaaaagcttactaaggcacctgttctagctcttcctgacttttctaaaacttttgagctagaatgtgatgcctctggagtgggagttggagctgtattgttacaaggtgggcaccctattgcttattctagtgaanaacttcatagtgccaccctcaactaccccacctatgatanagagctttatg

SEQ ID NO: 238080 - DNA, 408 bp, Glycine max
  unsure (1)..(408): unsure at all n locations
tgaaatgaggaagtgtagaagggtgaaacttcctgcttttattcgttgaccacagagtggtacctggagatatgtcgcgggggtcatgagaccttggggacgtcaggtggggtgctattgcccaaaaccaatcttgaccaatcccaacccaacccgggcatagtcagtcagtgagaacttgtgatgtacctaagcaggcgagctcctggcagtcaacagataaaaggaacaaagaccacatagcaaggaggcttgtgtggtggctggccaagtgtgaatattgtgtgacatatgggttatggcctctggtaatcgattaccaagggtgggtaatcgattacaacgcttaaaaatgaagacatgagactaagatggtctctggtaatcgattaccaangggtgtaatcg

SEQ ID NO: 238081 - DNA, 348 bp, Glycine max
agcttctggtgggacatcttgactagctttcttatctgactttcaccacagattctgccttcttctattttcagattgggaatgcctctaacagcacctttgtcaatgattttcttcatgcctcttaagtgcagatgtccaaatctttgatgccatattttgacttcatcttctttggagaatagacatgtggaggagtaactggtttcttgaggtgtccataggtaacagttgtcctttgatctgctgcccttcattaggacttcactcttctcatttgtcaccaagcattctgactttgtgaagtttacattgaatccttcttcacacaactgactgatgctgatc

SEQ ID NO: 238082 - DNA, 438 bp, Glycine max
  unsure (1)..(438): unsure at all n locations
gttggacanaatggatgagttggagagaagttcatgatatgctaattgaagagtttcaaggttgtttatatttacctcttcatctgatttagagtcagatcattttgatgcagtgtttgccatcagatagaggttggctgtcttcctcttttgtttcctcattgaacgatgtgtcgtccagttcttcccatgtgctcattagtactttcttgtcctttggtttgaagtgctttttcttgtgatctgtcttatcaaggtctacacattttgacttgaagggtcctggtttcttacactcacaacatatgacggaacttttggccttaccctctctttctctatatgggttcttagatctctaccagcttaatccactcttttacttccacgtgttccttatcttccttaagataaacgctaactgatcatcttcatgtg

SEQ ID NO: 238083 - DNA, 381 bp, Glycine max
  unsure (1)..(381): unsure at all n locations
gaccttaatcaccgcggctgcagctgctatggaaacaggggggttactgncctttcacatacactgtggagggtgttctaactactttcatacccttgatgttggaacaattttctgggacctcggaggcgaacagtaagtcctacaattagaaaaatgttaaaataaatttttactactcaccaaaagacaaaagtcctatgaaatattttgtcacatgttcccaaatccactcaagatctgattccttctggtaattttactagtctacacgaggagacctgttgaatgcgatacgttcaatgtacactgctggtcttttacttggaaacaaaatgcttccattgacaagcagtggatgcattgaaagactggttttaa

SEQ ID NO: 238084 - DNA, 430 bp, Glycine max
taagctgcgacttaaaaaagggaaaattgtccgaatttttttcatgaatctgacataataggagaactttctggctacatacattttatgtttgaatgcctcaactgcaatgtctgtttaaatgtacattttatgattctgccactatgtttgcttttttgctttaactacagcaataaaggatatttagatgccctaatccttattttataaactgcaaaccttttctaaaacaagatatggatacaccccataatttttttagatctgtgggaatcaaaaacaaggtcaaggggttacaataagtcatgcaccttgctcaacaaatgagctagaccccctgacagatagacacataatgtgcattgtattgttatatatcataatgtctcaaaatgtgttggggatagattcttctttgattctaatg

SEQ ID NO: 238085 - DNA, 330 bp, Glycine max
  unsure (1)..(330): unsure at all n locations
agcttccaagtnnnnnactagttctgcttgcttcctgaaatgacatagatgccccttcttgtaaagatataacatataagtgaggggaatgaaaacaaaacgaaaacagtgaagtataaaccacatacaatttattttattgaaatccaatgatactcttataaggcttgtagtgtataaatacatgaaattttatgataggcgnnatattggagataattattgtagaacaatctcatcatttgcatgtttgcctcccatactgtcctcagcaaagatattttccatttcgacccctagctttatttctcactcgtcaatgttcatttt

SEQ ID NO: 238086 - DNA, 456 bp, Glycine max
tgcttctacagaggcatatatacgataaagaatccactcactcttgcacaaataaaaagaataaaaaatccacagcaacaaccttatctctgtatccgtcatacaccaatgggcgaggtctgtataaccattctcttttccttttcttttcttcaattaccatcaatgtatcattccgggttctgatttttttttgtgttataaataggaagagaaaaaactagaggaaaacaaagtggaagagaaaaaagcacaggaagaagaaaagaaagaagaagagaaaaaacagaggaatcaaaagatggcaagaaatccaaggaggaatctgcgccaccataaatcgtgcaatgcacaaccttcacaatgcatgaacactttaagcacgatttctgacatctttttaagttaatgactaatttgcaacacttatgcaaaagataaagactattttgaatt

SEQ ID NO: 238087 - DNA, 246 bp, Glycine max
  unsure (1)..(246): unsure at all n locations
agctagacatttttcttgacggnnttttacattctcaatatataatctggatgctgggaataaaaaaatattttaaagtattcttttattaattaatattntctcttaaaaggaaatggtggagggaaaagcaaagcatatcaattatataccaaaatttcactagctgtttataactgtatccattcttacattgccgacataatacagatgcacccacacctttaattgctatgcttaaaaaac

SEQ ID NO: 238088 - DNA, 252 bp, Glycine max
ttcaagtgaaacacgcaggcgcgattgtagaatttgttcatatcggagaagaacacaagtgaaagaagaagtggaattgccactcaccatgtacatattcttcaacaactcttagataataaactatacgaggatggagtcccaggcctaacagacagagagatcacagataatatcctaactctgataattgcaggtgacgctgatattagaacgattgatcaccacccccaccctaacggacgttaaaac

SEQ ID NO: 238089 - DNA, 312 bp, Glycine max
agcttgaagatatggggacccatatatgtggtactaggtggcggtcgggcgatggtgcacaacaagttttccacatccacaatgcgcgcataaacccaccatcccctgttgcccacctccaactgagctcacgtactcccacgtagcccatatcctcgtttctctcaacaccgggtccccatcaatcctcccaagcttccacaacatccaagcaaaacaacattcaaacagcacaagctatcacagccaagcaaaacagagcaaaggcagaaaactctgccaaaacaccaaccaaatcacagcttttctcac

SEQ ID NO: 238090 - DNA, 407 bp, Glycine max
tctaaacggatctcatctagctcatatagttgctactttctttcctctccagcctgatcaatagagaagttgcaggtctttacagcccagtatgctatgtgctctatctctacaggaagatgacatgccttgccaaagacaacccgataaggagacattcctatgggtgctttgtatgcagtcctatgcgcccaaagagcatcatctatcctggtgctccaatcctttctgttcggctgcacaatcttctcctatatactttttatctccctgctcgaaatctcagtctgcccattggtttgggggtggtatggtgtgtgtcgcaacctaccctttggcgggcgatcgatgtgatggctcaccggtgcgtcttccatatgatgaaaatgcgcggagtcaccaccaac

SEQ ID NO: 238091 - DNA, 319 bp, Glycine max
agcttacaaatctatggtaaatccaagctcattaattaaataaaatcaaatcaaatctagataagataagataagattaagatgaaataatatctagatgagatcaaatctaaataatatcaagataagataagataagatctaattttgtagaataaaatagtctgtcctcttcaaggccaagcccaattctggattcaagcccaagcccaattctggattcaagcccaagcccaattttggattcaagcccaatgcttcattaattcctgaaattagattaaaaacatcaaattagcttaatgggcccaaataatat

SEQ ID NO: 238092 - DNA, 439 bp, Glycine max
ttagtgcccgttaatttgaagcagtatttgacattcctataatgtattccatgacattttctttgccttgatacgtcatgtaaattaagttctgaagaaaaatacttgttttcgccttatcgctttctgcaaagagcttttcaatttcagcaaagaattctttggcactagttatatcatctgaaacagagccctaaagtatgtaaattagttaaatgctaactttcctttggcccaatcacatcacacgtgtaacatcacaagtgtgcatgtaaattagttaaatgctaactttcctttggcccaatcaccattcatataaataatcacacacgttaacatttctcatgaacaatctacacacagagaggtcactttggtgatattgtgattcaattaactcattcatatgctagacaattgaaatgatataccatag

SEQ ID NO: 238093 - DNA, 385 bp, Glycine max
  unsure (1)..(385): unsure at all n locations
agcttatagttgactatatagcttgnttattggcattttcaaaggctcttcccttctaatcttcatttctgacatcaagttctcaagccacaaggcttgacaagctctcattgaggcttcaacgtattctcacatgagaacagtcccaccaccaactcctttgaacaccatgaaataaatgctccacacatctgaaacacataccttgctgtactctttctgtgtaatttatcatcactgagtcatagttaccaaatatttcaccacaaacatttttgccatggtttgagaacccataagtccaaaatcctttcacatatcttagtattctcttaactgcaagcaagtgagacagccttggatgaatcataaatctacttattaa

SEQ ID NO: 238094 - DNA, 430 bp, Glycine max
ttgggcaaatatggcagagaggtgtaatattgcttcatatttgagatatgaatataaacaattcaaaaataggtgggattctttgaaaaaggaatgacaattatgggctaagcttattgggaaggacacaggtcttggctaggatggggagaagaaaaccattgcagctagtgatgaatggtggaaagccaatattcaggtatgtgttatttaacgaaaatatagtttttgtgcatgcaactcttttgatcttttgttttttatgtgattcttgatattggggccaatattgcagttgcagactattttttataagcttgcatttgaaattttacttgatgattttagtaccctgagactgaaacagtacccctttatataccttcatatatattgacatgttcatccgtggaagaaagcatcgttattc

SEQ ID NO: 238095 - DNA, 290 bp, Glycine max
  unsure (1)..(290): unsure at all n locations
agctnggagaggatgcttcaatggatgtatataagtgtgagagaaagagagaggggggagcacgaaattgaaggaagaaaaagggagagaagttgaactttgtgttgtgtctcacaagactctcattcatcaaagttacaacaagggttacacatgcttctatttatagactaagtagcctccttgagaagctctcttgagaaaacttcccttgaaaacttctttgaaaacacttccttgaaagctagacttaactacacacaccctctcataactaactcacctcctga

SEQ ID NO: 238096 - DNA, 395 bp, Glycine max
attacccactcgaccgacatgttgatgcgcgatcgtctttatcccttcggaatctgtatatcctgaatgaggcgaagaagatgatgactacgtatcacatgttctacctacaacttccagaagagatagttaactgcgtcgagcttctttgtaatgaagtgcgttgagaatcaaaattggatcaatttcagattatgtctctattatcatatctaaattattagaacgatatctcctatacttaatcgtaattaatctatataaaggagcatcttctgtatactttaacacaataaatatccctcactttctcttcattttacatggtattatagctatgatgaggtaataacaaatattgtccctcacctgtatagtcgccgacactttctgac

SEQ ID NO: 238097 - DNA, 353 bp, Glycine max
agcttgtctcagcgtttatgcgagactgttaccaacatgctagctatcatcgccaagtaccgagaagagttaggtctagccgcggcccacgagcataggattgcggacgaatatgcccaagtatacgcggaaaaagaggctagaggaagggtgatcgactctttacaccaagaggcaaccatgtggatggatcggtttgctcttaccttgaacgggagtcaagaacttccccgattgttagccaaggccaaggcgatggcagacacctactccgcccccgaagagattcatgggcttctcggctattgtcagcatatgatagacttaatgggccacataattagaaatcgtta

SEQ ID NO: 238098 - DNA, 411 bp, Glycine max
  unsure (1)..(411): unsure at all n locations
ttgcgganttggtcttcgccagtgaaaggatcgatgtgggtccgaaaagaggcaaatttgatcatcctactatgacgactgagaaaactggggcaaatgaagagggtgagaaagagggagaaacccatgctgtgactgccattcctatacggccaagtttcccaccaaacccaacaatgtcattactcagtcaataacaaacctcctccttacccaccacccagttatccacaaaggccatccctaaatcataccacaaagcctgtctaccgcacttccaatgacgaagaccacctttatcacaaaccaaaaaaacaccaacaaaaaggaattttgcagcataaagcctgtatggttcaccccaaattccgttgtcatatgctaaacttaatcccatatccactcaataat

SEQ ID NO: 238099 - DNA, 270 bp, Glycine max
  unsure (1)..(270): unsure at all n locations
agcttttcaaatgggtaaaatgctcacattcactttcttctacatcatattcaaacttgtccaaataaataataaagtcatctcgactcanagaaagtcatataagtctcatacaattaatatagaacctatatcctaatgtcacatcctatcagagcgtggtgttcccgtgtcctctagcatgaggttcttcatagtcatccacctattcatctgctcccccgaacacaagttcaagatcatcacaggatccatacacaacaacataca

SEQ ID NO: 238100 - DNA, 433 bp, Glycine max
tcacaagcaagcttccatcaagtggttatcatagcacaaaagcttcaagtaggtgttccttaaacctccattaattttcagctttaccttctcctccattgttgtttcttcatttttctccatgtatctcctcacatgtcttgtgctaaatgttgttaacatgattctttagagtttccaccgattaaacttgctatagaagctagatttgattttctatggttcaaatctcttgttcttgttcttgaaacatgaatagtgttaagtttatgttcatttgagttttgtcttgttattttttgtggctgaaacctaaaccataaaattcttacaaaaacattaaagtagaagacaacctcaaaaatctagagtgactcgttcacctattgtaagtttgtcatataagtcatgtctagtcatgaaacttgtcaca

SEQ ID NO: 238101 - DNA, 250 bp, Glycine max
  unsure (1)..(250): unsure at all n locations
tatgnccagagttatgggtgtggaaatcctgaaactgagatcataattactaagaatcaaatgatccagctgaaatgcgcagcttgtggttttgtgtctgatgttgatatgagagacaagctgactaccttcatcattaagaaccctccagaagttaagaaaggatccaaagacaagtaatgccatgaggagagctgataaggagagactgaaggaaggtgaattatctgatgaggaacagaagaaagtg

SEQ ID NO: 238102 - DNA, 366 bp, Glycine max
ctgtatatggggccttgcaggtgatatatactgtttcatatagacactagacaattaacggtgggtgactctacaactgtataatagttgatctactttgatcatatatgcgagctctgatactttgatgtgacgaatcagttcacgagctacccagcagtgtatttatgactcaatcaaacccatctaactttatcatctacttccctcctgctgtatggaacatcatagcataacccattacttaaactcctgagtttttacctctttaccacaaaatatattggacattagattaagatatctcatatgacagtttataacctgctgactatagggaagacacctatatttatgggctataag

SEQ ID NO: 238103 - DNA, 326 bp, Glycine max
  unsure (1)..(326): unsure at all n locations
aactcgtggatgtgacggactgttggacatcacaacctccacccagcatagacatctcttttctagttagatgatatgttggatgaattgcatggagcttgtgttttctctaaaattgatttgaaaagtgggtaccatccaattacgattagagaaagggatgaatggaagacaactctctaaactaagtatggcgtgtatgaatggttggttatgcccttcgtgttgaccaaagctcctagatctttcatgagaataatgaaccatgtgttaagggaatttctaagaaaaattgttatggtttatnttgatgatatcttgattta

SEQ ID NO: 238104 - DNA, 454 bp, Glycine max
  unsure (1)..(454): unsure at all n locations
agaagctntcattatggctcttctctttgcttcataatatcttgggtcaccaactcctttggttcttccctttgcttccgcatagctagagttaccatggcttgaactttgtattttgaaagagcatctacattgggggcaacatagcttatgggatcaacatccttcgtgttgcttgagttgctgagaaaaacaacaactgcattatgatcctttttttgtaatgaggtggcctcattggaaggtttaacctagtttgctcagtgtgtaatccttaatcagccttagcaacattggatgaagcttgtgaagcaacttttttgacatcctttggcaaggcatcagaagtttcaagattagtacgtacttgggtgaccttggtagttttttccttagctatntttgcaataagcttaacttggatagcttctttcccatttctcctttttgatta

SEQ ID NO: 238105 - DNA, 253 bp, Glycine max
ttgttacacaagtggcctcagatattttaagaagggggggttgaattaacatattcgaaactgtttcccctaattaaaaatctatgtcactgtttactcaagttatgaattcccttaatgacaatcttcttaaatattaattcacatgacgcaccttgaatatgaatataaagcaataataaacaaaggacattaaggtaagagaaaatgcccactcagtgttatactgggtcacgcccccccccgcgtctat

SEQ ID NO: 238106 - DNA, 404 bp, Glycine max
  unsure (1)..(404): unsure at all n locations
agccttttctatgttctatncgggtgtagaagagtcaaattttgattcggagagattttacgtgtaaatccactttgaacaagtctaaatggatgttatggactggtgtgaggtgagagtttgcttcaaatatacctcattctaaatttcacctttcaaacctataaaagccattgaatggaggggtgttggacacctacattctgtgttgctgtgctttaaagcttgaatttggcttatgcatgattgatacatgatttgggacttgtaagaattgatttgcgcaagatcggatgagatgaagtgcgatcttcgaaatctgcacttatgcccaatttttgctgtgaaattatgcagcagaattttgcacacgtgcagacaatatgcttatgtgtcggtggctg

SEQ ID NO: 238107 - DNA, 449 bp, Glycine max
  unsure (1)..(449): unsure at all n locations
agctncgcttctctaggagtgagattggctttangactctaattngaatctgaatgctgattggctaacacgttcttgaatttcaagagggaacccttcaaaacttgtattggaagagttttggttgtaatgcatgtcctagtggaagcatttgcctgaacaatcaagactgtgcagtttcaaacacatagtgtcaaaagaatggggggagtgcctgctacttgggaatacagttggcattctcagggactgacaagaatctcgatgctcttaattcttggtatgaagcgcaaaatctacggcagtactccctctatggcctattctccaatcttccggactccatcatcgggccatattaaaatctctcttaagtctacatattctcaggttgtatgcatgggagggagactgtacccatttgactgttatttgtgagtttaaatgtt

SEQ ID NO: 238108 - DNA, 477 bp, Glycine max
  unsure (1)..(477): unsure at all n locations
ctatacaatactcatgcttcttgtttatatgcgttcaaaagtggtatcattcctccataaacagacttctntgtacccgcatgcaacgtttcatatttcacatcccaaaaccaactttagcttccttatacaaaccctatttcttttctaaggaaaaaaaatgattctgattccttttaatttttgtagcttttagattttggaaacgatcataaatgtgattttttacatcaaatgagcactattaattttagcatttggttttacattggattcttcaaaattatgttgaaatgttcggtaacataattttagattataaaaattttccatgtgtttggaaatgcaatcagaacgtgaaaaaatcctgggtgtcttgaaatgatttataacaactttcacatattttaactattggatgtggagagagaacattgattcatgttccgaattttggtttaaacacttatttcatat

SEQ ID NO: 238109 - DNA, 443 bp, Glycine max
tctaccacttcatgctcccaggcaaaccaattcctcctctattagaaatctcattttcactcgcttccctcccacacagtcatatcttttataaaccattatttttgctctgaatttgtaaaaaaaaagtctactatgagatggggtaaaacactcccctccccataagctcctctaatttacttttctcgaaattccctaccctcacaatttttctcaaaaaagttatttaattaagaacttttatataaagagtgtttaaggaaaaaaaaacatgttggattgaatattaccaacaatatttttttcgtaacacaacttcttttacatattggagaataagccaaaagaaaaatgaaacttattaaaaaaaaaaaatacacccacatcggtgaagataaacctcattaatccagtttacttaaatgattaggtgtcccaat

SEQ ID NO: 238110 - DNA, 412 bp, Glycine max
  unsure (1)..(412): unsure at all n locations
agctagacagaagaagaggatttcctttttttttaggncgaatctaacacattctcttcaagacataatactaacttccatacattttcacaactggtagtgcgactaagatgacggagaagaaccatggttggatgaatcttcatcaaatttcatttcattattgagatgtaaaaaagagatggctactaaggatgctaattaatttatttatacattgtctctctatctgcgcatttgtaatatacttatctcttacagtttataaaaaatgcaatgacttttgaacttttggttgacatatattcctactgagtgtgcaactagcanacctaaactagttganaatattctatctgcttatgttgatatgtccaaggctcacacgctgtgcttcttagctgatcctata

SEQ ID NO: 238111 - DNA, 437 bp, Glycine max
  unsure (1)..(437): unsure at all n locations
acactatcgagactcacgcttatagnctacaccaaagaaaactattatttcatgttatanatacaatgactctattgaaaagatgcttataatgtgatcgtattaggataaagatgtattcatgtcattggctaaaaattttatacataagttacaatgtaattatgatttctttatttttataaatccatgattttagtttccatcttttaaaattgagatatttagtccttcaattttctaagattcttaattntggtcaattcattcatttgagatggttaattgttaattgattaacgttgatcatttatctggttttctattttcattttcttattaccgagtagaagaattttaaaaacaaaatatttgacgatattggtccctgtctacctggtgagaatcccaaagctgcccaaatatagggatctatg

SEQ ID NO: 238112 - DNA, 404 bp, Glycine max
agctagagagtagatgatggttgttatttttacagacagacgacatgtcgcatgttgagtccacttctcacatttctggaaatccagagggacaactgaaagatgataaattaattatgcagcttaaacctcttatgcagtaccaagccccaaacacatgacttgtcattaacaatttgaatagtaaaacttgattacactgtgaacaattatataatccagagaaatcttggaactctcaacttccatttcaaattgttatgacacgctactacttccattctacattgctatgacaagctactgtggtgaaccatctgcttcaaaaaattaaattaacttcatttgagccaatggcccacatatcaaatatataactgctaagaacagatatgcacttgatt

SEQ ID NO: 238113 - DNA, 434 bp, Glycine max
tcagtaactctttcaaaaagaatacaatagtgataagatatgaagcatgccctactatgttggaccataattgcaagggaaggaccagttggcactacctaatgcacactagagtactagacaacatatacagtgacaatatttgattataatgtcttagacaaaataaaagaggaactataatggaaatctacaagtatcctttagaaacacaaatttatgtcactgagatatttttacaaactccactgtacttaaatgtcatgtaataatttgtctcgaacaaaagcatgcatatgcataatttacactaaagttacaaattttaagatatcttgatttacctcaacaggttccaggagtccttccattgcatttcgtacatcatcaatcaattcataaataactttatataatctaatctcaacagcttt

SEQ ID NO: 238114 - DNA, 389 bp, Glycine max
ggacttaagcacgagctgcaactatatcaagatagttggatctcttggagctggacttcgactcaaggggtcttaatgcggaattccccctggagatgcttcgtaacacaaaggataggaggtgagacgaggctccttccattatggaattatccctggaagatggagctttaccaccaagatgagccttggataagaagcttgtagaggatgctttaatggaggaaaagatagatggagagaaagagagaggggggagcaccacattgaacgaataaaacagggagagaagtggacctttgaagtctgtctcataaaactctcattcatacagctacaacaagtgttacacatgcttcttattatagactacgtagcttccttgagaa

SEQ ID NO: 238115 - DNA, 359 bp, Glycine max
tgaccttcgcacgtttgaactcatattctgtaatagatgatgggatccacctaactattcaatgtgagaaggttgttggaaacctattttattcggatatagaatgatactctttacagtattcagatataaaatgaaaaccccacctaataagcgatatttcatatatctaagactcaaatgtatatcatcttttaagagcttaattgtgcttatcatcgtgccacaagtcgtactcgtcggcgtcacgttcttcctttatatctatattaaaagataattaccttaaaaaaaaataattctaagtgaaatatgataacgatttgttctagatatattctcggtgaatcaattgatcc

SEQ ID NO: 238116 - DNA, 287 bp, Glycine max
  unsure (1)..(287): unsure at all n locations
ttgaatttttaccactcgcgggcgtcccacacagacataatttacataaaccattattcactgcccagaattcgaacaanaaaagcccactatgagaaggggcgaaacactcacctncacaaaagccccctcaattcacatggctcgcaattacctacccaaaccacatcattcaaaaaagccatgtaccgaacaacttatatattaagagcgctcacggaaaacacaacacgtcgaatagaatatcaccaaccatatgtctatcgagacacacgctctgtcacata

SEQ ID NO: 238117 - DNA, 429 bp, Glycine max
  unsure (1)..(429): unsure at all n locations
nggatatattctggtgttactagattgtgtctggntctattgcatatcttactattatttgtagtttctgttaaacatgcccaatagattattgacacctggagatcttttctccataccactattgcaataacattttacctagtacttgaacaattctgctacatgctttaactaactaacagattagggtcataagatcttgttctttntgttagctagttgcatgtataatgaaatcattttgtagttccttacagagtcttaccatgtggaagggtttattgtgctatctacttagaataggcattatctgttgactcttatcctattgatcaaactagtgtacagcttgngattattctgcagntacttgtttgtgtctgttagtgtatctaatggttctggacgccccttgaattatactta

SEQ ID NO: 238118 - DNA, 443 bp, Glycine max
  unsure (1)..(443): unsure at all n locations
cagctttcttcggagcccatgaattgcgttntccttcaagcctcctccaccctcgagtttggagccatgcgtagtgattgcttagtgcaattctccattctcaagcatttttcggagcccatgaattgcgttttcgttcatgcgtcctccaccctcgagtttggagccatgcgtagtgattgcttagtgcaattctccattctcaagcttttttcggagcccatgaattgcgttttcgttcatgcgtcctccaccctcaagtttggagccatgcgtagtgattgcttagtgcaattctccattatcaagctttttcttcggaacccatgaattgcgttttccttcaagcgtcctccaccctcgagtttggagccatgcgtagtgattgcttagtgcaattctccattctcaagcttttttcggagcccatgaattgcattttc

SEQ ID NO: 238119 - DNA, 441 bp, Glycine max
acgctaatacatgtaaatcaaatatatggagccttggatgttcattccgtaagaatagcactgttttgggttttttgtattaactccgaccacgctactacactaccaaaaactttgattgactcttgatatcttttatagttgtgtggtaaaattttctcttaagcttgagcagtacctttttttcatggataacacttaagacactcatccctttgtggaaaaaattgatcttttaataattattttcttgtttgccttcaaagtagatttcaggaaataccatatgttgaaaatgtcatagctgtaaccatcctaggcaataatagagataagcaggaccatcaccatttgccttgttctatgtcagttaacaacttaacaatgtttatttcattactctgctgtactgaaatgaattatacatcatgcttttgttca

SEQ ID NO: 238120 - DNA, 459 bp, Glycine max
  unsure (1)..(459): unsure at all n locations
tgtatggttaagccacacctgagaaatcataataaatatataaaaaggcttgcatgttatggaaaatgaatgatcaagaagagtctgtttggaaccacaaatttcttaaattgatttgatttgtcattgaaagtaaattagattacaggaggaaaagttgaattaccagcctgcaatcacaagagggtgaattggaactgtttcagcatgcattgctctgcacattgacattagcaaatagcaatcagattaaaaaacatacatacatacataagcatcaattccaatatacatactaaggtagtgcttggcccaacttattttgggtttctcttttgaaaaggaaaagttgggctaaacaaagttttcagaaaaagagcttctaaaaaagtagcttctttaataaagaanagtttgaaaaaaagaagtttttattaaaaaaactatgttttgagcttt

SEQ ID NO: 238121 - DNA, 438 bp, Glycine max
  unsure (1)..(438): unsure at all n locations
agcttantaatcaagagcggaaatcaaactatgtttatccactcaagataaaagtacataacaatgagaatgcttaacaaccataaggcataagcaaaaaagtttcatgatcaggattgattttggatgaaaaacatgatgtgattatgaagaagttttttgctagttgttattctgttttagtttgttgttgttacagtttggtttgtttttaataagtcctagtctgtaggatttagttgcttttgaattattccaatgaatcatgcagttattcatgagatattttcttgtattttgtttagatttgtaaaggctatataatagcctctttgaattcaataaacatagcaatcagttttgcaagagtttgaataattgcatacctttattatcttcaaactggtatcagagcctccactgggcctgatacataca

SEQ ID NO: 238122 - DNA, 444 bp, Glycine max
  unsure (1)..(444): unsure at all n locations
ngaggaatcttanacaactgctatagatgtcgctatcattgtcgaatgttatgagtttatcgtaattgaggttggaatgaacatgtatagggattcttaggggatcaaatttgactttattttgggatgtttattgtattgtaatttttcctgtatgattatgtgaaattgtttgagggattttactccccattttgtgagaagcatttatgtataatttgtttgttttgaataagattagcgtgataaataattttattgggatcatgaaattgtgattgaaattatgtataaatgataaattgtgggataacatattgctttgagattataatattgttgttgagattaagtacaagtgcaaagttgaacatgcgttaatttatgagatacacgtaaacatgtgatgatggattatgacattatgagaatgtaaattatgga

SEQ ID NO: 238123 - DNA, 402 bp, Glycine max
  unsure (1)..(402): unsure at all n locations
agcttcttatccaaagcaattcttggaggtgaaactccttcttccttggcttatcccctagcggatgatgcctcccttctcctcttctcctttgccttctgctgcatctccatggtgtaaaatcaccattgaaggacctcattgaagctcaaagatccagcctccatagaagctccacaagcaagcttccatcaattggtaatcagagcacaagagcttcaagtaggtgctccttaaatctccattaattttgttgctttaccttctcttccattgatgcttcttcatntttctccatgtatctcctcacatgtcttgtgctaaatgttgttaacatgattctttacattttccaccgattaaacttgctatagaagctagatttgattttctatggttcaa

SEQ ID NO: 238124 - DNA, 459 bp, Glycine max
  unsure (1)..(459): unsure at all n locations
ntaattaaatcacatgcaatttcaccttttttgttttctctatactaatcttgcttcctttaagtttgaaaatattacacagatacttcttaaaagagagatgaatataataattaaaaagcatgtgatacttatatatataattacacaaaatctaggaagctactgtaatttgctaattgtatatactaatttatgaataatatttctatttttttgtgtgtcttgcaagtcaagaaaatttgtcaataaccacattaatcatttacgtatgacagtatcttatttctttataactttttaaaacctcaaaacatatcaagtaagtaagattcttttaattgaatctctttagcacaacaattctttttaacccaaaaataattttatttttaaattaattttatcaatntaactcacgaaaacaagtaaacaaacaaataatattttgacaataaa

SEQ ID NO: 238125 - DNA, 462 bp, Glycine max
agcttatactactagaatgaaagcctaacataaccattatataactaagtgatgacaagagaaataagtacaagtaccaattgaatttgatcacaatctcttcatctaatgcttccatctttctctttccttttgtgcccccttggtaatctaaatcctcttcaattttttctttaactcctcatcttcactcttcagcagagacacctagtactcctctgctaaagaagtaccacaaacatattttgtcataggaacaaaattcttaacttattattgctgctaataaccacaaacatatacaaatgagaaaatgaataaaagattccaaacaaatgaaaggaaaaagatagggtgcacatgttttaattttacttacccaaagttggtaattaatttaatatttattaaaaataaatattttgctagactaggttaattaagctaggtcttaccttattt

SEQ ID NO: 238126 - DNA, 456 bp, Glycine max
  unsure (1)..(456): unsure at all n locations
ntaanntttttggaatcaaataaaaaatcaaaaatagtctcatattgtttaaattgttcaaatcgtgtttcaatagaattaattgattaatccaatatgtataaaaaaatactcaatacaaaaagattcttcatgtttataatatcagagattgattaattcaatagaattaattgattgatcttttgtaatactcaattaattgattaattctccaaaattaatctccattgtaatactcaattaattgattaattgaatggagattgattaattcaatagaattaattgattgatctaatatgtataaaaaatactcaatacaaaaagattctttaatagaataaatttcatgtttgtctaatttaaagtatgaaactaaaaatatcataatatgatgtttttcttaatttaaagtaaatgaaaactaattttctataattttcacatgaatta

SEQ ID NO: 238127 - DNA, 467 bp, Glycine max
  unsure (1)..(467): unsure at all n locations
agctngaatttccttagagtaaggaatctatctttcctaagatgtgccatcttgctaaacctatccaccaccacaaagataaagtctacacctctttgggttctaggaagcccaaagacaaagtccatactaatgtctacccaaggtgcacaggggatgggtaagggtgtgtatagcccatgaggcatcaccctagacttggcttgtaaacaagccacacacctagtgcaatgcttatggacatctttcttcatatggggccaataaaacttttctttgagtaagacaaaggtcttgtctatcccaaagaggcccatgagcccaccctcatggctctctttcataagtaatttcctaatggatccttgaggtatgtaaagctttccctctttgaagaaatacccctcagccaaatagaatccatcttgggcctttgtcccacaactctcataaatgggagagaaatg

SEQ ID NO: 238128 - DNA, 465 bp, Glycine max
  unsure (1)..(465): unsure at all n locations
tgtaggattatggngtacccttcacatgtggtactaggtggcggtcggtgtgatggtgcaagtcgactatccacatccacaaatcacacataaattcaccatccccagttgcccaccttcaactgagctcacgtactcccatgtggcccttatcctcgttcctctcaacaccgggtccccatcaatccctccaagcttccataacatccaagcaatttcagcatccgaacatcatgaactatcaaaaccaaggaaaaacagggcagaggcagaaaactctgcccaaaacacaaaccaataccacaactttttcttactccattaccccagtaacattctctttgttccaaatcgttcaccattggatcgactcgaaaattttactggaggtccttagtacatacttctacattttgaccgttgggatctactagaaaatgtccagaacccaatatgtactactct

SEQ ID NO: 238129 - DNA, 423 bp, Glycine max
  unsure (1)..(423): unsure at all n locations
agctagagaagaaaaggggggactaaaaccccgtccatctttcctttccaaagaaacgagacgtatacagtgaatgggaatccctacaggaaaccaaacggaacgagataaactcagaaaaaaaacgtgcgacggttctctcgattgccccacactttaagcgtcatatcgcttaactacatcggagatcacgggcgaaggcaattcctcgccatccatgtgggtgagtatcagagcacccccagaaaaagctcttttcacaacgaaagggccttcataattcggggctgatgtgccatcattttcttctatattctaaaccctttttgcaccattttaattattgattggtcttaattgtcaattaattaagcagttttattatttgggctcaattagctaanttgatgtttttaatctaat

SEQ ID NO: 238130 - DNA, 440 bp, Glycine max
  unsure (1)..(440): unsure at all n locations
cgaaggtgtgtaacccaccatctttcatattagaacactgttaatgtgtctactatcatgggtatcatttctttctccgtcattgagggaaccacttgggctgccagatccctccctctttgggcgtattctttgaaagatttgttccccctcttgcatttgggcgtattctttgaaagatctgttccccctcttgcatatgctttgtagttgcatcctatctgaagccatatcagaattgtattgatactgcctaacaaaggcaaccattaggtccttccaagaatggacttgggaaggttccaagttagtgtaccaggtaacagctaccctggtaagactttcttggaagaaatgtatcagtagttcctcatcttttgcgtatgcccccatcttccgacaatacnatcttggatgggtcttggngcaagtagtcccct

SEQ ID NO: 238131 - DNA, 425 bp, Glycine max
agcttatgacctagttgatgtaatgaaagtgtttggtaaaactaaatgataagttaactgaaatagctaaatcattattttcctttattttatgctcatcttatttttctttattttgtatcacaccatattttatttatttcgtctagacaataagtatcctctgccaaatataatatttagtgtaaatagtcatttttattcttgaatgtgtaaatcactgacaaattcacccctgaagattaaaattcaataaaaaattactgacatttacgtctaataaaaaaattaccgacatttatttgtccaatgaaaacctattgacattttgatccaaaataaaaattaatgacattttcatccaaaaataaattgctaacattttcgtccaacacaaaatactaacatatacgtctaataatggg

SEQ ID NO: 238132 - DNA, 427 bp, Glycine max
  unsure (1)..(427): unsure at all n locations
tcgatggagatgagcgttgcaaggctatagaaggacgttatccanaggctgaagaaggagatcaattagctccgacgtccggcgacagagctgcatgactcagagacaagcgcgacgctgaagaacctcctcgaagagggagaaagaatggtgacattcctagagacgagcgcgccagcaccaccatcaccatcgctgatgttattcaaaccctaaccctcctcaccctcaccctcaacccgttttgctcgtcttttcctgtgggaccgccttcaacgacgtcgtcgaggagctcaagaatttcaccacccgcatcgctcacgttctccccatttctgacgatggaggaagcactgctgagattggtcgtgtgttgtcagtactgcgttatggtaaattaataattatgaatactagtggttctaca

SEQ ID NO: 238133 - DNA, 449 bp, Glycine max
agctagagctcctccatacatatatttcatttctctcacgagacaatagtaatcgtagtttaataattacttgattagctttccagaagcttatatcttttttcttgaaatggtacaactgatcactattaataattgactgcgccatttgttcttatatgcaatgcaacagcgaaatgcaaaaatcaaaagtctcacacggtacccacatgtccttccaatctaaaaaattcaaagaattgaagatattgaaatctattatattattttagtatttatactagctgtattggtcaataattctcattaaggtgtctaatatctgaaagttttgtacgcaaattgcggcatccatataccgactatatatatgtcaaggatgaaaaaagggtatttgatgagcaaaagtagaaaggcacatgaaagcactccaatgcacatccttcctt

SEQ ID NO: 238134 - DNA, 434 bp, Glycine max
  unsure (1)..(434): unsure at all n locations
tgaccaacaagaacatcattgcactttattatgtgtggatggatgagcagagaaacactctgaatttcatcactgaggtttgcaccagtgggaatttgagggagtacaggaagaagcacagacatgtttccataaaggccctanagaagtggtctaagcagattttgaaagggttgaattatttgcacttgcacgatccctgcatcatccacagagatctcaattgcagcaatgtgtttgtcaatgggaatactggccaggtgaaccattttcttcaaatcttgtttttctttcagttatatgtttgattgattatcaaggtgaaaatcaactacaactaatgaaagaaaaaattgattacttatttatttactttcatttgacatgaattccttgtgtgagatctaagtaattaacttgagcaagtcatgatg

SEQ ID NO: 238135 - DNA, 348 bp, Glycine max
  unsure (1)..(348): unsure at all n locations
tgcagcanatgcaaaccacaagaacgttttacttcgatattctattgacgcccgagtatatcgagacgctctagattgattacagatgctctgagcaaatctcaacaacaattacattttactcggatgtccgaatgaatccagtaatatatcgagaactagaaattgagaacagaagctcgtatcaattgccaaccacaattagtcttaactcggatgtccgattaagtctcgtaatatatcgagacgcttgaaattgaaaacagaagctttgagcaaattcaaatgacaattactttttactccgatgttcgaatgaataccgttatatatcgagatgctcgaaat

SEQ ID NO: 238136 - DNA, 464 bp, Glycine max
  unsure (1)..(464): unsure at all n locations
ggatctctaatcacctgagctgcagctaggatgtgaaggatcttatatgactacangagaacccttgaaggctatattaattctatttcattacaccgccctaattaaataaaggcctacatatataagctttctcatttgttcctataattgaataaaacattgtatgttctatgtggaattataaagctaatctggggataagaaaaaggagaaaaaaaaatcatgggttggattctcccactaacaaaaaattaaccattacacaattaatatttttcaataaaaaagaataaattattatgaaaaagataagttaataactatatttatattaagtgtgtctggataaataatttaattaaagtcttactaaataatactacatatgttattttatactcaagatgaaaaggacccattcgttattatatataatatctatcatatatatatatctatat

SEQ ID NO: 238137 - DNA, 440 bp, Glycine max
  unsure (1)..(440): unsure at all n locations
cgcttgattactttntcaatatctgtggaatataagtgaatttttggcactattncntatgctttcactatcttgtgttacatcaaattgtgtactttgtcacattgttcatgtatgatgttgcaagggatacctttggtattaccatcttcattggcgttttgcttcatcatcttggatggttccttaatgcttacatctgcttcaagactataataatttgaaaacggtgtcgtcaagctgctaacagggttgttacatttctaattatattgtaaagtagattttgtctgctactttgcttttaacacttctttattgatgccagcgaatttgtgaatagcgtacttctctttgttatggagaaaatattcatgatatttgcatagaaaaacgtaatggacaatgttataataattgtttgtacatacctcgatgac

SEQ ID NO: 238138 - DNA, 481 bp, Glycine max
  unsure (1)..(481): unsure at all n locations
accgggatccttaagtcacctgcngcatgcaagctagtaatcttgtatataagctaatgatgcataatgaattattcaagacaacaatntctttcatggtatcagagcaggttcatgccgatgcgtcctggctttgtggtgacgaaaggggcacccaccattcattgttctcgcaccaagcccaaaaagtgttaggcttttctcaatagccatcctcgcctccaagacatggagaaacacaaactcttttactccaaggcttttctcaaacgaactcaaacaactttggacggtttgatcgacaagattcaagagatggagcccgagtttcgttgctgttattcacactctcttgagtttagcatggaacaactggtcaaaataatctttgtggatagtgcttttatacttgagctctcttgcagataccactatcgaanatggaaagaggacgacatgtgtcttgcataaccttggttga

SEQ ID NO: 238139 - DNA, 399 bp, Glycine max
  unsure (1)..(399): unsure at all n locations
nggacaatgaaagagcaattatgcaatgatgtgaatagcgcgcacggcgtttgtttcccttcacaagctttttctaaacgaaggtacaaactaaagcatgattntttttctttatttcctttttcaaatactattgtggtgacattcttgctgtcacagtttccttgctaagaaggaaagaattttaccttcactagtgtagactaatttgtgccaacactattatcactaacgttgccaaaaggataaaaaaaaagatgcaccaaccaaaatgcatagggttggttaactaactatgtgactgatgaaacagaatgcttatccaatgctgagtctcctttatttgttttccctaagtatctctttgatatctgcttctcttctatctacaaataccat

SEQ ID NO: 238140 - DNA, 445 bp, Glycine max
  unsure (1)..(445): unsure at all n locations
tcaagccaaggccagactcttgtgcatccttaggcttcttaagaanaaacgccaaactcccttcagaaaatctaatttcaagcttaaatacgtgggttggtccgtgctcgcgtgcttatcacaaatcttaatcgcttagcgcgcataagtggattttggcttagcgcacttctctcgcttagcggatgagctgaaggggtgcacttgatgacctggagcggtgcgctcaacgaacctgacagctcatcttcttctggattcttcctcgcacttagccactgagtgtcgcacttaatgaatgctcgctaagccagcagattggcttatcgagaaggtgaaaacaacactcttgccaatttgcctaattaacctgacaatgagagtaatntattattaaacaccaaaaataaaagtatatatttctattacctatatttaacagaaa

SEQ ID NO: 238141 - DNA, 457 bp, Glycine max
agctgggagaggatgcttcaatggaggataagaaatatggggagaaagagagaggggggagcacgaaattgaaggaagaaaaagggagagaagttgaactttgagttgtgtctcacaagactctcattcatcaaagttacaacaagtgttacacatgtttctatttatagactaggtagcttccttgagaagctttcttgagaaaacttccttgagaagcttctttgagaaaacttacttgagaagctagagcttagctacacacacccctctaataactaagctcagctccttgagaagcttccttgaaaagattcctaaagaagctagagcttatctgcacacacctctctaatagcaaagctcacctccttgagatgagaagctagaacttagctacacaccccctataatagctaagctcacccccatgacaaaatacatgagaatacaaaaa

SEQ ID NO: 238142 - DNA, 452 bp, Glycine max
  unsure (1)..(452): unsure at all n locations
tgtgcaaatcanatcactcctacatctcatctctagcatgcattntctttctttacccactcctcacgtttggttttttagggaaaaacaccataactaaacgcgccgcaagggatccctatcgcaccagatccaaatctagaacgatgggtgatcaagaggagacgcaggaacagatgaaagccgacatgtcggctctgaaagaacaaatggcctccatgatggaggccatgttaggtatgaagcagctcatggagaagagcgcggccactgccgccgctgtcagttcggctgccgaagcagacccgactctcttggcaactacgcaccatcctccctcaaacatagtaggacggngaagggacacactggggcacgatggcagccctcacctgngatacaaccgagcggcttacccttatggattgccgccaactattcaccaccatctt

SEQ ID NO: 238143 - DNA, 447 bp, Glycine max
atggaggtacaagcaaaatatgtggattttaatatgagcactatccaaagaatatcacattcttaattacaacttgaagataattttactccaacttaaaattgtcacatatgtggacaagagcttttttgtgctagtttcttagtttcggttacttaagacccaattttttatttttctttaattttggtatcttattttgatgtaataggttcatatgaccattgatatcattttggtcaattattatattttttaggcttcccaaactattatactggttaatgagattttattttagcgaaaatctaatgtgagaatctaattcttaatgagaattaattcttagtgggagaattacagggaagcctatcttataaataatacaaactctgtagttgttacgtagatcgagttcaaatgaaatatgatgttttttctttttgt

SEQ ID NO: 238144 - DNA, 473 bp, Glycine max
actatacaatactcttgcttattaaggtcccattctgatacaactgagagcagaagatttaaatcattattcgaaacaacttagttcaactcaaccaaagatgttaaacaagtagtactcacattgacagtcttgaaaatcattggcttaaaatacttgaagaaccctttggcattctcacacgtatgcagttcttgatgtcttcaatctcctgtgtcttactagtacccttgacatttttggccccttgacattcttccagctactccatgtatgtctgtaccacctaacaacatacacaattcccttactagtacacaggactcacaaactcccaaatttcaaggtagcaagaaaaccaaactctcttgggcctgatgacaccacccatggttcttcctgatctgctcttgaacatcattctccacagaaaccctggatcacctacaggttggactcttttggtcactgat

SEQ ID NO: 238145 - DNA, 436 bp, Glycine max
  unsure (1)..(436): unsure at all n locations
gcaagcttcaacattcaagagggagcgtggcgatatannccgggctactatcagacacccgaggaaaaagtgagtgttgttagaattggctcaccgccccaacacccaatttcgagcgtntngatatattacgggcctcaattagacatccgagtaaaaagttattgtcgtttgaatttgctcagagcatcaacattcaattccaagcgtctctatatattacgagactcaatccgacatccgagtaaaaagttattgtcgttggaatttcctcagaagctcaacattcaattttgatcgtctcgatatattacgggcctcaatcagacattcgagtaaaaagttattgtcgttcgaatgggttcagagcttcaacattcaattccgagcgtctcgatatatgacaggactcaatcagatatccgagtaaaaagat

SEQ ID NO: 238146 - DNA, 467 bp, Glycine max
  unsure (1)..(467): unsure at all n locations
tacgttcactatgaatactcagcttgagatgttcacatatccctttaggatctttggatttgtagataatttttccttggtttgggttgtttattctacatcttttctcacggaagcctttcgggaaatctatattcttaaacatgctctttccttnttggttgaaatttattagaatttaccaaattttgagtgccaccccatgtttattaagtgattgggaattgggttttagaagggaagggagagaaaacttttcatttcaaataaatatgttctattttgatttttctgaaataaaagacatgaaatgacatattgacataaactaaagtcttaaccttntatttctataaattataattctcttaatttaaaaattaaaaattcttttttttttttataaatttcacacttaaacaatttgaagagggtaaaaaatacttgtaacatttctccattttaat

SEQ ID NO: 238147 - DNA, 438 bp, Glycine max
  unsure (1)..(438): unsure at all n locations
gctnctgcnttggccgctcctcacggacgcatacattaccaacattgtggtccttgtaatattgaataaaggaaaaaaacaatgaaatcttgtactatgttgaatgattgaaagtaaaacatcaaatgtgtatgaaatgtgtttaaatttctcttaaatataattgtcaattgttgcttccaagtataagaggcgacagaggtgggcatatgcattcaacgttgatgttaggatttgcatcaagatgctcactatcaaacatggagcatacttcgataagaaaggtaagctcaattgtcactaatagtatgcctaaaaatggtacattaaagaggataagatctccatgatagtgaactctgtcatcgcctctatggaaaaaccatctgcttgtcagatagagcattacttcttgtttcacaacatgggatccatcta

SEQ ID NO: 238148 - DNA, 453 bp, Glycine max
  unsure (1)..(453): unsure at all n locations
tgaaccanaactggtgagagtgtgaacttaaactgtgagtgaacgactatctatgagtaataatctttgcatcaatctctgaatttttgaatgaaatgtataaacgaggacatgatgaaggccatgattgtgcatacacaagccttttgaccaaaaagcttaccttgaacgataactgtaccctttgcaccctttgtgagttgaatgattttatcaataattgaaccctgaacctgaatgattatctccagataccttgtttagactctaggagagcatataattcaaggcaaattcaccccaaatttaggggagtggaactgaatgggatgtaaagaaaaaaagaagataaacatcagcacacataacaaataagttgtgtgttaaaaaaaaaaagagaaagaaatccaagaaaatgtgtgctgatgtaataaagttaaaagcaaatggaag

SEQ ID NO: 238149 - DNA, 427 bp, Glycine max
acgctttatccagaagttaagcttagaacttgcggattacatataccacactcggcatgaaggttttccctctgactacaatgaaaaccatttctattcacaaaataatgagaacaaaactaacagcctttgtcctgaagtcaatggggactcatcaattctcccattttgtccatgaaatgaaattcactctattgtcagcaccatcctctttggaacctcaatcttttaatcctttagacatggttcttaaggagcattttgaactaaggctatagctagttggaacttcactgggacattgccaatctttggaccagcaatcatcttatcattatctcaatggttcaattttttcaatgaaggtatctacttgtgtgttcctctgcacttgcatgtcaagcgagtttttttttttctactttcc

SEQ ID NO: 238150 - DNA, 444 bp, Glycine max
ctgattatatgaagaacgatttgaagcgctcattgttttattcattgcgtaaactcttgtgaaggatagaaaagtgatcaaaacactttattcatcttgagagagaagactaagtattgaaattgtttatccgtctgtaagacgatagagtgttagtcattgtgcaatcaaaccaacaaatttttataatttgtgttagtgctaacagtggcttggttggacaaagaatactggttgtaacgacttataataaagcttgagttaaggagccacaagtggcagtaacaaatacttgtaacttgttgaagttagtgaaacttaatggtttgtcaaaaactggacgtattctcggtggctgagatgaaccaacataaaattcttgggtcttattctttttattttctctcttgctattgggactaacctaacgtttgaaattgatct

SEQ ID NO: 238151 - DNA, 460 bp, Glycine max
  unsure (1)..(460): unsure at all n locations
ccgagctgcactacgtagtaatgttatcgtctttatatcttangcgcctaaatcggacctccgagtgaaacgttatgaccatttgaaatgctcaagagcttccattgttcaatatcgagcgtctcgatttattatgcgccagaatcggaccttctagtgaaaagttatgaccatttgaatttctcgagagcttccgttgttcaatttcgagcgtcttgatatattatgcgcctgaatctgacctccgcgtgaaaacttatgaccatttgaatttctcgagagcttccgttgttcaatttcgagcgtctcgatatattatgcgcctgaatctgacctccgcgtgaaaaattatgaccatttgaatttctcgagagcttccgttggtcaatttccagcgtctcgatatattatgcgcctgaatcggacctccgagtgagacgttatgaccattcgaaatgct

SEQ ID NO: 238152 - DNA, 375 bp, Glycine max
  unsure (1)..(375): unsure at all n locations
nttcactcggatgtccgattcaggcgctttatatattttgacgttcgaaattgaacaatggaagctcttgagcaattcaaatgatcataacttttcactaggatgtccgattcacgcgcataaccaatcgagatgttcgaaattgaacaacggaatctcttgagcaattcaaatggtcaaagcttttcactcggatgtccgattcaggcgcataatatatcgagaagttcgaaattgaacaatggaagctcttgagcaattcagatgatcataacttttaacttggatgaccgaatcaggctctttatatatcgagacattctaaattgaacaatggaagctcttgagaaagtcaaatggtcataactattcact

SEQ ID NO: 238153 - DNA, 433 bp, Glycine max
  unsure (1)..(433): unsure at all n locations
ccgcatgcaagcttctggtgagacatgttgacttgctttccaatcngacattcaccacagattctgccttcttctattttcagattgggaatgcctctaacagcacctttgtcaatgattttcttcatgcctcttaagtgcagatgtccaaatctttgatgccatattctgacttcatcttctctggagaatagacatgtggaggagtaactggtttcttgaagtgtccatagagtaacagtgtcctttgatctgctgtcctttattaagacttctactttttcatttgtcactaagcagtctgactttgtgaagcttacattgaatccttcatcacacagctgactgatgctgtatcaagttgcagtcagtctcttcaccagcagtactctgtccagactaagaagtccatcatggactagctctcccattc

SEQ ID NO: 238154 - DNA, 386 bp, Glycine max
  unsure (1)..(386): unsure at all n locations
taagaaagctntatatggcgtagagcattcaccacgttcttggnatatcaaaatcgcagcctattttgtgaacgagagatttgaacgatgcgatcatgagcacactctctttgtctaaacacgaggaggtaaaagaatnttaattgtgagtctgtatgtcgatgacttaattttcactgggaatgatgcatgcatgtttgaaagctctaagaagtccatgaagattgagtctgatatgacagatttaaggaagatgaaatattttcttggtgtacaaattcagcagaattcagaaggcatctacttaagtcataacaaatatgcttgtgaattacttgaaaacgttcggctgccgaattgcaattcagtcaagaatcctataatgc

SEQ ID NO: 238155 - DNA, 348 bp, Glycine max
  unsure (1)..(348): unsure at all n locations
agctgtatgtgaatagttattttacggattcatgtgtgcctcgaaagaggaagttaagttggaggaagaagtgactgccaacgtcaaagatgatgggacctctcttatatcgaaaacaatggtggaggaggaagagaatttaattgaagttgggatgaaggaagaggaggcgctatgtgaggaggcacttgaccttaatggcacatagtttaacaaattggattagctnttaactcaagccaaattgaactttgatttctactaaaaaaatggacgacatcacacttgtagtttttaaccctctcttgcttccttttnttgttataaatttttatgcgtgttgatttg

SEQ ID NO: 238156 - DNA, 447 bp, Glycine max
  unsure (1)..(447): unsure at all n locations
ntananattgaattaagacgttcaatatctgctggtaatcgattaccatatatgtgtactcgattacacagtgcaaattttgaattcaaattttaatagctgttgtaaatcatttttggccactggtaatcgattacatcctctggtaatcgattaccagagagcaaatctcttgaaaaacactttttaacttaaattacttggccaaacattttgctacttcagttaggaattcccttcctatttagtatacctttcctaagactctagagactgtcttgatcatccatcttgaatatctttaatttctttgtctcgaataaagctttgagaagcatgtggtcctttggcatcatcaaaacattcaacttgatccttttgttacaagcataaacagccagtaaccaatttccaagaanaataatgtctccactaaacaatattcac

SEQ ID NO: 238157 - DNA, 434 bp, Glycine max
  unsure (1)..(434): unsure at all n locations
agcttataagaacaaaatagccttaattatttccaaatatgcatgtgaattaggacgcatcaacaagaatcaagccaaggctattgtgcaagcaatcaatggggcaaaacacaccaaatgattataatgatggatggctcaaattctcacaaaggtaaaatcatcactttcaaattgagcttttaaaactatcatgacatgtatagaagaatcaaggatttcaagtcacaaaatgtcaagaacttttattgtcaaaacaattacccatttcttgaacatatcctataattcaaagaagaacatgcaaagtcgtacgtgcacacaaaattgacccaaaatattaaactganaatccgacgaaactaacaacattaacaaattaacacaactaacaaattaacaaaaccaacaaaactagcagaaccaaagaacac

SEQ ID NO: 238158 - DNA, 418 bp, Glycine max
  unsure (1)..(418): unsure at all n locations
actcacctatgctgcnacattacaatagacctcctcaacctcatcagcaaaatcaaccacagcagaacaattatgacctttccagcaacagatacaatcccggctggaggaatcaccctaatctcagatggtctagccctcaacaacaacaacaacagcctactctttccttccaaaatgctgctggcccaagcagaacatatgttcctccaccaatccaacaacaacaacagccctagaaacaacaaacagttgaggctccttcgcaaccgtcccttgaagaacttgtgaggcaaatgactatgcaaaacatgcagtttcaacaagagaccagagcctccatttagagcttaactaatcagatgggacaattggctacacagntaaatcaacaataatcccagaattctgataagct

SEQ ID NO: 238159 - DNA, 462 bp, Glycine max
  unsure (1)..(462): unsure at all n locations
agctagaagaggaagataaagctcntttgtttttgaattccttaccaaaatcctttgaacatttcacggatgcaattctttatggcaaagatcaagacattgccctagaagaagtccaaacctcaataaggaccaaggagatgcaaaaacagcaagactccaaatctgaagataatggtgaaagcctgaatatttcaaggggaaggagtgaaaagaagggaacaagaggaaagaagtccagatcaaggtcaagggattcaaagaatggccagacaacaaagttcaaatgctttaattgtcacaaaactggtcatttcaagaaagactgcccagacaagatcaagaaaggatctttggactctgctgacattgttgaagcctctgaaggttatgagagtgcaggtgttttaatagcttctaataccaaaacacaaacagaatggactatggattctggatgct

SEQ ID NO: 238160 - DNA, 433 bp, Glycine max
  unsure (1)..(433): unsure at all n locations
tcacaatntatttatctcaaacttgagttttgttagaccaattactaagtctttcctaactagatgattgagatggtgcatgtttatgtgtgcagtcctacgatgccacaaccatgtatcatctatcttacttaccaaacaactcagctcatgaaatgatgcatgttcaatgtttaacatatagatattacctatccttttgccaatatggacaatatcgccgggcatatgcttcactaataagacaacaattcttgttgaattcaattttgaagcctttgtcacatagttgactaatgctcagaaggttatgctttattccatcaacatatagaacattctctatctgtgttttatactgatttccaatattttcttctcccattatatntgcctttattggtggctcccaaagtgacatattcttcttctt

SEQ ID NO: 238161 - DNA, 338 bp, Glycine max
agctagcttgaggagcttctatggttgctggatcctagagcctaatggtgattttccaccatggagatgcaacggaagacaaaggagaataggtgagaggaggcgtcttccactagggaataagccatggaagaaggagcttcaccaccaagatgagccttggataagaagcttggagaggatgctttcctggagaaaaagaaagagggagagatagagagaggggggagcacgaaattgaaggaagaaaaagggagagaagttgaactttgagttgtgtctcacaagactctcattcatcaaagttacaacaagtgttacacatacttctatttata

SEQ ID NO: 238162 - DNA, 340 bp, Glycine max
  unsure (1)..(340): unsure at all n locations
tgcctcanagaggtccatgaatgacaaggcggccgaattaactagttccgccccggagtacgacagtcaccgctttaggagcgttgtacaccagcagcgctttgaagccatcaagggatggtcgtttctccgggagcgacgcgtccagctcatggacgacgagtatactgattttcaggaggaaatagggcgccggcggtgggcaccactggttactcctatggccaagtttgatccagaaatagtccttgaattttatgctaatgcttggccaacagaggagggcgtgcgtgacatgagatcctgggttangggtcagtggatcccgttcgatgccgac

SEQ ID NO: 238163 - DNA, 467 bp, Glycine max
  unsure (1)..(467): unsure at all n locations
agcttgcggcacaccagactgcctcanatctctaatgtttggaaccaagttcattgtgtcaccatatgtaaaaccaaatcgggaatttgttatagctctaacaacttcctgatcatcaccaagtacacgtctgaggatctcataacgtgggatgaagaattttttcaagctcctgttcaaggtatggttagcaattaaaatcttacgcatatcagtgttggaaagcccaatagaacggaagaacttgagtttatgcaaaagggtattctctgcatccgcaacaagcaccaaagggtgtttctccacaagttttgcaagatggagtttggtgaagccatagttgttgagaagatcaataacagcatttgggccatctgnggttttcaaattgatcctattggagagttccttggcttttcttggggacaccccacatgagttgatgagataagacacagtacaagtgt

SEQ ID NO: 238164 - DNA, 376 bp, Glycine max
  unsure (1)..(376): unsure at all n locations
tatggattataaaataattgtaccgcatcgtagtgacatgtatcccattgagaataaatntagaattaatccttgtgtccatcatatccataagtcagggaagttgttgttagaaaatgatgaanagcagcctttacaaattataaccccatctcatcatagtgattcaggtacttatttagcacttgacaaacaaaaggttaaactaagtgatcagtttggttttaaatccaacaattgcagaagtgtttttaatgttggtgcaagttatcttaattttggaccccaatggatggccaaaatgaagcatttggaggtgcttcaactgggtcgttggctgcaaggttcaccanaacatcatattgaagtggagagt

SEQ ID NO: 238165 - DNA, 452 bp, Glycine max
  unsure (1)..(452): unsure at all n locations
agctctgctcgctaagctcccaacacttatttgaatttttgaggagtnggtgccgctaagcgcagccttcaaagagcttaacgcacatccttgcagcacatgttcggcttagcgggcactcttccgctaagctaattctgcagaatctaaaaattctgcaacttccgctaagcggctcctagtgtccctaagcggtagtgtttttttacaaaggccagctaagcggaccatgtctcgctatgcggccagtgtctttttcagttttattcttcagtttttaaaatttgaataacttatgtcctgatcaattgttagattccgttgtctgcaaatgtcttccacgaaaagaacaagcgtcgattcaacgcccactactcantatgatacaagaagattccactcttttgaggcttggaccagatacactgacaatgtgttgggaagacacatat

SEQ ID NO: 238166 - DNA, 451 bp, Glycine max
  unsure (1)..(451): unsure at all n locations
tagaacaatatacttggccttcgtttaattgtctctggtcttggcgaccacgatcaacaaagtactttcggcacctactatatgttgacttgaccaacgctgttattggaatgctgcgacaatctttcaacaccttattcacacattctaataggttggttgtcatgtgaccatatcttcgtccagatctatcgtaagccatgctccatttttcctttgaaatgcgatcaatccatcttgctatggctagactcaattgacgaaatttttctaagttttgatcaaacacatgcttgcaaggagtgtacgctgcatcaaatntgttaccatcaaaagttgtaggtagatatgaaactcanattaacttaatgtataaaatacaccttacccaatttcttgaacatctctttttgttcgcgttgtgaattgtgattgaaatgctgctatgtgt

SEQ ID NO: 238167 - DNA, 454 bp, Glycine max
cttcctcggggccatttcctgcgaaggttaacatttggaaagttagttttaccaagaaatgctactcttaaaaaaaaatggcatacaacctcctccaataaacacaaacatcaatgtaaatttagagcaaactcatgcacatacttccttacgaacattcactcgcacaagatattcttctacctaagaaaaatgcacccacgcacaatcaaggcaccttcgttacctagattatttatatgtacttccaaggcgtatttgctacctacatcacatgcacttccttggctaaatttacatacatgcatactcaaagcattttggctaccaaaaattgcatacgtgcacattctggtatttctaatacctatacatatacaaactttgtgatgaattctggctatctacacaataaggtgctacatatcatgctttattcaagtgttttgctact

SEQ ID NO: 238168 - DNA, 452 bp, Glycine max
ttccatcatctcctttaatccagccactcatgatgataagtgttcatgtagaaaaatgaaatcttttggtctatcgtgtgatcacatacaaatgttattagtttatttgaacattactgaattgcccaagtgtttgatacttaagaggtggacaatggaagcaaactaagattttcacaaggattcaaacttgaataaagtttggggatcgcaaaaggacactagacatgtgtcactgatggagtattacaaataaattagtgttcttgttgttaaatctattgaggagtatcattagcaaatggacaaggctatctcaaagattcaagaatcaattgaagaaatcaagaagcatcaagccaagtcaaagtatgtagtaaaaagtatttttcaaaaaaacatcaaataacacacttttttgtttacaaaggattttctgaaatcttctaagt

SEQ ID NO: 238169 - DNA, 442 bp, Glycine max
tcccaacgctctgttcaagctcttctaaaatctggaggcaaatctaggatctctatcatatactatgctagatggcacaccatgtaacctgacaacctcacttatatacaaggtggtcaacttttccaaggaaaatctgatattaatgggaatgaagtgagcagacttagtcaatctatcaacaataacccagatagaatctaaacctctaggggttctaggtagtcctactacaaaatccatggaaatattgtcccacttccactggggtatctctaaagagtgtaacttccctgaaagtctttgatgttctatcttaaccttctgatagactaggcatgcatacacaaactcactaacctctctcttcatgttgggccaccaaaacatcgtcttaaatcatatacatcttggtacaccagatggatgctaaatactctat

SEQ ID NO: 238170 - DNA, 369 bp, Glycine max
  unsure (1)..(369): unsure at all n locations
cacgttaataatatgtgcctgatcggctttcggtgaaagtacgaccattgaattttgagaacttctattttcaagttcaaggcctttatatatatgggcctcaatcgtatatccatctaaaagttatggtcgctgaattggacaagactttctgttgaatttcagcgtctcgatatattggacctgaatcggacatccgagaaaatttatgaccattgaatttccctaaacttcatataaattggacgtntcattatatggactcaatctacatctgtaaaagtatgccgctgaattgactaagctttggttatttcacgctcatatatatggccgaacgactccatgaaagtataccattgattctta

SEQ ID NO: 238171 - DNA, 422 bp, Glycine max
  unsure (1)..(422): unsure at all n locations
cacctgttgcatgcaagctnntaaaattgaggtcacttataatttatctcattgatttgccgacaaaactaatggaaatacgagagtgtgtaatgatttttgttttttgtctactatgaacatcctttggtaaaaagaatatttctctctatatgattaactttggattatgagtcataccttatccaaaactagacatacatgactttntatactggtaaagtttataaaattttgttatatgataagtataagttatgcaatagttctataaatactctatagaagacaaaaaatgtaaacctgagttttaatataaatttttaatcagataaatatatttatgtatatatctggtttgggttgaattagattgaattttacaatgaaatccaacatctgatttatccaaaacaaatcgg

SEQ ID NO: 238172 - DNA, 475 bp, Glycine max
  unsure (1)..(475): unsure at all n locations
tattacgtgaactatgaaactcagcttacactagtttgtttagaataatataataattntgattatatatataatcaaattgtagcttttacaataaaattatttaataagtagttattaaataacgtagtaataattaaagtagtttatttggtattgtctaaacgttaagacaccaaatttcaactttcacatgttcctattttcggtacctacactatggtattatttatttatttattatgttattgatatggagtattgattaattttgttgctaattaattttgattgaaaaatttaactgattattttaatgtgttttttttttctttcatttatgtttttttatcctcaaaatttaaattaaaatttttattaaagataattaaatatatacgcctattggtcacatgctacttcacttataaaatacatgatacatagtagtctttcaaaaatagagaaatggaat

SEQ ID NO: 238173 - DNA, 425 bp, Glycine max
  unsure (1)..(425): unsure at all n locations
atggttttggcattttgttgacccanntctagctgcctttccaaagacttcaagtaactccaccaacattaagaccgcttcatcgacttgcaaaggctcgaagctgtagaatgcgcctatagttggaagatgaagtagagatgccacatcatccagggtgatggtcagctctccaataggaagatggaaactgctagtttccttatgccacatctcgcataaaagtagatataagtccccgatcgccagtgtctactgaacatgcgatcaaaggacttaattctgttacagcgactaacccttcaatttctggagcaggcctctcaaatttctgaaccttccttccatgggaggataactttaattcaagacgttcctgcaaaaaaattaaatgattcgccactcatacacatataattaaataa

SEQ ID NO: 238174 - DNA, 364 bp, Glycine max
tagattctaggagtacattcatccatatataagttttttttcattcctaccccatacttgccttttatttacgcacttagcttcatatcattaccttgcaacatacacacttattaaattcatttgtacttatagttttgctttatatgctattgactttggccacttcaattcttacccaatgtctccccaaaatttgggacaaatgtgttttgacgtataacactctcaaatttgggacaaatttgccttgaaccaagcttttctgtggataatgctctcctacatcctaagacaaggtagcagaagtctaagactgtataggctcaaggttgaatgaatcaatcattcattcaactcaaac

SEQ ID NO: 238175 - DNA, 456 bp, Glycine max
agcttaagctccttcaatagcacaagactcttaatatttgaagagtatccttgtggaaccttcacccgacgaagacactgacaaaaacttatcttctcctttttggacaaagtatggcaagttgagggcaagtaaattttcttcccatcagaccttggatgcaactgtgatcgtatccccatatcagctagatcttgacgggtattcaagtcatccttcgtcttgccttgaatgttaaggagcatcccaatcaaacatttttctccacatgcataacatcaatacaatatctaacgtctagattagaccagtatggaagatcaaagaaattgaacatcttcttccatatgcaactcttacttttatccttcttttgggtctttccaaatacaatattcaagtgttgaacccgctgatatacctgctcaccagtcaacggtatcggtgcaatatcat

SEQ ID NO: 238176 - DNA, 373 bp, Glycine max
  unsure (1)..(373): unsure at all n locations
ctattcgtgacctatcaaactcagcttggtacctacttcttcactgcatcatgtatcaccgggttgagtcttctctgtggctgccttactagtttatccccatcttctacatctattcgatgcatacatgtggatgggctaataccacgaatgtccgccaaggtccagcctatagctttcttatgctccttgagaactgataacagattctcctcttgctcatcaacaagggaggcagatataattactacaaaacttntgctatcatccaagtgagcatattttaaatttgatgacagaggcttcaattctggtgtggatggctcgatattggtataaagacattgtttctcagcttgtacctcataaagaa

SEQ ID NO: 238177 - DNA, 446 bp, Glycine max
  unsure (1)..(446): unsure at all n locations
agcttgagtataattcgttgtttgtgttatgagcctacatcaaacaattggattattgatgtttctgtcacaatcaagtgataattgatgtctccatatgtgcgtacacggtgattatgttttcgtttctaaaattcatttggagtatctactattgattctagatgagtgatccttcttgatttaaaattattgtctcctaatcaatcgagtgttcatcttattattggctgctcatcttccaatcatgtctagttaaaatgcttgataatctttcttgttgttacttctaatacgaataaagagagacttcgcctttgacaatcacgttaagatgttttgagaggaaatacttgagtagacatgatcattggtacctatagacgaaagtcaaacttattaagacgtgtacctgtgttccttgaagatatgcttanttaccacct

SEQ ID NO: 238178 - DNA, 455 bp, Glycine max
  unsure (1)..(455): unsure at all n locations
tcagaacacattggtttgcaagcaatacttgaaaggtgagctcaaaatgcttcaagtcttcatcaatggatgcgctgtaaattagtatatcatcaaagaagacgatgatgaaatgatggaggtacggccaaaagatcatgttcatagttgcctaaaatgaggaaggcgcattgcataacccaaatggcatcaccttgaactcatagtgaccatggtgggttccaaaagttattttagggacgccctcaaaatgcatgctaatctgatggtacccctacaactggtcgagtttggaaaaacaccttgcacctcctaattcatgaggagttcatcaatcatcaaaattaggaacctgtctcgcactgtcagagcgttcaaagccctatagtcaacacanaaccgncatgcaccatcatgttttntgaccaacaataccggaaaagaaaatgggttgg

SEQ ID NO: 238179 - DNA, 452 bp, Glycine max
agctggttgaggagctggtaaatgaccttattcctacaagatatagagagtacaactatggcaaattctttgccaacagaaaccagagtgatttcaagaagcgtgatgtggagaatatctcaaatctaataatcttatacagtgacattagtcataaggctaggcataatcaaacctaattgatgaaaacaacccttcaattattgcaatctcagtcaaatccccttttaagccccttcacctttttttttgtgaaaagggtaagtgggtaactatccatcaacattagtggttcataatttcacccctaatatctctttcttccctcgataataataagtgccaatttaaactgtatgaatcaagtggttagtggaagaaatggcaacatgccctaccataatataaatgtcacaagtatatggttgccttgattgggtgctataatatac

SEQ ID NO: 238180 - DNA, 440 bp, Glycine max
tatcattttctgtgctggtttggacaattgtctttgttcttactcactgttatttcttaatttcctttacattagattctcagagctttgttcttgctcattgttattttttttttcattttgatttgttcacccagggctttgttcaaattgactttgttcacccaggcagtgtgattttctctggactccaataatattaatgatcaaagctagatataatttacgaacccgatcattcatacaccccattcctttttccatcacttgtggtccaaatgttcctctccattgaatgccatcatatcccatcctgatagttgtaggaagccaaatcaatcattctgcatgcaatgtcgttttaatttggtttcatttcaggatcaaaagggatgtttaagcaagcacccttggctttactaattcattctttttggatg

SEQ ID NO: 238181 - DNA, 425 bp, Glycine max
  unsure (1)..(425): unsure at all n locations
agcttgtgatgttaaatcaataaattgtagtcgcgatatgtaaatatgtaaacatttatgtgccactttntgaatgcttagtgggacaaatgggtaatgacaaagcttctattcccagtttcccactacatgtagtgtttagtgaaacaagttgaagattttgtcggtgaatacctttctaattatgtagcaaggcttttaatagtctctttgggatagattaatttcatccatttcaactatttttagaagaaaaaaaagttttttataaaaaaaatctctttatataattaattatgttatatacatggtgatgcatttcagcctcaaaatattctttcaagtaactatatcaactactagaaaaatgcagttagcgcccgaaattagcgaccgacattacaaccgaatagttttagtcgata

SEQ ID NO: 238182 - DNA, 442 bp, Glycine max
  unsure (1)..(442): unsure at all n locations
tgaccaagaattatntgtatgggttggatgtcgaattctggttgttcctggtgcggagatgatggtacagcgggtgaaccagaagcggaagtttcttttggtgaggtagccattgaaaagcagagcgtttggaatgatttcgtaaatctcagaaggctattgggaaatgctggtaaaaacacgaatgccaagcagatataaatttgaatgaagaatgtagaggggcgtgtgaagcaacggtcgaatttgctttgtagtgaacgtgctattaatgttaagtgattcgtttgggcacgttcagattgcagtagctgctataattcctctagcagacaaatgcccagcttgcccctcagtttttcaaactgattngcatgcaaagcccttgtgaaaatatctgctatttgttcctcagtgtcaacatgcttcagtgtgatcactt

SEQ ID NO: 238183 - DNA, 438 bp, Glycine max
  unsure (1)..(438): unsure at all n locations
ctgcaagcttttatgatatatctgcgtgaaatatataaaattcatcaaattactaatatttaaggtagtatatgcttatcattcaacgccaaacatgtttttaacttttatacttttgatcaaatttaattttagtcctttgtaatatgttaaaaatttaaagggatgtcccgaaaaggatatataaacgaaataaataaacttttaacatttatagccatattaaaattcacatttaatgtcatctaataaatattattaattntcaatactatttagcaagccttcttctcaccacatttaatttaatgtcatctaataaatattattaattttcaatactatttagcaagccttcttctaccacatttaatgtcgatcaataannaattaaaataatanaaaattaataactcatttcaataaattttatccaca

SEQ ID NO: 238184 - DNA, 394 bp, Glycine max
tcatctgcaggatccattccacacccaacccttacaattgtcctttgtgcattgtccaaataataaagccgtttgcaaacaagagaaacagaatttctatcacttgttttctttaacctactcaatatctcccatactatgtgctctggtatgttatccatcctcttttctcctctgcagaaaattcaaaatctaaaatttccaatctcatattcatgtatactaatgacaaaaaattaaaattcgaaaaatccaacataggatacacatatcatgtgtgtgtgttgcactgtcggttatctatttaccaaaaggttaagatctggggagaaaattgaaaggagtgaaggattcattgtgagatgataagttaatttaatggggattggaagaa

SEQ ID NO: 238185 - DNA, 363 bp, Glycine max
  unsure (1)..(363): unsure at all n locations
ctgcagcttatgaatgagatggtcatattgttccacggatgtccgacncggggacataatatactgagacactctaaatttaacattgcaaactctccagatattcaaattgtcatcacttttcacactgatatccgattcggggacataatataccgagacgctcgttactgaacaacataagctctctagaaattcaattggtcattatcttcaactcagatggtccattcggggatatgatatattgagactctcgaaattgaacaaccgaatcctctaaaaaatttcaagctgtattaacttttacttgtgaatcggattacgtgcataatgtatctacatgctctaatgtgacaaccg

SEQ ID NO: 238186 - DNA, 452 bp, Glycine max
  unsure (1)..(452): unsure at all n locations
ctattacggaccttgaaactcagcttgtttgtgcanattagggtaagcagatgattggcatatcttccacagtgcccattntgggaaaagagccctaaatgcagcanagaggaacaacttgtgcattgaagcctaggttttttcatttgagagagattattgagtagagagtgagtatgagatgctgagaagaggaggaggaatcccccttcttgtgtaagaaactatcattctctacttttaatctcatttattgttagggtttatttgtaatggctggctaaacactctagttggggatttctaacgaacagctgatgtaaatacataatatctaattgattgtgttttatgtgttcaatgcttcattcaatgcttaatgtttgtatgcttttggtctgataaccaatttgtgtgtacagttaggtgactttagcattgggaaatgtact

SEQ ID NO: 238187 - DNA, 466 bp, Glycine max
  unsure (1)..(466): unsure at all n locations
agcttctttngagagaaaggttttaatgattgttgtaatatcctaacttttgggcttgagtgtgtgactagtgatgtatgtgatagtgatacatgtagtaagtcatgtattacaatgtattagtaaatgaaatattagtgacacactactacaaaaagtagttttaacatggacttattaacatcgattttggacaaaaccgatgttaagttaaacgcggtgacatatttgtaaataaagtatctttcttaacattgattttccaaaaaaccgatgttaatgcatacacgttaacatcggtttttgaaaaaccgatgttaacgtatgatatgttaacatcggttnttttgaaaactgatgttaatataaacttntttttaattatttatctattttaaaaaacattatatattgcattattaattatattgtaatttacaaatataataattaatacacaataata

SEQ ID NO: 238188 - DNA, 461 bp, Glycine max
  unsure (1)..(461): unsure at all n locations
tacgtgaactatgaaactaagctnttaagaatataggttaaaaaatattctcaagttatttgttgtccctctctatttccacttcacaatgaatacatataagttatttttattatttttacttgcatgataaatgtgtaaattaattaaaaactaaataaagaataaaaagtgtaattaaaaaattaatattattttaaactttaaaaatgacaaataaatacatttttttcaagaaaaaaaaaagaaaaagaaacttgacacttgagaagaacagagggaaacaatatgctgtcccctttattccaaagtatccaaaccagcttatgctcaatgatgcatggaattgatatataagccaaatacagagttgtcttgtactagtatttagttgggacaagccaaaaaacttgggaggaatctcttgcaatattaggtggttgcattaaagtagttataat

SEQ ID NO: 238189 - DNA, 400 bp, Glycine max
  unsure (1)..(400): unsure at all n locations
agcctttgcatgtttaggaagttctagagtatggaaagttccaagttccagagagttctgagagattntgctttgtgaagatctacagagacgagagctcaaagcagaagctgttctgagagcttgagatgagtttgtgagtgattgtgagatcctataggtgaaggagacatcctcaccacttgtatttttgcaatctctcatcttgttcttctctgtgttgtaaaggaggtttccagactatggaaagctaaatcctccgttggatcttccctgtaggtacctgatgtaaatatatttctatctatgtaaagatagtttgtgagttctctgtgctatctgcttttcattccagtatatgcatgctttgttagggccattcaacaatggagaatggtct

SEQ ID NO: 238190 - DNA, 450 bp, Glycine max
  unsure (1)..(450): unsure at all n locations
tcgatcccgggcatgtccgccgcggaccattgttattctgtgaatatgactaactntcgngcataaaacttgtataaattgtatcaaactctcccaatttatggttcttttgtagtgttataagtattttttgttaagtataggtaataaatacttagtacttccattttgtgtgtttaataatcattttctctcaatttcaggttaattaggaaagctctggaaagtgatgtttttcaccttcttgctaagccaatatgctggcttagcgagcgtccgctaagtgcaacactcatgagctaagcgcaaggaagactctggaagaagatgagctgnacacagttgttaagcgcactgcttcatctcactaagcgcaccgcttcaattcatccactaagtgagaaaggcacgcgctaagcggccataaatgcctaagccacgagcacaaac

SEQ ID NO: 238191 - DNA, 397 bp, Glycine max
  unsure (1)..(397): unsure at all n locations
cagnncttgcggattggtctttgccgacaatatgatcttaacgggtttgaaaagaggcaaatttgatcatcctactctgatgagtgagaaatctgcggcaaatgaagaggatgagaatgaggaaggaacccatattgtggctgccattcctacatggccaaacttcccaccagtccaacaaggtcattgctcagccaatatcggcccttctcattacccaccacccattcatccacaaagtttgttggccgcacatccaatgccaagcgcaaaccaaaacaccaaccaagaaatgaatnttgcagcgaanaagcctatagaattcaccccaattccggtgtcctatgctgacttgctcncatatctgctcgataattcaatggttgctataacccca

SEQ ID NO: 238192 - DNA, 382 bp, Glycine max
  unsure (1)..(382): unsure at all n locations
gcgacccggcgctgatatgtacgatgatcaaggctttgttcgantacncgagctcactgaaggtgggctactgcggatggcggctctcatgtgtgatccgcggatgtgtagagtcgacttgcaccatcgtcctatcgcctcctagtactacatgtgacggctacctcattattctacaagcttgacatgaggaactgcggaatggtgagacttcctactcttattcgttgaccacagaccggctcctgaacattctcatggggtcaggacaccttggtgatgttaagtggggtgctcttgtccacaaccacatcttgaccaatccctacccaaccctggcttattcagtcatcgagaaccctgtgatgtacctaaacaggcg

SEQ ID NO: 238193 - DNA, 185 bp, Glycine max
gaggaagaacataagagagagagaggggaatggcaattgcctgacaatacggagagaagcttaactctgaagtgcgtctcacaagtctctcattcatcacagttatgacaagcgttacacatgtctctatttatagtcaaacacatgggaagctcccttgagaaccacggtgatgctggccttct

SEQ ID NO: 238194 - DNA, 158 bp, Glycine max
taacaaagcgctctttatctatccattgtgcttacaagtagtacatccaaagtacgaacactgaataagctcacatgttaagcgaatgacaaaagtgctgatatctgaacaaatgccgctacaccacgaaaggagagcggtcgcaaccttgaagtgga

SEQ ID NO: 238195 - DNA, 437 bp, Glycine max
  unsure (1)..(437): unsure at all n locations
ntangctgctcaattgctccaggttgctgcatggaatgtttaangtctgtatggggggcagcagaggagcacataccacaaacccttgcgacaggtacagatttctgattcaaggccagctgggttaccaagttgaccaacgcattcagtttgccttcaagcttcttagtttcagatgatgcagatgggtttgtagctacctcatgcactcctctaatgactatggcatcatttctggcactaaactgctgggagttggaggccatcttctcaattaaatttctggcttcagcaggagtcatgtctccaagggctccaccactggcagcatctatcatacttctctccatattactgagtccttcataaaagtattggagaagacgcttgtctgaaatctgatggtgggggcaactggcacatattctctataatct

SEQ ID NO: 238196 - DNA, 432 bp, Glycine max
  unsure (1)..(432): unsure at all n locations
gcagctgcagcgggaaagaagacacaaccttattatgaatcctccnaaactcttagaaaaaataatttttctcgctgaattgctccatccgaacacactatacgggttcataatgaagatgaaggtcaacatatttgatcccggttctatttgggatctactggttgcaaatcatgtcagggattggttcattccttttaaacacacatcgaccaaactctcgtagcggtatggattacatactaagaactatatcaatgcaaaatgggaagtaatctaaattcatcatgtatcatgcatgtcatacttgcgggctttgcctcccctagtatatatcacattaaatagtcgtgaacaatacttgcccttttatatagaattcttatgttggctgaattcgctgctccataaactaaactccgaagcattaaa

SEQ ID NO: 238197 - DNA, 441 bp, Glycine max
  unsure (1)..(441): unsure at all n locations
ctaatggcangacataaacaaagctaggaacagtaaattattgaacttgaccttgcgtagcttttcctctgccctttccttctttatttggtcaagctcagccagcaatgcttcagtgtcatcctcatcatcatcatcttcatcactgagaaagttaaggaaactttagtatatactaccattaacaagtcaaaacacttgttaaactccaaaatttgatgtcaggaatttgatttcaaattccaacaaaattacaaaaaagataattccaaatgcacccagagacaggagagaacaggtataatgtgaaaccacttgttctcatccaaaatatcacacacatcttccaacaaaaccaattcccccactgccaaactttcataccaaactaataacacagaataatgccagctgaaaaaaaaagcatcaatatagtgtata

SEQ ID NO: 238198 - DNA, 437 bp, Glycine max
  unsure (1)..(437): unsure at all n locations
agcttgagctcattgttgctgtcccacatagctcctcggaatttatctcggccatgctcttccttgcgagccctcttggtttcttgttcaagggctcttgcggtagctgcattttcttctcgtaactcgacacactcttttcggacgtctgtagcgactaacttgaatttttctttggcaagtcttgcctttactagctctgtttttagagctcagacttcttcatcctcttctggagcttcgaagttctcctcgttgataattttcaacttggagagccaatctaacccttgtgtatgaactttcagccattcatgataaccaccgatgatgccattacggatgcccctaagttctttatatttccttaatgggctntcccatgcctcgtggactctttgtacaatcttgaaactctgcgcgccgaaatctctcac

SEQ ID NO: 238199 - DNA, 437 bp, Glycine max
  unsure (1)..(437): unsure at all n locations
ttanaatttggtgtcactcttattataattcatcgtgtatgttanaaactaattcaaatgctaaaacacatgtgtatgaggctttgttattattctactaaaacatgtgttggtaaaactgttagttctctttgtgtagtgatcctctagtaatgtgtgaacctaatttcaaaaatagattcttagaggtttctatattgacaagtttcattagaattcactaagaaatgaaggagttattgattttataaaacagtgttacattcctgtaagaaaataaggtatgtggtttatttctaattatgtagatttctacttatgcattgtgatactattccatgagttagactcatnaactctttttattaatgttaagagacattgaaattatgaagagaaatttatatgaaatctcattaaaggaagtgatcacttat

SEQ ID NO: 238200 - DNA, 439 bp, Glycine max
  unsure (1)..(439): unsure at all n locations
agcttatcaaggaagctatctantctatttatagaagcatgcataacactggttgtaactntgatgaatgaaagtcttatgagatacacttcaaagttccacttctctccctctnttattccttcaattntgtgctccctccttctctctttcttgtcctccattaaagcatcctcttcaagcttcttatccatggaaatttttggtggagaagctccttcttccttggcttattccctagaggatggagcctcccctctcctcttctccttttccttctgtcgcaacgtgccctcttgggcgagcgaaggcgaggctcacgggtgcgctntccaaaagaggaaagatgcgcggattcgccaccaacgtttatttgtggaaaacgtcagaaaaaccgaaagaaaccggtcaaatgaanattctagttgggagtgtatta

SEQ ID NO: 238201 - DNA, 418 bp, Glycine max
  unsure (1)..(418): unsure at all n locations
tctttaggaatcttcttattgaagcttctcaaggaagttttctcaaganagcttctcaaggaagctacctagtctataaatagaagcatgtgtaacactngttgtaactctgatgaatgagagtcttgtgagacatatttcaaagttccacttctctacctcttttattccttcaatttcgtgctcccccctctctccttctctccctctttcttttcctccattgaagcatcctctccaagcttcttatccaaggctcatcttggtagtgaatctccttcttccatggcttattccctagtggatggcgcctcctctcacctcttctcctttgtcttccgctgcatctccatggtggaaaatcaccactaacgatctcattgaagctcaaagatccagcctccatagaaggcccaca

SEQ ID NO: 238202 - DNA, 261 bp, Glycine max
ataaaaatgaacggatgtacaactctattcactgtatctgactgagtacaaatgccccttgctatcccaaatgtgcctcgttaaaacctctcaaactaaatcctaaattctcttctttatgacataacacttgagtaggaaaaagtgtacaacattcggtcttgcattacgcaacagcaacacaactctcgccgaggggagttccaagttcccggaatagcttttccattccgttctctgaatcttgaccccccattatct

SEQ ID NO: 238203 - DNA, 383 bp, Glycine max
  unsure (1)..(383): unsure at all n locations
agaagttagagccaaaaagctaaggtgctacactgactcccagctngtctaacggctagtggcaaacatatatcaagccaaggaggcagtattgctcaagtactatcatgctgcaaaaacccttattgatgactttaattgcttcaagatgtaccatatacggggggagaacatcaccagagcagacttgctctccaagttggctagcactaagaaagctggacatcttaagaccattatccaagagacactccaagcacctaccatagacactaatgaggtgatggccagagaagaggcagaaccacactagatgaccctctacaagaaattcttgatccatgactattaccactttatgagaatgaagctcaacacctaaa

SEQ ID NO: 238204 - DNA, 188 bp, Glycine max
tgcctgggaccctacaggactcccttgaactctaggatgactgacgacctccactactattcttgcggtagaaccccgagactcgaagattctccctcatgaaggtgtaaaaaaatggtcggtttaccaagatttaaccaacctacctgatcggttttccgactatttcaaaaaaataaatcatattt

SEQ ID NO: 238205 - DNA, 420 bp, Glycine max
taccatcttatcaccctcaaaaagcaagaaggaccagttaaaatttccaatcagctaaaccgtgattgtgaatcagttatgtcatccattccattattattcagttcaacttgaattaaaccagttaaaattgagtcatgacatgaacaaagtgttccttgtgtgtgccagtgtgagagggagagggagcatgccttcttaagatatctgaattcagtgtttgttctttcatttaaaagatcctttccttcaagaatctgcaacaaaagaatcaacatgtacgtgcaattagagatagatgattgtatctactttgtaaaaaacactagaactatattatgtcttgtgaagaactcgagatccaagattcatacctcaatatggtatgcctattgattgacaaagaccaactatacttgg

SEQ ID NO: 238206 - DNA, 461 bp, Glycine max
  unsure (1)..(461): unsure at all n locations
tgttgcctcatgaggaatgccttgcgcttagatagcatgaaaaagcccttcgataatatgtatgtatgtaaatatgtagcataaaataccttgcaaaatgttgagtaaaatgccttgcaaaatatgaatatatatagcatgaaaatgccttgaataatatgaatatatatagaatgaagtgtcttacaaagtgtttgaatggttagcgtagaagtgtttttcaaatatgtgtatttatgagtaggtaggaaaagaagccttccgaaaaaatgtgtgtatatatatatatatatataatgtagcatgaaaaggttcgtaaaaaaaaatatatgtgtacatgggtgtctatcgtaaagtgcctttcaccaaatttttatgtgtgcaaatgcatatgtgtcataaaaatagcacggccccaatatgattattntataaagtgcatgttgacactcgcgccatat

SEQ ID NO: 238207 - DNA, 434 bp, Glycine max
  unsure (1)..(434): unsure at all n locations
agctntangagaaaccatagaaactaaagtagttcctaaacaaaaaccaattgaggaagcttcgccaagtatccccattgaaaaacctttattcaaacctttcaaagttagtgaaaaggctaaacgaaaaattagggaacttagaaaaactaaacccttaattgaaggcgtaggtgacaaccatagtgaattactaaacaagattggtagtttacttaaggtcattccagatactccccaagcctcggaaaatacttccaaaatggtaacaagaagtacctctaaattaattaatgttattaatgaagatagtgaccaaaactcagataacacaactgagataggatcaatgtcagaaaanaatataaatccaattaattccaaacactggaagacaccctccaaattatattaccaacgtccgactgcccctg

SEQ ID NO: 238208 - DNA, 423 bp, Glycine max
  unsure (1)..(423): unsure at all n locations
agatctangagggacgccgcggctgatgtgtatcagtgcctctctcgagtttgacaaccatcgtttcaggagcgctgagcaccagcagcgtttcgaggccatcaaaggatggtcgttccaccgagagagacgcgtccagctcagggacgatgagtacgaagattttcaggaagagatagctcgccggcgttggacgtcgctggtcactcccatggctaagtttgactcggatatagttttagagttttacactaatgcttggcccacggaggagggcgtgcgggacatgcggtcatgggtaaggggctagtggattccttttgatgcagatgccctcagccagttccagggtgacccgctagtgttagaggatggccaggagtgcgagtttattcagagaaagaactactgccgatggattga

SEQ ID NO: 238209 - DNA, 432 bp, Glycine max
  unsure (1)..(432): unsure at all n locations
gctggaatcaattacacacatacgtgtgtatctattctcacagnaagtctttcagacaatattctcaacagtcacatctttttacttgattcttgaatggctgtcaaagacctatatatgtgtgacttgggacacgaatttgctaagagattttcagaacaaaaaggtctcatcctcttaaaaagaaaaatcgttttatcctcttacaaattccttggctaaaacacttgtgattcaataaggaattatttgagtgctcaaattgctcaatctatctttgtcaagagagaattcttcttttcttcttcttcattctgaanagggattaagacacctagggtctcttgttgtgaaagaattctatacacaaaggaacggttgtccttgcgtgtttataacttgtcaaatggaatgtacaagatagtggaactc

SEQ ID NO: 238210 - DNA, 447 bp, Glycine max
  unsure (1)..(447): unsure at all n locations
atgtgacaaagcgcggaagagncagacttcctacttttgtntgttgttcacagagnnggacctggagatatgtcgctggggtcaggagaccttgtggacatcacgtggggtgctattgcccaaaaccaagcttgaccaatcccgacccaacccgggcatagttggtcagtgagaacctgtgacgcataatcgattacagggcttaaaaatggacacaggaagttaaaatggcctctggtaatcgattaccaatggggtgtaatcaattacacagggtgatagggcactggtaatcgtattaccagttggtgtaatcaattacacagtgctacctgccactggtaatcgattaccatttatgtgtaatcgattacacagtgtacattgtagatttcatgtgcaaaagctgtgtaattcatgtttgngcactggtaatcgattacatac

SEQ ID NO: 238211 - DNA, 464 bp, Glycine max
agcccttggattttatagtttagattgtttcagtggaaataggcctgagaattttgcgattgaagggcgtaatttgaaattctcattcacgacgaggcaaacacaggatgtaccggttcttaaggattgttcgattcgcattccttgcgggcagttttggatgcttcttggacccaatgggtgtggaaaatctaccctcttgaaggtattatcagaattcagaagtaagagttattgttttgtagtctagtgtatcttgtaatgtaacccttggcatggtgtgcagattttggctggtctcttgactccaacttcaagaacagtgtacgtgaatgggcctaaaagttttgttttccaaaatccagatcatcaggtttttattttctgttccaatgattagtaactttttttttctcgtacttggttcattggctcaatgctatctttctttgaagagagttgag

SEQ ID NO: 238212 - DNA, 452 bp, Glycine max
tcactattattacttggactgacaatgaagttggagtcattgtttttgcactacagacaaggagcctcattcagttctcacaatttggtccaaaaattacgaaaattgcttgttaattagtatgaatttcagtgatgcgaaaactttccataaagtttgatttttgtcaaattaatttcctattcctatatgtctaatagtatgtaaacgcgtgaattagtacgcaatggtttcgttgcaaaaccatttcgtactcgtacgtatttttatttttttttgttcagcgcctaacaaacatgactgattatatgcgttccatgttcagtagtccatgagcactataaacaacgggtaatctatatatgattttatcgctactaaatattttgattaattacctacgatggagagcttctattttggaagagctgatgcatgtcccttttcaattc

SEQ ID NO: 238213 - DNA, 450 bp, Glycine max
  unsure (1)..(450): unsure at all n locations
agcttatagtaatcgatgacataaattgtttgaagctcgcacagttatgtctcgtatcggtttaatcaattacaaccttatcataattgattatgtcgcaacctacccttcancgggaaggtgaggcgtgactcaagggtgagtcttcctaaaaagaaaatgcgcgggagtcgccaccaacgtttattcaaggaaaatgttagaaaaaccaaaatggggtctatgaattttaagaataaaggttcgggagttgtttacgtgcggggaaagtattatcaccccacgcatctgtcacaagggacagcagcctttaattgagtgcgaanaatcatgagttcaatgtttattttattctccctttttatgtttttttacatattgggtcgacaagagcatgacctttgctcctacgtatcctcaagtgcgatgaggaactcacacctatgtagt

SEQ ID NO: 238214 - DNA, 447 bp, Glycine max
  unsure (1)..(447): unsure at all n locations
actcttacgagtcagtttagttaaattgtaagccttcttggagaaaccttctatgaatctccggtaatatcctgctaaacctacaaaactcttaatctcaaaaacagacttatgactctcccacttaagaacagcttctatcttagagggatccacagctatacccccttgagatatcacatgccctaggaaactaactttctctaaccagaactcacacttggacaacttagcatagagttgtcggtccttaagggtatgcaacacaatcctcaaatgttcttcatgctcctctctagtcttggagtataccaaaatatcatctataaatactaccacaaaattatcaaggtaaggcgtaaaaactctattcatgtagtccatanacactcctggagcattagtcacaccaaagggcatgactagatactcatagtgaccgtaacg

SEQ ID NO: 238215 - DNA, 447 bp, Glycine max
  unsure (1)..(447): unsure at all n locations
agctcggaggtcctacatgagttgttaattcttttatgcaaaacgacggatacgtaacaaatacatacgctcaaaactttcattgcattccgatccggtgcaactcactttcacaattttggtaaatattaatttttgtccatgagtagagaaattcaaatctactatattctttttcattatttcttttatcatgaatcttatataattaactctcaatctgatataattatattcattgaattaaatgaagcaagtaataaaaagagtttatgatgaatcaaatcaaatttcaaattgatatataagtcacgaaaaccgttagatataattgatcaatgcaatttttcttattacacaaatattaatcataaatctttatacagaaaaattcaacttctgatttngtttttctgtccttcttcctactcactaattaccttactc

SEQ ID NO: 238216 - DNA, 392 bp, Glycine max
  unsure (1)..(392): unsure at all n locations
tacgcttagacagctcagcactaacacatcgttttgtctgttctgttananaacaagagaagagggttatgcgtaccgtatcttctgggactccagcaatctttaccgcgtngcatatctcgatgtactacgccaggtgagcatatggatcttcccttggaagaccatggaagagattcccttggattaactgtataacggaatgcgggttggagatatttgcggcttgcaccttcggtcttgcaatgcttatgaacaactgaagagtggcggtgttggagaagtcctttaaggtgactcttcgtgccgcgtccccgtccatttcagcgtgatgtggagagagacgaagtgatgtgcgactgattccttcagtgtcttgtacctacttcttc

SEQ ID NO: 238217 - DNA, 417 bp, Glycine max
agctattacctcatagatgtatcattattttctcctatttcttaaccctttgtgtcaccattttaattactggttaggccttaattgtcaaattaattatgcagttttatcatttgggcctacttgactaattttgtgtttttaattaatttcaggagaattataagcaactgggcttggacttgaagagaacagacaattttattttatcaaatcttatcctatccagattttatttcatccaatcttatcttatcttatctagattctatttaatccaatcgtatcttatcttgtctagattttattttatttatgggcttggacttaaaatagatttgtaagctttggggctgaggacctatataacagcaccagggttttagtttatagagtcttttggggagaggatataat

SEQ ID NO: 238218 - DNA, 347 bp, Glycine max
cgccctgggagctctagatgatggacttgaccaccctggcccatacttggagagtattatgatactctaacctagggcgctctctacacgtacgaccttaatatggacagggcgacgtgatggcatgggctagctatgaagatggacatggatgtgggcttgctcatatcacatcagatcttgctaatggtccaatacaactcctaacggctcggctttctatcctcgatcaccaccttatgcggagccaatggagacatcccccatactctgactttatagctgttcacccctgccatttatctggaatacatactgaagagctgtagcacatggatgacccttca

SEQ ID NO: 238219 - DNA, 424 bp, Glycine max
agcttagatccaacgatctctttctttttgtgttttgataatgccaaatccatatggtttgtattgacgtctcttctcatagtacctgttctacaacatgcttcacaaacatgttagtaacatgtcttcaatacaagttatttggtacaatctatttaatttcaatcaataatcaaaagcatcaatctttctcccgcttttggcatcacaaagccaaaaagagtatgtatcacaaagaaataaaccacataataacacatgatagagaatagaaagaaaaatatcaaatatcatctattaataaaaatgaaattacaactgattaagaacatatcaccaaatgtttaaaagcactataaagaaacaaaacatataatataagtcaagcctatactatatgcttatgatatgtgaggctaactat

SEQ ID NO: 238220 - DNA, 382 bp, Glycine max
actggtgagagtgtgaccttactctgttattgaacgactaactgggagtaaatgatctttgcatgaatctctgaattctaaaatgatatgtataacttaaaacatgatgaaggccatgatttgtatatacacaagctcttttgaccaaatagctcaccttgaattataactgtatcttttgctccttctataagctgaacgatttttgtcatgaattgaaccctaaacttaaatgattatctcctgataccttgtttagattctaggagagcatatggttcaaggcaaatttactctaaatttgggggagggaagtcaattggaatgaaaagaacaaagttaagcatcagcacacacaacacataagttgtttgttaaaaaa

SEQ ID NO: 238221 - DNA, 459 bp, Glycine max
agcttcaatggaggaagagagtgagagatatggggggaggcgtgggaattgaaggagattacggagagaagttaaactttgaaatgtttcttacaagtttctcatttatcaaagttatgacaagtgttacacatgtttctatttatagcctagcacatgggaagcttccttgagaagcaaggaaggtagcttccttgggaagctagaggaagaaaacttccttgagaagcaaggaaggtagcttccttgggaagctagaggaagaaagcttccttgagaagctaggggttactcacacctctccaatagctaagctcaccccatgccaaaatatatgaaagtacaataggaaacttccttgagaagctagaggggggctactcgcaccccttcaatagctaagctcatcccatgccaaaatacatgagaatacaaagaagtctctactacaaagactac

SEQ ID NO: 238222 - DNA, 431 bp, Glycine max
  unsure (1)..(431): unsure at all n locations
attcactaaagtgattaaagtgtgatgtttatctataanaagtcatagggaccaataatcgggcattggatgaactgttggtacctatgactatgtcattcgataaccatccataaatccagctgaaggatagagaaagagaatatgaaatagaagagagataatttggaaaatatggactataaacaaggaaactaagagtgtgggatcagaccagttntatctaatatttagctcatgtaacaactaaaattttaacacttatttaataaccaaataatatatgactaaaaatacgtgctactctgtctatatagcatatatatgagtttataaatgtgctaatcactctttacatagaggggatgtcattanaagaatctctcttggctctctatattttggcatggcgatgttctactcacactttt

SEQ ID NO: 238223 - DNA, 445 bp, Glycine max
agcttgttgtttaattaatgcatgcattgtttgttaaaaaggttttgtacatatcatatgacttcgcaattccaggcacatgcaaaatcaatagcccatgtttcataggctcttaatttgatgctatatatcaagccattttggggagttatgtccttgcaattcaacaccttgttatgttataaaatttgtttgtgacaatcctttttcttttacttcttaatttgcttggattctcatggatattgagattaatttagaggacagtgttacattctttggccttcttgtcatgaataacatttcagaattcttttaatttagccaaataatatatagtataattcatgtaatcgatcttaattattacaaaagaatatgtgtgcatgactcctattattgttgtaaattattgtattcaactgatttgcagactggacaaact

SEQ ID NO: 238224 - DNA, 433 bp, Glycine max
  unsure (1)..(433): unsure at all n locations
tgtacaagtctggctgcattataacaaggatacttgcttcatggctatatcctaagaaggggtgaccctcataacaatgtatggaagatgcggtgagacttcgatgggacaaagtgttcttgatatttatgtttcacttatatcaaggagaccaaatattagaaaacaagtttgctaattgtaaccatatgactataaattatggatcaatcgcattctatcccccacatattgatcatgcagctaaacataattgtggcagggaaaaaaatgaatagaaatataagcaaattctgcataagctctattttataggcaatcaaagtacctttagggataccattaaggtatgacagaacncttttcaacactgaatcaagacgcggacaggttataccaactgtgcacaccagatcagtatatatcacaactt

SEQ ID NO: 238225 - DNA, 433 bp, Glycine max
taagtcacctgcggcatgcaagcttcgaagagtctatagagaccatcctatggtccaacgcacaatattggcagacaagttgaaggcttgcctaaggtccaaaaggagtttgaccgaacattttaacaagatccaaaaaaacgtgtgggacatcattgaccaatacaaaaagaagttaagtctagtggcaacccatgaacaaaggctagaggacgagtactcgaaggtatcagtcttgcaagcataaagggaagcaagagacagagtaatcgattcattacacatataaccaatgatgtggatggataggtttgctttcacatttaatgggagtcaagagctcccaagattgctatccaaagccaaacgcatggtggatgtatactctgccctcaaagaagttcacgggctccttaattatagtcagcacatg

SEQ ID NO: 238226 - DNA, 445 bp, Glycine max
  unsure (1)..(445): unsure at all n locations
tcaagaagaagatggcctcatcaaattccttatttccttaagggaacnctatcaatagacctccaatctttaatggagagggttaccactactggaaaacccgaatgcaaatttttatcgaggcaatagatctaaatatctgggaagccataaaaatagggccttatatacccaccacagtataaagagtttcaatagatggtagttcatcaagtgaaagcataaccatagaaaaacctagagatagatggtctgaagaggatagaaaacgagtacaatacaacttataagccaaaaacataataacatctgccctacgaatggatgaatatttcagggtttcaaattgtaagagtgcttaagaaatgtgggacactcttcgattaacacatgaangaactacaaatgttataagatctacgataaatgcactaactcatgagta

SEQ ID NO: 238227 - DNA, 374 bp, Glycine max
agcttttcgattcattatatgtacgcgtatgtggtccatattgtgttccgtgcatctttattctcgttttggtcactttttataccccctgctgacgtgcttaagccattttacttaagtcatttctcgcttaacttaaaaacaaaataaatttccaccgaacgcttgaatggtattatccattaacttcggttaaaataaattccgaccgttctgatggaagcttgcttgtggagcttctatggaggctggatctttgagcttcaatgaggtccttcaatggtgaatttttaccatggagatgcaccggaaggcaaaggagaatatgagaagggaggcgccatccactatggaatataccatggaagaaagag

SEQ ID NO: 238228 - DNA, 426 bp, Glycine max
aagctccttcaactgcacaaggctcttaatattagaatattatccttatttaaccttcacccgacgaagacactgacaaaaacttatcttctccttcttggacaaagtatggcaggctggggggaagtaaattttcttcccatcagaccttggatgcaactgtgatcttatacccatatcagctagatcttgacgggtattcaagccatccttcgtcttgccttgaatgttaaggagcgtcccaatcacactgtcacaaacatttttctccacatgcataacatcaatacaatgtctaacgtcaagatcacaccagttcggaagatcaaagaaaatggacctcttcttccatatgcaactctgactcttatccttcttttgggtctttccaaatacagtgttcaagtgttgaacccgctgatatac

SEQ ID NO: 238229 - DNA, 467 bp, Glycine max
  unsure (1)..(467): unsure at all n locations
cgcnagctngaatntaagagagtaattgaattattctatcatattgtcnaatagtttcttattgaattaaaaatttagcccagaggcaatttttatgtcacaagattcaattttctagtatgtttacattggtaaaagatacaagtcagattaatatgcctcaaattttgattaaaattatatattaagttgtttaaagatcatataagaaattatacataatattttgattaattgtacttatataatgaattttatcccacgggaatttttattatatttttataattaattgtgataaaatgacatattatttttcatggtttacccacagggatcatgaggtatgtataatttgtcaattctatcataaagtaaatatttgcaatagaaaattaaattatttttatgttgcacccgtaaagctttgaattgagtatgtaacttgattattctatcataatggt

SEQ ID NO: 238230 - DNA, 455 bp, Glycine max
  unsure (1)..(455): unsure at all n locations
ttctatatacgctngaaccatttatcaataaacacaagttgttttttattcataaaattagagtttatctcttttatcttagtgagagtgattctcctaaattcttgagtgattcaagaacacccttgctgtatcaaaggactttcacaacctttgtgtgttgccttcgctggaaagagtgattctttccttcctatcatctccacccttgttctttcaaaccacaattccagaaaatccacctctgcccaaaattatctcgtgaccataactcccattttacacactcaaattaagtgattcttgagcctaaattgaatttcaaaacgagacctttcacctcgttttggaatcacctcatttggagccctgtagcttccgttattgccatttctatatttctgtccagccaccacttaacctacgttttaccatcccattcatccattntatgc

SEQ ID NO: 238231 - DNA, 376 bp, Glycine max
agcttctacttatgtggcagggcgggctttcttcactttcttgtctccaacgcgagctctgaccactgtttttccttcccgcgatgcttcttttcatgttcgcctgagtgggcttatagcctaaaccatacttcccacgatttccttgggtttttatcaggctagttatgccgccattgtctttgcctaaacccatcccgggttcataaccgttccccaacataactcgggccatcattaccgtcgcatcggacaggcaaggttgcccaaagagggagtccacggaggaaatgctgaccacctcaaaagactgaaaagcggtttctaacgattcttctgcggcttccacataaggcatggaggatgggcagcttac

SEQ ID NO: 238232 - DNA, 432 bp, Glycine max
  unsure (1)..(432): unsure at all n locations
cttttcttatctttgtatggactactcacaaaatccatttaaaattctttagtgtcctataggccatgcacaaggtagataagtcaaggaaacacaaaaatccaaaaataagccacaattgtcaattaagctcaatcatttgcctaaaaccaaaactaaattaaagtgagaaaataagagacaaaaagaggtcaaataagataagaagaatagaaaaatactaaactacaaatgctcaatctctcccttcctttccctctcaaatcgttcgatatccaccgagttaacttagtttgttaaggtactctccctctatacctcgattacacatttttttttgtctgtggtttcatttagatgatgaatngcattccaggaaaatgtgaacctcaatttcatgggttagatcgtttttagggaacacatttggtc

SEQ ID NO: 238233 - DNA, 460 bp, Glycine max
  unsure (1)..(460): unsure at all n locations
agctntgatctaccaccaccaccaccaccaccatcatcttaattttctattatgttgaatattattagtactttgatttctagccgtgtatttggctatattattatgacatttgaacatttagtatttcttttatttgcatagtatgactgaacaattatgaattatgttatatgactatgtggtttttatatatttgatctattcatgtttcttgcttcatgattggtttaaatttttcaatgaatgtcttgtgtatgattacgcatttgtgtatgttttatatttgttacgcactctggttttttggtgatgccaaagggggagagacatagggattaaatcaagaactcacataagtaattaacttaatttcaagtgaagcttacactcacaaacaaagggggagaatatggagaattaagtgagtgatcgactacganaaagtatgtgcatgtgt

SEQ ID NO: 238234 - DNA, 451 bp, Glycine max
ttgcttgcttctacaagccacttgtcgacaataccagcactggattgcttggtggttgttgttctttgatcattcttgtgcatggcgagatgacagctacatcaaagaggagtgggtccgtcggaagtgatgcacgatcattactgcaatatgaaattagattgcatattagatgataataagaggctaagagagttagtttgcagtgacatgtgtcattaggtagttaattctgttaggatttccaagtgggaagtttgttaggaggtagttagtaacaactggctatatatagcaagatgttgtgaaggctcgggtacgttttggaaatttccaatatcctttgtaatcctctgcattcttcatcaataatatcaaaatctcttcttgtttgggattctcttctacatttctagttcttctatttgatccataatcctagcactatatc

SEQ ID NO: 238235 - DNA, 317 bp, Glycine max
  unsure (1)..(317): unsure at all n locations
agcttaggcaaaatcaaactataataactttntactcgtatgtccgattgtgtcccgtagtatatcgagacgctcaaaattcagaacagaagctcttagaaaaatcaatcgacaataactttttactcggttgtccgattgtgtccgcagtatatcgagaagcttgtaattcagaatagaggctctgagcgaaatcaaacgataataactttttactacgatgtccgattgtgtcccgtagtatatcgagacactcgaaattcaaaacagatgctttgagacaataaaacgataataacattttactcggatgtccg

SEQ ID NO: 238236 - DNA, 410 bp, Glycine max
  unsure (1)..(410): unsure at all n locations
taattctgaattntgagcgtctcgtatattacgggtattattcggacatccgagtaaaaagttattatcgtttgattcggctcagagcttctgttctgaatttcgagcgtctcgagatactactggacacaatcggacatctgagtaaaaagttattgtcatttgaaattgctcagagcttttgttttcaaatacgagcgtctcgatatactacgggacacaatcggacatccgagtaaagagttattgtcattagattttgctcagagcttctattctgaatttcgagcgtctcgatatactactggacacaatcggacatccgagtaaaaagttattgtcgtttgattctgctcagagcttctgttctgaatttctagcgtctcgatatactactggacacaatcgga

SEQ ID NO: 238237 - DNA, 450 bp, Glycine max
  unsure (1)..(450): unsure at all n locations
agcttgagatctgaagtttaatattcaattgatcaaagttcaaaaaaatgcacacacatgacctctatttatagcctaagtgtcacacaaaattggagggaaattcaaatttcacttgagattgaaattgaatttgtggagccaaactttggagccaaaatttcactaattatgattagtgaattttagttatggttcagcccactaatccaagatcaattccaagattctccactaagtgtgcttacgtgtcatgaggcatgaaaagcatgaaggacatgcacaaagtgtgactatatgatgtggcaatggggtgtactaagcaaatgctcacctccccctctaanaattaattggattggacttctaccaattcaattaaatttattttcaaccacacacatcaaatatccacttagtgcatgtgaaatacaaaactacccttataca

SEQ ID NO: 238238 - DNA, 394 bp, Glycine max
  unsure (1)..(394): unsure at all n locations
cgcttgatgcaacattnggagaggtcaatgttataacgagatgatgcgctccatgagagggtggatcaaatggagaatagagatcataatgaagaagaaaggaggagaagagggaatgatggtgttcctagacaaaaccgaattgatggtattaaactcaacattcctccatttaaaggaaagaatgatccggaggcctacgttgagtgggagatgaaaatagagcatgttttctcatgcaacaactatgaggaggaccacaaggtgaagcttgccgccacggagttttccgactatgctcttgtgtggtggaacaagctacaaaaggagagagcacgaaatgaagagccaatggttgatacatggacggagatgaaaaagatcatgaggaagc

SEQ ID NO: 238239 - DNA, 444 bp, Glycine max
agcttcttatccaaagctcatcttggtggtgaagctccttcttccatggcttattccttaacggatggcgcctcctctcacctcctttcctttgtcttccgctgcatctccatggtggaaaatcaccattaaaggaccccattgaagctcaaagatccagcctccatagaagccccacaagcaagcttccatcattcttgatccttccaaaagcctcttggcaatcctcattccagcgatcagtttggtttttgcgtaagagcttgaacaacggctcacaaatggcggtgagctgcaatatgaatctggcaatatatattaagcgtcccaggaagcctcggacttgcctctctgtacagagttccggcatctcaaagatagccttcaccttttcggggactacctctatccctttctggcttacaatgaaaccaagaaatttcc

SEQ ID NO: 238240 - DNA, 426 bp, Glycine max
  unsure (1)..(426): unsure at all n locations
gctctanattacattgatgtttgtatttatgggatgttgtatngccattttggtntaagagtagcgtcccactggtaaaactaactttccaaatgtttgccttcgcaggaaatggccccgaggaagcttgcctcanagaggtccaggaaggacaaggcagccgaaggaactagttccgctccggagtatgacagtcaccgctttaggagcgctgtacaccagcagcgcttcgaggccatcaagggatggtcgtttctctgggagcgacgcgtccagctcagggacgacgagtatactgatttccaggaggaaatagggcgccggcggtgggcatcactggttactcccatggccaagttcgatccagaaatagtccttgagttttatgccaatgcttggccaacagaggagggcgtgcgtgacatg

SEQ ID NO: 238241 - DNA, 346 bp, Glycine max
  unsure (1)..(346): unsure at all n locations
taagtgacctgcggcatgcaagcttcatgaagcagaggtatatntatgtctttgttttcctngaaacctctaatcgttcttccgagcttctaaagtatcttctgccgagctcattccctctagaggacaccatgtgaccaatatgacactatttcgcatttagttaagtgtgtgtgtgcgtgcgcgcactacatgtctgaatgtgtgtgattcagaatgttctcacgagtgtaattaattaagcaaactattgtacacctcgttcgctacccatttctttgcatcataaagactagcttgaatgtggccttcatgcccatgaaagttggaaattgcatgacttgta

SEQ ID NO: 238242 - DNA, 304 bp, Glycine max
  unsure (1)..(304): unsure at all n locations
gactcataatgagattgaagtatcggctaccgtgtgcaactacactatatatggcgggtgacaactccaaaggaataaaccttccgactctnaatacataagtgtgataaagactgtgttgctagcatttcgactagaattacactcactagagaaaattgcttatatgtctctagtcaagttaactaccttttactttgaatgtggtatgcagcactttcttctgcgtcctgttgagtgcgctgagcatccgccggtcaacacaatatgaaatgttctctgcattacgaatgtcccgggtaac

SEQ ID NO: 238243 - DNA, 410 bp, Glycine max
agctagtaagattatggggcacctatcatatgtggtactaagaggaggtcgggcgatggtgcacaacaagttttccacatccacaaatcgcacataaacccaccatcccctgttgcccacctccaactgagctcacgtactcccacgtagcccatatcctcgtttctctcaacaccaggtccccatcgatccttccacgcttccccaacatccaggtaattcaacatccaaatcatcacaagctaacaaaccaagcaaaacagggcaaaggcagataactctgccaaaactcacaccaaaatcacagctgttttcacttaaagaccccaggtaacattccttcgttccaattcgttaaccgttggatcgactcaaaatttgtactggaagtctctagtacataagcctac

SEQ ID NO: 238244 - DNA, 434 bp, Glycine max
  unsure (1)..(434): unsure at all n locations
gtgaactataaaactacgcttaaaaaactccgagtccttacacctttttaaatgnttttttaacaatacaataaatagtttttatctttntttgcaagatatattttgaccgaacaaaagtcgtttaaggcattggaccattaaacgatcttttgatttttggaaatgagagaaatgttaaggcgttggaccattaacgatctcttggttttgaaaggagagaaacgttaaggcgtgggaccattaacgatctcttggtttttgaaaggagagaaacgttaaggcgttggtccattaacgatctcttgaggtggtcaacaaaagcggggcttttgctcctacgtatcctcaattgcgatgaggaaatcagacctacgtagttcttgccaaagtgggtaaaagtacatcttgatttatgcttttaaacggttcat

SEQ ID NO: 238245 - DNA, 430 bp, Glycine max
  unsure (1)..(430): unsure at all n locations
agcttgcagccattataagataatgagcatgtnattggaagtatgactganaatgttagtcaatttgtcagattgattgtgaaggaatgcattaactgtatcccagtgagagtgtgatccttaaattttgagagaaatgactatcatttagtactgatttttgcgtgaatctctaaagtatggattgaatgcatgaaattgaggatgatgaaggccatgtttgattatgatagccacttagccaaaaaactgaccacatgcttgaatgatttatcccttgcacccagtttgagctgaatgaattattgattgattgaaccctgagcctatatagtgttatctcctgctaccttgtcttaagttgtaggagagcatcatccacagaagcttggttcacagcaaatttgtcctaacttttgaggagtaatca

SEQ ID NO: 238246 - DNA, 298 bp, Glycine max
  unsure (1)..(298): unsure at all n locations
atgctgtgactgtcattcctatacagacaagtttcccaccaacccaacaatgtcattacttagccaataacaaaccttctcttacccaccgcccaagtatccacaaaagcaatccctaaatcaaccacaaagtctgtctaccgcactttcaatgacgaacaccacctttagcacaaaccaaaaacaccaaccaagaaatgaatntgcagcgagaaagcctgtagattcaccccaattccagtgtnctatgctgacttgcttccatatctacttgatgaatcaatggtagccataaccc

SEQ ID NO: 238247 - DNA, 374 bp, Glycine max
agcttcaacagagatgtctaatgttctatttttatatcaaatccactccaagcataaaaaataaagaatccatgtcaatgtccccaacaatctacctttcgaaaacataaaacataaaacaaaactcaaaaagtcctaggtaataaaaagtaaaggaaatagtcatgtaattagtcctaaatgacacaaaatgaatgctaacctaatgaattaatatgcaaaaacatggtataaatatcacacgtcagtatattaataatttataggggagttgactgtaatattattgtttttaaaatttgactggctatagtaactaatatattaaatctctacaagcacttgagtgatatactccctaaatatctccacta

SEQ ID NO: 238248 - DNA, 324 bp, Glycine max
  unsure (1)..(324): unsure at all n locations
tccccgacgaagacactgacaaaaacttatcttctccttcttggacaaagtatggcaggctgggggccagtaaattttcttcccatcagaaccttggatgcaacagtgatcgtatacccatatcagctagatcttgacaggtattcaagccatccttcgtcttgccttgaatgttaaggagtgtcccaatcacactgtcacanaacattttctccacatgcataacatcaatacaatgtctaacgtcaagatcacaccagtacggaagatcaaagaaaatagacctcttcttccatatgcaacgcttgactttatccttctttt

SEQ ID NO: 238249 - DNA, 433 bp, Glycine max
gcaagctttaaagtgggaggacttataatttatctcattgatttgccgagaaaactaatggaaaaacgagagtgtgtaatgatttttgtttttcgtcttgtatgaacatccttcagtaaaatgaacatttctctctatatgattaactttggattttgagtcataccgcattcaaatctagacatacatgactttttgtactggcaaagtttataaattttttttatacgataagtataagttatgcaatagttttataaatctctctatagaagaaaaaaatgtaaacttgagttttaatataaatctttaatgacataaatatatttatgtataaatccggttcgagttggattagattgaactttaaaatgaaatccagaatctgattttatcctaaacaaatgggcttattatatcttaatttgctcaa

SEQ ID NO: 238250 - DNA, 340 bp, Glycine max
  unsure (1)..(340): unsure at all n locations
ggcaatgacaaagctgatggagattgaanattgtgacaaggggacaggaagtgggaacggatgggggtgggtgtttgctggatatcccaaaacgggaataggacggtttttgaataaaccacgggtaagaataccagctcccattcttgtgtagtggcctttaggcctcccctcaaaaaaaaaaactttactataaggttgtttttaaaatattgacaatgcttacaaagaacaaatgacgttcaattctcaaaatacataaaacaaaattacgttgaaagagataaatggctaagaaaatcttatcttctgatacaagtaaaacactgaacttttcacc

SEQ ID NO: 238251 - DNA, 351 bp, Glycine max
  unsure (1)..(351): unsure at all n locations
ctctcccaataatttcatctttatacaactgaattgcgaactctggaatgttaatccaaactgctagcttccttttcactgatgtattggcctaaaagaaaggtctctattgtttcactaaaacataacgatcaaccatcatccaaataccttcacagattaccatattattgttttcatccgacgtaaacaatacttgataataattgtttacacacatcaataatcttaattgagccctttttagcccaatcacgatctaacttcggcccaatatcccaaaactaatatgcttatcaagtattgtaaccatgagtgatcctttctanggcttgtctgagcattatactc

SEQ ID NO: 238252 - DNA, 463 bp, Glycine max
  unsure (1)..(463): unsure at all n locations
agctnncacctttggtcctcctcatagttgttgcatgatatatcatgctctattttcatctcccactccaagtaggcctccggatcattctttcctttaaatggaggaatgttgagtttaataccatcaattcggttttgtctaagaacaccatcattccctcttctcctcctttcttcttcattatgatctctattctccatttgagccaacctctcatggagcgcatcatctctctgtttcattaacctctccaaatgttgcatcaaagcttgcatttggaattgcgaaagccccactccatcattatgattagtacctgacatctcaaacaaacaaatcaaacgtaacaagacaattatagttgctgtgtgaatacctcacccactcaagtgtatcacacaattatggcttgtctctaatgaaacactctngccttttaccactctaattcccttgagtt

SEQ ID NO: 238253 - DNA, 439 bp, Glycine max
  unsure (1)..(439): unsure at all n locations
tctcctcttatttgctataaatagggggataagtgatgtatataagggttcagcccctgaggtacttctctctctctctctcaatagctgaggaaaattagttccatgaagaaaatccaagccgaggcgcttccgtaacgtttccgtgagtaattacgcgaagattctcgaccgttcttcaagattcatcgttcgttcttcgttttcttcggtcttcaacgggtaagtacctcaaaccaagcttttcaattcattctatgtactcgtggtggtccacattttgtttcatgtatttttattctcgttttcatttactttntatacccccttttgacgtgcttaagccatttatttaagtcatttctcgcttaatctaaaaataaaataaatttccaccgatcgtttgaattgtatcatccgttaattttgggtaaaatga

SEQ ID NO: 238254 - DNA, 438 bp, Glycine max
  unsure (1)..(438): unsure at all n locations
agcttgttgcggtacgcacaggtgtgcgtctttctggtcttggtctcgaggctctccatcaacctaccctccactctcaaaaacacaaccgagtgtttccgcaacttcatgggtagccctcgctttgtttttctcctcggaaacgtcataatcataacgttgttcgcacaatcgggacaattttcatctaatcactcatcttcagccaaacatgccccaccggaacctgcagatctctatctcgagttcctccaaaacaccaccatccatcagaaacttcaactccatctcagcaacaataatcgcaaaccanagccaagtgtgagactagtggccgagactgttataataaagggtcaagaaattgatgccaccaaaactgcagagactagtttggagatgaacaagaaaggatatagaaggtgtcaatcggatatt

SEQ ID NO: 238255 - DNA, 367 bp, Glycine max
  unsure (1)..(367): unsure at all n locations
tatgtactctatgttntatcatttgttcaacaataagtgtgagtgacaagtacggtttgcacgatggaagacggaacaatgacgtgagagcatgaaaaaataatatttttttaatatcaaacactttctaataatttttttacattattaattaattagaaaataatattaaatatatatttttaaaaataattattataaaagttagtaatgttattatatatatactcctattattattatacaataagaaaggaagattttacatgtttgaaaaagaatgttaagtaacactgggttggatgacttangtgggaaattcacgagttctgtggccgtatagaatgttttaattgtatcaagaatt

SEQ ID NO: 238256 - DNA, 328 bp, Glycine max
tctaatgaaagagttatgtcacatatgatctgtctatactcatgaaagaaagaaaaagggtcatggtttttggttccttttgcgttttttccccttcaaagctttgtcccaatacatgtacagaacaatggtgaattaatgaaggaccaaacagtgtttgagtttagactcattgtaacttgacacgtgccatccccttttttttttttccattttcttctcgaatgtcatcataatttacaatgaaaatcaagattcagtttgtcaattgaatactaaatgcggcttgtggaagagtgagctaactatattaatggtgaagagtttg

SEQ ID NO: 238257 - DNA, 293 bp, Glycine max
cataagcgggttcagtatgtaacctatatctattacttttctcattcttatggagaagtcaagaggtaatctactatgtgacatcaaaaggaaccaggataaaggatgctggacaatgacggcagaaaaaattgagctcgatttcaacctttatggtttaactggctactaggaataggggaaatttaatcccaccaacatttactccagacttcaagtaatttactaaggggtttaaccgtatggcacacctctagttgaaaggttgcttcatgtttacgagaagttaatgc

SEQ ID NO: 238258 - DNA, 448 bp, Glycine max
agcttgccacccagctcgcccaggcgagttatgttgcttcctccagaagcaacagccttttggaggaatcttttggagggcccaagtgggcctggttgctatttgcacccccatttttactaaatacaccccctgcccttttttggtgattcttttttcgtaaagttatggaaacttacgaatttcgtaatgatacttgttttctttccgtaatgttacggaaccttgcggattacataatcatccctttttttgacttacggaatgttacggaacctcactatttgtgcaacgatgcttccttttgattttcggtgtgtcacggaaccttacggattgtgcatcaatattttcttttgatttccggcatgtcacggaatttcacaaattgcctaatgatgggtgccaagcacctcaaaatgaccaaacacaagttgcatgccaccaa

SEQ ID NO: 238259 - DNA, 455 bp, Glycine max
  unsure (1)..(455): unsure at all n locations
tacgctagttgctgacaggaggaatgactatgtttttgttatgcntttggccttgttgataagcatagtcactaagagtcctccttggtggtctgttttcttctcctcctcgatcaaccatgtcatcttttacaagtggctttntagttgaaggataatcaatagaagaagactcacttggtggtttagtggttggttttctttttcttcatgttcttactttcagtcttggtaatttcctaatcaaatggtaatttatatacaagaaatttacctcgcataaaggaaaaatagacacactacaacaacccgtaagcaccaaggttagtgaaaaataacaagagagaatttatacaaaataaaaataaaagaaatagttacaaacataacgaaatagcctatctaattgaaaatttataattcgaaagaactaaatgggcgactcaagtccctgg

SEQ ID NO: 238260 - DNA, 444 bp, Glycine max
  unsure (1)..(444): unsure at all n locations
agctntcagccatttcaaacgatcataactttttactcggatatctgattgagtcccgtaatataacgagacgctcgaaattgaatattgaagctctgaactagttcaaacgacaataactttttactcggatgtctgattgagtcccgtaatatatcaagacgctcgaaattgaatgttgaccctctgagcatattcaaacgacaataactttnttctcggatgtttgattgagtcccgtaatatatcgagacgctcgaaattgaatgttgaagctctgagccaattcaaacgacaataactctttactcggatgtctgattgagtcccgtaaaatatcgagacgctcgaaattgaatgttgaacctcagagcgaattaaaccacaatactttntactcggatggggattgaagtccgaatatattagacgctcgaattgaat

SEQ ID NO: 238261 - DNA, 437 bp, Glycine max
  unsure (1)..(437): unsure at all n locations
acgcttcacatcagaccacttccaggtgctgttctacttttatggatntgatggggcctatgcaagttgaaagccttggaggaaagaggtatgcctatgttgttgtggatgatttctccagatttacctgcgtaaactttatcagagagaaatcaganacctttgaagtattcaaagagttgagtctaagacttcaaagagagaaagactgtgtcatcaagagaatcacgagtgaccatggcagagaatttgaaaacagcaggttcactgaattctgcacatctgaaggcatcactcatgagttctctgcagccattacaccacaacagaatgggatagttgagaggaataacatgaccttgcaagaggctgctcgggtcatgcttcatgccaaagaacttccctataatctctgggctgaagccatgaacacagca

SEQ ID NO: 238262 - DNA, 410 bp, Glycine max
  unsure (1)..(410): unsure at all n locations
agctnggataagtatgtatatgttaatttatgtgaaaataaaattcaaccttatatattatattttaaaagataatatataagattataaaaatataataaattaaaaaaatgaattctaaactatttttgtataaaacttatattaatattatattttgtatcaaatatttaaatagtaaattaaaaaataaaaagatcaatttaacgtagtggacaaaataaagggatgaattttataattaaaccatatatttataatttattattgattaaactattttcatgactaatcaaacacgtgttaatataaaacaatgtataattcaataattatctggacataatgatttgaaatcaaccgagaaaaaaacatgagggtcgaaactacgttataaataccataaaaaa

SEQ ID NO: 238263 - DNA, 379 bp, Glycine max
  unsure (1)..(379): unsure at all n locations
aattcatgcagaaaggaagcttggattactttatatttggttggagctttgtcacattctaatcctttntttagaaaacaaaaatttctatgaaatagctgtcaagttaatttagaagtgaatttagaagtagctacgtacattattaggttgggctaagcaatttaaaattattggtggaattgctcgaggacttctccatctttgtcaagactctagactgaagatcattcatagggatctcaaaacgagcaatgttcttcttgatagtaatatgaacccaaanatatcatattttggtatggctaggacatttggattagatcaagatgaaaccaatacaaatagagtaataggaacatagtaagcttttctacac

SEQ ID NO: 238264 - DNA, 431 bp, Glycine max
agcttcgaataaatactaaatattctatttataattaaagaaattatgcttatcaaatagtggtgttgagcattatttgtaatttatggaaagctagttgtagtttaaataaataaaaaactaaaatatattttccattctcgtaaatataaaaatgttgagacttcatcctataaaaattttagtatgtttggcaaattaaaaatctattactttttgacccaaatatagatttaaattatctttaatatgttctaattaattctatcttttaaaatattaaataataactacttattaagaaaataaaatgtattactttaaaattctgaataataatttatttagatggaaaataaactaattaaaaaattcaaatcgtataaaatatcaaaataaatattaatttttcttaataaaaaatagtttca

SEQ ID NO: 238265 - DNA, 411 bp, Glycine max
  unsure (1)..(411): unsure at all n locations
agaacgggggaattcttataggagaatccatgtttttgttcattntcattcaataaataaaatcattctttgggttgcaaacagaactggaatatatctaagcccctatagtgatctatcttctcaacctcgcccaagtacacacataaaaggatcaaatgggaaagaaagtcaaactatcaaacaccatacagacaaagtttaataagtttcaatgaggagaaaacacgataaaagtcgcccacctagaacctgagcagcagtaatgcgtttctttggatcctttataaacattnttgcgaacaagggtccttaacactgtttgatatgcttgggcatggactactttcaaaataatatgaccttgcatatgacatcaatattccctttttcggctctacagccatattt

SEQ ID NO: 238266 - DNA, 417 bp, Glycine max
  unsure (1)..(417): unsure at all n locations
agcttgatagctcttgtatgttttgtgtttatacccaagancttgatataattgtgtaaaattatttgaggggttntatttcctatgttgtgataatttaaacctgtgattaatggtgaatgtgtattgagatgtgtgtattgagatgtgagctatagactgtgcaatcacacaattgtaagaccatttaagggcgaaaagtattgtgatgggattcactgtgtgaactctacagtataactgattcttaaaacaatcaaattctcgtgtgcatcgtttgtgttataggtaaagtgtctgtcatttatgaagcgcgttaccacttgatataacaatatcgcttttgaccttgattatccttctcccctccggttgatgctttccatacaaaatgaatcttcttctagaccacttttt

SEQ ID NO: 238267 - DNA, 432 bp, Glycine max
gaatcaagatcaatattcaagactcaagattcttttatctagagaagaattaatcaagataagtatgataaagttttttcgaaaactgagtagcacatggatttttctcaaaacatgtttaccaaagaatttttactctctggtaatcgattaccagattgttgtaatcgattaccagtaacaaaatgtttttgaaaaagttttcaactgaatttacaatgttccaattgatttcaaaaagctgtaatcgattacaatgttttggtaatcgattaccagtgtgcttgaacgttgaaattcaaattcaaatgtgaagagtcacattctttcacaaaaaagctttgtgtaatcgattacactgatttggtaattgattaccaatgatagtttctgaacaaatcacaagatgtaactcttcaaaacaaaatcgac

SEQ ID NO: 238268 - DNA, 451 bp, Glycine max
  unsure (1)..(451): unsure at all n locations
agcttggagttctggttgcatcttcaattattgagaatttcgtccatgttgcagatgctatcttctcttaaaaagatcatgtctttgccagataatacaaatatatactgcggacacgagtatacattggttagttacatttactcttgtccttcatgttctgtgcttccttttcctggcctaagcactgcgacattgactcttttgctttggtgttcggcagaataatacaaagtttgcattgtctatcgaacctgaaaacgaggaacttcaatcctatgctgcccaagtagcttaccttcgaagtaaaggcctgcccacggtaagtcttacattgttcttctttttaattaatagtttgaagagtcctccctccattcttctcccnctaataactcttcttaattaatcttattcactagtcacatatcatagtactaaccttatcatc

SEQ ID NO: 238269 - DNA, 290 bp, Glycine max
cattctgcctcaatcgaggactgtgtcgatgggtgaaagacttcattcaagtgaatttagtcataaatcttgtttggacaaacttctccataagctaaagaagaaaataagaagatataatgtattgagcttctgcaccgtaagttttggggatattaaataaaaagagcttctataaaagttgattttaactcatgtgagaaactaaattcattttaccttttttttccttctcttatagaagcctaccgagaagtttattcaaatggggctatagtgtggaaatatat

SEQ ID NO: 238270 - DNA, 316 bp, Glycine max
gcccccaacgccaaccgccgggcatgagaggacaacaaaacccagacggaccgaaaataaaagcacaaggagggaagcaacgaccaaaaaagagaacggaaaaggcagagaaacgaccacgcccacccacacaaagacggccacaagagcaaaagaggaagccaacacgggggtataagggggcctgacacgaaaaaccgcgtgaaccagcacaaacaacctccagaaccggagcgagaggccccgcacgaggccccagcagggcgagacccacagagacaacatgcgggacaacagcaagagcagcccaccgagc

SEQ ID NO: 238271 - DNA, 399 bp, Glycine max
  unsure (1)..(399): unsure at all n locations
gggctcctctaagaacaatagcatcatttcttgcactcgaattgtgggagttggaagccatcttctcaatcaaattcctagcttctgcgggggtcatatcaccatgagctccaccactggtagcatcaatcatacttctctccatgttgctaagtccctcatagaaatattgaagaaggagttgcttagaaatctagtggtgaggatagcttgcacacaatttcttgaatctttcccagtactcatacatggnttctccactaagttgcctgatgcctgaaatgtcttttctgatggcagtggtcctagatgcagggaaaaatttctccaagaacaccctcttaaggtcatcccaactganaatagacttggtgggcaggtagtatagccaatcttttg

SEQ ID NO: 238272 - DNA, 389 bp, Glycine max
  unsure (1)..(389): unsure at all n locations
atgcaacaattgttagccgnggctatactatacatcttgccaaacaaagtcaggttaacgataactcgcctgtgctttttcttccatgctatatgtagcaaagtcattgatccagtcatgtttgatgagttggaaaatgaggctgtaattatactgtgctagttggagatgtattttccccctgctttctttgacatcataattcacttgattgtgcatctggtcagagaaatcaaatgttgtggtcctgtttatctacgatggatgtacccggttgagcgatacatgaagatcttataagggtatacaaagaatctatatcatccagaagcatctattgttgagaggtacattngaaaaaaaaccatttgaatttgttcataatactt

SEQ ID NO: 238273 - DNA, 442 bp, Glycine max
  unsure (1)..(442): unsure at all n locations
agcttttggtcaaaaggctgggtatgtttcttttttccttcatcatgtcttcatttatacatttcattctaaaattcagagattgatgcaaagattattactcacagccagtcgttcactcatagtttaagttcacactctcaccggttctggttcaagcttttctttctcaatcaatctgtctactaactaacaattctaaatgcaagntcacattcttcttctttctttatctaacatacacacttgcccaaactcatgaaaagaaacacaaattccatcaaaatcatgcactcaattcaaaataaaaggcatacacccatttttcacaaaaagatcaaagtgttttactgctatgtcantaaaaactaagttaaaactgttcaaaatgctttaggatgagcanataaactacccataaacaaaactagcagtgtatata

SEQ ID NO: 238274 - DNA, 361 bp, Glycine max
cattttgaggtaccattctaatggacattctgaagaaccatcagaatagtcattttgatgcttcctgagaataagtccatacttggtgaattcctttgatgaattgatcttctattctaaagtagcacaactttatcacttttaacacttcttctcaagttcaagcattctgatgttgattacttcataaagacttattagaaatttagttgttggcatgttagtgttctgtccaaggtcaaactgagtagtattctttagtcctttattctgatgcttctcatcagggcttcttctagacaacttcatcgttcaacaatattgcatctccttatgatggtaggtcttacttttttatatg

SEQ ID NO: 238275 - DNA, 420 bp, Glycine max
  unsure (1)..(420): unsure at all n locations
agcttggaaggtagncataccttatcataattatatanacacatacacacacgcatgttcaggtagaaagataccttagatatgcatgattgtaaacaaaaacacacttcacaaaatatatatatgtatgtttaggtagcaagataccttggatatgcatgtatgtagcaaaaagatacctcacataatatatatatgtatgtttaggtagcaagataccttggatatgcatgtatatagcaaaaatacctcaaaaaaatatacacatgtttaggtagcaaaatacctcataaaaaaaaagaaggaataaaaacaaacgagataaaaatgacaaatgaaacaaaatagaaaatatattgctagctgaaaaccgacatgctttgaaaagaggtacttccaactttgcttgtaaaaattcac

SEQ ID NO: 238276 - DNA, 89 bp, Glycine max
acggagaatacagagaagaaaatattttttccaaccgaggggcaaatcacgggcccttataattgcctcccgccaagatctaaattgct

SEQ ID NO: 238277 - DNA, 418 bp, Glycine max
tgcggcatgcaagctatatgccctaatgaaacaaatctatttttcataaaaaccctaaaaatctaaagctacagttgaagtcttctaccctaatgttaagacaagagaaagagaaaaagaatcatggaacttacttggatggtgtatggttgatgcttcaaagttgaaaatgcacaaagatagcacagatgcataatgtgcaattttttggagagagagaatgcatagacgaggtttccgtaatctcgcaaatctaagtgtaactgctgttacactcacttaagcacatttttgatactttcgcttagcggaccgctgcgctaaacgagcaagagagacgtttggtttctcaacaaggattgcttagtggaccccggcgcttaaccgacgtttaaattcagatcacgttttttttttg

SEQ ID NO: 238278 - DNA, 428 bp, Glycine max
  unsure (1)..(428): unsure at all n locations
aatagtcataacttttcattctgttgtccgatncaggcgcataatatatcgagatgctcgatattgagcaaaggaagctcttgagcaattcaaatggtcataacttttattttggaggtccgattgaggcgcataatatatcgagacgctcgaaattgaataacggaagctctcgagaaattcaaatggtcataacttttgactcggaggtccgattgaggcgcataatatatcgagacgctcgaaattgaacaatggaagctcttgagcaattcaaatggtcacaacttttcactcggaggtcggattcaggcgcatagaatatcgagacgcccgaaattgaacaacggaagctcttgagcaattcaaatggtcataacttttcactcggaggtcggattcaggcgcataatatatcgagatgctcg

SEQ ID NO: 238279 - DNA, 216 bp, Glycine max
gaaaaaaaggaaacatggcaacgcaacaaataggaggacgacaaaaaacgaaaagggccgaaagacaccaaaaggaggaacccacagacaccaggcagagaaccacacaacaaaaaggcaccataccccagggggaaacgcaacaaccgacgagccggaaaacctgcaaggaaaggcacagacacaaccagaccacaccaaacccaaccccgaaaa

SEQ ID NO: 238280 - DNA, 459 bp, Glycine max
  unsure (1)..(459): unsure at all n locations
ttaagcactgcggctgcaagctaggcacaaatatggtttattataatataatagnantatatatcatgcgagacaatatagtatttttccttaaaactatnttttttatactccacccaccggcaaggcaattcgagacaaacgtaattacttattgggtgttgttaggtgcacccaatagtattgttgatgcatctagcattttctcatttttttcaattntgtccttcactcttacggaagaccttcttccgtaagagttctaacttttatggaagaacttcttccataacaatcttatggaataagttcttctgtaaaagttttttttttttttttacggaagaatttcttccgtagaaatcttatggaagaagcatggaagatgttctttcgtaacacgttttttntttatggaagaacctctttcgtagaaatcttacgaaagaacttnttttt

SEQ ID NO: 238281 - DNA, 393 bp, Glycine max
agcgaggagcagacaatggtatattctttttgtgtgagggggagcgttacgtctactgttgtattttatcctatcgacaacaattaaagtggttttagttgaatctactttggcatagtagagttaggcttttcccctatgtaatcctgttttggtctctctggagccaaacattacctttattttattcagttgatcgtgtgcagcgaattgaacaatataaaccatagagtggagttgaattgtgttgtcacataaacttcttagtatatttttctgaaccatttcctatatgaattactcataacagcatttacttatggatgatactgaataagcgtcagtgtgtatatgatgacatggtaactagattttactgggtctcccatgtat

SEQ ID NO: 238282 - DNA, 345 bp, Glycine max
  unsure (1)..(345): unsure at all n locations
tgcaagctttgagccaaatctaactcaccattatatcttganccatggtgagaatgtcaatccttacccctcgaaaagcaaaacaagagaggaaaatttccaatcaaagaaaaaaaagagaaggaaaatgtccaatcaaagagaaagcaaaaaaaaagagagaaggaaaatttccaatcaaaggaaaaaagagaggaaaggaaattcccaatcaaagagtgggagaaagcgaaaagaaaagaaagaaaattcccaaccaaagagtgggagaaaataaaaggaaggaaagaaagctcctgatcaaggatcgaaagaaatcaaaagaaatgtgcagaaaggtctttg

SEQ ID NO: 238283 - DNA, 249 bp, Glycine max
aaaagaagggaaagggggagaaaagaaaaaggagggaaaagggacggagaaggaaagggaaagaaaggggggaagagggagggaagagagaaggggaaagaagagaagggaagggaagagaaaggatgagaaaagaagggggaaggggaaggagagggaggaaaagaaaggagaaggaagaggagggagaaaaggggaaggagagggagggaagggaaaaaagggaaaaaaaaaaagaggagagaaaaa

SEQ ID NO: 238284 - DNA, 393 bp, Glycine max
  unsure (1)..(393): unsure at all n locations
gaccactccaacatgaacattccattattgaggtatgtgaattctaatggggagtatgtcctattgcaatgtctatgattgcaccaaaggtgccaagcgcaagcatttggttctagcagatcctgaccagncctgtccttgttcttggctgattaagtggaacagggaatttgcatgtgcaaccgactggttttttatgccaaaaatcacacagcaagaaatgctgggttttcttgacagccatactttgtttgggaggctaggaaatcaagttatagttactacatcgaatgtgtacacttctgctagtgttctttgcagttctgtaaaaaataactcaaagctcggcattacatacctcattttttatatcattcgttctctatgggtact

SEQ ID NO: 238285 - DNA, 376 bp, Glycine max
  unsure (1)..(376): unsure at all n locations
gaaccctctatggaaaagtgatagcctcgtccctcccttcctgaaaacccactaaaaactgcctaaccccccctgttgatactccataanttattctgcaaaaactgcttaaggcaattacatatgggcctaaatcactacacattcaggtacgattaaccctttgtgcctaactagggtttcgaaacatcacaatagaaacagaccatggaacaatgcgttttcatcattaacatacaacagagacataccttcgatggaagcacagacacgaactccacaaacacgaactcgacaatgtgggtgcagtcacggaagcggagcccagtttgcgacaaacacgaacccacgcagaaggagagacaacaataacgcc

SEQ ID NO: 238286 - DNA, 447 bp, Glycine max
  unsure (1)..(447): unsure at all n locations
gcaagctggcctgtgaaaagaannaaggcttttantatttattcacaccggagcttgggtggttagaaaaatataaaggttgtacttaataacttggtaggctaaaaaatatagtaataaatagaatatttaacatacgaaatatgtagtgatgatttatgaaattaacatttttttaacattatatattcactcattatttaccagtttttaatgtcaagtttgaggttttttttagcttatcgaatacttaacaaggtgggtttaaataatttaaaagtgcatctatactcttacgggaaattatgtctttatctatattgatattagagaatttgattatttatataattgagtctataactaagttggaaattaatattatattagaacacatgaactaggtcaacatttatcaaaatgtggtccaatacttaacaatatctc

SEQ ID NO: 238287 - DNA, 270 bp, Glycine max
  unsure (1)..(270): unsure at all n locations
gaaagggaaacacttgggctgccagatccctccaccttagggcgtaatctatgaaagatccatgccccctttttgcacatgttctatagttgcatcctatccaaaaacattatactgacactgcctaacgaaggcaaccattaggtccttccaagaaaggactcaggaaggttccaagttagtgtaccanggaacagctaccccacgaagactttcttggaagaaatgaaaaagaaatcctcaatctttgcgaggccccccccccccccc

SEQ ID NO: 238288 - DNA, 334 bp, Glycine max
ccatatgctcctcaagcacatctagcagtaaatgaagacctgatggttgctgtggaagtggacgcaaacttggacgacaacaaggtggactggattctaaattctggtgcttttaaacacttatgcgccaacaaagagcttattcaccagattgaggacgctgatgacggagaatgtgtcttcatgggaaattcagctacagctggagtgcttggtaaaggaaagatctctcttcaacttacttcgggaaaaacattatcttgagtgatgtttgcatgtcccttctgcgacgaacctaattctgtagttgctaaatagactgactaaatggttt

SEQ ID NO: 238289 - DNA, 446 bp, Glycine max
  unsure (1)..(446): unsure at all n locations
ggaccttaagcacctgcagcagcagctcaacgagaagagtctttttctttttgnttangcagacccacaatcgctggattctacaatctgatcttcgtctaaagtcttgagcccattagagcatttaaattaaatgcacttcccttcttcatgcaaagttcatgttgataggctagcgtgtcttgctcttcagtagggaagtcacttttttcatcatagtaagtctgcaacaatagagtacaccttttgatgaggatcaatatcttccaaattgtggactacatttattctgcattggatttgacaaatcctaggagaatgttttctgaatgaatgaatctcacacacaatatgttaagtgaaggccttaatagccctcttaattgacatgctagatcgtctatggatgcatttcttcatatatagaacttagatacagatcttga

SEQ ID NO: 238290 - DNA, 404 bp, Glycine max
  unsure (1)..(404): unsure at all n locations
tgcaactgctcatgataaggcatgtagaatttgttgtagaatccgactcgggtctgactttgctctatnttagccaggtgcacaagttggcctaaggtgaactccatggtctaatcttttccctttgggttttngaactagaggagtaaggtttgcatttctctattgttgtcacaaacccttaccttcgtgaccttcttcatgagttctatttcttgttcaaagagcccacacaattgccaccaccacgatccactgaccaccactttccattattgccaaactctaccttggtcaacatgcgttcgtatcagtacccatatgtgcaaaaaatggaaattgaggttcatgttaccaagatgtttgtaacttggtggatacaacctaccagtagtccattttct

SEQ ID NO: 238291 - DNA, 449 bp, Glycine max
  unsure (1)..(449): unsure at all n locations
ccttaagtcacctgcggcatgcngctaaagaaaagcccaactccctctatttctgatttcagactaaaaggtgggcctgttcggctcgttcgctagcgcaattctgaaccgcttagcgcgcattagtgaatttcggcttagcgcggcttttctcgctcagcagatggactgaagcggtgcacttagttaaatgacccttcgcttagcgaacatgcattgctcatccttcttccagattcttcctcgcactcagccgaggagtgttgcgcttagcggatgcctcgctaaacccgaagaatggcttagcgagagggtgaaaatcagcactttaaaacttttgcctaattaacctgaaattgagagaaaaatgattattaaacacacaaaatggcagtactaagtatttattacctatctttaacaaaaagtaattacaacactacaaaata

SEQ ID NO: 238292 - DNA, 441 bp, Glycine max
  unsure (1)..(441): unsure at all n locations
agcttgagacaacactgcggctgcagtattcattgctggccttttccaacctncgtcaccctggttgcccaaattcctttgatctctaagtacaccagccaatacacgttccatttccaaattccatgtaaaataaaatcttggttcctcattattatttcctaaaacttttcttttgtccgtcattttttcattagatgactccattgaagttaatgtcacttattcaacctgcacataacaaacattagatataacctactttattcatttgactagtccattgcacaatcatagaaaatatttcaagcaaagtttttatgcaatagcaaagtacataatagtctatctttcatagaaaaatacaatagttacaaagcactcaaagtttgtctgcaataagcaaatacatttaaaaaagaactatccctaagcaaagtt

SEQ ID NO: 238293 - DNA, 309 bp, Glycine max
accgtagtctatttgtgtagacgtacatctcaaggcaatctgttgtgactgaaccggattaatttattttccctggagatgattggaactacgtgaatagcacatcggttttactagtgaatttccttttactcatatttccgtctaaaaaaaagaaaccattactcatgttggagggcctctatatgtgaatcgataccaaaacaaatgcgaacgtatattgactatgggagggcccacctaatttataatgcgaatgctacaaacagatcgacttataaaataaggttctggttaatatgacaaatg

SEQ ID NO: 238294 - DNA, 446 bp, Glycine max
  unsure (1)..(446): unsure at all n locations
agcttgacttaaacttaggaatctttgttctatcaatctactactagctttaaacaattcaacaagatttgttggaagattgcacattgactaaaatatataatcgtcttgcagatggatatatcactcaatacttttagtattntctctcaaggtatacaaggcattttgagagctttgtatctttacaagaatttacagaaagaataattcacgtagattgttcgtgtcttttatcttcaaagttttttctatatatagtctttttctccaagtatctattatctcacaacagttggatttctcactctaatcttcatctgaagtcttgagtctattggagcatttaatgcttgtatcaaatgcacgttccttcttcatgcaaagntcatgtcgataggctagtgtgtcttgtacttcaacagggaagtcacttctttaatcat

SEQ ID NO: 238295 - DNA, 439 bp, Glycine max
  unsure (1)..(439): unsure at all n locations
agcttgngaggattgatggngaccttgnngtgattattacgaggatatgggctacgngggagtacgtgagctcagttggaggtgggcaaccggggatggtgggtttatgcgcgcattgtggatgtggaaaacttgttgtgcaccatcgcccgaccgccacctagtaccacatgtgatgggtaccccataatcctacaagcttgagatgaggaagtgttgaagggtgaaacttcctgcttttattgttgaccacagagtggtacctggagatatgtcgcgggggtcaggagaccttggggacgtcaggtggggtgctattgcccaaaaccaaacttgaccaatcccgacccaacccgggcatagtcggtcagtgagaacctgtgatgtacctaagcaggcgagctcctggcaggcaacagataaatggaaaacatgacca

SEQ ID NO: 238296 - DNA, 417 bp, Glycine max
  unsure (1)..(417): unsure at all n locations
agcttctctagactcgctctataaatttttaatgcaaaggaaaatggttcttactaccatcttgttcgatggcagtcaacaaagtaccacgatatttgccagttaaaaatgtctcatctacttgcacaagtggcttacaatatttgaagccttcaatgcatgagttaaacgcccaaaatacacgattaagaatcaccctaggagggtcattgtcaccttcctccattgaagatgaatcttgtattttactatggtacctgatacaaaatgttgagcaactatcaaccatatagactggtaattgtatgattgttcccaacttccaaatttcatttcaagggcttnttgtttagatgccatgctttttgtatgaaatagtgaaccaaaccattgatgcatgtcggcaatcaagggttt

SEQ ID NO: 238297 - DNA, 417 bp, Glycine max
  unsure (1)..(417): unsure at all n locations
agctntaggcccaccaataaatatatatctttttttattnttcataaaacaaaaaagtcacattcattaaaaaaaacggctgcatatgttgacaaaaggacctaatatataattttctcatttaagtaaaacaatattttaaaagttgttttatgccactcacttgtcgttgggatgaccctgttttgtttcctagagctaggacaaccattgtcataactgagaaaactagtggaatcttgagaattgatatcaatgtgaaaagaaatagggggaggtgaagttgtaactctataaaattgggcttaggatcttactcgaccccacaaaaccaactagtaaggtgagaagtaagtaagcttagctttataagttctatttaagccccatatcttgtcaatgtgggactaaacacca

SEQ ID NO: 238298 - DNA, 447 bp, Glycine max
gctttatctagccaagatcatacaaaagtgttacaacatatcctaacgatttctaattatatgggccattaaatctatcatgtgttgacagtaattgattagcctgtgaatttcctctggggctgaacacacttcggcattggcatttgctttggctagtagtcgcgggaggtcttgacttctatttaaggtcaaggcgaacctatccatccacatggtcgcttcttgatgcaatgcatcaatcactctccctcttgcttccttctcggggtacgcttgtgcgaagtcctctactagtttttgttcatgggtcaaagactggtttaactcttctttgtactgccctattatagctagcatgctttgctccgtggcttctaagtgctggaccaaactcctcttggatcttgagcaagcagctaactccttctttaagaccatgccatg

SEQ ID NO: 238299 - DNA, 158 bp, Glycine max
  unsure (1)..(158): unsure at all n locations
agctcgggaggtctctcactacaactttctttatgttgtctcangctttttctgactttganttttgtgtgggcttttggtgtttttgttggggatggggattaatgtgtgggccgatggggttttgttgtggctcaagagcgagtgctgctaggttt

SEQ ID NO: 238300 - DNA, 238 bp, Glycine max
gaaacaaaaacaaaagaaagcccccgacggaaaagggagagccgaaacgcggcaaaagagaccgacgccggcgggccgaacccgaggaacaaaaaggaaaaaaagaaaacaaaagaaaacccggaaaaacaacgaaaacagcggacacgcgcgaggaaaccatgcgaacgaacggcaaaacaaaggaacaaggagaccacccccaccgccgccaaaaaaggagcgaagggcacgaaac

SEQ ID NO: 238301 - DNA, 392 bp, Glycine max
ggaccttattcttccctaccaaaaagctctgaaataagtttctagaaactgcttccctcatcaaacctgttaacccttcagcagccaagacaaataataaaggggctaagggatcctcttgtctcaaacctctttgaggcttaaatacctcagtcggacttccatttacaaggatggatattgaagctgatgaaaggcagcctttaacccaaccaatccacctttcatggaaccccattctcctcatcatataaaataggaattgccaggacacaaagtcataagctgtttcaaagtccactttaaacactaaacaagatttcttttgcttctaccctctaacaacctcactatcatcaagactcatgttcagctgcgaccctaacaatgct

SEQ ID NO: 238302 - DNA, 413 bp, Glycine max
  unsure (1)..(413): unsure at all n locations
gctggaccaataagatgatttnnctttgtacacgccaaaanncaggggagaactctaataaaatagctccaactcacggcaaattgtagacatagctaaaaagtgaaaatgatcatgtaggctgagaatgatggctctgaacttaatagtaggatttattaccttatagatggaggaaaagactaggtagatgctgagaactatttccctttggatgatctcctttctaaacttactcttctttcctctattatgaatgttagttttcctctattcatttagttcattctttgctttcataattaatagttttgccctttgcggattcttctaatatttatgaccgaaaatgaatnttttgcatggacctattaaaaaatcatactaccatttccagctaccactattacgcc

SEQ ID NO: 238303 - DNA, 296 bp, Glycine max
cggaatacacacgtgaccctgcttagaggtagggaatgcgtttatcgtaataggcgctaaaatgcacatgtgcagggatcattagggaatcaaatcgggatgtattctgagattttcatggaattataatttgtactataagattataaaaactatttgatggaccaatcgatgtcctaccgcaaatcggatggaaaaattgagcgctcttgatgtcttcgtgtatttaacctacgattctgattcatcgattttgatacgatggagtgaaactgggaacggatattactccccat

SEQ ID NO: 238304 - DNA, 439 bp, Glycine max
  unsure (1)..(439): unsure at all n locations
agcttagcatattnntgacatctatatatttatatgttctgttatcanannnggagctggaatacatttgatagtgttcatggtcctttactctaaccatttgattggatttttacccgaaaactccaactgcaacttgagaaatatttcattataatatgtctcaacacttatcattaacaaatattttggtgtaacctcatgctaattaaataatgattaagctgcagactcacaatacgagattaattcacctctgtaatagtcctaagagagttatgtgcaatttacttaatatgtgtttagtatataatagtctggagtattcctttgggtcgttgtgtaactttattagcttctatgaagtgtttcttctaatatgacctgcttttgaacttattaattcattgtcaatctttatcatttagttctctcttat

SEQ ID NO: 238305 - DNA, 436 bp, Glycine max
  unsure (1)..(436): unsure at all n locations
agcttcnttgaganaacttccttgagaagtttctttgagaaaacttccttgagaagctagagcttagctacatacacccctctaataactaagctcacctccttgagaagcttccttgagaagattcctaaagaagctagagcttagctacacacacctctctaatagctaagctcacctccttgagttgagaagctagagcttagctacacaccccctataatagctaagctcaccctcattccaaaaatacatgaaaatacaaaaaaaaaagtccctactacaaagactactcaaaatgccctgaaatacaaggctaaaaccccatactactagaatggccaaaatacaaggcccaaaagaaggaaaaacctattctaatatttacaaagaagagtggatccaaccttgacccatggtctcaaaaatctaccct

SEQ ID NO: 238306 - DNA, 262 bp, Glycine max
cagctgagcttgtagctaccccatgcacttctctaatgactattagcatcatttctggcgctcaactgctgggagtgggaagccatcttcctaattaaatatcctggctacagcaaggagtcatgtctcctagggctcccatcactggcagcatctatcatacttttctcctaaataccgtggccttcataaagaaattgaagaagcgccggcctgaatttaatggggaggcaactggcctatagatttaaactctccacac

SEQ ID NO: 238307 - DNA, 325 bp, Glycine max
tttaccttgtggaaacgtttagtcagagagaaatcatgaaccctcttgaaggtattcacaagagcttgagtctatggatcttcaaagagaagaaagacttgtgtcactcaatgagatatcatggagttgactcatggcatgagaattgtgataaacagcagtgttcactgtaatcttgcacatctgaaggcttcactcatgagtttctttcagccatcacaccacaccagaatgtgatagtagagaggaaatacagaccttgcatgaggctgctcgtgcatgcttatgccaagaacttccctaaatcttgggctgaagccatact

SEQ ID NO: 238308 - DNA, 341 bp, Glycine max
tttcaagcattgagcttgatagacatgaacattttcttattgaggtcaacctctcttcatagatcttcaaacattaaatgtgaaagatgtaagcatttctattgagatcaacctttaaggctgaacggttcatcatccctcaacctttaagcatgaaagacatggatacttctttttgaggtctgctttccaagaaacaattcatagtctctcaagcattcaacttgaaaagtgtgagcacttcttatttatgttgattgcaattccaagcaggatggtgtcacaatcgttttcatttgatataattcttgtcgcccacctattggcaacatatatagaag

SEQ ID NO: 238309 - DNA, 415 bp, Glycine max
  unsure (1)..(415): unsure at all n locations
agctggagacagaaaagccatgtttancttgtatcncaaangngctacaacctttagtggggataacagagaagagctngtgcgtagtgctcggagacaatggattgatggcaaccgacgaacatgcccaagattaaaaccaaaatcaagaaaagtccgcaaggattcaactttcttaaaggcaaccatattgatggactcattagaatttaacaagtgtaaatgatgaactctacttgacaaatgagtcaaccacaatgctcatgaaccacacattcttcacccataatagactgggcaagatcatgaaatagatcatgcatcttgaaacttgtaatgataccaaactcatttgacttttgctcttgtaaaaatgatctattgaaaaaaattccttaagatttaataaatccat

SEQ ID NO: 238310 - DNA, 328 bp, Glycine max
  unsure (1)..(328): unsure at all n locations
tgtactatgaccgcaaagaaatggagtctttttttgggatcgctccaagcgattttgtctggagttctttgcacaagctggctttccatgtcctgctttgaggaacccttctgatcacttacttaggtgcatcaatactgactttgacaaagtcaaggccactcttaaagggtccatgaaactcaaggtattcacctctttctgctctattatgactctcaatttttgtttttcaatttaacagcactatatatacagtcantaattactaaccatcttctcacttaaagaataccttttaatctctaattttggtcgtaaagctctt

SEQ ID NO: 238311 - DNA, 431 bp, Glycine max
  unsure (1)..(431): unsure at all n locations
agcttagactacgattattatagaattagtatgttccgaatgcctctttattttagatcacaaaatttgtatagcttgctgcgaagtgcgaagagcaatgagggacagattatttgttgttttccgtgttttttttccagatgctgaacgtatttgggttgttcatgtcaatttctttgtgttctgtgaagattcaactaaagggttaccatcatgtttagaaattttggttcttttatattaaaaatggtgttgttttgaaggccgtgattatttggattgacttattttaaagaacattctttgagaaaaaaaaaactttcgttttaaaaaagtgggatagtgctgctgatgttngtgttgttgaggaagttattaaaaggaatttcaaggtaaataatatctctgaaatattggttttaaaatgagtc

SEQ ID NO: 238312 - DNA, 381 bp, Glycine max
tcacaagttttaaatgatctctaaatagattcttgaaatctctctgtaagtttttataagcttttgagagaatagatgagttagatagaagctcatgataagcttttctaagagattcagggtcgtcaaaatttatctcatcttcctgatctgattcaaactcctcagaagctgtatctaccattacgcatatgttggcttcttcatcatcttcattagatgtggtgtcgtccagatcctcctaggtgctcataagacccttcttgtctctaatcttgaagaattgcttcttatcttgactctgttctaggtttgagcattcagacttgaaatgtccaagcttcttgttctcatagcaaatatgaagattttgctttatct

SEQ ID NO: 238313 - DNA, 364 bp, Glycine max
  unsure (1)..(364): unsure at all n locations
agcttatgctgcaaacatgtatgaggagactctccttatctatcaaaaccaacaacaggtagaataattattgtatctttcaagcaaacaagatacatatccagggttgggagaaaatcactctataatcttgagatggggcgaagtccctccacaacaaacaacagcgctgtctccttcctttccagaaatgtctgctaggtccaaagcaatgccaatatgttcnctctctccaataacagcaagcagcatatagcatgtagtcacaactaaagacaaacaagcaacttgaggctcctcctcaaaccttccttagaaagagtttagtgagggcaaatgaccactccaagaatatgccaatttt

SEQ ID NO: 238314 - DNA, 368 bp, Glycine max
  unsure (1)..(368): unsure at all n locations
agcttanaaagggagcttgagnggttgatttgtatgacacaaagagagagagaacgcggaatggaaaattgaaggaagaaaggaagagaagtntaactttgaagtgtgtctcacaagtttctcattcatcaaagttatgacaagtgttacacatgcttctanttatagcctagcacatgggaagcttccttaaaaagctaaagggtagcttgcttgggaagctagaggaagaaagattccttgagtagctagagggggctactcacacccctccaatagctaagctcaccctcatgccaagatatatgaaaatacaatgggaagcttccttgggaagcaaggaaggtagcttcctttggaagcaagga

SEQ ID NO: 238315 - DNA, 279 bp, Glycine max
cggacggggcctaggcaaggagaaagcctcggacgaaagaagacgcccatgtggcggcggaagacaccaccagaaccacccggggaaacctaacagaaagaaagcagaaacccgcgaaggatgcaaagaggggagacgaagactgcaaggagagaaagaccgcgccagcaagagaatcacgagcgaccacggcagagaataggaaaacagcaaggccaacagaaagcggcacacccgaaggcaacacccatgagatcccggccaccataacaccacaac

SEQ ID NO: 238316 - DNA, 444 bp, Glycine max
  unsure (1)..(444): unsure at all n locations
gcttgaaaagatatttgggttcttttatcttctactttnattaaggactcttccctccattgtaaaggataattgaaataattagaccttgacaggttcatatcatgtgtttctacaacgtttattttgcattttgaatttaacaatgataaataaaagtattatttagattattagataataatctattgcattaagactaccaacaaaatttcattcaagcctaaaccaaatcacatagatataaacattctaaagtatcaattaaccatttacatcatgatactcgattgtattaagactaccaatgatatgtaaaaaaaaaaactaccaatgttatttcattcanacctaaaccaaatcccacatatataaaaagtatatattaaaaaagaaaaaataaagccgtctaaaacatcaaataatatcttattaccttttatg

SEQ ID NO: 238317 - DNA, 352 bp, Glycine max
  unsure (1)..(352): unsure at all n locations
caaagagtttgagagattttgttgtgtgacaacctgcacagaatcgagcttgatgaggaagccgtcctaagagctcgaaatgagtttgtgagtgattgtgaggttctataggtggaggagaaatcctcaccacttgtatttcttcaatccttcatctttctcttctattggttggaaaggaagtttcccagttatggagagctaaatcctctgttggttcttccttgtaggcacttgatgtatatatctttttttttatctatataatgatgntgtgggtgttcactgggctatcagaacttcattcttaccatgcttttcccttgatacatagatgcatgtgtttttagga

SEQ ID NO: 238318 - DNA, 360 bp, Glycine max
tcttcagtttaatttaactgcgagaacaaatcaaaatctaaaccagttctgatgaaatatcaatcacaatggcaagcaagtgatgaccacataaaaaacaaaagaaagtacatatgatgatgtttaacggattgtggaattgaaactcaacaattgaacaacaattgacataatatcagtgctaattattgaaacggcggagttttacgaagatgtggaaaagaaaataacactcaatattaagagatttaagctgacttaattctattaatggtttaaaagtacttgcgtataaaacttgaaatataaccttatttatactatcatagcctattaataaggaagtatcatgaattgaaa

SEQ ID NO: 238319 - DNA, 319 bp, Glycine max
  unsure (1)..(319): unsure at all n locations
agctgcaatggagcttacatcattgttgtatgtctgngnangaacatagggggtgcagtgaccttgttagatatccctggtgggagaaataaagtggttaaagagttttaagcatctccggagggggatgacttataatctttaattatccacggtcagtgcattgatggtgcccatgtttcatgcttcgcatgacatggaaatagtataaactttgttagtaagtacttgcagtttctcatgaggaggaatacttgtacttggaggcatgtcactcgatatggaactccttgatactctggctgatcactatgggggg

SEQ ID NO: 238320 - DNA, 443 bp, Glycine max
  unsure (1)..(443): unsure at all n locations
agcttgtattgagagcatgcattgngctctctcaaagtattgtnttgntcattngntntgctatgtcattttgttggggcgtatgtctcacggttctatggcgagctattccttcatttgcacataactcattaaattgcctattgcaaaattccatcccattatctgtcttgagttgtttaacctttttctctgtctgcttcttcactatagatttccattgcttaaacttaaggaatacatcactcttttgtttcaagaaaaaaaattaaacttttcatgagtagtcataaatgaaagttaacatttacctcgctccaccatgggaaggaacacttgacggaccctataggtctgaattaatataatcaatagtcccttgccttttgtgaacttcatcngctaaatttactctgcatttnttttttcataaacacaatgct

SEQ ID NO: 238321 - DNA, 382 bp, Glycine max
agcttctaagacatttttacacagtctgttcttgttgatttgagaataataaactttggtctcttgctaagcaagaatggagcgctaagtgcaattccaaccaaagaaggaatcgcgttgagcgcccataggtgcgctaagccagactccaacagagagggaattgcgcttatcgactagaggtgcgctaatcgagccctagtgcagagggggctgcactaagcctaaattcttatgctaagcgcaagaagtggacttcggcttaccgcgacaggctcgctaagcgaaatctgcaacttataaatgcgttctcagtgtgaaaaacatgatattttactctcttcttctccaaaacaccacccaaacccttagacctcatttt

SEQ ID NO: 238322 - DNA, 475 bp, Glycine max
  unsure (1)..(475): unsure at all n locations
ctcttacccgcatccttaagtcacctgcggcatgcaagcttataagaacaaaattgccttaatcatttcttaatatgcatgngaatnaggacgcatcaacaagaatcaagccaaggctattgtgcaagcaatcaatggggcaaaacacaccaaatgattataatgatggatggctcaaattctcacaaaggtaaaatcatcactttcaaattgagctttcaaaactatcatgacatgtagagaagaatcaaggatttcaagtcacaaaatgtcaagaacttttattttcaaaacaattacccatttcttgaacatatcctataattcaaagaaaaacatgcaaagtcgtacgtgcacacaaaatngacccaaaatattaaactgaaaatccgacgaaactaacaacattaacaaattaacacaactaacaaattaacaaaaccaacaaaactagcanaaccaaagaacacttccc

SEQ ID NO: 238323 - DNA, 387 bp, Glycine max
  unsure (1)..(387): unsure at all n locations
agcttggccaagatggctatgtgttttcttttatatgngcaaatatgggagtaggtggggtgttctctcacctgagctccccgaagaactcatcgtacatggagggggcaagctccacgttcctctctagaagcatgttccggagatgaacgatgtcctagtatttgggatagcaatctctaaggctaaccgagaggagtcccatgtgggctccccgtcttgaggctggctgggcacgactttgcatttccttgaagccatctgcaaaataaagggacaacacccatattaatgagatgagaatcctcgtacagggtgtgaaaaaaaattgttattgttgtgggcgcttatccgccacaacgtgcttagcggccatgcatgaggtct

SEQ ID NO: 238324 - DNA, 322 bp, Glycine max
ggagagctatgctgagaaataatggcctgctattgtgtattacatattggagaaaaatgccacttgaatgtttttgaaagagtgaatttgactggtgtggctattgggtgatggttaaacttgaccctgaaactcaagggactactcatgctctgagagctattatgttggattgaccaatgagatgcgaaaacatgagttgctcaaatgaggaattggtgtgaagcacctgatgcaataaacaaaatcttgataatgttgcaaaacaatacagggttggctactgtgtatgaaatacaacgaatgttccttataggatgat

SEQ ID NO: 238325 - DNA, 432 bp, Glycine max
  unsure (1)..(432): unsure at all n locations
ggatccttaagcaccgcggctgcagctcaaatagagcttgagggatatatttaagggacttaatatncaaaccaccattcctccaaagggaacaaaccatatcccaaggcacaatcgctagcttcctttgggagtgatagctagaccatatgaaattgttgatatttttatccagtgagtttagtaatgcaggaggacacttataaatctgaaaacaataaaccatcataccttgtatcaccaatggaactaactgaactctccccatgatggacaacatcgccccctttcaagaagctaacttggtgaggattttatcaattatgccctgaagatgcacttttttaagtttccttttaaaaatggggacccctgaatacgtaaatggtagcaaaccttggcaatgcccaagaaattctagattctggtttt

SEQ ID NO: 238326 - DNA, 408 bp, Glycine max
  unsure (1)..(408): unsure at all n locations
agctntatggggagaagggagaatggctcttggcttttataacagcnggacatgatatatgtcaaggtgttggtttggccagtggttcaaggataaagaggatgtcctatatcatttccatgacacgcatgcaacaatgatgattaggaaattttatgcaaaactggtcatgcatgcacccatgcggacactcaagcatcaagttcttatggtcatgtgacactagggtttaggattcattttctcctatttaagtcaacccagtgtttccaaaatacactcctttatcaattcatgcattcatctgagtccattatgggtgtccgggaaaattttcacagcattcaccctttaggtgtatacacattttccaacaaaaaccttttgttttgatcgatgaatttttgt

SEQ ID NO: 238327 - DNA, 457 bp, Glycine max
  unsure (1)..(457): unsure at all n locations
accttaagtcacctgcggcatgcaagcttgacaactcatatattgtttattgtatcacaaacattatntaaatgtaaataaaaagcaaatgaatcacaaaacagtaactaatcattnttctttttgatatagaaattttttttagctttgaatagatgccaatcctaagcataaagtattataagagcaaatggtttactatcaagtcaaagaattgtagtaccacttacccatgtgatagttgttagcctagtgaattcatctggagaacctgccctatgtaccaggatttcagccatgcgaccataatctacagacttcaagagtagcactgctcgagtcagaaaatgataaatgaacaaaaaactttgcttttgtgtcaaagtagtagttgaaaatgaaccacaactctgttaattaatcaatacaagcacaagctaacaggtatatcaaccct

SEQ ID NO: 238328 - DNA, 389 bp, Glycine max
  unsure (1)..(389): unsure at all n locations
tgcggcatgcagcaggctgtacagagatacttttttttctatnggnacacacgcaaaaggcaaatttcagacctcntccacaagctgatttgccaatttgttttctagaaatcgattaccaaagccttgatcatgtagctccatatggagcttataggccttggatcttcttcataaatggaggttttttgcttcttgataatgaatggcagtggtatatagaatgagatagatgaatggagacgccactccatgtgcaagatgagattagaagaatttcaccaccatttgaagccatggataagagcttgaaggtagaagaatatgaatgatgggagaaaagagaagaccccaaatctggttcctctaagaagctttacctttgattt

SEQ ID NO: 238329 - DNA, 429 bp, Glycine max
  unsure (1)..(429): unsure at all n locations
agcttaagattagacatttgatgtatgaattttgcaggaatatatactnnaattatggagatatgctatgatgccctatcaaaaacaataaaggtaaaaaaaaatatgaaacttaaaaaatgaattaaaacaataataaaagtcatatctttaaaagaaaaatgttaaaaaatggcatagatataatttttttaaaagttttcatttaaattaatgagataaaaactaaaaatatttacctttgtaattcaatattaacctgttcatgtttttctctatagatgataataatttttaccatgaaaacttcacatctttgcatcttgtgtattttcaatccctcgaattcaaatatataaacattcattcatctaacactttcatcatattatgtataaattatatacctatagtaagtatagatttctc

SEQ ID NO: 238330 - DNA, 413 bp, Glycine max
  unsure (1)..(413): unsure at all n locations
caagcttgcagatttggtcttcgccagagaattgatctaagtgggtctgaaaagaggcaaatttaatcatcctgcttgggcgaatgagaaaactggggcaattgaagaaggtgaggatgagggagaaacccatgctgtgactgccattcctatacgaccaagtttcccaccaaaccaacaatgtcattactcagccaatgacaaaccctctccttacccaccacccagttatccacaaaggccatccctaaatcaaccacaaagcctgtctaccacacttccaataacgaataacacttttagcacagaccaaaacaccaaccaagaaatgaattttgcagcgaanaagcctgtaggttcaccccanattccggtgtcatatgctaaacttgctcccatatctacttgatact

SEQ ID NO: 238331 - DNA, 232 bp, Glycine max
tgcccacaccttactgtcttcgtggggggtatgaactgcttgacaagaaatcttatggaggagaagacctagcgttgacatgaggaacattattttactgagaacccaacactcaacatcgatccttcaatctctatggcaagacatcttgagtggaagatctcacgcacatagagttatgaccaaatgacgtctgaagcggtacaagacattgtctacaaattgtgagttc

SEQ ID NO: 238332 - DNA, 404 bp, Glycine max
  unsure (1)..(404): unsure at all n locations
acttttgagatgatttatctttcaacttttatgaacaanatatttcttctctaggtatgtggccccagtggtcgctggtatctggcaaacagcgggtctgtgcccggagatcttttacttataataggaaaggcacttacccatgctactggtggcctatggcctgctgcatcatataaaggctctcctgaatattttttgagtcctaatggcggaggaaggtaccaaataatttttttaaccaaagtcttgtatttgtgatgactgataagattccaaccaacttattaggtactttcttgagctttgtgactgtaggacttcttttgcatatagactcatgccacagggcaatgctatattatattgttccctaattgcagcagctggccatgtatttccca

SEQ ID NO: 238333 - DNA, 394 bp, Glycine max
  unsure (1)..(394): unsure at all n locations
actaagctataagaacaaaattgcctcaatcatttccaaatatgcatgtgatttatgaagcatcaacaagaatcaagccaaggctattgtgcaagcaatcaatggggcaaaacacaccaaatgattatgatgatggatggctcaaattctcacaaaggtgaactcatcactttcaaattgagctttcaaaactatcatgacatgtagaggagaatcaaggatttcaattcacaaaatgtcaagaacttttattttcaaaacaattacccatttcttgaacatatcctataattcaaagaaaaacatgcaaagtcgtacatgcacacaaaatngacccaaaatattaaactaaaaattacaagccttaaatgaagaaccatgatatcaccatatc

SEQ ID NO: 238334 - DNA, 410 bp, Glycine max
agcttaaggctgaagcaaccagctcgcttgtcgatttttttacttccgaaggaagcaagcagctcacctgggtgagctgctgtgcaacctccacccctcattgcctataaatacgcgtgaggggggctgacgagaaggggccacctcctaaaatcaaaaggcttttaatgaaattagtgagaaagaagataaatatgaagaataagcatgggtgaggcatcttccgaacgttttcgagatcgattccgtgatcatacttcaccgatcttcgttcgatcttcgctcggcgaccggctagttttactcttgaagtaggaactcaatatgtgcaccactaggggaccactcttgctttccgcatcttcatttttaattttctacaaccaggtgactcatttccttgtgaaagc

SEQ ID NO: 238335 - DNA, 386 bp, Glycine max
  unsure (1)..(386): unsure at all n locations
tgtgcatattaagaaaaattgtgagcgatgggaaataaagaactttaatgatagacatagtcatgatttgttggaggangattattattctctattacctactactttcacatcggaggatggttgtaggtgatattntgcacantgagaatcttagaaaagtagggataagggctcctcatatatttggttcattagctaacattatttgtggttatgacaagataagatggcgtaagaaagatcttcacaaccaaattgcacgacacaaagacaagacgactctgatgctactaatgcattaagagtacttgatggcttgatacagatagaccctatgatgtttgtagacacataanggacatgatgacatgttgcacatttat

SEQ ID NO: 238336 - DNA, 381 bp, Glycine max
  unsure (1)..(381): unsure at all n locations
agcttgcctcanagagatccaggagagacttggcgttttaaggaaccacttccgctcccgaatatgacagccatcgttttaggagcgctgataaccagcaacgcttcgaagccatcaaagaatggtcctttcttcgggagagacatgtccagctcagggacgacaagtatactaactnctaggaagagatagttcgccagcggtgggcatcgctggttacccccatggccaagttcgacccagacgtaatcctcgaaatttatgctaatgcttggcctacagaggagggtgcgcgagatatgcgatcttgggtgaggggtcagaggatccccttctatgcagacgcccttacgcacaacttgggaaccctttattgctgga

SEQ ID NO: 238337 - DNA, 305 bp, Glycine max
tgacaaggtggtcaacacccgaaatcgaacttttcaatccattctttgtacccttagtggtccccacttgttttgcatgcttttattatcatttcatttacttttcgtacccccttgtgacgtgcttcagtcatttatttaagtcatgttctcgcctaataaaaaataatataaatttccaccgatcattcatattataacatcctttaatttctgttaaaatgaattccgaccgttcggtcatgccgtaaccacgttttaaacaaataacgaggcgaaataattatataataatcaaaaaatat

SEQ ID NO: 238338 - DNA, 413 bp, Glycine max
  unsure (1)..(413): unsure at all n locations
agcttataagggccgagagggacaaatgattgattgtatttatggngttagaacggacgttaaaggctcgtcataggtcgaagagatgtttgatggaacagcctgaccaaaacagaaaataatatgctgttaattattgaccaatttagcgagaaggcgaaccttgctgctagtaatgggcatttgctacaagatgaacatgcaaaggtatcatctctgcaaattgaaaggtacccagagaaaaggtgatagagttgttgcatggggaaactattaaatgcatgaatagattttctctcactctgaatgagaagtcacagatttcaaggatgttagcccaagccaaggtattggctaacacatacgtcggtcgtgacgacttcaccatctttttattactgccccccttgccc

SEQ ID NO: 238339 - DNA, 360 bp, Glycine max
cttatgtacattgactatgcctataataactaacaagaaatgacaaagacatggtaaatatacagcataattagctaacacaaacaagccaataccaagtcatgttatttgcagtttcatcttacaaatctcctgtcgtaaaagtatgcacctctgtatatggttcaacacttgtattatcataaaatttgtttgtcaattgagttagcaatgtatgatttgactttaaatttcatcaactactgataaacgatgtataatctgttgtgcttcacagctgtctacacattgatgtggtttccgtggctataatttacgagttctgtattggacaattcataacttgttggtaacccatga

SEQ ID NO: 238340 - DNA, 347 bp, Glycine max
  unsure (1)..(347): unsure at all n locations
agcttaacgggaggaggggagatatttctcttgcaccaaaaagataagaattctggggctgaggatcctatagataccggtgtatagaaaaacagaagcctaagtgcaaatatatctccttgccttattccttctgcacttccttctatggaggccctggtcctcgaaaccagctaataaaatctcccccctaacaatggtgctctcgctccttgaccatgaccgaaccacctacttctttcgaccacaaaatggaaaagcttctcgtccgcctcacccaccaacaaattatcctcaccagcaaaattgacgatctcatacatcacngtttccctttgataccaccc

SEQ ID NO: 238341 - DNA, 363 bp, Glycine max
  unsure (1)..(363): unsure at all n locations
aattgcgctgagtgcacatgtcgcacttaacttgaacagacctctggaacataattggcttagcgagcatgctcgctaancccaattccaaaaataacaaatacagagaagaaattgctcttagcgagcacggctggcttatcgcatgaacaaaagttcagaaaaacacaagtgccttgggcttagcgagacacgctcacttatcccagggttattcagacaatacggttgagtggcttagcgagcagactcgctcattcaccaacagaaaactgaaaagactctaatagtctgaactacgcacacttaactcgctaagctcggcatgcctgctttgcgagctcatatgaacatacaaaataa

SEQ ID NO: 238342 - DNA, 397 bp, Glycine max
  unsure (1)..(397): unsure at all n locations
agctntgcggattaggtcttcgccggcaaattgattgtaacaggtttgaaaagaggcaaatttgatcatcctactttgatgagtgagaaagttggggcaaatgaagaggatgagaatgagggagaaacccttgctatgactaccattcctacatagtcaaatttcccatcagctcaacaatgtccttacacagccaataacagtccctctcacccaatcatccacaaaggccatccctaaatcatccacaaagtctgtctaccgcacttccaatgacgaacaccacctttagcacaaaccaaaacaccaaccaaaaaggagatttgcagcaaaaagcctgtaggattcaccccanattctggtatcatatgctcccatatctactcgataattcaat

SEQ ID NO: 238343 - DNA, 413 bp, Glycine max
  unsure (1)..(413): unsure at all n locations
gctttcatactgtcgtcaacaaactacggatggtcggtatatcaaaattaaacttctattactgatgtttgtaatgtcatagattaatttaatgtattacttcctagtgttttactttgtaatgggtgaatattacgtttgtggacttacccacgagtcaaaatttggtgcacggatccgttttagcgaatacaagtgaaatgaaaaaaataagtttggatctgtttaattagtaaaacggtgctataaatngatccgtgattntctttatctgactggtgcttattctgtatttgtgtgagtaattctaatatttatagcaacttaattggaaagcagctgtattattctgtgggtagaanaatgttgcattggatgattatgtggtgggaataaataactaatctgttatg

SEQ ID NO: 238344 - DNA, 379 bp, Glycine max
  unsure (1)..(379): unsure at all n locations
agcttagcaaatggacctagttgntgctcattttcattgtatcttctgtaatactcatcacctctatcaaatctaataattttcacctttctgtctaattgtctttctacttcattcaagtaaatttctaaggcatccactgcttgagatttcttatgcaataagtagacataaccgtaacgtgaataatcatcaataaaggtgataaaatatctttcctttccataaatatcagtatgcacaatttcaagaagctgagtacttcttggagctcatttctttgtatgttntgtttgtttttccttaatacaatccacacaaatatttagatccctaaaatctagatcaggaagaatttcattctttattaaactttctt

SEQ ID NO: 238345 - DNA, 208 bp, Glycine max
  unsure (1)..(208): unsure at all n locations
tacatggtcgaaccacgttaaaactatgtcttctctctcttctcattattcctttctcttcttcttattgctctatactaacaaccctatcttcattctcctctccctcttgtcttttcttcactcattcatgaatccgttatgcatttntttagaaataaatatattattngtagtatagtgtacgtcaatggatcgaaacacgtta

SEQ ID NO: 238346 - DNA, 396 bp, Glycine max
  unsure (1)..(396): unsure at all n locations
agctgcagctatcaccctaggcgctctagttcatttggttntcaagttggttccttgtgctaagggggcttcttgtattgagcgataatgtcgccttgagtgggactggtgcactcggtgtgttcccatttttcaattatttaccaggcctccctgtgtgtcatttctacaaaaaaaaacattgtaaattaattaactttaacattcacagattaaaacccagaagaaactaaatcccaaatattttaacacaaaagatatattataagagagaataaaatagataattattatgtgatttaaatataaaaattatgtatgcataacaattatcaaaaatcaagttaataaagacaacgtatcggttaatatattttatatttaatgaaatgaatt

SEQ ID NO: 238347 - DNA, 416 bp, Glycine max
  unsure (1)..(416): unsure at all n locations
tctgtgcatcggatctgagcatatcgacctcgccaacaatttcttttcttgtggcggcgctccagcccatcatcctaaactttgtcccgttgatctatatctgatttatatataaaatttgggaggttatcctcatgatctgtaatgtctggtgaagaacctgaatgagaaaggagaaggaaaaagaagagttgggagattaaggcggacaaaaagatacatttgtgataattcttagttatcaattcattaaaatcattaacacggttagttcaaaacaaatagatggaccatttntggtcttcttttaacataaatgactaaaataatctttctacaagataagaattaatttcttaaaaaactatataagtgatttgacctttaagaatgggactaacccaaagaaactgata

SEQ ID NO: 238348 - DNA, 394 bp, Glycine max
  unsure (1)..(394): unsure at all n locations
agcttcacattaggatccataggagtatctttaggacgacaatcaagcatgccggtctcggttaagatatccaaaacatacttccattgggaaatgacaatgccagaggaggattgggcaacttcactccctaagaagtatttgagtggacccatgtcttttgtctgaaactgactatggagacgagatttagtcaaagaataccctcaaaatcattgtcaataatgacaatgtcataaacatagacaacaagctagatgcaacgactagatggagaatggatgaaacacaccgagtgattagtctcacaatgggtcatgtcanactggagcaaagcagagctaaaacggtcaaaccatgcatgaggagactacttcaaccatagagagaacga

SEQ ID NO: 238349 - DNA, 315 bp, Glycine max
  unsure (1)..(315): unsure at all n locations
gctcaccttctggtcctctcatagtggtgatgagaaacatgtctctatttcatctcccactcaacgtaggcctccggatcattctttcctttaaatggaggaatgttgagtntaataccatcaattctgttttgtctaggaacaccatcattccctcttctcctcctttcttcttcattatgatctctattctccatttgatccaacctctcatggagcgcatcatctcgttgtttcattaacctctccaaatgttgcatcaaagcttgcatttggaattgcgaaagccccactccatcattangattagtacct

SEQ ID NO: 238350 - DNA, 251 bp, Glycine max
atttgacttcccaagagccttctcaccattagcatatcaccctgcatagcttactcctcaagctcttcttccacatgtatcttttcactgatttcaaacacactggcgagatcttcatctgccttcatgaacatggtcctcctcggtagacactcacaagcaatatgttctatgcctaagcatttgaagcactttatgtgattggcaccaatgctgcatgatgaggcaaaattattctatggttcaacact

SEQ ID NO: 238351 - DNA, 324 bp, Glycine max
agcttatgaaaaaacatggtatatattatgttgattaatctagaagcaagcagtgtcttttaccagaataacagcatctctggctgcaatagtgagaatatcagcgcaagaaacaattccagggcactctgattcaactatgctcttgatcttatcaacaattcccaagccttttaaagagtggatgttggtagcggcgttcttctcacctttaagtgtgattgtgtcatcaagcaaaactgatccatcgcagccctgagcccaagaatgtaacattttgttagtggtatttacttctttctcattaaaatcatattggctttc

SEQ ID NO: 238352 - DNA, 196 bp, Glycine max
gaatgagaaatgccatacagaaaacgtccgattgattctccgctttattctactaaagaaaagatgtttgtcgaccattataatatttttcatcacttttcgttttcaacagggctacggcacgaccgaacggtctaaattcattataaccgaagtttacggatcatacaattctaaccgttcggtggaaatttat

SEQ ID NO: 238353 - DNA, 362 bp, Glycine max
  unsure (1)..(362): unsure at all n locations
agcttcaaccctntcctccaagcgctgccttggtatacctaccaccccattcctgttttgcttcactcggtctaactcttatgccaagatcttgaccactttttctacacttgcaatggaggggtagaatccagaaaacagatacggcttctttcctcccagcgggcatcctatcgcaacctacccnttcacgggagggcgacgtgagggcgacgcgagggctcacgggtgcctcttccatgggaggaaaatgtgcggagtcaccaccaacgttaattcaaggaaaacgtcgaaaaaaacggaaaggtgtggtctacgaactntaagtgtgaaaggttccggagttgtatttacacatgggg

SEQ ID NO: 238354 - DNA, 403 bp, Glycine max
acgtgacctatgaaactaagcttttatccaggcaattcttggtggtgaagctccttctttcttggcttattccctagtggatggtgcctcccctctcctcttctcctttgccttccgctgcatctccatagtgtaaaatcaccattgaaggacctcattgaagctcaaagatccagcctccatagaagctccacaagcaagcttccatcatgatgtttttaatctaatttcaggaattaatgaagcattgggcttgaatccagaattgggcttgaacttgaagaggacagactaatttattctacaaaattaaatcgtatcttatctagatattatttagatttgatctcatctagatcttatcttatcttatcttatctagaattgattcgattctacttat

SEQ ID NO: 238355 - DNA, 375 bp, Glycine max
ggagaggattattgaaataaatatgaaaccttcgcctatttattaaacaatttaaacttctagaattattggcggttcatgataaaggcatccaagatttgactatgatcacaaatcccccttaggcatgcaatgagacatcctgagaagagctattgtttcctgcatttcctagatggttcctgcactctcctttttcattcaaaatggttaatctgagatactaaattatatcctggaatgtatcttctctttggctttcacaatgataaatttgaagggtcaaatcatcctagaaagagtacagaaacaattgggaatgcaagaaacccaaccctttagagggaggaggaagacattctacctcgtcattct

SEQ ID NO: 238356 - DNA, 391 bp, Glycine max
  unsure (1)..(391): unsure at all n locations
aggcttcagcagcagagtgatatatccaattattttcctgctcatcttggtgggtcagatttagagcgatttcctggttttgctcttgctcagaacaagagctccaacattcagcagatgatgcagaatcctggatcagattttgaacgtattctggaacttcagattcaacaacgccagcttgagcttcaacaacagcaagatatgcatcatcaacaactacttcaccaacaaatgaaacttcagccccagcaacagtctcaagttcagcagttgcttcttgaacagtttatgcatcagcagatccctgatcctcaatttgggcagtcaaaacatgatatntctagggataacctggtagatcacgttcaaatgaggagatatgtgcatg

SEQ ID NO: 238357 - DNA, 389 bp, Glycine max
agctttagcctttaggttgtgcatcatgttgttctttctatctctaacatcaatcttttttttcgtagtttctctgaggtaatcttgacttctatatctttctccaggttagtttgagcttttcttattgtcttgtgtttttggtatcgcaatagggaatttttacacttcctctggaaaaaccttgaaaatgagacgttgtacaagttatatttttataaaattgatgttattattgtgatcttcgctaaacctcgatcacattggcatgggtagaatttcaaaatgacatttccttgtaatagaactcgaaacattccttatcccattttgttttgatagatgcaattgaccccgaatgtcatgctaacctcatctttttaaatcta

SEQ ID NO: 238358 - DNA, 417 bp, Glycine max
  unsure (1)..(417): unsure at all n locations
actaagctaccttgagatttacnaacttcaaactgtgatggtcaaaatgaattatgaattcccttggccagaaatagagctaccatgtccacaaagctcttaccaaagcgtacaactctttgtcatacgtggaataattcaatgtcaccccatgaaaagtttcactaaagtatgcaactattttagagtcttggatcagtacaacccctattccaacaccagaagcatcacattcaatttcaaaagctntatcaaaattaggcaaacaaagcaaagatgcattagccaacttatctttcaataaattaaaagttttctcatgcagattagtccacttgaacaccacattctttnttacaagttcatttaaaggtgcagcangtgaactaaatctcttcacaaatcttctataaaaac

SEQ ID NO: 238359 - DNA, 223 bp, Glycine max
atgccacatggctcaagatggataagtctatccactaagtgcatctctttgtaaagataacatactacgtgtgctgattgagctctaaggtatgagaagatgctttatttttatacagagggttagcttataccacttaagtaaatgaattcacggataatttgatttattgccaattacagacttttatactactcactaattaatttaacctctaaagcca

SEQ ID NO: 238360 - DNA, 281 bp, Glycine max
gggagattgttaggaaatttataattcctaattaattaatatgggctacatattatattacaacatttatattagttatttacatttaaataggttcaatataaagtaatctatctaagtgagcccattagactgtcataaaaattgatatgggcttaatgagcggacaccagtttggcccattatgggataatgggaaaccctaataggtttaaaacataaggcatgaatattgtccccaatacaccaaatcaataaatatgttctcctctccccatctg

SEQ ID NO: 238361 - DNA, 307 bp, Glycine max
cacacgccaagtttcctctgtactctagatctagtctacgatgatatatattcactttctcatgggcaatggggaataaagaagggtaatgtgggtctttagttcatataaaatataaggcggtgtatgattatgaagtgcgggaagtaataactaatggcatactgattatcattgcctaaaacaattattagatctcacaacccaaaccagaagttatataatgtgctgggataaaaacttcagacttgataggcttaaatatgatatttggccctgctatataccccgttttggcatctagtcc

SEQ ID NO: 238362 - DNA, 397 bp, Glycine max
  unsure (1)..(397): unsure at all n locations
nagcttaacggcattgaggcggagatatttctcttgcaccaaaaagataagaattctgttagcagaggatagtattaataagtatggaaataaaacccgaatcataattgagaaggtatttccttgccttattccttctccccttccttctatggaggccctggtcctcgaaaccagctaattagatctcccccctaacaatggagctctcgttccttcaccatgaccgaaccacctccttcttccgccgacaaattggaagagcttctcgtacgcctcagccaccaacaattatccctcaccagcaaaattgacgatctcatacatcacgttgcccctttgataccacccggcccgtgcttgtctaccttacctcgccattccacggcctggaccc

SEQ ID NO: 238363 - DNA, 381 bp, Glycine max
  unsure (1)..(381): unsure at all n locations
acctctggaacataattggcttagcgagcatgctcgctaaccccaattccaaaaataacaaaatcagagaagaaattgcacttagcgagcacggctggcttagcgcatgaacaaaagatcataacaacacaagtgtcttgggcatatcgagacaggctcacttagcccagcgttatacaaccaatatggtntagtggctaagcgagccaatctcttattcacctcataaaactgtaagacttaagagtctgtctaccacacttactcgctcgctcggttgcctgttgtgaagctttatgactcacatatacatgagatttaatgcttctaagccatatgcgctgcaagacagttactcgcgcatctaacataatgataact

SEQ ID NO: 238364 - DNA, 302 bp, Glycine max
  unsure (1)..(302): unsure at all n locations
agcttgccacccagctcgcccaggcgagcatgntttttcctncanaaacaacagcctttggagaattttctagagggcccaaacgggctaattgctaattgcacccccaattttactaaatacaccccaatggcctttttttggtgatacttttttctcaaagttacggaaacttacggatattgcaacgatacttggtttctttctgtaatgttacggaaccttgcggatttcataatcaatctcttttttacttacgaaatgttaccgaaccctcactaattggcaacgatgcttccttt

SEQ ID NO: 238365 - DNA, 375 bp, Glycine max
gagcctcagcatgcagagccagggcttcgcttctttttcatgctctactccagaccagttcagggcagaggtcgcatggcccgctgattggccctaggcccaagcaggagaggcacccccagaggctcccgacgatggagaggaggcccacgaggacgaggagatggccgatttgcttgacttcttgtgagggagtggagctacatgaccgggagatccccagattcatgttttccttcatatatctggtatcatcttctatgttatgttattttatttgacttgagagactaatgtttggttttgttgattcgaatggctttcgtacatcacatacattatttgttcgaatggtgcgctaatgcttatatcatt

SEQ ID NO: 238366 - DNA, 414 bp, Glycine max
  unsure (1)..(414): unsure at all n locations
agctngtaccagaataaaatgtgtgcttgctggtaagtgaggttgaacatgaggtcctgaaggtgagggccaaaattgagatcacccattgaggtatatgcatcaagctaatgacgttaaaagagtgcttcctgggaggcaacccaatgctgatttctttcattctatttttcatgcattgcataatttggaatttgcttgataattattgaaaaaaaggatatcagcttataacgagtcatagatattggtggctattttaaatgttttgaggaagtggactgaaaatcacttaaaaaacattttcatgaaaatagtccacttgctaagcgcataccacctcgctgtgcgcattttcttcatgcgctaagcgcttcaacccctgcatcttaagctgatttggttcactaaact

SEQ ID NO: 238367 - DNA, 383 bp, Glycine max
tgatgcaacatatggagaggttaatgaaacaacgttattatgcgctccatgagaggttggatcaaatggagaatagagatcataataaagaagaaaggaggagaatagggaatgatggtgttcctagacaaaaccgaattgatggtattaaactcaacattcccccctctaaaggaaagaatgatccggaggcctacttggagtgggagatgaaaatagagcatgttttctcatgcaacaaatatgagagggaccaaaagatgaagcttgccgccatggagtttttcgactatgctctcgtgtggtggaacaagctacataaggagagagcaagatatgaatagccaatggttgatacatggacggatgataaaaagatcatg

SEQ ID NO: 238368 - DNA, 384 bp, Glycine max
  unsure (1)..(384): unsure at all n locations
agctngttgaaattgccatgtttggatgattattcttacccattctgttatagggtttttttgatgatatttgtgatgtttatatgctgaaattgctcatggaaaactgttagaaatgaaaggtagagttaacctatggttggaaagtgagaatgtggtgttatgagtggaaaaagagtgaggctttgagagttggaaggttaagtctgaattctatggtaaatcgaggttaaagtgagttaatcctatcttgaaatgtcatttatgacttatgagaaagcttggactgtgctacagagaaaaacataatgaccatagtgaacaaagagccatttctagtgcaaatttgggtgttgaagagtcatatattgattcggtgagatt

SEQ ID NO: 238369 - DNA, 425 bp, Glycine max
  unsure (1)..(425): unsure at all n locations
tggtgtcatgtgtgacatggataagggatctatacctgcatatgaggcgtttctagttgaacttctccacctcgctcattgtgatttctcgcaatggtcttgcctcgatccacttggtgaagtagttgatagcgactagtaaatatttgactgctcacgattcaacaattgtcctagtatgttcattccccatatggcgaanggctaaggngaactcgggttgtggagatngtcangagaggtgcgcggaatgtcagcgaattcctggcatcgtctacacttctttgtgaagtggatggcgtctgccatgagtgtttgctaatagtagcttgcgttcaccactatggttgtaaaggagtggtcccatgtatgaatgccacaaattccttcgtgaagttcttcatacatagtctgctgttgctgtt

SEQ ID NO: 238370 - DNA, 352 bp, Glycine max
agcttttgcaatacagcttacaatattttcttttcatcaaaaaaacttacaatattttttctctatctttccattacattcatctaatttcacacccctctctcttctcatcatatattattttcctgagttaacaatttttctgtatacacttactgcgcaaaagtaatttatttattttaaaattagttatacctgaagattaattgaaatacaaacttcattacaatttttctattaaagttatttaaagaaaacattacaaataacactcatgcatgtgggaaagtagttgttttgagtttaagtttatattacgagttcactctaactagcgatgtgggcagtttat

SEQ ID NO: 238371 - DNA, 334 bp, Glycine max
gcatctgatgtataatgaccgaaatcttctctttgcgtatactcccaaatattcacaactctgtttggctatgattatcacgcaagcaaaagatgttgttaaaagcataaagaaacggattggaagtaaaaattcaaaagttcaacttcttgcactagctgtgagcaaaatagtcttgcgatacaacccttcttttctataaactctgatgcagtattgttctagaatctattggatcaaacatcgttgctgtaattgcatttttaaatatcattatggcctcccaacttacattgttactcgtcatttttgatgttctgttgatgagatgatg

SEQ ID NO: 238372 - DNA, 236 bp, Glycine max
aatttgacttcacactaccattccccaccacatatcccttgaaatacctatcgatatgaccattctcatcaaaccattcaatccctctacaatcactatgaataggaagggtgacaaagggttgccttgtctaacgcctctctgtatattgaattccttagcagaactaccatttgccaagatagatattgagctacagcataaacattctgtgatccacataattcactttatga

SEQ ID NO: 238373 - DNA, 367 bp, Glycine max
  unsure (1)..(367): unsure at all n locations
agctntaaaatgtgaattaaaacattcttatctgctgngaatcgattaccatatatgtgtaatcgattacacagtgcaaattttgaattcaaattttaatagctgttgtaaatcatttttggccactggtaatcgattacatcctctggtaatcgattaccagagagtaaatctcttgaaaagactttttaacttaaatttcttggccaaaccttttgctacttcaattaagaattcccttcctatttaatatatccttcctaagactctagagactgtcttgatcatccatcttgaatatctttaatttctttgtcttgaataagctttgagaaacatgtgatcctttggattatcaaacattaac

SEQ ID NO: 238374 - DNA, 327 bp, Glycine max
tattctaatcaccgcaattggcctgtgcctattatttttcattttggaagctaaggtagtagctgtagcttatgtaacatcttacttgagctacatggtgcattacacatggttaatgacctaccattagaatgttgaatcgttcataatctgaaataattggtaaaagattgttttggttgccagttgcgtaacacaaccctcaacttttgtctgggtttgagatgtgtaaaatttggcaataaaatataatgtagccacatgggcttagatgttctttatacatgaagcagatttgaccttgcatgtccccagcacatgtaactt

SEQ ID NO: 238375 - DNA, 418 bp, Glycine max
agcttggagtatcaggtaattaacagctggattactactgatagaaagaatgtcgcaaaatctatatttgatttcatatttcattataataaaagcacatcagtgacagaaagagcttctggctctgcattatgctatttttttttaggagggagggaagaacactcttaaaagtaaaatatgtatggaaatttttaataatcctttagcatattacatgagtaaacttaacatcacattaatataaaatcttaaagttgagatttataagtctttctttcacttatatgatatttaaccttcctatgtttatttaatattgatattccaacaaaactcatacaaaagaatcataaaaaaacaaaaggcaagcatgcctgtgcagtccttatcagtaacagtgcatatatggttgttc

SEQ ID NO: 238376 - DNA, 382 bp, Glycine max
  unsure (1)..(382): unsure at all n locations
tgagctngaagcgtgaacaatcacaggtcctttataccttgtgtaaccatgttgaaagccaaccctcctggcttcactctntgacattatatggatcaatctttttaaaaagttgatttcttggcacgcatcatgtatacgatatggatgaaatatgaataacttgcagggccacccaccctggatatgggccaagtcccctttcccttatctactgtgtttatgttccaagggtattgtaagagttgtttgtgcttatctctcttcattaacacttggaattatttacagggagtctgacaatttatatgaagatggtggtggaagcaacaataagaatggcacgcggcaattgaaattaagcaatgtgggtttcaccaca

SEQ ID NO: 238377 - DNA, 417 bp, Glycine max
agcttataacactgcaaaggtgatgagaattatctctataattgctattataataaaaaaaatccttttcttttattacatggccaatcaaactttagacagaaaatgttactgacactcctctttaattaataggtcaatactcagacaactataatggtcaagaaggacaatgaagacttataatatgcgttgagatggcaatggaggcaagagccgtttgtccaaatgaaagatggacaaattacaggcatcattgacctgactgctcccaaactcttggatcaaaaggttgtcacaaatgattttagtgattacttatggtacatcaccaggtaataattttctatgcatgtcctttttaattaattcaaagttgagtaatggttaagtctcttattaaatatatcttcctac

SEQ ID NO: 238378 - DNA, 280 bp, Glycine max
attgatgaaaacaactagagaaaattactaaccatcagcagcaacaggccaataaggagctttagttggagcatctaatcgttgaagaataactggatcagccttcataatagaaattgagaaacctaacagaaaatgaaataatgctaatcagaactgcataatgaaaaaaaaaaaaagaagcctattgctattggctgtggtaacaaacctgccatatcaagagaagtcataaatgaccctgtataaactctatcaacagccaatccatgttctagct

SEQ ID NO: 238379 - DNA, 323 bp, Glycine max
  unsure (1)..(323): unsure at all n locations
agcgtnatagggacgagcgagaaaccagcgatctatctatgtaatgcagaannttagccggccagaggagacgcccgacctaggagggaagaccaatatctcagaaatatggggaggggctcaaccaaaaacactgtcgacgggttttttttattttacaggcacatgaaactggggaaagaaccctatactaaacccacaagggatgtgggcctttctactcgaaccaacaaacctggctaatcgtcacaaacaaaaaaaagggccttgccaacaagagtattaagggcacctgataacggactcaataaaaagaacatttt

SEQ ID NO: 238380 - DNA, 326 bp, Glycine max
  unsure (1)..(326): unsure at all n locations
tttgggtaagtacgcatgaggaattcaccatgtcatagtaaacctccatattcaacgagcatttataaaaatatttataaattatttaccaaataagattttcacattaaaagtagtaatcaaattcacatacgtataaaatataaatttatttcttatcaactatataaacttttcttgaccnctagaatccttggtgtttagtgtttactcttaatctaattgcttatgcactgcagaagcctaaataaggcggaaattatcgcgggcagtcaagctccgtctgtaatactccttaatcatcaaatactgacattactattgta

SEQ ID NO: 238381 - DNA, 406 bp, Glycine max
agcttctatataagctgaaccattttatcattaatctctagttgagttttattcagaaaattagagtttatctcttttatcttagtgagagtgattctcctaaattcttgagtgattcaagaacaccttggctgtatcaaaggactttcacaacctttgtgtgttgccctcgctggaaagagagattctttccttcctttcatcatcacccttgttctttcaaaccacaattccagaaaatccacctctgcccagaattatctcggggccataactcccattttacgcactcaaattaagtgattcttgagcctaaattgaatttcaaaacgagacctttcacctcgttttggaatcacctcatttggagccctgtagcttcacgtattgccatttctatatttct

SEQ ID NO: 238382 - DNA, 302 bp, Glycine max
ccaatctccgggttccaagacaaccttctttctccctgtgttggcttgtttagcataacttttatacttcctctcaaattgatctttgactccctcatgaagcttcttcacataggcccgctttgcttgaccttctttatgcttgaaaacagaaacattatgcatatgcaaaagattaagtgtgagtagtgggttaaaactcacaacgacttctaaaggagaacaattagtggtgctatgaacagatctattgctagaagattcaacatggggtaaacaagctctccaaggttttaagttct

SEQ ID NO: 238383 - DNA, 424 bp, Glycine max
agcttcatgatgatgaatcaagtagttttgatgatgacctttagcccaaaagaatgatgtcaagattgagtcaactagttcaagatcaagattaatttcaggattcaagaaaagacatcctgaagaatcaagattcaaaagaggatgaattctcgattcacgagaagaaataaaaaagcaacatgtcaagacttcacaagggaaatattcaaagggatttttcaaaaaccaaacatagcacagttttgttttacaaaaagagttttctcaaatattctaagttactagagtatttactctttagtaatcgattaccagcttcctgtaatcgattaccagtaatagaatttgatttcaaaaaggctttaactaaattttaacgttccaaatatttttaaaatgatgtaatcgattacaaaatttt

SEQ ID NO: 238384 - DNA, 128 bp, Glycine max
aaccaacatgtttaagtaataataacactaatcataataataatgataataataatagtaataataataataataataattatgattactattatgattattaaataatactcttcagactcttctga

SEQ ID NO: 238385 - DNA, 413 bp, Glycine max
  unsure (1)..(413): unsure at all n locations
ggctgcagctggcggcgtgggagatctgaattctctgtggttaggatntttaaatatgcatgaaagctgttaataaatcacatcattattagatgaatatgagaggactattgatttactagttcagtaaaacacgcaactttatagctaacgcgtaaaaattacatcacttgtggtatgtttacaacagataataaatcacaatcattagatgaatatgggggagaagagaaaacaatgaataagaaaattatgaatattgatgtatgtttctttatgtagccaaaagaaagttaaaaataaattgattttaaaaacacatttttttcttcttcattaattattgtatgcgaccaaacatccttgatgctcccaccgtcgtaggcatgacaatgggtgaaaagggattggtc

SEQ ID NO: 238386 - DNA, 359 bp, Glycine max
tatcattctttcttgatcctgagtgatacatattatttttcaatcaaaagacattagacgagaaacttatgaactaatatataagtaagcatgctgcgcgcccaaaggacaacctgatcaataatataatgtgaatgtgggtaaagtctattttgatacaaaagtcatcacggaacatatgtaggttgcccatgcattcacgctatagaaaaaaaaaaatagaacgcattgctatatgagtgttacaaacctcgctgtgcctaaaatctatttgaccagctaaaccatatatgcattgactttatgcacaaatatggtatgctgcagatttttcaagtttggcccattgtttttagacg

SEQ ID NO: 238387 - DNA, 418 bp, Glycine max
  unsure (1)..(418): unsure at all n locations
agctntgcggatatggtcttcactggcgaattgatttaagtgggnctaaaaagaggaaaatctgatcatcatgctttgataaatgcaaaaaaaattgtggcaagtgaagaaggtgagaatgagggagaaacccatgatgtgactgccattccaatacaaccaagtttcccaccaatccaacaatgtcattactcagccaataacaaaccttctccttacccaccacccaattatccacaaatgccatccctaatataaccccaaagccagtctaccgtacttccaatgacgaacaccacctttatctctaaccaaaacaccgaccaagacatgaattttgcagcgaaaaagcctgtataattcaccccaatttcggtgggctatgctgacttgcttccattattacttgataaatcaa

SEQ ID NO: 238388 - DNA, 286 bp, Glycine max
atggcgcctatgcaagatgaaagccttggaggaaagaggtatgcctatgttgttgtggatgatttctccagatttacctgcgtcaactctatcagagagaaatcagacacctttgaagtattcaaggaggtgagtctaagacttcaaagagaaaaagactgtgtcatcaagagaatcacgagtgaccatggcagagaatttgaaaacagcacgtttactgaattctgcacatctgaaggcatcactcatgagttctctgcagccattacaccacaacagaatggca

SEQ ID NO: 238389 - DNA, 436 bp, Glycine max
  unsure (1)..(436): unsure at all n locations
gatccntagagtcacctgcggcagcaagctttgacggactataccaagctctatgtctctggacggagaaagatctatatataggcttgcttagagtagagagaggaagactagagatttggatcaagtaaagtgtgttaaagatgaagaaggcaaagtcttagtgcatgaaaaagatatcaaggaaaggtggaaggtgtatttccacaacctatttaatgatggatatggatatgactctatcagtctagacacaatagaagaggaccggaactataagtactaccgtcggattcagaaacaggaagtaaaggaagcgctgaaaagaatgattaatggtaatgcggggggccatacacatacctattgaggggggaaactcttggaataaaggtttgagtgctcacctactctttacgaattttaaggcaaaccc

SEQ ID NO: 238390 - DNA, 351 bp, Glycine max
  unsure (1)..(351): unsure at all n locations
aataacatagaaaccacattatatatttactcatatattcattgttggagcacttcaacatagaatactgtggtaaagctttgcatgggatcaacatagattactgtggcgaaacttcaatttatattggaaataacaaatttgatgtttgctacggttctttacggtgagtagtggaggggttaccttttattttattttattcattntaattctcccgacactcaatctcataatatcttatcagtactgcgagaaggctgaattcccatctcatggtatcccaacgtttgcttgcctgcgtatcgctggtggacaattaaggttctctatatacatatattgcttctt

SEQ ID NO: 238391 - DNA, 340 bp, Glycine max
  unsure (1)..(340): unsure at all n locations
agcttnaaggaaggagaagatgagcggagttataatgacacaaagagcacgaacttntgtgccccaaatgaggtctgaactctgaagtgtaattctcaaatgatcaaagttaaaaaataatgccccccatgacctctatttatagcctgagtgtcacacaaagctggggagaaacttgaatatctattcaaatcttacttgaatccgaaattgaatatggggagccaaaactccctaattatgaatagcgacattagctatggtccaccccatcaatcccaaatcaagtccaagacattccacctaatgggcttacgcgtcatgagaaacggaaagcatg

SEQ ID NO: 238392 - DNA, 286 bp, Glycine max
caacaagaatcaagccaatgctattgtgcaagcaatcaatggggcaaaacacaccaaatgattataatgatggatggctcatattctcacaaaggtaaaatcatcactttcaaattgagctttcaaaactatcatgacatgtagagaagaatcaatgatctcatgtcacaaaatgtcaagatcttttattttcaaacaattacccatttcttgaacatatcctataattcaaacgaaaacatgcaaagatgtacgtgcacatgagattgacccaaaatattaaact

SEQ ID NO: 238393 - DNA, 347 bp, Glycine max
agcttgtccattagtacaaatagcactattattgaccttgaatatttgaacattaagaggcaataatgtttgcatctcatatttgaactttatgaaaaaaaaataaaaaattacatcatgacccctgaaggtctcggtgtcacgataaaacaatactttggaccggcttcaagaagctctcgcacgcctacgtccatgactctcgaagacccagagtaagggacacaaaaaaatcaaggaccaactggaggagtcaatcactgaaaaagtgactcgacaattaatgttgtctttcagccaaatgcagtcccaaatgcaatcgcaactgcaatcacaaggactcacac

SEQ ID NO: 238394 - DNA, 394 bp, Glycine max
  unsure (1)..(394): unsure at all n locations
agcttgtggactataccttctaccgaacactttcgtgtttctatctcggcccaagtttattgcgggctgtagcaccggttccacttccctagctgtattggaggcggncgccgcggcattatcctctatagttttttgaagttttagcatggcctctgtgatagaagccatttgatcttttaaagccgataggtcggccttcatctgttcttgcacgccctcttcattatccatttttctggatcgagtgttataggggtgcctttgcgctttcttagttatggtgagttccctaaagaaacaaacaacggtgagtatgccaccaaaacatgaatatgcaaatgaatgatcggagcctttggatccccctaaggggttttagataacgcgatgg

SEQ ID NO: 238395 - DNA, 310 bp, Glycine max
gcttccattgattttcatgtatttggatggggggagctagctatagagagggtgagatccccctctactctcaggaagcttcttctctacttccaggaacttccatggctggcataataaacatgtgtaacttgcatacttgatgaagaaacttggaaaccttaagtcacttattcctatttctcaattccacatctctctcttctcttattcttctcatgagctctcttaacttattagccttctggggagcttctctggtatttaggagggctcttacttttctatttcgtgactctgtgaacacatg

SEQ ID NO: 238396 - DNA, 337 bp, Glycine max
  unsure (1)..(337): unsure at all n locations
agcttgcttcttccaataccatgacttcttttagcttcccaataggtggcatgtcccacttgtacttatcccatctagtttgcatcttgctaaatcacaatctgaaaagcatgtttagtctaagaaggtacctttgggataccacaaacctacattggttgtgcccttatacttaatgatccttttaacagcagttaagtgatattccttatgattggactgntatcttgcacataaacaaatgattagcatgatttctggtctactttgtattaggtagagaagtgatccaatcatacctctatatttggattcatccactaatttacctttctta

SEQ ID NO: 238397 - DNA, 290 bp, Glycine max
  unsure (1)..(290): unsure at all n locations
ntatgagctctatttaagccatatctctagtctatgtggtttttaaccaccgcccttgggctgcagataaggcaacccccaaagaggctgcaactaaggtgggttaagggtaactgtaatcaaggcggctttccaacactaactatcctaactaactccaccttacccacaatgctaagaatactgccccttctaaaaatcaaccttgtcttcaaggttgaaagcagccaactgatagcagagatttcacgttactatttccccaaaatctacttgtgcagcaccccttc

SEQ ID NO: 238398 - DNA, 433 bp, Glycine max
  unsure (1)..(433): unsure at all n locations
agcttcaagaaaaagatggcctcagcaaattctttatttccagaagggaattctatcaatagacctccaatctttaatggagagggttaccactactggaaaacccgaatgcaaatttttatcgaggcaatagatctaaatatctgggaagccattgaaatagggccttatatacccaccacaggagaaagaatttcaatagatggtagttcatcaagtgaaagcataaccatagaaaaacctaaagatagatggtctgaagaggatagaaaacgagtacaatacaacctaaaagccaaaaacataataacatctgccctaagaatggatgaatatttcagagnttcanatcgcaagagtgctaaggaaatgtgggacactctttgattaacacatgaacgaactacagatgttataagatctaggataaatg

SEQ ID NO: 238399 - DNA, 180 bp, Glycine max
gatgtctcttcggcatactactctgccgaacacatctttcactgttgctccacgcttttcttcatggcaatgtccaaagctccaatgtcgcactttctgcagccttggtttgtaggcttgcgtatgattctccgaaccgccctcttcaacgggacagcaactgactctctgcagttgctt

SEQ ID NO: 238400 - DNA, 361 bp, Glycine max
ttggtagggaaagtgaaacctattcacgagctccagctggacataacttttttaactaggcgggcacttttttctacaacaactctcgttgtgtattgcaaaaatctgatctgggtcggggatatttcaatgggaaagttaaggccttttttgctgcataggaattatggaaagaaacataaaaaggggggatttttaaaggggggggaggagatggatcgttctgctatgacttgggcgccaagaatggatattccgaccatgcattgacacggacaggtatgagctggtcccggatattggatctggaattttgggcgggacggttattacaaccaccaccttgggagctggtgctgtc

SEQ ID NO: 238401 - DNA, 240 bp, Glycine max
gtgaatgagaatccagcaatgaacacggacaggaaaatacaatgtgagcttgctgtgctaaagaaaaacaatataagagcacaatctcttttactatccatgcaaatttggtagactagcttgaaagtttcattagaagttcatcaattacttgaccaaacccaatcacatcggcataatggttgatcaagcttcattgattcaaactttgaagaaacatagagattaatggtacattta

SEQ ID NO: 238402 - DNA, 396 bp, Glycine max
agcttgaaggaattattaacgcaggtcatacaaactccagagcagcatacttatttagcaagattgatgggatatgattaccagataattcatcattctggagccttgaaccaagctgctgatgctctttcgcgtctgccagagcataattcctcattgatgatgttatcggtaccatgtcttactttcatggaggagctccgccggcagctggaagcttcctcagaatatgtgaatcagaggcaagcaattggtcaatctcctaccacattcccaggttattcagttgtcaacaacctcattctgcaccaaaagcgcatatggcttcccaggggacttccattaatacccactctgctcactgaatttcactcaactcttgccgatggacacatg

SEQ ID NO: 238403 - DNA, 353 bp, Glycine max
agcattgtgtcccgacgtccttcagcacaaggttccttaaatcacttcacctagccatctgctcccccgaacacaaggttcaagatcatcacaggatccaaacacaaataacacacagggagtgagttatcacattgctaactaatagagaaaaataaaacaacatatatgtataaatattatataacaaaataccatttacttgagcataactcacgttatttcaccacacgtctcattcgttttcacaacattcgcatactcaatagtcaaaacacaatatcatcaaatcaatcaatatagaacaatacacaagcgttatgcagcagatacactaagactcaatcctatat

SEQ ID NO: 238404 - DNA, 353 bp, Glycine max
  unsure (1)..(353): unsure at all n locations
agcttgagaaaaaaatttatttgagcgaactaatcatgtgtctttttctnttcaaaggtcctggtttataataaacttaggcattgatcaacaaaacatttaaagtattgacataataaacccttactgcaactataaatagcccaacaataaaataccccattttttcaaacaaaatgtcaaaagacttgttaaccttatccagataaaacaaagcactgcataatgctacacaaatgacaattttttttaattgaaccacaacattacaataaggattgaaaatacaaacttaatccttttagcgaccataaactttaacaccaatggcaaatttaaaaatatcaaaacat

SEQ ID NO: 238405 - DNA, 333 bp, Glycine max
acaatttctcattcaaatcatttgcaaacactcatttcatacaaaacaatccactacatatcaaattcaaccagggcactggtcaaacaagctttctgtacaagcaatcaactcacagtattgaaattcaaatgattgaacataaatcataaaagaactgaaataaactaaaatgttcaaaatggataaacttaaatgtcctactcatgtgaatgctcctgtgcatgctcattgagatccaacacatgagcagctggtgaattctgagggataggctgctctagctcagaagctagagcaaacggcatggaatcatcaaggatggggactggg

SEQ ID NO: 238406 - DNA, 433 bp, Glycine max
  unsure (1)..(433): unsure at all n locations
agctnggatttccttttatagggaatctattcttcctaagatggagccaaacccagtcaccctcattaagaactagctcttttcttcctctattgcctttagttgaatacacctttgtttggttctctatttggttcttaaccctctcatacaacttctttacaaattctaacctagattccccttctttatgtataaaagaagtgtccagtgggaggggaatgaggtctaacggtgttaggggattgaacccatagacaacctcaaaaggggactgcttggtggttctatgaacccccctgttgtaggcaaattctacatgaggaagatactcatcccaagacttatggttgcctttcagaagagcccttaaaagggtggataaagacctattcactacctctgttcgcccatcaagttgtggatgacaagt

SEQ ID NO: 238407 - DNA, 395 bp, Glycine max
  unsure (1)..(395): unsure at all n locations
ntnataggctctgaatccgcgacgttgcgcttagcaccaccttctcgcttagcacgagtaagtggatttgagcttagcaccaatcatgcgctgagcctggctaaagacaaccatcgcgcttagcgagtagatctcgcgcttagcatgcggcctttgtggcgtcccgaaataatgactggtttaatagtaataaattaaatagcagaaaccatgggaaattttttttttctctctctcttttttttcacactgtcattcatttcatggtaattaaattcagaaggaaaattatcactatagagtcttgaatggccagttcacaactctattcggattcatttctttctgatcactcataacctctaaaactattttgctatttncaaaaatatact

SEQ ID NO: 238408 - DNA, 423 bp, Glycine max
  unsure (1)..(423): unsure at all n locations
accgggaccttaagcaccgcggctgcagctnacatttgcaaggggtgatctctttaaacttcttcatattggaaatttggaataatgactgaggaggatatgcacatgcacacacacatcatcatcagcagaagcaagagtccaaactcttcaaaaaggagacataatggtttcatttatatctctaacaaactctcacacacaagccatttgggttttgaaacgtaataaaagcacaacacataactattttgtgctgaaatttacattaacgtaaactgggcttataatatgaggattgatcaaaggggtgcaagatattaaatatgactacatacacaattctaaaaggaagggtaatttaacatatagaaaaccttgcttgacaagttcataaactctaatacaattgcttaaaagctt

SEQ ID NO: 238409 - DNA, 336 bp, Glycine max
  unsure (1)..(336): unsure at all n locations
tctntgattctcatagagcacattattgtttagaggtgaaggagttctaaatataaataaatattcaattaaagatcagctaaaatcgatttataaagtcaaaactcatgagatgtcttataatttcatccaaaagtaaaacattctaattactgtgtgtaaaagcaactatagaaacaagcacatatgtggaaagaaaatttaatcttggatagtattaaaattaaatttataatatttattaaatataaaaattaattttagagattgatttttagagaacaaagaacacgagagatgtataaataaaaaggaaggttgcgaaaagaatacccg

SEQ ID NO: 238410 - DNA, 371 bp, Glycine max
agctgttagaagaagagttgacgttgtcatttattatctcttaaaagccgacgataggggcgaatatttaattatacccaaccaaatttctgcattttttggacaccaaaataacgaaaaatacatcaggagtctaatctttgttcgaatcttcataaagaagttcaaaagccttcacgaatgctcacctattcggatgcaattgaatcacaactcaaagttataacaacacactgaaagtcaattaatggaaatattactacctcgaacctctccgccaaaatcctatgcataaagtaaagtcttccgagcctgaaaccctggcatgacaaaagctggcctcggaatccacgactctatgcacaaattcg

SEQ ID NO: 238411 - DNA, 74 bp, Glycine max
acctagtaaacactctttgttgatgcccttttaaaacttctaagaatggcctcgggagatataacaggccctca

SEQ ID NO: 238412 - DNA, 352 bp, Glycine max
ttaagcaccgcggctgcagctccagaataagatcttattcgattcagatcaagatcagagataattataagatagttgaaacgttttttaaaactgagagcacatggatttttctcaaaacctgtttaccaaaagttttactctctggtaatcgataaccagattattgtaatcgattaccaatagcaaaatgttgtcaaaaatctttcaactaaatttacaatgttccaatagatttcaaaatgttgtaatcgattacaatgttttgggattcgattaccagtgggccttgacgttgaaattaaattccaatgggaagaacccattctttcacaaaaaagctttgtggaat

SEQ ID NO: 238413 - DNA, 214 bp, Glycine max
  unsure (1)..(214): unsure at all n locations
gatcttatgaactntgattcttctttctgaccgaatgaagtgatatctaacatctatatgcttggttctatcatgatgaacctgatccttggccaagcatatagcactaaggctgtcacagtagatgttagcatattcttgattaattccgagatcatttatcagacctctcagccaaattccttccttttgcagcttagtaagaaccatatat

SEQ ID NO: 238414 - DNA, 363 bp, Glycine max
  unsure (1)..(363): unsure at all n locations
agctttacagcagattttagtaatgtatcctcttcctanaattaaaataacttaattccattaacctagggaattaaaaaaacttaatggctgagtgtaactgaaattgtggcaaccaaaagacacccccaacagccaacaagtcagccaccatttggtctcccaaaaggctgatgcctaagttgccaattgggcccttattacaacttgaactaaacctaactataacccttttagttgattaacccaaaacatatttttggtcagccaactttacaaggattgggccattatttaaacaaactaaacactctaaaattgaaacaaaggggggcatttagtccttcttcattggggcatgat

SEQ ID NO: 238415 - DNA, 150 bp, Glycine max
  unsure (1)..(150): unsure at all n locations
tttggaatcttgttcatcaatattcatatgttctaaagaatctgcaatatcatctaacatattctttcttgacaagatagcattagattcatcanaggtaacatgaatggattcctcgatattcatagctcttttattatatatcctata

SEQ ID NO: 238416 - DNA, 271 bp, Glycine max
  unsure (1)..(271): unsure at all n locations
cgcagcatgcaagctgagacagggaaccacaatttttctatggcggcggcgagggccaacagtttcaatccacaaccgcataacccccatncctgtgccacccatttgactccgactccacgagcccatatctggttctatcaacacgggctccataataccccaagcttccacatcaagcaaacaaaattaacagcacagctatccagccagaaacagggaaagcagaaacttgtcaacaaccaccaaaatcacagcttttcataaagac

SEQ ID NO: 238417 - DNA, 284 bp, Glycine max
  unsure (1)..(284): unsure at all n locations
acaacctgacctataggagtgtaaagctataatattttattgatcancagaaggcgtggctgcatataattaaccattcaaaagttcttaaaataaattaactatgcatgttcaatcatatttcttgttgactttcatacaaaaaaacaatgttaatgggcaaacataactgtatacacaaggngacaaccatttaagcttgatgccaagcaaaaaatcatggattcaaccccccgatgggtcatgggtgcaaccctactgtctcaagtatttacaaacatctg

SEQ ID NO: 238418 - DNA, 404 bp, Glycine max
agcttatatgcaatgtgagatcatgtgagttgtatttttcatcagacgcttaggagtacataacatgacacgccacacaatgggtttgtcaagtcacttttactaagtaaaatcataaggtgaccagtcatgatcactctgttttgcaagaatgcaccaaccatatgggatcaacatagacttaaaagagcactcaaatcaagtgtgtttactctcaaggcttaaactctgaagaattcgttagggccttacctttctggttcaggttccacccttaaaacaacttttgcacgccgatattgctcatgaaatatacaatatccacaacttcacacatatttttatacacatttaacacaatgcactataatttaaacctcacgttcctaacttataatctacac

SEQ ID NO: 238419 - DNA, 306 bp, Glycine max
  unsure (1)..(306): unsure at all n locations
actctatgcttcttgcggcggacaccaaactaatatgatgacccttntgagcaatgagcttggcaagatcaaggcttgggattaagtgtccgaacgctatccatggaaacattactatgtctgacanaatatttgtntattaagaactcaatgcaacatcatattatggaccaacaaacgttacgtcttatttaactgcacacattatatttcgctattgatatattaaattcacacatactatattaataacagtatcaatctgatatatactataatcaacacaatattaataatagcattaat

SEQ ID NO: 238420 - DNA, 232 bp, Glycine max
agcttgccggccctcatgtgcagatgagtttgttgttcttttatgaacgcatcatcctgttggaagattgtgaagctatgcccaagagggcgtgagtgctaatctctcctgcactttaaaaaagtgcctcccactacgttaattcgtggacacttataccatgaaggaacggaggattggcagctctcgaagtccaccggtatgccaacgaaagagtaccggctgcacaatg

SEQ ID NO: 238421 - DNA, 75 bp, Glycine max
tgtcatatctcatggacccaagaagtatatactgacatgatacctagtgagtacatgctccatgcgtcgttatca

SEQ ID NO: 238422 - DNA, 417 bp, Glycine max
agctttatatggaaaacatatataaggatattattcttattccaacgaagccatgagaatctagcaaatgcctaaatacataatgtgaataaagctttagtcaattcaaatatctaataaccacttctcctatgcatttcatgataaatcatgtatgctgacaaaaaacaaaacttgtgaaataaaagtgtcaatatatgtacgtgaatatagtgcggtgtcggaaattttagaaagaagaataagaaattaacaagattgaaagaccaatatatcaagtataaaacagatcactgccgcataattttcacgcattcactttataaagcgcaggacatcgagttatcatgaccaagaaaaaatatatgtaaatttaaaaatcaaaagattctgaaagaggagaataaaaatttacct

SEQ ID NO: 238423 - DNA, 431 bp, Glycine max
tattcatgatgctaatgtcgctccctctatatctttctatcccccctttttggctttgatgatgccacactacaatatgacatctactcattgggtgcattaggaggctgtgagtcttaagattggaaacctgtttttcttaaacaatcctaaaaattcttaacacttaagaaaagatccatgcatatgatagtcatcatcatatatcttactatataatcttacttatgctaatgcaacactcaactgcttatgcaatgtaatcaatgtgcagttcatctcccaatatgcgaatacgcaagtcatctccccttataggcattatcaaagccaaatagtttgaacttatacacaaaacaaagcacatactgaagcgaataaaccataccttttattatcatgagacttacaaccatattttatacattaaa

SEQ ID NO: 238424 - DNA, 379 bp, Glycine max
  unsure (1)..(379): unsure at all n locations
agctngncaatagcagtggtggggcttcttgttgtgtctttccacggctangctaggactatcatagcctaaacgatcttgaacatcatagaactgaatagcagtgtgtgctgagagcctaactcttcaatcacgaggaccctttgcagtgtagaccttgctgggcctatcttttctacctgtggaccgaacaatgagccctgcttggacttgaacaatctctcccccagagctcttcatgcccattcctcaatttcttctattgtgccttctgcatagttaatttagtcccctttcgtggttggacaccttgggtgatgagtgatgacaattgacaccctcactctatatggctaacaattgtctcctatttttattc

SEQ ID NO: 238425 - DNA, 303 bp, Glycine max
gcttgggctaactgagaaacacccaggagagttttgattctttaataaccaaactggggagttggtcctaactgctcatcctactcagtctgttcgcagatcgttgctgcaaaagcatggaaggtatatctgctacattatatatacgtgttttaactaaggagttatgcgagctcattcattggtgcattttttatacatttgaaaatggaaatcattgacctgtaatgacaggacatgatatatatagactatagtataccatttctggcattgtggcaatatctgcattgagactaatta

SEQ ID NO: 238426 - DNA, 423 bp, Glycine max
agcttggagcatatagagaccgcatatattttgacctcgaaattgaaagaggaaactctgagcaaattaaaatgacaataaattttaactcggaagtttgattgagtcctttaatatttcgagacgctcgaaattgaaaaaagaagctcagagcaaattcaaacgataataactttttacttggatgtccgattgagtcccataatatatcgagacgctcgaaattgaaaacgcaagcactaagccaattcaaacgataataacttttcacttggatgtctgattgagtcccataatatatcgagacactcgaaattgaaaacataagctctgagcaaattcaaattacataactttttattccgatgtccgaatgtggcccggaatataatcagacgcttgaaattgaaatagaagctctga

SEQ ID NO: 238427 - DNA, 304 bp, Glycine max
tctaattctgagcgtgtaatatgtgactgtacttattcggacatccgaataacacatattggcaattgaatatgttacgaaattccgctttctacttgtagcaatttaattaattaggggactcaattggacatccgagtaaaaagttattgtcgtttgaatttggactagcttctatattcaattggaatgtatcgatatattacgggactcaatctgacattcgtgtataaagttatatgcatttgaaaatgctcacagctgctgatctcaattttgagcgtgtctatatattatgggactc

SEQ ID NO: 238428 - DNA, 421 bp, Glycine max
  unsure (1)..(421): unsure at all n locations
agctctacaacagatggtagtaatgacccattattttagnaataaaataacttaatgccattaacctagggaattaaaaaaaacttaatggctgagtgtaatagaaattgtggcaaccaaaagtcacccgcaacagccaaagtcagccaccatttggtctcccaaaaggctaatgcctaggttgccaattgtgcccttattacaacttgaactaaacctaactaaagcccttttagttattagcccaaaacatatttttggtcagccaactttacaaggattggacccttatttaaacaaactaaacactcttaaattgagacaaagtggggtcatttagtactcctccatttggacatgatacaactacgaccttgaactttctcttgaaattgggcttgtttcaaatatttggacaaca

SEQ ID NO: 238429 - DNA, 227 bp, Glycine max
actcaagcttacgcatatttagaatgaccgcggggcgagaatttattttcttttgccacaacacaggaatttaaaaaacttatggctgaagtaactgaatcggacaacacatgtattctcaaagccaacagtgtgactcatttgtcctccataagctgagcctaggtgcaattgggacttatacatctcgaactcacctaaaaaaactcctttttgataaccccaaa

SEQ ID NO: 238430 - DNA, 347 bp, Glycine max
  unsure (1)..(347): unsure at all n locations
agctntcatgaccatgggagagagctgttgtttgtattattacnnatttgcaancgaaccgatacaccaactacatttattagaatagactttgatatcattatagaatttgatttgactctaataccggcgggaataagctcacccacaagacgagaggtgttccacttatatacactattttgactatataacaggatctccaacattattggatgtataattttctgttcttatagcaaggaattggtgcatggtcgggaaatttccttttggggggttggcttataagctttctcagatcatagggggcaatatagcccgggagggttttctctcggcccccc

SEQ ID NO: 238431 - DNA, 356 bp, Glycine max
  unsure (1)..(356): unsure at all n locations
acggactataccaagctctaggaaccagggatggttatagttctatatatacgctcgctaagggtagagagaggaagactagagatttggatcaagtaaagtgtgttaaggatgaagaatgcaaagtcttattgcatgaaaaagatatcaaggaaaggtggaaggcgtatttccacaacttatntaatgagggatatggatatgactctagcagtctagacacaagagaagaggaccggaactataagtactatcgtcggattcagaaacaggaagtaaaggaagcgttgaaaagaatgagtaatggtaatgcggtggtgccagacaacatacctattgaagtgtggaatactctt

SEQ ID NO: 238432 - DNA, 239 bp, Glycine max
atacaacacaacctcatcttccgatgataatgtcattacttcgatgatagtggatactaaaccactgttagataactcatatggtgggcttatccattcaactacgactatggaagtagatacatcaaataatgcaaattaccatgctgaaactaaatacaccagaatttttgatgacagggacaaaatgaatctgagcctggaatggaccataattactctgatacgatggttgatta

SEQ ID NO: 238433 - DNA, 434 bp, Glycine max
  unsure (1)..(434): unsure at all n locations
agctttaagagaaataagagatgatagggttctttttcttctaagcggnnnaagcccttcttccatcaagcttaggtaagtgatctacatttttaactccaagctcgattttcacttcattttattgctctattttcacttgtagtttcaaaaccttattttgcactcttgaaggttggaaactcgaatctaaactccctcattcttccttctaaatttcgtggagtctacaagaggtaaggggggtctctccaactcttgaatcatatgtttgttgttgaacttccttgaacatgttgttgctttgaattttaaattttttgtatgtctcgaatctgtgctctgagttgttttccttgagttttggatgccaaaaatgacttctcttcatgctaaaacataaaattagcctcaaattcctcccaaatcggagt

SEQ ID NO: 238434 - DNA, 395 bp, Glycine max
  unsure (1)..(395): unsure at all n locations
gtactgcatgtgaaattgtaatacccctttctttatattgttctgcactaccccagcagcaacttcagatatttctgcagcacattcaataactttagcaatgtctgatctgatgacttgaaaacatgaaacacagtggcatatatatttcttctagctgcctcacagttccatagcagatcgcagaagtagaagatgcacacttgagagaagtggaaattgggttggcaaagaggaggggtaaggaaataacgcatagtttcattgctttctttactttaacagctggctatttatcataaaccttgcttcttgatgaaggcatagaacacagaaaatttactaaatgcattccattcattgnctatatctagtgaacactgctgaaatcttca

SEQ ID NO: 238435 - DNA, 364 bp, Glycine max
  unsure (1)..(364): unsure at all n locations
catgcaagcnnnaaaanggggaaggagagaggaacggtatatgtattatatactacccacaatccttaaatctgcacaaagtccagatatctataagtaacagcccacattttgctggaaatcacaccctaagatattcttttttgcggcagagagctagaccactgttggcggtcgccaaatcatcgaagcacaaatgaatcacactcttaacgggggaacattggtagaccaagaaacatctacgctcgaagaaaatgaaataccaaatggtgtagagttccaagaaacatccataatcgtgataaaaaaaaagccctaaaactaaccgttatggacctattaaaacgcaccaacaaaacaa

SEQ ID NO: 238436 - DNA, 315 bp, Glycine max
  unsure (1)..(315): unsure at all n locations
acttataggctgacgtaatttgacttatgagagaagctntagctttctattttttcttcttttatatagaagtttatttaaccaggccctgtagtcctgtttacagaacaacgcaactaaccatgttggaatgtttattactgctaatatagcgtaacggcaactcattcgttacggtattgttgatttcagatcatatagaattataatgaacacacgactttgatattggtgagtccatttattccgtgtctgaatgtaatatgatgcacatgctcattattgtcttatttctatactcgttgtataattaat

SEQ ID NO: 238437 - DNA, 388 bp, Glycine max
tcagcttgaagaatggaggaacgagagtgtcttacttatattggaagagccgtgatgatttacagccaggctacatggaacatggattagatgctactccaataacctattgtgcagaaaacaatagcctttccaaactgcgtttgcaatcaaactaagtttgaattatctattgggggaaatgatgccggtccgtcctcacagcctaagggcaaacctctaaatttttttaactgccatgaaagcacccaaaataacccaggggagactaaatattattccatctcgggccatagtaaggacaaggatgaagtggcatcacatttctcttcagccaggcaaaattcagatgattatgataacatcgattccaatgccctacctgata

SEQ ID NO: 238438 - DNA, 384 bp, Glycine max
  unsure (1)..(384): unsure at all n locations
gtacaccactaagccccttcaaattttcaatcctaccaaaccttaacgagtattactctggatntaaatgtaaggaaaaagacaacagtnttatgctcatttataatatgtaattatattaattctaattaaaaattagttatttttcttaaattacttgagaattatttatatataaatccaaattcaaaatgaaaacattgttttcttcgataacacttatcatgtattattgttataaatattaattaataatagaacatgccttanaaataatatattacaagatatttcgctactcttgtaaaatcaattgtaatatgatactaanattatagtgagataatctaaatatatttattatatcatacttacaataattta

SEQ ID NO: 238439 - DNA, 432 bp, Glycine max
aagtcacctgaggctgcagctagagtaagctgagttaggagtcttatttgtttgtaacaaataattgtaacttgttgaagttagtaaaactcgatggtttgtcaagaactggacgtagtctcggtgaatgagataaactaatataattctcttgtgtcttggtcttattatcttctccttttctatttgaattgacctaggatttgaatttgatctttgtgttcgaaaaacattgtttgttttacaaatatttgaaactatcatctaattcactttgcaaaaagtctaatatctattttcttaagtcttaatttatcagaagataactctattgtttacgaaaaggaattaaattgagtgaaaatcccaatttaacccctcttcttgtgatatttgcatgtacatttcgcttcaacgagatatgaattttcc

SEQ ID NO: 238440 - DNA, 335 bp, Glycine max
agctagatgaattgttagatctttcaaagtctacaagtaagaaatcatggatgagattcaaccaaacagaatgaaggaaataccccacaaggctaataccttctctatgaaatctgcacatcaactatgagattataagaagaagaagaaagagaagaacaatgtattacttttggaaatgatgacgcggtttagaagaatgaacaagagaattatattcttctaaaattacaaagattcttataagcactatcaatatgtgataatgacttgacatattttattattaactatacggactctgataactgatatgtggcgatgtgacattctat

SEQ ID NO: 238441 - DNA, 364 bp, Glycine max
gggagacggaacaagcccagaaagggctaaagcaaggaaaaccgcaccaaaactagcctgaaaaacgccaaaggaaatcgtgggaagcatgggttaggctataaacccacccaggcagagataaagagaagcaccgcggaaaggaaaagcggaagtcaaggttcgcgggtgagacaagaacgcgaaaaaagcccaccccgccacacaagaaggagacctataagcgcagggctaagggacgaaggacaagtcattgcaaatacaaagatgaagcccgagggcacagaattggtacgaccggccctccaaaatccgataggaaaaggaagggaggaacgcccgacattaccaccagcaaaagaaa

SEQ ID NO: 238442 - DNA, 379 bp, Glycine max
  unsure (1)..(379): unsure at all n locations
gcagcagcnaaaggaagaaacgtaatacgtggaacaaaacccccagcgaagcaaaacacagagaaatgcgaatccaattcgagcgaccgaaaacatctccagctacgggtaaacgagaaccaaagagaaaatctcaaatcgaaaggagagagatctatggcaaaccttccggcttgcaatgaggaaacggctacctaaagatgccagagaacaacaggatcatatatctggagtgtctgggaaacttggcgcgaagaaacactagaaacacccgaccctctagcaacaaaaaaacatcaaaacaacgggcagcacagaggagcatgggaccgaaacaacaacggaaaaaccacacacaactccaccccggaaaagcacg

SEQ ID NO: 238443 - DNA, 335 bp, Glycine max
gattattctatggcatcatcaaaatcatgtattcatacattcacattctccctttattttatgatgacaatcattatcaagcgaattcttttcgacatcatcaaaacctgcatgattcacattctccccctttttgaagatgacaaccatctgtatgtaggagtaaaaacaaaagaatatctacttgtgtagtttactctctccttgatttgcaatgatcgcttatatgaaacagttgaagaatgcctatatctcatatataaaaagttgctcataaaccttactatcttatctcttattcatctctcccctttgtcaacatcaaagacaatcat

SEQ ID NO: 238444 - DNA, 424 bp, Glycine max
agcttgagatgaggaagtgttgaatgttgtttcttcctgcttttattggtgaccacagagtggtacctgaagatatgtcgcgggggtcaagagaccttgtggacgtcagggggggtgctattgtccaaaaccaagtttgaccaatcccgacccaacccgggcatagtcggtcagtgagaacctgtgatgtacctaagcaggcaagctcctggcagtcaacagataaaaggaaccaagaccacaaagcatggaggcttgtggtggctggccagctgtgaactttgattgatatgtgggttatggcctctggtaatcgattaccaaaggtggggtatcgattacaaggcttaataatgaagataggaggctaagaaggtctctgggaatcgattaccaaggggtggaatcatttccacgcttgaaa

SEQ ID NO: 238445 - DNA, 313 bp, Glycine max
  unsure (1)..(313): unsure at all n locations
ggccacccagctcgcccaggcgagctaggttgctttctctttatgcaacaaccatctggaggaatcttctggagggcccaagtgggcctggttgctatntgcacccccatttttactaaatacaccccccttgcccttatttggtgattcctttnttcgtaaagatacggaaacttacggtatttgcaacgatacttgttttctttccgtaattntacggaaccttgcggattacataatcatccccttttttgacttacggaatgttacggaacctcactaattgtgcaacgatgctttcttttgatttccg

SEQ ID NO: 238446 - DNA, 382 bp, Glycine max
agctttgagctctatgtatagagtcatccattaaagtttttcatgtgtctatttcttttcttaatttgctgctctcataaaaaaaaaaaaaaaaaacagcaaattagtaccaaagctcgtcttaaggaatttctgagttattgagagaaaccataatggaaccaaatacttcatttactacaagtccaccacttgtctttttttttttgtgaggtgtactataaaacacgatttgcaaggatgaataatgttcatcttgaagcataggatctttgggaggctataaaagaagaccaaaaagtttatgaactacctgcaaatcttaaaatgacatggctcattaatcacaaacttcaactaaatttaactctggggtgttcat

SEQ ID NO: 238447 - DNA, 329 bp, Glycine max
  unsure (1)..(329): unsure at all n locations
cctccaagcaaaacatgccagatccaatcaaatttaatatctgcatgaatataaaacatggattggatccaaacaagtaagcaaagggaaaaggttatgaaacttgatttaccctacactataaactaaaaattcaaattaacaaagggttaggaaattttcatttttccagctacttcaacaagttgctaaatgtgatcaaatattnttccacctatcgtcggatggctcaaggcatccagattgttgtgaatttgctgaaaacataatacaacagcaagcccacagcactcatgcctttatagaagcagagcagcacacaatctatt

SEQ ID NO: 238448 - DNA, 310 bp, Glycine max
  unsure (1)..(310): unsure at all n locations
agctngttgattttaacgttaaggatgagattggatttgaaaggaagacgcatagcaaacaaacaaacaaatctttaattatataagagtaaaaaatcaagaatattttttagttgcttaagagggacaaatacagcaaactataagcaacaagtaacacatcacatacctttttctgacttgatcccggaggagtgcaaagcaatgtcggtgatgccaatgtctgaagagtggaggtggcatccatagttgatggttggagttagaatgttggaattaaaactggaaagaacccaagtgcaagtagaaa

SEQ ID NO: 238449 - DNA, 348 bp, Glycine max
actcaagctcgcatgtcttaactgtgagggtggggtctacagcatgttaacttttatggttgaagcgatcaacgtgtatgagagatatacgtgcttcaaaccgaactacatcgtccatatcggcaatggaagtctattgaagcgatcaaggtgtatgagagatgtacttcttcttcttgaggtggatagtctcagtctgtcgtacgctttgttcaaactattgaataattaaagtctgttgtcaaacttgtggaatatcaactggaaaagggtgttggaagcatcatcacgaatggaggattgctcaccctccggacacttgggtcgttgggctcctttatatactca

SEQ ID NO: 238450 - DNA, 347 bp, Glycine max
  unsure (1)..(347): unsure at all n locations
agcttataaaccaactagcttattatttatttttatcaaacataatcttagaatttttaattatcatacttaggacaataatttaggtttttttttttacttttttagctaccctaattatatgattaattaagatttattatttcctttttaatttttgacatgttgcttttttaatctatgttctactttgtatataatacgatgtacaatagatatgtacatacaaatagaaaataatcatctattattccgtccatgtntcttgcattggttcactattttcttcctactaaccctcttcttaagaatgtttaacgaaatctgtaaattatttatcaatgtgg

SEQ ID NO: 238451 - DNA, 344 bp, Glycine max
tgagatgaggaagtgtagaagggtgaaacttcctgtttttattcgttgaccacagagtggtacctggagatatgtcacaagggtcaagagaccttgtggacgtcaagtggggtgctattgcccaaaaccaagcttgaccaatcccgacccaacccgggcatagtcggtcagtgagaacctgtgatgtacctaaacaggcgagctcctggcagtcaacagataaaaggaacaaagaccacaaagcaaggaggcttgtggtggctggccagctgtgaattatgtgtgatatatggtttgtggactctggtaatcgattaccaacggtgggtaatcgattacaagac

SEQ ID NO: 238452 - DNA, 412 bp, Glycine max
  unsure (1)..(412): unsure at all n locations
agcttcagatcggagaagattcttcttattttccttnaacactntcatgtaacgntcaattggatacatccaaccgtagaaaacaggcccacacattctgatctcccccactacatgaacaattaaatgccccattatgtcaaaaaatgatggaggaaaatacatctccaattgacaaaggacaatggcagcctcctcctccaactcatccaatcttggtgggtcaatgacttttctacaaatagcattaaaaacaaagcacagccgtgttatggcaacctgaactttgacaggcaagattccctgaatcgctacaggtaatagatgttgcattagtacatgacaatcatgaagattcaacccaaccaatttcatatcattgaccgaccaaggctttttatttttaagaata

SEQ ID NO: 238453 - DNA, 434 bp, Glycine max
  unsure (1)..(434): unsure at all n locations
agcttcacaagtaagcttccatcaagtggtatcagatactttgagaaaatcaaggccatccaagaatggcccatcccaaaaagtgtgggagatattaggagcttccatgggttagcaagcttctatagaaggtttgttcctaatttctctacaattgcctcacctctcaatgagctggtaaagaagcatgtggcatttacctggggtgaaaaacaagagcaatcctttgctttgctcaaagaaaagctaactaaggcacctgttctagctcttcctgacttttctaaaactttttagctagaatgtgatgcctccagagtgggagttggagctgttttgttacaaggtgggcactctattgcttattttaagtgaaaacttcatggtgccacccttaactaccccttctatgataaagagttntatgccttaat

SEQ ID NO: 238454 - DNA, 336 bp, Glycine max
  unsure (1)..(336): unsure at all n locations
tattttgatctccttgtggtgctctaaattgtgggaatgtgctcaaatatgtggggcaattatggtttgttttcttgcttgattaagttgaattgggggttcgtatgagatggccctacgcctataatgcattatgaagtaatggggcatgccacattgtccccgttctcttgctattgatgcctaaacgcgcgcccaccaagtgttcggtgaaatgcctcaacggcattagcgcgtgattgttgtatggaaacaacccatggggcaattaggtttgacatattttgggacatgcattcattntcgaagagctagagtaatagcccccatatgtct

SEQ ID NO: 238455 - DNA, 376 bp, Glycine max
  unsure (1)..(376): unsure at all n locations
agcttgccttatagaggtccaggaaggacattgctttctaaggaactanttccgctccggagtacgacagtcaccgctttaagagcgctgtacaccagcagcgcttcgaagccatcaagggatggtcgtttctccgggaacgacgcctccagctcaaggacgacgagtatactgattttcaagaggaaatacggcgcccgcgatgggcaccactggttactcctatggccaagtttgaaccagaaatagtccttgagttntatgccaatgctaggccacagaagagggcgtgcgtgacatgagatcctgggttaagggtcagtggatcccgttctatgctgacgctatcagccagcttctgggatattcgatggtg

SEQ ID NO: 238456 - DNA, 330 bp, Glycine max
  unsure (1)..(330): unsure at all n locations
ctcagcttggttgtgagttgatttagccttagttgcactcggttattaattatcttattcaaaaggaccttcacagtaaaatgttcgattggagcttatttacccnctatttttaattaactgaggctacagtgtgaacgatcgattgaattttatattaactgtgattaaacgatattacaacacaaaacaatcacatttaaggttcccaacaaaacactcactatcctaatggagaaatgcctaaaattattacacacaaatggaatatgggtagcctattagaggctcccaacacacttccaatgaaaggctcattttgttacaaat

SEQ ID NO: 238457 - DNA, 405 bp, Glycine max
  unsure (1)..(405): unsure at all n locations
agcttgtattncctgtagaaagagactagattctgaaaatctgtatcatcggcatgcagaatgaaatccttatacatagtagctataagcaataactaagttgggtatgcagcactttagaaatattagcattaggtagcatcaataaagtgaaaacaaaaatattaaatattacaaagtttatgcaaaaaaaaatgatgtggacacaataaatatgttttttctttttcattttagatatttgaaaaaaatataaagactttgtgaaaaacaggtgtaagaaaaatatagtcacattttatgagcagcttacagaaactgatcatatgcggatgactagaccaacatctgttagtaaaaggtgctagttcaagctctttttattgcaaagtacttactgacatc

SEQ ID NO: 238458 - DNA, 432 bp, Glycine max
  unsure (1)..(432): unsure at all n locations
agctntttctgcaactaatatgcaacactttccatgcatgattccttgttttccttttgaattaatatatatattaagagcttggtagaataaggaggaccgttcaatttacacaagatctaatctaagcattagcacttgctttccttccagggcagggtgcaacttggattttcatcctaaaaaagattaaaaattggaaaaagtgaagaaagaatgctagcatgcatataaagcctcgctcattcgccatagattgtgcctcttgtagactttgtcaaggctcttgtccgtgtcatacaaattccaccactacaatattccctattaacctcctgatatatatatatatatagccaaccaaatgatgacacattcggaaatcaaaaaataaagcttgacctctaaaatatttcgaggattttttaaatt

SEQ ID NO: 238459 - DNA, 448 bp, Glycine max
  unsure (1)..(448): unsure at all n locations
gtcactgccctagtgcccttggagcgaggcataattttatttcattccgtntacttcttttgtggggttgcagtttgcatggttaacaaaatgaccgaccacggaactttcaatttcttaagatcacacatttttctttcctcaagatgaaggaaggcaaacgtaatctatttagagtacatttacgaaataacaattaaataaacaaagaaaccaaattggtcactccttctaattaatgtgaatcacgagaaggaggaaacctcgagataggtagttattaatatggctacctgatcgttttgaagttaaatgcagtcgatttaattttgataggatggtaaatgacatcattatctcatcgaacgtggcagaaactaacattattaatgtgcttttgagactagagacgttgcctttgtttaaaatgtttcaataacaatagtga

SEQ ID NO: 238460 - DNA, 418 bp, Glycine max
  unsure (1)..(418): unsure at all n locations
tgcacgcatgcaagcttaagcgngggntgaacctgacttaatatgtttctcttaagcaaaggttgagccacgtttgagaaaaatacaaagttgcatctagaattggcgcttaagtgtgaacttttgcaaaacgtgttataaataacttcaaaatggatttcaattcgaattcccttattgtataagaactgtgagatgcataacaagatttaatgtcacattgggagaattacttttactaagaatgattagttacgaattgaaacatattgagtatgaattatttcactttaactaccattatctaaatattattgaaagaacactgagatcttttacttgccatgaatgaataaatctaccctaagggagtcatttaattgctctattgaatggtattattggctggccatgggag

SEQ ID NO: 238461 - DNA, 372 bp, Glycine max
agcttacaagagaatttattacgggctatttttctttttagcaaagcacgcgctggaacaaaggtccctaggttttgaagatcaaggaaaaataaccggcacgagcaaacagcaactgcaaaagagacacctacacaaaacctaggctgattaggcgagcacgcataaaaactctgatgaaggcaatcagaaggtagtactgggtaaaatccccacaagaccatcagatgccatgatgagtgaaaaacagtttctgtatgacacaaaccaaacagttcctgcgaacaaaatattaacatgaacaaactgcaccatgcctggagatgtgcgcccgcaaggatgcgtttacctacggcagactccggggtgcgg

SEQ ID NO: 238462 - DNA, 353 bp, Glycine max
atacaaagggaagcatttacaatgaagacttctgtattatgtatgacgaaacacacgatatgcatcactctttattaatctaaggttcatatgcggaccacaataaattccaccaagctataggattctacaaaactcctgattcatagagaatggtactataataattcaatatggtttagtatccaatccggtaatgctatataaattcttaatggaatctgagtctcgtatgaacacattccccattatatgtgaatctcaactttaaccataacatttgtgtcctttagctagatcaacagatatggtacacctcaaacatgagtataatctcttattcgactcaattt

SEQ ID NO: 238463 - DNA, 380 bp, Glycine max
agcttatgcaatcttggaattggagttctctcacatggaaaaggagattctgggtttcttgagaaggctgaattatattgcctgatttatatcccaactaatggtgacatgcaaacctatcttcaaattgctgcacacaaatcatccttcggagtggaataatgattgtcaggaagcattttataaaataaaaaaatacttgcgaagacccccaatcttagtcccttgagttgttggaagacccctcataatgtatctggcaatgcttgatggatctatgggttacatattaaggccacaagatgattttggaaggaaagagcacactatatactatttgagcaagaatttcactagttttgagatcagatattcatttt

SEQ ID NO: 238464 - DNA, 379 bp, Glycine max
attgattgattgattgattaaaccttgagcctattaagttgtatcttttgctaccttattttagggtgtaggagaccatcatccacaaaagatggttcaaggcaaatttgtcctaaatatgggggaggtattatcaaggtaaatttgtcccaaatttgggggaggcattgggtaatgattgaaatggttaaagaaaatagtatatacacactgtttctgtttctgtgttaaaaaaaactgtaggtataaataaagttaataagtgtgtatgctataaattcacgtatgaaagctaagtgcctaagaaaaaagggcaagtatggtgaaggaatgactgaaaaaggaacggtattctatggatgactgctcttctataacc

SEQ ID NO: 238465 - DNA, 418 bp, Glycine max
  unsure (1)..(418): unsure at all n locations
agcttacctcgaacccaacagcaacattggttgctacattggcagncaaatgtacctcagctcaccacgacgctagcagtagaaaccaaaaaactaataggaatgaaaagcaaaaaaatccagtgactaattaagagtttccagtgaacaaataaaggcatccaatgactaattatacaatgaaaacttgaagcttacctcgaacccaatagtgacaatggtagcgacactgacagtcaaacgtacctcaggtcaccacgacactggcagcagaaaccaaaaaactagcaggaagcaaaatcagacaaatcctgtgactaattaagagaatccagtgaacaaacctattcagcgactaattaagagaaaaatacacttgactattagacatgaagacataatcttaccttgacccaac

SEQ ID NO: 238466 - DNA, 300 bp, Glycine max
tagctcacacacctctctaatagctaagttcagcttctttatattataacctagagcttaactactcaccccctataatagctaagctcacccccatgacaaaaaacatgaaaatacaaaaaaagaggtcttactactaaaactactcataatgccccgaaatacaaggctaataccctatactactagaatggccaaaatacaaggcccaaacgaatgaaaaacctattctaatatttaacaaagaagagtggattcaaccttgacccatgggctcaaaaatctaccctaagggtcatg

SEQ ID NO: 238467 - DNA, 322 bp, Glycine max
  unsure (1)..(322): unsure at all n locations
agcttggatattatgatgttttttataacttttttttttttagcaaaacactattcatcatcttcaacctctagcgggtcaaacccgacccatatgcagactcggttgattctcactcatttctgcactgttttacacgattcagaaaacccaaacacaaggaaatcaaacaaaataaataattctaatcttatttntaacaaacaaggccctttataccagcttggattcctttttacgggtccactcccacttagcattcttccattgatgatgtgtccctaccatgcgaggaggaaagttagtgcgatctgtcgttatg

SEQ ID NO: 238468 - DNA, 302 bp, Glycine max
tcttcttgacatcatcaaaatcttcatgatttacaccaacgccttaacgtttctctcctttcataaaacaagagatcgtcaatggtccaacgccttaatgtttctctcctttcaaaaacaaaagatcatttaatggtccaatgtcttaaacgacatttgttcagtcaaaatatatcttgcaaaaaagataaaaacaacttaaccaacgttcagttctcgaagaactacgtaggtctgatttccttaccacaattgaggaatacgtatgagcaatggaaacacccttgtcgccacaaaaagat

SEQ ID NO: 238469 - DNA, 323 bp, Glycine max
agcttattaattgtcagcagtatgctatatttatttgcaccacctattaggccatttgcaccaccatttggtccttagagcttatgtccacatatatggtcgtcattatgctcaagatacttgcattgtcattagctctcattgacgagacatgcctcttaatccattttatcttcttgcgagataagttatctcaaatagaacctatggtgtttaggaacaaaaaactaattacaaacaattggtttgattcctttcctcactttttagttctaaaaattgtcttttataacaattttacactatgcaagaatcaatttctc

SEQ ID NO: 238470 - DNA, 354 bp, Glycine max
tcttgaagaatcccgttgtgagtagagcagtcttttaatttaatgaagaacgacgatacatgtttcattcttcaatcagagacctctcattacaatgaaaaagttgaagttgagttgcatacattacccggaaaccaattatcttctgccgtgtccgattatgttctgagatacttgcaaactcaacaagagtcttcggcttcactaaacggttgattctttgtatcacgccacgagccacacaccaatcgaactcttcattcgtacccataaacaaaacttgttacccattcctacccaatgaagatacatagaatgatgctgtgatccacattggtgtgctagaatttctac

SEQ ID NO: 238471 - DNA, 368 bp, Glycine max
agctttgagccaaaatcctgtctcaccatttaccttgacccagggtgagaatgtcaatccttaccctcggaagcaaaaaagataagaaggaaaatttccattcaaagagaaagcgaaatgaaaagaaggaaaatttccaatcatagagaaagcaaaaagaaaagaaagaaaattcccaatcaaagaatgggagaaagtaaaaaaggaagaagaagaaggaaagaaagctcctgatcaaggatcgaaagataacagaagatatgtgcagaaaggtctttggaccggacaatatatgaacaatacagaattgtcaccaaatgaacgaaaagaaggaaatgaaaccatgacctaaagtggtcttcttcctt

SEQ ID NO: 238472 - DNA, 366 bp, Glycine max
  unsure (1)..(366): unsure at all n locations
tttgttgtcctagcaacctggctgtgaccttttgtacaatttacctatatgacaaagctnttgtgtagcagtttatgttgagtgactccattatcaataatctaattgattgaatacatgtttttagctcattaaactgcttgaatatcttgagttattgagtgtaggttctttataaattcactgccagtgactacctgcctggcatgttctggcaaggtacatggccatggcgctagcttctaattgatgatgagtataatagtctaattcatttgtggtcttcaaacatgacctaacataggaacttcttattgtaacgntacttcctcctttattccaaaatcaatgattgttaatattctt

SEQ ID NO: 238473 - DNA, 285 bp, Glycine max
  unsure (1)..(285): unsure at all n locations
agcttagctacacacacccctctcataactaagctcatctccttgagaagcttccttaagaagaatcctaaagaagctagagcttagctacacacacatctataatagctaagctcacctccttgagatgagaagctagagcttagctacacaccccctataatagctaagctcaccctcatgacaaaatgcatganaatacaataaattccctactacaaagactactcagaatacctcgaaatacactgcatatacctctatactactagaatgcgcaaatac

SEQ ID NO: 238474 - DNA, 267 bp, Glycine max
gctgacattcaacgaaatactgatcacggtgttcgttgagtctcgcaatatatcgatacgctccagattgaaaacataagcccgtagacaattcaaaggacaataactctttactcggatgtccgatagagtctcgtaatataatgggacctccaaattgaaaatggaggctcctatcatattcaaacgacaataactctttgctcggatgtccgactgagtcccgtaatatatcgagatgctcgaaattgatgacacaagctctga

SEQ ID NO: 238475 - DNA, 380 bp, Glycine max
  unsure (1)..(380): unsure at all n locations
agcttgagaatatcatgccttgtccttctcttcacgtcaattctgatctgccaagaagctcgtcctctacctttcaccttctcaagaagtaatcaaagccatgcattttcagggagtgccacaaaattggttaaggagcttttgctaaggaagcaattgcttggtacggaaaattatgagcctaatcgactcagtccaggtggtccagaccctcttcatcactaatgaatgtgcaattaatgcatgaaaacttgagaatcatagattcatgcaacaggaaaaggaaagattgttattgtcactgcatttaccttcccacgtacgcattccttttagaattangagtccataaatcatcttattgcataaaatgatttatt

SEQ ID NO: 238476 - DNA, 348 bp, Glycine max
  unsure (1)..(348): unsure at all n locations
attttcccagtctggccgttgggagtttgagaataataactttnggtctcttgctaagcaagaatggagcgctaagtgcaattccaaccaaagagggaatcgcgttgagcgcccagaggtgcgctaagccagactccaacagagagggaattgcgcttatcgactagaggtgcgctaagcgagccctagtgcagagggggctgcactaagcctaaattcttatgctaagcgcaagaagtggacttcggcttagcgcgacaggctcgctaagcgaaatctgcaacttataaatgcgttctcagtgtgaaaaacatgatntttcactctcttcttctcctaacaccaccc

SEQ ID NO: 238477 - DNA, 418 bp, Glycine max
  unsure (1)..(418): unsure at all n locations
agcttcctcgtggcttctttgagaacttttcaagaggcttctttgagaagctacatccttatctatccacccctctattaactaaattaacttccttaaaaataattacggatgaaaataacgcaacaaataatcaaacatcaaacataattactaataatatatagatatatatatatcagggtgttacaactctcccacccttttagaaatttcatcctcgaaatttaccttactcaaacaaggatgggtgagcttctcgcatctgaatttctaattcccacatggcatcttctcctgatgcacctccccatatcaccttgaccaacgaaatctcnttccctcttaggtgtttggtcgccaatcctcgatcctcaaaggcaatatttcatatgtcaaattattcttcacttggaca

SEQ ID NO: 238478 - DNA, 245 bp, Glycine max
  unsure (1)..(245): unsure at all n locations
gaaatcatatctagntaagggctaagagaccatacaagttttctaacgatttctaattattggggccattaagtctatcatatgctgaccattaccgagaagcccatgaatctttttcggggcggagtaggtgtctgccatcgccttggccttggctaacaatcggggaagatcttgactctcgttcagggaagagcaaaccgatccattcacatggttgcctcttggtgtaaagagtcgatcac

SEQ ID NO: 238479 - DNA, 380 bp, Glycine max
agcttgggaggattgatggggacccggtgtttatttattcgaggatatgagctacgtgggagtacgtgagctcagttggaggtgggcaacaggggatggtgggtttatgtgcgcattgtggatgtggaaaacttgttgtgcaccatcgcccgaccgccacctagtaccacatgtgatgggtaccccataatcctacaagcttgagatgaggaagtgttgaagggcgaaacttcctacttttattgatgaccacagagtggtacctggagatatgtcgcgggggtcaggagaccttggtgacgttaggtggggtgctattgcccaaaaccaagcttgaccaatcccgaaccaacccgggcatagtcggtcagggagaacct

SEQ ID NO: 238480 - DNA, 339 bp, Glycine max
  unsure (1)..(339): unsure at all n locations
gcctcccatcagtggtaccttaagtttcatgggataatatcttcatttggatttgatgaanatcccttggatcaatgcatataccacaaggtcaatgggagtaaaatatgttgtcttgttttatatgtagatggtattttacttgtagccaatgatcggggtttgctacatgaggtgaaacaatttctctctaagaatcttgacatgaaggatatgggtgatgcatcttatgttatcggcattaagattcatagagatagacctcgaggtattttgggtctatcacaggaaacctatattaacaaaattctagacagatttcggatgagagattgtcac

SEQ ID NO: 238481 - DNA, 387 bp, Glycine max
agcttgcagcaaacgctaacgacattttacttttcactcggaagtccgattgagtcccgtaatatatcgagacgctcgaaatttaaaaccgaagctcgcagctaattctaacgacaataacatttcactcggaagtctgattgagtcccgtaatatatcgtgacgctcgaattttaaaaccgaagcttgcagcaaatgctaacgacaataacatttcactcggaagtccgattgagtcccgtaatatatcgagacactcaaaatttaaaaccgaagctcgctgcaaatgctaacgacaataacatttcactccgaagttcgattgagtcccggaatatatcgagacgctcgaaattaaaaccgagctcgtagctattccaacgacat

SEQ ID NO: 238482 - DNA, 289 bp, Glycine max
agtttgcgtcaattctacacttcgttaagtcagcgttgcttatacgcactaatggacttcgaggaaagtattgtcgtgaattgctcgacttcgatttaattcgagcgctattatgttcagactcatcgacttcgatgaaagtattgcgtcgattgctcagcttcgattaattcagctccgaatataccactaatcgacttcaggaagtattcgtagattgtcgacttctttaaatcagcgttattataggactatcggctcagtgaagttgcgtaattgtcacttgtta

SEQ ID NO: 238483 - DNA, 369 bp, Glycine max
  unsure (1)..(369): unsure at all n locations
agcttttcgattcattgtatgcacccatggttgtctacattgtgnttcgcgcatttttactctcgttttgtttactttttataccccctcttgacgcgcttaagccgatttacttaagtcttttcttgcttaacttaaaaataaaataaatttccaccgaacgttagaattatattatccggtaacttcggttaaaatcaattccgactggtcggtcgtgccgtaaccacgttggaaattaaaaagaggcaaatacattatgataatcataaaacgccttttaataaaaataagcggaaaatcaatcggacggtttctctttgggatttctcattcttaaccgacttgattaataactaaagtgaaact

SEQ ID NO: 238484 - DNA, 174 bp, Glycine max
  unsure (1)..(174): unsure at all n locations
tactcaagcttcttgcgtatgcgctcttgctgctcagagaatgccatatactaattcctcttattactagctattctgaattctttacgtcctgaatgtacaaccttcanactggtgctcgttctcctctttgagaatgacgaggatcttcatacgacttcatccagtttgatg

SEQ ID NO: 238485 - DNA, 411 bp, Glycine max
agctattcttgagaaggtaattatttttcttaatctagccatttccaaaacttttactcaagcttctaaccatatgaaacgagtcctggcgtaacataaatagttgacattataataataataaaaaaagattataattgtcattgacctaataaccttaaaattaagaatgtttattctttcatttaagcggctctaaaatgcaatcctttaaacatgcctaacctaaccacaaatttcactagattttgcatatttggtcttgctgcaaagttccatgcctctcaataaaagcatacattgcttatttttgcattaaaattaattctaggctagcattcattcattctgaatttagaacagattgatacctgaataaagaaacgactctttattaattaagcccccttg

SEQ ID NO: 238486 - DNA, 289 bp, Glycine max
  unsure (1)..(289): unsure at all n locations
cattaaggctaaatttttgcaaatatttgcactacaatttataactttggctcatatgattgaagagaaattctatcatcattaatcaagttgttcaattggagagaaatcctaatctttttcttttttcctctctgccaatggcaccattcacacaaaagaaaatttagaaaaataaataaatactgcatagtaaaagaaagagagaggttgcagtttacctaaggtgttgtcgtatcactcanattatcctcagaatcatcattgttcaatgtgatacggagcaact

SEQ ID NO: 238487 - DNA, 391 bp, Glycine max
  unsure (1)..(391): unsure at all n locations
agcttggggggctacctctcctgctatttctatgaacaatggggttcttgagtgaggggggagttttgggtgaagaaaactcaccccaaccccctttttatctaactcgttcagggtgtgctagcccaggtgagctaacttttttttttgaattattgaaagctagtttaaaaacagggatactcacctctcttcgtgcccttgattgcgtgctccatgcagcattactgttgatcctacaagttaaaaaaatgcaaatgcatgtgcatgttcttactttcggntatttccttaaattcacgcttggggcacccctatgatccaagaaataaatgttttaaagaaaacaaaactaacgctatcagtggtgaaaaaaaaagaactcatttta

SEQ ID NO: 238488 - DNA, 309 bp, Glycine max
gtgatcatcaattcccaaacatatgggagtatgaaatgagtgaacgcaatatatcttgcatatacattgcttgtatcttgagttcacgaattaaattgtcatcatctaaaatgaggagattgtaaaagcaaagactttgcctttgatgttttgatgatgccatatgatcgtaatgtattgatgccttatgaaaaatgtgcttgtcaagtttaattcaagtgattaaatggcggttaagtgatcatcaattccaaaacatatggggagtatgaaatgagtgaacgcaatatatcttgcatatacaatgct

SEQ ID NO: 238489 - DNA, 383 bp, Glycine max
  unsure (1)..(383): unsure at all n locations
agcttctagccaaatagacttaccttgaatttattcctttgatagcccttntgagccttgtttccctttccgtggtttgaagctcactacaagccttaagtgaaaaaccatgatatcaccatatccttaaggaattttggagctttggaattgttttgggaataagtatggggggtttttgtttcattggacaacttgttttgttggctatgcttcatgaatgtatttgggccatacttgatgtacattgtatattggataaatattggacatgctgaatgaaatgttgtttctcaaaggccatagagtaaaaaaaaaaaatattcgaaaaaaaaaaatcgacaaagaaaaaaaaagcctaaagttgaggaataaatcttaat

SEQ ID NO: 238490 - DNA, 307 bp, Glycine max
  unsure (1)..(307): unsure at all n locations
tcagatatcttaagaaggnggggttgaattaagatatcccacactacttccccaattaaaaatctatttcactttcttttcaagttataaattcccttaacaatgaacttcttaaatattaattcaaataaaacaatttgaatatgaatataaagcaataataaacaaaggagattaagggaaaagaaagtgcaaactcagatntatactggttcggccacacccttgtgcctatgtccagtccccaagcaacccgcttgagaagttcactatctttgtaaatcctttttacaagtctaaacacaca

SEQ ID NO: 238491 - DNA, 257 bp, Glycine max
cactcccaaatatatatttttggggatttgatcctccttgtgggagttaagatggcatatttataatagttatgactcattaatatgatatatatcttaaattttgaacaactaattttatgaatggacatttagatatagatatttggcactggtctaagtacttatgtgtttctactgagtttcaggttatgctgtcctcttgtgagcttgagatctttttttcttgatcgttatgtccttttggttatttgtta

SEQ ID NO: 238492 - DNA, 53 bp, Glycine max
ccccccacacactcctttaacagaaaaaccgcactcctcccccctaccccccc

SEQ ID NO: 238493 - DNA, 402 bp, Glycine max
  unsure (1)..(402): unsure at all n locations
cccaccaccccccccacaaggggntatgatgacctgacacgggaccanaagnngacgcagcagcaagccacacaaaggagagaccattttcagacgcaacccacaaaacaccaacctccccccacccaacccaagggcccaacaaacaccacgccccccaaccaaccggaacacatcaccccacaccctccccagctacaggacacgccacccggcccacaagatcgcaaaactccgcacaaggcccaaaaaccgccggaacaaaccactaacccccaaccaacgccccgcccaacccccccgcaccacccactcacgaaaacaccaaaccatccccccgcagcaaccccaagcacccaaaccgcacgccccccaaccccgaaaaacaacccggaaccaaac

SEQ ID NO: 238494 - DNA, 256 bp, Glycine max
  unsure (1)..(256): unsure at all n locations
tcaaaggtgatcaaataacaagcagagattaaaaggtactacgttccctcctagtaacgcctttttaacgtcttgagctggacaccttatgactttgtggtcacgggcctagtactttgcttaccttaggctttggacttggtcgcctattggttgaccatgtgtcatangcaacgctctaaccttattgtggatgagctgaggtgaactctataggtggtggcggtgcgtctgttgctcgttgccggccattctt

SEQ ID NO: 238495 - DNA, 258 bp, Glycine max
gggggagtcgaaggtggggatttataaatggagaggagtggaactttgaaatatggtttacaagactgttatttattaaagttataactagtgttacacatggttttatttataaaataggtagttttcttgagaagctatgttgaagaaatgttcttgagaagcttgattgagaaaactgttttgagaagctaaaagttatgtaaacacacgttttttataactaaggttacctgtgtgaaaagttttttaagaata

SEQ ID NO: 238496 - DNA, 130 bp, Glycine max
cttccctgggtgaactactatgcaacctccaccccttatttcctataagtaagcatgccgggggggggggggcgtttctcttttattcctaaaatcacgtctacttttcactaatccttattcaatttcc

SEQ ID NO: 238497 - DNA, 352 bp, Glycine max
gctttataagcgcgggtctgagagacaaatgtctagtggtcgcgatatacaaagatgatgttccgagtacattagaattggtatgaccattccctcctgatttccagctgggaaattggcaagtggaggaacgccacggcatttacgcaacgagcataatgtaaacctttacggttttaaaagctctatagttgggcctacgctttagagtttttttctttttgttaaggctttgtgtctttagttggtgattttataatacaaagatctctcttcatctgttcctacgtctctacccattctcattcatttgcatggttacttctttttctgagatggcagaacggatgat

SEQ ID NO: 238498 - DNA, 369 bp, Glycine max
agcttatgcgcatacttctttacgaacattcacttgcacaagacattcttataactaagaaaaatgcacccatatacaatcaaggcaccttcgttacctagattatttatatgtacttccaaggtgtatttgttacctacatctcctgcacttccttggctaaatttacatacatgcgtactcaaagcatttggggtaccaaaaattgcacatgtgcacattccggtatttctaatacttatgcatatacaaactttgtgatgaatcttggctatctacacaataaggtgatacatttcatgctttaactcaagtgttttgctacctaaagccgcatgcaaattcaagtattattttctttgctgacta

SEQ ID NO: 238499 - DNA, 341 bp, Glycine max
  unsure (1)..(341): unsure at all n locations
gacaacccgantaggagacattcctatgggtgctttgtaggcacgccgatgtgcccaaagagcatcatcaagcctggtactccaatctttcctgtttgcttgcacaatcttctctaaaattctcttgatttcccggttagaaatttctgcctgtccattggcctggggtggtatggtgtggataccctgtgtaccaccccgtactctttaagtagggcatgcattgtcctgttgcaaaaatgggttccttgatcactaacaattgctttaggtactccaaacctgcaaaacagattatacctgacacaaggctgcacacactttagcatcattagttctag

SEQ ID NO: 238500 - DNA, 455 bp, Glycine max
tactcagctaagaatctttatggactaaacatgcaccgagcatttttgtgtgacttagaaacttccttcttgaacaaaaatttgagagaggaaaagttgataaaacacatttcattaaaaagttctctcataacattttactcatgtaagtttatatggatgacatcatttttggttctactaatcgatctctttgtgaagattttgtacacaagatgcacgaggagtttgaaatgccaataatggggggggggattaaattactttcttggtctctatgtgaagaaaattgaccatggaacatttctctatcaaacaaagtattgcaaagaacttctcaagaagtttaagatggacaaaagcaatgaggatgaaactcctatggtactaattgctaccttagtgcagatgaaaatggaaagtcatttggtcaaacaaaatatagaggtatcatt

SEQ ID NO: 238501 - DNA, 437 bp, Glycine max
  unsure (1)..(437): unsure at all n locations
ctgcagcttancaactctttctttntggttagttaaaacttctaatgctcttaatctctcctcgtctaaatcaactaactcatctgacatcattttccaataatggtcgattaaaatgtccatttgtttttgtactctggctgattgcaaatgtatttcgaccggaagtacagcatcgtgcccataagtcagtcgaaatggggtagtattagttgattccttaagagaatttctacatgcccatagaacttgatctaacgttttattccaatttcttggtttttgggcaatgtgttttttaaccaagttaattataatcttattggctgcttcgacctgaccatttgcttgcgcgtaatatggtgttgaggttaataatccaaagccagttttttgggcaaatctttccattttcgtcagtaaaaactgaccttgat

SEQ ID NO: 238502 - DNA, 352 bp, Glycine max
  unsure (1)..(352): unsure at all n locations
gggagataggtaggtaaaataggcttgtcatcttgagggatcaggggccagtaatcaaatagatgtggataggataaattcacctaattgataaagaaaaatccaaaaccataccgtctaagaaaacaaggcatgctaaggcctaatgttctcattctactgaattctctaattaattattttgctttctattattttctctaccattagaggttatctattagtattattgtacttattttacaccactctttatttcttcccttacgaattgaaaattacacaataaaagtacaaaaaanaatccctgtgaaattcgacactcgaacttctgaattntaatacttggaca

SEQ ID NO: 238503 - DNA, 317 bp, Glycine max
  unsure (1)..(317): unsure at all n locations
ttttgtttgttgaccacacaatggtagggggagatatgtcgcaggggtgacgacaccttanggacgtcaggtggggtcctattgcccaaaaccaagcttggctaatcccgacccaacccgggcataatcagtcagtgagaacctgtgacgtacctaaatatgcgagctcctggcagtcaaccaataaaagaacaaagtccacgaaacaaagatgcttgtgtggcggctggccaactatttttcttgggtggtatctggaaaatagcctctggtaatcgattaccattcggtggtaatcgattataaggcttaaaaat

SEQ ID NO: 238504 - DNA, 352 bp, Glycine max
  unsure (1)..(352): unsure at all n locations
tcttcatgcactcctctaatgacaataacatcatttctggcactaagttgctggaagttggaagtcatcttctcaattaaatttctggcttcacaaagggtcatgtctccaaaggctccaccactggcagcatctatcatacttctctccatgttactgaggtcttcctaaaaatattggaggagaagctgctcataaatctggtggtgaaggcaattggcacatagttncttaaatatctcctagtatttatataagctctctccactgagttggctactgcctgaaatatcctcttctgaaggtcgctgtctttggaagcacggaaaattttttctatgaatactctctt

SEQ ID NO: 238505 - DNA, 351 bp, Glycine max
  unsure (1)..(351): unsure at all n locations
agctngacccatcccaatccacagagtgacttcttttatacatgatcaccaacctcaatgtgcaggtatttcctcnttcttttcagataactcttctatctactttgagcaatcctcatcctctcttggataaacttgaccttcttagtggtttattgtatgacttcaagtcctaaagtgaggttctctccgggttctagctagcatagggatgttctacaccttctaccatacagagcttcatagagagccatgccaatggtagaatgaaaactattgttataggtgaactctaaaactctatcaacgacaagaaactctcccaacctcctttttgttctaatatacaca

SEQ ID NO: 238506 - DNA, 375 bp, Glycine max
  unsure (1)..(375): unsure at all n locations
agcttcttnctaaagtaagaagagtatatatgttctttaaaactctgatgaattgaaacatacacagcangagtatctggaggtggcagattctccaatccttctaatttttttttggaacgcacaaaatatatagtattattaataagagcaatagtaccagaggtacttaagtgcatttttacaacagtagctatgctgtcagcctcccaaaaaacacatataaacccatcacaagtccccaccaacagacaaaaactccccatattaaccaaaggcctccacaagtccccacatttcttctatgaagattatctctagtaaagagcctatcctttataagcctccaagtgaaaatggcagcctctgggggga

SEQ ID NO: 238507 - DNA, 256 bp, Glycine max
  unsure (1)..(256): unsure at all n locations
ttttttagtatctcattcaagctctggcacatgtgcctattagagaggagcaaaaagggcccacattcactttgagacggtgaaccacactcagtcacaaaagagagaaaaaactgacctttgaaacgctaaaacactgcctcggngtgcgagccatttctctgggtccagattctcgcatatctctgcgtccgtcagggcccagtatccacaagcagcaatatatatatcaaaacgctcaaaataaaaccccgag

SEQ ID NO: 238508 - DNA, 415 bp, Glycine max
agcttagagccaaaatactgactcaccatataccttgacccaaggtgagaatgtcaatccttaccctcagaagccaaataagggagagggaaaatttccaatcaaatagaacgccctaaatgaaagaaagaaaatctcccatctaagaataaagagaggagaggaaattcccaatcaaagaatgggagaaagcaaaataaaaagaaagaaaactcccaactctagaatgggagaaagaacaaagagaacgagaacaatgaaagaaagctcctgatcaatgatcgaaaaataacataataaatgtgcagagaggtctctggaccaaacaatatctgaacaaatacggaattgcacccaatgaacataataaagagaagaaaccctaactaaaagtgttctctcctttgataccaac

SEQ ID NO: 238509 - DNA, 431 bp, Glycine max
agcttatgttgcaaacatatataatagaccttcttagcagtcaaaccaacaacaacagaataattatgatctttcaagcaacagatacaatccaagttggagaaatcatccaaatttgagatgggcaagtccttcacaacaacaacagtctgtccctccttttcagaatgttgctggtccaagcaagccatatgttcctcctccaatacagcgacaacaatcacaacaaagacaacaagcaactgaagctcctcctcaaccttccttagaagagtcagtgacgcaaatgaccatctagaatatgaaatttcaacaagagacaagagcctccattcacagtctgacaaatcatatacggcagaggctacttagttgaaccaactcactccacaagtctgacaaatgcctcatatactggcataatcaaaaat

SEQ ID NO: 238510 - DNA, 314 bp, Glycine max
  unsure (1)..(314): unsure at all n locations
cgctctanattacattgatgtttgtatttattggagggggttgtattccatttttgttttaagggtagcatttcttggtaaaaactaactttccaaatgtttgccttcgcaggaatggccccgaggaagcttgcctcaaagaggtccaggaaggacaaggcggccgaaggaactagttccgctccggagtacgacagtcaccgctttatgagcgctgttcaccaccagcgcttctaggccatcaacggatggccgtttctccggaagtgatgcgtacagcccatggccaagtctgagtccaaataccccttgac

SEQ ID NO: 238511 - DNA, 191 bp, Glycine max
  unsure (1)..(191): unsure at all n locations
actcaagctacaagaaaanagtngcctaatcatttgcaaatatgcatgtgtattttgacgcatcaacaagaatcaagccaaggctattgtgcaagcaatcaatggggcaaaacacaccaaatgattataatgatggatggttcaaattctcacaaaggcaaaatcatcacttccaaattgagctttcaaaa

SEQ ID NO: 238512 - DNA, 337 bp, Glycine max
  unsure (1)..(337): unsure at all n locations
acatcatttagaaccttattntaattttctagctccttctctaacaagcccaccgaggttttcgccttctttaccttagcctcccatcctaactctttattcttcaaaagttgaacttgagattttagagtgttcacttcagtagtcaacttagtattagaaatgatggtactctgaaggtcctcgacaaactcaactactttcttcttcaaactctccacctcttcgacttgtgaagggacttaagaatgttctataacccaatgctgaataatcatcaaaaagtgagtgtgcatgtcaacaaacgtctccgaacctaaaagaataccagtataag

SEQ ID NO: 238513 - DNA, 197 bp, Glycine max
  unsure (1)..(197): unsure at all n locations
aaaactaagctatgaacactagctaaaatattacagatgtagaacangctaactttattntttnttatcataatgctttatatattctctttgtttttctcctctttttcattgatttgtgagatgctaacgtgctttttaatttgagtgcacatatctaaacaaacttatgtgtaaacttctgaaaaaaaaatatt

SEQ ID NO: 238514 - DNA, 249 bp, Glycine max
tctacttcaaccgatatgcccttatgcacggcaatacataacatagaaatcacactcggaaagggtggacaattaactagagcagcaggtgctgtagcgaaactaattgccaaagaggggaaatccgccacatctaaaataccttctggggaggtccgtttgatatccaaaaactgctctgcaacagtctgacaagtgggaaatgttggagtaaaccataccaatttacgtagagccggatctaaatgt

SEQ ID NO: 238515 - DNA, 165 bp, Glycine max
tgctggtgaagcttctatagaggccggagcgaaagggcattgatgttcttcaacggcgacacttcaccatggagaagcagcgaaagataaaggacaagacgcgagaggaggcgccaaccactacggaataagcctcggaagaaggagccccaccaccaacaaagc

SEQ ID NO: 238516 - DNA, 248 bp, Glycine max
  unsure (1)..(248): unsure at all n locations
ccggactcaccacttcgactgacgagctgagctaggggaggtcttccagcacccaagggtagcaaggacgcgtcgcaaagagaagcaacctttctcacgtcggaatagccaacggaaacggctaattgcactgtacatggaatcgccacccccactggcgagccgcccttggagtacacattaccaacggcgagatcaccagcattaaataggcactccccttccacataagccgtgcgttncgcaaa

SEQ ID NO: 238517 - DNA, 326 bp, Glycine max
  unsure (1)..(326): unsure at all n locations
agcttctatataagctgaaccattntatctattatcataagttgagttttattcagnaaattagagtttatctcttttatcttagtgagagtgattctcctaaattcttgagtgattcaagaacaccctggctgtatcaaaagactttcacaacctttgtgtgttgcccttgccggaaagagtgattctttccttcctttcatcttcaaccttgttctttcaaaccacaattccagaaaatccacttctgccaattgggcccttattacaacatgaactaaacctactaaagcccttttagttgattaacccaaaacatatttttg

SEQ ID NO: 238518 - DNA, 186 bp, Glycine max
  unsure (1)..(186): unsure at all n locations
agagaggaaagggaccaatcacgagtagacggttngatcngatagatgacttgaaggttggctgaaggtccaaaagagacttgactcaccggttatgcgaaacagagaccaacatgctagccattgtcagcaggtgccaagaagaactaaatatagccacggcccacgagcatatagtggtggacg

SEQ ID NO: 238519 - DNA, 436 bp, Glycine max
  unsure (1)..(436): unsure at all n locations
agcttccccaacatcaaagcaaaacaactttctatcagcacaagctatcacagccaagcaaaacagagcaaaggcagaaaactctgctcaacacatcaaccaaaatcacagctnttctcacttaaagaccccagtaacaattccttcgatccaattcgttaaccgttggatcgactccaaaattttactggaagtctatagtgcataagcctacattttgaccgttgggatctactagcaaacatccagaactcattctgcactgctctttccacaaccagcaaatgcctagtatttttctgcacttgtgcaaaatcctgctgcacaatttcacagcaaaaatctgcacaaaacgcagatttcgaaaaccacacttcctctcatccaatcttgcccaaatcaaatcctacaagtcccanatcatgtatcaatcatg

SEQ ID NO: 238520 - DNA, 180 bp, Glycine max
gaatgaagaacgtcgaagaacgggtgaaacctttgcgaaattcttcacggaaaacgttacggaaacgtttcggaagcgcctcggcttagattttcttcacggaaacaatttttcctagcaaattcgagagagagagaagtgcgttcggggctgatacttcttatttctccattcttggat

SEQ ID NO: 238521 - DNA, 311 bp, Glycine max
  unsure (1)..(311): unsure at all n locations
atcgattgtcattccttttctctgatctcgaatataatcctntatagattacggcgtaactttgttgttatcaacagccacaaactatttaactagataactttaagttataagctaatgtaaatctatgtgtactcacgtggacgagcatgaatctcccacactggaagatatcaaaganaatgaaccacaatttcacagtatcagtagtgctgtcgtaaaacgagctgcacttgactttggtttgtgactcctttcttagtgcagagtcgtgtccacacaggctactcttctcttttggctgaatttac

SEQ ID NO: 238522 - DNA, 319 bp, Glycine max
atgcaagcttctagtcgtccatagagctcctctgttgtactgtctagcaaacgctgcatctgtgcattcatcgcatccactaacagacgttgagcgccgtccaactgatggtactcgtcaccaccaccacctgctccaagcataattcaacaggaaaaaaaaaatgtgcaataaaaattattaaggtttcaggacctcacaacactctactcacgtctcttatatggcagtacactccgagttaatgctctccataaggctttgcgtaatgaatccctttctgcttttaccactcgtgtttcctcataaagtcctggaa

SEQ ID NO: 238523 - DNA, 346 bp, Glycine max
  unsure (1)..(346): unsure at all n locations
agctntgacttgagtcatcaagagattattaatatgtgaccatggcatgagattgtaatcatctttttcaacatctctttcaacaatcaagaaatctatctttcaatcttctttctcaacatcattcaactctttcaacagattttgtctgattcgttttctcttcatctttctaaaaggtgttgttcaaaacttcttctttccaagtaagttctttgttcacaaacttgtgctattcatcttttcattctcttctccctttgccaaaagaacaaaggactaactgcctgaattcttttgggtctctgtcctccctttgcgagaggaatcaaaggaccccgcctga

SEQ ID NO: 238524 - DNA, 109 bp, Glycine max
gccactctggatagtaacagaaacctaaaagtcatcattcccacttcacataattatgatcatatctaatacataaataaattataaatgaatataatacttataatta

SEQ ID NO: 238525 - DNA, 440 bp, Glycine max
  unsure (1)..(440): unsure at all n locations
agcttccatcaggaataacctatgaagactcattcctgagatttgaattggaacttgtgcttgttgtatggtctaagaaaggggaagcatgaccaaccaaacaccctaagaaatgaataatgaggaagtttgttgaacagtttgtgataaggaaccccattgtcaatagttgaagatggcaacctgttgatcaagtaaatgctggaactcagtagtgtagtggcagtttggcctaagaaagaagagtgacaccaagctccactatgttcgataaatcagattacggagtgggaggaaagatccttattcaattctccactgtgtgttcaatcttcaatagtaaaattctactctgtgtgattctctccacctaggttccatctcattttctgagtcttcatatcctcttgcttnctaatcgaactgacttttgttacaat

SEQ ID NO: 238526 - DNA, 295 bp, Glycine max
ttaatcaacaatgtatcatgtatatgagatcaaatttccttttcagagctatacttactaaaatctagagttgtccctcgtcagggtggacgtggccaaagtaggctctaagatctcgcacgtcggactgagagtagcctttgtttataggacaagaggggggacctgctaaataaaggacttcgacactaaagtaagtacgagagttaggtgagaataaatttttgtaaaaggtgagatagaacctggtacttatagagtggagtggaagctgcgggtccttatttgttgggat

SEQ ID NO: 238527 - DNA, 323 bp, Glycine max
  unsure (1)..(323): unsure at all n locations
attttgttaaaccaagcatcttttgtatacaaactctctaacttttttatttaattctctaccatttatttttaatattctatttattggtgcatgcgattgactcttctttttgtgtattgcattcaaaccaagtcccaaaatccaccactgcaatatgaacttgatattgataagctcattcacaacttcaaactcatacccttatggattactccanctatacctgtggggacatcaatcctatcttactgctcaagcctttagaaagaggcactcttgacttcaagcttatgttcctaccaatgatggagaacaaccta

SEQ ID NO: 238528 - DNA, 425 bp, Glycine max
gctaagccagctctgtgtttattatagttattaaaagttgtaggaaattcatcaagtgatagtgtgttgttaacatttatctataattatttcaaaatggagaaaatatggttttttagttcatatttatatgattataccattttttttaattttaaaatatttataacttctaggaaactgattctcagaccaatttctaagttagcaatggtgtatatagattggttaaccaaatagtaatatgttagtgataaactaggaaatcttcttactaagcttgacagcacgataagctagaaagagcttattttgttgagcttatctctgaaactggtataattaagatagagcttatttgaaagctaaaaatgattctcatgagcccacaaagataatgtaattttctatgagcaaataatata

SEQ ID NO: 238529 - DNA, 409 bp, Glycine max
agttcctccccattatgttcccgttatatggtcacggagcaaacacgctacgtgtggtttccttcatattgccatgcatatcttttcaattccatgtttgtgtgcgtctctactatgtttttatttgatggtgttgtcatgcttgttcgtctaatatatttctattctgtgctatcaaccgtgagcttgcaagtatgtatatttgtatggtgttgtcactcatgcattgtgttgatctcgtcattttgtcacaggaagtcggaaagtccgcaccgccttcttaaatgcatacatggtgcactgtggtgatgactgcaaatgaaccatgacgcccgaatgtttgtgagtatgaagagatgatctctcgagctctcgtgtctataaaatgcatttgtgtcatgcataacat

SEQ ID NO: 238530 - DNA, 410 bp, Glycine max
agcttgagatgaagaagtgtcgaaaggtgtttctttctgcttttattgctgaccacagagtggtacctggagatatgtcgcgggggtcaagagaccttggggacgtcaagtggggtgctattgcccaaaaccaagcttgaccaatcccgacccaacccgggcatagtctgtcagtgagaacctgtgatgtacctaagcaggcgagctcctggcagtcaacagataaaaggaaaacaagaccacaaagcaaggaagcttgtggtggctggccacctgtgaattttgtgtaatatgtgagatatggcctctggtaatcgattaccacaggtgggtaatcgattacaaggcttaataatgaagacaggaagctaagatggtctcttgtaatcgattaccagggatgtaatcga

SEQ ID NO: 238531 - DNA, 327 bp, Glycine max
  unsure (1)..(327): unsure at all n locations
tatagaatgggatagaagctcttagaagcgtgcctgtaatctgtcaccataggctaagcagtagccttcatcatgaactattttttgtactatctgtcaattcatatacatatatatatatatatatatatatatatatacatctcagcaaactaaagttgaggatcctctttgtgtgcatattntcatactcaaacatttcaagtaattctaaagagtctaaacgtctaaccattttaattcatggaatctaaataagccttatagatgcaaacatccaagatattaccattcatgataagttaattatttgaaatagcactaact

SEQ ID NO: 238532 - DNA, 392 bp, Glycine max
agcttcttagtttcagatgatgcatatggttttgtagctacctcatgcactcctctaatgactatggcatctgatggtgggggaaactggcacatagtttcttaaatctctcccagtactcatacaggctctctccactgagttgtctaatacctgagatatccttcctgatggctgtggtcctggaagcagggaaaattctttctaagaatactctcttaaggtcatcccagctcgtgatggaccttggagcaaggtaatacaaccagtcctttgccactccctctaatgaatgaagaaaagccttcagaaatatgtgatcctcttggacatctgggggtttcatggtggaccacaccatgtgaaattctttaaatggttgtgcgggtctt

SEQ ID NO: 238533 - DNA, 377 bp, Glycine max
cttgaaatacgaatgtttgtgtgagtttttctctttttcttgagaagcctctacatgcacaagaatcttgccttggcttgaagcttttgcatgtgtaagaagttctagagagagaaaggtccaagttccaaagagttatgagagattttgttgtgtgaagatttgccaagaggagagctcaaagtggaagccattctgagagcttgagatgagtttgtgagatcctataggtggagtaaaggaggtttccggactatggaaagctaaatcctctattggatctctcctgtaggtacctaatgtaaatatatctctatctatgtaatgatgttttgtgtgtcctctgtgctatttgcttttcattccactatgccttt

SEQ ID NO: 238534 - DNA, 379 bp, Glycine max
  unsure (1)..(379): unsure at all n locations
ctcaatcagacatccaagtaaaaagtattgtcgtatgaattggcttaaagcttaaacattcaactntgaccgtctcgatatattacaggactcaatcagacatccgagtaaaaagtaattgcccgttgaattggctcagaggttaaaaattcaatntccagcatctcgttatattactggactcaatccgacatccgaagtaaaaattattgtcgtttgaattggctcagaaggtcaacattcatttttgagcgtttcgatatattatgggactcaatcaaacatccgagtaaaaagttattgtccgttaaattgcccataagtcaacattcacttcgaccgctcgattattacggactcatcagacatccgataaaaa

SEQ ID NO: 238535 - DNA, 134 bp, Glycine max
ggcaagaaaaaaggtcatgcaaccagtaaaaggtaagaagaggagggagccagaagcaataatcgccaagacaaaacaaaaaaaaaacccacagaccaaaaaagaccagcaccaagaaaagcagaaaaaggagc

SEQ ID NO: 238536 - DNA, 430 bp, Glycine max
  unsure (1)..(430): unsure at all n locations
gctggagcagacccatcaatctctctaactctcataaactagtgacctctaagctcttgattttgacttgatagaacctctttntaagcgaaggcttttgacttgatcccatgttgtactaaagtgaaataaaatctagtgcgaatcaaaactccgacatctatcatgggtggaatggatgaatgcatgaagaaatgcatatgacacagatgcaatttacgaatacgggagcccgagaaataggttccatcttggatacaacgtttgggcagcatggcacccaacgtatngttttttttaagaaggcgacacggaccctccgtcggtttgctatagtgaggggatcaaagacgaaacccacacatgatgcatatgcgaaaggcacatcaccgggatgtacatagtatgacaatattcacaaaccatataa

SEQ ID NO: 238537 - DNA, 247 bp, Glycine max
aaacagccaggcgcggacgagccctactgccctccaacgtgagtgactattgcgacgccatagagcctcgcgaaatagggccggccatacactacatgcaaccctcatgagctcttggacaaaggctctagcagaaatagcattctcttcccgtaacccggcacactccttccgaacgtgggtaacggccaacatgaactactccctggaaaggatgcctttcctaactcgcttaagagagcacgga

SEQ ID NO: 238538 - DNA, 343 bp, Glycine max
agcttcgaaaagtgttgtgtgtcaccttctttctaagccaatctgctggcttaacgagcatccgctaagcgcaacactcatgggctaagtgcgaggaatactctggaagaagatgagttgtacatgtttgctaagcgcaccacttcatctcactaatcgcactgcttcagttcatccgctaagcgagaaaggcatgctaagccaaaaatcactaatgtgcgctaaggggtccataagtgtgctaagcgcacgagcatgaacaaagccacctatttaagcctgaaatcagacttagagggagagtttggattgcgacttagagctttgcatgtctatggtttct

SEQ ID NO: 238539 - DNA, 380 bp, Glycine max
tgcaagcatgcaagcttaacacaatagtaagagggctactttgttgttacttggagttcacaggttcaaatctaggacacagctcctctttttgctgtggtaagtctgcatacatctaccctccccagaccccacttggtgtgagcctcatgcacttggtcggcctttttaatcctggtgttagatcatttagagattaactatcatgagtgtccaaacaatcatttgtcatttgtgcttcaatcttaattaatctcgtcgattctgggcttatcttgacagagaatcatcttagcttgagcttctcttattttgcatgcctagtgcctaactccttgagtctactttctttccatgaattgaaaccttcataaattctc

SEQ ID NO: 238540 - DNA, 415 bp, Glycine max
  unsure (1)..(415): unsure at all n locations
agcttaccaaaacatatgtcggttatgtgatttgacttgctgctttattcattntgagctgcatactacttgtttctgaattctaaatttctaaccagaaatagcctttctaatttgaatgcagtccaaatgtgtttcttgttactgagtttttgataaaatagttgtatagtttttaggatataaaaaaaatcctctgtgttctaagatgagtttgattaatatattgataatattctttgaatcttgtgccttgccatcttacatagaaaaattgaaaaatcccttgtgctggtaggttttggtttacttttatttccacattatgctgttctttctctaatttatgtctcctttttcttcatcagattatctttatgttgcttttgggcatctcatgtcacacaattattaa

SEQ ID NO: 238541 - DNA, 400 bp, Glycine max
agcttatgcattgctgaataataaaagaatatttgatgtgtagccttggtacttcgatatcaaatgatatagcaaaaacaaggaatacccgcgggaggcctctggcaatgacaagagaacattgcgaacgttggcggttggcggttggcttctttctaagtgggaatatcctatacaagaggaaccatgacatggtgctatttcgatgtatggacctccaagaggctaagcaaatgctggtagaggtgcatgaaggatcatttggaacacatgccatgtcccgcaaaattctgagagcgaggtattattggctcactatagagagtgattgttgcattcatgtgagataatgccataagtgtcaagccttcaccgataatgttaatgctccacccatacc

SEQ ID NO: 238542 - DNA, 189 bp, Glycine max
  unsure (1)..(189): unsure at all n locations
gggacatacacagagggtttcacggacagagcggcgattcttattntgaacatcatccaaaacnttgacaagtcattgatacttccataaataacgatattgtatcatgcgtaactatacgcattctcttattctgatcattgtgtgtagtgagattatttattccatgcaggaacatcaatcctattt

SEQ ID NO: 238543 - DNA, 377 bp, Glycine max
ctcgagagctttcgttattcaatttcaacccttctcgatatattatgcgcctggatcggacttccatttgaaaaggtatgacacattgaatatcttgagagcttgcggtgttcaatttcgagcgtctcgatatattatgagcctgaatcggacttccatgtgataagttatgaccatttgaatttctcgagagattccgttgttcaatttcgagcgtctcggtatattatgtgccagaatcggagttccgtgtgacaagttatgagaatttgaatatctcgagagctctcgttgttctatctcgagagtctcgatatattatgcgcttgaatcggacttccgtgtgacaagttatgaccattagaattctccagagc

SEQ ID NO: 238544 - DNA, 383 bp, Glycine max
  unsure (1)..(383): unsure at all n locations
gcttgcagcanattctaacgacaataactttttactcggaagtgcgattgagtcccgtaatatatcgacacgctcgaaatttaaaaccgaagcttatagcaaattcgaacgacaataactcttcattcggaagtctgattgagtcccataacatatcgagatgctcaaaatataaaacagaagctcgttgaaattcgaacgacaataacgttttactcggatgtccgattgagccccgtaatatatagagacgctcgaaatttaaaaccgaagctcgcagcatattctaacgacaataacttttcactccgaagtccggatgagtcctgtaaactatcgagacgctcgaaatttaaaaccgaagctcgtagcaaatactaacg

SEQ ID NO: 238545 - DNA, 339 bp, Glycine max
  unsure (1)..(339): unsure at all n locations
tagtgagaaatacttgtaaattttagaagttagtgaaacctggtggtttgtcaagagttgaacgtattctcagtagaagagatgaccaatataaaacttcatgcggttgatctttctctctctttgtggttaactggtctcgggtttgaaattgaatttgttctggaaaacatatttttataaaatatgttgatcatcatatgatcatatttgtgtcattgaaaaatctattatacattctttcaaatctttccaaacaatagcttgctttattntcaaaaaaggtttagaaaatttaaaatatcacaattcaaccctccccccttctgtgatatttgc

SEQ ID NO: 238546 - DNA, 339 bp, Glycine max
  unsure (1)..(339): unsure at all n locations
atctcgttgagatcttttctattagaatttaaaccgtggtgagttactgagttttatgcgatgacaaacaaatcatgttgcttaatttctagcttaaagggcaagattgtatgttaacaacctttttttgataatattgtagagataaggggagcaacatgagcaacatggtgaaaaacccacaagctaaagcttgaagctcaaagaaaagcttgaagaagttnttgcttttacatgcctaactcccttgagtggcatttgtatagggtggtgcatcttagtacatntgatatctgtattgcatagtgcatcatcatagtgtgtgtgaagaaaagtttc

SEQ ID NO: 238547 - DNA, 399 bp, Glycine max
agtcacctgaggctgcagcttcccataatagtagccaaatgttgttattgaaaacactgttatttcatttgtaacaagctaggcatgattaatatttatgctcaaacttgggaattgggaacaatggttaagaagttttatggattgagttagaattatactattgaaagtatatgggcttggcccaaatatagtttgcactgcattgtatttaaatcttaaaatattagcatataatacaaaaaaatacaaccataacgaaaatagcctttggagcattaacatttaaccagacccaagaaaaagaaaatgcgtaagacaaatatcaactaaagaaacatgttaaacaaatattggcattcaggaagtaacaactatttgcaagtaaaacttacatat

SEQ ID NO: 238548 - DNA, 437 bp, Glycine max
  unsure (1)..(437): unsure at all n locations
agcttatatgatacagtcctcaagagctttgttatctttgtcacccatttattctattatttacagttttttaagattgaaattcttacatgatgaataggtgtattatatgaattagttatgaaaatttattagcatgatgaacttttcaaataatttttctatggcatttgtgcttctctttaagtgacaagagttggttttcaagagcatagtctcatatgcttagagatgaaaataggttagcttactcctaagaaacttatggcttgacctatattatagtcttaggttatgcttttggctattgagaaaaactagcttagatataataactcagttaatntanataaatataaacataacaatgatattanttttaatacactgaaattttactatgaatatgttaaaatatatagttatataatctatta

SEQ ID NO: 238549 - DNA, 259 bp, Glycine max
ctgaaggcctaaagctaaatatagtgactgaacacaattaaaaaagattccgaacaaagggttatctctaaaagcaaaaagtggacctctacaatccttggctaacactgtatcaaaaggaatatttgaggccaatgtcatctacttgcaaagaacactctgcttctctcatccgaaagataagaaccaggctctgtgtaaaaatccacacaagaaggcgcctggtgtaaaccggaaagaacacaaaacggactccacc

SEQ ID NO: 238550 - DNA, 251 bp, Glycine max
ctgagtcaggcattttttttatccgctctcggtcatctagggttctttggccactctggagtccgcttgagaacttcagtctgttcggatgagagcccatcttgttcaatcatgtggtctcaaaggggtgtactgccccttttcatgctaaatattctaattataggattcaggcgttatcatgaattatcctgcaagtgacgagtcactactaactcgattttgaagttacgatacgtatacaaatgtac

SEQ ID NO: 238551 - DNA, 450 bp, Glycine max
  unsure (1)..(450): unsure at all n locations
agcttcttatgcaaaggaattcttggtggtgaanctccttcttcctaggcttatagcctaaaggatggtgcctcccctatcctcttctcctttgccttccgctgcatctccatggggaaaaatcaccatcgaaggacctcattgaagctcaaagatccagcctccgtagaagctccacaagcaagcttccatcaagtggtaatcagagcacaagagcttcaagtaggtgctccttaaacctccattaattatttttctttaccttctcttccattggtggttcttcatttttctccatagtatctctcacatgtcttgttctanatgttggtaacatgattctttagagnttccaccgattaaacttgctatagaaagtagattgatttctatgggtcaaattcttgtcttgttcttgaccatgaatgtgtgagttaggttctttgagtt

SEQ ID NO: 238552 - DNA, 405 bp, Glycine max
  unsure (1)..(405): unsure at all n locations
cttattatctataagatatcttctttcttcaatgaagcanaacaccgagcacttagtgtgcatgagaagctaccaccacaataacaatatccaaataacaatgaagcatatcaccaaacgtttggtgtgaaagagaaacatggactgactgatnttttttttcttccttgcagctttgtgagcaattgacgcataattgcgccatatgcagaaacaataatacaaccaaaatccactgaacaatggaaaaggcatcatcatcattattgcaatatttagtgtagctaagcggggacttggagagaggtttattgtaagcaacacaaaatggagacttagtcgctctctaagccgagacaaaattgcagtgcaaccagataaactacaacaaataacgaatttgag

SEQ ID NO: 238553 - DNA, 419 bp, Glycine max
  unsure (1)..(419): unsure at all n locations
cttagactaagattagcctaccatccttatactgatggccaaantgaatggaccatgtagtctctggaggaccttctgagggcgtgtgtcttataacaatagaggagttgggagagntttctatcgttgatagaggtcacttataacaatagttttcactctaccattggcatggctccctatgaagctntgtatggtagaaggtgtaggacacctttatgttggctaaagcccggagaagacctcaccttaggacctgaagtggtacaacaaaccaccgagaaagtcagttgatcaagaaagataacgactgctcaaagtcgcagacagttatatgataagaggaggaagactggaattgacgttgtgatcaggattttgaagtcctccgggctggggtggcaacattgaacctgaac

SEQ ID NO: 238554 - DNA, 187 bp, Glycine max
  unsure (1)..(187): unsure at all n locations
tccacttatgtgcgagaactctntgccaggacggggcaatcattaaanggcaacaatatcttctgggtcaccactataccattcttacaaaccatcgtagtctgaaagaaataatgacacaagcgatccaaacgttggaacaacatacctatctggctaggctcataggggatgactactatataca

SEQ ID NO: 238555 - DNA, 442 bp, Glycine max
  unsure (1)..(442): unsure at all n locations
aagtgacctgcggcatgcagcttacccttatggtcgttccttcttgtgttttgngctcgcacttgccatgattctctctttgtatggcacccaatatggggtgcacagtggtggttatgtgaaatctgacatgggttttgatgattaccctttttacaagcttcacaaccttgtgatggttgctgggcattccatttacactaatagtagctgaggcaaaattgagaaggaggattnttggtttttggagtcttatctcaagaatccaggccaagctgcctctgttgtgacacacattcatgaggggattgagattgnggcaagggatgactctgctttgctgctctctagtgggggagagactcggagagatgctggccttcgcagcgaggctcacagttactgtgctgttgcggatttcaacgggtggtctgtgagttgt

SEQ ID NO: 238556 - DNA, 199 bp, Glycine max
  unsure (1)..(199): unsure at all n locations
ctggtcctcctcatagatgtggcatgagagatcttgttcttttntcatctcccactccaagtaggcctccggatcattctttcctttaaacggacgaatgttgagtttaataccatcaattcggttttgtctatgaacaccatcattccctcttcttcttctttcttattcacaatcatctgtatttatccatctcctc

SEQ ID NO: 238557 - DNA, 294 bp, Glycine max
  unsure (1)..(294): unsure at all n locations
cccctctaataactgagctcaccttcttgagaaagttccttganaatattcctaaagaagctagagcttagctacacacaccgcctataatagctaagctcacccccatggccaaatacatgaaaatataaaaaaaggccctattacaaagactactccaaatgccctgaaatacaaggctgaaaccctatactactagaatgaccaaaatacaaggcccaaaagaaggaaaaaccaattctaacatttacaaagaagaatggatccaaccttgacccatgggctaaaaaatct

SEQ ID NO: 238558 - DNA, 263 bp, Glycine max
atcaaaaagaagaatctacttcaaccgatatgcccttatgcacggcaatacataacatagaaatcacactcggaaagggtggacaattaactagagcagcaggtgctgtagcgaaactaattgccaaagaggggaaatccgccacatctaaaataccttctggggaggtccgtttgatatccaaaaactgctctgcaacagtctgacaagtgggaaatgttggagtaaaccagaccaatttacgtagagccggatctaaatgt

SEQ ID NO: 238559 - DNA, 418 bp, Glycine max
  unsure (1)..(418): unsure at all n locations
gctatggatatgggtccagcagggagtaccaggtctatggaaatcactatctctctctcaggtgataaaccagatatatcctccaggaacacttcaagaaactctctaacaataaagaggtcacccatggaaaccattgtctctacttctaggttagatgagatcatgtacacttgagaatcttcttttaaagatgtcataactaggttggcagagataaacatcctatccttactcactctagaatcatcaaacacaagaagtttatcataacagtttaacaagacatggttggaagataacgagtccatacctagaattacantcaattatctcanaggcaacaagtcagatcaatcaatantgttctaccangaatttccacaggacanttcaacacacattagaagtaacacat

SEQ ID NO: 238560 - DNA, 170 bp, Glycine max
gctctgaagctgcggatgtgacaaggaggtgagagaaatttttattcatccactcgctcagcgtgcctagagcgctaagagaatcacacatcatgcgctgagcgagtaaccgctcatgctaagcacgccaacccctacccattggctgaaggggaatcgctaagcaagac

SEQ ID NO: 238561 - DNA, 459 bp, Glycine max
agcttatagaatatataataagagaacaatgacaattgaagaatcgattcatgtttcctttgatgagtctaatgctatttctccaagaaagaaggatattttagatgatattacagaatctttagaacaaatgcatattcatggacaagattctaaaggaaaaggagaaggaagcaatgaagatcctccagtagaagtcaaagcaaataatgattttccaagagagtggaaaacttcaagagatcatcctcttgacaacattattggtgatatctcaaaaggggtaataactagacactctctcaaagatttatgcaataacatggcttttgtgtctatgattgaacctaaaaatttaaatgaagtcataatagatggaaaatggataatagctatgcatgaagaactaaaccaatttgaaagaaataatggttgggagttagttgagaaacctaaaat

SEQ ID NO: 238562 - DNA, 173 bp, Glycine max
  unsure (1)..(173): unsure at all n locations
ntgggtgtgtaaagactaaagacaagagagggagcttattatttaattcagagctcccaaacaatgtcaagcctcagcaataatcaagtaatcaactataactagtatacatagttgaaaatatgcggccatgtgataccataattgtgtcacatacttatccactttggata

SEQ ID NO: 238563 - DNA, 389 bp, Glycine max
agcttcccgcattcgtactggaatgatctgttattgctttcctaaggcaatatcagtataattccaatatggctcccaatcgcactcagctacaaaatatcttcaaaaaggaaggtgagacctttaaagaatacacacagcggtggagagacctggcagcacaagtggcccctcccatggtcgaaagggagatgatcaccatgatggtagacaccttgcctgtgttttactatgaaaaggtggtaggctacatgtcgtccagcttcgcggacctagtattcgccggggaaagaatcgaagtacggttgacaagagggaagttcgattatgtttcctccacaagtgccaatgctaaaagaatcggaccactacggaaatagggaagaggg

SEQ ID NO: 238564 - DNA, 303 bp, Glycine max
tttgccttcttttaaagtacgtccactggtaaactaacttccaatgttgccttcccagaaatggccccacgaacctagcctcaaataggtccaagaaggacaatgccacccaaggaactatttccgctccggagtatgacagtcaccgctttaagaacgcttgacaccaactgcccttcgagaccatcaaaggatggtcgtttctcccggagcgacgcgtccagctcagggatgactagtatacttgattcaggaggaaaacggcccccgccgtgggcatcactggtactcccatggccagtt

SEQ ID NO: 238565 - DNA, 204 bp, Glycine max
tttaaaactctaccgcggtgcctagacttaaaagttccttctgctaaggctctatgcctttctggatcttgaattataataaaaagatctttcttcatctgtatctgcgcctcgctctatcctcattcattggcatatttatttctgtacgcctaaaaacaccaaatctgacgatgagtccatcgaggtactaatactcgggac

SEQ ID NO: 238566 - DNA, 367 bp, Glycine max
  unsure (1)..(367): unsure at all n locations
agcagccagctacgagacacaacgggtgaacgtttatnnttttccttcatacttgcaattgaagcgaagttacattaaatgcatatggaaagcttctactgagcaaatataaaaacttatcaagaaatatttacaactcctcccaaaaagaaccatatattgggagaaatatactcattattgaaaactctctcatcaaaagcattgcgaaagacactacaataacaccatgcctatgtaaaaaaccaattccacttaatgataaaaaacatatcaatttaatacacaatcattcgaagcaagtgaacacaatctacaccaactataattaacaacaagaaaatgtgtccaaagaacataccaaaac

SEQ ID NO: 238567 - DNA, 242 bp, Glycine max
  unsure (1)..(242): unsure at all n locations
tttttccaaaaaagcacaaaatctccaaatattagttgtctctcaatgggcgaattttacaagagtacgttcatccatcgccccccacacaaattatttatgcctatgaaacatctctacgagtactactacgaaaacactaaaaaggagtactatccccaacaaatgtntgcattcaaacatacatctttcacagttaacgcaacattcaatatcttctcgcaggataattcttctacctg

SEQ ID NO: 238568 - DNA, 83 bp, Glycine max
aaaacaaattaaccacaaaccgccaactcgcacaaagaaatagcacagcaacgcctcaaaaacacaccccaggaagaaaaaca

SEQ ID NO: 238569 - DNA, 354 bp, Glycine max
catttgcaatacaccgaaagcatgactcatttaaataggtgtcacaaatccaactggggataactgaacccaccaaacattttactatgaaatctactatgtcacaacacaatagtaacctgactaccaaatttgattgaaacaaacaagaaaatcaccttgattccaaacacataaagaaagtaaaacttcaataaaaggataccaaaagcactggaataatgttttgctctaagaagcacctacgtgcacgataccaaatggttacaacaacctgcatgttagtatctcttatattcaggaaacgaataattcaatgagagcaagcaatctcatattaagcaacccatgtgt

SEQ ID NO: 238570 - DNA, 315 bp, Glycine max
  unsure (1)..(315): unsure at all n locations
gacttaagacactgctgctgaaaccnaccaccgggggcgttttttgtttatagccgagtcttcctctgcccccattctatccgaaaccaccatatatatgggcacaatcctgttttgaaaattcgcaatgacccagctagcctccttgtgtttacataaactcccacctctattgatctacatttaatttttttcacactgtttaacttaccttaaaatttaaggctcaagctcttttatatgaaaatagaaacttatcggaatatattataggtataaggttggctttgcatcctgttgacacaagctgagtag

SEQ ID NO: 238571 - DNA, 185 bp, Glycine max
ttttgttcctcttcctggatgaaattttagggatgatttatactttgggtggattatgagggtcaaatggattttggattaggactgagatgattggtcttcgagggggataggaaaagtatctttgttaaaatcccttaaggtaaggagggatctactcttccgcttcagagtaatagtgtgtt

SEQ ID NO: 238572 - DNA, 309 bp, Glycine max
  unsure (1)..(309): unsure at all n locations
acataatgttataagtaatagaagcaaactgccatgagttataaattacgataaaatactatagttcagaacaaaaatgctgcagtcaacatcatctataatcacattatctataagactggttacctgaggttacctgtaacagttgcatattaacatcccgcggaacaccactcagcaaggcagaaatgtttccactcccacccactccttttgaacctgccaagtcataagcatcaattaagtaagccacgagccatgacccttcaacataacatataatagaanatcagagtaaactctcattct

SEQ ID NO: 238573 - DNA, 367 bp, Glycine max
tcatattataaaaattgttcaaatcatgtctcactagaattaattgattgatctaatatgtataaaaaaatctcaatacgaaaagattcttcatgtttgtaatatcagagattgattaattcaatacaattaattgattgatcttttgttatagtcaattaattgattaattcttcaaaattagtctccattgtaatactcaattaattgattaattcaatggagattgattaattcaatagaattaattaattgatctaatatgtataaaaaatactcaataccaaaagattcttcaatagaaataatttcatgtttggtttaatttacagtatttaactaacaatatcagaatatgatttttttt

SEQ ID NO: 238574 - DNA, 312 bp, Glycine max
ctgaaggctctatacaatggagtgaacattaatatctttagactgatcaacacatgcacagtggcctaagatgcatgggagatcctgaaaaccactcatgaaggaacctccaaagtgaagatgtccagattgcaactcttggctacaaaactcgaaaatctgaagatgaaggaggaagactgtattcatgactttcacatgaacattcttgaaattgccaatgcttgcactgccttgggagagagaatgacatataaaagctgggagaaagacctcagatccttgctaaaaattcgaatgaagtcactgtat

SEQ ID NO: 238575 - DNA, 52 bp, Glycine max
  unsure (1)..(52): unsure at all n locations
cgccccangaccccccaaacaatctccaactcccaaaaaccccaaaaccaaa

SEQ ID NO: 238576 - DNA, 208 bp, Glycine max
tcagtaaagtttgcgttgattgatacacgttaacattcattctcgagcgtcgtgatatattacggaactctatcagacatcccactagataggatcgccgtgaatttgtctacgtccaattcttttcaccgtccgatatattagtgactcaatcgatattcgactcaaaagtcattgtcgattcgaattggcctcataggttcaacat

SEQ ID NO: 238577 - DNA, 344 bp, Glycine max
agactggaaagcgggttctaacgactcctttgcggcttccacataaggcatagaggatgggcacctcaccaagatgtcttcctcgcctgatacgatgaccaaatgcccttccactatgaatttcaacttttggtggagtgttgagggaacaactcctactgagtggatccatgggcgccccaacagacacctgcagggggggttaatatccattacttggaaggcaacttgacaggtgtgagggcctatctgtactgagagatcgatctctcctctaacctctctcacgggtgccgtcaaaggcacgaaccaccattgaacttggctttaactgggaggcattg

SEQ ID NO: 238578 - DNA, 319 bp, Glycine max
  unsure (1)..(319): unsure at all n locations
tcagccggatcactaagcgacacgtgatcgctggttattcgctangcatcgccgccaagctcaattctatacgaacataacttatgtccatgaacctaagcaccagtcatggcagctaagctgaattcctagtggcaatgtgagcactaagcgagtccttatcatctaactgcatgctcctctgtacttaacatgcatcattttagctaagcccgcccagatcccggcttagcgagagttacagcctttctgaactacaaacctcgctaaacggaacttgtctcgcactaaccacagcctatgttaaaaaaaaactgat

SEQ ID NO: 238579 - DNA, 405 bp, Glycine max
  unsure (1)..(405): unsure at all n locations
agctnntaggtagatatgggcccatggtctatattttagcccacttatncttgtacatattagattagggtttcattatttttggaccttgtatttaaagctccatagtgtagggagggtatcctagtaatgtaggatttttcatcccttgtatattagggcacctaaactatattttgtattaggggtagttttctaatttcacatgcattaagtgcactatttgatgtgtgtgtgttgggagagaaatttaattgaattgggagaagcccaatccaactaaatattggaacttcctaagggggaggtgagtatttgcttgttacaccccattgccacatcatatagacacactttgtgcatgtccttcatgttttacatgccttatgacacctaaacaaactt

SEQ ID NO: 238580 - DNA, 292 bp, Glycine max
ttgaaaagctagaggggggctactcccacccctccaatagctaagctcacccccatgccaaaatacatgaaaatacaaaaaaaaatccctacttcaaagactactcaaaatgccctgaaatacaaggctaaaaccctatactactagggtgcccttaacttgtagggtatcttacaaacctaaaatggccaaaatacaaggcccaacagaaggaatacctattctaatattcacaaagaaaaatggacccaaccttggcccatgggctcagaaatctaccctgagggtcatg

SEQ ID NO: 238581 - DNA, 403 bp, Glycine max
  unsure (1)..(403): unsure at all n locations
agccttacaaggcatgctatgcgctcgtattggnccacattgcgttccgcgcattattattctcgctatgtcaactatttataccccctgtggacgagcttaagccattttacttaagtcgcttctcgcttaacttaaaaataaaataacattccaccgatcatttgaattgtaacatccgttaatttcggttaaaataaattccgaccgttcggtcgtgccgtaaccacgttggaaataaaaaagaggtaaaaaataataaaataatcaaaaaaatatcttttagtaaaataaagcggacaatcaatcggacgtgttctctttgggatttctcatcttaatcgaattgattaataactaaagtgaaactaatggctaaaatcaattcgcctagtcaacctcg

SEQ ID NO: 238582 - DNA, 426 bp, Glycine max
accaatcactgcggctcaacttacattagagccgtggatcagcctttacctactgttaatacccatcccgctactgggagaggatcgggccctcaaaaggaaaaattccacaactatctaggggtagttgcttcgagaaaggttcctattgtgcatagcaactggaaagattacctgaattgctaaaggagctactgtgggatgacattttaataagtcctcaaatacatgttgtctttattttgatgctatatcttaaaagtacatgttcacattgactaaatgtaacataacaaatgtatatatgcaggctaaatttgatattccagaagcaccaaaggcgaagaaaaaggtcatgtcaacagttgcgataagatagaagaaatctaagtccaccttgactagcaaatttgtgttgctaacact

SEQ ID NO: 238583 - DNA, 208 bp, Glycine max
gacaacacatataacacccacaatgaatcacatcggacatgagagcgaatctacacatctgtgtacgtatgcgactatcaattgataatgactcaaacgaactaatttggcctacttgtacccacatgatgcatctacctctcagtaacccatcactctaagaacttcataattaatcgtgcttggctcaaaaaaatattggatagat

SEQ ID NO: 238584 - DNA, 309 bp, Glycine max
tatgaaactcaactatctaatttgtcaacaaaataagcgggcggattctttgtatgaaatcgtcatcgaactattaataatatctaatattgcacactccacattcaagatattcaatctttagcggtagagacatcacatatttcagatggacgattaatataaacaaaataatatatataatatcactctataaaataatctctatggctcaggtcgagttaattgctaactctaataccaggaacgcttcaactaatatatttgtaacattagaacaatcggtaaatcaatcactgacccccttca

SEQ ID NO: 238585 - DNA, 400 bp, Glycine max
  unsure (1)..(400): unsure at all n locations
gcttacagaaggctcaggtatttcaatgattntcttttatgncgacggcaaaattttgattactgaattntgatgcagtttatttatatactgtcaacttgtgtgtcaatgactgttttttttttttttgaacttgtattaatatcattatcagtcttatattactactttagctattagtctatcagggggcaattaatcttcaattttgctattctaccttgcttcacttgtgatgtgtgcatgcttttataagatgtctaataaatattactacgttttaacacgaaggggtcaagtgtataaataatgttgctgagctattaaaagagaggacttctgatgcagctattaatgctttagaactagtttctaaggcattgtcaataagtttatactc

SEQ ID NO: 238586 - DNA, 291 bp, Glycine max
  unsure (1)..(291): unsure at all n locations
ttaaccatatgtggaccctctatgtggcttcactggataaagggtcaacatgataggaagcatanaacttaacacaaaatttgggcatgaagggttcgaacacaagaccattaagatcaaatatgtagtgggtaccttctacgacgtacttctcgaatgaccaaccctgaacactctaagcgtcgtagtatctacaccccatttagctatgaaggttccatcagtagttaattccataataatagtccatgcctaccacaagaaagctagtgagtgttacatggctagact

SEQ ID NO: 238587 - DNA, 404 bp, Glycine max
agcttaggctaagatgagcctacaattctcttatcttgatggccagaggaacggaccattcagtcgttggaggatcttttgagggcgtgtgtcatcgaacaaaagaggagttgggagagttttctgtcattgatagaattcacctataacaatagttttcattctaccattggcatggctccctacaaggctttgtatggtaaaaggtgtaggacacccctgtgctggctagaacccagagaaaacctcaccttaggacctaaagtggtacaacaaaccactaagaaggtcatgttaatccaagagaggatgatgactgctcaaagcatttagaaaagttatcaggacaagaggaggaaagactatgaattcaaggctgatgattatgtattcttaagattcac

SEQ ID NO: 238588 - DNA, 332 bp, Glycine max
ttataacggaggacaactagagcgattgatgactcatttctactcgaatgaccctcgagaaggcctagtgtctaactaatgacaataaactaagcgctggttgagaggcaagccaacatatttttgataaatggagtcatctttttgtattcattccataaaaaacagcccaacagctgcaaatataaaacaggacgcgcagaaagtaaaggcccaccatgtgaagtcagcaatatgagaggtgacaatagcaaaagagaaatgggctacacgaagccacgcgcttagcgcacatccaggcgctaacgcccatgtacgttttcaaaattttg

SEQ ID NO: 238589 - DNA, 327 bp, Glycine max
aagcaaaaaagaataaggggaaatctctcatcaataaaaaagagaaggaaaatttccaatgtatgcaaaaatagaaaagaaggataattccccaatcaaaaagtgggagaaagcaaaaagaaaagaaaggaaaattcccaatccaacaatgggacaatgttataaaatgaataagaagaaggatagaaagctcctgatcaaggatcgaacgataacagaagaaatgtgccgagaggtcttcggaccggacaatatctgagcaatacagaattgcctccaaatgaacgaaaaaagaaggaaagggaaccacgacctaaaatagtcttc

SEQ ID NO: 238590 - DNA, 259 bp, Glycine max
actctcagccacttatgataaccgcccatgatctcattaccgcttcccctaagctctatgtcctttcttcacgccgcatcccatgccttgcgaactccatggagaaccctcacgttgtggccattgaaaccccgtgcgatgaaaggccgtatgcttttatctgaaggcactcctctcatgggagaccaagccgacttatggccacgaccggattataactaatacaacccctttgtccatcaagggaacagtcggacat

SEQ ID NO: 238591 - DNA, 446 bp, Glycine max
  unsure (1)..(446): unsure at all n locations
tctnttggaccttgaacaggcgactaactactctgtttttaccatgctacgcgctcgcgactggtgccttttctcccttcgcaactagagttcattattgctaccccataaggctccgcgaaatatgatccggccatactcttccttgcgagccctcttggtctctcgttcaaaggctcttgcggtaattgcattctctttccgtaacccggcacactccttccgaacgtgtgtaacagccaacttgaacttcttcttggcgagttttgcctttcctaactcgcttttgagagcttggacttcctcgtcctctttcggtgctctcaaattctcttcgctgacgaactttaactttgcgagccaatctaaacctcgtatgcgacctttcaccattcctggtaccaccatgatgccttacgatgcctctaagctctgatctttcttac

SEQ ID NO: 238592 - DNA, 350 bp, Glycine max
agctatgaggattggggatgccgctgctttcctcaacaatatccattccctttgatactcttttcaacaaggatcctgattttcaattgcttgaatcctttggctgagcctgttttcccttgttgaggccttatcatacccacaaactcaattttcgatctcaagagtgcctatctttgggatattcctcctcccacaaaggctataaatgtttgtctttatttggaagaatctatgtctccaaagatgttctgtttaatgagttgaggttcccttatattgacctgtttgcttccttttctaactccatcaagagacttgattcctatttcaagctaaattccaacctg

SEQ ID NO: 238593 - DNA, 294 bp, Glycine max
  unsure (1)..(294): unsure at all n locations
atgcacacacatccgaaatcccaatcccatggatagtatgtgccattattcccttagcaacgtgtgttttgcgacatcgtaaaaactncatggtgagtagtttgagaaaccaaataccacataataaatcatcgtaagaatcccttttgcatattcactgtaaccggtgattcccctcatttcagagttgaaactttttaaaattgaactcacttatgcaaatattacataacagatttagcgactacccaagacaatactgttaataaaaaacctttaaacaatacatataat

SEQ ID NO: 238594 - DNA, 403 bp, Glycine max
agcttgacatacttcaacttaacagacttcttgaaatcaggaaggtttcgcgatgaagatgccatcaagggtttatctggctttgcatctgtcattttttgccctgttcaaaagttaaatctactttggttagataactagctgtctagctttaaccaaaaggcttttttcagcatagaacatcgtacaatggcaacaaattggcaccacaagatcctttttagtaagaatttctactaatatacagggaataatcgcgaatataaagcttgctttctttaatattcaagaacaaatcagctggaaatgaaaatagtctgtgcgtagagaacaaagttagagaaattgaaaaggccaacccgcacaaaatgaactgaagacaaacctcaatttgattgttcat

SEQ ID NO: 238595 - DNA, 428 bp, Glycine max
  unsure (1)..(428): unsure at all n locations
tanctntcactgaacaagtggtatatggtggaatggtgtataagcaatcctcaattattcataatatcaattatctatgtaggcaatcgaaggagttccaaagatcaggtctggatataaccctgctacgtggatgctggaggctacttcttcagttgaagaaaacagattgtgagtggactttgcagaaatctacagaaaatcaagtntatatcagtatgtacattttttggcggtaaattttgtacatgatttttttatttatataaacataccatgtgtttcttcagatataaccaagagttggttgaaaggttgagcacgcctagtggtaattcaaaaagaattgcattttttcaccaagtattgccggtcatcttttgagcagttctaacttgttatggaaacaaatcttttgtactggcgta

SEQ ID NO: 238596 - DNA, 346 bp, Glycine max
  unsure (1)..(346): unsure at all n locations
tcgctccctccatggtgacgctaaccatgactgtgaaaactcacatctgagtttttttttccatcctgtgggagataaattagcaactacccatgaactttgtaatgatttgaaatgcaagaatccaaataattttgaatgcaaacgacgctggcttcaactgctaaaagcttgctccaaacaatgaaggaatcccgatgggaaagacttttcacggaagtcatatcattctgtgaaaagcatgacaacatgttcttgacatgatcatttcgcatgctcctagaagaggatgagctcaccaccatgtngaccatattacaatctaccattatacacgcataatcta

SEQ ID NO: 238597 - DNA, 270 bp, Glycine max
  unsure (1)..(270): unsure at all n locations
gcgcacaacaagttttccacaatcacaatgcgcgcacagacccaccatncgctgttgcccacctgcaactgagctcacgtactcccacgtagcccatatcctcgtttatatcaacaccgggtgcccatcaatcctcccaagcttccacaacattcaagcataacaacattcaaacagcacaagctattacagccaggcaaaacagagcaaggcataaactctgctcaacacatcaaccaatatcacagcttctcttacttaaagacccca

SEQ ID NO: 238598 - DNA, 371 bp, Glycine max
ttgatgataacaatgatgataacaaaagatgatgaccaaggtgatgacaaaaagctcaaagatcaatcaaagaacaactcatgtgaatcaaagatcaatcaaagaacaactcacgtgaatcaagaacaattcaagagttcaagataagaatcaagaagaattcatgactcatgaagaaagttagagtcaagattcaggttcaagatctcaagaatcaagatcaagattcaagactcaagattcaagaatcaagagaaggcttaatcaagataagtatgaaaattttttctcaaaaattgagtagcacatgatttttctcaaaacatgtttaccaaagagtttttactctctagtaatcaatcaccagatta

SEQ ID NO: 238599 - DNA, 381 bp, Glycine max
  unsure (1)..(381): unsure at all n locations
atgacttcaaagactacaatgttctttgtctnttatgctcttcaaagactacaatggcttcagtcatttacgctttcaaagactacaatgtcttcagccatttacgcttttcaagactatgatggtcttgagtcttttacgctctcaagagactgcaaatgtcttcactcatttaagctttcaaagactacaatgtcttcagtcatttacgctttcatagacttcaatgtcttcattcatttacattttcaaagactacaatgtctttattcacttacgctttcaaagactacaatgtcttcatgcattcacactttcatagactccaatgcctctagtcttatacatttcagagacttcaatttcttcagtcttttacat

SEQ ID NO: 238600 - DNA, 376 bp, Glycine max
ttttttatccctgcgatgcccgggtaaatagattgtttgagaatctttatcttgattatattttgtatatattctgaccaccaattacactctatagagaactatcgtattttgagaacaaataacacatgaaaatgctggaaaaataaggttacatgaccctattcaaaacaaataacattctcttcggttaattttacctttcttctcagtttcatacatgaataacaaatactggaaacacattactcaaataatgattacaacagttaaatgtcgaatcattcaatcatatacacatttgcaagcaacctgatgaaagaaaaagtgacacaaatatttcaatgaatatgctctaaattgacttataatatta

SEQ ID NO: 238601 - DNA, 309 bp, Glycine max
tatttatgctaattcccatcaaacggcctctgtccgtttgtgccaacgactaactcattgcatatgttggatcaacataaagttgattacccttgtccccacatacccaaccattacaacgaattggcataaagacaatatgcaaaaccgatgcaatatggccacttacgttaactcctccctcttggtgctactttagacataatcactaccataacagggccttgtgagtgtcctcctatacctaacttctatctgcacctctctgctctacttatgcacccctgactgttgttctgagccccgcat

SEQ ID NO: 238602 - DNA, 327 bp, Glycine max
tttgattatcagccatgtattttggctatattattatggtatttgaacaatttactattccctatttgcatggtatgtttgaacaaatattaagtatgttatttgactatatgggttttatagataatctatttatgattgttggatcatgattcttgcttcatggcttggttgttaattactcaatgaatgttgtatggatgttcagttatgtctgattatttcaaatttgttacgcactctggccttttgttgattccaaagggggagagaaatgggattaaaatcaataacccacatgagctatcaatttaattttaagatatg

SEQ ID NO: 238603 - DNA, 367 bp, Glycine max
ttcttatacattttcaaatgactacaaattaacattcctttttctgaggcgttggagcaaatgccaatatatgctaaattcatgaaggatttgcttacaaagaagagaagaattatggatgatgaaatattggagcctaagccataacaagggcgtccaacttaaaagacgttaaagaagtgcccctaggaggcaacccagtgtttctaaattttgtcttaatttgtgttactttaatgttatgtcttatatttatgaattttacttctgagtctttattcgtgaattatgtttttgaacatataatctgctttgttagagctatcgttgcatggcttgaggacaaacctattttttatgaggatga

SEQ ID NO: 238604 - DNA, 386 bp, Glycine max
agctagagcatagctacacgcactcatctataaactaagctcacctacttgagaagcttgcttgggaagctagagctaaactacacacacccatctataaactaagctcacctgcttgacgaaatacatgaggattctaaaaaaagtccctactacaaagactactcaaaatgccctgaaatacaaggctaagaccctatactaatataatgaccaacatacaaggcccaaaagaaggaaaaatctattctaatatttacaaagaagagaggacccaactttggtccatgggcgtagaaatctaccctgcgattcatgagaacccgcaggcctgtcttagcaaatctagcgcaattctcttggagtcttctatgcaatacccttgc

SEQ ID NO: 238605 - DNA, 354 bp, Glycine max
ttctcctcatttccttatctggtcctgtcacttttcacaacatgtcgcaagaaacacgttaaatagatcttgtgattaactaatggatgttaccttgggtagccattccctactttagcatctcaaaactttatatgtaacataattctttggaaatatttttccccaagatgcacgatgatatattttgtgtgtgaacctcttctgcatgtctagtatgctttcatttggattacttctaacatactcatattcacgaggtaatgttttatcctaaatctttttacaatcgttgcaccttcatgtgttactggagggtatcccacatatcttctgcactttaccattcgatcc

SEQ ID NO: 238606 - DNA, 347 bp, Glycine max
  unsure (1)..(347): unsure at all n locations
aaggctcacgattgtcgcgtgctgatgtctcaattgntaaccgtggctatacgagacatcttgccaaacaaagtcaggttagcgataactcgcctgtgctttttcttccatgctatatgtagcaaagtcattgatccagccaagtttgatgagttggaaaatgaggccacaattatattgtgtcacgtggagatgtattttccccttgctttctttgacatcatgattcacttgattgtgcatctggttagagaaatcaaatgcataggtcctgtttatctatggtggatgtacctggttgagcgatacatgaagattcttaaaacgtgtacaacgaatctatatcg

SEQ ID NO: 238607 - DNA, 402 bp, Glycine max
  unsure (1)..(402): unsure at all n locations
agctttcattgttgacaactaacattgttattngatgaccgtgatgcatgtttgtgccagatcattgacaatgtttcataatgcaaaataatttattcttttgcagcattgtgatttttcaatcacacttggatttggataggttccaattaaggcaaaaattatgatatttgcttgatcaactaaaatgttctttgtacatatttttctgtgtatataatattaatttatgtatatctaatttttaatatttctgttatttatttttattgcatttttttaattatcatgtgatgtcttgggttttatttgttaggttctttttatcattctaatcacattggtgatgatgttaatttagctgtgattctcattttctgaccttgctatgaaatgatatta

SEQ ID NO: 238608 - DNA, 307 bp, Glycine max
  unsure (1)..(307): unsure at all n locations
ggcctaagnttattgcaggatgtagcaccagctgcgctttcctagctgtattggaggcggccaccgtggcattatcctctatagttttctgaagctttaacatggcctacgtgatagaagccatttgatcttttaaagcccataagtcggacttgatctgcacttgcactccctcttcattatacatttttctggatccaatgttataagggtgcctctgcactttcttagttattgcgagttccctatataaacaaacaattgtgagtatgccgcaagaacctgaatatgcttatgaatgatcgga

SEQ ID NO: 238609 - DNA, 399 bp, Glycine max
  unsure (1)..(399): unsure at all n locations
agcttcttagttttagctgatgaaaatgatttcctggctacttcatgcactcctctaatgacaatagcatcatttttggcgctacattgctgggagttggaagccatcatctcaattaaattcctggcttcaacaggggtcatgtctccaagggctccaccactggcaacatcaatcatacttctccccatgttactgagtccttcataaaaatattggagaagaagctgctcataaatctggtggtgagggcaactgacgcgtagttttttaaatctctcccaatattcatataggctctctccactgagttgcctaatgcctggaatatcctntttgatggtcgtggtcctggaagcaaggaaaatgttttctaaagaatactctcttgaggtcatc

SEQ ID NO: 238610 - DNA, 466 bp, Glycine max
  unsure (1)..(466): unsure at all n locations
tgttacagtaacacaataactctatagataattcatggctactagataaacgggtacttacaatttgataagatgataatgacattatcattaaagttcatatatattaatagcttatcagtccaatgacccatatgctaagcacgtcgtgtttgcattcctatatcaaggctaatgaggaagggtgatgtgtattatttaacgccacgtcagtttatggaccccagacagtacaaatttgaaaaataatcattgtaagtaaaccaaatgtcttataggatactggcttttagaagttcacactttgtttctctaatcaaatcttaatgtttatatttgtaagaacattggctctacttatgaagtngaagactacccctccacaaaaatttctcgcatgaactaagtagccgtggtttacatgaaaattctcatgtggtaaaatgccgcattacacacacatgaa

SEQ ID NO: 238611 - DNA, 295 bp, Glycine max
acatctcaaaacaacaaaacaaagggaacaagacaaaaaatagccgtggactgaataccagacgacgcaacatgccctatagcaggcgagcaaggcgaggcccaccggcgcacttaccaaaggaggaaagatgcgcggagacaccaccaacgataattcgcggaaaacgccaaaaaaaaccaacgaaacctggcaaaaagaatataccaagatcgggagacgaatctacgcctgaagaaggaaccagcacctctcacgtaagatacaaaggacaacagcctaacataccacaaac

SEQ ID NO: 238612 - DNA, 224 bp, Glycine max
gatttaaacaaaaaacttatttcacaatccgtgaatgctattattgaaactttaaacatcatttaatatttgaaaaaaattttatcaattaatgtttaaacatgattccagaatttaatatttccttattatactccattcttataattcttaattacatgacttaaaatatgagttcatccttactttataacacctgatataacttaatatatattacctaa

SEQ ID NO: 238613 - DNA, 346 bp, Glycine max
tagagcatgtgtacactcgttggaactttgatgaatgaaagcctcgcgagacacaactcaaagccaacctctctccctttctcttccttcaattacgagctccccccattctctttctccccctctttcttttcctccatagaagcatcctctccaagcttcttatacaaggctcatcttggcggagaggctccttcttccatggcttattccctagaggatggcgcctcttctcacctcttctcctttgccttccgctgcatctccatggtggaaaatcaccattaaaggacctcattgaagctcaagatccaacctccatagaagccccccaagcaagctccca

SEQ ID NO: 238614 - DNA, 232 bp, Glycine max
aaccctcgccctcatgcacaccagagccagaaccacccgaactacgccgaaaacgacaaaaccccccaccgcacacaaaacaccacacagacaatatgactcgccacccagaacacccagaggagaacacccaaccacagggcagcccaaaacacaaaaaagcggcctttacaaagggccgccaacaacaaactgccacatccacaccgagacccaaaacgcatgtgagccc

SEQ ID NO: 238615 - DNA, 380 bp, Glycine max
aacatatatctcactaaaaggggtgggtgaataacgtgttaatcaaaaaacaaaactttcaaaatggaaatggtaaataatattttgaaaacccctctctacagacagaggtggaatgtcatctaatgagtagaaagcttgccttttaacggaaaacctcctgtgcaaagtatgacagtgatggatagtgaaatactattaataagctaatgaagaatagtaaaaatacataactttatactgttcacttaacctgaactatgtccaattcttctttacaaactattaaagggttccactaatcaaccttcattacaacaagtattctttcttgtcatttctggactacaagaattctcaatgctactcttggcacaccc

SEQ ID NO: 238616 - DNA, 393 bp, Glycine max
  unsure (1)..(393): unsure at all n locations
agcgccctggaggtgggcggggagttgtttatcatactngagaaggtgcagaggtgcctttcttctcctataagccatctacaaaatataagacaagacacacgagattagcccacgtttattctcatgaaaatagaaaaaattaagactgaaaacagagttgggcgcttagccccttcacgaaattactgatgggcgaagcgcaaaaaactcacgataagcccagagactcaacaaatctttctttctatatattaggcttagcgcagcaaggcacgcttagccttattccagaggtaaagaaacagaacctaagtggcacttagctagcaagccaggcttaacgcctgaactattatgaagatctcagtatactattgacgcttagcgcat

SEQ ID NO: 238617 - DNA, 56 bp, Glycine max
  unsure (1)..(56): unsure at all n locations
ccaccatcccacttcncactacaacctcttcccacactactacacactcaccctcc

SEQ ID NO: 238618 - DNA, 404 bp, Glycine max
  unsure (1)..(404): unsure at all n locations
agcttgnagggaggctgggctacaaaatatctattgttntcttctaggattcaaaggcttagattctaagagagcacaaatcctagacttatctaagtgatctttttaatacaattagcttgctcactagcttttcactttcatttgcttttgaccttattacatcagcacacatttcctttgatngctttctttgtctttcttctcttcttctttcctcttttttttataacacaacttatgtgttatgtgtgctgatgctttatctctttctttgcatcccaattagttccactcccccaaatttggggtaaatttgccttgaaccatatgctctcctagaatctaaaacaggtatctggagataatcattcagggtcacggttcaattgttgacaaaatca

SEQ ID NO: 238619 - DNA, 362 bp, Glycine max
  unsure (1)..(362): unsure at all n locations
tcccttatactatgngcttgagatgttcttgagaagtttgtaaaggaagacaacttgtggctttcgagtgatctatcctcaacttatgccattgaatcatgtatgaggaacctacaccaacttcaaacaagctctaatcaagattccatccatccatcanatttctaatcaaaacccatttgataagctcttggtggaagaagagaaatgaactaagagatcaagaatagacagagaagagcttaccaacatggaaacaaccaaaaagactctataaattatggaaacaaagtcttctctgagtgaatctcaaaaatacaagctcttgagagaaaggataagcctatagaggaataaaaaga

SEQ ID NO: 238620 - DNA, 398 bp, Glycine max
agcttggaatagcatttgggcacctatttttaatctcctatgttgcacctacatataagaaacagtcccactctcccaattttacaaaatcatattcatacatcattggggcatttcactgagcacttggtgagcgcatgtttggacataaattgcaagaggatggggacaatgtggcatgccccattgcttcagaatacagcataggcctaaggccttctcattcaaatcctcaattcaagaaaacaagcataaaaacaaaccataactgccccacaaatataagcacattctctcaatttggagcaccaaaagatgaagaaaatataccaatgggaagctaaaaacatcaaggattgaatacttacttgtgggagtgaataataacaccaacaatg

SEQ ID NO: 238621 - DNA, 296 bp, Glycine max
  unsure (1)..(296): unsure at all n locations
cagctgtaatcgannacacacatactgtaagtgattaccatttgatgcctncaganaacattctcaacagtcacatattgttatctgattctcaagtggtcatcaaaggcttatatatatgtgactagagacacgaattttatttgagtgttgaagaacaaaaaggtcttattctcttaacaagcaaaattgttttattctcttacaaattccttggccaaaacacttgtgattcaataggaattatttgagcgctcacacttttcaatctatctctttcaagagagatgtctttt

SEQ ID NO: 238622 - DNA, 198 bp, Glycine max
ctcattatctcttacactccgatatacaaataagtccctactgttaaacatcaatttccactgttagtcatatatctatgtgataagccttagttcatgtaagcaaacccatgttacaagtatttggactgaattgaataattatgataagttaagatacacaaatggacattgcgcaccacaatatggtacactatc

SEQ ID NO: 238623 - DNA, 321 bp, Glycine max
atggcggcgaaacaatgcatcctgatgtaatgctgaagaacagctttacacatacactgactggtctatcttgacagtcttgaacgataactctggaatcttaccctatgtgcacgagctttctgatttatccgacttatggccatatgctaaaaggccttgattatcttcacatttgaaattagtgccacaacattaccttattgaagcgtcttcaaagtaacaataccattttccactctgcgatagaaaaaactgattaattctttgacaaacttaaactttactttatatattgccacctttgaatgccctcctctt

SEQ ID NO: 238624 - DNA, 388 bp, Glycine max
cctgcggcatgcagcttggaagagaacggcaacggatgtttttggtttgaaaccatcaactggaaatttggatcaataggaataacatgatgacacttaagctccccaagaacctacacatcaatgaaatccttttgagtcacatatgaatcaaaaaatggacactattcttcacccccatcaagagcacttaggttaagttcatagtctattggagaacataactacccggctggaaaacatagaaactgggttgaccctaagcaacctccttaagcctaatgaggatgaagcttaatcgtgtttaagtgctctttcctactatacgtagttatttccgattatgttaaactttatctctgtgtctctgtttaataaacaaactatg

SEQ ID NO: 238625 - DNA, 334 bp, Glycine max
ctttgatatgcatgaaatctcaatccggtttctagaagttacaataattatacatgtactggaaagaaatttaacaaatgtgtacaaaacatctgatgttgaattttgcattggtaatgttcatacatgtaaggtactaaggtttataaatgtgtgtatatgtataagtgggactcctctcaactaaatatttcgtacacatcaaaatgcagcatatccgatgggtctagaaaacaagtcatatgctacttacagaataaacaagtcaactcttcatcacaaaatgttcatccgagatcttcattaccaaaccttattgaattcatggtacata

SEQ ID NO: 238626 - DNA, 361 bp, Glycine max
  unsure (1)..(361): unsure at all n locations
tatttttgaaagcaaactacaaaaacgctcatcttaacacaacaatgacatgcttaatcccttctgagttacaacgaactcatgcccacatttaatgtaacacatataagaacatgcgtacgtgcaacaaatcctactatttatgtcacatacaaagacatccaacacattctagtcaccacacatatatatacatctttgaataaaaacacacatnctcgtgctcaaagcattgtgtcaaaatttacacctaatcacatcctatatattctgctatcacaaactacctatacatattcaaagcatttaacatacaaacttatgctgttccaaccacatctatttatatgcacaatgaaaa

SEQ ID NO: 238627 - DNA, 66 bp, Glycine max
acttactttcctctttaccatgagggttttctgggaatcaccaattccttgcttccttccctagag

SEQ ID NO: 238628 - DNA, 419 bp, Glycine max
  unsure (1)..(419): unsure at all n locations
gggaccttaaagcactgcggcatgcagcttagcagacgacaagaagattgtgttcttatatctatcaaaaggcataaacctagtaaaactacccanatatctcccaaacccaatacccatgaacatttatgtgagaagaagtctacccaaacctgaaatctgaagtcccactatgtagaggtgcctctacgacctccaaaatggcttcttttcgcgatttggagcagaaatggtgagcaaaggttggagctttgatggagcttcaatggtgaggaagaaaaaaggaatatcaacgtgagagagagagggagagaagcttctgaatctttttggctgagtgaataacgagagagagaacatggcttttattataaaaagactntctctctttctttttttttaaaaaagatgtgccacat

SEQ ID NO: 238629 - DNA, 305 bp, Glycine max
catgacgtttgggtttaaagctcaagtgcttaacctagccctatgcgctaagactaactaaaattttcaagtgccagaggcatacccacgcttatcgcgaagacacgtgcttaaccctgacagcagatctgattggtcctgcaacatgcacttagcctatgaaggaagggttatctcgcatccaaactttacgtttatgagaggagttaggctagacgcacctaccgtgctagcacctggcaagcttacaaacaaaagagagtgggctagcgatcttgccaataacccacttgaagtaacttata

SEQ ID NO: 238630 - DNA, 229 bp, Glycine max
ctataaaggtagctcacccctgataaaaacatgaaatataaaagcttattacaagacaactacaagccccaaaacaaggctagaccctatctactgaatgggcaaatcaaggctatatgaagaaaactattctatttttacaagataagcgggctaactattcctgggtcgaatcaccttggctctgagaacctaggcttcttggacttacccatctcttgaactctac

SEQ ID NO: 238631 - DNA, 388 bp, Glycine max
  unsure (1)..(388): unsure at all n locations
agcttatgccatgaaagagtcaggtagaaatctttatagnccaacaccttaaatagtcctctctgcttctttcgattacataggaccatccaaaagtatgaaatcaagacaccgcataactttaccgctttgctaaaaactacgtaggtctaaattcctcatcgcaattgacgatacatacgagcaaaagccccgcttttgacgacccccaaagagattgttcaaggtccaacacctaaacgtttctcacccaacacaaatcgttgaaggaccaacgccttaacgtttttcacccaaaagagatcgtttaaagatccaactccttaacggttctgtcccttccaaattgagaggtcatttcaaggtccaacaccttaaacaactctct

SEQ ID NO: 238632 - DNA, 302 bp, Glycine max
tgcagctgcggagaactgaggcgaatttgtttcaaagcacagactatgcaatacttctcgagatgagacttgggagcttgtttggtgggcagaaatggaaagctgatattaatatgcctcctaatttacaaaagtttatttaggaattggaaaaactaacgaatatgatctgtcatgctacgattattttttaaatgagaggaaatagaaacatcctgcagaccaatttttttcttgatcgtatatctaaatgactataactgacctatcttcagctcatcccaaaccaaaatattccttat

SEQ ID NO: 238633 - DNA, 403 bp, Glycine max
  unsure (1)..(403): unsure at all n locations
agctngnnagagctatcatcacatgatgctttattggcacaaaataagttgatttctaggaaacttgagattttaacagaaacatttggtaagttgccaactaaattgtatattggtcaacctacacattcttctgttttgcaagttacaggttgtaccatctgtggtgaggctcatgaaataggccaatgtattcccattgatgaaaacactcaagaagtttactatatgggaaatcaatagagacaaggatatactcaaggaggatttttaggcttccagcagggtccttataaccaacaaggacagtggagatgataccctggcaatcaattcaacaaggaccagggtggaccttccaacaagccaattcaacaagggcctattattacaggactactaa

SEQ ID NO: 238634 - DNA, 372 bp, Glycine max
cttgctactgaatccagccatgcgcaagtatcttcactcccccaaggccaacttctccagactttatatataccaccctaaccgaggacattcaaccaaggagtgcagtattcttaaagacaagatagacgacctcatctaagttgggacaccttaaggattttatccacaagccttattcatattagcacaacaacaactatatgcatgatggagataggataaaaaatggatcacaatcattactctcagaccgagagacataagagtataacgccatctatggagagggagaaaaaatctcctgatccacccagacatatggtcaatactatttacataaagatttgtcgtgaaaagggcaataccctc

SEQ ID NO: 238635 - DNA, 404 bp, Glycine max
  unsure (1)..(404): unsure at all n locations
agctnggttagaggtacttacccgttgaatactgaagaaaacgaagaacgaacgatgaatcttgaagaacggtcgagaatcttcgcgtaatttctcacggaaacgttacggaagcgcctcggcttggattttcttcacggaaataattttcctcagtaatttcgagagagagagaagtgcctaagaggctgaacccttttcttcttcacttctccccctatttatagcaaaatgggggagaagcttgccacccaggtcgcccaggcgagcaaggttgcttcctccagaagcaacagccttctggaggaaggatctggaaggcccaagtgggccacattgctatttgcacccccctttgtactaagtgcaccccctatctatattttggtaattcttcttccgta

SEQ ID NO: 238636 - DNA, 285 bp, Glycine max
gcttcaagactcaaattcttcaagggatggcaccaatcctcctttccaattacctatacggcaactcacaaacaaggaaacatatagacaagctataaccaaagaccaaaataatgaaatgaaagctaaaccaatcaagtgttaacaagaaaaattttcaaggagtattcaacaattaaagctatgaaaagcacacaatagcaagctacgactcacagagaaacctagaatggctctagagtagaggttaaaaactaaacaaatgactcagaaacctccaagttt

SEQ ID NO: 238637 - DNA, 389 bp, Glycine max
ctgcactcactaaacaggggagctgtttatttcacagatcgaagaattacccatctctttaagttctccgagtattacactaacagtaatgcctctaaaacatgaaggcaaacaccatggctaccaactctagatcatgcataggataaatcctttcatgagtcttgagttgtcaagaaaacataggcggcttcttggcctcttgcaaaagcattcctctaaactgaaaggttactctagacacttcactaccctaacaaagacctactcgtctaagaaaacatccctttattttctaaaacataatcttactctatatattttctattactatgaaactcttattttaatgaacaaaaatcatttcctctcattcatatttaatttct

SEQ ID NO: 238638 - DNA, 354 bp, Glycine max
ttggggctttataccctgcactcatgctactaatagcatacatcatatggttgataatatggacgagttaacctgcattaaatggcattgaagcatatatcatccattttgcaatggcttttgtcacacttttttacaatttgcttattttgcaagacactctttaagcctaggttgaactccaagagttgttctaggcataaaataatcatctacataaggagtgctcttttccttctgagactcggaagacaatggttttggaggtcttcttaattcctcaactattctcacagtggcttcatccatcttaaatgtactactctcattaaattgttcctgctgcactattat

SEQ ID NO: 238639 - DNA, 411 bp, Glycine max
  unsure (1)..(411): unsure at all n locations
agctntgtgtggaatgatgagagaggcacttattttaaaatatgttcaaaggagtcttggtgggaaacaaaaatttatagatcaatttattacaatatgttgataatgcaattttcatgggagatgcgactttggataatgtgttggtcatgaagagtattatgaggtgtcatgaaatgatttccaggctaaaagttaaatttttttcaaaagtagttttggagggtttggggtggatgatgagaggattcaaagatttattaattgtttgaatttccaatcactcactttgccatttgtgtacttgggtattcctattggagctaatccgaggagggaggagacatggataccaattatgaacaatatatccacaaggcttacattatggaagtgccataaattatctat

SEQ ID NO: 238640 - DNA, 328 bp, Glycine max
acacataagttgtccctgcggcatgagaccatccatgcttcctaatgggattggtgggataaagttccaagacacatgtgctgacgcatctgaaaatttgatggacacaaagactataaaccgcaagaaagaagcatgccaaaagctacccaatgggagtagcgaaagtgacaatgtttctccttcccaggtgaaaggggataaagccattaataacgcgactccgttatgcctaaagattgctccctcaacacatttgtcacatagtggagtttgactgacactttctcggaaccctcaatggctatgacttgattggacagaaaac

SEQ ID NO: 238641 - DNA, 342 bp, Glycine max
tgtaacacttgtcttaactctgaagaatgagagtcctgagagacaaactctaaagcacaacttctctttctcttttctacctctaaaatcgtgctccccccctgtctctttccagctctctttcttatcctccattgaagcctcctctccaggcttcttatccaaggcacattcttggtggagaagcccacttttccatggcttattccttagtggatggcggctcgcctcacctattttcctgttgcttccgctacatcctccatggtggaaaatcacccttgaaggacctcattgaatctcaacgattcatcctacatagaagctccacatgctagcttt

SEQ ID NO: 238642 - DNA, 247 bp, Glycine max
ccctattggatggcgccgcctcttacctcttctcctttgactaccgctgcatctccatggaggaaaatcaccattaaaggacctccttgaagctcacagatccatcctccatagaagctccacaagcaagctatcatcagaaaggagatcctttcctcaccctttaatgtgtgatggttgtccctaggagagataaattccactctctctctctttgagctcatattcgttggcccccatggacacc

SEQ ID NO: 238643 - DNA, 287 bp, Glycine max
  unsure (1)..(287): unsure at all n locations
gacattgaaactccgctgnaccaagggattgagagagttttaattttcgcggctgaagtagaattcactgctaccagctggcttaccttcccttgccttcaaactttctggctatcaatacaatatttttaatcagatgaaatctttgctcatttgaaatttgagaactaattggaagataaaagcccgggggtctacaactcctaagcttaagggggtcactgacattttcggccttttttcttctctttaccactcatcttactttaccatgggggtcggaaatc

SEQ ID NO: 238644 - DNA, 393 bp, Glycine max
gcttctggggacgcggagcgtgtttcttctcctcttacagaaccatgccatgtgctcgcgattggtccctttcttcccttcgcaactttgagttcactattgctaccccatagagctccgcgaaatttgttccggccatactcttccttgcgagccctcttggtctctcgttcaagggctcttgcggaaattgcattcttttcccgtaacccggcacactccttccgaacgtgtgtagcagccaacttgaacttctccttggcgagttttgcctttcctaactcgcttttgagagcttggacttccttcgcctcttccggcgcttcataattctcttcgctgacgacttttatcttggcgagccaatctaaacctcgtatgcgacctttcagc

SEQ ID NO: 238645 - DNA, 215 bp, Glycine max
tgagctcagacaagaagggataattttttttaggtatcaaaggataattaagttattcattgtgctaagctttaaaacaaattcctatatccttcctatctcatggacattgaacctcacgtaattcatctatgctttgtgctacatcattttgcaaatcacaaccgatatgactaggctccattctacccggtaacttatcactccaattgact

SEQ ID NO: 238646 - DNA, 339 bp, Glycine max
aaaaaggcccatgaagaagtccataggcttacttaacgcgaaagcacgtgctaagcacgaggtcgtatgaattttaagctactttaggcctataaaatataaaaggagtatgaagcaaaggagaaatattcgccgagactcagagctctctaagcatctttcataggggaaaccctctctcttgccattcccccctcttcctatattcatttcttttcttctttcatccacattagcgcctaaagtgtaaagtctctcatgaccatgagaggctaaacccctttatttggggccctacagctaacatccttgtaatgcaatttcttttactatctatta

SEQ ID NO: 238647 - DNA, 416 bp, Glycine max
  unsure (1)..(416): unsure at all n locations
cggctcagctcaacatcgaccctttccaggtgcggaactacttcacatggactngatggggcctatgcaagttgaaagcctcggaagaaaaaggtatgcctcatgttgtcgcggataatttctccagatttacctggggcaactttatcagagagaaatcacacacgttcgaagtattcaaggagttgagtctaaaacttcaaagagaaaaggactgtgtcatcaagagaatcaggagtgaccatggcagagagtttgaaaacagcaagtttactgaattctgcacatctgaaggcatcactcatgagttctctgcagccattacaccacaacaaaatggcatagttgaaaggaaaaacacgactttgcaagaagctgctagggtcatgcttcatgccaaagaacttctctataat

SEQ ID NO: 238648 - DNA, 407 bp, Glycine max
catgcaagcttaggagagaacctttttcttttctttggcaacaacaaaaagccaaagaactcggagatcaacacagttataacaatggagtagcaagatataagtatcagagtattaaatccaattagccaaacttataatcaagaaaataatcaaaccagaattcaaataacataaaatgtcaacaaccacaaaatatcctagactgaaacacaagaaaaataagcaaagtacttagcataataatgtaaattctaagaaactaaaagccaaaatacacggcttataaaagataaataagcagaatctaaaatctaacacgacggaggaggtggtggaagatcaaaactctgacgaatgtattcgacatcctcttctatctgtgtaagacgaatgtccataccggc

SEQ ID NO: 238649 - DNA, 97 bp, Glycine max
tctgacactagtatgatgaacttatggatgtctatctggccccctatgaagcctctgtatgagaaaccgagattgtcccggtggaacaacacgacca

SEQ ID NO: 238650 - DNA, 345 bp, Glycine max
gctagatccttatctacccacacccttctattaactaaattaacctccttgaaaaataatacggataaaaaataacataacaaataataataatatatagatacatatattagggtgttacattgactcagtgcttttatgatttgacattgttacctgcataaactgagtcatagtctcctccagcttagtagtcctctgaaagatgttaggcccttgttggattggcttgatagaaggaccacccttggccttgttgaattgattgtcagggtgtgatctccactgtccttgttgattataatgaccctgctggaagcctgagaatcctccttgagaatatcc

SEQ ID NO: 238651 - DNA, 369 bp, Glycine max
acctttgcgaataatagaaacttcaaggctgagtgtgcctgatattgtggcatccaagtgtcacacccaacaatgcactagataatcaccctgttggctccccacaacgctgactcctatgttgcccactgggcctctattacaacttgaactaaaccttaaatagtcctttagttgatttactcaatcatatttttggtcagccaactttacatgaatggctcttattatacatactaacactttaaaattgaataagggggtccttcatccttcttcatttggccataatcactacaacttgacttttatcttaacttgggctgtttaaattcttggcaaacatgcgaaagatactgggttcttgtc

SEQ ID NO: 238652 - DNA, 321 bp, Glycine max
ccaacttcaaaggcctacagaatctatctaccacagatcatcaaagttattgttcgcagggatgtcaaatatctggagtcagataattgggactggaataatgataataggttctgatttcaggaggagaatgaagatgctgatgaataacccatccgaggaaccagatcacttttagacatctaccaaaggtgtaatgctgctgtaatggagcctgagggatatgaataaacttcccttgatcacaaatggagaaatgcaatgaaagaggagcctataatgattgaataaaattaaacatgggagctggtggacagacct

SEQ ID NO: 238653 - DNA, 233 bp, Glycine max
tacccaaggggcctggaattgtccgggtctgaaccccgggactcagtggggctatgccaaaaccagcctgccaatcccaaccaacccggcatatttgtcagtgagaaccttcgatgtacctatgcaagcgagctcctgtctgtccaccaatttattgataacaataccacaaatcctggaggtttgtgtggctggccactgcgaatcttgcgtaaactgtcgattgtgggctc

SEQ ID NO: 238654 - DNA, 390 bp, Glycine max
agccttatgagagagaggttcgggagttgtttttatctttcttgcaaaatatattttgactgaatgaaaggtcatttaaggcattggaccattaaacgatctttcgattcttttgaaaggagagaaaacattaaggcattggaccattaatgatctcttggcttctgaaagaggtgacaaagcttatgtgtcggttttaagtctttaaaatccacgtttaaccaataaaagtgaaaaggaccatttcaaggcgttggaccttaaaaatggttttttaggtgatgacaaaggcttggtttatgaattgattttacccttagtttcactctggttattactcaattccattaagaaagacaatccccaagaaaaacgtccgattgattcttt

SEQ ID NO: 238655 - DNA, 228 bp, Glycine max
aagaaacaacaagaatactactaaatgaacgtgtttctttcccatgggcatattataagtatttgaaaatacaacgcctactaattctaaaatagttgattttattagacagagctacactagtttcatggttttctacaataattagaaaaacaaaataacgaaatatatagtcccctatctatcacacaaactaacgtttacagtcgtttgttaaacaaagatcac

SEQ ID NO: 238656 - DNA, 415 bp, Glycine max
  unsure (1)..(415): unsure at all n locations
tagccctnnnngagcctggttccggttgcttgttttgaagctcactacaagccttaagtgaaaaaccatgatatcaccatatccttaaggaattttggagctttggaattgttttgggaataagtgtgggggggtctttgtttcattggataactcgttttgttggctatacttcatgaagtattttgggccatacttgatgtacattgtatattggttaaatgttggacatgcataatgaaatgctgtttctcaaaggatataaagtaaaaaaaaaaaaaaatctcaatatgaataagagaagcattaaagttgagtgaataagaacttaaatggcaaaagaatgacgacactcttggcttactcttatgattaatttaaccttacttttctatggtctatgttattttcttat

SEQ ID NO: 238657 - DNA, 264 bp, Glycine max
tttctcagagctttcattgtcaattacgaccgcctcgatatttaacgggactcaatcggacatccgagtcaaaagatattggcgtatgaattaacttagagtttctgttttcaatatcgagcgtctcgatatattatagggctcaatctgacattcgaattaaaagttattgtcgtttgaatatacttagagctgctgatttaattacgagcgttcttatattctacaggacacattctgacatctcgagatataagttattgt

SEQ ID NO: 238658 - DNA, 362 bp, Glycine max
gctattactaatatattaggcccatcgattaggaagagggcaggaatacggagggttttaaagatcgtctttatagaacaaaaatgagtttggcggcgtctaagctcaaggactgcatttagtttttctcttcatcaaatcctttgattcccatagctatgagtaactaattccatgtctgttgggattggtgtaataagactaccttcatctaatttctgctatttgtattcaataaagcaatggttatagttcttcttttgtgcctattgccttagattgatcacctaattacttgattcattgagctcaattgtattgggagaaatctatttgcactgtgaattgaacaagacaatgaa

SEQ ID NO: 238659 - DNA, 295 bp, Glycine max
  unsure (1)..(295): unsure at all n locations
cgagagcaacactaaggggtatagcaagacattttcccatagcaatcgtgatcggaaggtgcacagacaacgtacattntctttcaagaaaaataatttcaaaaagtgacacggaagggattaaatgattctttattcttcttctcttgagagatttattgggagttctttctaattcgtttttcaggtatataactctgttaaataggcagaacttggcatggacatcactggtccaacaaaaagtccaatatcaagtgagagagagtgtctgtaactaatcaatgtgttgaag

SEQ ID NO: 238660 - DNA, 367 bp, Glycine max
  unsure (1)..(367): unsure at all n locations
accatacttctggctcaattaattaaatcaaattcctaccgtggaacaatattcgttgctttatgcgtagcttgatattttcaaaatctgtctggaaaatttctataatctttactgagtagcatacacttcaaagtttcaatactaaaatattaaaattacttctaaacttcacaatacatctatggggagacctatgctatatacactcttttttntatctctatctcttcacacttccactggttcttattccacaaatacttatcttctctccctctttttcacaaatcttactaaaattagtttttgaaacgtagttatgttctaacttttaacattacataaactagtgtctataaagtaa

SEQ ID NO: 238661 - DNA, 369 bp, Glycine max
  unsure (1)..(369): unsure at all n locations
gcatgcaagctntgaagggtctggtgtggctcgcttgtattatacaaagngtccgaagtattcaatgcgttgttgtccaaatatgcactctgatgccttcagatgaacgcactctgttgaagggtctgaagaaagctgttatggtggaccatgtgagtctggaaattgtggctttatattaggatatcttcgaacaaaaccaatacgaattttttgatgaacgactgaaataaatcattcatggcggcccgaaatgttatatgtgcattgtataagccatatggcatgacaccgttctctatatggctctgatgagtatggaaagccatctttggatatattggtcagccaacaaattaggtggaacct

SEQ ID NO: 238662 - DNA, 371 bp, Glycine max
  unsure (1)..(371): unsure at all n locations
ctcttcatcttctaacctgnagatgcccattgaagctgatgaatatgacacaacatcaccactatcctgcccaataggacaaaaggaagcaaaaaggaagatcaaaggaaaaggagttgcaagccttaatcccaatctcgatttgtttggcatataaagtgcaatgaaggagaataacatcaaataccataaacttattgagttaaatgaggcacaagaaaggcgtatggagtatgaaatccttgtgaacaacacactagcatgtctgagaagcaatgccaagaccacgaaaagcattgtgactgtcttaggcagaaatgatgattttgaatgaatacgccaatgtggttctgtattatttaattacagtt

SEQ ID NO: 238663 - DNA, 441 bp, Glycine max
caatatgttgataaatataacacgtccgaatgtggctcaatattcttactctacaagcgttataattcaacaattacttatttggattaatttcttcctaagcacttccaaaaaaagaaaataagaagaataatatgaatgtttatataacataaaattaatttatacataaaatcaattagtaagaattcatctcatgttacttctaaaaaaatgatattcaattaatgcataagttacttctaactcatgaaaaaaatttattcatttattttctattcttaaaagtgcttctttataaacttattccaacatgcccttgatcatataatatctggtgaacactgatataatatcttggtaacaaagaattctatcgacagccatactataagttggtaaataagatacattatatttcttagacttacattgactaca

SEQ ID NO: 238664 - DNA, 441 bp, Glycine max
  unsure (1)..(441): unsure at all n locations
gctttngtaaagatgagctctgggttntctatacaactgttatctcagtagccgacaacttacctgtaggagggcatttaaatcatcctcagcatgtgtggtttgaggttcaacttttgggaggtccttccatttgatctgaccactgggtttcttcaatttgtcatctgttgtagcatatgattccatctttccatttntcttcaatggtggattcacctgctcgtaatactcttcagaggggctaaaatcatcctcttcattttcatcaggccatccatctgtcacgcgatccttataggctgacccagtaacagaagataagggaactgtacttgattctttaagggtgaaatttgacgataaacatccttctttgaatgttcccttcgatagcttttaccctgtttgaacagcaaactatgaatttcttttttatct

SEQ ID NO: 238665 - DNA, 374 bp, Glycine max
  unsure (1)..(374): unsure at all n locations
agactgaactttttaacctgtgatgttacanactacaaaaataaacacgtgtcagtaacaaatagcggaaaaacaaatatcaaattatacctccagccattgcaatgaaagagttgtctagttatggttcttccaagctctctctctttctctatctagatggtgtatcatatgaattggaagagatgagctcagggaccaaatacatgtgctatatataggcattctacaatcaagaatgcatttcagagccataaccactcattattggtcattacaacccatcagtagccattcaatctggcctctcaattccaaaactgatgagccttccgttttccaacatgtaagagcacattattacattctcccac

SEQ ID NO: 238666 - DNA, 443 bp, Glycine max
  unsure (1)..(443): unsure at all n locations
gcaagcttatngataacatatatgattatgagttttcatcttctaccccatcaagcataatcaaaagagaatgaatgcatctagttcagttgtccaagaaggtttctcacatctcctttaaatttcttatctcttctccttgctaatctttgtcttctcctaatagatccaccttcaagttctatagggtctaaaccaacggacatagatgctctacttgaatctcctaagcttcgatctgttcccatattagctggtgggcttagacaacaaactcatcaatcgacgacactctatacttgatttctagattgaattatgagcatcaatgtggcacttttaaggtctctaaataggttcttgatcccttctcttgtttcctttgaaatgcctatccaatatttatgtatcacttanatgtatctatccttaagctgagaaaa

SEQ ID NO: 238667 - DNA, 246 bp, Glycine max
cctgtatgaagacaagtaaatcatccatcccatgcgtggctaagaggaacaacaattggaaggtccttccatttgatctgaccactgggtttcttcaatatgtcatctggtgtaaaatatgattccatctttccattttcctaaaagatggaaatacctgcttctatacacttcaaacgggctaaaaatagcccttttattaatctcatgccatatctgagttacgctatcctcataggctgaccc

SEQ ID NO: 238668 - DNA, 404 bp, Glycine max
  unsure (1)..(404): unsure at all n locations
taactaacataagatagataagtttacctttcactgggnaacaccacttgtcctaaggatttatatattaaatcatattctattccttcacattaatcacatgttcataacaaaacatctcaagtacaacacatcatctttcacacacaattcattacccacaattacgtagcaagtcacaatgatcattacacagacgttaagcaacatataatctaagactcattcctatattgaatgtgcgtttttgtcagtgaaaaataacactacggcacctaggattacttaatataatacaccacacaatgggtaagcaggtcactcttattaaataaaatcttatggtgattaattagggctatcctgtttagtgtgaatgctctaaccatatgagaacaacatat

SEQ ID NO: 238669 - DNA, 352 bp, Glycine max
accccacctatcctattaggtgagtggaccatataatctaccgcaaaacccatcataaaccggctcttgttctatgttgtggagagatatacttgatatctcatcttgcgtaaagcttagtcagaaagttttccattatgctctctgaaggagaaatcgatgagttgaacaccccatcagaaaaataaattggtgtaaatgttgcttccgccgataacatcattttttcaatgataaatatcttatttagcattcgccctaattaagtctctctcaagctttctaacattgcttacaattcttgggccacttcttgatgctaagttcatttattaatatctctcgagtggac

SEQ ID NO: 238670 - DNA, 386 bp, Glycine max
  unsure (1)..(386): unsure at all n locations
catgcaagcttatatacatattatggtaatacttcaatgtctcgtatactatttaaagaaaattttgttaatcataagacatgatggtcttatataaaactgactactcttacatttagaagtcatgcagtgtcctcatataatgattatgaatgataaccaattcttaaatttaaaaaccaatttttaatttataaactcacaaatactgctgcctgtgatgatgttggagatgctctaaattttacttttcttctattggatattattgcctcttcacagtctcaacttggcataaatattgacgggacagataaatgtgtgaatgccataggtttanctgtcatgactcatgaagacataatttttagccaataatcatcaaa

SEQ ID NO: 238671 - DNA, 487 bp, Glycine max
  unsure (1)..(487): unsure at all n locations
agctctcagatccggtcatggaaagactnggcgactgccttcattaggcagnaccaatacaatacggatatggctcccgatcggaactagcttcagagtatgaccaaacgagaacatgagtccattaaagaatatgcccaaagctggagagatctcgcagcccaagtcatctcgcagcccaagtcatcccgcccacagacgtagccaccccctcaaaagaagtggatcctccggtggtaaaaggggttgaaaagaaagaaggtcttcaaggaaagacggtgacttgggaagaggctcatgagttccttcacctcatccaacaaagcgagtttaaggtagttgagctactaaataaaactccagcaaggatttctttgcttgaactgctcataaactccgagcctcatcgtgcgctgttgataaaggttctcaacgatgcccacgtagcacacaatatctcagttgagggtttaagggatcgttatca

SEQ ID NO: 238672 - DNA, 422 bp, Glycine max
  unsure (1)..(422): unsure at all n locations
gagccaaaatcctgactcaccatatacttttatccanggngagaatgtcaatccttaccctcggaagcaaaaaaggagagaaggaaaatttccaatcaaagttaataagagaggaaaggaaattcccaatcaaagagtgggagaaagcaaaaagaaaagaaagacaattcccaatcaaagagtgggagaaagaaaaaagagaaggagaagaaggaaagatagctcctgatcaaggatcgaaagaaaaaaaagaaaaaatgtgctgaaaggtctttggaccggacaatatctgaacaatacagaattgtcaccaaatgaacaaaaagaaggaaaggacaccacgacctanaatggtcttctccctttaattgccaaccaatatcttgtgcgctagcgactttttcgcccccacttaacaaaag

SEQ ID NO: 238673 - DNA, 409 bp, Glycine max
cgcttgtatgactaccatggtatcaaaattgatctcttagttcaccacaaacactctcatcaggaatgtgatgaagctggaatgcaaagttcaccactaatgcttcatctggactgcagttcagcattgatgtggtgacaatggaagtccttgatgccactgctcgaagtttgagtcaagttcagcatttataatttcattgatgtctaaaaaggtaacctgtggatgtgcatctggagttgctgcaccatttagagagctccagtttgtggtgtattgtttgctttggaagaggttacatcttaattggtatggacttttatttcttgatcaaaaattctgtttgcttagaagcatgtgcagtaaagatagtggtgtctgtacttaaactttgctgctcgagctcttg

SEQ ID NO: 238674 - DNA, 413 bp, Glycine max
  unsure (1)..(413): unsure at all n locations
ctccctggagggaggatagggtgtttctcttcaagntctctgcgtaacactgtcatgcttgcttatggtctaccttgatggttacaatctccccggttagggtagggaatttcattttcaaatgcggcatggagactatggctccaagctcattaagtgtcttcttgccgatcaaagcaaaatatgatgtgtctgcatcaacaagtagatatcttattgtgaagctcctggagagctggccttgaccgaaagtagtgattaagtccacgtagtctttggtctctactatctcacctgcaaagccatggagtggactggtgtaagtgtggacagtgtgagggcagacctcgggtctctgataagtcctccaatataagatatcagtggagctgccttaggcgataatgaccttg

SEQ ID NO: 238675 - DNA, 458 bp, Glycine max
  unsure (1)..(458): unsure at all n locations
gctacaccttctggtcctcctcatatnttgttgctganaaaacaagctctattttcatctcccactccaagtaggcctccggatcattctttcctttaaatggaggaatgttgagtttaataccatcaatacggttttgtctaggaacaccatcattccatcttctcctcctttcttcttcattatgatctctattctgcattggatccaacctctcatggagcgcatcatttcgctgtttcattaacctctccatatgttgcatcaaagcttgcatttggaattgcgaaagccccactccatcattaggattagtacctgacatctcaaacaaacaaatcaaacgttacaagacaattatagttgttgtttgaatacctcacccactcaagtgtatcacacaattatggttttctctaatgaacactcttgcctttacactctaattcccttgagtc

SEQ ID NO: 238676 - DNA, 405 bp, Glycine max
  unsure (1)..(405): unsure at all n locations
ctanggatggaacacttacttgttggttattaacaanagcgcataacggaatcaaaagaagcgaaaaagggtgaccctatggctgcaaattcntcaatcccgtgggtatggcttttgaaaggggggaaaagaagtttttgaatgttaaaacgcccccctttcgtcattattataatttggtgcaggggtggctcgcccaggcgagcccaaatcgcccagacgagctaacctgtactttttttttttttctatttttatgaggggaacattaaccatgtccccttccttgtcatggattagtatcttgccttactcgaactttactatggttaagttacgcgttgattactttctttactttacttctttcttttttaatcaaccacatattaagagagctttaaa

SEQ ID NO: 238677 - DNA, 441 bp, Glycine max
cgcatgcaagcttgcttgtgtggttctatggaggctggatctttgagcttcaaggaggtcctttaatggtgatttttcaccatggagatgcatcggaagacaaaggagaataggtgagaggaggcgccttccactagggaataagccatggaagaaggagctttaccaccaagatgagccttgggtaataagcttggaaggatgcttcattggaggataagaatgagagagagatagagagaggggggagcacgaaatcgaaggaatataagagggagagaagtggaactttgagggatgtctcacaatactctcattcattaaagttacaacaagtgttacacatgcttctatatatagactatgtagcttccttgagaagctctttgcaatacttcttgaaagctagatctatctcacaactcctctataactaactca

SEQ ID NO: 238678 - DNA, 436 bp, Glycine max
  unsure (1)..(436): unsure at all n locations
gcttataagaacagaatagtatgagatcatttctaatatgcacgngaattatgacgcatcaacatgaatcaagccatggctatcgtgcaagctatcaatggggctaaacacaccatatgataatgatgacggatggctcaaattctcacaaaggtaaaatcatcactttcacattgagcttttaaaactatcatgacatgtagagaagattcaatgatttcaagtcacaaaatgtcaagaactcctattctcaaaacaattacccatttcttgaacatttcctataattcaaagacaaacatgcacagtcattcgtgcacacaaaattgacccataatattaactaaaatccgaaagactaacaacattacaattacacaactaacaattaacaaaccacaaactagcaaaccataacacttcccccgctcctcat

SEQ ID NO: 238679 - DNA, 420 bp, Glycine max
  unsure (1)..(420): unsure at all n locations
ncaagctttccctctattccctataaatagggggaggagggcanaacanaagggttcaaccctcctggtatctgagaatcactttaaattagtgagaaatattgtttccgtgaagaaaatccaagccgaggcgcttccgtcacgcttccgagacgttttcgtgggtgatttcgcgaagattntccaccgttcttcgtcgttcttcggttttcaaccggtaagttcccgaaatcgaacttttcaattaattctatggacccttagtggtccccacttgtttcgcgtgctttattattcatttcacttattntccgtacccctttttgacgtgctttggttatttatttaagtcattttctcgcctaatcaaaaaataagatatttccactgatcatttgaattgaacatctttaatttctg

SEQ ID NO: 238680 - DNA, 417 bp, Glycine max
  unsure (1)..(417): unsure at all n locations
agctataaggtatatgagtatgtttaagaagacgccanggggggtagggcaggaattgaataaaaaattaaactatttccatggtaattatataaattaatacttgaaaatttgattaatttccaattaaattatttttaaaaatattattagacatttacctacataaattttatttttagttctactacgtttaattaatcttaaattaaatttggttacaaagtaccttgtcattaaatatttttcacgaataataatcataagacatgaaatgtcattaaaataaagacataggtatgttttcataataatctttagccaaatattctcgaacggaattgtgcatcaataataaataattgctgatttttattcgcagggctaattttaccatgataaaatatattattaaat

SEQ ID NO: 238681 - DNA, 347 bp, Glycine max
  unsure (1)..(347): unsure at all n locations
atcttacaaacgctatataacagattaatctctctgcttttcacgcggtttattaaatgattcatggggtaatttccctccaattgactaataaaatgtttatcttcaataacttgcttaactcaattcattctatattagggctcatcataaacggtttgccatttcatctcaattaactcagatatattgttccacataacatcgataagatctgataatacgtgtacaaagtctcacacacagcaatcctatgatcatatatcatatttaagagagtcattgatatctaagattatttgaacattcctataatantgatctgcgactaaaaacataagtaaata

SEQ ID NO: 238682 - DNA, 449 bp, Glycine max
  unsure (1)..(449): unsure at all n locations
gcttgaaagaagaaaattagtatgtaatgtattctttgttanaaattaagtggggataattaaggttgattaatggtgatccaaatttcatagaattagaaaaagggataattaagtcatataagtttaaagtggagggcatttttgtaaattattatacaattagtttaaaaataaatttttaatctaattagttggcgactaattaaagtgtcttattatatgatgtagaataattaaaataagttagagctataacaccttgaaaaattataactccgaccgatagagaataacattgagcagtattgtactttggctctatatgaatggactctgtgcagttccactatgagtgcacatattccaagagatattatcacattaatctagaaaggttaacacattaatctagaagattaggataagaattacgaattttagcaaaa

SEQ ID NO: 238683 - DNA, 393 bp, Glycine max
  unsure (1)..(393): unsure at all n locations
tttgctnggatagatagttntttgcttggtttggccnaaaaatgatttctgagtgctggtctatcttatccttctgcgtgatgtatttgatttctcctttggtttgtggttctgacggtccaaaaaattatatttttttgtgttcctcgggcttatttgacgtggctgactattgttcttcctttgcaacacaaaagcttcaattgttttgcgtcttctacctttagtttatgttatgacttttcgtatgacaaaagcttaaatttttttgggtgttctgcctttggctaatgattcaatatattatttggcatgttgattatttttataatccctattgtatgtagagaaggtggataaacacactatagctgcgatttttattctaaaaac

SEQ ID NO: 238684 - DNA, 466 bp, Glycine max
  unsure (1)..(466): unsure at all n locations
gagctgtgatggaatgtggttctttgagcttcaatgaggtccttcaatggtggttttccaccatggagatgcaccggaaggaaaaggaaaagaggagaaaggaggcaccatccactatggaataagccatggaagaaggagcttcaccagcaagaatgtgccttggataagaagtttggagaggatgattcaatggaggaaaagagagagagaacgagagaggggggagcacacaattgaatatagaaaagggggagagaagttgaactntgagttgtgtctcacaagactctcattcatcaaagttacaacaagtgttacacatgcttctatttatagactaggtagcttccttgagaagctttcttgagaaaacttccttgagaagcttctttgagaaaacttccttgagaagcttgagcttagctacacacaccncctctaataactaagctcacctccttga

SEQ ID NO: 238685 - DNA, 363 bp, Glycine max
ttttttcagacagactctcaacataataataaaagataagtgttttataattaccttataaaccagctaatgatagaagctctttcatattagtttttttcaaaagatatttttagattatgtataaactagcattaacttatagaaaaggtaacttaattctttcttatggattgctttttttagtagtacttctagatacatttatccagatagacccttaatattaatatatatcaacaatacttataatcttatgagactgagcacgatttattgaggcaagtagaatatgctcctacggttctcttttgatctcgtgcatctgagctacatgaccgtggagtaatattccgaacgact

SEQ ID NO: 238686 - DNA, 348 bp, Glycine max
ttattaaaaataccacctaagtctatctgatcatatgtatattagtgtatgtatagttgccaagatggatctgtatgaaataattatacaagatgattgacgtgaaatttgattttatgttatttaaacaaatctctaaaaaatcttattcaaatgtattcagtatacagataatatggaggctaaccagttgaggcatgatgagatatattcactatgttgataagacatctctcttcgaagattattaaatagtttaaaactagtcatatgtcgatagcctcatatatttttcatggcatgcgaattataacgaataacttatacgatgtataaatcgtatataaa

SEQ ID NO: 238687 - DNA, 276 bp, Glycine max
ccaaactcgacaccaatggtgagaggggaaccgtttggaacctcttatcggtgaactgcacgagcaggcacgatttccctacacctgcaccgtaccatataaaaacccaaacttggtgtcagattcggagacccaattgcgagaacaaaagagggttggcgagaacataacctgcgtcaccgatgatgatgtacttgaagaggtagtcgtacgacatggctgaacgacgagaaacaacgtcgtttggagggtgcgaaacagaatgaagaagagtaa

SEQ ID NO: 238688 - DNA, 440 bp, Glycine max
  unsure (1)..(440): unsure at all n locations
agcttgtattagtcatggatcgggttannccgtttcacactnttacacgaatttaatattgtgatctaccctcgccagccaaacaagttgattcacgggtctatttttttaaaaagaaaaactataattttaaaataaatattattttttcttttaaaaaatagtcaattacactcaattatatatatatattaaaaagaagtcttaataaatctctaattaatactcaattacaaaagttttaacacaactaaataaattttcaacatanatgtaaatgcaaagaaagtntggattgcagctttaagattaattgagtttaagttgggcttagctggtggtcgcagggttgcggcccaactcatggaccgcatgatccatacncgcacaactaacatattatgagggacggctctaaaatcctgtatagtaatggattt

SEQ ID NO: 238689 - DNA, 376 bp, Glycine max
tcacttataatgtaactcattgattcgacgagacaactattggaaaatcgagagtgtgtaatgatttttgttttttgtcttgtatgaacatcctttagtaaaatgaacatttctctctatatgattaactgtggattttgagtcataccttatccaaaactagacatacatgactctttatactagtaaagtttataaaattttgttatatatatgataagtataagttatgcaatagttttataaatacgctatagaaggaaaaaaaatgtaaacttgagtcttaatataaagttttcatcacataaatatatttatgtataaatttggtttgggttggattagattgaattttaatatgaaatccagaatctga

SEQ ID NO: 238690 - DNA, 431 bp, Glycine max
  unsure (1)..(431): unsure at all n locations
cacctgcggcatgcaagctntatgagaagcacacatatgttgctcttgatgtncttcctctgccccttttcattatggttttgtaattcgctcaattctgggttctagggtttttggtctttgattattggtgtctgcacattgacaggatagtgaagcaactagcttctgcaagggatcatgataaaatatatgatcaattttttgactacggatattacttactgaccacaagccaaccatcggaaggtacctttcttataaataaatttggcttcaatatattggaatgctttagctactttatgtttcactaattgtttctacctcattgctgatatttcctgaagggaagtaattactttaaacatatatgcttgcagtcaggttacatggatagagagattaaatctggagaaattgctgccctg

SEQ ID NO: 238691 - DNA, 355 bp, Glycine max
  unsure (1)..(355): unsure at all n locations
gcaagcttaggtngagttctgcttacctatacgatgcttgtgtattagagtagaggggtagttaggatagtttcttaccctagatagagtctacatacaacaattggtttcactccaatataggtatggcgccttacgaggcattatatggtaaaagatgtaggacacctttatgttgggtagattctagtgagagcattgccttatgacctaaggtagttcagtataccactgaaaaggtcaagttgatccaagataggatgagagcagcccaatgtatgcagaagagctactatgataagagaagataagatcttgaatctgctgtaagtgatcatgtatttctgagagtcac

SEQ ID NO: 238692 - DNA, 318 bp, Glycine max
gagatgaaatgcggtgattggatatcctgttagctgctatcaccgaatagctgaaaaacttgtgcttgagtgaaacagtagccgtatgactatggtttgagctactttccttgatatttgtctcatgactaacttcatctaactgaatagctcacattttgttcttctctttgtctagctgcatattctgtgaagacaagcgattggtacacattgcttcatctttctctatctgctatgaaaacatttgatgcatacactctttgtacataaacactgcatacttttccacttgaggacaagtgagttgttctcttt

SEQ ID NO: 238693 - DNA, 453 bp, Glycine max
  unsure (1)..(453): unsure at all n locations
agctnnngaagatttgttggtataatttgcctgttccattaggctcttaatgtctttagaggttacttcctcattgacatcttttgtcttgaatggaattgccatgacaggtttattgttactatctttgatgtttggtagttgatattgtgttgcgggaggcaattccgattggattaactcaccatccttcacttgccaatttgttatgacattnngtgttggatcacctatgatgtcttgtttccaagggtaatctatatcctttctgatggcataagcatgaaaccaatcaaagataaggacattaattttgactctctcgacaaattcgtacaactcgtcttggattgttatctgtttgaccctagaatgttggaaaaccatctctttgcgttcatctcggaaataaaatcttcctaaggttcctttcatgcttagtgcaatacatct

SEQ ID NO: 238694 - DNA, 342 bp, Glycine max
  unsure (1)..(342): unsure at all n locations
agcatctgtggtgaagtgtatcatcaaaggtctgggttagcttgggctttattctgccaattgtatacacacatgttgctctcccttgctcgtaacaccaatgtcaaataggccttgtgccatcatttgctgaacaactccctcgctgctgaacatatttccacgtcatgcgatgcatgcatatgcattatacaggaatcccattngtgctcatcaagggaaaccatgctcgtctcttgcaacgcctaaaatataacctcctagaggtgaccatgtcttctattgcttcgacctatacagtctgcactcctctatagcagttactgccgatcctccatgatt

SEQ ID NO: 238695 - DNA, 337 bp, Glycine max
aagcgcttgttgctttctatggacagagtgaataggctcaggtcatcaaacactacgcatcttttaaagcacaaagcgaggatcggaacctctaccgtacgttcttttaaaagacgacgatgagaaaattacagaggacaggaattcctgtgggaaaccaataagaacattctaaagataaaaacatgttgtgacttccttaattgccccagatcttaagcgtagtatcgcttgacaacgtctgagttcacggttgaaggtggctcctcgtcatccatgttggcgagcaccatggtgccttcggagaaagccctttttacaacgaaaggccctttat

SEQ ID NO: 238696 - DNA, 216 bp, Glycine max
acctgaaaccatctaaccttctgttattgcaaaaacaaaaagaaggcgaatgacaaatttctgcaacatgtaaagaatcctgttggggatttttacataaagaaactgtgtctgttgcatacgacatggttcataccttaattcttgagaactgacatacaacctttccagttggggccctcaaaaccatggcttcggcagcctgtgtatgactat

SEQ ID NO: 238697 - DNA, 210 bp, Glycine max
tatggactgagtgaaaggcgtaggttgtcttatactacgctatctcttaaagctcatggctatgatcggaacctcaaccgtgcgttctttttatagacaacgatgtgataattacataggacaggaatccttgtggtataccaagaagaacatacaatagatatacacatgtctgactttcttaattgcccgtatttaatcgtttatcat

SEQ ID NO: 238698 - DNA, 441 bp, Glycine max
  unsure (1)..(441): unsure at all n locations
gcaagcttggagacttgagtctcgtatcggtttaatcgattacaactatctcataatcgattacattgttgtttgagagaatgactgatttattcaggactctcggctntaattgattaccaagtggattaatcgattacttctctctcattaagtgtttagaggtgaacaagaacactttaatcgattacttagggcatctaatcgattgcattgttcttgagttatttccagatgctgggattaactctttaatcgattacttagataatctaatcgattacttcattgaagtaatcgattatgctatagatttaatcgattacaggcagttataattggtttctctataaataaccaacttaagttcacatctaaaaatcaagagatcaatagaggatcctcaatacatctcaaaaataacatcttaaccttagaatg

SEQ ID NO: 238699 - DNA, 322 bp, Glycine max
  unsure (1)..(322): unsure at all n locations
aatgttatcccctcnccctcattngatagcttccatgaagactacaataagcgctcctgagccctacaatgtcaattccaaatctatatattatatgtgaaaatatcttacatctgttaagtgctttatagttaaatcactagttaagtagaaataatatgccaaattattcatactaaattaatagaataatcaagttgaatagtttcaaatctgcgagttggagaaactatggttgacgataagacataaattaaagtttatagacttaagtttgggttaaactcaagtcttaaaaatatcttacggtatactcttttat

SEQ ID NO: 238700 - DNA, 380 bp, Glycine max
  unsure (1)..(380): unsure at all n locations
agcttatgagccgtggagttatgtgtgaggtttccctgtttctccattgaagggtaccccagcataccctggcagaggtcaggattgaagtanaggttgttttgccttcagtaggattgagtagagcagtagagcattgtcttcatcgtggtaaaacgatccaagcagagcgttgagcacggttgaaacagaggatgaaagaaagaccacgttggtggagcttcgggggcagatccgcaacgaacgttcagcccatcgtcctactacgtctataacctcgacaagagtacaggttaggcaattgtagtcttccgtttgcatgttagtatttgtttgttcggacttggttggtgatggtatcgttgcagaccttggtcggt

SEQ ID NO: 238701 - DNA, 327 bp, Glycine max
cgcatgcaagcttcaagaattaagtttagagaatctatattcatgaacactcaagatcgtgtatgatgaatcttgagaagactcaatccatataagttcttgaatggcttctcaaaacattgagttgcacaagaatatttcacaaaatcttttaccaaaaagatttactctctggtaatcgattacccgaaggtgggaatccattaccagtatccaacattgtttttcaaacctgattacaaagctgtaatcgaataccacattttaaactgttaatttcaatttcaaaaggccaaactgtgattaaacattttcaaatatttcaac

SEQ ID NO: 238702 - DNA, 353 bp, Glycine max
  unsure (1)..(353): unsure at all n locations
cggcaagcttgatagagggagtcgtctttatagctctatatgagtctgtgagtgagggtgaggtcctatacgtggaggagacatccactacttatatttcttcaatccttcatctttctcttctctttgttgtaaaggaaacttcccagatatggagagctaaatcctctgttggttcttccttgtaggtacttgatgtaaatactctgatatctatttaatgatgttttatgtgttctctgtgctatcaagacatcatttcagtgtgcttttgccttgatcacgtaaatgcattgcttngttaggatcattcaacagtggaaactggtctgattttagaacttgatggacag

SEQ ID NO: 238703 - DNA, 357 bp, Glycine max
atcttaagcgactgtgctgcagctttagccaatggactaccttgattatttcctttgatagcccttttgagccttgtttccctttccttggtttgaagctcactacaagccttaagtgaaaaaccatgatattaccatatccttaaggaattttggagctttggaattgttttgggaataagtgtggggggtttttgtttcattgtgacaacttgttttggtggctatgcttcatgatgtattttgggccatacttgatgtacattgtatattggttaaatgttggacatgctgaatgaaatgttgtttctcaaaggctaaagagtaaaaaaaaaaaatcaaaaaaaaaaattttcg

SEQ ID NO: 238704 - DNA, 397 bp, Glycine max
tcatctagccaagattatacaaaggtgttacaagagaatctatttattcctaattatatgggccatcaaatctatcatgtgctgacagtaattgattagcccatgaatcttcttgggggcagtgtacactttggccatggcttttgctttggctaacagacgcgggaggacttgacttccattatgggcaaggcgaacctatccatccacatagtcgcttctgatgcaacccatcaatcaccctccctcttgcttctgattccgcctacacttgtgcaaaaatgctcagtttcttatgtttaatggccaaggactggtttaaatctttcttgtattgcccctaaatatctatcctagctatgcttcgtggtttccaagagtttgtccaacttctttt

SEQ ID NO: 238705 - DNA, 322 bp, Glycine max
  unsure (1)..(322): unsure at all n locations
tacttttattccgtgaccacagagcggtacctggagatatgtcgcggcggtcaagagaccttggggatgtcaggtggggtgctattgcccaaaaccaagcttgaccaatcccgacccaacccggacatattcagtcagtgagaacctgtgatatacctaaacaggcgagctcctggcagtcaaccgataaaagaacaaagaccacaaagcagggaggcttgtgtggtgactggccancaataagtcttgagtgagatttgggatatggcctctggtaatcgattaccaagggtaggtaatcgattccaacacttaaaagtga

SEQ ID NO: 238706 - DNA, 391 bp, Glycine max
tcatctcaaaaggaaaggtggagaataaagtgagtgaacgtctttttaatagcttgtatgtatctcttgatttcaggtttgcatcatcaaaaagggggagattgtggaagcaaagctaccatgatgattcaccaagatgttttgatgatgccaaagcttaaagatttgtttcaagattaaagaatcaagcattcaagatttcactcaaagattcaagaatcaaatgaagaaatcaagaagcatcaagccaagtcaaagtaggtagtaaaaagtatttttcaaaaacatcaaatagcacgttttttgttttaaaaaggattttctgaaatcttctaagttactagagtttttactctctggtaattgattaccatttggtagtaatcgacta

SEQ ID NO: 238707 - DNA, 415 bp, Glycine max
  unsure (1)..(415): unsure at all n locations
agacaacacagctcaatccctattactcataagataaattatgcagcgtttagcatgtgaccttataatgtaccaatatttgacgttgtgtttcattatattctatttttaaaatatattgaatataaaatagaatgcgtctatcaaatattagtgaaataataaaaaatattcggtttttgattgggtagaaaagcaaaaataaatggaaaggataaggaaggaaacaaagcatgtgaacaacatacagagggagacagagaaacctgctcgactattgattaactttatatgcccaaaagtcacggtcaagatataatccctctgctatccgtggngaccaagacacacccacgagaacaaatactctatattattctaggcataagcatatacatgcatacatatacataca

SEQ ID NO: 238708 - DNA, 428 bp, Glycine max
agctgaatggggccaaggacaaggtgtggtaaaatatggaataaggggctgaatcccaaaggaatagagaagcaatggggaataagtgcaaattaagaaaacataagacaataaaaaagaagtaaagataaaatttaaacataaagagtagaaccaagagtctcatcattcttttcttattcactcaactgtactggctttctttttctttttcgatttttttttttgctctgtagccttttgagaaacagcatcatattcagcatgtccaacatttaaccaatatgcaatgtatatcaagtatggctcaaaatatatcatgaagcatggccaacaaaacatgttatccaatgaaacaaatacccccacacttattcctaaaacaattccaaagctccaaaattcctttaggatatggtgatatcatg

SEQ ID NO: 238709 - DNA, 411 bp, Glycine max
  unsure (1)..(411): unsure at all n locations
tcaagctcgcacagctaccatagatgcaactatgtattctgcttcacatgtttacaangctaccacaccttgcttctttgagcacctagaaattggtgttttaccaatcataaaaacataccctgttgngctattttgatcactnttgtcatcacactcattagagtctgaatattcaaacaactttgcctttgtatacctctcatcattaagaaacattatgccaaaatttaaagttcctttaacataccttagaattcttttgcctgccaagaggtgaagtgtccttggttcctccataaataagcttatcaagccaacacttttgaccaagtcaggtctagtgttgcatacgtatcttaatgacctttacaatttgtttgtatagtgtagcattaactagttgctcac

SEQ ID NO: 238710 - DNA, 337 bp, Glycine max
  unsure (1)..(337): unsure at all n locations
ttatatactttttttanntcgggaaatatttgcttaagtgttttttttaaacgctatcaatntagtatttaaccaaacattatagaattatgtgtacatatataatttgtatttccaataagagagatagcaagatttcatattaattgcattaccaattcagatcagttggatcaagttatagtaaataaacctcanaccaaggccaactcaagagtaaaacaactaaaacttgagctttaaattcacatgttgactaaaaggcctcaacttntgtttagacctcacttgctattgggcccatcctctcactcgtatactctactttgggtgcata

SEQ ID NO: 238711 - DNA, 384 bp, Glycine max
aacttacaataagaataataatatttttattttatcaaatcttatcgcatccaaatgttattctatctagattctattctatcccgattctatttcatctagattttattgcatccaatcttatcttatcttgtccagatcttattctatttcgtttatgggcttggacttaaaatagatttgcgagctttggggttgaggacctatataacaacaccaaggttttattttagggagttcttttttggagaggagaataattctacgattttagaagtccagtttttattgctgatcatgcacactgatcacgttgaataaaattcgtcttctgcactttcatgtcgacttcaatccacagtttcatttctactgattaatgga

SEQ ID NO: 238712 - DNA, 357 bp, Glycine max
  unsure (1)..(357): unsure at all n locations
gcttgaacacaaganatgaaaatgatcaattcttcaattactaaggaaaaggccacgaagttgcttgatggtgataaccatcaagatgaagccgaggtgctagaggttcatttgaaagatcttgctagtcattttgaacccatcataggcaaagattaattaggtagctttactggtgacattnttttttgtgatggtcgcattttgtatcgataaatgaaaactttatgatctgacaatatcttaaaatagttgaagtttgataatttcattgaatatggtgaattgttgagttaatcgagcactcaaaatatttctaagtgatccttggacttgtccattaataatttcatatat

SEQ ID NO: 238713 - DNA, 411 bp, Glycine max
tttaaactcagctctaaaaggctctgagtccacgacgttgcacttagctctttttctcgtgcttagcgcgagtaagtggatttgagcttagcgccagtcatgcgctgagcctggctgaagataactgccgcacttagcgcgcgaccttgatattgatgctctgccagattcttctattgcgctaagcacgttgaatctgcgcttagcgatggatgcacacttagcccaactgatgagctaagctcaactatcccttttagcacttcatgacttagcctctttttaacctgaaattgcacagatttcatcattaaatccaatagaaatattctagagactgctttaacaataaaacaagatttatttacaaaattactaacaaaataaccataaattggggaacttcacaag

SEQ ID NO: 238714 - DNA, 424 bp, Glycine max
  unsure (1)..(424): unsure at all n locations
agcttctcacattggaaccgttttagtggacccaagatgctcgngcaacttttgctactcttaaacagatcctaacctcaacccctgttcttcggttgccggacttcacccttcctttcacggtggagacggacgcgtccggcacgggcatgggtgcagtgttatcacaacagggccacccaattgcttacttcagcaaaaattntccaccaaagctacttggtgcttccacatacgttcgtgaattattcgcaattatgaccgccgtcaagaaatggcgccagtacctccttggccagcgcttcaacatcctcactgatcattgcagtttgaaagagttacttacccaggtgattcaaacacctgagtaacaaaagtaccttgcgccgccttatggttacgactacaacattcaatatcactc

SEQ ID NO: 238715 - DNA, 395 bp, Glycine max
ctgagttcagtgagtaagaaaataagtaagcaacactgatttgattttcgttgttttgcttgcagtacttcaatcgcttcttctacgaatgttaatgaacttactttccgtgttttcatagttgcaaaaatatggatatatttaattgtttgttaatatgatgattttgggttattccttattttcacttgctctctatttattttctaactgcccacgactaggaacatacttgtgtttgaagatctgacttttatttatgtatttttcctagtatgatactttgtttgcccattccattatgcttcaaatttttgtgcattttgttattgccatgtatttgattttgacacatgttagcacttttgggtcatacatatatatcacataaattg

SEQ ID NO: 238716 - DNA, 435 bp, Glycine max
  unsure (1)..(435): unsure at all n locations
tccngagcactctttcatcctaaatctctctagtattttattgatatatgatttatgggataagcctaatagtgcctatgatatgtgatcgatgccgtacccgaatcaaataaatattaaaatgtagtaactatgaagtgatcctaggtcatttcccaacgagcaatgatacacgaaatgttcataacagatagtaggaaatagtaacaaattgggggggttgtttgcttttgtaaattaaacagcgagtaaaattgaattagaaattatcagaatttaaatacgttgcttccccttgattcacaagcaagtctcttatcctaggttgtgagaatatatcctttatcatttcaaccatgtaatgcaacccctagattaaataactaagtgaaatttaacattaagcattcattatgtgattaagcatcacacaca

SEQ ID NO: 238717 - DNA, 400 bp, Glycine max
cctcgaagagttgagtctcatatctattaatcgatacattattttatattcgaccacattgctggttgagacaatgactgatttattcaagagtatttgtgttaatcgattaccaaggggattatctattacttttctctcatttagttgttcaaaagttaacaagaacactttaatcgattactttgagtatctaatcgattacattgttcttgagttatttccagatgttgggaagaacactttagttgattacttagataatctaatcgattactttgtagatttaatccattacaggcggttataactgttttctctataaattatcagcttgtgttcccctccatatgatgtagctccatgtggagcttgtaggcctaggatcttcttcatcaat

SEQ ID NO: 238718 - DNA, 451 bp, Glycine max
  unsure (1)..(451): unsure at all n locations
agcttataaaagttgtatgattgtgtttctacactaaccaatgagcatgaagttntaaagaaataaaaacatgatctctggttagaaaatgaatcttttaagcctttgttcaaataatataaatgggatgaaaatccaattaagatattgaaacttgaaagagaaatatttaacttaaagaaagaactttccaagaaagaaaattaattctctgtaaaggatcaacctgttgatgtgatacaacttcatagggagatttaatctctaaaaaagaatctttctaaagttgttgaaggatacaaacatctcaacaagtttttgaaatacaacataaatccttttgacaaatatggacatgtttatagaggaaagagatttgtcataatgagcctacaatgatgatatttctgtgganacttggcatgcaacgttaaatgcnacacatgcctaa

SEQ ID NO: 238719 - DNA, 399 bp, Glycine max
tctcccctatattgctataaatagggggagaagtgaattatatttaggttcagccccttatgcacttctgtctctctcgaatatgctgaggaaaattatctccgtgaataaaatccaagccgaggcgcttctgtaacgtttccgcgagtaattacgcgaagattctcgaccgttcttcaagatccatcatttgttcttcgttgtcttcagactacaacgggtaagtacctcaaaccaagcttttcaattcgttctatgtacccgtggtggtccacattttgttgcatgtatttttattcttgttttcgcctactttatataccccctttttgacgtgcttaagccatttatttaaggcatttctcgcttaatctaaaaataaaataaatttccaccgat

SEQ ID NO: 238720 - DNA, 325 bp, Glycine max
gcttgaaacgaggaagagtagaatggtgattcttctcgctcttattcgctgaccacagagtggtacctggagatatgtcgcgtgggtcacgagaccttgtggacgtcaggtggggtgctattgcccaaaaccaagcttgaccaatcccgacccaacccgggcatatttagtcaatgagaacctgtgatgtacctaagcaggcgagctcctggcagtcaacagataaaaggatcaaagaccacaaagcaaggaggcttgtgtggtggctggccagctgagaatcttgtgtgatatatgggttatggcctctggtaatcgattacca

SEQ ID NO: 238721 - DNA, 407 bp, Glycine max
tgtccaaactccttaaattttataatgtggggggattttattattgtctttagcttcactgattcaacatgttgttttaaagtatgaaggtccctaagcttgtgaaccaatttaaaaaatctttgtaatacagtatgacacgtataatttattaactcatcccttaaaattataattgaaggacaaaacttatagtatccagcaggtgcttttagtgttctccaattaaatgttagagtttcatctcaataatttctttaataaatgtttgcatacaaattacgaagatgaaactctaattatgattagagaacaaaataaaaaatacctatagaaatcctttcacacacaaacttaatgccattcaatagaacacagagagtctagatattgtggcttatctaaca

SEQ ID NO: 238722 - DNA, 270 bp, Glycine max
tctgacgaatcttaagcactgagctgcactatatgttttataacttgacgcatctctacatattctatggattgaatgcgacaactacaaacaaaccttaacattctcgtatgataacctagactccaatgatactcccacagggaaacctcacgatgctgttatactctcatccagagaatggctctttgaaaaacactttatatgaatttgactggggcactctaagtctcaacaaaatggcgagatataatatatgcccattcgata

SEQ ID NO: 238723 - DNA, 395 bp, Glycine max
cactcaagcttgaaccagaaaccggtgagagagtgaccacactcttcttgtgtaccactggctgcgagcacaaatctttgcacgtatctctgcattgtacaatgaaatgtctcaataggacctgatgaaggccaagattgtacatacacaagccttgggaccaaaaagcatacctggaaagatcattgcatcccttgctccttgtataggctgaaagatgtcgacaagaatagaaccctgagcttaaaaaaaatctcctgatacctcgtatagattctaggagagcatatggttcaaggcacacttactctaaattagggggagaaaagttgaaaagaatgaagagaaaaaggttgagcctcaccatatacacccgaggagttgtatgttaaaaa

SEQ ID NO: 238724 - DNA, 337 bp, Glycine max
tttttgcggtaccttctatgacatcgatgcttcttcatttgtctctacatgaatgtcgctcccagtcttgagctaaatgaattgaacaagaatgctttaagataccaccgattaagcttgctatataagctagatatgattatctatggagcatatatcttgaacttgttctagaaccatgaatagagtagatgatagcgtccttagaaattagacttggtattattgtgagtgaaaactatattcttatcatgcgtatcatatatttatagaaaaagataacttcttaattctatagagacttgttcacctattgtacttgtgtcatacaagcatg

SEQ ID NO: 238725 - DNA, 398 bp, Glycine max
ttacagcagattttagtaatgacccactaacctataatttaaataacttaatgccattaacctagggaattaaaaaaaacttaatggctgagtgttactgaaattgtggcaaccaaaagtcacccccaacagccaacaagtcagccaccatttggtctcccaaaaggctgatgcctaagttgccaattgggcccttattacaacttgaactaaacctaactaaagcccttttagttgattaacccaaaacatatatttggtcagccaactttacaaggattgggccattatttatacagactaaacactctaaaattgaatcaaagtggtgtcatttagtcctcctccatttgggccatgatacaactcacaaccttggacttttctccttgaaactt

SEQ ID NO: 238726 - DNA, 467 bp, Glycine max
  unsure (1)..(467): unsure at all n locations
agcttcctcttnctccctcaaacgagccttatattgtcagacgaagcccttcatctccaccgagtcaactcgcctgcacctcgccaacctcgacaagctcctcgagacccagaagcccgtggtcccaccaacccaaatccaacaccaaccaatcatcaacgatccaaaggaaaagaaaggaagaagctttttggagggtcttgacttgnggaggctatggccggagatgaaagccaccgatgaaatgtccccgcgccacctcaaacgcctccagcgcctcctctccatgacggnggagtattccccgaggaacatcctcggcggccgctggagagaatatcacggcagcaacgactggaaagggatgttagaccctctagacgagaatctccggcgagaggtcgttcgctacggcgaattcgtccaagccgcgtatcaagccttccattcagaccccgccatgtcaa

SEQ ID NO: 238727 - DNA, 404 bp, Glycine max
  unsure (1)..(404): unsure at all n locations
tataaaanaacatcttatcaaactcaaagattgaaaatagcaatcactaaggcaaaatttttttccccccaagttgagcaccttctttagcagaggacttgaaaattggatctttttgttttcagttagtgaataatatcccagtctccatgttgttcaaccttcagtttagtctagtgatctgaaataaaaaggacagaaaaatggggacaaaaataaaagagattaagggttcaagttataattcaaaataccaatattcattcaaaggttcaaattcaccaatgcccattttccaaagtaaggggagactattcgttaaatactaatttaaaatgattttagagagaatgaacaaattaaatttcttggcatatttagctgtagagtatatttttccttat

SEQ ID NO: 238728 - DNA, 234 bp, Glycine max
  unsure (1)..(234): unsure at all n locations
agagagcatgctcttcattcttcacatgtacgtacgttctcctggactgatgtttctaaaataatagtaaaacacctgtttgatagatttattattagttattattatccaatattttaagtattttgtgtggtttaaatattttatgtgatttaagattaagattntattttaaataggtttaattactattttagaccttgaatttgaggagtgtattttttttagtccctg

SEQ ID NO: 238729 - DNA, 393 bp, Glycine max
gagtcatcaagagattatcaatatgtgaccatgatttgttgtttataaaaaaccaataatcagggatcatcatcaatcatctttgaatcatctatctttcaacctatctttcaatatcttctttcatctctttgaactaatctttctgaatgatttctcttcatttttctaaaagctttttatcaacactttttctttcaagagaagttctttgttcaaaaacttgtgctatacatctttttcattctcttctccctttgccagaagaacgaaggactatccgcctgaattcttttgtgtctctcttctcccttacaaaagattcaaaggactaactgtctgagaattctattgattcttccctttccccttaagcaaaagatttcaaaggac

SEQ ID NO: 238730 - DNA, 398 bp, Glycine max
cagtctaaacgacccatcaccaaaatgagtgacaatttcttttatttttgcaactcatacttacttcttatatccattagaggagaaaccccgccggtcttgcgatcttccccccaactggttgataagaccttcaaccaggggaaagtcaaatgtactcctcgatagcatcaggggaaaagctccactaagcttaaggtagccttaccacatgggtgacaagacatttaatcaagttgaaatcaaacctaagatgattgcttggcctctactttttaaagaccatcacggtcctacctctacattgactaggtcttgctttctgtgctgtcaaagattccacaattataatcacgacgggctattcatactacaacaagtactaagcattacatacg

SEQ ID NO: 238731 - DNA, 372 bp, Glycine max
accacagagtggtacatggacatatgccatgggggtcaagagaccttggggacgtcaggtggggtgctattgcccaaaaccaagcttggctaatcccgacccaacccgatcatagtcagtcagtgagaacctgtgacgtacctaagcaggcgagctcctgacattcaaccaattaaagaattaacaaacaaagtccaccaatcaaggatggttgtgtggtggctggccaactatatatcttgggtgttgtctgaaaaataccctctggtaatcgattaccattcgtgggtaatcgattacatggtgtaataattgaaacaggatgttaagtagcctctggtaatcaattaccaattgtgtggaatcgattac

SEQ ID NO: 238732 - DNA, 397 bp, Glycine max
aaacccccctatcaggtaatgagtgcaaggacacttttcttaatcaactttgaacttcaagtgagtgcttttgataggaggtgaatcatacacctccacctttctgaatcattggtgatccaaaaggactacattaatgtgcatgctcttgtggaagctccagaataacatctgctttcatctaaacaaagtatataatagccaactatttcaccattatctcattcatgaccaaccaaccttattccaagcttaatgagaagcctttcgataatctcactagacattgtggttaagtccacaaactcattagagacatcaatattaaaataatcaatgaatcttgatgcacgtacatcataaaggaaattcataattcacctggcaacgactcttc

SEQ ID NO: 238733 - DNA, 215 bp, Glycine max
gcacgatgaccacccaccactcctacctacgaatcatggatataccttgaagaaagaaaaagcgtttgagaggcacactatgagactgtctctccaggaaggataacctccgaataattgttctcacacgatctcaggcctatacactgtatattgtgcctcatggtgtagtattacaccatgtacctctacgggaggcgctattgataacttta

SEQ ID NO: 238734 - DNA, 398 bp, Glycine max
  unsure (1)..(398): unsure at all n locations
cctcgggtaccttcttctttactacatcaagaatcaccatttttattcttctctgnggctgncttactggtttagccccatcatctaaatttatccgatgcatacatgtggatgggctaataccaagaatattcgtcagggtccagcctatagccttcttatgcttctagagaactgataacaacttctcctcttgctcatcagcatgggaggcagatataattactggaaaactcttactatcatccaagtaagcatattctaaatttgaaggcagaggcttcaattctagtgtgggtggctgaatagtggtagaaagagatggtttctcagcctgtacctcataaagaaagtcagaggtatatgaacttcctgaagcatggttagttctatctaac

SEQ ID NO: 238735 - DNA, 440 bp, Glycine max
  unsure (1)..(440): unsure at all n locations
agcttccatcatgtggtatcagagcacaagagcttcatgtatgggctccttaaacctccatcttattttttgctttaccttctcttccattgttgattcttcatttttttctccatgtatctcctcacatgtcttgtgctaaatgttgttaacatgattctntagagtttccaccgatgaaactntctatagaagctagatntgattttctatggttcaaatttattgttcttgttcttgaaccctgaattgtgttgagtttaggttcctttgagttttgtcttgttattttttgtggctgaagcctaaaccataaaattcttaaaaaaatattaaagtagaagaaaacctcaaaaatctagagtgacttgttcacctattgtagttntgtcatagaagtcatgtctaatcatgaaacttgtcacataagatatcttatg

SEQ ID NO: 238736 - DNA, 398 bp, Glycine max
ccttcaaatcccccttcatttccacaccaaattgcaagatattttgtttttggagtctaagagcctacctctacctcgtgggaccttcaatttcaggtaagggtggacttctcctcacttgaaatttgtgggtgttgggttcttaagagctataatgggtagttctactaggttattgctttagggtagttgtttgtgaaggaaattgttgtaattatgctaaacttgacatgtttaatgtaagcaaaactacccatgttgatttagggttcaataatgatgttttgagttatatgtgtgcttaaaatgtagatagaaaactggtagagaggatggggagagttagcttacagttaaatgtgagaatggtagtgttgtacgtggaaaagtgtgagatt

SEQ ID NO: 238737 - DNA, 360 bp, Glycine max
tccggaaatcgtaacgtcaccgtccctaccttgctcactgctattactacgttccgcgtacaggtatactttcaagattacctccaagaacccctgatataaacctccaatattgataacctggctcatgaatctcatgatgatgatttcacaatctatgctgactatgactacattgattatcgcaacagctacaggccatatcttattatcgacaaattcaacaatgattatagactcaagtagattctaataggattcatttacatggtgccactctctggctaatagatagtgtctgcaaatattactataactttgtgcttcaagatgcattccaaagataagacaatgactctc

SEQ ID NO: 238738 - DNA, 392 bp, Glycine max
tcttgttgattagcttaagtgggttgacctttttttgtattatagccttccaattattcattgactcagagcttggtttcttgcgctatgggtcaacttgcggtggagagtgaaatagacaaaagactaattttttttttcttttatctgagcaacattcatcttgtctccattacttgtacgaaaatgattttgtagagaatatactaattttgcttttgttcttgctttataaacacaaatttgaaatctaaatggggagataaataaaaaatgtgagggaatacaaaggacaaaagattttcaagaaaaatcatattctgtcaaagcatatcatatatccattttgttggacataattgaagaaattttagtgcaagtggaaattagag

SEQ ID NO: 238739 - DNA, 422 bp, Glycine max
ttcacattttttgtgttattaatcatgtcatacaattcttgtaagtttatattcttttcgatcaagcatcaaacataacattaatattgtgctctttagattaaaccaacttcaataaatcttttaaattcccatacttaaaaatttttacttgtaccactaacacaaactggaagcataatttaacctaccatcgtcaaccataacaaaattctacagtaaacaaaaatgtttactaaaatgggacgaaatgacttcaatttgttgatgggtatccattcttgtaaatgcaacctatcgaaatggaatgtagaggacaataagttcatcttgctattgggatcgttgagaaaatttcatagcatagaaagttgtaaaacaaaggatgaaagtttgaaaaatacaaggttcaagtctcatat

SEQ ID NO: 238740 - DNA, 331 bp, Glycine max
aacaatatactgggccttcatgtaactgtctttgggcttggcggccacactcaacaaagtacttttgacacctattgtacgttgatttcaccaatgctgttatgggaatgttgcgacaatcctttaaaaccttatggatacactctaagaggttcgttgtcatgtggccatatcgaacgccttctttatcgaaagccatcgtccatttttcttttgagatgcgatcaatccatgttgctatggctggacctagttcacgaaaattctctaaattttgatcaatactgtgcttgcagagagtgtaggctgcataaaattatttatgaataac

SEQ ID NO: 238741 - DNA, 375 bp, Glycine max
gcttagccttagagtgtgatggaccttttatgttttggagaggatcaataacaatgcctataagttggtgttggatcgagtggcctcataataattaagaagggggggttgaattaattattcctaaaccttaactaattaaaaaattactcttttaaggctcttactaaatggttaagagaataaggagtagaagagatactcaacagatagtaaaagcggaaattaaatgcacaacggaaagtaaaagagtttggaagaaggaaacaaacacacaaaagtttttatactggttcgacaacaacccgtgcctacatccagtccccaagtgacctgcggtccttgagatttctttcaaccttgtaattatctttg

SEQ ID NO: 238742 - DNA, 385 bp, Glycine max
acacggaatataaacctcagctggctatcgaatgatgaacaatacactatttctttttttctgtgtaacctgaaactgagagaaaggtattgtttaacgcacaaaaaaagtatgtgatgatctattacctatatataacagaaagtgattgtagttttatgaaacaaccatgaattgggaactgtggattcaatatacactaggtgtatacacaaaagttagtcgtattcatcgactaacaatacactcgaagggagtggtaccttcgacgcttcatcaaaagctgaagtataaggtggatggacgcttgggcagttgatcatgggaagaagacctcttgctaaggtgctcgacttctacgcccttcattgagggcacaaatgaa

SEQ ID NO: 238743 - DNA, 142 bp, Glycine max
  unsure (1)..(142): unsure at all n locations
atctttagtaccgcagccgcaactttgaagaggtgtgcttatttatgataggggggcgcgtanctgatgcaagcttcattggagctcgtatgcctatgatctctttcatcaatggattcctttgcttccttgaagatgaatg

SEQ ID NO: 238744 - DNA, 399 bp, Glycine max
gcttatgatgatgaatcagcataagtagagagttttttttattttaaaagcccaaaagatcccatgagagtgttttcaagaatgagtccacaccgtcttgatcaagattgtattcaagattctagtaaagacttcgatatgaatcaagattcacgagaagattgactccagattcacgagaagaaattaagaagcgacaagtctagacttttcaaaggatgtattgtaaaggaattttcataaaccaaacatagtacaggtttgttttacaaataggtttctcaaatttttctagattccagagtgtttactttctgggaatcgattactcagtttcctggtatcgattatccatgtgttagaatttgagttctaaatgtatttaactagaatctgcta

SEQ ID NO: 238745 - DNA, 395 bp, Glycine max
  unsure (1)..(395): unsure at all n locations
agagattatgattattaaacacacaaaatgaanatactaagtatttattacctatacttaacataaaatacttataacattacaaaataaccataaattgggagagtttgatacaatntatacaagttttatacacaaaagttagttattttgagagatgaacactaacgtgctatggaaaagcggatgaacttctttttatttgggaagttagctcgcttttaggtgtctattctctatttgctattctttgattgttattgtgaatattcgntcataaattctatttgtcttttcctggttaactggataaccactgttctgttagtattttatatgcatagatctcccataagaaatttagttcctccggacttataaatngaagctacatt

SEQ ID NO: 238746 - DNA, 390 bp, Glycine max
atgactctttttttttacaactttcttagatttttattttccctctttttccttctctgtgacttttggagctaaagccttactatccttttttttcttttgtttttctaactttaacttagagcttcgcttgacttcttattttctctaccaagaaactcaactataagtttattcaactaaataatattgactacgagtagataaaccattagtaactttttaggatcaaacaaattgagcctttggttcaggctactgaaaattcaaatttttgtttccaataattctgataattattatgccaaataagtggatccaaattgtatcttataatcaggatgcaaatttgaatgttacaaagtaaatgagctctcaaaacctaactca

SEQ ID NO: 238747 - DNA, 190 bp, Glycine max
gcaccaaaccataccaaagtggcaacacaatgaagacttacaggagcaaccgccgtgatcagacgaaaacaaagcgagaaaacacggcggcagtttgggttttaggcacatagcgctcatctcaatagtgaaagaatctagggctcaaggctgatgtgaacgagatctagggcaaccttatgcaaaagaa

SEQ ID NO: 238748 - DNA, 375 bp, Glycine max
ataatgaagattttttttttgaagcatcactctatacagcgggaatacatctttttggtacgaacctgccgcgttgtgatacaatacgatcccttctgcctcagcataaagactctgggagtgtaactatcccttgatcaataggagaagacaaagggggaaaaactcttattgacctgtgagccataatcatgtgatgccactctccatgtgcagaatattgggagagttgcaaataatgctcacttcacagactgtacaaataagctgaacactccatcatcccgccatattgagacatcgaagatgagttgctcatagtaaaacactttatcttcccgaaaaactttgtggtaatggataactctacagata

SEQ ID NO: 238749 - DNA, 318 bp, Glycine max
attttggaaccaactctcatctcacacaaatctattacattaatctaaacctgctcaaactggttttaccaccaaaaatccaccgaatcaaaattttacttctcaacacccaatttaccctaaaaatggctcttgccttcactttggtcactcattttcctcctttgcacagcccaagctttcccacaagtcctaaatgacatttcaaactaagattaactcactttaaccctcaattacccctaaatccagctttagcttttcaaatacttaaagcatcacactcttccactcatatcactacattctcactttttt

SEQ ID NO: 238750 - DNA, 404 bp, Glycine max
  unsure (1)..(404): unsure at all n locations
gcttcttatccaagctcatcttggtggtgaagctccttctttctttgtttatacttagnggatggcgcctcctctcacctcttctcctttgtcttccgctgcatctccatggtggaaaatcaccattaaaggacctcattgaagctcaaagatccaacctccatagaagctccacaagcaagcttccatcagtcgggatgaatcaaaaaggaatcctctccgtgcccaccatggggaattatgccccccttttgtagggcctcgtagataaacctcgtgggggtcatcatgtcctttaaaggcttagacctgcgtggcctacccgactcgatgacattaactgctccccctccatgattggcgagcgggtttttttcacgttgcgccgatcctcttgaaacatc

SEQ ID NO: 238751 - DNA, 410 bp, Glycine max
  unsure (1)..(410): unsure at all n locations
agctataaccctttgtcattagtaaacattctgatattaatcacaatcacaagcaagatatcctaactacatgcaagagataagaatgaaaagtagaaaagggaaagagaagctgggttgcctcccagtaagccctcttttaacgtcactaacttgacaagtcaggtgccttcaaggtggcatgaaggtcacaaagaacacatcctccttacagttccaccttttagctaggaattccatgaacttcatgtatnttggaagtgcatgcaaactcattgcaaaagagaggttggtgatcccagagagaaaaacacttaattctctcttttgctctccttgcctttgcttcttgacaatcaatngatggagtagctctttgccacatcaatttcttgattgtcattacattt

SEQ ID NO: 238752 - DNA, 406 bp, Glycine max
cgcccagagaaggagtccacggaggaaatgcttaccaccttttttactggaaagcggtttctaatgactcctctgcggcttccacataaggcatagaggatgggcagctcaccaagatgtcttcctcgcctgatacgatgaccagatgcccttccactacgaatttcaacttttggtggagtgttgagggaacaactcctactgagtggatccacgggcgccccaacagacagctgtatgggggggtaatatccattatttggaaggtaacctgacaggtgtgagggcctatctgtactgggagatcgatctctcccctaacctctcggcgggtgccgtcgaaggcacaaaccaccattgaacttggctataagtgggaggcattgaatggtaatttctccaaagt

SEQ ID NO: 238753 - DNA, 390 bp, Glycine max
  unsure (1)..(390): unsure at all n locations
atactcatattattttgtggatataattaattatatttttgaaactagctgactttgattacacattagggctccataatttatattcctataattaagtaagactgtaattacaattaagatgcgagtcatgtgcctctttatatttctcattacttttattttttagttntcttattcctgttaatattttcttttcctttaactttcttattttctactacgttcctcctattcgaaagtattaaagatttaatgggaagaaaacttttaaaaagactatcaggtaagtgcaaaccagacttttaaacgaccagatcgagttaaaataaaagactttgttaaattataggccaaactcagacttaaaaatttatcgtaattaaacta

SEQ ID NO: 238754 - DNA, 396 bp, Glycine max
ctccaacttttaatgcataatctaagaggaaactttatttatatgttgacagtttaattgaactgatttcaaaacacaagaattgaactgatttccaaacacacagggagttgagaaggagggaaagaattgaaacaaagtcgacattttagtattttatattttcccctaaacttgtaaataaaggggttttttaaaaaaacttcttcttttcctctaatttctttccaattaaactaaataacaagtcaaactctcttctttaatacaccattccctccgaagaagacaaatcgccctttattatgattataacattttttttttctaaaactaattttgcataaaacttttttcataacaaaaacttatgtttttctctcccctattaatcaa

SEQ ID NO: 238755 - DNA, 444 bp, Glycine max
  unsure (1)..(444): unsure at all n locations
gagaagaactgaggttattctacctcttaaaagaaagagagnngagtccactgatgacatggacgatgatattcaataccaatcatctccatcacccatccaccttgatcactgtgaacaccaaggaccacccgtcatcgatccaaacctcactgctgaagacatagcaaggttacgatttcctgtggctgttctctctgagaatgcttacaacattcaatagagactagatgcataattccaacccttcatagactggacaaaattttcactggatattgaggaagaagttgtcacatgccctccatccatgcacaaagatcatgaattgtaccatcttttgctgcattggatcatctatatggattgaagtccttcctccaccaacttataagcgtcttcccctgaagatatacaagccttcatcatcagcagccctgcgca

SEQ ID NO: 238756 - DNA, 396 bp, Glycine max
tgcaaaattacttcagtttggtcaaaattgatgattttattattatttattttaaccaaaatatgcaggcttttgtttttctttttattgcaaattatggggatgtagtctttgttttggagtgtcataagctcacttgtatgttcttcaggaaagtttggatttttgcttttctcaaaattttcgtagagaaaatctacaattttttttcatttggtttagtctgatttccaacatgattttatttccagaatcattttccttcttaaaatctggaaattttgttttcaaaaccgtttgtatgcaagttttgcaaaagttcttgtagcatagactacagtgagctcttaacgttctgtggggatatcttttacagaaatgaaattccttatgatc

SEQ ID NO: 238757 - DNA, 295 bp, Glycine max
ttcttgaagttcactggcagcggaatggaaaaggaataaatatgattggagatgccacttctaggagaagatgagtctagcacaagctcactaccataggaagccatggataagagcttgaatgacgagaaaatgagtgtggggagaaggagcctgaatattctgtgcctcaaatgaggtccgaactttgaattataattctcaaatgatccaaggcctacaagctctacatggagctacatcatgtgtgatcaaagcatattactctacgtgatgctctattgcctcctctatc

SEQ ID NO: 238758 - DNA, 402 bp, Glycine max
tcttatccaaggcacgttcttggtcgtgaagctccttcttttatggcttattccctagtggatggtgcctcccatctcctcttctccttttccttctgctgcatctccatggtggaaaatcaccattgaaggacctcattgaagctcaaagatccagcctccatagaagctccacaagcaagcttgcattacaagcatttcaaacaagatggatgcctacccttgtagtggtactttttagatagttgtgggggtgatgtcgatgtttgctaccattgatggtggtcaaagaaaaaaatttccctcaccccactgtggacgccaaatgttctttctggatttggcaagatcttctcatagtggtgttcctttataagctcctccacgaattgtggtaagtgg

SEQ ID NO: 238759 - DNA, 191 bp, Glycine max
cacgaaagacataacttaaattccccactagctgcaagtgggatagcaaggaaacagtgaccgtaccctgcttatgctccccagcccccaataaaacatagaaaccgcccttgccctgcctcatgacacacgtatagaacttcaggacagcccattactttccacaagccatcaaggataggtccaaccaa

SEQ ID NO: 238760 - DNA, 329 bp, Glycine max
caggccctcatgtagcttcaggaaatcgccttggctctccttcaagaggagaaactccgcaattcacaatgaacattgtgtggtcgtgctctttcaccaagttcatctgcgccacgaatacccctacagacattgccaccttccatgttatcacctcaacctttactatccacacctcttaaacccggcattccttacaaatggttgtcgttgaaagaattaaccatatgccatgagatagagctttgtttaactatgatgaatgattaatcaaggccaccattgctcatccaaattcttcttcttaatcatggatgaggatgagctac

SEQ ID NO: 238761 - DNA, 416 bp, Glycine max
tctcttaatttcattctcttcctcaagactaccgactttattttctcttaagtatgacacagaaatgagatgttactcaatgtacaagataccaattttaaaatttcaaatcaaataaaacaaaattaacattactattcatttcaaccattgaactaattcattaacaaaaggataaggtacctaaaaatcctgggaaaaaagtttttgatgatcttttggaattgctcctcatgtaggccatgggtgatcaaattgttgcctaatggacaatgtgacagcctttgccgcaaccttagattgacgaaacctaaattgaaaaaataactcatgaaaaagtaaaaagatcaaatgatgtattatatataatgataattatattaattttgtaacacttacgctccattgataaatgt

SEQ ID NO: 238762 - DNA, 337 bp, Glycine max
  unsure (1)..(337): unsure at all n locations
cttctcgaccggatgcttaatgcacctgcngcatgcagcttgcaaatggatctgaattcttttatgggaggcaagataacccatctcaattctgtcttaacaaccctccctatataccttctctctctttgtagaatacctacataagaggtgcataacgcagtttctattcataggaactttttgtggggaggaggttctgaagcaaccaaaataccgtgggtaaattgggatattgtttgtcctcccaacaatacaggatggctggcgattaaagatatgtccaagtttaatgacgccttgattggtaaatggggatgggacttgtcaaataacc

SEQ ID NO: 238763 - DNA, 392 bp, Glycine max
tcttatccaaagcaattcttggtggggaagcttattcttatttggcttattccctaatggagggggtctcccctctcctcttcttctttgccttccgctgcatctccatggtgtaaaatcaccattgaaggacctcattgaagctcaaagatccagcctccatagaagctcacaagcaagcttccattaaatggtactcagagcacaaaagcttcaagtaggtgctccttaaacctccattaattttttgctttaccttctcttccattgatggttcttcatttttttctccatgtacctcctcacatgtcttgtgctaaatgttgttaacatgattctttagagtttccaccaattaaacttgctatataagctaaatatgattttctatg

SEQ ID NO: 238764 - DNA, 401 bp, Glycine max
tgccaacccatggaagctcctaatatctcccacactttatgtggtgggccattcttggatggccttgattttctcaaggtccacttggaccccatttctaccaactacataccctaagaaaactatattatctacacaaaaagtacacttctctatatttgcataaagggagtttttcctaaggactgaaagaacttgcctgagatgtcctaagtgatcatctaagctcctactgtacactaaaatatcatcaaaataaacaactacaaatctacctatgaaatcccttaagacatgatgcataagcctcataaaggtgcttggtgcattagtgagcccaaaaggcatcactagccattcatacaaaccaaacttggtcttgatagcggttttccactcat

SEQ ID NO: 238765 - DNA, 484 bp, Glycine max
  unsure (1)..(484): unsure at all n locations
gctggaggattatggggtacccatcacatgtggtactatggggcggtcgggcgatggtgcacaacaagttttccacatacacaatgcgcgcataaacccaccatcccctgttgcccacctccatctgagctcacgtactcccacgtagcacatatcctcgtttctctcaacaccgggtccccatcaatcctcccaagcttccacaacatccaagcaaaacaacattcaaacagcacaagctatcacagccaagcaaaacagggcaaagccagaaaactctgctcaacacaccaaccaaaatcatagcttttctcacttaaagaccccagtaacaattccttcgatccaattcgttaaccggtggatcgactccaaaattgtactggaaatctatagtacataagcctacattgtgaccgttgggatctactagcanacatccagaactcattctgcactagacttntcacagccaaccacacac

SEQ ID NO: 238766 - DNA, 392 bp, Glycine max
tcatgtcttcattgtaactttgtgcttccgcgtgtgtgctctttgttcttgtagattggtagttagtttgttaattagttactactactaaggtttggaatgaagctagtcttgcttggaaagctgagccaaaatattgccttattttgatgagctgttgcttggaagcatctactttcttccttcattgttgttgagtactcctttctttcatgctctagattttgtttccatgcttcatatcctatagctttttgggataacgcctgctcaagttgtttggcctattgttcacaacttcagcagcttctattgctgattgcttacattccctaacaccgttgagcttctttctcagttcctgaagtgtcactttggccttatcaagctca

SEQ ID NO: 238767 - DNA, 404 bp, Glycine max
ggaaaagcggttctaatgactcctctgcggcttccacataaggcatagaggatgggcagctcaccaagatgtcttcctcgcctgatacgatgaccaaatgcccttccactaccaatttcaacttttggtggagtgttgagggaacaactcccactgagtggatccatggccgccccaacagacagctgtaggggggttaatatccattatttggaagggaacttgacaggtgtgagggcctatctgtaccgggagatcgatctcccccctaacctctcgacgggtgccgtcgaatgcacgaaccaccattgaacttggctttaagtgggaggcattgaatggtaatttctccaaagtgctcttatgcatcacgttcaaactggaaccattatcgatgaacactt

SEQ ID NO: 238768 - DNA, 390 bp, Glycine max
tcttcacaaataatcatcacacagcagaattctatcatgactacccatcatatctccccaaaccccatacccacgaaaatcaaaggagaaagaagtccacccaaacctgaattttcgaagtcccactcgtagacacgcacttcacgaccccgaaaatgccatcctttcgcgattttggacagaaatgatggccaaaggttgaagctttgcttggagcttcaatggagaatgaagaagaagaaaatggcaacgtgagggagagagagagctgtctgaaaagtgtgggggctgagtgaagagagagaaaagctctttggttttaaataaaagggttttcctctttttctattattttattataaactatgccacatgtctccatttgagtgg

SEQ ID NO: 238769 - DNA, 487 bp, Glycine max
  unsure (1)..(487): unsure at all n locations
atcctctnagncacctgcngcatgcaagcttgggggaccntagcatgaacacctgctgtatattttaaagcatctgagaagttgaaatcacttgctcctgataaagattcagacccttcaagatttcattcttggctctctaacacgtctgtggagaaactgcagctggatgtccaaccatttgatccaccaactcccataaatctttgccaaaaattgggaaatagcatggattcatttgagcacacaccaagcaggttattcatgactttatttttttttttctgttaatgctgatattgaatgatgatgaatntgaacaagttatattttagtcaatctgcatgataggcgaatcttcaattattatctctcaattttatangaagctctacatacattcctaatagttagagcctctggtatagcaactgcctttaactatatatagaatagacaatcgttttgcttaaaaaaagtgcatcat

SEQ ID NO: 238770 - DNA, 395 bp, Glycine max
tcgtagttactagagaatgagaagaataagggtgttgaatttgttttgatatcggcggattgaagaggcttatagaagtggagaagggaagggctgattctgagaagaagaaggctgctgaagcttgcaagttactagagaatgagaagaataaggctgttgaaaaggaaaaggaaatcagtggattgaagaggcttatagaggcagagaagagaagggctgattccgagagcaagaaagctgctgaagcttgcaagatggtaggggatgagaagaataaggctgcggaaaaggagaaggaaatgagtagattgaaggagcttatagaggtggagaagagaaaggatgattctgagaggaaggaagacactgatgtttgcaagttacttggagaa

SEQ ID NO: 238771 - DNA, 433 bp, Glycine max
  unsure (1)..(433): unsure at all n locations
cggaccttaagtcacctgcggcatgcaagcttagaggcatcaagcatgtaaagtgttgtaatntctcaactaaagactgattacctgtgaaaataagtccgctaagcaagttaaaagattttcttccccgtccaatatgcttttgttatttccataatactctagtaattgttcgcgaaacggaacacataagtatagtgcctgtacaatttggcaaaatgagaaagttgttagcaaagaaccctaaaagcctttacaaaaaataacaaactgaccgtcttcaagtactatcaccagacatatctagtgcccttattgatattttagagatggtaaacatattgagtgcaacaagacaacaactacttttaaattgacgtatgcaccttaagcgacacttataatactattgaatgaaacatataaaacattg

SEQ ID NO: 238772 - DNA, 322 bp, Glycine max
gactgggcttggacagaggaaatgtgatagcctctaagagtaaacgcgaaaatgtcaacaacaaaaaactacatgcactggataaaagcctgacttgtattgttactgcatggctttaacagataaagtaatgcattatggatgtctcatggaaaatggtatcacgaaccatcattattcagaattacaaaagcataacaaagagtatgagggacagcttctggaatatatcagccatgacaaaatatgaagccaaatattgccttcacaagcaggtccacattatggtatggtaaatattcaagaatttaattgctatgtt

SEQ ID NO: 238773 - DNA, 457 bp, Glycine max
  unsure (1)..(457): unsure at all n locations
tcacctgcggcatgcaagcttcattaagaagcttactccagaagctttcttgtggcttctttgagaagctagatccttatctatccacacccctctattaactaaattaacttccttaaaaataattacggatgaaaataacgcaacaaataattaaacatcaaacataattactaataatatatagatatatatatcagggtgttacatacggncttttgtaggtaaatgtcatataataataataaaactagttcctaattacactctttnngtgattataattttaattaaatatacatgagcttattattatgctgcacaaagttagagatctgctgcaacatggcctttgataagtacaacaacctgctacatacaatntaaattttgntaacctatattgtgattattggaactagattgtgtgccttttaacatattgcagcccttgatc

SEQ ID NO: 238774 - DNA, 404 bp, Glycine max
cgatttgtgagtggactttagccttattttcactctggttattattcatttcaattaagaaaaatcccaaagaaaaacgtccaattgatttttttgattattttattcaaagatacttcgattattttattattattttgcctcttttggttttaaacgtggttacgcatgaaagatcggttggttttaaaccctgccccttctgactgaggctaaactggtagagacactcatgtatttgaacctgtccacggtggttggccgcctgctggcaaaccaaatgctgtaaataacgctctacgcccagtgacccatctggactggcctgccaaggtggtggcagtgcgcctgcggactgatgtgcatcaccctgcgcctgcctatgcgcacaatactacttgatg

SEQ ID NO: 238775 - DNA, 397 bp, Glycine max
ctgaatcccagtccaaactcctctcacgaaatctgattttttgcttaaataggtggccttgttcgtgctcgtgcgcttagtgcacgtatggaccgcttagcgcacgttagtgatttttggcttagcgcgcctttcttgcttagcgaatgaactgaagtagtgcgcttagagagatgaagcgatgcatttagcgaacctgtatagctcatcttcttccagagtcttcctcgcgtttagctcaggagtgttgtgcttagcagacgctcgctaagccaatctgctggcttagcgagaaagtgaaaaacaacactttcagaatcttacctagttaacctgaaattgagagaaaatgattattaaacacacaaaatgaaaatactaagtatttattacctat

SEQ ID NO: 238776 - DNA, 238 bp, Glycine max
ttaaacacccttcaatgttgaactcctctgcctttctttccttcattcccacaccatgtttattctctctctctctcagtctctctctacatggaaggttcttctctaagctacttaatcgaactccctctcttggtggcgaatgttcttcttccatggcttactccctattggacggtgtcttctctcacctgtattcacttatctttcactgcaactccatgatcgtgtgtgaaat

SEQ ID NO: 238777 - DNA, 395 bp, Glycine max
tactgaagtatgtatggccaaacttcattattgttgtttttcacatacaagtgagctcgtcacaaatcttctacacttggagtgataatatataggcctcttgaacccttaccgcccactctgtcatcatggcgagactcaagaagcccaacacgtttagccttttcaatgtactctaaacaaaattcaatggcttctctgctatgtacctttcaataatatatgcttctagacgatgtaaattcttgggatacccttttaagatcttcatgtagtactcaaccgggtacgtccaccacaaataaacaggaccacaacatttgatttctcttactatatgaacaattaagtgaatcatgatgtcaacaaaagcacgaggaaaattcatctgcaac

SEQ ID NO: 238778 - DNA, 230 bp, Glycine max
gcaacacacacaagaagcaaccgtaaactcccaatcagttttccgaaacagtcatctcatcatctacgtgacgactcaatacgaacatggtaccgattgcgtggatacacaaataaatatttgataattaagcaccccactttgatgcattgtgaatcacaaattgtaggaatcaaaacttttatcatgcaaaactagcatagtaactgtacacattacccaccaatagg

SEQ ID NO: 238779 - DNA, 413 bp, Glycine max
atactcaacctcgctctaaatttacattgatgtatgtatttatgggatgttttattatgccattctcgcttaagagcagagtcccactggtaaaactaactcttcaaatgttagccttcacacgaaatggccccgcaaaagcttgcctcaaaaaggtccacgagggacaaggcagccgaaggaactaattccgcaccggagtatgacagacaccgctttaagagcgcctgactccaacagcgcttaaaggccatcaagggatggtactttatccgggagcaaggcgtccatctcagggacgacgagtgtactgatttccatgaggaaatatggcgccggcggaggacaatactggttacttccatggccaagttctatccagaaataattcttgaggtttatgccaatgtttg

SEQ ID NO: 238780 - DNA, 384 bp, Glycine max
  unsure (1)..(384): unsure at all n locations
atccttaagcgactgcagctgcagccanagaattatagaagaataaattttttcatatataaanacaaaagatgctgacttggtatgaaaagtttctacaccagaagttgcatgctaaccgctgacagcaaaataagtgagaagaaacagctcatttntttcctcccacaatctcctactacaggtcagggtggaactaaagacaaattttgctactataaaaaagtaactggcatttaatgggacaagttctgactcagcgggctcatgcactaaaaaaatacaaagaaagagacggccaaatctttctcacttcaccgcaaacccaaataggaatccaaaaaaaacatcaatctgcaaactaggccccatgtacgtgacacc

SEQ ID NO: 238781 - DNA, 409 bp, Glycine max
cttacaaataccataattcgaaaaatgaaataatccattatttttattttttacacagaatccaatcttggcatcccgacacatcatcatagtctgataaataatagttgttcattacaaattcaaggcattcattcatccaccatgtcatgtctaagtcatgaaagctattacaaattagacaaggtgaaaataataatgcactagtggtcaaatcaaagcatcccaaaaaatgtcattgcatcaagtatcaacacttccttatgctacaatagtctgccaagtcaatcggtgggtcatcctaattgtcacatatccacaattgcaactctatgtatttcattaagcaaacattgttatattcgttcaaacttcgaagtagtaagtcttatagagggagggtgatatt

SEQ ID NO: 238782 - DNA, 413 bp, Glycine max
tccaagaatcaagatcaagattcaagactcaagatttattaatttagagaagacttaatcaagataagtatgaaaaggttttttcaaaaactgagtaacacatggatttttctcaaaacatgtttaccaaagagtttttactctctggtaatcgattaccagattgttgtaatcgattaccagtagcaaaatgaatttgaaaaagttttcaaatgaatttacaacgttccaattgatttcaaaaaagctgtaatcgattacaatgttttggtaatcgattaccagtgcctttgaacgttgaaattcaaattcaaatgtgaagagtcacatcctttcacataaaagccttgtgtaatcgattacactgatttggtaatcgattactagtgattgtttcttaataaatcaaaaga

SEQ ID NO: 238783 - DNA, 393 bp, Glycine max
tggttcgaggtacttaccggttgaagatcaaagaacgatgtataacgaatgaagaacgtcgaagaacggttgaaacctttgcgaaattcctcacggaaaacgttacggaaacgtttcggaagcgcctcggcttagattttcttcacggaaacaatttttccaagcaaattcgaaagagagaaaagtgcctcaggggctgaaccccttccttcttgctttcctcccctatttatagcaaaataggggaggtggttgccgcccagctcgcccaggcgagctcagctcgcccaggcgagcagggttgcttcctccagaagcaaccgccttctggaggaatattccagagggcccaagtgggcctgggtgctatatgcacccccatttttactaagt

SEQ ID NO: 238784 - DNA, 434 bp, Glycine max
  unsure (1)..(434): unsure at all n locations
agcttaataatgccaaattctaaatactaaataacttctggaacatggacataatggaaccaaagagattcaataagaacattaatagaatgggctctaggtccgtaattaaatggtccaacgtctatataggattggcttttactttttgcccccattgatatttacttgcttggacaaaattgtactccaagatgtatgaccggtaaccctagcacccccaacctaatttgttctccatgttgccccaacccacaacacccctcttcctgacttccttggcggcaccaccgtagctacgccatagtcaacctcaaaccctgctacaataatgtcaaagtttacctcaaaccccgcgtctcctcattattcaacctaaccgtgtgaccncccccccccttcccgaccaaaatgagacccccttcccttcatgc

SEQ ID NO: 238785 - DNA, 410 bp, Glycine max
ctaagcttacatgtttgtttgtatcatcaataactccgagcatatcatatctcttagacatgctgcacaacaaaactgtgatgaataagcttaacaaggaatgcaatctatactatggacaaatgccacctctaacacaacaacattaatatacattcttcattcaacatgtcatatggaccaaaaaagaataacaaattcttttaacaatcaagtcacactaaacattaaaggacaacaaaagccaacctaaaatctcagaatgcaaacctaaaaaccagtctctgattgagcaaacctaaaccctaaacatctaactcccaactctggaatgccaagaccaaactttctaaaaatctaagcctaaacccaacctcagaacccataaacgtatttgtagctacattata

SEQ ID NO: 238786 - DNA, 257 bp, Glycine max
  unsure (1)..(257): unsure at all n locations
cctactatcattggtatcattattttctccgcctttgaggtgccacttgagctgccaggtctctccacctttgggcatattctttataagatttgtgcccctttntgcacatgttctgtagttgcatcctatccggaacaatatcaaaattttactgatactacctaacgaaggcaaccattatgtccttccaaaaatggactcgggaaggttccaagttagcgtctattgaacagccaccccaataagactttctt

SEQ ID NO: 238787 - DNA, 423 bp, Glycine max
acctatgaaactcagcttaaattaattccatagaattcaatgagaagatttatggttatatctttagaaggaagcgtcaactagagatgatgaagtgttaaagagggaagctctttcttttttcaagaaccttttccaatcttcttatcaatgccatatggaagtctagtgttgaatggtatcccccaagttgatcaggaattaaatgatgctctccaagctcttgtgcccatggaggatgttaaacatcatttcttccatgagctctaataaagcgctaggggttgactacttacaaccaattttctttaaaacttattgggatatagttgttgaggatgttttgtatttggtggcctctgcttttgggtctggttagattgacgcttctcttatggagactcttatccctaaggttgattc

SEQ ID NO: 238788 - DNA, 425 bp, Glycine max
  unsure (1)..(425): unsure at all n locations
atccttaagcacctgcagctgcagcttttatccaggcactctcttagtggtgatgcttctccttccatggnttattccctagtggatggcgcttcctctaacctcttctactttatcttccgctgcatctccatggtggaaaatccccattgaagtacctcattgaagctcaaagatccagtctccataaaatcttctcaagcaagcttccatcaagtggtaatcagagcataagagcttcaagtaggtgctccttaaacctccattaacctccattgttgtttcttcatttttctccatgtatttcctcacatgtcttgtgttgaatgttnttaacatgattctttagaattctcaccggttaaactcgttataaaagatagaattgatttcctatggttcaaatttcttgttcttggtcttga

SEQ ID NO: 238789 - DNA, 360 bp, Glycine max
tgaaagaaagttgcaactgagtgagataaatgaaatccgcctagaagcctacgaaaatgccaagttctacaaagaaaagaccaataagttccatgatagcatgatagttaagaaagacttcatggttgggcaaaaagtgttattgtataattctaagcttggactcattagtggtaagttgaagtctaagtggattggtccttttgttgttactaatgtttctccttatggtacagttgagatcaaaagcgacttcacaaacaagagcttcaaggtcaacggacatcgacttaagccattcctcacgaacccttctttagtggacgtagtggtggaagagacttccttacttcaccctac

SEQ ID NO: 238790 - DNA, 383 bp, Glycine max
  unsure (1)..(383): unsure at all n locations
gcttgagggnnnaatctattaatatctctataggtttcttaaaacatacattccttgtactatactttcacatataaactntgtattgtatccaaatttgtccgtttgtcataatttagatatttaattgctatttaaaatgtataactttatgcttacacgttcgatgcttcaatgttgtttacagacattaagcctttataccctaaaaattagcattttcattacatgattactgttggaggtgccacactcaatctattattttataatatgatctaaagtaggggtgtaagcgagtcggtttgggttgggtttggtcaaatccatgacccaactcagttaaatttgaattgtgttgggttgattttctaaggaaaaaa

SEQ ID NO: 238791 - DNA, 406 bp, Glycine max
tcattaagaggcttcctctagaagcttactccgggttctttgtttaatctttctcaagaggctttcttgagaagctagatccttatctatccacccctctattaactaaattaacttccgtaaaaataattgtggatgaaaataacgcaacaaataatcaaacatcaacataattactaatatgtatagacattatatcgggggtacatttggaagttcgctcgtcaattttaaaatttttccagggctatgtggtgtatggtttcaatggtgctttgagagtaaacagtagcttagacactggagagatagagtgaatatcttgtgaggctatatcacttatatttgagctgattgactacctaaccatgtttgagatgcttgaatgattttcatgattgacttg

SEQ ID NO: 238792 - DNA, 412 bp, Glycine max
  unsure (1)..(412): unsure at all n locations
agatctcttttcctgaagtaagcactattgtgtgctctggaatttatgccaatcatctgcttaaagtattgtcgcaacctacccgtcggcgggagggcgacgcgtgactcgcgggatgcgtgttccacgaaaggaatatgcgcggagtctccaccaacgtttatttgaggaaaacgtcggataaaccggaaaagacgcgatctacgaacttctaagtgaaaggctcgggagttgtatttacgcgcggggaatgtattagcaccccacacgtccgtcacaagggacggcagcctttaatcgaatgtgcaaacatgactttgattnttacggtcccttttatgtccttatatcccttatactcttattatattctctctctttttgggacagacagggtgtttcctttgctcta

SEQ ID NO: 238793 - DNA, 395 bp, Glycine max
tgtctataacggaagaaaagaaaactgaaggtgaactttttttttatgaaagccaaccaagcaagaaatgaattgaaagtctcagattcgaaaacttatcggttgaagaccaaagaacgcacgaagaacggcagaaaatcttcacgaaattgctcacggaaacgtctcggaagcatctcggcttggattttcttcacgaaaacgtgttttttcactcaaaatccctgaaatgcatagggtaaaaggtcaggaggctttggaacagcttcccctatttataggagaaaaggggaggaggttgccgcctagctcacccaggcgagcaggtggctttctctggaagtattttaagaaaaagttcacgccccctttttcgtattttatgaaaaagttat

SEQ ID NO: 238794 - DNA, 401 bp, Glycine max
actttatctatgggtcaatgcaatcaagaaagaagaatccctaagagaaacgtgcgattgatttttttatatgtcactaaaagatatgtttttgattattatattagttttttacctctttattgctttccaatgtggttacggcacgaccaaacggtcggatttcatttaacaaaaattagcagatattacaattcaaatgatcggtggaaatttattgtattttttgattaggcgagataatgacttaaataaatgactaatgcacgtcaaaaggtggtacgaaaagtaaatgatatgaaaataaatgtacgcgaaacatatggggaccaccaagggtacatagaatgaattaaataagttcgatttcgggaacttaccgtgttaagaccgaagaacga

SEQ ID NO: 238795 - DNA, 385 bp, Glycine max
ctaaataggctctgaatctgcgacgttgcacttaacgccttcctcgcacttatcacgagtaagtggatttgagcttagcaccaatcatgcactgagcctgcctgaagacaactgctgcacttagtgcactgatctcacgcttagcgtgcaatcttgatattgatgctctgccagattcttctatcacgctgaagctgcgctcagcgatggatgcgcgcttagcccaactgatgagctgagctcaactgtcatttttagcacttcatgacttagcctctttttaacctgaaattacacaaatttcatcattaaatccaatggaaatattctagagactgctttaacaataaaacaagatttatttacaaaagtactacaaaataac

SEQ ID NO: 238796 - DNA, 381 bp, Glycine max
cctagaattaaaataacttaatgccattaacctatggaattaacaaaacttaatggctgagtgtaactgaaattgtgacaaccaaaagtcacccccaacagccaacaagtcagccaccatttggtctcccaaaaagctgatgcctatgttgccaattgggcccttattacaacttgaactatacctaactaaagcccttttagttgattaaccaaaaacatatttgtggtcagccaactttacaaggattgggccattatttagacaaactaaacactctaaatatgagacaaagtggtgtcatttagtcctcctccatatgggccatgataccactcacaaccttggactgttcttcttgaaacttgggcttggattcaa

SEQ ID NO: 238797 - DNA, 401 bp, Glycine max
ttacagcagattttagtaatgacccactaacctagaatttatattacttaatgccattaacctagggaattttaacatactaaatggctgagtgtaactgaaattgttggcaaccaaaagtcaccctcaacagccaacaagtcagccaccatttggtctcccaaaaggctgatgcctaggttgccaattgggcccttattacaacttgaactaaagccctattatttgattaacccaaaacatattcttagtcatccaactttacaaggattgggccattatttatacaaactaaacactctaaaattgaaataaagtggagtcatttagtcctccatttgcgccatgatacaactcacaaccttggacttttctccttgaaacttgggcttgtattcaaa

SEQ ID NO: 238798 - DNA, 294 bp, Glycine max
  unsure (1)..(294): unsure at all n locations
catagacataaagtacacgttgaacgtgcagcacagagttaaaattctgctagaggattttgaatctttgaaaacaagggttgtcactattaccagtggtgaaattagtttgacagaatgcatgtttcactgcaaaatcattcttttgtaattgagtgtacagcagcattgagggagcaaaaaattatgaagctgtgctctattttagttacaaaagactcacggaaacatactagttctatcagtcctgtgtcatgatacaaaattntcccctactttcacattagctaccta

SEQ ID NO: 238799 - DNA, 371 bp, Glycine max
cataaaactccgcttgtcaggcgttacaaatcgaagactctaggaggatcattttgtttaaatataagttgttgtgaggacaacttctacccatcagcaagatggtagcccttatcctttaagcatacacctagccatatccaatagggttctgtttctcctttctgccaagccattgtgttgaggcgaaaaggaagctattacctcatgtacgatgccttaacttacagaaatcttggaactcttgagaggtatatttacaccctccatcgattttaacaatcgttaacttgaattcagattgtctttcaattgattggacaaatttcacaaagagagaaaatactgcacacttctcttgtcaacatata

SEQ ID NO: 238800 - DNA, 408 bp, Glycine max
  unsure (1)..(408): unsure at all n locations
agcttaatatgtctctaaattaatttcctctatagtttanaataatatcaataaagaacatgaggactaaataataacggggaactatgtttgcaatccttttactttaagtaaagtattagtttccttactttgatcaatttggtcttggaattttagaaaaaagaaaattgtttttgtccctcgttaaagttcaagaatcaagtttcgccaaaagtttagggactatttaagaggttagtttagaaaatgaaattttggaaagattgatgtgtggtaacacgtaattcggaaaaattaatttgacatacaatnntttgaatctattaaataaatggtccgtagtgtggtgttttgcttgttgtcaaaatcattttcaactaatatttgctatggacttattattca

SEQ ID NO: 238801 - DNA, 408 bp, Glycine max
ccttgtttgaacagtgaattgatagaaaatgatatgcagtggtttgtttggtatgaaatgagtgtttgagaatgatttgaatgataaattgtatgatttgagtggattggaatgattagataattgttttgattaagcttgtagccattataagagaatgagcatgttattggaagtatgactgaaaatgttagtcagtttgtcagattgattgtgaaggaatgcattaaccgcatcccggtgagagtgtgatccttaaattttgagagaaacgactatcatttagtactgatctttgtgtgaatctatgaagtatggattgaatgcatgaaattgaggatgatgaaggccatgttttattgttatagccgcttagccaacaagctgaccatgtgttggaatgaatta

SEQ ID NO: 238802 - DNA, 351 bp, Glycine max
  unsure (1)..(351): unsure at all n locations
gagatgatgaagtgttgaatggtgaatcttcctgcttttattggtgaccacagagtggtacctggagatatgtcgcggcggtcaggagaccttggggacgtcaggtggggtgctattgcccaaaaccaatcttgaccaatcccgacccaacccgggcatagtctgtcagtgagaacctgtgatgtacctaaacatgcgagctcctggccgtcaactgatattaggaatacacgaccacattgcatggaggcttgtggtggctggccanctgtgaattntgtgtaatatgtggattgtggcctctggtaatcgattaccaaaggtgagtaatcgattacaaggcttaaaatt

SEQ ID NO: 238803 - DNA, 411 bp, Glycine max
acacggacattaaaactcagcttgagccaaatccgactcaccataaccttgaccatgtgagaatgtcaattcttaccctcggaagcaaaaaaaaaggggagagggaaaatttccaatcaaagaggaagcataaaatgagagaaggaaaatttcctatcaaaggaaaaaaagagaggaaagggaattcccaatcaaagagtgggagaaagcaaaaagaaaagaaagaaaattcccaatcaaagaatgggagaaagaaaaaagagaataagaaagggaagaaagttcccgatcaaaaaaaaataatatgcagaaaggtctttggaccggacaatatctgaacaatacagaattgtcaccaaatgaataaaaagaaggaaagggaaccatgacctaaaatggtcttcccccttt

SEQ ID NO: 238804 - DNA, 445 bp, Glycine max
agctctttgcaatgcgagatatgattggattttataaaatagtccacattgtatgaccattcttttcggtgttgatacagtttcttccagcagcggcttccaaatttgtatatggttccaaaaaatatattacgcttcatcggggactaggaaaacgcacccaacggcaggtcaccatccacgatggtgtgccatcaattgctgacccatggttccaatatcttgatcaaaaaattgatggtcggagatgaaattgtcttctacttccacgtttatgaccatgcatgggagctcttgatcagaaaacaaattgaatgggaggaggacatccaccttgaagactgacttcttttcatctgcatggaatcgtgatagcaaatttaatgaaataaaacttggatggaagcaacatttactaccacctcatatattcatatacatttga

SEQ ID NO: 238805 - DNA, 398 bp, Glycine max
  unsure (1)..(398): unsure at all n locations
tagctcgtttaattcatctaaaatataattatttttaatttactaaaaattaatnttctacttcataaatttactatttaataaatcatttgaataatatataataatttacgaataaaaatatttatgtggtatgatattatggaatctatgtaatttaaattttctttttatattaaaggatttttcccacctataaatgttaaacttttaaaacttaaatttaactgatttaaataattaaattcaatcttaagattaattttttttaattagataaaaaagcttaatcaagtattttactaatcaaactcgaataattcacaagctaataaattaactgatttacatccttacttaagcccacaccacacatactatgaccataagatgacttt

SEQ ID NO: 238806 - DNA, 421 bp, Glycine max
  unsure (1)..(421): unsure at all n locations
atcatgtgtgnctctatggcgcancttgtgttttatatggatgttggttcaaggtggtgaattggtgggctgtgaccaaaatccatatggaagtgtattctgttatctttctgcttgtcctttgtttatataaggcaaggatgccctgtattttacatatacgatatacttccacttgtataatgcaaccataacaaaagctttctgtttttccctcctgcggatgtagccttactcaaggtgaaccacgcaaatatgcttgtgtgtctttctctcatctctttctctctcaatattgtagcaacatcgagtgtgacataactttctgctgcatctgctgctgctattcttgtttgttcttcattacttccacaacaatttgtttgacagatttatggtgtacaattcaatggctgcactg

SEQ ID NO: 238807 - DNA, 399 bp, Glycine max
tcactgaattgcaggtgttattgaagaacatgcttcctaatctttttacgttgccaaaaaatcactacggggcaaaaaagattttgtgtccagtgggaatggagtaccagaagatccatgcatgccctaatgattgcatattgtacagaaatgagtatgcagaaatgtagcagtgccctatgtgtggggtatcacgatacaaaatgcagcatgacgaattacgtgatgatgcaaccacaaaaaattttcgtcttgcaaaggtcagctggtatcttccaataataccaaggtttaagcgattgtttactaatggacatgatgcaaaaaaccttacatgacatgtagatgacagaaaaagtgatggattactccgacatccagctgattctccataatgga

SEQ ID NO: 238808 - DNA, 318 bp, Glycine max
  unsure (1)..(318): unsure at all n locations
aattgaattaataaaaaaagaggagaaatgagctgatgcgcatccaaccactcactacactcggngccatgaccgaggtgtagacgactcttcgcgggactcgaaacattacccaacttgcacagggcaagccattctatcagggagtgactactagtgccaagctaagttcctcactacatttaccaagaaaaaatcaggcactatcacccctaggcaaccacatattgcctgatatggagtgaaccattctaacaacccacccaaagagcaataccagctcacacacactcacatcccctcagtgtaccctctaaa

SEQ ID NO: 238809 - DNA, 400 bp, Glycine max
  unsure (1)..(400): unsure at all n locations
nagcccanaagtataccataacactatttgcccaaccacgaagtctttatttactatcacgccatcacggaaccggagggaccttatattgaaagaacacggcatactccaaggccacaacgcggaatcaaaccaacccacctaggtgcaacttccgtatctcggcagcctgatccatagagaagtgagcaagagttcactgcccacaatgctatgagctcaattttcactggaagatgacaagcctttccaaagacaacctgataaggagacaaacctatgggtgctatggaagccagccgatgtgcccagagagcatcatcaagcctggaacaccacacttccatgcaggcagcacaatctttctagaacactctcgaccccctgtacaaagtcagcc

SEQ ID NO: 238810 - DNA, 359 bp, Glycine max
  unsure (1)..(359): unsure at all n locations
agcttctgtccctgagatactggttcccagattacaacttggagngaagatggctgaaaaccctagccttgcaacatgttctatggaagtagacaaggagatggacaagataatccgcagtatcgtgagtagcatnttgaaagacgcctctgttcctgatgctggtgaagatgttccaacatcttccaccccgaatgtttctgtgccggatgttgagaaagatgttccaacatcttccgggccaaatgctgaagtactctcttcccccagcaaagagagatcaacagaggaagatgatcaagcgacaaatgagacccctgcaccaagggcaccagaacctgctccaggtgacctcattg

SEQ ID NO: 238811 - DNA, 247 bp, Glycine max
taacagaataagaactaatttaaaaattaggaccagtcacatgccctactagaagaagcccacattaacgaacgtgcattctacattcggcccgtgtggagccccgaagtaattttctcgcacggaggcatttttggaaaaatagcttattcatcaacgaccgtgccacaaaaacaccgtattgaatagtcctttcccattttccactgatttttgggaagcaccatcgatgactatcccatcattt

SEQ ID NO: 238812 - DNA, 214 bp, Glycine max
cctccgcctctataacctcacaaacactcacagacatcacttatgctcttaggatggctgactcttcatgctcaagactctaccaggcttgacattgcaaaagctatcaaaactctctggaacctgaacctttctctctatacaaatccccaaacatgccacagcctcaagaattacctaaactccctattcattatgatttcaagctgaaata

SEQ ID NO: 238813 - DNA, 394 bp, Glycine max
aaataaaaactgtctgagctaaagtatcatatgttttttaattgcactgcacactgagtcgcagagttatttgtctatgagagatttactctaagtacacgtatccctagggagattatcccaacaatctaggaagttattgtgttaatctagaccttgaagataggatttaccaattttggcataaaacaattgtaaccatttttgtatatgtatactttatccatttcttgctaaaaattcaaatgcataaccacccacttatggcaagctagtgcacatccccccatgggctatacaatggtcattctaaaaaaaaagaagatggaactcacaaaccaagacggggtgaattggttctaatcaaatcaacaaaacaatgagttttgaaagc

SEQ ID NO: 238814 - DNA, 463 bp, Glycine max
  unsure (1)..(463): unsure at all n locations
tacatgtggnactangtggcggncgagcgatggtgcacaacaagttttccacatccacaaagtgcgcataaacccaccatcccctgttgcccaccttcatctgagctcacgtattcccacgtagcccatatcctcgtttctctcaacaccgggtccacatcaatcctcccaagcttccacaacatccaagcaaaacaacattcaaacagcacaagctatcacagccaagcaaaacagggcaaaggcagaaaactctgcccaaaacaccaaccaaatcacagcttgtctcacttaaagaccccagtaacaattccttcgatccaatacgttaaccgttggatcgactccaaaattttactggaagtctatagtacataagcctacattgggaccgttttgatctactagcaaacatncagaactcattctgcactagaacttccacagtcaaccacacacaatc

SEQ ID NO: 238815 - DNA, 369 bp, Glycine max
gggaaacaaccacttttttttttcttttccctaacccttccggcgcggcaacctcttgtgcccacccactccaccggtggccgcgggagctgccgttatttgccgttgaacccccacaccaagaggaacactttaatcggagcagaatcttcaaaactcatctcaaggattcggtagagaacgaagcctccaatcctaccttcgtggttttcttcgaggtaaccgtgattctaagcctactccttggtagtttaagcctatctttacatcttttctgacttgggaatcgtcattggatgcttttacactttctatgaaaaaccctagagaaagagacattgtaaaagttatctttttatgaaatgagtg

SEQ ID NO: 238816 - DNA, 440 bp, Glycine max
  unsure (1)..(440): unsure at all n locations
agctnggactgtgctatggagattatcaaatgtccaaagtgaaccaagagccatttctatggcaaaattgggcgttgaggagtcaaattttgattcggtggaattttatgtgtaaatccagtttgaacaagtttagattgatgttatggacttgcttgaggtgagagtttgcttcaaatttacctcattctaaatttcacttctcaagcctagaaaatccattaaattgaggggttttggacacctatattttgtgttgctgtggtttgaagcttggctttggtttagacaggattgatacatgatttgggactngtaggatctgatttgggcaagattggatgaggggaagtgtggttttcgaaatctgcactttgtgcagatttttgctgtgaaattgtgcatcataattttgcacaagtgcagaaaaatgcttgtgt

SEQ ID NO: 238817 - DNA, 385 bp, Glycine max
  unsure (1)..(385): unsure at all n locations
gggggttaattttttntaaattttatttatttgatataaaagatnggtggaaggtctaataataatggaataactcaacgattacaaataaaatgttgtatatattaacctaaatcccaaagtgactgcattaagagagaaagtacccatagcattaatatttaagcctaacatttatggaacaaacaatttgtttgacaagagctctacaataaagtagcagaaagcacaataacatcacaatgcaacagcttgcattgtataaaatgaacatgaaactcatgttatatacctcaaattttaaattgaagcaccttgcctaaaaaaaactagcagtgggctaaaatgggtattatcctattagggttattttttccttataaaa

SEQ ID NO: 238818 - DNA, 307 bp, Glycine max
  unsure (1)..(307): unsure at all n locations
ctcgaatcacaacaaaggtgagtatcaacactatctatcatcataaacgaaattntagctcatgttataacaaacttgtaatgtcacctttgtcttggaggaaaatatattgcactaagtgaatatgttcagggagatcgcctataatcatatgatcgatccctagatcttgattaaatctaatataaaataaatcaaacatcaggtaacaatttacaaatgccctttcaaaatgacatgacaataacactctactactaatacatgttaaataacattgtcagaaatacaacaccccatccttacc

SEQ ID NO: 238819 - DNA, 253 bp, Glycine max
ccaccaactaggttgtgacatgggactctaaatatagcttgatagtaagtgctactatataaaatgctttctcaatctcccaccctattactataacactcagctgcattatacatgttcacgacacattgcaatccatctttcattttatcaatgaatcttacaattccggattcacatatgagctagatgattcacgagtccaaacttgatatagacagatctaacaaaacctacactggctcctttgact

SEQ ID NO: 238820 - DNA, 360 bp, Glycine max
agcttagcgtgagtgtacgcgctatgcccttttctgaaattgcaaaacctaagaaagttttgggcttagcgtgcctctccggctaagtgagagttgcaggtgaaatctaacctgcaactttcgggtagcgggctgtgtgcactagtgagaataattggctcgcttatccggtgatgccatgcttagccaattattgccttgaagttctagaggtgtagtgcggcttatctcgtatgctcgtgcaacaagttggtgggtgtgcgctaggcctgcacttgcgtgctaagctgttagtcgccttatacgactaactgttgtatagaatacattttctaaaacttgtatagttccccaatttat

SEQ ID NO: 238821 - DNA, 398 bp, Glycine max
aggaggataattagagtgactgacgaccatcatctatttgaatgacccgcgaagaaggccgagcggcgaactaataacaataaactaagagccggatggaaagcaacccaagacaattaccacaaaatggaaacaattgtacgtattccctacaaaaaaaaagagcccaacaagtgcaaacaggaaacaagaagtgcacaaaggaaacgcccaacaggaggagccaggaataaaatgggggccaaaagccgaagagaagaggacggtacaaagccacgcgcttaacgaacatccaggcgcaaaacgcccaggggtttatcaaagtactgaaatttaaatcaccgcggaaaatcgaagggacgcctatcttggcgcgcttaccgagaacagcgccctaa

SEQ ID NO: 238822 - DNA, 402 bp, Glycine max
  unsure (1)..(402): unsure at all n locations
gagatgcagctagctttaaaacaccctcttcttatatgactacacgtcctcgccttcagaggactacacgtntgtgccttcaaaagactacacgtctctgccttcaaaggactacacgtcctcgccttcacagggctacacgtcctcgccttcacagggctacacagactcgccttcataggactacacgccctcaccttcaaatgcctacacgtgcttactcttagaggcctacacgtgcttgccctcggagggctacaagccctcgacttcagaagactacacgtcctcgccttcagaggactacacgtcctcgccttcagagggctgcacgttctcgcctttgagggctgacaccctcgcttcagaggctgcacccctcgcctcaagggctgacatctc

SEQ ID NO: 238823 - DNA, 363 bp, Glycine max
ttattcaaactcacaacgcggagatgttctgatgtacctggtggagtttaagcacttggacaaccggattgtgggtttgccgacacacgacctcttgagctgttctgtcataggactctaggccgacatccgctgtgaggttcaagctttgcagcccctcaccttggtccaggcatctgagatggccgcgctccattatgagaaattgattgacggtcgtcagacaccacgccctctatcatcttttttttctataccaacacctcccgcaccaccggtggctgtggcactttcttctgtgccgatagcgtcaccttagattacgactcggctcgcaggtttcatcaagcgcctatctccgga

SEQ ID NO: 238824 - DNA, 469 bp, Glycine max
  unsure (1)..(469): unsure at all n locations
agctaacaagatgctctgttattacgaaatataaccanagaagcaaattgtcgttttggctcctattgtactttccaattaggtacctattatttaaagcatgccaatttgatctctatagttgcgctttttttttctttctcaacttggtcctccttgtaaaatctccgttaataatggttgttcgatcaatgttgtcttttattccacaacaacaattgttttaagtggtggcgtattgcgattatagaaggttgcgatggatgaacagtctaatgagtcatcaaggacagattanggaagttcaataagcaataatatgttgtggttgatcaaacaacgtaagatgactttatggtgatgatcaatttggataaaaaatgaactatagagatcatattgatatgttttaattataagccccaattgaaaataagacaactataggatcatagactatttaacatac

SEQ ID NO: 238825 - DNA, 399 bp, Glycine max
tcagcttattcaaacacatatccaacttattacatcacttcttatttttattaatacctaaatgtgggtgctggtatatatttaattaaaatatttaattacataattagtgaaaaacacggtgctataatcttttcatcatgatgttttttaatctttgatatttttttttcaatttttatgcttttcattattattcagtctatcctatatttctttatttaatatcttccttgataatcttccatcctttataattaatactcttttatttttatatctaaatagaattttaataatttgtttaacaaaaatattcttatattataacttacaatttaaattgttaattatgaatacaaaatataatttatgtattcacaaatatttatttattat

SEQ ID NO: 238826 - DNA, 258 bp, Glycine max
  unsure (1)..(258): unsure at all n locations
tcacatgcctaactccctcgagtggcatttgtattgggtggtatcttgtatggtgcatcttattacatatgatatcngattgcatcatgtatcatcatggttagtgtaaagaaaagtttcttcaagaggcaaaaaatctttgttttaatcgcatataggttcattgcaattgattacgacatgttgtctaaagcttgaagagatgagtctcatattcggttatatcgattacattgttgtttgagacaatgattgatt

SEQ ID NO: 238827 - DNA, 406 bp, Glycine max
tcttatccaaggctcatcttggtggtgaagctccttcttttattgcttattccatagtggatggcacctcctctcacctcttttcctttgtcttccgctgcatctccatggtggaaaatcaccattgaaggacctcattgaagctcaaagaagctagaattttcacaaaatttggtaaaacaaggtgagcatttcatagtagctggtgtatcttaatgtacaaaagtatcaataattcgagtttagattccttcagtcagttgaggttagacattgagaactgataaaaataaaatacacgagtaacctaaagggcatatattaaatacaatatacttcttgcctagctcaaggtatacattgtcattctaaacaacgaacctaataactgtgttgctaatatatt

SEQ ID NO: 238828 - DNA, 401 bp, Glycine max
ctgtgaaatgatttctatacaaaagttagtcgtataaagcgattttcttccacgtgcgtgtgttggagggtgtgtggtacttcgagattagggctgtgaaattggtagaaagtgggcacatggtgattcttatgttgcaaaagtaagagaattactttatcctatgtaagagaattcacataatgaattcgactctattgggcttcttgtttatcctaagaagcaactgacttacagaggcatgcatgtcttgcaatataattaggtatggggctctcattatttgaagatactgttattttattcagcactttgtgggtttaaatcacacgttggtttttgggagttcttttgttgattatgctaacagattgtttcacttgtttagtgggtcttctttc

SEQ ID NO: 238829 - DNA, 441 bp, Glycine max
  unsure (1)..(441): unsure at all n locations
ctataaacaagtgctaatcttttcaatttcnnggaanangaagctcaacaagaatcaagccaatgctattgtgcaagcaatcaatggggcaaaacacaccaaatgaatatgatgatggatggctcanattctcacaaaggtaaactcatcactttcatattgagctttcataactatcatgacatgtagaggagaatcaaggatttcaagtcacaaaatgtcaagaacttttattttcaaaacaattacccatttcttgaacatatcctataattcaaagaaaaacatgcaaagtcgtacatgcacacaaaattgacccataatattaaactaaaaatccgacgaaactaacaacattaacaaattatcacatcttactaattaacataaccaacaaaactagcaaaaccaaagaacacttcccccatacttaaacaacgc

SEQ ID NO: 238830 - DNA, 338 bp, Glycine max
tgtgcctgtcaagtcaatccttatgatgaaaaatattgcctttattttttcttgagataaacaaaaacttgtgataattagggtaatcgataagaagtgagtccattgtaaattataataaggtgttaattagaattaagagtttgttgtctagccactggtttggatgtagtagttccgtgccaaattgtgaataatataatgcctacattgcctagtacaatattctgaaagagggtttgcaacttattgctcaaaagcttcatagtgggagaggaatagcagcttgatctgtgcacagttgtaatggtagagggtgaatccactcactttttcat

SEQ ID NO: 238831 - DNA, 341 bp, Glycine max
ggcacttggtaggctcattatcttttccactacaacaagaagtcacttctgttcatactcacgtgtgatagctgaagcttaatgtaatatatatctctctctataaattggtaaaatcttttagggtccatgttatgaatagacagctcacatgatcttatatttgaaccatgacatgtattattttttaaaataatttcaattacaacatcctataacgtctttttatatagaaaccccatactatcttttagaaaagatagatctctcatcttgtgagaaaaatcagcttaatatagcatgcccttaataattaacacatatatcaaataatattttat

SEQ ID NO: 238832 - DNA, 348 bp, Glycine max
  unsure (1)..(348): unsure at all n locations
ttgggtttcnctgcattcaaaattaattgcgggcactacatacacattaaattattctctctttatttaccaacaagatatagaaggctcattattangttgtaatttgcttaataatactatatcagaaataatatagaagggtcaacgcatttagtcttcgaaatttgtttgtactcgcttctttgtagttccccccacatgcacaaccatatataacggatggattagcacttaattagcatgaaaatatataacttacactggatctttgttatgaagcatggaatattcgtggtccatctatgcaagacaagatgcattacatgatcattgactaaataaagt

SEQ ID NO: 238833 - DNA, 405 bp, Glycine max
cgcgtattaaataaaattatagaattagatggacttatttattctttataagatgaaaaatattatttatacaacaaattatgaacaatgtgtgcaacatttttttagagtctatgtctcatacacataatttattattgtcatgttaagtagagaagagaaaaataaggtgaatggaaattagatggatgagtgaaaatatagatatttgattaaagaaaattataaaagaaatgatgagagataactaaaaataggaaaaaaattacatatacataaagtaggtcccataatttttcttttatatttctaccaaacaactaaatcatattcatttctcctttcttcgtatttctactctatcaaacaaaacatataagcaatgagaaggaatatacacaaaat

SEQ ID NO: 238834 - DNA, 367 bp, Glycine max
  unsure (1)..(367): unsure at all n locations
tatcctaattatgatgttccatatgcncncaagactggactaatacatttgttgcccaagtttcatggtcttgcaggtgaagatcctcataagcatcttaaggagctccatattgtctgttccaccatgataccccctgatgttcaggaagatcatatctttctaaaggcttttcctcattctctggagggagtggcaaaagattggctgtactaccttgctcccaggtccattaccagctgggatgaccttaagagggtgttcttggagaaattccttcctgcatctatgaccactgccattagaaaagacatttcatgcatcagacaacgtagtggagagagcttgtatgagtactatgaaagaa

SEQ ID NO: 238835 - DNA, 392 bp, Glycine max
  unsure (1)..(392): unsure at all n locations
ctgaagatacaaactccctccatacacccaagaaggttatattttatccaccncnaccagggagcgagaagttctaatccaactaattaccaagcgcttgttcaacgcgtgattgtttttccgataaacttgcagcaccatgaagcctgagactacctcagtatagaaagataagtgtgggcgcttctccaacctatcccagggagatttaagaattttttaaaagggaatcaaaatgatattcagatagatttaccggcgatccaaacacacttagttagcattcaaaactaagtttagagcatctggaactaattatacaacaacatttatcttaacaggagacttgtgactaaagttaatttaatatccacacaatttaatatccacac

SEQ ID NO: 238836 - DNA, 380 bp, Glycine max
  unsure (1)..(380): unsure at all n locations
agcttcatactttgagagaagataataactcaattaaacatatgagcacaaactcattgtggcaatcaaacaagacaaacaaataaaattttgttagtcgtcatataaacaagttaattgaaaggaaagtttcaaccaacttaatttaaaagataatggtttngatgttacatttttcatgatttaagtgcttagatctttaaagatggaagtcagaatttttctttttgtttaatcttcttgagagatgttctcatcgctctcatagtccttggatagaagggtgatctccttctccgaaccatcagatgagtcattgcatcctaagcaatatacgctctcttggatcttctttctcataggctttctctcattctttc

SEQ ID NO: 238837 - DNA, 396 bp, Glycine max
tgtgctaagaatgtcatgatccaacacatcatatttttttataattgaatgtcatgatccatcacttgtctgcgtatatatttagtattaagatgtgtaccaacaatcctaaaatgttctgtgcagatattttccattgtaagacactacacaagattagagactccgaaattaattttgttttatgccaattgctattatgctttgttgtgtcttgctaaatgcatatttaatttgaagcaacttcattatttttgtgttatctggtaatggtttaattggataatagtttacaagccaggtaatatataatttaaatatatgtgccgagatgtaatattgccatgtaaattataatatttaattattgttatgttagagtatgtgcatgcaatt

SEQ ID NO: 238838 - DNA, 331 bp, Glycine max
cactcaggatctttttattcaacctacacccctcatcaatgtaaagagcagccacacatataattcaaggtttgaatagaagtccaagtatcatgtggtgaagtgaaaccatcttgataatctcatatggcaaataaagaatcggcaatcctcacctttctttttcaataaaaatatgcatacaatgcttatcaacactgacacgaagagaatatttaaatcgagggtgagcagtacccaacaattctctaaatcctaagctgtcaacaaaccttgagaggaagttcatcaacaattatcacttagcatggttatatctagtgaggtcttg

SEQ ID NO: 238839 - DNA, 319 bp, Glycine max
tttatttgttttattatcggaaaattggtttagtgcaaaaaaataagaattctctttcgcaaatctattaatatagaatgaatttaatttggagttgatctcataaaatacttctttaatgcaaaaaatggctatttgccttattaaatattatgttcaattgaaaatttatcataagaataaaatattttaatgcgtgattttttttccatttctcctcattaaggataaagaaatctttttctttatgttatgccggctttaacgattaaaaatttcgcctaattttcatttggtttttttagcggacattaatttt

SEQ ID NO: 238840 - DNA, 319 bp, Glycine max
tctacttatgtggcatggcgggcttccttcactttcttgtctcatccgcgagctttgaccaccgcccttccttcccgcgatgcttctctttacatctgcctgagtgggattatagcctagaccatacttcccacgatttcctttggcatttatcaagctagttatgccgccgttgtctttgtctaaacccattccgggttcgtaaccgttccccaacataactcgggccatcattactgctgcatcggacaggcaaggctgcccagagaaggagtccacggaggaaatgcttaccacctcaaaagactggaaagcggtt

SEQ ID NO: 238841 - DNA, 397 bp, Glycine max
  unsure (1)..(397): unsure at all n locations
tcggtatgaaataggagactcatagtctaggagtggctttttttttattggcccagnagacttaagcggtacacggtcgagatcccaaatttgacaattttgagctcattctcaaaataaaacttaccctaattaaacatggttgttgactttcgaaattatatagcatcatacgccaaaatcaagcagcttttttaaatatgagaaccttgcaaagtaggagtaaatttaatatttgaagtacaaatgtaaaaattatctttgccttaaaacaaacaacttctcgaattaaagagatacgggagactttcttaatagatatatcttctaaaaagctcaaaatcatatttcttagacactataatagaagtctatgtctaacagcaaagtgaacaac

SEQ ID NO: 238842 - DNA, 432 bp, Glycine max
caatactcaagcttcgctttaacagccatggatacatcaggaccggcggttattgtttttccttgtactgggatacgatcgggcccttatatggtaaaattgttggaccaagtgctctgaatataatttagaatgggggcgggaattaattattgatgtcccttgcctaattaaattctatccttcttgacgttactataaccaactaggcttttactcctactgtctatgagcggtatagaacattatattgattactctacactatgctgaatgcgctggttcacattgctcagtgcaaattaattagtgtatggtggaataacacaatcctttcacttgatacttgctcggcgactgcccgtgcctacattcagtcccgaaacaacctagcaggcttgagattgatgtcaagcttggtaaaatctttat

SEQ ID NO: 238843 - DNA, 321 bp, Glycine max
  unsure (1)..(321): unsure at all n locations
aaattaattatataaccacacataattatttaaaactttaatctttattgtttgtgtataattttgcatgattaaaatttaaattttttttatgggaggagctaattgtgcaactgcacacatgataaaaaggaaaggagataagttgatacttgagagagttgagctgaaaagtaaaaagaaggatataaatagcagcacctttggttttgcaccaagcccaaacacagacatatgtggtcccttttaatggtccctgccattctttgaaaatgggatgaanaccattnntgcctctctaattatccctcaaccacacac

SEQ ID NO: 238844 - DNA, 401 bp, Glycine max
  unsure (1)..(401): unsure at all n locations
tgctcgctgctgatctatatgcgacctacgattttttctggaacaancagggatcacacttgaaacttatgtgctttaagtgagaaaaaatgcttctttttccacttgtgaagatgttgaaagtttggctatgaagaaggttcaaactgacaaacatttggtatttccattggtttataaacttattgagctaactttgatattgccggtgtcgacagcatccgttgaaagagcttcttcaaccatgaagattatcaagtctaaattgcgcaataagatcaacgatgtgtggttcaatgacttgatggtatgttacaccgagcgggagatattcaagtcacttgatgatattgatattattcgaacatttaccgcaaagaagtctctgaaaggacacttgc

SEQ ID NO: 238845 - DNA, 356 bp, Glycine max
  unsure (1)..(356): unsure at all n locations
cataatggatacaaacacaagggatcacattcactaacaccattcaagtatgaaaacgtcactggtgttccgaatgcagtggattggatggataatggagctgtaacatnagtcaaggaccaaggccaatgtggtaattaagaaacagaaattcttttatcagtaagaatcgaacgcagattacaaggtagttacaacaactcatgtgtcctgctcaaccaactgagctaaactccctcggttatacagaaaatcaaccataaatgaaagtgatactcatttcttttcatatatcactggatgatggcgttaataataatggtaattttaaataacaggagctgctggcattttaa

SEQ ID NO: 238846 - DNA, 389 bp, Glycine max
  unsure (1)..(389): unsure at all n locations
ctgaagncaattctacacctgtgtttcttcactctattattttttctaatactaaccttgcgatccaggctcatatcaacttgattgttaaaagttttgatattaaaccttaatgattacttgagtgagatatctccaggtccttcaagggtgattcctattccactaccattggggttactagctccaacaacatagagcatccaccaatcacctctgtcactactactcgatttacatggaagctctaccatgaagtaaaccatacattaagctctaatgggtccttgtggctagctccatggaccatgcaaccattcttccatcaagctctggcttttgaagcactcgtctaatatgatggttgggcttgactttgatcaaatgac

SEQ ID NO: 238847 - DNA, 452 bp, Glycine max
  unsure (1)..(452): unsure at all n locations
ttagagccacctgcggcatgcaagcttaatgaggaggctatcagcttgttgctgtgcatactgaggtaggaatntgcccagatctgtacaaggagacgggtgaagatcatgcgcaccagcatgaccaccctcacgtaaatttggatgacgttgctgcttagcaacattctcgctaacgaccataactcagacctcccccggccgaagtgtcagctggtctacgccatcctgactcaggtgagtgtacatattgcccagctaatatcatatgttgtgtatcaatttgcagggatcatgcctccttgacacccagtggacccaaagaagtccaacagggccctgggttttcctgctttgttcacaggcctgtgccaattctatggagtgttggtcaaccctagcaagcttatccggcctcccatcagcagagccttcattgagaaatactacat

SEQ ID NO: 238848 - DNA, 398 bp, Glycine max
cgtcactattaacatcgttcaattcaacattggttctatattcttgttaaatttcttctaaaaccgatgttgaatgccttttttgtagcactggagattgagataacttcttcaagggaggagtatatctccacatgaaattgagctagtgttccacataattgagattaagataacttctttgatgaaggagtatatctccacatgagattgaactgatgctcgacataattgagattgaggtaacttcttcaagggagcctacctccacttgagattaagttggtgctcataattaagattgaggtaacttcttcaaggaagaggtatatctccacatgagattgagctgatgctccacataattgagaataaggtaacttctttgaggaaggagt

SEQ ID NO: 238849 - DNA, 479 bp, Glycine max
  unsure (1)..(479): unsure at all n locations
atccttagagccacctgcggcatgcaagcttgccattacatagctgatgngttgatattattcgntctctaagggnnacttagcaagccatgagattgatacattgtgcacgtctatgccacttttggacaactttggctgtgtgcgtaaattgagaaaaggggttcttatgcttgcaagtgtaagcaaatgggcaagcttcattgtttctaatccgcggaggagtgaagattatgttgagctgggaaaagagtacttgcacccatcttgttatgcagggcaatctactgactatgagaagctcatcaaattcttgacagattgtgacattctttatcccaacatgcatataaatggaaaaaatgtataaaatataaaatctaattaaatcaactttattcaataaaatcgtaagtaaatcctcgtgaataaaaggtccacattcatttcattgttaccaatataacttttcaaaatat

SEQ ID NO: 238850 - DNA, 405 bp, Glycine max
  unsure (1)..(405): unsure at all n locations
tactcacgctcctggtatatataggacatcttctttaagagcccgntgtgttttattagataaagancaacactaaagctcgagcctgaagaagtgtctgttggggcatcttgcactcaaagcgcatcctcttcgtgatggaaaaccactctgtttagctcccttgtagaatacttcaacacaaaaccacttgtgtttccttatagtatgtctgtcacaacatgacacgattttggatccttatttgaacttcataacactagaagctcctttattcttcttacgatcttgatagatcctatgagaatgcctcttaagcacttcttgcaagatgaatctcagacataaagcattaattgaggacttaaactagatcttaaaagctacgttgaatcataacattta

SEQ ID NO: 238851 - DNA, 365 bp, Glycine max
  unsure (1)..(365): unsure at all n locations
aacttacagagagtattcaagcttatctcaatcggcgcgctaagcacacttacaagcatntcataaatagtaagggattggcgcttagcacatcctgccgctaagcccaactcgtgaaagttcaattcctgattggatatggggcttatcttaagacagcgcgcttatcactgctacaaaatatttttccaaagaaggaatggcgcttaacacatcatctccgctaagcccactgcttgaagttcacttccagtgaagatgttgggcttagcgcagtgatgtgcgcttagctgaactattcagccaactagccaggggtctaagtgcttattgagagcaagctcatgcttagcgcatgaatacat

SEQ ID NO: 238852 - DNA, 230 bp, Glycine max
cttcattacgttcgttcatacggtcttcaagtcttcaacgcggtaagtactctcaaaaccaagcttttcaattcattctatgtacccgtggtggtccacagttggattcatgtattttttttctcgtttcattcactttttatacccccttttgacgtgcttaagccattttatttaagtcatttctcgcttaacctaaaaataaaataaatttccaccgatcgtttgaa

SEQ ID NO: 238853 - DNA, 415 bp, Glycine max
  unsure (1)..(415): unsure at all n locations
tgaaattgatnanaccaaactattattcgtctcggaaaatatcataaacactgaatacatggcccagaaaggcacctacatgagaagtttaaagaaattaactaattcctataactaatatattntaagagtgaattaaatcataaatctgcaaattaaaataaaaaactcaaaaaaagaatacaactattaaaaaaataccataaataaatttagaattaaaaaaataaattcataaaacaaaaaaatggcacattgagaaattggtttgtgacatattgtgtagcaaaaaacaataaagctggacagtgagaaatcggattatgggcaccggattttcattggcaataatgatntgtatcacttttgatagataatttggaacttgattatttgcgaactttttaatcttttt

SEQ ID NO: 238854 - DNA, 400 bp, Glycine max
tgcattcataatttcagagacccataagaaatatggtttttttgtgtatgaagcaaggggaaaaaattcagaaaaatggaagtacccaacgctttcaagaattagactggcttaattaactgcatgaaccttaaacattttcaattcgtcctccatctctgtatatactagtaaaactcgaacctcgaaaaacaccccgtatgattaagaattagtgtaatagggaattaaatatcaacgtattagcattaccgttttagacttcaagttaattaccagtaatgctaaattaattagatcatgacaaactttattaaaaaggtactatcatttaattagatgcgtgtatgcataacaagtgcgaatgcttactattggttcgccatgtgctagaaaccaa

SEQ ID NO: 238855 - DNA, 304 bp, Glycine max
ttcgcgccggaaaccgaatcttcctccgacagctccaagtcctacgccttggaaataaacctctccgggttcgcgaagaaacccgtgctctcaatgacggtggtggagtcgcgagacttcctcatctcgctctctgaatccatcgcgttccacagactcgctttcttcgagaccatctctggcatcacccacgccaagggcgctaacctcttttgctgggaccaccgccgtggattcctctgctttcccaggcataaacgctgttgcatcttccgacacgaacggaacgctgattcatttcttt

SEQ ID NO: 238856 - DNA, 387 bp, Glycine max
ttgactgcgagaaaactatttttgttgttttatatcgaagatcctctcctgcattacttcttacattacccagaagtaacagaacatgttcccactctgatgtggtgcccaccaacatgatatgctttactttatcatctctcgcatgaacattacatcaggggtcccacacatggacatcctaggagaaattttaagatgcccataactaaccttattcaacagagtccaagatttttgaatccaaattctttcatctgccaaacagcaagatgggctcccttgaaattgtgagaaagacacaaacatcccatgtaatctccaatatttgggacatcaaacgcaacatcatcatcaacatcaaccggcaacgacaaatatctgtat

SEQ ID NO: 238857 - DNA, 264 bp, Glycine max
taaactaactggcaacaactgaatgaagaaatgattgttaaagcacatgaaatgcaagttcatacgatactaacaaaaaacttatacctacaaaagccatatatgtggaggagatccctatacacttatcacaagaatcgtctcattgctacctaaccaggaatatacgtccagcaaattctactcatgcagagtagaagaatgaaagggaaaaactggtgccgcataatatcttaactatactgatctgcctgatcagacaaa

SEQ ID NO: 238858 - DNA, 211 bp, Glycine max
ttaactaactgaacacaccggtaaagctggataatttttagtgatgtgaacctacagcgaagtacttctacccttgcttttgcatcttcatggcgtctccctttggcagaaaagcttctgctgtgactgggctcttcctatcgaccgatgtaagctatttttctattaagatggttgcgcttcttcggcaacggcttaataccctttgctt

SEQ ID NO: 238859 - DNA, 364 bp, Glycine max
atctataaaaactagtgaacaacctttgacatgcaaaaacatttcaactatgttgtatcttttgaagccaaagcactcagcttatgtctttataaaaggagaatttacaaaacatctaaggtgagggggccaatccaaaaccaattgactaaagtaagggaatctataagcaagaagagatactctattacagatgttctttgctcttaacaagagccgatattgtatcccaccaacaaaattaaattatctatgctccaaagccaaatggcgaacatgtgtatttctataatatggggaaaaagcaaattgattcttcagcttttacagtcctcatctttatgatacccaggacattgatgtt

SEQ ID NO: 238860 - DNA, 431 bp, Glycine max
tagcaccccacctgacgtcttcatagtcttctgacccccgcgacatatattcatgtaccaatctgtggtctacgaataaaagtaagaagtctcacccttccacacttgctcatttcaagcttgtaggaatatggtgtatccatcacattccggactatgtggcgttcgggcgaatgtggcaaaacaattcttccaaatcacaattaccgtttaaaccaccatcccttgttgccacctcaactgaactcacgttcttccacgtatcccttatccttgttcctctcaacgtccggtccccatcaatccttcccagcttccaaaacttacaagttattcaacatccacgcatcatgaacttacacagccaagataacagggcagaagcagataactctgctccaaacacataccaacatcacagctttttacac

SEQ ID NO: 238861 - DNA, 153 bp, Glycine max
tgaagaatctcaaggaaccactagagatgtcaatattgttggtggactacacacatgagctcgcttagaggctatggatgagcctatcgcaattgcaatcatcactatatatgtgtagggatccttagaggatcaaattacgattttattggg

SEQ ID NO: 238862 - DNA, 287 bp, Glycine max
  unsure (1)..(287): unsure at all n locations
gcttgctaacccatggaagctcctaacatctcccacactnnttgtggtggaccattcttggatggccttgattttctcagggtccacttggaccccatttctaccaactacaaaccctaagataactatattatctacacataaggtaacttctctatatttgcatagaaaggtgttttcctaaagactganagaaacttgcctgagatgtcctaagtgatcatctangctcctattgtacactaaattatcatcaatattagcactacaaatctacctataaatcc

SEQ ID NO: 238863 - DNA, 113 bp, Glycine max
accatttatgcctgacatctaccttatgaaaactgcataacattcatgtgacattttcaatattccgtttccgatgctgggttatattaccactcaagcaatcaccaaaattt

SEQ ID NO: 238864 - DNA, 192 bp, Glycine max
agcttccaatatggcaacaaacttaagtggtcttcctctaggactcgatgtaatactctgatatctaactaatgatgctgcatgtgttctctgtgctatcacaacttactatttagtatgccttttgcctcgatcacctagatgccatgttcacttcgggtcattcaatatagggaaatgggttgatccata

SEQ ID NO: 238865 - DNA, 441 bp, Glycine max
  unsure (1)..(441): unsure at all n locations
taagcaaagatatatttggtttgtggagnttcatgccccacaccaaagctttgaccgggactcgttgggcggtaagcatcaccaccaccaacattatcatcgtttgggatgtaccataaacggaaggaagctgtggactcctaaggattactggtggggaggaaaggtaatactctttcttgagtcttccatgagcccaaatttgttttgctaacgaagaagacacgaaaggataacaagatggttttgtgtgccctgaaactgagaacaaaattaacaaacaatggtctatgtgcttcaagaacaacttattgatgcctttgataaactagcataaaggcgctacttaacatgactcctgtaccggcatattgctatatggcttcaacatgcaccatatactatgtttatatgtggttaacgcacatggggatgtctctt

SEQ ID NO: 238866 - DNA, 381 bp, Glycine max
ccacagtaatccaacaaagttacaactttcatgaacttaaagaatctaaaaatttggcagaattatgatcttttattgcaacatttcaatgtgatgttaactactagaatgggtgaactatgtagctagataatcttaccacagccttgctacgcaagataagccaatcatgatggcaaatattccataagtttttaaagtcctttgggttttcccctgggaagaaacttatgttgttgaaaaaaacataagactaaattccaacaagaaaacatgaactagaaatatccttacaattcccaagaccttcccatcctttattgatgatgcccctctgtccagtgatctccaaagcatctaccaatatttgtgtcaatcttt

SEQ ID NO: 238867 - DNA, 370 bp, Glycine max
ctatagagtgtatctattatataggacttctaatgccaaagcaagggaaattaatgatgtgcccagctcctaatgcactattaagggaaattacaaataatggctatgtggataataaagccaattctgccttttgtttatctaagaaattactagataacaaaatttctgtgcattggatacaacctgccgaagtacttgattgtataacacacaataacaacctactataattatgctatgagattgaagggtaaaacgggttatcttgatatcctattattatatattaacaaattcaatgaggcttatttgcatggtgttgggtaaaattgagaactcatcccattgtgttaatcccccccccccc

SEQ ID NO: 238868 - DNA, 396 bp, Glycine max
  unsure (1)..(396): unsure at all n locations
acccagctcgcccatgcgagcaagggttgcttcctttctatacaacagccttctggaaggcccaagtgggcctggttgctatnttcaccctcatttttactaaacacaccccctgcccactcttttcggtgattcttttatcgtaagttacagaaaccttacaatgttcgaacgatacttgtgttctttccgaatggtaacagaaccttgcggatacataatcatccctttttggacttacggaatgttaccgaacctcactatttggcaacgatgcttccttttgattccggtgtgtaccggaacctacggattgcgatcaatattcccttttctttccctctggatatcttccataacttgaggaactcacctattcaaaattctaaaaagggc

SEQ ID NO: 238869 - DNA, 448 bp, Glycine max
  unsure (1)..(448): unsure at all n locations
nntacctttcattgtaacccttataacttatgcgccaacaatgtcatagataaagaaatgttgatgttcaaaggacactattaatccttgttaatcaactgacctacactgagcaaggtttggtcaatgttatgtacatcaaagaacaatctgattttaatttggatccctgaacaccttgaatattcaaacaattccttttccctttacctggaaattaagcaccaattcccaattttgacctttgaagacattagtggcttcaaatccttgaatagagtcttatcatatgtcatgtggttcgtacaaccactaccaatcaaccaactttcacttgattcactactcaagaagcatgtggccacaaacagttggtcctcctcgtcttgattagcaatctgagctccctcatcatggtgaattttgttggggcagatcaccgcttcac

SEQ ID NO: 238870 - DNA, 245 bp, Glycine max
  unsure (1)..(245): unsure at all n locations
cattttgttgggaaatattgtatgacncgtgggtgaccacattttctttcttcttaaccaataaggatttgacatgacttttctcatggtttaatattctttattgcaggcacgaatcaacattgacttgcaattctcacaatgcaaatactcctcttatttcacacacaaatatttattgcagaaaaaaacacttccaaacatttctgaaacaaatggaataaacaatccaggggtaaaacctt

SEQ ID NO: 238871 - DNA, 354 bp, Glycine max
  unsure (1)..(354): unsure at all n locations
tttacaaattntcaaaactttttctaaacaccacaatgttacgtctgaagatgaatatgtaagaaaacatatatcaaattttcccaaagcaatttagacaatgacttcggatcctgtacgaccaacaatgattctccaatacaaaaatcaattcggaccataagcaatttaaaaccagcagaggagataaccagatggacacatggattatatggtcatctaaaccctgagactacttcaggtctgacaaaccctaagtctactacttcacttcttataagtattatgaccttcactttagttcctaactcaggctctatcaaacttgtccaatcaatatgttttttttcctct

SEQ ID NO: 238872 - DNA, 269 bp, Glycine max
cacttaagacttcaccagaaaatgaagacacctgtgactacatatctgactatattgtcttttttcacacagaccacattgaccgaaataaactttgttgcatagtctcaattagcatcagtcatgaatgtcttcaagacctccttgttacttattaaacactgtatggaaaaaaaaaaagcctaccatggttatcaactcagcctcactgaagtagcatggtcttgaaaaaatataaaataactacatctactctacccctcccccac

SEQ ID NO: 238873 - DNA, 246 bp, Glycine max
  unsure (1)..(246): unsure at all n locations
ctcaagctcacaaaagnnngatggctggaaacaagcacttatgctttggtacaagaagttaatgagtgtatgagcaactcacgattcaaaagatgtgacatggaccattgctgctatgttataaaatatactaaaagttatgttatccttgttgcgtatgttgatgacatgttgatagcatgatctagtatggcagaaatcaacaaggtgaatcagcagttggcaaaaaactctgaaatgaaggat

SEQ ID NO: 238874 - DNA, 437 bp, Glycine max
  unsure (1)..(437): unsure at all n locations
tctattncatggcaacatggaccaactcctctgtttgtgtcaaaaaggtctctgaatctgaggccacaaacctctctgaccatttggacacttgacccttcacagtgaattgcagtgctagtgctgctgctgctgctgctgcttgtaggtgtagtggtggacttatcatatgagtcatctgagtcatacacaaataactcgtcccattcataagggctcgtgtcccaacttgatcaacaacttccattattttggcctcaagcttgtcactttgtttacaatgctcttgcaagtctgcatgaaagttctcagtttcataagctcaatgaacctggtctaagtatacttaaaaattaatatccataaaattgctttctgagtcttatacgttcagagtaaataatattaagcataccgaggtgacttcttcataacaa

SEQ ID NO: 238875 - DNA, 247 bp, Glycine max
  unsure (1)..(247): unsure at all n locations
tacctganatattantgggcccgttatcttgcttccggtatataataatatcgganaagtgaacgaaaggaatacgataattagatgaccaaccttatgtttgcttggattattctaaccgcaaatccgcgttaataaaggaaacatatagcttcaaaaaaataaaaaagaaatagtagcttttgataaaaatgcatatgaagtgtggctttgcacaattaaaaatatctaatccaattaatacgag

SEQ ID NO: 238876 - DNA, 355 bp, Glycine max
  unsure (1)..(355): unsure at all n locations
nttaaccttgacttggtagaacctcttgccgggtngattttgttccatgcttgctaaagtgagacaaaagctggtgcanatcaaaactccgatatctcatgggtggaatgaatgaatgcatgaaggaatgcatataacacagatgcaatctatgaatgctggggtccggggaattctttccctttctagacacaacgtctatgggtaggcaaatgccccaacgtacgtttttaaaaagcgacatggacccttcgttggtttgtttacacaagggatcaagacagaacccatatgcgatgcctatgcaaaagacacaatgcgggaatgtacacagtatgacaatattcactgaaca

SEQ ID NO: 238877 - DNA, 435 bp, Glycine max
attcgtaccttaaatactaagtctagcaacagaagattcttttgattctagatgatgttttcttaagggaataactacatatgaaccgatctctaaggattctatgcttgtctcacaaaggctatattaataatagtctaataagatttacgatgaaagattgttacccaacatggcacctatttgggaaatgccatatgattcattttgaatcaatgtcctcagaatatcttggaagggaacaaactaaaagccttccaattctttcgtgtatgaacctttttatcctacgtgttacataccttacattgttttggtggaatttttggagattaaaatattctcaatatacactaacacttcaataaatgttagatatttgacgaatcaaatcaacatttaaagttgtggtctcaactgattttttggtgctta

SEQ ID NO: 238878 - DNA, 460 bp, Glycine max
  unsure (1)..(460): unsure at all n locations
gggaaggatgcttcaatggaggaaaagaaagagggagtgtattatatatgggggagcacgatattgaaggaagaaaaagggagagaagttgaacttngagttgtgtctcacaagactctcattcatctaaagtacaacaagtggtacacatgcttctatttataaactaggtagcttcctttggaagccttctttgagaaaacttcccttgagagccttctttgagaaaaccttcctttgagaagcttctttgagaaaacttccttgagaagctagagcttagctacacacacccctctgataactaaacccacctccttgagaagcttccttaagaagattcctaaagaagcctaagcttagcttcacatacctctctaatagctaagctcacctccttgagatgagaagctagaggctatctacacacccnctataatagctaagctcacccccatga

SEQ ID NO: 238879 - DNA, 387 bp, Glycine max
tctttgctgttatcggttaacatggaccattcacaaagtatatatcaacccatacattactgcttttgcaagaactacaataagtttgagttcctcattcgcaattgacgatcctatgagcaacaccttctttttccaccaccctaaaagattgataaatggtcaacgccttaacgtttctcttctatcaaaaatataagagatcgttaatgttggatcgactggcctcagaatattaataaagcgaggcgttgaattaatgattaatgtgtcttgacaattaaaattatccttctaatatactaaatcaactaggctctctactagtcttagaaagtaagactaaacaatacttaaaaagttagcgaataaagtcacacggaatta

SEQ ID NO: 238880 - DNA, 341 bp, Glycine max
  unsure (1)..(341): unsure at all n locations
tgcatagataaattntgctaatgcatgtgttgcatcaattgcctgaacatatgattaaaanatggatataataatataatacaattaggagaaatagaaaactagatgaactgaattgctcaagtaatagacagacctgccacaaagtcaatgtcttggtaatggtatccttgcccagctggattttatgggaagataatgcttccattacctcattggaactgctacccattacaataacagcatttgttacagcttgcaatagaaaaaaaaaaccaaagtcatgctttagtatgcaagctaattgatagactgtgttaaaaatgcaactttaagatcag

SEQ ID NO: 238881 - DNA, 306 bp, Glycine max
  unsure (1)..(306): unsure at all n locations
actcaagcttataagtgcgggttctggagacaaaggtcaagcgttctcgatatgcgaagatgatattccgagtactttggatntggtacgaccatgctctcctgatttccagctgggaaattggcgagtggaggaacgccccggcatttacgcaacaagcataatgtaaacctttacggttttaatagctctatagttgggcctaggctttagagttttcatttagttaaggctttgtgtcttttgtttntgaatctataatacaaggatctttcttcatctgttcctgggctctacccattctca

SEQ ID NO: 238882 - DNA, 438 bp, Glycine max
  unsure (1)..(438): unsure at all n locations
gaccttagaaactcagcttatatattgtgcaccctggttcttgaaataatctacgtcgaaagctcctatataaggtgtaatgatagccaccatatagntaaagttggcataatatgtgcttattcacccacctgtgtttgtatttgtcgcataaatgaatcagttaagaaacaaaacttaattaaatttattttgatcaccacctgtttataggtttggctttgagtgtacatttatatcgaattttgttttccgaatgatgattgatgtatgtgttcattcagttatttctttgattcttacttttattttggaccgtgctgcccatcatcacaggtacaaatggttgttaccaatgaatattcttattatgtgttcactgtccttattgacaattgatatatgctatacacattgtgttcatgatgagtgaacctt

SEQ ID NO: 238883 - DNA, 324 bp, Glycine max
attgaatgatacccgaaaaaacttatgggaacatggaattgattatctgcataataatcaaccaagaaagcttgaactacgtatgttttccaatccaatctaaacacagaggtcttgcaaataaatctaaaacataataatatatgaatccgttgttaaaagctaactatggagaaatattgatatacatattgttatacaaattctagctcattgtaaaagaagaatgaaagaaaagaaatacttgcctcatgaatatgcaagatgccataccaacctaaagagaaagatatggtttgacggatcctattctcctgccaactt

SEQ ID NO: 238884 - DNA, 433 bp, Glycine max
catctaacctgaccaaaacgatccataacctgaccatgtgaaatgcaaacctttctctgagcccattacaacaaaaaaaggtgacgagagggaaatttccatctaacaggaacatacaaggagagaagataattcccatcaagagaaagtaataaatggaaggaatatccatttcccgaggtggtgtagggataaagaaaataaatgaaaactcccattcaaagaatgggagaaggaaaaaaataaaaaaagttataaagaaaaagctcctggtcaagaaacaaaaaaaatgtgcagaaagggcttttaccggaccatatctgaacaataccgaattgtcccaaatgaacaataaaaagaaagaaggaaaccgcacctataggggcgtttcccttaataccaacacaaatccggcgcttcgaccacttttttt

SEQ ID NO: 238885 - DNA, 469 bp, Glycine max
  unsure (1)..(469): unsure at all n locations
ntctcaaggaagtnttctcatagaagcatctctatgtatctttcttactcataaatcaaagcatgtgtgacactctgtgaactttgatgaatgagagtcttgtgagacacaacttaaagttcaacttctctccctgatcttcctcaattcgagctccccccctctcttctctccctctttcttttcctccattaaagactcccatttcaagcttcttaatccaanggaacatttctttgantggagaaaccttctttcttccatggcttattcccttatagatggtgcctaccctcttctcttctcctttgccttccactgcatctccatggtggaatatcaccattgaaggaacctcatgaagctcacagatctagccatcatagaagctccacaagcaagctgtcatcactcatacatctacgtgatcaagggaaaggcatgggtacaatgaattcctgatagcata

SEQ ID NO: 238886 - DNA, 403 bp, Glycine max
gccttgccccttgatataattgagggactcatggtcactatgaatgacaaattccttgggataaagggaatgttgccatgttttcataacccgtactaaagcatacaactccttatcataagttgaatagttaagggtatgaccacttaactctcactaaattagacaatggtaggccttcttgcatcaacactaccgcaatacccatcattttaatcattcaacctcaatttcaaaagaatttttgaaagtctggcaacgcaagtatggcggcataatttagcttttgataaaaacatagaaagcttcttcttgtttctctcctcatttgaaaccaacatatttcttgagcacttcattgagaggtgcttgccatgtgctaaaatccttcacaaatcgtcta

SEQ ID NO: 238887 - DNA, 434 bp, Glycine max
  unsure (1)..(434): unsure at all n locations
nttcgtcttacagacagctnatagtttatacggataaccactcgggtattttcgcccgtcaccgcgactcaaaagtcaatatgacagatctggtgagcgcggaagatgacgtaaatctccgcgtgtcaaccgtgttgtcagccgcgattgaagattggcncagaagacgacattagtctctgcgtgttatcaagctttctgcctacaaacgcaaaaagttatacggataaccctcggtatttcgcccgtcagcgtgactcaaaagtcattatgacagatcttgtgagcgccgaagatgacataaatctccgcatgtcaacgggcttgtcagccgcgattgacgaaaggcgcataagacaacattagtctctgcgtgctatcaggcttgtcgtctacagacagcaaaaagttatacggataaccactcgagtttt

SEQ ID NO: 238888 - DNA, 410 bp, Glycine max
tagcagtaaccgcatactcttcaatttccaacaacactatttattgcattgtaaaattagcaatcggcaagggggagtccttctatacatggaagaagagaaccaacagagaggcatgaaagtgagaaacaatcctctcattagatggaaatgggagagtgagagagagacacaccccacaaagagcctgattgaaaagagaaatggttgtcccacttattgttacaatacaaagttgagagactaaggggtgccatagtttttctcttgctaatactgagaagaatttccatgtcaaaaaaaatattgcttaatatactacattctcttaggccatttacttacataaagaaaacaaaatgttcttgacaactgcctgttacactgaagaaaagaaagagaaagtattc

SEQ ID NO: 238889 - DNA, 323 bp, Glycine max
atacaatactcaagcctgtaagcctaggatcttcttcatcaatgagatcatatgcttcttggtagatgaatgacatctgaatagacgagaaagagagagaggagacgtcatttcaaggagaagatgagtctagaagaagttcaccaccatatgaagccatggataagagcttggaggaagaaaaagatgaatgaatggagaggaagagaagaacaccaacctttgtgccctaaaaaagctctgaatactgaagttaattgtcaagtgatcaaagttgagaaaacgcacacacatgacctctattgatagtctatgtgtcacac

SEQ ID NO: 238890 - DNA, 327 bp, Glycine max
ttcaatagaaccaagtgacaatcaacctggtgacattctaccaccttctaacgatattgaccgcactgaagtagaagctactccttctgttgcttgaattggcaaccctatcaatcaacctgacttaccacaagaacaacctgccgtcgaggtattatcctctaatgtgttttaaatcataacctatacgaaactatttgttaacactctttccattgataattctcaatcatgtacaacaaaatgtttctgaagaagaaatacccttacatgctccaacattctccgctcctgatacagatgcattgaatgtagatgaacagggtg

SEQ ID NO: 238891 - DNA, 274 bp, Glycine max
tgaagggacacccacatttcctaggacctctgttgatatattcttttttgctacacctatactcgccgctcccttcacagccagttaacataaaccgaagccttcctctactacctgggttgggccaccttaaatcaccgcacaaatccgtttcatgaccacggatcaagccaccgcgatacatcctttcggcactcaaacacctacgaagcaatccatatatattaagttttctaccacgattcatgttataaatttgtgacaaacattaaca

SEQ ID NO: 238892 - DNA, 312 bp, Glycine max
aaccatgaaatgtgcccccacagaataagaactccaataaactataatgagtgtccctacactgacatatgcacaatggtatgaaccatggacttgatatctgatgaaaccaccaagaaataagtgaactcagtgtatgctcaactaataattaattatttgctttgaagaagtacatgcataatcacaaatctatatatgtataataatgtgcatgcacatattaataataatcctaacatgttttccacttagattatgtttgtgttcctaaacaccaatattatgaacatctgattacaaatcacaaca

SEQ ID NO: 238893 - DNA, 451 bp, Glycine max
  unsure (1)..(451): unsure at all n locations
ttcaactattaatgaagagccagaattgngtgatgagaatctaacatcaccaatacatgtgtgtatggcccagatacaatggaagaaggttcaaggaatagataaaacaagacggtgtctagtaccacatgttaatctgaagcaatcttatgtcctatttattacacgaattgcatccaaaggtgcctttgctgggtttcttcaacgctaacttgacccttcttagtccttactctattccaataagaacatgaagaagtctcttcttggcaaaaaccagattgcacggttggctaatttcaattaatgatgtaatgttgcgtactacttaagctattttaactattttatgtgtgcaatatgtacagtattatttcctttccggtaatgtaaaatcactgaatgttgctttgtagatcatgttggttctttacccattttgcctaatatt

SEQ ID NO: 238894 - DNA, 463 bp, Glycine max
  unsure (1)..(463): unsure at all n locations
ctattgatactcaagctaacatctgctgaaccggcaaaatgaagtaagttttntattcaatgaataactcaagtntcttctttaagcgaacaatactaaatcacagtctgtaagaacaaattcattttccttttaagaatctaacatgagtactcaaaacttaaattgagaaaaatattgatctagttaagaatcgttctgtgctagttaattcaagcccctcaagaacttaatctaatttgacaagtatattttcactcaatgaagttatttatcttggttccaaactccaatcaatcacaaatatatgtgggctattaacttaccttttaatgttcgacacttatgaatatgaatctcacgaggggcagaataagatgtgtccccggctcttgaaccaaccattccgcaagacgtggtctatatacatatcaacctaaagactcctccttcaaccatatat

SEQ ID NO: 238895 - DNA, 327 bp, Glycine max
  unsure (1)..(327): unsure at all n locations
ctattacggacctatgaaactcagctttaacacnaagtagtcgtaaatgtgactaacaacttctccaaatttacagttatgcttgtcctcaagcaaagaaagaacagttcacttgtcctcaattgacaaactcacagtggttattcataatcgtgtntgtttccaagcattcaatcacatgacacaagtggcatacaatgcttcaaccaacaacttttacaagatatgcagattttcaaagataggaacatgattattaaaccacacaagatatgcagatatcaaggaatgatcatccagcccaagcctcacggtcactgtttcact

SEQ ID NO: 238896 - DNA, 428 bp, Glycine max
tattcatcttctctaatcttcatatgagagagaaatcttcttcaatgccgtttagtacccaaaaaagaaaaaacaattaatgcacgagataactgaaatgaagtcttatacaaagtaacatatttttcaagactatgtcttataatatggacactgggagcatttacgattaacaatatttttagttctcgaacctttatgaagttttatttttaagtccctgaacaaaaacttgcctactcttattccctgatgttttcttcaatcaaaaattaatcatcgcatcaaatatcgtgtaagtgggacatatagaatataggttggttaatgggaaaggaaaaaaagaagacaagtggctgttcaatccctaccacaaaataacatttaaaactaacttatgataaaagaagtgatatgtgaatcatttc

SEQ ID NO: 238897 - DNA, 361 bp, Glycine max
  unsure (1)..(361): unsure at all n locations
cttgacatgttcaagagcatgtgctactactgtggagggcttcttaatntggtcgccacacctcaaggtgatggcactcacatttttcggattcttcacagtctgtgaaggcaatttgtcagaatattgggactgagcttggttcaactgagcaaccctctgccctatctgattattatactctgaatggaggctcttgtctcttgttgaaattgcatattatggatgggcattgacctcactaacctctctaaggaaagctgacgaggagcctcaattgcttggtggctttgttgtgcctgctgctgcttgtgctgcattggaagacgaacatatggcctgcttggccaacaacattcta

SEQ ID NO: 238898 - DNA, 443 bp, Glycine max
  unsure (1)..(443): unsure at all n locations
tgcagatcaactngatccatatgcttcttaccgatcaagttgatccgtttaatgcattctgatatgcggatcatctacgttctaccctatcactattgtcgattagatgaattcatacgcggatcaagcaaatgcctaagcactacacagcaccaccaacaatggaaacgcataccaacgcgagggagaagaaggcctacctcacaattgcctccaacctgaaaataaatcaccacggtacgtgccgcgcacaacgaacagaactgcaatgcgactaaagaacaacgtgcccagggctcaccaaggacgctgtcatgctgaagaacgataaggaagcagaagaagaatggagctgcgatgctgaagaagaatgtgacgcatgatacaaggaggctgggtacacacaaggttttaaaaatgcaaggtatttttgcttttccata

SEQ ID NO: 238899 - DNA, 406 bp, Glycine max
  unsure (1)..(406): unsure at all n locations
ggatgccactcctggagttatggacactaacaagagaccaattattgttgtatgcagtgaaatatgtattccctgaatgcacaaaattgtggtgcatatttcacattaacaagaatgtgaacgttaaactgtaatcactaattgccttaacaaatgcctgggaatatggcatggattgctaagaaacttaactgatcgtcgtcacaaccacagcttgatgaatgcttgaagaagtcaaagaaccttgcgcacctcggccaataattgttgactatgtcaaggaaacatggataataccacacaaggagaaatttgttccacctgtactatatcgtgatgcacttatgaacacaacaacaacagggtgatactgncaactatctctataacattgaaaaattatgaa

SEQ ID NO: 238900 - DNA, 292 bp, Glycine max
aatataactactatcaacggataaaagctcatatttttccatcttctaacaaacacaaccccataattcaaacccatacccacaaaatataagaaaagaatccacccaacctaattcaatccacactaagacccttaccactccaaatgccctctttccgattgagcaaaatggcaccaaagttaaacttgttggcacaatggtgatgaaaaataaaaaagctctaaaaaaggaacctcgaattctttgctaagagaaaaaacacttttggtaaaaaggtttttttctttcc

SEQ ID NO: 238901 - DNA, 354 bp, Glycine max
  unsure (1)..(354): unsure at all n locations
ctcatttactattaagtggtgaatgttcttcataaatgaatattatnaatagaganaatcctcgatcaaagattggaggaaagcataagaaaaagagaaaatacctaatccaagattggatgaaagttaaagataaatctctatcaaagatcagaagaaagcaaagagtaatattccgaatggtcgttggaccagaccatggcttaattattgtacagaattgtccttatgagatattgaatagataggaaaccatgatttgaaacacatgaagctccctttcttggtaccaaccaaatctttgtgccccgtctctttcatgctgcgctaaacaaaacataaaactggaaagga

SEQ ID NO: 238902 - DNA, 408 bp, Glycine max
ttatcacaactctggatcgcttagcgagcataagtgaatgttcagcttagcgctcgtcttctcgcttagcggatgcatgcaagcagtgcacttattgggagtagccctcgcttatcacatgggtgcgagctatcccttctttcaaatgttacctcgcgctcaaccgcaagaatggtgcgctcaacagatggctcactaaggcgacagattggcttatcgagcatatcaaaatcagcacttgacaaactagcctgattaacctgaaattgaaaggaaatgattattaaatatacaagatgggagtactaagtatttattacctatatctaacagaaagtaattactacgttacaaaataaccatcaatggaggagttagatacacatttcacagatatcttctcaaaag

SEQ ID NO: 238903 - DNA, 257 bp, Glycine max
tcttatccaagacacattcttggtggcgaaactccttttttctggcttattccctaatggatggcgtctcctctcacctcttctcctttatccttccgctgcctcttcatagggaaaaatcaccattgaaggacctcattgaagctcaaagatccagcttccatagaagcttcacaagcaagcttccattagtaatgcttagagaaaatgaaaataaatgacaattaacatgaaaataaatccccactagccactaa

SEQ ID NO: 238904 - DNA, 266 bp, Glycine max
  unsure (1)..(266): unsure at all n locations
ngcatgaattacatctncgcctatctcaagcaaattcttcttgatatcatcaaagtcctcatgattttcatttgtaatgtttatatgattcgggtacgggctcgatcacttaccatgaatgataattgtatcctttgcaccctttttgagctaaatgatattgtcaaaaatttgaaccctggacttaaataattatctttagatacccttgttagattctaagagagcatatggtcaaggcatatttaccccaaatttgtgggagt

SEQ ID NO: 238905 - DNA, 313 bp, Glycine max
gtattctagacaaagcaagttaagatattcaagatggatgatcgagacagtctatagagtcttagaaaggatatctttaataggaatggaattccaattgatgtaacataaggtttggccaagaatattaagttaaaaagtcttttacaagaaatatactctctggtaatcgattaccagaggatttactccattaccagtggccacaactgatttaccacagctattaaaatttgaattcaaaatttgcctcgtgaatcgattacacatatgtggtaatcgttaccaccgttttctaacgtttaattcaaat

SEQ ID NO: 238906 - DNA, 393 bp, Glycine max
  unsure (1)..(393): unsure at all n locations
tttactatggggacacatatcagtcatgagtggaaaggtacatacagaaagtgctgaagatgataacagcttatgcaacactaataagccttaactgttgatttgctcatcaaaacatatggaagagtccacagntcacaaacttcttaatgtatgtgtttaccatctacaaggtttaagtggtcctcaggtccattctcgggaacaaataatccacttcctaaataactttcgatgcaagatatgctaatccaactagttaagtttgagtcttatgttgaaatatagtaatcatcgattcctaatgatcctctatcttctttgacactcactatgacataaataagttaaccattggtgtttgcctaatgtattttaatttgatctacttct

SEQ ID NO: 238907 - DNA, 366 bp, Glycine max
  unsure (1)..(366): unsure at all n locations
gcttgacctgtcaggctaagcgccattngcttctgtaagttttcattngaataaggctaagcgcgtctgtgcgctaagcccttggtgtgtgttgagctaagcaccctgctgcactaagctcaactctctcactatcttttaagtttttgtagttaggctaagcacgccctgtgtgctaagcccgagtgttattcggttgaggctgagctaagcacgccattctgcgctaagctccaactctctttggttntgaaaattgtagacttaggctatgctcagttgtgcgctaagcctactctgcagaanaaaatgttctctgtgtcttcgagctaagcgctagtctgctacacttagtgcctgagtaaa

SEQ ID NO: 238908 - DNA, 430 bp, Glycine max
agcactctattagtgagaaagcttctccttacatggctctattctctagtggatggagcctgctctcacctcttaccctatatcttctgctgcaacaacatagactgagaatcaccattgaaggactttattgaagctcaaagatccaacctccatagaagcttgtcaagaaatatttcatcaagaaacacgtcgaagtaacaacaataacatgaaaagtggagcctaggcactatatagttgtgaccataaatcactcgcttcgagatgtctcttgttagtcttgtgctctgcacaatgatcgttgagttcttcttaaggatgggatgcaatcttaattaatactgacaggatgaatagagagagaacgaaacaatcaaccactctaacaccaggttagtcttctacctctgattatgtttcaactgat

SEQ ID NO: 238909 - DNA, 434 bp, Glycine max
  unsure (1)..(434): unsure at all n locations
agcttgtaggattatggtgtacccatcacatgtggtactatgtggcggtcgggcgatggtgcacaacaagttntccacatccacaatgcgcgcataaacccaccattccctgtagcccaccttcaactgagctcacgtactcccacgtagcccatatccttgtttctcttaacaccgggtccccatcaatcctcccaagcttccccaacatcaaagtaatgcaacattcaaacagcacaaactatcacagccaagaaaacagagcaaaggcagaatactctgccaaaacaccaaccaaaatcacagctcttctcacttaaagaccccagtaacaattccttcgttccaattcgttaaccgttggatcgactccaagattttactggaagtctctagtacataagcctacgttttgaccggtgggatctactaac

SEQ ID NO: 238910 - DNA, 303 bp, Glycine max
ctgccagataacatggtatgaactctacctaggattattgctcattgacataataaactaaatcagtgcggtgtgatctgcacgaatgtccttaccatattatagggtgagactcgtacactcggataaccatctgacagtctcaatatataaacgttatgcggggtggcatcttgtgagaagctgatcgtgttaacgtggtctataagcactacggcgtactcatagctgtgatacatctaccttacctacaaacctgaaactgaccgcttatcataacaaaccgaatagggggatgaagac

SEQ ID NO: 238911 - DNA, 449 bp, Glycine max
  unsure (1)..(449): unsure at all n locations
agcttgagatgnaggaagtgtgaagggtgaaactttctgcttttattgttgaccacagagtggtacctggagatatgtcgcgggggtcaagaaaccttggggacgtcaggtggggtgctattgcccaaaaccaagcttgaccaatcccgacccaacccgggcatagtcggtcagtgagaacctgtgatgtacctaagcaggcgagctcctggcagtcaacagataaaaggaaaacaagaccacaaagcaaggaggcttgtggtggctggccagctgtgaattttgtgtaatatgtggattgtggcctctggtaatcgattactaagggtgggtaatcgattacaaggcttaaaattgaagacaggaggctaagatggtctctggtaatcgattaccaaggggtgtaatcgattaccaggcttgaaaacgaagtcaggaaacttatggag

SEQ ID NO: 238912 - DNA, 462 bp, Glycine max
  unsure (1)..(462): unsure at all n locations
ngtgtattgctgcattctactaatatatggaattgcccactgctttgcctgagaataacaattgcttgaccacaacagcgctggaggcggcaagggacaatggtctttcaaataaacctattgtacacgaacaaacattatatcatgcgttgaccgtgccaaacgaaccagcgaagtcattgcataattgttatactaactatattcaatgtacctgaacaaaatgatttccaaacatgtgaccgacacatatgatgcggtggccagaagaatcaggtggtggttgacttctaagagggaaaaatgtcattgcttgttgtcgggacaacgatacaaggattacgttataccgtgaagcaatcacatatcccatgtccgttatatccatccactntgtcacactaacnctgaatgaaccaaacatacacatgtnnagtaattaaacattgttattaaaaaaaa

SEQ ID NO: 238913 - DNA, 415 bp, Glycine max
  unsure (1)..(415): unsure at all n locations
agcttagagcatgtntgtataggagttcaatttaacgcaaccaacgttcacgcaaaagtttcagtatacctgcgttgccgattttgctttgtaaagcatgtttgtctcgttgaacgtggatacaacgagtacccaaacacaatcttaatcaagaaatgatgtaaaagggatgcacttttttttttaaaatgatgttttatagaaaactaaacaacagccaaagaggctagagctaaaaggttacacaaacattacatgagactaaaaatgtcattttagaagaatcaattcttcttaaagagcttaaactaaacttttaggtgaatgctaatgaatgatttcattacatttctaacacttttctttccctggttggtaccaaattttctactctcaaacacattatcaatacaac

SEQ ID NO: 238914 - DNA, 405 bp, Glycine max
  unsure (1)..(405): unsure at all n locations
tcactgactactctnttctttgcattgttatcaacatnttaaattagtaaacttaaatatttacatgacaaaaggtggtatttcttcatattagaaagtaaaccttcgtgcagttataaggttgtaagcttgtgacctgatggtcaaatttactaatctcagaagcaaactctcttattatgagagggaaacgtggatacatcttaccctctctatatcctacaatgcttgcaaactngtgtattggtctacccatcattactcacttccattgggtaagtgacatcaaactcttaatcaggttcataaatgtctctctttctccctaacagcttgtagcaagcaaacatgatgatggtttttccttctctaaaaactntcccctttttacctttgtctggtctc

SEQ ID NO: 238915 - DNA, 381 bp, Glycine max
  unsure (1)..(381): unsure at all n locations
agcttgagaatggagaatngcactaagcaatcactacgcatagttccaaactcgaaggtggaggacacatgaacgaaaacacaattcatggggctccgaanaaggggttgagaatggagaattacactaagcaatcactacgcatagctccaaactcgaaggtggaggacacatgaacgataacgcaattcatggtgctccgaaaagattgagaatggagaattgcactacgcaatcactacgcatagctccaaacgcgaaggtggaggacacatgaatgaaaacgcaattcatggcgctccgaaaagaatgagaatggagaattgcactaagcaatcactacgcatagctccaaactcgaaggtggaggacacatgaatg

SEQ ID NO: 238916 - DNA, 474 bp, Glycine max
  unsure (1)..(474): unsure at all n locations
gacactatgaatctcagctttaacanatgtcttcacaaataatcatcacacagcaganaactaacttaactacccctcatatctcccaaaaccccatacccacgaaatttaagagagaaagaagtccacccaaacctggattttcgaagtcccactcgtagccacgcacttcacgaccccgaaaatgccctcctttcgcgatttggagcagaaatgagcaccaaaggttggagcttttgtggggtttcaatggagaatggaggagaaggaaaaagcaacgtgaggaagagggagagcttctgaattttctgttttggctgagtgaggagagagaaaagctctttggtcttaaataaaaggttttcctctttttctattattttattcaagctctaccacatgtccctatttgattggagcaaaaagggcccactttctctttttgactgtgacccatactcagtcacaaaagtg

SEQ ID NO: 238917 - DNA, 428 bp, Glycine max
agcttataatctcagaacagagttgtttaacatgggaacaaggagataaactctctctttctctctctgtgtgatgttattgttattacatcatcatctttaaactccctttgaaccactgtcaaatgaattatcatgttgaacaaaagtcctttgaatccttcaagctgagttgatcttctcatcaataagcattggaagcttgttctggataggaccgacatccttcaagggcatgtctagaatctgcaatagttgaaaatgacatacatatacaagcactgtgcaaattgcaagtaccaaaaaagagtaaagtagcatagctagaaaaagtgaatgcagaacaatatgttattgcctcattgggtttactcttggtcgattttaccccaggtggaacaccgcaccccacccttctagtttagcag

SEQ ID NO: 238918 - DNA, 424 bp, Glycine max
  unsure (1)..(424): unsure at all n locations
nggacagttcagcagaccacaggtttgtggttaggattcttccctcaggaacccaatgagcatatacatccttcaatgtttgaatggctttttggccttctggggtctccctgcctccaatgaggacacggtccggattgaaaagatcttggattgcagttccctcagcaaggaattcagggtttgaaaggatttggaacttgattcccttgccattgtgagtcaaaattttctctatggcctcagcagttttcacagggacagtggatttctccaccacaatcttgtcactcttggatacatcagcaatcatgcgtgctgcactctcccagtacgttaaatccgcggccttaccggctccaagaccgcgagtttttgtcggggtgttgacagagacaaacactatgtctgcctcatagacatg

SEQ ID NO: 238919 - DNA, 444 bp, Glycine max
  unsure (1)..(444): unsure at all n locations
agcttctccctttntctgcttctagagctcttttccctaaataggcactatggctactctggaattttgtgccctggccattctgtacaagtgtgtagaagctaacatagaaggtgtaccctaattctacacaagacaggctttaaataggctctgaattcaaaacgttgcgcttagcgccaccctcacgcttagcgtgagtaaggggaattgggcttagcgccagtctcgcgcttagcctggctaaaggcacctgctgcgcttagtgcactaatctcgcgcttaaggcgcgactttgatactgatgctctgccagattctcctttgcgctaagcacgttgaagctgcgcttagcggtggtgtcataccctaatttcatccgggaaccatccgttgttgggatgcgaccctcgtttgaccacttcgaggtacttggcacccatc

SEQ ID NO: 238920 - DNA, 421 bp, Glycine max
taaagtatgcccgagtcattcatccctatgagatgttgtcgaagtattggcgatcagaattgccattccttggattatagggttgaaccaagctcatgcttttacaaaaaggttcatcaagtcaagttgaaatatggaagtaaccgtcttgcaaaattggggcaaaagatgaattgagtcacatcactgcttcgtctactgccaaacatatttaggattattgatgtccttgttacttccagtttcaccttgacaaagatgtcatggaccatgttgaaaatctaaattgattcaaccccatatcttgcgtaaaaattcgcaatacttcaactgtgcatcattcgcatgcatccatgcttttcattggttgcattgctcgttgcattctttccttgaaaaataaaataaaatgaacttaatc

SEQ ID NO: 238921 - DNA, 455 bp, Glycine max
  unsure (1)..(455): unsure at all n locations
agcttgtttaaatggatctctcttgatctcacatgatgttaacaactcactttaacctttgaaatttcaagatacgtaaactagagtttgtgagccgtaaaagcttgttccttttcactcataaaagtgagaacacaaggtggctatttatagagaaaacagttgcaattgtctgtaatcgattaaattggtaatgcaatagattatctcaaagaagtaatcgattagattctcactttaattgattaaagtgttcttcccaacacctgaaaagctttgaagaataatgtaatcatttagatttttgatttaattgattaaagtgttcttgatcacttctgggaacactttcaagaacaatgtaatcgattaatactcccacataatcaattaaagcagagactcaagaaaacaaacatggtctcanaagaacagagtaatcaattataggtata

SEQ ID NO: 238922 - DNA, 462 bp, Glycine max
  unsure (1)..(462): unsure at all n locations
ngnganaggtngcaagagattattaagagctatccacataatggcattactcaacaaaagctagctcgtattttttatgttggagtgtcctcaattaatagggtgagtttggatgttgcttgtaggggcaacctcatgttaaaaccccatgttggtgaaatcaaaatcattgaagacatgtgttctatgaaataacaacaatcacactagaagaggggttgaatagtgtgtcaatcaaagatcaaatatattttttgttcaactgtaatatcatagattcatatatatatatatacatatatatacacacacacactagaattgtaaaaaaaaaaaacaagtttaatagtccaataaatatatgaagtaagaagtttaaaagggttttcaaatagacaccaaacacgctaaagaaagctaagagaatacttagtaaaaccacttcagagagacatagaaaca

SEQ ID NO: 238923 - DNA, 413 bp, Glycine max
  unsure (1)..(413): unsure at all n locations
agctntacattntcgtgaatgtgacaatctatttcttagtggattgattcaccttaacagcccacaaaatcatataagcataattagatgcaacaactcactcatctccaatcttcatatgattgcaccaaatgaaagcccaaacactgatgagaatgttatctcacattcatccaacatttccataaagaactccaagatggaaattggtaaatcatatataagttacaatctttaattgcataattattatatcttgtccttaaatcattcaatgagaatgcatagccctttaattcctagttntttttataaggctactcaagtggtagatcctctcttnaattttttattaaaaaatatgtgatggtaaatattcattttctcattaagttgcaatcttatgtataaaa

SEQ ID NO: 238924 - DNA, 453 bp, Glycine max
  unsure (1)..(453): unsure at all n locations
ggcttgtggggcttctatggaggctggatcnttgagaagatttctaaagaagctagagcttagctacacacaccccctataatagctaagctcacctccttgagaagcttccttgagaagattcctaaagaagctagagcttagctacacacaccccctataatagctaagctcacccccatgccaaaatacatgaaaatataaaaaaagtccctatttcaaagactactcaaaatgccctgaaatacaaggctaaaaccctctactactagaatggccaaaatacaaggcccaaaagaaggaaaaaccaattctaacatttacaaagaagaatggatccaaccttgacccatgggctcaaaaatctaccctaaggttcatgagaaccctagggcctttttagtagctctagcccaagcctcttggagtcttctatccaatacccttgggggg

SEQ ID NO: 238925 - DNA, 428 bp, Glycine max
  unsure (1)..(428): unsure at all n locations
agctttcttgtagatcaaattccctaattggaatggaatactcaatatgattaatactaataagacactacatatttgcagaccacaaatcaatgcagctatactttctcatttccacaccaatttttgatcatgttattcatttgacaaaaatatgaaattaacctaattgggtgaacaaaaccaataaagcacctgaagactagaacaaaaagtataatggttaggtagagaagaacctgtcgaaggaacagtaaacgacgtgcacctagctcaccactacaaaacctaatgcacgtttcgcaagagctacaatggaaataccatgaaatagttcaaaataccaatngggtgtacattgaatagcagttcctttttcattcaacccaataaagcatcanagttagaggcgataaatagatagtgat

SEQ ID NO: 238926 - DNA, 452 bp, Glycine max
tgttgaagttgaagtggaagtggagtaatataatcaaagagcttccatgggagacaaaatattttagaggaattatggctgaaagtggctgagtgcctaaatcaatgattggttttttttttgttgttgaataaatcaaagattcgtttggtgaaacatgtttttattgaaaaactatatcttgaatgttgttggggctgctttatgattctaaaacaataatttatattgtgtacgtacgtatcacttgaaaagtgcgtttagattgttgtggttaatatattttaattaatgtatatacatagttgttagcggctgtgtgtgcccgggctgtttgcacttgtcatgatatctttattgccggttgaagattatttccattcaatacataagtaagataagcaatatatatatactttttaatattatattctttattattattattgaaa

SEQ ID NO: 238927 - DNA, 392 bp, Glycine max
  unsure (1)..(392): unsure at all n locations
agcttgttagttgtgtggagcccacctcaacggtcttgggatatttatgagggcattttgaagggtatgaacaagttgaaccattccaaacagtaacatcttgagcaaagatctttgagtgagaaatctgcattttctgctttaaccctctctgtgagagtgacccacttttgtgttgtgcttggtaatttgtaaaagactttagatagaagtgagatattntattcctgaatggaatccctctttcgaggtgaagacctatattttgtgcaataaacacatagatcctcattnttttttgtaagtctagtagtggctggaaaatttgaaatccaatggtgttgctagtctagttgagggctagaatgaactccagttggagaactgacagt

SEQ ID NO: 238928 - DNA, 328 bp, Glycine max
gctgacagtattataatctaattacgttgccaagtgtgagttggatcttatttggtaaccatgaaacaaattgctctatatagctgatcaatgaaggtgggtaagttaagtttgttcctgaacctatggccatgtagcacttgagaaatattgtggcactgaagtacttgagtaatcttccaaggtcactcgttcaggttgctcttcaaccatgacttctgctctacactctgtagatggacattccctggatgtaggtgaattacaagatgatgactcataaaagtgagcctcttcaaagattgaagctactgttatgttgtgcaaa

SEQ ID NO: 238929 - DNA, 330 bp, Glycine max
gagagtcacctgaggcatgcaagcttgtatggaggatatacttatatattaaaattctttttatgacaactggttttattttaatttttatttttttggctaaataataagtttaaaacctaaatgtagcctttctgtaggtaaaggttgttacagttacccttccctaacccactaggtcacccattttagggggaagtcaggtttcaccattctaatgttaagacatgtcacaagaatgactgagtactaaggacttataaagacttcctaatgaaggaccaccagtaggatttgagccaagaccttttttgttggatgctgttgatc

SEQ ID NO: 238930 - DNA, 449 bp, Glycine max
agctcctacttatgtggcatggcgggtgtccttcactttcttgtcttcaacgctagctctgaccactgttcttccttcccgcgatgcttcttttcatgtctgcctgagtgggcttatagcctaaaccatacttcccacgatttccttgggttattatcaggctagttatgccgccattgtctttgcctaaacccatcccgggttcataaccgttgcccaacataacatcggccaatattaccgccgcatcggacagacaaggttgcccaaagagggagtccacggaggaaatgctgaccacctcaaaagactggaaagcggtttctaacgattcttctgcggcttccacataaggcatggaggatgggcagcttaccaagatatcttcctcgcctgacacgatgaccaagtgcccctccactacgaatttcagctcttggtggagtgtg

SEQ ID NO: 238931 - DNA, 452 bp, Glycine max
  unsure (1)..(452): unsure at all n locations
agcttgtatacttngtgggcctctattaagtgctttgtttagaatctattcaatgagcttaaatatgttattaaactaataggattcacacttaaaaaactggaaaaagtatactaaatttgcatgtgggactacctaaatatgtccttaaaataagactacctaaattcaaacctggtggaaaaattgcatgtgggaaatctactcttgacctcttcaacaataaaatagttatgttttaaattataaatctttttggtatagcccatttcaatattcctgcacgtttggtgattattctatgtaggcatgttcaaactagttaaggcggaaagataaacaattataatgcgtgcttgtacgcttgagacttatataactgaagaatcatatcttgatctcacgtgtcttattatggtatggcttcaagggccttaaacttaacacaaaat

SEQ ID NO: 238932 - DNA, 449 bp, Glycine max
  unsure (1)..(449): unsure at all n locations
tgaccaactgacctgctaagcgaggttgagttggactaacagtgttgagttatataattgggcatatatggaccaaattgataagcttgttggactatattggactcaagaaacacagttctgaattcaactgagcttaatatagcccgatatttgttaatctatttatattttgaatcaatatgaattcatactaatatagttaaacgggtcaatatggattggcttgacaggccactatacctgtgtggacttcngaatatatgatcatattgcatatgagctatctagacctaaaccatatatcatgcttgacccaatggatgtagccaaactgacccacccattttgctgactatatcgatgggctatacgatgttgtgtatggtgaaaatctaatatgaatatttccactgagtgtgttccctacatgtggcttgaccccagga

SEQ ID NO: 238933 - DNA, 452 bp, Glycine max
  unsure (1)..(452): unsure at all n locations
agctntttgtaagccctttcaatgactttttcctcaatcgtatactgggtaattaccatgatatgagacattgacacaaatagtaaataactaggaagcacaacacttcaaaatgacttccaaaccagtgtcaaacacatcttgaaaacctttgaatattcctaccttacatattttaatgattttgagattttgtgccaatacaagatgccacaatgcttagaagtgttttattgtatctacagtgatatgtgcttacttatgaaacatggtgtccttattctaatttggtattggccatttatgccaaaaaagtattaattttatctgttgtacttaggctgagtaatatattntttagaattttctgtagctgcagccaagtgacatcttataactgtgtccagtgctagtattagtgatttctagatagaagcctaactatgatgaac

SEQ ID NO: 238934 - DNA, 455 bp, Glycine max
tcatgtcaaagagagaacgtttttctctgtccaaaagcactctttgagctttctccaatcaacttaaatgcagcttctgcaccagcaaagttgtttttgtcaggatgaagttggagagcaaacttgctatattgcttcttaattattgcatcaccagctgtctgttcgacctgaagaatttcataccaatccatctcattaccatacaatttctgctcagcagagcagtgcacatcacaaacaacaagcatttgagctatattttccagatcaaggtacagctgctgagcctttagagcaactttgcgagccccaacaaaatccctgttttccatcttcttttcagaatgtccttggcccttaaggcctcttctttattgcagtccatcaaagatccagatgggaaaatattatagtggatgctatggccaagtgaagctacatttaatccaaca

SEQ ID NO: 238935 - DNA, 374 bp, Glycine max
ttaagtcacctgcggcatgccaagcttgagccaaaatcctgactcaccataaactttgacccatggtgagaatgtcaattcttaccctcggaagcaaaaaaaaaggggagagggaaaatttccaatcaaagaggaagcaaaaaaggagagaaggaaaatttccaatcaaaggaaaaaaagagaggaaagggaattcccaatcaaagagtgggagaaagcaaaaagaaaagaaagaaaattcccaatcaaagaatgggagaaagaaaaaagagaagaagaaagggaagaaagttcccgatcaaaaaaaaataatatgcagaaaggtctttggaccgtacaatatctgaacaatacagaattgtcatcaaatgaat

SEQ ID NO: 238936 - DNA, 462 bp, Glycine max
ggagatgaggaagtgttgaagggtgaaacttcctgcttttattgttgaccatagagtggtacctggagatatgtcgcgggggtcaggagaccttggggacgtcaggtggggtgctattgcccaaaaccaagcttgaccaatcccgacccaacccgggcatagtcggtcagtgagaacctgtgatgtacctaagcaggcgagctcctggcagtcaacagataaaatgaaaacatgaccacaaagcaaggaggcttgtggtggctggccagctgtgaattttgtgtaatatgtggattgtggcctctggtaatcgattaccaaaggtgagtaatcgattacaaggcttaaaattgaggacaggaggctaagatggtctctggtaatcgattaccaaggggtgtaatcgattaccaggcttgaaaacgaagtcacgaaacttacggagcctctggtaatcgatta

SEQ ID NO: 238937 - DNA, 433 bp, Glycine max
  unsure (1)..(433): unsure at all n locations
agcttcctctaccggtgaaaaaacattgtcggttctcgcttgtaaaaaaattgcgcaatgtcggctgaaaaacatcagttggggctgtttaactaccgatgctggctactgttttttctattccacccctgaataatacttggacgatgtcgatttggaaatgttcgatcggagtcatccggtcatgcttctttttaagacctcgatctgtcatcttttcctggccgacgtcggctagcatttttttcgatcaatatcggtgaatcatgctttttgccaaggtgggctaacgttttcgtggctgatgaaatgagagcatgccagtgtcggtcgaaacacaatctcgcacgaaaaaccctagccgacctacattgtaatttttgtaggcaataccgaacagcanaacttcgtctaccataaagaaatattatcg

SEQ ID NO: 238938 - DNA, 451 bp, Glycine max
ttttctgttcggtattgcctaacaaattcgcaatgtagttcgtctaggtttcttcgtgcgagctcaaccgaagttgtatttcggccgacaccggcattttgtcggccaggaaaacattagcccacctcggcaaaaaaacatgattcaccggtattgacagaaaaaaatgctagccttagtcggccaggaaagatgaccgatcgaggtctaataaagaagcatgaccgaatacgccgatcgaacatttcctaatagatatcctccaagtattattcagggattgaatggaaaaaacaatagccgacatcggtagttaaatagccaacattgcgcaatttctttcacaaacgctggccgataatatttctttagggtaaatgatgctttcgttgttgggtgtcagctataaaattttcaatgtaggtcggctaggttttttcgtgcgagctca

SEQ ID NO: 238939 - DNA, 378 bp, Glycine max
  unsure (1)..(378): unsure at all n locations
gcaagcttgctcagctagctgatataatcatgcatacttttctgatgatgaccgaggaacaattagggatcaacttgaaacttatgtgcttcacgtgagaagaaatgcttctttttccacttgtgaagatgttcaaagtttggctatgaagatggttcaaactgagaaacatttggtatttccattggtttataaacttattgagctagctttgatattgccggtgtcgacagcatccgttgaaagagctttttcagcaatgaagattatcaagtctaaattgcgcaataagatcaacgatgtgtggttcaatgacttgatggtatgttacaccgagcgggagatattcaagtcacttgatgatatngatattattcg

SEQ ID NO: 238940 - DNA, 457 bp, Glycine max
  unsure (1)..(457): unsure at all n locations
tctgccttgaagcactgagcctagcagcagaagagagggagatcacacaccccataagcagaaaacaagaacaagagttacaccacaaccacaactagaacccataacaaaaacacccttcaaagaatgcaccttcaaactcaacctcggagtctccaaacacaagttgacacccctcaaaacccttcaagagtgaaacttgcccncttttcaccttcttcagccacaaaaaaaaaaattccaatgggactcactagccttgtttctcacttcctatgagggcaacaagggtacccactaaacagccacactaagcttaccctcttttgttttattccctctttcttaaaaactctcttttctctctctctctctctctctctccttccactntccatatcatatatcatattatattatattaaattaaataactcgttaaataattaaacaaaaa

SEQ ID NO: 238941 - DNA, 428 bp, Glycine max
  unsure (1)..(428): unsure at all n locations
agctntaaggtttctacagngttgctgcggtgactaagctttacttcttttgtttctgttacctatatttttgcccttttaatttttaactcttacaattgttttgccctttcaatttcttgccctttctttaatatttttcttttaattttctccatttttatgtttgtgtaaaattatttcataatttatatataagtatttatttattataaattataaattttagttatataaaataaacattcactaaaatactagtaattgataaatgtacaacttagatttatagaacaacatcacatgatatttgctttaagctcatnagtaaattgtgaaaaagcttaccaataataatgaattcatgtgagtggtgtttctatagttgttattaccctattgcatgaattatcgtaattattgtttac

SEQ ID NO: 238942 - DNA, 355 bp, Glycine max
  unsure (1)..(355): unsure at all n locations
gagaatgagagagagagagagaaagagagagagtggccgagaaattgaaggagaataaggagagaagttgaactttgaagtgtgtctcataagtttctcattcaacaaagttgggacaagtgttacacatgtttctatttatagcctaggtcactaaccgtgtgaatttcattntcatttcatgtgaacctaaaagggatattccaagaatatgccaaaggcattttagtatattccctttagatgtcacaagcatggaagttgtggctctagcacataagaagcttccttgagaagcangaaggtagcttccttgggaagcaaggaagaaagcttccttgagaagctagagggg

SEQ ID NO: 238943 - DNA, 422 bp, Glycine max
  unsure (1)..(422): unsure at all n locations
agctntctcgctgcanaattcacttcttagttggtgtttttggtttgtgctaaaggtggtgttcgtcattggaagtgcggtaaacagactttgtggtagatttaaggatggcctttgtggataactgggtggtgggtaaagaggtggtttgttattgactgagtaatgacattgttgggtttggtgggaaacttggccgtataagaatggcagtcacagcatgggtttctcccttcatctcaccctctttatttgccccaagtttctaagtcgtcctagtaggatgatcaaatttgcctcttttcggacccacatcgatcctttcactggcgaagaccaaatccgctaagctttgagggtgcgtagcccaccatcttttcatagtagagtatcgataatgtgtctaccatcacgatcatcgt

SEQ ID NO: 238944 - DNA, 174 bp, Glycine max
cttcacaaagagctacatcacccttccccttaaaaaggatttgacctcaaattcagagggtcttaaaactggagaccatggatcaagctgaatggtttgatgatgcccaaggatcacatggatcacatgcttctcaaagctttattccagaccaagaaatttaagatatttaag

SEQ ID NO: 238945 - DNA, 398 bp, Glycine max
  unsure (1)..(398): unsure at all n locations
agctngcatgatttacatctccccctttctcatgtaaattcttcttgatatcatcaaaatcttcatgatttacattctccctctttttgatgatgacaaccacctgtaggttaggagcaacaacaaagaaaatatctatttgcatatagttntactcccccttggttttacattgattgcttatatgagacaaatgaagatttcatatttttcatatataaaaagttgtctcataaaacaataaataatttttcttactattttatcttttatctttctctccccctttgtcaacatcaaaaacaaatcatgaatagagaggagaaagatgttaccacttgttgcaatgtatgagaatcaagtgatactcaaaggcattaaaacaatcattcaatatt

SEQ ID NO: 238946 - DNA, 450 bp, Glycine max
  unsure (1)..(450): unsure at all n locations
tgttagctntaaggaggtacctctgagatactacatacctacattggttgtgcccttaaggtatttaatgatccttttaacggctgttaagtgagattcctttggattggccatatatcttgcacacaagcaaacacttagcatgatatccggtctacttgcagttaggtagagaagtaatccaatcatacctctatatcttaactcatccactgatttacctttctcatctaagtcaaggtaggttgaagttgcattggagtatatgcttctttgcatttttccatacagaatttcttaattagttatatacaataattggttcgactaaggaaggttccattctttatctgcttgacctggagtcaaagaaagaagttcaattctctaatcatatacatctcanattctttctacatacaacttgaaaattccttacacaaaatttca

SEQ ID NO: 238947 - DNA, 387 bp, Glycine max
  unsure (1)..(387): unsure at all n locations
agcttggagatgatgcttcaatggatganaagtatganggagagaaagagggaggggggagcacgaaattgaaggaagaaaaagggagagaagttgaactttgagttgtgtctcacaagactctcattcatcacagttacaacaagtgttacacatgcttctatttatagactaggtagcttccttgagaagctttcttaanaaaacttccttaagaagcttctttgagaaaacttccttgagaagctagagcttagctacacacacccatctaaaaactaagttcacctccttgagaagcttccttgagaagctagagcttagctacacacacccatctaaaaactaagctcaccttcttgacaaaatacatgaaaataaaaaaaa

SEQ ID NO: 238948 - DNA, 445 bp, Glycine max
  unsure (1)..(445): unsure at all n locations
gtacagcagatgtcactctactccaaattcttgaaggatatgtttacaaggaaacataagtacattcactaggaaaacattgtagtggaaggaaattgtagcactgtgattcaaaagatccttccacctaagcataaagaccctgagagtgtaactattccttgttcaattggagaagtcactgtgggaaaggctcttattgacttangagccagtataaatntaatgtcactctccatgtgtagaaggttgggagagttggagataatgcccactaaaatgactttacaaatggttgaccgctctattaccagaccatatggagtaattgaagatgtgctggtcagagtgaaacattttatcttcctgacagacttcgtggtaatggatatctgtgaagatactgacattcctgtaatattgggaagggcattcatgttaactg

SEQ ID NO: 238949 - DNA, 431 bp, Glycine max
  unsure (1)..(431): unsure at all n locations
agctntgattagtgtatatgttacactaaagttatattggatcttattgagtttcaattaatcattagtgcatatgttacactaaagtcatatattgggtctaattgggtttcaatcaatcattagtgtatatgttacactaaagtcgtatattgggccttgattaggtttcaatcaatcattagtgcgtatgttacactaaagtgatattgagcattgattgagtcttattgggtttcaatcaatcattagtgtatattttacactaaagtcatattggaaagtgttgaatgcataagttacacattgaatcttaataaatcattattgggtcttggttagtgaatatgttaaattaaggcttaattgcaaaattcatcccgctattttgcctatttcaccaaatcggtcccnctatttttaattcacta

SEQ ID NO: 238950 - DNA, 439 bp, Glycine max
  unsure (1)..(439): unsure at all n locations
tctcccncaattntctataaatagggggagaagtgaagtagattagggttcagccttcttggcatttctccctctctcgaaattgctgaggaaaattatttccgtgaagaaaatccaagccgaggcgcttccgtaacgtttccgtgagtaattacgcgaagattctcgaccgttcttcaacattcatcgttcgttcttcgttttcttcagtcttcaacgggtaagtacctcaaaccgaggttttcaattcattctatgtactcgtggtggtccacattttgtttcatgtatttttattctcgttttcattcgctttctatactcccttttgacgtgcttaagtcattntatttaagtcatttctcgcctaatctaaaaataaaataaatttccaccgatcgtttgaattgtatcatccgttaatttcggttaaaatgaa

SEQ ID NO: 238951 - DNA, 355 bp, Glycine max
  unsure (1)..(355): unsure at all n locations
agctntgagccaaagtcccaactcaccataaacttttccctcaaaaggaaacaaaaaaaaaaggagaaagaggaaaggagaacaggagaaaattcccaatcaaagagtgggagaaagcaaaaaaaaagaaaagaaggaaagttcccaatcaaagagtgggagaaagcaaaaaagaaaagaaggaaaattcccaaatcaaagagtatgaagaagaaaagaaaggaaagaaaattcccgatcaatgatcgaaagaaaacagaagacatatgcataaaggtcttttagaccagaccacatctgaacaaatacagagttactaccaagtagacacaaaagaagggggggaaaaccatga

SEQ ID NO: 238952 - DNA, 457 bp, Glycine max
  unsure (1)..(457): unsure at all n locations
nggaagattatggggtacccatcacatgtggtactaggaggttgtcgggctatgtttcacaacaagttttccacatgcactaatggcgcataaacccaccatccgctgttgcccacctccaactgagctcacgtactcccacgtagcccatatcctcgtgtctctcaacaccgggtcttcatcaatcctcccaagcttgcccagcatccaagtnattcaacacccaaatcatcacaaactaacaaaccaagcaaaacagggcaaaggcataatactctgcccaaaacacaactcaaaatcacagctttgcacatacaaataccccagtaacatgtccttctgtccaattcgttaaccgttggatcgactctaaaattttactggaagtctctagtacatacgtttacattctgaccgttgggatctgctaggaaacatacagaactattctgcactc

SEQ ID NO: 238953 - DNA, 507 bp, Glycine max
  unsure (1)..(507): unsure at all n locations
ccgcntcgattgggctgagactatctattacgcgacactatgaatactaagcctgtttattgacatcatggttgaagctaattaattttctatttcatttaaagggatatggctgcacgtttgaacaggacgatttaactcgttcccaattagtactggaccaagcggaactacatgccaactgctagacacattcgatggatgatgcataacaggctgtacttagtctgttactggaaatacgatgagccgagcccacgaggtttatgatctgcgctataactctagttatggagagtgttatatttgataagtgtgtaggcgaaccctacatacaatctgctgatttcttgaagcgctttctgtcagatgatgcgaggacgaatgtaaaaatacattgtgattgacattccaattctattgttagtctatattaaaaagatcactctcaaattattacgactaaggaaactaacactacaagttgtgactcacaaatcaattctg

SEQ ID NO: 238954 - DNA, 432 bp, Glycine max
agcttcttagtttcagatgatgcagatgggtttgttttacctcatgcactcctctaatgactatggcatcatttctggcgctaaactgctgggagttggaggccatcttctcaattaaatttctggcttcaacaagagtcatgtctccaaaggctccaccactggcagcatctatcatacttctctccatattactgagtccttcataaaaatgttggaaaagaagctgttctgaaatctgatggtgagggcaactggcacatagtttcttaaatcgctcccagtactcatacaggctctctccactgagttgtctaatacctgagatatctttcctgatggctgtggtcctggaagcacggaaaaaaatttctaaaaatactctcttagggtcatcccagctcgtgatggaccttggagcaaggtaataca

SEQ ID NO: 238955 - DNA, 414 bp, Glycine max
gcaactgactgtagtattacaagatcagattaagattaaaaaaaaaagccaaattgtcccaaacaatgctctctcaagtaggatcaatatctgaaaaatgaaatgttaaatttagaaatctaagtaaatattgattcctaattttttaaatgttggaaagacttggaagacaaaaattgcattaaaatagaaaatgcaaaacatatagtgggactgagacacattagcagcgtttcctcaactcaaaaattataagaatcagaagtaaagagtatgttaagagtgtggtaacatactctaacaagctttgatcaaatgactaatattaattggcaaaaaagatatttagcagatagcccaaccaacttcactatgtctagttagaaattccaatattctatattacctgctcat

SEQ ID NO: 238956 - DNA, 453 bp, Glycine max
  unsure (1)..(453): unsure at all n locations
agcttcattcctttntcactcatgtgtccaagtctttgatgctcacatggttgaattattgacagcctcagtaattgctaccatatcctcatctgcaatcatgtaaagagatcctcgcttctttccacgagccacaatgagattgccttttgttaccttccaagctccatctccaaaaggggtgtaatgtccctcatcatccaactgccctatagatattaaatttctctttaaggcaggaatatgtctgacattgtgcaatgtccatagggatccactagaggtcttaatgttgatatcacctcttccgacaatgtcaagagattttccatctgcaaggtaaactttttcaaatcttccagaaacatagttagacaataaatctttagagggagtagtgtggaacgacgcacctgagtccatgatccatgaatcaacaggactatccaaact

SEQ ID NO: 238957 - DNA, 445 bp, Glycine max
  unsure (1)..(445): unsure at all n locations
tggttcgaggtacttacccgttgaagatcgaagaacgatgaataacgaatgttgaacgtcgaagaacgggtgaaacctttgcgagattcctcacggaaaacgttactgaaacgtttcggaagcgcctcggcttataatttcttcacggaaacaatttttccaagcaaattcgaaagagagagaagtgcctaaggggctgaaccccttccttcttcactttctcccctatttatagcaaaatatgggaggtggttgccgcccagctctgccaggcgagcacggttgcttccttcannaacaaccnccntctggaggaatattccggagggcccaagtgggcctgggtgctatttgcacacccattttactaagacaccctcctctgctgtgtttttggtgatcctttttcgtaaagttccgaaacttacgaattatgtcacgatac

SEQ ID NO: 238958 - DNA, 415 bp, Glycine max
  unsure (1)..(415): unsure at all n locations
agcttattaaccaagatgcatagaccaaaggccacaagtattaccacctatgttggnntagaaccatgacaataccatggaattgaaatcaaccattgcaaacggtagtagattaatttggtgtgtcccaaagaaagtgatgtgtcttcggttcaaatattttttttaacaaatattatctcattactttattatctcttgatatgctgtcacactgacactaaatgttggacagataaccagaaagtatatgtagaacaagagcaacattntggccatattctggtatgacttcatagcttcattataaatttcacaatcagtacatcacaagacacgctcaagaactagtcaaggatacaactacgatacatttcaatgcacataaataagcaataaagcataatgtaacata

SEQ ID NO: 238959 - DNA, 422 bp, Glycine max
ttaccaccaagagagtgtcttagataagaagcttagagaggaatcttcaatggaggaagaaaataagagagagggagagagagtgtggtgtggaaattgaaggataatagggaaagaagttgaactttgaagtgtgtctcacaagtttcacattcatcaaagttgtgacaagtgttacacatgtttctatttatattctaggtcactaacttttgtgaatttcatttacatttcatgtgaatctaaaatgaatattccaagaatatgccaaaggcatcttagagtattccctttagatgccacaagcatggaagatgtgactctagcacatggaaagcttccttgagaagcaaggaaggtagcttccttatgaagcaaggaagatagcttccttgagaagctagagggagggcacatgcact

SEQ ID NO: 238960 - DNA, 318 bp, Glycine max
  unsure (1)..(318): unsure at all n locations
agacttgcttccacanaatagtctctgtcgaattacgctgacatctcccggaaaggtgcagatgaccacattggtctctgcgtgtcatcggacttggggtctccgaataacgaggtgcggataaccgtaaagtgctctgcatgccatcgaactcttgggtcgctggatagcaagaaggtgacactaaatagtctcagtcggaagacgctcacagctccaggaagagtgcagattaccacattggtctctacatgtcattggacttgtggtgtccaaatgatgaggtgctaataaccgtaaggtgtctccgcattccac

SEQ ID NO: 238961 - DNA, 451 bp, Glycine max
  unsure (1)..(451): unsure at all n locations
ntgatataatgcatcctttgtatttataggtatagaggatctatccacttgaaagtgtcaacaacagactcagtacaatgcattaaattagtacgacataaatttgatcaacaatgaattagtatatatagctacaccttattcaatccaagaatggaaaaagggaatcagtggttaagaatgaacatgggtcaagcttgagtcaggttttttgaagccaaaccgaatgaaaatggttaggttgagtgtgttaaatgtgactgtctcaacccaacctaatcacaattgggttgtgccaaagtcaggtcattagattagatattcggggaaaaatggaagaaaaaaaaacacaaaaataggggtagagtagggaaaaggtaattttgtcccaaatttatgggaggcactgggtaagaattgaaatggtcaaagaaaatattatacacacact

SEQ ID NO: 238962 - DNA, 450 bp, Glycine max
  unsure (1)..(450): unsure at all n locations
agcttaagctctacctagggngcatttaagcacttttggtatgcaaagtcacgttttgctgctaactctcctttaatggatcccaaatgaactccaactaaaatctttcaatgttaaacatgaacattgaattaaaaatgcatctaaaggacatatatcaacaatcaaactcattaaacataagagcaaagttggtttaagctttccttacctatcctaatttaatgaacttgctttgagatgaaagaaggaagaaaggattgggttcaagatgcaagctttctttcactcacacaacaactttaaatcatccacaccacccaaaaccaaaaaaccaacagaaatcacatcaaaaccttgaaaacgaacacttttataaacttccaaaagtgctcatgggagaaaaataaaaatggaggaagaaagaggaaagtggagagtttcttacca

SEQ ID NO: 238963 - DNA, 452 bp, Glycine max
  unsure (1)..(452): unsure at all n locations
tgtattattgacatcatggttgaagctaattaatttcctttcgtatataaagggatatggctgcacgtttgaacatgatgtatntacttttttccttagtgtctttgtttttagttttactatgttgcagtttttgttgttcttggttgatgcgcctacctcaccttattaatcattatacttataatagaatcttattattcttttggtttaattattggtgntataattttattatttgtatattttactctttatagtttaaaattggtttttttagttcttataatttatattttaattctcttttaatctttntaggttaaaagtgatattttttatttttataatttacatttcaattctcttttagtctatataaaaagatcactttcaaattataaagactaaaaaaaaattaaaatacaaattaaagactaaaaaatccattt

SEQ ID NO: 238964 - DNA, 352 bp, Glycine max
  unsure (1)..(352): unsure at all n locations
agcttaaactcactagcattcatatattgtttatgcgtataatataaacccactcagtagtaggcttgtgagactttttttcgaaggtattatcaaatataaaatatacttataaagacatttacgggcatgtaagacgtggcttttactctgaaaataattatccaaacgtggctattgcgagaaaaaaaaacccttgattaaggaatataaaaggaaccgcaacctcaagagctaatgcttccgtattgttacattangctggtgccatctcctccatatatatatatatatcggatcacagatcagaatgcctattaatctattgcattagtgatgaattctactagtg

SEQ ID NO: 238965 - DNA, 356 bp, Glycine max
  unsure (1)..(356): unsure at all n locations
cttaaactcttgacactaacaactcttaacacccctcaagcttatgcatagatcttaatgataccgatcttgttgacatcatagcatacccaagtcaaagcctttgtgaataaatttgtaagttggtcaatgcttaacaccaaagaacataaggcagagaacactatggagcatatacacgnaaaaagtatcttaatagggttcctaaacgcataatcaatgtattaagctggtacacaaatttcccagatcaaatgatgcgttagaagccagtctctcatcaacatgatgataatgtaatagtgatgacaaagattagattgtcaaatattcctagaatatagaatctggtttat

SEQ ID NO: 238966 - DNA, 356 bp, Glycine max
  unsure (1)..(356): unsure at all n locations
agcnttgagccaaaatcctgactcaccataaatcttgacccagggtgagaatgtcgatccttaccctcggaagcaaaaaaaaagagaaggaaaatttccaatcaaaggaaaaaggagaaggaaaatttctaatcaaagaggaagcaaaacaaggagagaaggaaaatttccaatcaaagagaaagctaaaagaaaagaaagaaaaattcccaatctaagaatgagagaaagaaaaaaagagaagttaaaaagaagaaagctcctggtcaaagaaaccagaagaaatgtgccgagaggtccttggaccagacgatatctgaacaatacagaattgtcaccaaatgaacaaaagaaag

SEQ ID NO: 238967 - DNA, 454 bp, Glycine max
  unsure (1)..(454): unsure at all n locations
atccttatggcatgcctncgaactttcacccnccgttgcccacttctggaatgatnntaagccaaagccccctactttttganggnngcaactcccacctttatgaagactatcccccggcaagacgaatgggaaggagatacccatcttggcccccttgctcacctcanagatccatncncgcatgaacnntacccaaccgaacatagtccgccatatcccggnctcacccacacccgtaaaagaatctgttcccttcgcggaagataaaggaaagattgangcgctngaagagaggttaagagcagtcgagggccttggcaatacccattctcgganttgcagattgtgtcttgtgccaacatcgtcatccttccaagttcaaagaccgactttgtaagtcaaaggacgactgtcgaagggcatttcgatgattgcgaagatgggcgtattn

SEQ ID NO: 238968 - DNA, 441 bp, Glycine max
  unsure (1)..(441): unsure at all n locations
agcttcttgagaaaactacatggagctgcctctgtataaacgctgcccagccttcgttaaccgttggatcttctcgaaatttggtttgcaacttcacaagacactttaccatgatttaacccgtgggatctttgagaaaatatctggagtgtgctagaagcttccgttcccgagagcatctcttatttaagcatttcagcctttgctttcttgtagcttaggaaaaatcccatttcttcttctttctttcttccaaatccatttctaaagttccaagtactttctccatcacccacaaatcatcatttttctccattgaaaacccacaccgagaggaacccttcaaccgaagcagaatttccaacttggcttgcggnttcggtagagaacgaanaccctaatatgatctttcgttttctttcgagggtaaccatggtctat

SEQ ID NO: 238969 - DNA, 457 bp, Glycine max
  unsure (1)..(457): unsure at all n locations
ggggcaagtttgtgccttcaaagtgaggcaacaaactttcctttgtgagtttagctcgcctgggcaaatttttctgcacctcttggctcttttctataaatagccatgtcaagtaagaaaagagggacattggaaggtagagagaaacctgagaaacaccagaaggaggaaggaagtggaaagtggagctcgagcactatagagttgtgaccgaggatcacatccttcgtattattggtaatttcattttgttcgtaatgctttattctatntgatcactagtttcatgaaatttgattttaagtttcactagaaagtactctntgaatttgaactgaatgaatttactctttacgttacattgctaggaatagagcataacattttgattgcaaatagcacgcaattatgattgtaatgttggggtatttacttcatatgcgagggatcaatattc

SEQ ID NO: 238970 - DNA, 301 bp, Glycine max
  unsure (1)..(301): unsure at all n locations
caagcttgtccgcanaaatcactgataactgttttaaggtccaacgccttaaacaatcctctntgcttttatcggntaacatggaccgttcgaaagcgtaaaatcaacacatcactttactgcctttcaaaagaactacgtaggtctaattttctcttcgatggagggtacgtaggagcaaaagccaagccgacgtatgtgacttggagggaagtcttttgttatagccgccaagccgacgtgataacgttggaatttatattgggggagagttgtgttgtgttatgaactcttccttagt

SEQ ID NO: 238971 - DNA, 452 bp, Glycine max
  unsure (1)..(452): unsure at all n locations
ggcttctacattnttcatggtaccaattggttctttctttgtatagcttggatgattcatatgcgttgaggcgcatctctttaagttcctgtagctttaccttcctcctctctctacatgttgtagagtcaaagttgaggaacttcatggcccaataagcttttatttctaactacccttgtaggtggcatgcttttccgtacaccatttgaaacggngagaggccaatgggtggtttgaaggttgttttatatgcccataggcaatcatcaagctttgcagcccaatccttccttgaagtagctacggtcttttctagtatcctcttgatcctccctatttgaaacttcatcttattcatatgtttgtgaataatagggtgatactactttatgttgaacattatagtattggaggacctttgagagttgagcattacaaaagtgtgtacc

SEQ ID NO: 238972 - DNA, 342 bp, Glycine max
  unsure (1)..(342): unsure at all n locations
agcttgactggtctttaactcaagaagaanaaaatgttttaatatttaccttgttgatcattttatccagcatatacttttcactttntatcaattagtaggccattttgattcctgtatacaatttgtattttattctttagtgttgactcttgactcattttttttattctaattggtgtttctccattatacttctgctcttttagaaattctcatagatacattaattaaaaaaaaaagccaatgcaataccgaaaaaaattaaaaaaaaggcaaaaaaaaaagtcaatacaataccaaaaaaaaaataaaaaaagaataaaaaaaaggccatactac

SEQ ID NO: 238973 - DNA, 446 bp, Glycine max
  unsure (1)..(446): unsure at all n locations
tgctcanacagacaacaatggtagctttgggatgcattccatgtatctgaaaaggacaataggcttattctggaggaaattatgttaggttctaaaggctacatgaaccaatcaaccttagcagcatcctatctttggatgcaattaccacatgcagattaaacaaaaccagtaattctagagcttcttttgaccttccagactacttcatgacatttctctatgtactntaccttattaatngtaatgatagttatatgtgaaacaattaaaattcttatagtattgaatgctttgtatagaggagttattattcacaccttcattacataatccaaaacgttacctaataaccagtaatttaacaatgaatcaataagcaaaaggaaaccaatcagcacctaacacaaacacaacataccaaagaggagaataatttgctattg

SEQ ID NO: 238974 - DNA, 377 bp, Glycine max
agcttaggaacccaaacttgtagcttcaatgcattgaaacatgcttaaatttggttttagagttagaaaaacatgaaaattatgattttcttgtgagagtttttgctcgaatttgggttgccccatgtttgatactttacataaaggtagcatggaaaacaccttgcaatagtgtgtatacataggtaaatataagaagtatgaaatccctagcaaagtgtgaatgattgtcttcctagatgaatgtatgatagtgtggaatgccttttttgaatgcaaatatgtgcaggatgtaattagttttccaatatgcatataaataaataggagtgaaacagtaaaaatttgtatggtgtacttcaaatgtatgtaagtag

SEQ ID NO: 238975 - DNA, 435 bp, Glycine max
  unsure (1)..(435): unsure at all n locations
nntacagcagatttagtaatgacccactaacctagaattaaaataacttaatgcctttaacctagggaattaaaaaaaacttaatggctgagtgtaactgaaattgtggcaaccaaaagtcacccccaacagccaacaagtcagccaccatttggtctcccaaaaggctgatgcctaggttgccaattgggcccttattacaacttgaactaaacctaactaaagcccttttagttgattaacccaaaacatatttttggtcagccaactctacaaggattgggccattatttagacaaactaaacactctaaaattgagacaaggtggtgtcatttagtcctcctccatttgggccatgatacaactcacaaccttggacttttcttcttgaaacttgggcttgtattcaaatagtatggacagcacttgttga

SEQ ID NO: 238976 - DNA, 255 bp, Glycine max
  unsure (1)..(255): unsure at all n locations
tcttgtctctctttcttgacttcctcaacgtctcctttacaccttggcttaacgaggcttcatcttgctccttcaagcccttctctacgatatcccacacatcttgagctcctagtagcgccttcatcttgatactcccaattatcatagttgtctttgtgagcatcggcatttggaaaggaaaaccttcattcgccatcttttgaggatctttgagctctgataccacttntgtggaaataaggctttttatgt

SEQ ID NO: 238977 - DNA, 461 bp, Glycine max
  unsure (1)..(461): unsure at all n locations
tctcnncctatttgctataaatagggggagaagtgaagaagataagggttcagccccttaggcatttctctttctctcgaaattgctgagaaaaattatttccgtgaagaaaatccaagccgaggcgcttccgtaacgtttccgtgagtaattacgcgaagattctcgaccgttcttcaagattcatcgttcgttcttcgttttcttcagtcttcaacgggtaagtacctcaaactgagcttttcaattcattctatgtgcccgtggtggtccacattttgtttcatgtatttttattcttgttttcatttactttttatacccccttttgacgtgcttaagccatttatttaagtcatttcttacttaatttaaaaataaaataaatttccaccggtcgtttgaattgtatcatccgttaattntggttaaaatgaattccgaccgttcggtcgtgccgt

SEQ ID NO: 238978 - DNA, 452 bp, Glycine max
  unsure (1)..(452): unsure at all n locations
agcttcaccttctggtcctactcatagttgtggtatgagaaaacatgctctattttcatctcccactccaagtaggcctccggatcattctttcctttaaatggaggaatgttgagttcaataccatcaattctgttttgtctaagaacaccatcattccctcttctcctcctttcttcttcattatgatctctattctccatttgatccaacctctcatggagcgcatcatcttgttgcttcattaacctctccatatgttgcatcaaagcttgcatttggaattgcgaaagccccactccatcattacgattagtacctgacatctcanacaaaccaatcagacgtatcaagacaattatagttgctggttgaatacctcacccactcaagtgtatcacacaattatggcttttctctaatgaaacactcttgccttttaccactctaat

SEQ ID NO: 238979 - DNA, 237 bp, Glycine max
  unsure (1)..(237): unsure at all n locations
cgagatgaggaagcgngaagggtgaaacttcctgctctcattgtcgaccacagattggtacctggagatatgttgcgggggtcaggagaccttgtggacgtcaggtggggtgctattgcccagaaccaagcttgaccaatcccgacccaacccgggcatagtcggtcagtgagaacctgtgatgtacctaaacaggcgagctcctggcagtcatcagattaaaggaacatagaccac

SEQ ID NO: 238980 - DNA, 430 bp, Glycine max
agcttatgctgcaaacatttacaatagacctccttaacctcaacaacaaaatcaaccacagcagaacaattatgacctctccagcaatagatacaaccttggatggaggaatcaccctaatctcagatggtctagccctcaacaacaacaacagcaacctgctcctttcttccaaaatgttgctggcccaagcagaccatacattcctccaccaatccaacaacagcaacaaccccagaaacaacaaacagttgaggctcctccgcaaccttccctcgaagaacttgtgaggcaaatgactatgcagaacatgcagttttaacaagagaccagagcctccattcagagcttaactaatcagatgggacaattggctacacaattaaatcaacaacagtcctagaattctgacaagctgccttctcaagct

SEQ ID NO: 238981 - DNA, 538 bp, Glycine max
  unsure (1)..(538): unsure at all n locations
aagagaatagtgtcttattctcncttccttattaccgcncncctcttctttcgctannannnacacaactnctctgtttcttgagactatgcatcagcgacacttgaatgctcagctcacacagttatacttctcagactgagttgtggaagaccatttactaagtatttccgtattagaggacttagatgatgcatggtaatgtgtggagtgctatgatgtcgcaacctagaatcatgctttttacttaccaagcagcttagctcatgaaatgatgcatgttcacatttagcatgtagatattacctattgtttttcaaagaggacactttacccggntntnacgnnacttatttggaagatttcttgttgaatttccccccccccnnccccnnnnnnctnnnnnnnnnnnnnnnnnnnnnnnnnnnnnnnnaannnnnccnnnnngtnctccactattttcttgctattgctcaacatacatatctcactttgaccaagtcaaggttgcactgtactgtcatgtgcctaacaccat

SEQ ID NO: 238982 - DNA, 443 bp, Glycine max
  unsure (1)..(443): unsure at all n locations
ctctgcaagtcttagaaacttagtctgttagttgtacaaatttgctatgcaactctcataggtctctataaaatgtacaatgtaactaaaaatgtttgggaatgaaattaaatgtcacactttcgcaaattttacgcaatgctctctttctcttactctctatttctctctccctctatcttttagnttcaattcatttctaatagatgtcatccctctctttttgtgtactcaaagtcagaatctgtaatgtacagtctaatatatgtagaggatatcatagtcactgcaaatgactctaaacttgattagaaactagtttacctatntttcttaanagatcatggagatcttaatttatttttgcgaatngaagcagctaattaagtngatggctcacatatacttactccatctaagtatatgtgtattanggatctttt

SEQ ID NO: 238983 - DNA, 319 bp, Glycine max
tccttaagaagattcctaaagaagctagagcttagctacacatacctctctaataggtaagctcacctccttgagatgagaagctagagcttagctacacaccccctgtaatagctaagctcacccccatgacaaaaaacaagaaaatacaaaaaaaagtccttactacaaagactactcaaaatgccccgaaatacaaggctaaaaccctatactactgaatggccaaaatacaaggcccagacgaaggaaaaagctattctaatatttacaaagataagcgggctcatacttagcccatgggctcaaaatctaccct

SEQ ID NO: 238984 - DNA, 370 bp, Glycine max
agcttgtcacttttttgagtcactctttacagtcttaagtttacttcaattggtgtctgtatagaacttgtcttttcttaatacacttaagcaaactcataaataggcattaattgaaaaggcttatgatttgtgtttagaaggtttgtaataattaaagcatcaagggttttggactcaacaaattttccataacataagatgtaaaaacaattatcaaagagacattggagaacattcaccatacacggatagagagcaaatatgaactaatcaaattgaatggtacacatactgaaataataagggactaaacaataaatatctaaacttcatataactcggtaaaattacctgctacaacaagtca

SEQ ID NO: 238985 - DNA, 391 bp, Glycine max
tgaccaatcccgacccaacccgggcatagtcggtcattgagatcctgtgatgtacctaagcaggcgagctcctggcagtcaacagataaaaggaaaacaagaccacatagcaaggaggcttgtggtggctggccagctgtgaattttgtgtaatatgtggattgtggcctctggtaatcgattaccaaggggggggtaatcgattacaaggcttataaatgaagacagggggctaagatggtctctggtaatcgattaccaggggatgtaatcgattaccaggcttgaaaacgaggtcaggaagctaaggaagcctctggtaatcgattaccaaggggtgtaatcgattaccaggcttaaatagggaactgggagttgatgggagcctctg

SEQ ID NO: 238986 - DNA, 375 bp, Glycine max
  unsure (1)..(375): unsure at all n locations
agcttagtcctataccattgttcactgaactctttataactgttggggaacaggtccttaagtttcccacacctaaagtaattcaaggtagtacattaaaagcatattcctgatcctagcaatatttatattcataaataaacatggtaagctgatacatcttttgaaatgttttttatttggaacagtgaatctgtctggatggatgactgatgaagagtttgcaagagagatgattgctggagtaaatccacacattattaagaaacttgaggtaaatttactattgaactgttaagtacataacactantaaacatttatccacttgttaaatttgcagttgataaccttaactcattgcaaattatattta

SEQ ID NO: 238987 - DNA, 421 bp, Glycine max
  unsure (1)..(421): unsure at all n locations
tctcaccgggccaccttgatagtgcagtgactatgctgttccttcattatctgataagatttagtacatcctataagcaacataaagtatgtgattaataataatttaactaatgaaaaatcaaagcatctttacatgaactaatttccacgttgaatgatataaaagtgaatactgcataatctgcagtcttgatttgtttagcacctgctctatacaatcccaagtttttgttttgattttttntaagaagccttatagtttatactttatagaggtgtgccaccaggaaactagaattctaagcagagtttatgtctaaagcacttgaaaacctatttaaaatgttgttttgacgattcatttggagtaattntaaattttcctataatttttattaaaaagcttcctatttaataag

SEQ ID NO: 238988 - DNA, 240 bp, Glycine max
agcttataaaatttaaattcacatctttaaaagctgttataaacagtttaaactttgggtaatcgaatacataccttgtgtaatccaatacaggctttgaaattcaaactcaaaatttgcgaattatttcataaatcacatttaaccattggctgttcattaccagagaggaaatatcatatttttgagaatatacatgttcttaaaaaaaacttgtagaaatttcctttagccaaacct

SEQ ID NO: 238989 - DNA, 382 bp, Glycine max
  unsure (1)..(382): unsure at all n locations
acaccactgtcgttgtgaacaatggatccatttgtaaaaataaaacctaatgtagagttcacaattgtctgactgcttgtctctcccaagaatgccatagttttttntgtaagagttgggttatgactgaaacttgtggttttttacagtcttangcgatgtcatatatatatatatatatgagttttaatatcagtgttgcattttttaaagattaaaaatacacatacacatgctttcttatgtgttgttaactacaccaatgacgtgacacactttatcttgcatcagatctacatgtgtagtcatgttgtgcaaggtcttgtcacgcactttatgttaatgcagacaacaatttatcatacatgttttttacaatgtg

SEQ ID NO: 238990 - DNA, 382 bp, Glycine max
  unsure (1)..(382): unsure at all n locations
agctngcacatgcataaatagnatataagcaatgttttgtgtaagaaggatgcacatgctagtcaaagttcttatctcgtgaaacatgcttatagggtctcttacatgaaatgatcatacctgtggaatcttgccagaaataaagctagtctataaaaacttgtatcacagaccactaaaaaattataagttgtgtttattggactccaagtgatgcattaatattatacaagttaagatatcagaagggaacactttggcaaaaaaccaatactttgtgtaaccattaccttacaccacccaactttcattctntaccattgatatgttcatccttctatccatttgttgtgttcttgattgtcaaccaatgacacatgca

SEQ ID NO: 238991 - DNA, 458 bp, Glycine max
ggcatcaaacaaccgcctatgagcatcatgatatgagctttaacatactgtgctatgaccatatcatcaacatcatgaagttgctgaaaattttgtcgcaaccagcttaaataaatcattttactctttacatacttatcaggtggagtttttcctagtaatgtctaatgagcaacacgtacatcatcggtgaggataccagttactggcaatccatcaatcttcaagcgcaactgtatgcccacatcatgtaaagtaatggttgcctctccatgtgaaaaatgaaatgtgtgcgtctcgggtctccaacgtactaaccacatgctggttaatatcaacttttctgacatttataacatgactgaaaccagctaaagtgaattacatttttacccgattatctatccgatccaagtggatgaaagcgcaaacaaaattatacctcgaacaaatcattc

SEQ ID NO: 238992 - DNA, 452 bp, Glycine max
  unsure (1)..(452): unsure at all n locations
agctntgcagaggtcaatcaaaggcatttattactgtaagatctctccaatgctcatgaaagcaattggacagacaagcagtgatagtgaacattaatatcccgataaaattaaagggtaatgttaaaataaataaaagagtaaataactaaatataaattatttcatctaagataaaatatataaatttgtgagagaatcttttaataagatataatgtttaaggattaattagataataaattatattntttataattaaattgatattaagttttaaaatttaggattaatttataattaattctttttagaattaatttatctcactttttatatatttaaaaattaagtttaaattttttatcttttaagaataatttattgcacttatcacttttaaggataaattaactattttagtattatcataaataacaaataacaaatgt

SEQ ID NO: 238993 - DNA, 458 bp, Glycine max
  unsure (1)..(458): unsure at all n locations
tgttgagtgctcgaaggatttaattgctctgcttatttggattcttattagtaaaggggccaagctacttactgggcctctattttttacacctttaatgcttgttagtcctgttattatgtattcatatatgcacggccgtttaaactgtcatcgtaactgactttttaatagttgctgtaatgatgggtattatttgcttattggcacagcatgttactctagctagcttagaaaggtgtacggtttggaatttagtgtctgggtaggatttattgattgtagtgtggtcatgtcattatgcagtgtttacagaggtttatttttagttgaactctatcaagttaaggaaacaagagtccagaggtttatttttttgaatgatgagcaacttgatttactggnttcatatcacatcctttgagttagaatgctgatggtctagtagtgcagttaca

SEQ ID NO: 238994 - DNA, 365 bp, Glycine max
agcttttagatgtcttagattgacaattgaatgtatcatctgctgctaccgtaatattagaagttttcttatattaaacgtgccaccactaaaaacaactcatttattcaatattaatgatttggttaccctcgatacaattggactgcttttggtgatacaattgatgatttatatgcttcttacaaattgatgtatgaattagactacatcttagaaacagtgaaggagataaattgatgtacaaattatatcaaatgttaagaacagtgaaggagaaaaattgaagccacattggcaactatatgtagtcatactctcacgtcttaattgtttctggctaactagttgtgaattaattccat

SEQ ID NO: 238995 - DNA, 444 bp, Glycine max
  unsure (1)..(444): unsure at all n locations
tgatagaggccgngtggttgactnttcaagagggcggacccttcataaaaacaaagtcgcttgccaatcatggaggggggcggttaatgccatcgaggtgaatgggtcacacgggcccaagcttttggaggacgtaaagacccccagaaggtttatctacaaggccttgcaaaaggtgggcatgattccctgcggcaggcgcagagaagactcttgctaaatgcatccgggtgtactccatgacatggaaacatgttcggcagtaagagatctattacaatggatgatagaccaaggccggcttaaggtcggcagtgagagggaggaggaacaacatgtatacatgcagtcggcagatgaagaaggacctaaaaagcctaaacccttggtaatacacttcactaggaacacggctccccaaagacctcaacacccctcggtagt

SEQ ID NO: 238996 - DNA, 340 bp, Glycine max
  unsure (1)..(340): unsure at all n locations
agcttgtaaatgaacaacggaagctctcgagattattaaatggtcataacttatcacacggaagtccgattcagacgcataatatatcgagaagcttgaaaatgaacaatggaagctgtcgagaaattaaatggtcataacttgttacaccgaagtccgattcaggcgcatactatattgagacgctcgaaattgaacaacggangctcttgaaatattaaatggtcataacttattacacgggagtccgattcgacgcatatatattgagaccttgaaattgaacaacgaatgctctcgagaaattcaaatggtcataacttttcaaacggaagtccga

SEQ ID NO: 238997 - DNA, 379 bp, Glycine max
cacacggaagtccgattcatgcgcataatatatcgagacgctcgaaattgaacaacgtatggtgtcgataaattcaaatggtcataactttgtcaacggatgtccgattatgcacataatatatccagatgctcgaaactaaacatcgacagctctcgagacatacaatggtcataacttttcacacggaagtccgattcaggcgcataatatatcgagaagcttgaaattgaacaacggaagctctcgagaaactcaaatggtcataacttatcacacggacgtctgattcaggcgcttaatatatcgagacgctcgatattgaacaacgcatggtgccgagaaattcaaatggtcataacttgtcacacagatgtct

SEQ ID NO: 238998 - DNA, 409 bp, Glycine max
  unsure (1)..(409): unsure at all n locations
agcttccatggggtgagttttgtttcccttttcacgctntaattcactccccacaagtaagtgcattttcccttggttatttggctctccattgatgtgttttggtgctttagttgctcattttttgcaaaattcgtgaagcgattcgcatctgaatccatgcttgttttgttgagttgagggtttgtgtgagaaggcattangcctatgttgtattctgaagcaatggggcatgccacattgtccccattctcttgcaatttgtgtccaaacgtgcgccctcgaagtgctcggtgaaatgccccaatgatatatgaatatganntttgcgaaatgggatggtgggactggtttatatatgtagagacagcatangagattcaaaatatgtgcccgaatgcaatttcaa

SEQ ID NO: 238999 - DNA, 331 bp, Glycine max
accgcttagcgacaccttattcttggcttatcgcgactcagtgtcgccaagcgcaattccttacggccataactaaggtccatgaagctaagcgccagtcatggcagctaagctgaattccttgcggcaatgtgagcgctaagagaggccttatcagctaagcgcatgctcctctgtacttaagatgcatcattttagctaagccagccatagcctggcttatcgagagttacaacttttcggatctgcaaacctcgctaagtggtttgatcctgtcgctaaaccaagcctctgttaaaaaaaaaaaaactgattttgaatgtgaaacgtc

SEQ ID NO: 239000 - DNA, 460 bp, Glycine max
  unsure (1)..(460): unsure at all n locations
ttggttgatgctatttctgacttaaaaatatttagaggtgagtcttccagttttgcaagttaaggaatttttttagaattatttaattcgagtaataatttttttgttagaatgaaggatcaatgtctagtttaagtttaatagtgctagcaaatagatttatttattgttatcattcacaaaatatttaattgaagtaataattggttttctagataaaaaattaatatgtgaagtttaagcgtattaatttttgtaattaggttttttactttgaagtttttttaattatgtttaattatttacaagccttacaaatatttacctgattcccttctagttttctgaagttagaatgaaatttgaatctatattttaagttaaagttagtagatgaagcaaccaaatacagttatttatttaaaaactactcttggtatgattaatgatntctaatttt

SEQ ID NO: 239001 - DNA, 438 bp, Glycine max
  unsure (1)..(438): unsure at all n locations
agcttgcattatgttgagagatagcgtgtggaaattaggtgcgtcagtgaaaatgttatcttgcatggcaggaaagtagtgtaggagaaactaattgctgcaaaccggtgagttgtatgaatcttaattgtgagagaatgactagtatcaactactaatttttgcatgaatctatgaatgctgaatggatgcatgatgtggaaatgatgaaggccatgttgaatttatttttttgttacagagccaaatagccaccttgtatgagtaattaaagtaaacctttgcacccagtaagccaagcatgattgaatattgtcctgaaccctagccaaagtaaataattntatcacaccttgctccaggttttacgaaagcattatcttgatgtgaaatggttggttcaaatttgagaggcggtggtgtagtaaatcatgtaaa

SEQ ID NO: 239002 - DNA, 480 bp, Glycine max
  unsure (1)..(480): unsure at all n locations
gcccgcggnnttgaacatgcatagtgctcttaaactagctttgtgggaaacagattcaggatatctccaattgctgacgacactattttttttggggaaacttcaatggataatgttaagctgtgaaggccattcttagaagctatgaaatggtttctggactgagaatcaatttttcccagagcccatttggagcaattgggcaatctgaggagtggtgttgtattgctgctgatttcttaaactgtgccatgcttcattttctttatgtacctanggttgccataggtatcaattcgagaaggaggtggtgtgngagcctataattaggaattcgagctacgttgacaaatggaaccaagaanatctttatggctgcagaatacccaaattaatggtgcttaacagcattgcctttgtctatcagtcttctatcacgggcccttcgcagtgattaatagactaactgccattcaagan

SEQ ID NO: 239003 - DNA, 387 bp, Glycine max
  unsure (1)..(387): unsure at all n locations
agctntacagcagaatttagtaatgacccactaacctagaattaaaataacttaatgccattaacctagggaattaaaaaaaacttaatggctgagtgtaactgaaattatggcaaccaaaggtcacccccaacagccaacaagtcagccaccatttggtctcccaaaaggctgatgcctaggttgccaattgggcccttattacaacttgaactaaacctactaaagcccttttagttgattaacccaaaacatatttttggtcagccaactttacaaggattgggccattatttagacaaactaaacactctaaaattgagacaaagtggtgccatttagtcctcctccatttgggccatgatacaactcacaaccttggacttt

SEQ ID NO: 239004 - DNA, 467 bp, Glycine max
caggaactataaaactaagcttacaacatgtggattatcctccagcacatcaacatcctgcatactatgtatatcgtacagtcttcatcagactcttcagtcgaggagttatcctcacctcgcctcgtgttatcactgcaaaccaaatacaaagaacgatcctccatcgagtcctccatcaaatatgtatcatataagtcatcattagtccctaccttaatgtaagatctaagcaaaactggtgccttgactcaaattaagactctagccacatctagatgcatcctattagtagtatactcatttgcatacatatagtcaccataggagctacaatccgatttaaaaaatcatcattccattcatgagtagggacattaagcaatttcacccataccaagttttatggtctaccaagcgagcgagaattccatagaacaatatctacagaaccactcccatcccat

SEQ ID NO: 239005 - DNA, 449 bp, Glycine max
agctataaacctactttatcgagttcctgaatgttgaaaaagtgttctacatgaatggatggttcaatgtctgtgtggatagtggtgatttccagggttgggacaatctcgacagcacgggagttagaagtaaccattgcaaaaagtttgagaactatgatttaaatttcagagaggaagatgaagtgtttcaaagtagtgagtaatgccaagagtttcaacattttaaggttttgtaatgggttttttggctttttcaaaaacaatcattaagtccactttccaaaattgactcaacaattagtgttacaacgtttcgttatgaaaaatactgtgttttatataataataataataataataataataataataataataataataataataataataataataataataataataataataataaatgcatgatatgtcgttcatat

SEQ ID NO: 239006 - DNA, 469 bp, Glycine max
  unsure (1)..(469): unsure at all n locations
tctatggaaactgggatcttgagcttcaatgaagtccttcaatggtgattttcaaccatggagatgcagcggaagataaaggagaagatgtgagatgatgtagcttcatgtagagcttgtaggccttagatcttcttcatcaatagagacttttgcttcttgaagatcaatggcagcggaatggagaaggaggaaaggtgattgtagacgccacttcaaggagaaaatgagtcaagaacaagctcaccaccatatgaagccatggataagagcttgaaggtangagaagatgagtggagggagagagggagaangggcatganatgtatgcctcaaatgaggtttgaacattgaagtgtaatttctcaaatgttcanagttgaaaaaatacacacacaaaagcttctatttatagcctaagtgcacacaaaattggagggaagattgaatttctattcaacttcacttg

SEQ ID NO: 239007 - DNA, 332 bp, Glycine max
  unsure (1)..(332): unsure at all n locations
agctnggcatcttgctccaactntctttntagctcttccttangtagtgctttaacagatgcaagcactccttcttctagctcaaaaacttccttcttctcaagtgtttcatctaacttggctttctttcgtgcttcgtccaaggatttcttcttagccttagcaaaggctacaacttctttgttgctaatgagagacagagtatgtttggattgaggaatatgatgagctggtgaatgaggttgaagggataaagaaggtgaacgttgaggtgtacgagttttaagaatcgcatcatcagattcttggtcttttggaggttacgagggtat

SEQ ID NO: 239008 - DNA, 449 bp, Glycine max
  unsure (1)..(449): unsure at all n locations
tgtagaactatgttggattntccctacgggtgttttttgttccactttttctttgttcaaatatattcaagggaaattcggtttgccggaaagcacaccggatcgtcaagtatttaaaaattaaaacggatgaatccgagtatcgaacacagggaactaatgtttacctgaattaagttcagaaatgaagcattgttgagagaacatgtatgattgataatttcaaacaaaatttaaactaacttttatgctaaaaactataaaaagcaaggtaagtaaaagtgacaacagtaggcagaaattgttgggtctttctaacaaacaagctgatgcatataaatatatttctctaatcaatcagactcttgtgttctatgctgtagcctaaattactaaacctcgatccctcgtcagaccgaatcaatccaagcttcgtactcatatccctc

SEQ ID NO: 239009 - DNA, 446 bp, Glycine max
  unsure (1)..(446): unsure at all n locations
agcttaggttatggttcacggtatggttttcttgagcctcagtctatacaccatgcaaaggacagacgtcaagaatgtcaacaatacattgaaacatgggtcaaaggaatcacattgacaagtgtacttaggaccttacttgaatcagtaagtgaaattcatgtcattattgcgaaaaaagtttgcattataagtacctaattatagtttttcgacttcagggcacattggcatcttattgttctgtgtccataggacaatattgatgtttggttttgttctttgcttaagaagcctaatgttaacatcaaggttgcaattaacaggttattcttcaaattataagtaaattaatgtataccaattgtagtatattaacacaantaattttatcttatatacgttaacgttattgtggaaactagtgcaatgaagacattaaccac

SEQ ID NO: 239010 - DNA, 455 bp, Glycine max
  unsure (1)..(455): unsure at all n locations
nttatagacactgtaattgggtttaaactttataatggaaaatatcgttgttaatattattcttttaagataaagaaattttagcaggaaaaaaagttcatataagaaaggagacatctctatctatcaatcagccagtgaaaattatttttgtggtttactgcatttcattgggttggatggtatacaatagtattcttgttaacttcttcatttatattgtgacttgagaatgaacttatctcttgtattacatacatgtatcagtttctgaatacataaacttggaagtgtcactccctctaatgaccactatattatatgaaaagttggaaatcccattaccactactagagttgttgaaagagagaaaatagattcaagagatgttgaaacctgtgtcttgactacacaacggagtccattntatatagacttaatgcaataaatacaaa

SEQ ID NO: 239011 - DNA, 421 bp, Glycine max
agcttctgttttcaatttcgagcgtctcgatatattacgggactcaatcggacatccgagtcaaaagttattgcggtttgaatttgatgtgagactccgttttcaatttgtagcgtctgaatatattatgggactcaatcagacatctgacttgaaagtttttgcggttttaatttctaggggcatctgctctgaatttcgaatgtctcgatacattatgggactcaatcggacatccgagtaaaaagttattgtcgtttgaatttgctacgagattctgttttaaaaatggagcatctcgatgtattacgggactcaattggacatacgagtaaaatgttattgttgtttgaatttgcccagagctctcgttctcaatttggagcgtctcgatatattaccggactcagttggacatccg

SEQ ID NO: 239012 - DNA, 205 bp, Glycine max
tgtctcagcgttatgcgagacggagaccaacatgctagctatcatcgccaagtaccaagaagagttaggtctagccacggcccacgagcataggatcgcggacaagtatgctcaagtttacccagaaaaagaggcaagaggaagggtgatcgactctttacaccaagaggcaaccatgtggatggatcggtttgctcttaccttg

SEQ ID NO: 239013 - DNA, 405 bp, Glycine max
  unsure (1)..(405): unsure at all n locations
attaggttgttaagtttcttcctaactaaaaatcaaaataaagccttatactaacgttcgtgaattaacgcgttttcagttattagtcgaaacaacancattcacttactatagatcgatactataacactcttaatatattaataaaagaacattaggattgctagcccataggtgacacattgttattgacttgaaacaaatgcatctatggctattctttttcactatacgccgtaaactatgggtgttgactatcttttcaagtataatcacattgtgtttctaactctggcctacatatgggctcctaatcaataggacttatctctgaggctgtctcatctcatttaacttgcattgtaatcataattatatcacaatactttaagttcactcatgtcg

SEQ ID NO: 239014 - DNA, 455 bp, Glycine max
  unsure (1)..(455): unsure at all n locations
tcctccaatactcgaccttgactctctatcagcaatgtgtattttctatatttggattgagggggcatgctggctttagattntcctagactatggctactcttgatcttcacctttcggtctattggcttccttgaagattttccacgcattttctttctaaacttggtaatctcttccatctgaatgaatctaacagcccttgctcccaacatgtccaatattgtacgcaatctcttgcacagactatccgagtagggaccaaatttcaatgccataatcattgaagggagtgtgacttttgggctcaagttctgaatcaaaactgagactggtgataacctttcaatgaaatcgtgaaacgatcctccttcttcttacctaatgtcaatgagtgccacaactgttagatggtgtggtatgctcgtcacgtactgagctcccaattgactata

SEQ ID NO: 239015 - DNA, 318 bp, Glycine max
  unsure (1)..(318): unsure at all n locations
agctnttcgcanagcttacggtaaaatctgggacttatccatggtagaagtctccacagaggccattgcctcccatgcccagtattatgatcagccgatgaggtgcttcacctttggggacttccagctatcacctatggtagaagaatttgaagagatcctaggatgccctctagggggaaggaaaccatacctcttctcagggttctatccctcattagctagaatttccaagatagtccaaatctcggcgcaggaattagaccataggaagcaagtcgaaaatggggtggttggaatattgagaaaatatttgga

SEQ ID NO: 239016 - DNA, 455 bp, Glycine max
  unsure (1)..(455): unsure at all n locations
tgtgtaacccaccatcttttcatagtagaatactggttatgtgtctaccatcacgattatcatctccctttccatcattgggagtgccacttgggctgccagatccctccacctttgggtgtattctttgaaagattcgtgcccctttttgcacatattttgtagttgcatcgtagaatggactcgagaaccattatgtccttccaagaatgcactcgggaaggttccaagttagtgtaccaagtagcagctaccccagtaagactttcttagaagaaatgtatcaacaattcctcatcttttgggtatgcccccatcttccgacaatacatctttagatggttcttgtggcaagtagtccctttgtacttgtcaaagtccagcgccttgaacttgggaatgaccacgttcgggtactangaacaactcttctatgtcagtaaaggcataatctc

SEQ ID NO: 239017 - DNA, 362 bp, Glycine max
agcttagccgggccttctgcggctttaaccagttgtcgaccgagagttcctgggcggtcagcggtggcccgaccacgacctcgacgccgatcgggtcgttctgttcgagttcgtaggcgatgaggatgcgttccttcgtcaacctccggacctcccgatcgatctcggattcctcgtcggcgtatcccccttcaagatcgacctcccttgcgacgagcgtcggcaggtgcgactcgtcgtagagatagacgatcagcgcctcgttgtagacctcgacctgcgtggcccccgggcggatgccgggccatggagcttctgacatgcggacctccggcatcgcgtgtagattcctctcacgccat

SEQ ID NO: 239018 - DNA, 468 bp, Glycine max
  unsure (1)..(468): unsure at all n locations
tattaggacctatgaaactcaagctntagggacctcggcgagaggccatgaccgagtttgcggctgaaggctggacgttgcgagcctgaggattgggaatcctcggcggccatttccccgatctccaggaagctgatcgactctccggccttcggcttgccgtcggggccgtgagttagcgtgccttcgtcccgagtcggaccggctccaactcaaccgcctcggcccgctcgggcttcacccaggtcctgaagagcgtctcgtccgggcccggcctgacctcgacctcgtatgcctgcccgacgaccaggcccgggaggacgaagcgtccgtctcggtcggtccgggcctcgcgggcgaaggccagtcgcgaagcattcttcgaatcgtcggggaagacgcgtcggccgtaggtgagcgtcacgccacgcgcaggctcgccggcccggtcgaggaggatgcccctcg

SEQ ID NO: 239019 - DNA, 311 bp, Glycine max
agcttagagatgctacaacttggggggagtgttggaaactacaaaaaatctattagtgctttaattcatgtacttagttcaaatttgctgagtttgagtgctaaaatctcaagtttcttagttcaaatctttaaatcctaaaatctcaacttctctatcattatgacttttctattgccgattacatcaatagttttgactagatttgatagtttatttttatctgcatattttataaaggattaaatgctctgttgtaagacaccatactattttacaaaccacactgctacagacttcgaggtttacac

SEQ ID NO: 239020 - DNA, 452 bp, Glycine max
  unsure (1)..(452): unsure at all n locations
tcaggggattgaaattccgcctgacaaacaataaattatgttttgttgtaagtaaataacaaatttagactattaaagaaaatcaacgaagaaaactcaaatacctgaatatcctcccatatcaaatccttctgagcagtagggacttccttccaggtgtcatatgtcacgtcgaccttatcacgagcgacaatccccaaatatgttcttaatttcttcttgtagggaccgtcggccttgccggtagcaggatcgacgttgaccacaggtctttctgccccaggtggtctagtggccaatgatcgtagccgtgtcgccttgcgtgtccgcttcaacgtagatggagacgcatcancgtttgcaggaggaggaggaagaggaggaggaggcgaggcangtggagtatccatggtcctttaaagaaaanaagttgagttagttaatattatcaa

SEQ ID NO: 239021 - DNA, 390 bp, Glycine max
  unsure (1)..(390): unsure at all n locations
agcttatccttatggcttgcctctggacttcacttcccgtgccaccccggtaagattaagccaagcccctacttttgaggggcaacttccgccttatgacgactatcccgggcaagacgatgaggaaggagatacccatcttggccccctgctccacctcaaagatccgtccccacatgaactaccccaaccgaacatagtccgccatatcccggcctcacccacacccgtaaaagaatctgttcccttcgcggaagataagggaaagaatgaggcgcttgaagagaggttaagagcagtcgagggccttggcaattacccattctcggacttagcggatntatgtctcgtgcccaatatcgtcattccttccaagttaaaagtaccgga

SEQ ID NO: 239022 - DNA, 460 bp, Glycine max
  unsure (1)..(460): unsure at all n locations
ntatgacattgttaatgttttcttactaattgtggtcatttgattntagtattaatcccttttataatgaactcacccttgaaatttttgtatcatgtggttggtacctatgatgatcgcgaacccttgttcgtgggagtagaatgacagcagtagagtacaggattattttagggagagttgtgttttgttaatcaactcctccatagctggttccattattctttntgttgaattgaggatgtaaatcacaatcttaattatatgtatgaacaaatttactttccattatgtgaataatgtgtactaagttactatgcctatatatatatatatatatattcatttaagtaatggtgcgttgtttgggaatgtatatcgtgaaattaaaatntaaaatttactttaatttttcataagcaaattaacagaattttcatttaaaaattgaagatttcac

SEQ ID NO: 239023 - DNA, 443 bp, Glycine max
  unsure (1)..(443): unsure at all n locations
agctngaggaagtgatgacttccctttcttaatggcgacgtctgatagtccaccctttttttatgaaccggtgtctatttgaggtcttgggtctctttctccccttgaccaatccagtgtgctcttcttgagcacttgaatgtggccccttcccaactccaccctaaaaaaagatgatggtactcaatgaaccaagaggggaagagggtgaattggttttcaaaaacaaaacttttaaaaccaaagttacaaaagcttcttttatacaaatcgtatcacaaaacttttcatgaactgaactcaatcaatacataatcaatccaccctttatacaatatccttcattaaagttatttcatttttaacaaagatatatctttgaatcttttgaacactgattaatacttgaatgagaaataaagatcagatcaagagaagagata

SEQ ID NO: 239024 - DNA, 446 bp, Glycine max
  unsure (1)..(446): unsure at all n locations
aattactttggttcggtcaaaattatttattttaggataatttatttttaccaaaatgtgtaggcttttatttttctttttattactaattatagggatgcaatctttgttttgtaaagccataagtccacttgtatgttcttcagttaattttggaattatgcttttttcaaaattttcgtaaagaaaatctacagttttttctatttggtttagtctgatttccaaagtggaaatcctattgttcataattttatttccatgatcattttctttcttaaagtctggaaattctattttcagaatagtttgtacactagttntgcagaaattcttatagcataaactacagtgagctcttagtgttttgtgtggatatcttttacagaaataacattctttgtgatctggtcctatgtggaattgtatttcatgttcatggtcat

SEQ ID NO: 239025 - DNA, 396 bp, Glycine max
gcttagagaggaagcttcaattgaggaaaagaaagagataggggggagcacaaaattgaaggaggaaaagaaggagagaagatgaactttgaagtgtgtctcacaagactcataatcatcgaagttacaataagtgttacacatgcttctatatataacttaggtagcttccttgagaagtttccttgagaaactttcttaaaaagctagaacttaattacacacacccctctaataactaagttcacctccttgagaagctttcttgagaaacttccttgagaaataagcttccttgagaaatttccttgagaagcttccttgagaagctttcttgagaagcttcctagagaagttaaagcttagctacatacatgcctctaatagctaagctca

SEQ ID NO: 239026 - DNA, 472 bp, Glycine max
atactcaagcttcttagtttcagatgatgcagctgagtttgtagttacctcatgcactcctctaatgactatagcatcatttctggcactaaactgctgggagttggaagccatcttcttaattaaatttttggcttcagcaggagtcatgtctccaagggctccaccactggcagcatctatcatacttctctccatattactgagtccttcataaaaatattggagaagcagctgctctgaaatctgatggtgagggcaactggcacatagttttttaaatctctcctagtattcatacaagctctctccattgagttgtctaatacctgagatatcctttctgatggatgtggtcctggaagcaaggaaaatgttttctaagaatactctcttcaggtcatcctagctcgtgatggaccgtggagcaaggtaatacaaccagtcctttgccactccctctaaagaatat

SEQ ID NO: 239027 - DNA, 456 bp, Glycine max
  unsure (1)..(456): unsure at all n locations
agctnttcctccctcttcccacgttgcttttctcttcttcttcctctccattgaagcctccattaaagctccaaaattgctcatcatttctactccaaattgcgaagggaagccattttcggagtcgtgaagcacacctctacgttgtgggacttcgaatttcaggtatgggtggacttcttctcacatgaatttcgtgggtattgggtttttgggagctatgatgggtagttctactaagttaatgccttatggtagttatttgtgaaggaatatgttgaaatcatgctaaacttgacatgtntgatgtgagtaaagctacccattctattttagggttttacgatgatgctttgtgatatttgtatgctgaaacttgtggtagaaaactggtaaagatgatggggagagttaacttacggttaaatgtgagaatggtagtgatgtgagtggaaa

SEQ ID NO: 239028 - DNA, 471 bp, Glycine max
  unsure (1)..(471): unsure at all n locations
ctaagcttagtgcctntaggaactgaagaaagaataganagcagaatgttaatgtgataaaacttcatttatatatattcttctgtcttaagagaacaaataaggaacacaaggggtagaaagaactaagaagtaaaactaaccaattgtagggtctgtaacttaccaaccaacanaaaaatcacgggctcgttgagatgctaccctgtctttntctgtanttgtttgaggaaaaatcccaaacgtgtaaatagagataccaacaaatccatgttgnttgtcctgcaaagccacttaagttacttagaaaatgggaacattctttgctatcagtgtccgtatgagaagaataaatgtcaaaaatattaagattgagaagcagataaggatcctacagttataagtttaaattttatgcgtgcataanacctattacattgtccgctaataaaaaaattataacatcacttt

SEQ ID NO: 239029 - DNA, 110 bp, Glycine max
  unsure (1)..(110): unsure at all n locations
acctgcngcatgcaagcttgcttgtggagcttctatggaggctggatctttgagctttaatgangtccttcaatggtaatttttcaccatggagatgcagcggaaggcaa

SEQ ID NO: 239030 - DNA, 461 bp, Glycine max
actaagctgacgtttaaaatttaatatacgttgccaagtgtgagtatggatcttcatttggtaaaccatgaaacaaattgcattgtattagctgtatcaatgaaagtgggtaagttaaattttgtgcctgaacctctggccacgcaacacttgagaaatattgcggtttcgaagttcttgagtaatcttccaagttcactcgtcgaggttgctcttcaaccatgacttcggattcaaattctgctggttgagattccccgaatgtatgtgaattataagatgatgactcagaaaagtaagcctcttccaggattggtgctattattctgtcgtgcaaaagctttctttttctttctacgttgtttcttctaaaggtggcttcaatttctaaatccaatggaaccaattcacctgcagaggatctacacatgctaacactaacaggataagcatttaatcaa

SEQ ID NO: 239031 - DNA, 417 bp, Glycine max
  unsure (1)..(417): unsure at all n locations
agctntgtgttatcaattacactaatttggtaatcgattaccagcgtttgtttctgaataaatcaaaagatgtaactcttcaaagggtttttgactttttcaaattggttttaagtttttctaaaggttataacttttctaaatggtcttcttgattagacatgaaaagtctataaaagcaaggctttgttttgcatttaaattattctttcaatcttgaacacttattcaatcaatcttttagaagccctaaatctctttgaacttcttcttcttctttgcaccaaaagccttctgaagttttctggttttctaaaccttgaacacttgtgctattcatctttacattctcttctccctctgccaaaaagaattcgccaaagactaactgcctgaattctttttgggtctctcttc

SEQ ID NO: 239032 - DNA, 458 bp, Glycine max
  unsure (1)..(458): unsure at all n locations
ntattcttaattttcttgaacttgataattgggaatttgctttatttntgacaatacactntcccattcgtcaatcctcctaccatgtaagtaagatccaagaacttcaagagctagtagtagtcctccacaataagcaactacatttcttgcaagttcattgaagtcttcttttggatttggttctccaaaagcgtgaaaacaaaaaagctcaagagactcattttcgtccatttcctccatttcataaacataatcaactntaaataggttcagtacacctgcatctcttgttgtaatgattattacagatccttgaccgaaccattcacaatttccacataaatcttctaattggcgaatctccttcacatcatcaagtacaatgagcaccctttttcctgaaagtctattctctatcatagttggtcccatcccaatgctatgtatcttgacct

SEQ ID NO: 239033 - DNA, 447 bp, Glycine max
agcttcaccttctggtcctcctcatagttgctgtatgagaaaacatggtctattttcatctcccactccaagtaggcctccggatcattctttcctttaaatggaggaatgttgagtttaataccatcaatttggttttgtctaggaacaccatccctcttctcctcctttcttcttcattatgatctctattctccatttgatccaacctctcatggagcgcatcatctcgttgtttcattaacctctccaaatgttgcatcaaagcttgcatttggaattgcgaaagccccactccatcattaggattagtacctgacatctcaaacaaacaaatcaaacgtaacaagacaattatagtggctgtttgaatacctcacccactctcaagtgtatcacacaattatggcttttctctaatgaaacactcttgccttttaccactct

SEQ ID NO: 239034 - DNA, 458 bp, Glycine max
  unsure (1)..(458): unsure at all n locations
tttgagcaattcaaatggtcataaatagtcactcggaggtcttattcangcacataatttatcgagacgctctaaattgaacaacggaagctctcagaaaatttaaatgctcataacttttaactcggaggtccgattcatgcggataatatatcgagacgctccaaattgaacaatggaagcttttgagcaattcaaatggtcataaatagtcactcggaggtccgattcaggcgcataatttatcgagacgctctaaattgaacaacggaagctctcagaaaattcaaatgctcataacttttaactcggaggtccgattcaggcggataatatatcgagacgctccaaattgaacaatggaagctgttgagcaattcatatggtcataactattcactcggaggtccgattcaggcgcataatttatcgagacgctcgaaattgacaacggaagc

SEQ ID NO: 239035 - DNA, 427 bp, Glycine max
  unsure (1)..(427): unsure at all n locations
agcttatgcgcatatttccttacaaacgttctcttgcacaagacattctattaaccaaaaaaaatgcacccatatacaatcaaggcagcttcgttacctagattatttacacgtacttccaaggtgtatttgttacttacatcacacacctccttggctaaattcacatacatgcatactcaaagcattttggggtaccaaaaattgcacatgtgtacatcttggtatttctaatacctatacatacacaaactatctacacaataaggtgctacattttatgctctnttcaagtttttgctacctaaagccgcatgcaaattcaagtatatgttcctttgctgactcaaaatgtattcaaataacaggtatacatgttttggtaatgtatcttctttacataacatgcaacatatttatgtatata

SEQ ID NO: 239036 - DNA, 393 bp, Glycine max
  unsure (1)..(393): unsure at all n locations
aggtcctttggctcccctatccttttggtccggcaaatcactttaattccctggcaatcatcttattccaaaaaagtaaccgattaaatcctagatctacaccttgtcttgcatttctatgggttaaaatttatagatctactcttgaatcaatgatttgtgtcgattctaagttctatcaattttcagtcataatattcttgtaccaaacctttagatataaattttcttcccaaatattgaatagaaaaaaaaacacaaaaatctaagtgtaatcacttaatccatgtngtcttagaagcatgtttagtcataataatttgcacattatgttctaacgtcggattgaatttgtatttgttgattgaatccagatacatatgtcatgtattc

SEQ ID NO: 239037 - DNA, 341 bp, Glycine max
agcttcaacctagaggagacggaccattccaagtgttggagaatatcaacgacaatgcctacaagattgacttgcctagtgagtataatgtaagtgccactttcaatgtgtctgatctatctctttttgatgcagatggaggagccttggatttgaggacaaatccttttcaagaaggagggagtgatgaagacataaccaagggcaaggaccatgaagcacttgaaggttccatgaccagaggcagacttaaacaagcccaacacgttatagagacaacgctggtcatttgtatagctgccattgatgatgattgaaggcccaagtggagaaagatgaat

SEQ ID NO: 239038 - DNA, 397 bp, Glycine max
  unsure (1)..(397): unsure at all n locations
ctaagctgaatagacattcgtgtgaaagtatgacatttgatttttcgagagtttccgatgtttaatttcgagcgcatcgatatattataagcctgaatcggacatccgtgtgaaaagttatgaccatttgaattttagagagttcccgatgttgaatttcgagtgtatcgatatattatacacctgaatcggaccttagtggtaaaagttatgaccatcntgaattcacgagaagctttgttgttcaatttcgagtgtcactatatgtgatgcgccaaaattggacattcgagttaaatgttatgagcatttgaatttctcaagagcttccaatgttcaattctgagcgtttcgatatgtgatttgcctgaatcggacatccgtgtcaaaagttatg

SEQ ID NO: 239039 - DNA, 456 bp, Glycine max
  unsure (1)..(456): unsure at all n locations
agcttctaaactntatacaagaatgaagctctgataccacttgttagacatgtggcctcagatatcttaagaaggggggttgaattaagatattacaaactgtttccccaattaaaaattctactttgattctaatgcaagttccaagttcccttaaagatgaatttctaaatgatgattcaaattaaacaatctgaatgtaactgttaagcaacaataaataaaagagtttaagggaagagaaagtgtaaacacagtttttatacaggttcggcaaagtccgttgcctacgtccgatccccaagaaagccgcttgggagttccactatctcgtaatcctttacaccttctgaaacacacaaggacatcccttcctttgtgttcagatgctttacaacaagagactctcagtctcttagccctttgatcagaaagagaggaagaagaaatgatctt

SEQ ID NO: 239040 - DNA, 462 bp, Glycine max
gtcttatttcagcagatgaagatgaatccatggccacatcatggactcctctaaggacaatagcatcatttcttgcactgaattgttgggagttggaagccatcttctcaatcagattcctagcctcaacaggagtcatatcaccaagagctccaccactggcagcatcaatcatactcctctccaggttgctaagtccctcatagaaatattgcagaaggagttgctcagaaatctggtggtgaggacagcttgcacacaatttcttgaatctttcccattactcatacaagctctctccactaagtttccagatgcctgaaatgtcttttctgatggcagtggtcctagatgcaaggaagaatttctccaagaacacactcttaaggtcatcccagctggaaatggacctcagagcaaggtagtacaaccaatccttcgccactccctccagagtataaa

SEQ ID NO: 239041 - DNA, 422 bp, Glycine max
  unsure (1)..(422): unsure at all n locations
agcttactctaggatcataanaaatgaatgatataagaatttgagtgagagagataacaatcaacactcgggaatataaaacatcagtatttattattcatctttattgtttacacataacaaacatcaaactacacaataactaacaacaaattttctataatagaaattctaattgaattaactgcctacaagcctaagtatatacctaagttactcttatacaacaattttccaccttaactnggtttaacacacttaatactaacaaagactcaactctgtgtcccttcaaggcaaacaaccaatatcttatctaaacaatacttaaacttgctccttggtaaaacttagttagcatattaccaagattcttctttgtagctatcttctcattttgatcgaagcccttgtaatcatat

SEQ ID NO: 239042 - DNA, 452 bp, Glycine max
  unsure (1)..(452): unsure at all n locations
tctaccctggatcgaatggtcacataacacctcttgtaacgtctgcacaggcacaactccttatgaggtgacgtttggaagaaagccatttaactttccagagtatatcaaaggaacatctaacatcgaagcattgaatgcttattgactgacaaagatgccactttccaaacgattcgcaaaaagcttcttaaagcacaggaagctatgaaaaagtaggccgatagcaagaggcgcaacaggcaataccagataggtgattgggtcttgctccggcttcgtcctctccaccagacatcagccaaagggcctcaaatagcttctggtaaactcgcaaaacgattctatggacccttccaggtaatagatcgcattggcattatggcctacaaactgaaattgccggagacagctaanatccaccctgtgttccattgctctaaacttaaacc

SEQ ID NO: 239043 - DNA, 361 bp, Glycine max
agcttataatggtaaaactattgaatatatatatggatattaataattatcttatatattttaaacatataaactaacatatataaaaaactaaaaataattgataaatatattataaaaaatataatatagaaaattataaattataaactcaacaccggtgcatggcacggggtattatgatagtaaattaaatatgaatggttgaatttggtttcaccctaagagacgccatgtcaatggttataattttttttcttctctttttccttcattaatataaattagcttatttgtataaaaataaacaataattagaaatataaatcgcataacaatataaaaattttatatcataaca

SEQ ID NO: 239044 - DNA, 395 bp, Glycine max
  unsure (1)..(395): unsure at all n locations
tgtaacttatactggcttatgcgtgatatgtgtgctaacactgaagttacagagcctcgtagttgcactaactgtcattggtaacctacacattcttttgtttgcaggtgacaggttgtaccatcttgtgtgaggctcatgaaacaagccaatgtaatcccattgaagaaaacactaaagaaattcatatatgggaaatcaacagcggcaagggtatactctangaggattttcaggcttctagcaaggaccttatagtcaacaaggatagtggaggtcacaccctagcaatcagttcaacaaagatcagggtggactttcgaatangccaatccaacaagggcctaacatctttagaggactactaagctggaagagacttttgactcagttat

SEQ ID NO: 239045 - DNA, 420 bp, Glycine max
  unsure (1)..(420): unsure at all n locations
agcttgcactntntgagtggaataatctctcatataaagttattgtgggtggagcataaagttccatttgatggaacattgttttaaccaaaaaaattgcaacacgcatgaaagcatcttcatcttgaatcttgatataacagataaggcttaaattatgttgtctttcttatttattcggataacttatagatngaaagcatatattaacacatgatgaaaccgtcttcttctttagggtgttcgtggttttgatcaaattcattatcctacaaatcgattcatttaataaagctaatttcttataataaactttggtgcagtcggtttgatttgctacttcgactgatctccattaacaattatgtagttagtcaaaatcatttcatttaaatcgcatactttagatagttgaaaatc

SEQ ID NO: 239046 - DNA, 411 bp, Glycine max
  unsure (1)..(411): unsure at all n locations
agaagtagtatatttcaccttcaaaccaattcaatcaactatcaaatatganattacaacacataaaggcgccaatgaaccgaatagcactcaaaaaagagtacatcgcatgctaaacgtgacttacaggaaacgcattatagaccatgtgatgctcaatatcaagcagctccccagtctccaaacacgaaggtctgtgaactggaaagctagttttgagaaactgttccaatcgatgcgcatcgatgtttgatctgtagcctccgtctcactaaaaccaatcagaaccacgttcacttcaagcggaactcgaaacgggacctacacgaaccacagactaaagcattcacacttaatataacacatcaattaattggatagcgaatgtgaatttgatttttgtggtgacca

SEQ ID NO: 239047 - DNA, 448 bp, Glycine max
agcttagaaagacaatacttcattcatgacatcaaataaactttaaagtcatccgcaatattcaaataaaacatatatgaattattggaaaagataaaacacaatgccaaatgtgagtgcataccactagtcatatatcattaaagtaattaagtttaagacacataatcatgaacaacctagagcacgtcaatataatcataatgttcagtcatactaagcaagtgttaaaagaaatactaagtattcaaatgtcataaaaacatagtcaaagacaaggcttaaaaacaaaatataattataatctaaatatattatcagagaatctaagcttaggtttaagtaacaaaaattagttatgaacacatacatggtgactcattacttatcttgattaattaaccactagattttaagtatgatataacaatcatgaacacatatcata

SEQ ID NO: 239048 - DNA, 462 bp, Glycine max
gtcaattcattcttctttagttcgctgtcattcttcatctcgtttacttctagtattcttttcttccgcttttacaagctttcaaccatttatttaagccgttctcttgtttaataattgataaaatgaatttcaaccgatcatttgtgttgcaatctcgtttaatcactgttaaaataaaatccaaccgatcgtttgtactgtaacctcagttaaatcaaaaaactgtaaaataatgataaaataatcaaaatatctttgaaaaaataataataaaataataaaaaaatcaattagacattttactttgaaagtttcctttaaatgagttgataataaccaagtgaaactaaggctaaaatcaactcacaaaccaagctttgcccgcaaaaatcacttgaagttgttttaaggtccaacaccttaaacgatcacgaagaactacatatgtctgagttcctc

SEQ ID NO: 239049 - DNA, 459 bp, Glycine max
  unsure (1)..(459): unsure at all n locations
agcttatcttaacacanaaatggcatgctaatctcctccgattagaacgaactcatgcacacgtttaatgtaacacatttatgcacaggggtatgtgtaaaatatcctactatttatgtcaatgtacaaggacatccaacacattctagttaccatacatatatatgtattttttaaaagaacacacattctcatgctcaaggcactgcgtcaaaattcacacctaatcacatcctaaatattttgctatcacaaactacctacacatatttgaagcacatatcataagactttcattggttcactcacatttatttatatgcatattggaaagctaattacgtcatgcacatacttgcatttaanaaggggaatccatgccatcatacattcatttaggaagcgacctcaatattcatttangaagatactcattcacactntgcaaggaatttcatg

SEQ ID NO: 239050 - DNA, 350 bp, Glycine max
  unsure (1)..(350): unsure at all n locations
tctaggccttatctcgctgctttatctacctgtaacttactatatgtatgatattttcaaaaccgagtatgtacatcggtcttaaaacgagtacgactactagtttccaaacgtgtatatcaaacgtacatcgttttcaaaatcgagtagcatacgtacatcgttttaaaactgtgtgtttcagaattttttaatattgctctgttttacaaaanaccaaaattaaccttgtaaattaaatcagacacacagacacaacatatatcatctgcatttgcttcaagaggtntagcagaaactagctagtaactattaatgaaaaaatcaatgatactatgatactatcacaa

SEQ ID NO: 239051 - DNA, 353 bp, Glycine max
  unsure (1)..(353): unsure at all n locations
agctngaagatgcaatgcngtgaatttagaagggagaggttgcaaganaacttttgaaatatttggagtaagtgtaagtgtaacggctgttacactttacttatccatttttcgaccaactcgcttcgcgagtcaacccactaagcgagagagagacgtttggcttctcgccttctttcttggtgggccgacatgctgggcccaatttcaaattcaaacattttatttgaactatgcttagcgcaaagtagcacactaagcgagtgtgcagataaggaatcctgcaactctcgctaagccgggctcaaggccgacttagcgaatatactgcatcttgcatacagagggggtat

SEQ ID NO: 239052 - DNA, 459 bp, Glycine max
  unsure (1)..(459): unsure at all n locations
tgtaggattatggggtacccatcacatgtggtactaggtggctgtcgggcgatggtgcacaacaagttttccacatccacaatgcgcgcataaacccaccatcccctgttgcccacctccaactgagctcacgtactcccacgtagcccatatcctcgtttctctcaataccgggtccccatcaatcctcccaagcttccacaacatccaagaaaaacaacattcaaacagcacaagctatcacagccaagcaaaacagagcaaaggcagaaaactctgccaaaacaccaaccaaatcacagcttttctcacttaaagaccccagtaacaattccttcgttccagttcattaaccgttggatcgactcgaaaattntactggaagtctttagtacataagcccacanttttgaccgtgggatctactagaaaacgtccagaactcactctacattactc

SEQ ID NO: 239053 - DNA, 237 bp, Glycine max
atggacatcaatgtcagtatcttcgtgaattgctcagagcttcagttccttccggtgctcgaataatacggactaatcgacatcgactgaaaggatagacgttgatttctaaagctttgtttaaatgtatggtctgttttcgggctaaaagacttcagataagtatgtcctcgaactgtcaagatctgtttcattcggcgccgaataaaaggcgtcatgacatcaataaaatatgtc

SEQ ID NO: 239054 - DNA, 450 bp, Glycine max
aaactaagctcttaagcgcgggtctgggagacaaaggtcaagtgttcgcgatatgcgattatgatgttccgagtactttggatttggtacgaccatgccctcctgatttccagctgggaaattggcgagtggaagaacgccccggcatttacgcaacgagcataatgtcaacctttacggctttaaaagctctatagttgggcctaggctttagagtttttccttttgttaaggctatgtgtcttttgattttgaatttataatacaaggatctttcttcatctgttcctacgtctctacccattctcattcatttgcatgtttacttcattttctgaaacgacagatccgatgacgagtcccccgaacgtactaatacctgtgacccgactatctactttcggcaagaaatgaatcaaacggaagatgaaggaaacgaggatgtgggac

SEQ ID NO: 239055 - DNA, 183 bp, Glycine max
tcgtctcgtcctattaccaatttctatgcttgtaaggttatcatcaatttctgccatttcttccgatagtattcttattcacgcgtactaccatgcgtttatcgctctcactactgcattagaaacttcctccgcctgctcttatctagtcatgttgaatataaacttgtgccagtggacccc

SEQ ID NO: 239056 - DNA, 448 bp, Glycine max
  unsure (1)..(448): unsure at all n locations
agcttcaagaaaaagatggcctcagcaaattccttatttccagaagggaattctatcaatagacctccaatctttaatggagagggttaccactactggaaaacccgaatgcaaatttttatcgaggcaatagatctaaatatctgggaagccattgaaatagggccttatatacccaccacagtagaaagaagttcaatagatggtagttcatcaagtgaaagcataaccatagaaaaacctagagatagatggtctgaagaggatagaaaacgagtacaatacaacctaaaagccaaaaacataataacatctgccctaggaatggatgaatatttcagagtttcaaattgcaagagtgctaaggaaatgtgggacactcttcgataacacatgaaggaactacagatgttaaaagatctangataaatgcactaactcatgagta

SEQ ID NO: 239057 - DNA, 455 bp, Glycine max
  unsure (1)..(455): unsure at all n locations
ntggaagcaatcttgtattggtgcttccttcatcattcctgtttatgccttcagcaaccaagtcaaacagtaggggggccaaaggatccctttgtctcaaacctctttgaggcttaaattcagaggttgggcttccattcactagaatagatatagaggctgatgtgaggcaccccttattccatccaatccatatatcatggaaccccattcttctcatcatataaaanaggaattgtcaagacattgaatcataggctttttcgaaatccactttataaagacacacccacacacacacacacacatttcctctcaactaccttatttgcaaccagaacaccatggagctactgtctacccttcacacagacacacccacacacacacacattcacgttgggacacacccactcatactcacacacacacactcactcggacacacacgcaca

SEQ ID NO: 239058 - DNA, 127 bp, Glycine max
  unsure (1)..(127): unsure at all n locations
agcttgtgtttttaagggtatacgattataggctcancaaatttatagatataatgactgcctacacgaactgtatcgtggggggtatgaactgctcgacttgaaacttatggaagagaagagcaag

SEQ ID NO: 239059 - DNA, 169 bp, Glycine max
gccccctaaaacaaacactttcttcctggattgacctctatcataccctccttcttaggaagaattcgccctcgaattgaagtcaaaggtgcctacctcacaaagaatcaagtcagtaacatttaaagtggcgctcactccctcaacgagagggtaagcgatcttatat

SEQ ID NO: 239060 - DNA, 325 bp, Glycine max
  unsure (1)..(325): unsure at all n locations
agcttatatacccctgtctaatgattatgaagtaagttctaacttttaccatgcaagaaaaacaaaagaacataattaaaactgggttgcctcccaagaagcacttctttaacgtcattagcttgacgcttttacctcaacgggtgatatccaccttgtcctttaacttcaggacctccttaccaccctccatcacttgcaagcagacattctgatctaacataggcttgtcttcttcaaatagatcaaaattgatcttctgatcttcaaaacccatttccaatgtctttcttcctatgtcaactacacagctngtagttaacat

SEQ ID NO: 239061 - DNA, 445 bp, Glycine max
  unsure (1)..(445): unsure at all n locations
tggtttgtgagttgattntagccttagtttcacttggttattatcaactcatttaaaggaaactttcaaagtaaaatgtctaattgatttttttattattttattattattttttcaaagatattttgattattttatcattattttacagttttttgatttaactgaggttacagtacaaacgatcggttggattttattttaacagtgattaaacgagattgcaacacaaatgatcggttgaaattcattttatcaattattaaacaagagaacggcttaaataaatggttgaaagcttgtaaaagcggaagaaaagaatactggaagtaaacgagatgaagaatgaaagcgaacaaaagaagaatgaattgaaagcttcagattcaaaaacttaccggtcgaagaccgaagaacgaacgaagaacggcgaagaatcttcacg

SEQ ID NO: 239062 - DNA, 435 bp, Glycine max
  unsure (1)..(435): unsure at all n locations
agcttgccttgccccttgatatatttaagggactcatggacactatgaatgaaaaattccttgggataaaggtagtgttgtcatgtattcaaagcccgcactaaggcatacaactccttatcataagttgaatagttaagggtacaaccacttatcttttcactaaaataagcaattggatggccttcttgcatcaacacagccccaatcccaacatttgaagcatcacactcaatttcaatagatttttgaaagtttggcaacgcacgtatgggggcattacttagcttttgcttaagaacattgaaagcttcttcttgtttctctccccattcgaaaccaacatttctcttgagcacttcatttagaggtgctgccaatgtgctataattcttcacaaatcgttataaaaacttgctnaccatgaaactctca

SEQ ID NO: 239063 - DNA, 400 bp, Glycine max
tggctcaatcttcatccttttctttaaaattacagttaagtcaaggaattataaacaatcttagtcaaaatttcctattaattgaacctatattatacaactatcatcgatttttcagaaactgatgttaaacataattggttaacatcggcttttacaaaaaatcaatcctaaccaactcatgttaacattgaattttggaaaaattaaccgcgtattggcttatttataataatttttacgctttatccaattcactcatctccctcatgcttcgtcttcctcacgcttctggcaacctcgaaccctttgtcactctcaaactcactctcgcggcgctgaaaccactatcatcactgtcgctcatgatcatctaggtcttagtgtcacttctcgctct

SEQ ID NO: 239064 - DNA, 316 bp, Glycine max
  unsure (1)..(316): unsure at all n locations
agcttcttatcgaaggcaattcttggtggtgaatctccttcttccttggcttattccctagtggatggtgcctcccctctcctcttctccttttccttccgctgcttctccatggngaaaaatcaccattgaaggacctcattgaagctcaatgatccagcctccattgaagctccacaagcaagcttccatcacccttcttcattctccttcttcatctttctaaaccttcattctttaatcctaacttgaacaccattgtatcatcttcattttccatccaaacacattcaaactttgaaccaaataccttaca

SEQ ID NO: 239065 - DNA, 456 bp, Glycine max
cttgacttgagtcatcaagagattataaatatgtgaccatggcatgagtttcaacaataattatcatcatcaatcatctatctttcaatcttctctcaacatcattcaatatctttcaattctttctacagaattttctgattctttttctcttcatctttctaaaagttttttatcgacactttttcttcaaagaaaagttctttgttcaaaaacttgtgttattcatctttttcattctcttctttctttgccaaaagaacgaaggactaaccgcctgaattcttttgtatctctcttctcccttttccaaaagaacgaaggactaaccgcctggaattctttgtgtctctctttcccctttcaaaagattcaaatgactaaccgcctgagaattcttttgattcttcccttccccttaagtaaaacatttcaaaggactaaccacctgagata

SEQ ID NO: 239066 - DNA, 430 bp, Glycine max
  unsure (1)..(430): unsure at all n locations
agctntatgngatgtaaagacctgcaacttctctattgatcatgctggagaaggaaatgaagtgcaactaagtgagctagatgagatccgtttacaagcctatgagaattccaaattctacaaggagaagaccaagaagttccatgaaaacttgatagctaaaaaggactntgtggttggacagaaagttttattgtataactctaggctcggactcaagagtggtaagttgaggtcaaagtggattggtccttttgtggtggctaatgtttttccttatggtacagttgagatcaaaagtgaatccacatataagagttncaaggtcaatggacaccggctgaaaccattcctcataaatcccttcttagcggatgtagtggtggaggagaccctcttacttcaccctacttctcttccgccatgactt

SEQ ID NO: 239067 - DNA, 478 bp, Glycine max
  unsure (1)..(478): unsure at all n locations
acttagaaactaagcttancatttttcctctcagaagtcaaccaccactcgattcttctacgcaccgcatgatatgcgtaagtcttgtgtttggaaatcattttgttcaggtccattgaaaattcatttactcaaatattttcaattattcaataacttggcttgttcgcttaacttattattgtcatttcacttacaacaggtttatctcaaagatcattgtcccttaccgcctatggcattgatgtggtcaagcaattcatatccttaggcaaaacagtgtccaactacatacgtaggtagaatgcagtagtacttaagcctaatgacaattaaaacaacgcatgtagacctaaacaaacactgaagctgtaacatttatgtacctatatttacgattagatttgtcttgatgtaacacgtcagtattgaaacactaatgaattgttgcaagaacaaatcgatgagctggtccatt

SEQ ID NO: 239068 - DNA, 471 bp, Glycine max
  unsure (1)..(471): unsure at all n locations
taagtcacctgcggcatgcaagcttctcagaaaagtcacaaccaacctgaatcataaactcttttatctgttaaaatgagaacacacacattatttaaatttaaataaaaagcaaatgaatcacaaaatagtaactaataatttttcttttgatatagaaagaanttttagctttgaagagatgcccatcctaagcataaagtattataagagcaaatggtttactatcaagtcaaagaattgtagtaccacttacccatgtgatagcttttagcctagtaaattcattaggagaacttgccctctatactaggatttcagccatgcgaccataatctacagacttcaagagtagcactgttcgagtaagaaaatgataaatgaacaaaaaactttgcttttgtgtcaaagtagtagttgaaaatgaagcacaactccattaatcaatacaagcacacgctaacacatata

SEQ ID NO: 239069 - DNA, 267 bp, Glycine max
  unsure (1)..(267): unsure at all n locations
ctaagctttgannataatttgcttcaatagggatacacaattttcatgttgatgactatctacgaaaagaccaaagctacaaccaatgtgataaattaattaggtgatggaaaaccctctagtgcaccggaatccccatgcacagtcagagaaaaacctcaagtacaaggaattacttaaattatgaaaaaaaaaccaccacaatatgaaaaaagtgtagcctaaagaaaaacaatgtaaacaccaactaatgcctcctaccccctg

SEQ ID NO: 239070 - DNA, 419 bp, Glycine max
  unsure (1)..(419): unsure at all n locations
atgagtccccctatatttcaaaattcactaagtctccataggagagactagaaccatggtctttagagtgagtagcacacttctttaccaatacatccacatgaccatttagatatttggtgcaaaatatagtattattataagttttatgcgaaaataattcaaaattcaaactttattcttttttaatttattatatttntataatcttatatattggcctttaaaatataatatataagattaaattctattgtcgcataaattagaatatgtatagttatataagctttatttttattctatatattatatttttataatcttatggtattttattacgctcatcaaaactttatttagatagtaaagatatagtataacatttatcttaaacttataatttttatataaaatat

SEQ ID NO: 239071 - DNA, 466 bp, Glycine max
  unsure (1)..(466): unsure at all n locations
tccatcatttggctatgcatccaattcaaatagcaaataaatataatataataatcaagaaaaaagaataaaattatttcataatagaaaattcaatgcacaatcgagactcatctaaaatcacagtcatcaccatccttcatgttcatcatagaactccatcatcaactcaaactaaaagaaaaaaggtttcaccaaatttaggaattttaaaaatcaatagaaataaaaagtaaattaacaatccattgtgccattatatataatttgtggttaattcaaggattagttagacttagtaatatagtataatgcataaccataacttaaaagaatgatgcctcagaagtttaaaaaataaataaaataaagaataatgatggtagattgaagatttttccttaaatggagtttagctntgcaagaacatgaaagagcaacttgtgtctcctgctagtatgcaaat

SEQ ID NO: 239072 - DNA, 338 bp, Glycine max
  unsure (1)..(338): unsure at all n locations
agcttatgaacaagaaagcaaatataatgagcattatgatcttaacaagattctatcttattcattgagcaaaaggaacttatataccgattgagaatagatgcagaaactaacacaaaggcagttaccaagtttggtaccaatctattaaggttcaaaatgaattcggcgggaaaggtagttttctgttagcttgcttccctcgagcttagtggattcagatacgataataataggctcgggttccttgagacagctngattaagagccccccttaagctaggaatagatgttcatcatttccagcttggaacatcatgaattgaatgaagctggct

SEQ ID NO: 239073 - DNA, 433 bp, Glycine max
  unsure (1)..(433): unsure at all n locations
gtcttgagatcccaacttacactgactcgtgatttanagcaattaatagtatattagataagtgatgaattcaggtcctatctgttntaaaaaactattntaaaataagtgatatatttgactctttaatgtaatattaatatattttttattaatatctctaataaatattgctttagtttttaaatctaatattaatattattttcttttatcaatctaataagattaattttctaaaattatcattcgattctatctatttattagttctaattaatctgtctaaaataaaataaaacgacacttattttgaaatgaaaaaaagtaatatagaatctatttaacaataaatctaaattaaataaatcttatcctcaaagtcaattttttaaagggaaaattaaatattgtaacatatagtaaaagcacta

SEQ ID NO: 239074 - DNA, 354 bp, Glycine max
  unsure (1)..(354): unsure at all n locations
agcttatagagtagtagatcataaatggaataataatttaaataggtgaattaatatatttttaattgaaatagattaaaatagtacatatttattggaatacacaaataatacataaaatttattaataaaaaaatcattattttattaaaaaaaatattttattgaaaatataaaatttaaaaaagaatgcattggactattntaatcaacataaaaattttgaaaatgaaaaaattcaatttctctatgcaaaaacaaaattgtaaaaataaatttttttttttcttcaaacacagaattttaaaaaaaattaaactataaaatataaaaatttaaatttttaaattttta

SEQ ID NO: 239075 - DNA, 454 bp, Glycine max
  unsure (1)..(454): unsure at all n locations
ggtcgtaggctactgggaaattccatacgtttgcaccattgtttattctctcttgctgccccaccactagccgtagatcctcatttaaaacctttgaagatgaacattaaaacacaccaattaacagatgttggagaagacaaagatgtcatttatttaaggacaaaacttgcataatttgttttttcatgttcttgttattagcttctcaaattaaatgatgacatgtggattttcttttttgcaacatattgctatccacataccataatttgagttgagaacttgatagtaaaagcaaaatgagaacatgatcacatttgtaaagttttgtcttttatttaactactaataaataaccaatactaaaaattcaaatcatattgaattatatgcaganatatgtttggntnttaagattatctgctggcgttatgtatcctctgcaagttta

SEQ ID NO: 239076 - DNA, 447 bp, Glycine max
  unsure (1)..(447): unsure at all n locations
agcttgtangaatatggngtacccattacatgttgtactangtggcggtcgggcgatggtgcacaacaagtttttcacattcacaatgcgcgcataaacccaccatcccctgttgcccacctccatctgagctcacgtactcccacgtagcccatattcttcgttttctcaacaccgggttcccatcaatcctcccaagcttccacaacatccaagcgaaacaacattcaaacagcacaagctatcacagtcaagcaaaacagagcaaaggcagaaaactctgccaaaacaccaaccaaattatagcttttctcacttaaagaccccagtaacaattccttcgatccaattcgttaaccgttggattggactccaaaatttactggaagtctatagtacagaagcctacattgtgaccgttgggatctactaacaaacatccataac

SEQ ID NO: 239077 - DNA, 458 bp, Glycine max
ctttcgattcattctatgcacacatggtggtccactttgtattttgtgtatttctattcttgtttcattcgctatgttataccccctcttgacgtgcttaagccattttacttaagtcattcctcgctcaacttaagaataaaatatattgtcaccggaacgtttgaattgtatgatcccgtaactccggttaaaatgaatttcaaccgttcggtcgtgccgtagccacgttggaaatctgaaagaggtaaaaaaacatattttcatcataaaacatcttttagcaaaataaaacggaaaatcaatcggacgttttctctttgggatttctcattcttaatcgaattgattaaataactaaagtgaaactaaggctaaaatcaactcgcctagtcaagctcgttcataataataggcttatgaagtttgtcattcaatttctcactaagtaaaatgga

SEQ ID NO: 239078 - DNA, 444 bp, Glycine max
agcttccacacacccttcgtttctagaatagtggacttattttaatatgtcgagatatatagcatatgtttttacaatttgtatttagtttttattaagcaaaaaattactcgagtaaaacagaaaagtgcattcctctctatataatagtagtactggtgcttgaaggtggtgaaaaaagatggaaatgggagatttggaatattaattggtggggtattaagaagaatggctgtggcggagttgttgggaatgcagatatagagggaaaaatgcagtgtccatgcttgagaatgaaatagcaatgaacaaaaccaaaatgatgcaactgtgagaggagtgagaggccatgcctgcttcaattgtaacttcaatttcaattttctgtagaggaattaagtgtgcatattccgatacgagtggctgcctttatagacaatgaca

SEQ ID NO: 239079 - DNA, 460 bp, Glycine max
  unsure (1)..(460): unsure at all n locations
ntagctggagggggagtgtgttataacagtctttnttagtgttgtcataacaccttcatggtatgcttgagtttgtttgaactcaggttctgcttcaacatttgctagggagaagcaatgataagtctagtcatagcagctctaataccatgcagcttaagagaagaaacgataattcttattgcattagttagttcaagttataaagtatgataaataggaaaagtttattagaaatctgattacaattcanattaatatattaaaacaaaaaataagggtaagagcagatgaatctgattatatccttgcccagtttagtttgccaaagaacacagtcatgaaggtataagcttttccttcttttgttgctttattcttacaactctatgcattaaataagttgcttaagtcatgacatgcatgtttagtactatctccatgtctatatataaattag

SEQ ID NO: 239080 - DNA, 406 bp, Glycine max
  unsure (1)..(406): unsure at all n locations
atcactntggctatgcatccaatccaaatagcaaacaaatatatatttttcgtctagaaaaaagaataaaatcatttcatcaaagaaaattcaatgcacaatcgagactcatctaaaatcacagtcatcaccatcctccatgttcatcatagaactccatcatcaactcacactaaaagacaaaaggtttcaccaaatttaggaactctaaaaatcaacagacataaaaagcacattaacaatccattgcgccattatatataatccgtggcaactcaaggatcagttacacttagcaacatagaataatgcataaccataacttaccagaatgatgcctcacaagtctaacaaacaaatcaaatcaagaataatgacgtgagagtgaagattttctcttaaagga

SEQ ID NO: 239081 - DNA, 306 bp, Glycine max
  unsure (1)..(306): unsure at all n locations
agcttgtagggttaaagtctcacgattgtcatgtgttgatgtaacatcttgccaaacaaagtcaggttagccataactcgcctgtgctttttcttccatgccatatatagcaaagtcgttgatcctgtcaagtatgatgagctggaaaatgaggccgaaattatactatgccagttggagatgtatttttcccctgctntctttgacatcatgattcacttgattatggatctggtcagagaaatcaaatgttgtggtcctgtttatctgtggtggatgtacccggctgagcaatacatgaagatc

SEQ ID NO: 239082 - DNA, 434 bp, Glycine max
  unsure (1)..(434): unsure at all n locations
gctttctggccnaattatatttagtaattgcaactacataaacttatactacagaatactgatccaccttcaaaagtcgaattgatgttgtaagcaattacattcccagtagaatcttcgttcaccacagcctacaagaacaatatatggaatgtatagtgataggttgatgagattcattcctttgaaagaaattcagactgatcatagaatggcactcacattattntgaataagttntgctctctgagcanaattaagtgtattcaatgtttcagcagcgcagctgaaaaagtgaaacggtcaaatttaaagagagggtccagagacaagcttgcctaacaacctcattgactcagatctttatagttgtacccagcacacttgttngaccactgtgagaagtaaattctcatgctgagaaacagtcaaac

SEQ ID NO: 239083 - DNA, 291 bp, Glycine max
agcttaacaaacttagaaatcaagtgtatcatgaattccgaaatatagggggagtaaacgaatgcacattttatctatatacaattgtttgttgcttgcttgaatcttgatttcaggtattgtattgtcatcatcaaaaagggggagattgtagatgcaattggctttgatgttttgatgatgatcatgatgatgtgttgcaattgatgcaaatgggctttttaagattaaaattcaagacaatacttcaagattacaagtcataacatcaagatgatcactagaatatta

SEQ ID NO: 239084 - DNA, 442 bp, Glycine max
  unsure (1)..(442): unsure at all n locations
ttgagccaaaatcctgactcaccatanaccttgacccatggtgataatgccaatccttaccctcggaagcaaaaaaaaagaagagaaggaaaatttccaatcaaaggaaaaaggagaaggaaaatttccaatcaaaggaaaggaaattcccaatcaaagagtgggagaaagcaaaaagaaaagaaagaaaattcccaatcaaagaatgggagaaagaaaaaaagagaagttaaaaagaagaaagctcctggtcaaagaaaccagaagaaatgtgccgagaggtccttggactagacgatatctgaacaatacagaattgtcaccaaatgaacaaaagaaagaaaaggaaaccatgacctaaaagtggtcttctccctttgattaccaaccaaaatcctgtgcgctagcgactatttctgcccgcactaaacaaaaacagaaa

SEQ ID NO: 239085 - DNA, 433 bp, Glycine max
  unsure (1)..(433): unsure at all n locations
agcttttcctcaagaaaagcagcntttgaagtctcttgatgtaataaacccaagagtgacaacttgttctttcgtctcttggccatagaactctcagtcaagtcctctatttttcttgctagagactttgcttggctctacatgtaacaatatctgtgagaggatccattacacattaaaaaattcaaactaaatttgtcttctttgatactttaaacaaaaataaataaataaatatctgtgttcatatcagtgttcctgccatgactgaataagaggatagtttttatccattactacagcaaaatactccgttaaatcattaaatgtaaacagagtgtatntattttgagaacaattaatacacttcatctcatgtagatatatgttcaaaatgaaggtagccagtgaaaaatccactgctttaaatctc

SEQ ID NO: 239086 - DNA, 455 bp, Glycine max
  unsure (1)..(455): unsure at all n locations
ntacattactcctcatgcttctcaccatgtctaataagggtttatttcttcgntctgccacaccattctgatccggagaaccaggcatagtgtattgggcaacaatcccatgttcttgaagaaattttgcaaatgaacctggtgcttgtccatcctctgtgtatctaccatagtactccccacctctatctgatctcacgatcttaatttgttttccacattgtttctcaacttcagccttaaaaactttaaaggcatctaaagcttcattcttagaatgaagtaagtagagatacatatatcgtgaataatcatctataaaggttatgaagtatttcggactatttgcatccatgtctggacaacatatgtctgtatgtatgatttctaataaattagaactcctctttgcaccttcttagacttgttagtttgcttacccttaatgcaatcta

SEQ ID NO: 239087 - DNA, 294 bp, Glycine max
agcttcttttggaccttgaacaagcaatcaacttctctttcagaaccatgctatgtgctcgcgactggtccctttctttccttcgcaacttgagttcattattgctaccccataaagctccgcgaaatttgttccggccatactcttccttgcgagccctcttggtctcttgttcaagggctcttgcggtaattgcattctcttcccgtaacccggcgcactccttccgaacgtgtgtagcagccaacttgaactttctcttggcgagttttgcctttcctaactcgcttttga

SEQ ID NO: 239088 - DNA, 452 bp, Glycine max
  unsure (1)..(452): unsure at all n locations
ggctngtggngcttctatggaggctggatctttgagcttcaatgatgtcctttaatggtgatttccaccatggagatgcagcggaagacataggagaagaggtgagaggaggcgccatccactatggaataagccatggaagaaggagcttcaccaccaagatgagccttggataagaagcttggagaggatgcttcaatggaggaaaagaaagagggagggaaagagagagggaggagcacgtaaattgaggaagaaaaagggagagaagttgaactttgagttgtgtctcacaagactctcattcatcanagttacaacaagtgttacacatgcttctatttatagactangtagcttccttaagaagctntcttaagaaaactttcttgagaagcttctttgagaaaacttccttgagaagctagagcttagctacacacacccatcta

SEQ ID NO: 239089 - DNA, 575 bp, Glycine max
  unsure (1)..(575): unsure at all n locations
agcttttgtttttgctatgtaaacacaacttagatcaacttctaaggctaactagttatgtgctaaaaaaacaaactcttctcaaccttgcattttgtaatggaataaaacaaattaaaatctgcaatggtaaagaaaaagttaccttcaatactataatagaagaaaggaggtcatcatggtaattgtggtaaagtagtggtgtttctactcttatttcttagcataggaagccattccattcatgagaccatttgtgtatttcgagtaataatttcaaattcagaaaaacaatcaactaaacattctcaagacttactcaccaaattaatatcattgttccgccataagaagccatgctatttcatgaaatatgaaaacttttttaccttggttgggtttaaaaagcatgttttcttataatgttttgntgggttatgcattaccatgcatgtttctccttctctttgacacatatagatgtatgatactaatgatgagatcacaatgacttgacttgaatgggttaagcactattttctattaaataattctttaggtggacaccacattat

SEQ ID NO: 239090 - DNA, 580 bp, Glycine max
  unsure (1)..(580): unsure at all n locations
tctggttttagttactccatattgttgacaatttacttgggtttctacctttgtgatcatttagtttaatgtgctaagntgtttgaagtttggtctttggcaagtgtgtacaaagttagtacctatcactttctatattttttgttgatcagacctcactatgaaaactaaaagtttcaagtctttaatatgttagcttttaaatatttttggaagtagatgttgaaggtacttacgtctggccttgtgggagagctcattttcttgaaggctatgtcagtttttaacagtgttactctattgctatgaaaaatgttgtttttgagagcggtgatgctcacacaatacttaaaaacacagtatcaattaatcgtgtatggaacgacactagaaaaaatacagtgttggcacaagaccaactcagctttaaatattgttgctcttttaaagggaggtgaaatgggctatacaccaacaataatcaaattaaatgtccttcatttaataaatatttatttttaccaacaattttttcaatttaatattttatgatgaaaaacgtgcatacctcttatatttt

SEQ ID NO: 239091 - DNA, 785 bp, Glycine max
  unsure (1)..(785): unsure at all n locations
gattatactgtttattgtatagtcttatgcttaatttatccttcatttttgtctttatcattgttttcaattttgattttcttttcttacttcttctttagtgttatttggattgtgaaaaggttttgctcttttctttccggactaaaaaaatgtcaccttatttgagaatgtctcttgaatatatatatatatatatatatatatatatatatatatatatatatatatatatattttttttttttttttatcttgaagcctttatttggctagtgagcataaatgattttgtttattccattgcaaattaagccagatgatcattgtggtgaaaagcgcaaagcaatgacacttgcaattgatgacaatgagagtctactgaagaaatccaagaaggagtggagttgcgagttgtgtcaaatttctgcaacaagtttgaaaggcttgaatgatcatattcaagggaaaaaacataaggctaacaaagaatccactaaaactcanaaaataggtaaggagaaaaaaacaactttattattgaaaaaaaggtaacattgtgtgaaatgtactaaagcattattattatgaatgcagggctgattcaagaccaaaagtgaaccctttatcctttgttaacaccccgaaccatgcaactggaatttaaaaaaagggccagttgttcacaagagcaaagtgtaggtgatttggacaccaaattgaacacttcttttaaccacccttgggggaaaggcccaagcctttttttatgatgccggctgacg

SEQ ID NO: 239092 - DNA, 462 bp, Glycine max
actaagcttgtgctgtgtacttttactctctcaactctcaattactggggcctttagcttgcgtttgtgtccttctatgctatattatgcagtaaaaagatttgagagatttttcttacagtaaaacactaaaacattctgtacttcatgatatggttttgaagttctgaggggacattttattttcctgtggtggtttgcatcttttgcaagtatcagataacactccttgatggggttgggagtgtttggttctgttctggttttggcactcttattcaagcatttggcatctcaacttccaaatactgatgagttctctgtgtctgagttcttgaagaagatgatgggtttagcatctttccaaggctacaacttctctgcttctgtctgttcatggaaaggggtttcttgtgatgccaatagagaacatgttgctgacttagtcttttctggtatgga

SEQ ID NO: 239093 - DNA, 514 bp, Glycine max
agcttcacatggagctatatcatgtggtatcaagagcaacttcttctatgtaatgttcttttgctttctctatcttttgttcagtcaattcactttcattccttgttcttcatcttattctccatgtatctcttccattttcttatggtttggtgttttttagagtggatccaaaaaaataaatcgattaaatcttagatctacacttgttcttgcatttctatggttcaaattttataaatctactcttgaatcatgtttttgtgttgattttaggttctataatttttcagtcataatcttcttgtactaaacctttaaatttcaattttcttgcaaaatattgattagaaaagaaaacacaaaaatctaagtgtaaatcacttaatccatgttgtcttagagtcatgtttagtcataataattgtcacattatgttctaagtttgcgttcattttttattttgttgattgaattctagataccatttttttatttattcttgcaattctta

SEQ ID NO: 239094 - DNA, 532 bp, Glycine max
  unsure (1)..(532): unsure at all n locations
tcaggctgctcaattgctccaggttgctgcatggaagggcaaaggtctgtatggtggtcatcagaggagcacaaaccacaaacccttgcgacaggtacaaatttctgattcaaggccagctgggttaccaagttgaccaacgcatccagtttgccttcaagcttcttagtttcagatgatgcagatgggtttgtagctacctcatgcactcctctaatgactatggcatcatttctggcactaaactgctgggagttggaggccatcttctcaattaaatttctggcttcagtaagagtcatgtctccaagggctccaccactggcagcatctatcatacttctctccatattactgagtccttcataaaaatattggagaagaagttgttctgaaatctgatggtgagggcaactggcacatagtttcttaaatctctcccagtactcatacaagctctctccactgagttgtctaatacctgagatatccttcctgatggctgtggtccttgaaacanggaaaaattttt

SEQ ID NO: 239095 - DNA, 439 bp, Glycine max
agctatgtgatgaatcttggctatctacacaataaggtgctacatttcatactttattcaagtgtttttgccacctaaagccgcatgcaatttcaagtatatttccttttgctgactaaaattgtattcaaattaaaaggtatttttttgtaatgtattttttttttttgagagaaacattaaccatgtcccctccttccttaagggttagtgttttgcccatcttgaacttacttaagttagaattaggcattgattacttatttttaaaacaaacaaaaagtaaaagaaaactgcgaatacaaaggatacagggctgccttgcagcgacgttctctgcttgtttagcgtggagaaggggcgaccatcagtcggacgtgaccccatccccacttgcatacgtccctgagtgcctgcaagtatgaaacaactgggtgtg

SEQ ID NO: 239096 - DNA, 169 bp, Glycine max
accccaaagtaacctctctttccttttccttccttaattttggggccccccccctcttttttttttcccttttttttttcctccatggaggcatcctttccaggcttttattccaaggctaatttagggggggaggctttttcttccatggctatttccttatgggagg

SEQ ID NO: 239097 - DNA, 416 bp, Glycine max
agcttgccatatttgttgttttggtacacaaaacagaactctaatttattaaagcattatctgatgtaccagatgcgtcctacctcacaaactagcgtttcatcatacaacattgctacacctttaatcatttctcttatcttattacttggagaaaattaatgtctcctatattcttgggccacctgcgcaattcaagatctctaccggaaaaaaaaaaagaaaaagacatgaacgagttttgagtttatcaatagcggagtactgtgcatgcccataatcataaccatgcattaggtcgacctctaaaggccggaattaatccaaattatatgacacaattgtcttgtctaaattaaagccgcacgaaatacttttttacggttcctccacatatgaacacatatgatcaaatt

SEQ ID NO: 239098 - DNA, 1174 bp, Glycine max
  unsure (1)..(1174): unsure at all n locations
ggctctcctcagcgcggattganactgagntcctttcaanancncanntnnagntgttcaccgtttgcattcgcactaagaacggtacacttcgctatcacgaggcccaccttactagtggtttctcaacacaagtctatttagtctgttaatacggacattaaaaatgtccctttgggcatcacactggttcattctcagtattcctaccaggtgtgcggcaccatgactgcttttggagctgtaaatactgtcaactatgtaaccgggattggcggcgccaccccctcctttctacgtcgttaattaaactcgctcgaatgcgtacctattctactcctccctcactgaatacggactaacagaagtgcgacagcaatgccggaagaagattctcttatagaaattaagatttgctgaaggccattgaatttatcttttgaggacgaccatctcttttattcttctttcacacaggccttgaacattattaatctgatggccctcttaagcgatgacccgcgaaaactctaaggcggatgtcatgccacccccaacactcccttcattatatcctaacacctacagcgcttgggtggcgattcatctcacacatctgcaactattcttgaattattaccagaacatngggtttcccgctaatgtcaactatagaaattgtgcgtggataaatcaccgtccctcatctcaccaacggcataaaaggcgtagatctctcctctatttatctgctatcacatgaggcgcctggggagacaatgactcctgctctccaatgacgttcgctctcaatagcgggccatatggtaaattgcaccanaactccctgtcacctctatcgaccttacagctgccatctaatatgtctctttaacatcgattctctgtcctaatggcttgtacggctacaccgctcactcacgctccttcgctctcacttgaagtacactcatagcgcttggtgtcactctataactgcactcgatctactcgcgtactgatcaccactgtctgcttctaatatacgtanaaactctaactgctctcttggcactacngtcattctcatcacgctctatcgcctagtatcttgatgatctgtcgcttcctacaacgtgcactaactgctctcgcgctctctctctcttgtctt

SEQ ID NO: 239099 - DNA, 316 bp, Glycine max
ctctactcagatgcctttgaagctgctcatccaagcttttcagatctatctgatgcgctctcacataccccccactatcactgttcctcataatgtaactgtctctatctctcacacacacacacacacacacactttttctatgtaaaattcaaaaaattcaccacaccccactatggactttgaagctcaaagtcactcggaatcatcaaaagatggtaactttggtagcacgctctggttttgagcaagatcttcttggtgggacactcgtgactctgttcctctactattactataactatgagttttgctg

SEQ ID NO: 239100 - DNA, 520 bp, Glycine max
  unsure (1)..(520): unsure at all n locations
tcacagatagggttnttatcttttaggtccaccgcttggntaccaacggatttatctggttcgtcacgtatgaaccattggtttaccaacggatagaaaaaggctcaaaagatatatttaataattcccatatatttcttattcttgaatcttccacttattataattaatgccaaaattgtgaatttacctcaatcatttttttttatcgttttgtcaaattttggcattcgattttggaatgctacacgtatttataaatctaagacagtacattaatatatacttacataaagaaaagacaattacaattatgccaaattatatagtaactaggctgttagaaataactaggcttttattcgatatattctttttctttttttccttctttatcgatgcaacgtttccggccaatttcagttttgcagtaaagtagctgtaatatatttgcaattggctgaaaaaacatatatttgtgatgactgatgatgaatcgacctatatatgtcattctaaa

SEQ ID NO: 239101 - DNA, 317 bp, Glycine max
agcttgaaattgaacaacggaagctctcgagaaattttttgtgttataaatttacacacagatgctcgatccggggaaataatatattggagacgcacgaaattgaactacggatgctctagacacaggtgaatggtgataacatgtcactcggatgggcgagactgtgccaatttctatccagacgcttgaagtcgaacaaccgattgtctaaacatattacaatggacgcaactgtttacgcgaatgttcgattgggggacaaaactcatgctgacgctcgaaatggaacaacggaagctctatagaaattcgaa

SEQ ID NO: 239102 - DNA, 452 bp, Glycine max
  unsure (1)..(452): unsure at all n locations
tctatataagctgaaccatnttatcaataaacacaagttgagttttattcataaaattagagtttatctcttttatcttagtgagagtgattctcctaaattcttgagtgattcaagaacaccctggctgtatcaaaggacattcacaacctttgcgtgttgccctcgctggaaagagtgattctttccttcctttcatcttcacccttgttctttcaaaccacaattccagaaaatccacctctgcccagaattatctcgtggccataactcccattttacgcactcaaattaagtgattcttgagcctaaattgaatttcaaaacgagtcctttcacctcgttttggaatcacctcatttggagccctttagcttcagntatttccatttctatatttctgtccagccaccacttaacctacgttttaccatcccattcatccattttat

SEQ ID NO: 239103 - DNA, 651 bp, Glycine max
agcttttggtttatataagcttcatcttcaagtatctttttctcacaacaagtagatatcttcacttgatattcatatgatgaaaatggtcggtgggagcatttaatgctagcattaaatgcatgtcattttctcatgcagaaagtcctctcctcaacacttgcggtgaaaagaagtgcatcaagtagtcactcctttgtgtcagagtaggtcctgcataacggagctctcctttggatgacgattgagggatttcagatcttgactttatttgtttttcataagattcaacaaatcctagaagaatgtttatgcaaagaaaatctcaaacacaaagtattaaatgaggtcttaaatgacatcacacatgttgtattagattatgactccatctgcctatcatctgaaacatcagacgtagatcttatttgatacgaaatatcagacacataccacacaacttttaacctttttatctggttacatttaatcaaaataattaagggtcttaattcatttttaagacataaatgcccttttgactcaacaatctcctattttttgatgatgtcaaacaaacacaaaaggttaaagatgaaaaaggaccttatagatatggcattagtggcatcatgacaaattaatagaatt

SEQ ID NO: 239104 - DNA, 537 bp, Glycine max
  unsure (1)..(537): unsure at all n locations
gtttgatcttctgattcacgtgcttaaaatgctctcgatacttttattcttcctctcaaactctttgaactcttccttgcacttcctcatatcattatctaactcctattttatgaaaatgaaagaaaaaaacaatgactagattacttcctcaaaagcttatcattaagaatcatatgaccagcaatataatcatgcaaactgattcaattagaaaacccgtctcatccaaacctcttgtcttttcatatagttgttgggcgcagtttcaagctctttgagagtttgttcactatcttggattttatccctggaataagataccaccatgttcttcgcgaggaaagaattcaaattcaccaaataaagaaaaaaaaattccccattgaaatccaaatgtacctttctgccttgagatntcttttagagtagcaacattcccttgtaactcattcatttttccacctgtatcatcaagggccaactttgtagctttctgtgccatttaaacagagacaactccttaacatgtatgct

SEQ ID NO: 239105 - DNA, 500 bp, Glycine max
agcttgtagggttaaagtctcacgattgtcatgtgttgattcatcatcttgccaaacaaagtcaggttagccataactcgcctgtgctttttcttccatgccatatatagcaaagtcgttgatcctgtcaagtatgatgagctggaaaatgaggccgaaattatactatgccagttggagatgtatttttcccctgctttctttgacatcatgattcacttgattatggatctggtcagagaaatcaaatgttgtggtcctgtttatttgtggtggatgtacccggttgagcaatacatgaagatcttaaaagggtatacaaagaatccttatcatctagaagcatctattgttgagaggtacattgcaaaagaagtcattgaattttgttcagaatacattgagaaggctaaacctattggccttcctgagtctcggcatgatgacaaagtgggtggtaagggttcaagaagactgcatgtgatcactccaagtctaaa

SEQ ID NO: 239106 - DNA, 484 bp, Glycine max
tactccagcttttcttggcgccaaaaatttatcattctagttaaattagccactcacatataatttatactacaagaaataactgattccaccttcaaaagtcgaatttgatggtgtaaagcaattacattcccagtagaatctttgtttaccacagcctacaagaacaatttatggaatgtattaggatagggtgatgagattcattcctttggaagaaattcaaactgatcatagaatggcactcacattattttgaataaattttgctctctgagcaaatttaagtgtattcaatgtttcaacagcgcagctgaaaaagtgaaacgggccaatttaaagagagggtccagagacaagcttgcctaccaccttattgactcagatctttatagtgacccagcacacttgtttgaccactgtgaaaagtaaattctcatgctgagaacagtcaaaacattaagctggacatctagaaaattat

SEQ ID NO: 239107 - DNA, 992 bp, Glycine max
  unsure (1)..(992): unsure at all n locations
cggccaccccccggcgcnattaganaactggtaggcaccgactgatctatatagaganctagcatgcatggcatagcttgctgtgtatggatgaatggctgctcaccatcacgaagagggtattatntatggtggacctgggcagatggcagcacgaacagtacctcacaccatccactggataaccgtataaggaccactggtcctcctgtaagacacacctgccaacatgatgctcacgtccttcctcacgatagccatgtatcgctgtgatcctattcaccgcgcgggtcacccgatctattccgctcctacgctatccactaacactacgaggcctgtccaacatcgatatcctcacaacgctacccgaaccagccaatgtaggtgcccaggacaaaataacgctgcccaaagactcaataccaggataacagcgtttttgttacttagagagtacagcgacacttcgttctttccaatacgttaaccgatggatcgactcgagaattttaatggcagcctctagtacacaagttcacgttttgaccgttgggatctactagcaaacattcagaactgattctgtactactctttccacagccaaccatactcaagcatttttctgcacagagcgccaaattctgctgcaccaatttgacagcgaaatccgcatgagtgcggaattttgagacccactgttgcttcattcatttttcccaaaaaaaaatctacaaggcccaaatcatgtataaatcagggttaaccaaagtccagcttctcaccacaacaacccgtaattctagtgtttccaaacccctccaatttatggattttctacgggtgtgaaagtcgaaactgcgaaatgggctcattttggtgcgcactcctctcccctccacccgccttctactccgtaataaacccggtgcaaccgggtttacaccccaaaattccccggtttcaaatatggctccccaccacccccct

SEQ ID NO: 239108 - DNA, 527 bp, Glycine max
  unsure (1)..(527): unsure at all n locations
ntgcttccacacgaatctctctacctccacagaaaatgtnntacttattgatggtcttaagcataatttattaagtatttatcaatcatgaaaaatgccttttggtatcatttgattctcatatattccaacaagtggtgtatcattttcttttgggctaagaaatgatactttgaacggtatgacatgctctactcttttaattcattataaatttctgaatgcttttattctctctgctcctgatttgtttttaatgttgataaagggggagagatagataaaagataagattgtaaggggattatttattttttatgagacaactttttatatatatgaaaatgtatgaaatcttcaactgtttcatataagcaatcattgcaaaatcaagggggagtaaacgacccanatattctttttactcctaacctacaagtggttgtcatcatcaaaaatagagagaatgtgaatcatgcaggtttggggtttgatgatgtcaaaaagaattggcttgataatgattg

SEQ ID NO: 239109 - DNA, 498 bp, Glycine max
agctttgttttgtgagttgaaactatgtatttgtaacctataaacccacacaactccaacctccaccacccctcatatcctcatatctttcactctttttccttttgttttgcccaagacactggcttctggagtttgaggtacatagtcttggaaggattctccacattcctcaccaccccttttgtgtcctccaacttctctgcaagattttctcactttctaggcccttgtctcagggtacatgcatctgcctctaaatctttgagcttttcattcatttctttaaaatctctcaacatgggaatcccttttttggatcaaggctttgaatcttgaaacacaacttttttttcgattggcttgttaatttttattagtaggagattcgaacctacaacctctttttccttcacaacttgaccaaccttatatctcctttttgaaacacaacttgtctttcaagttaaaccttccaacactacatcataaacgtat

SEQ ID NO: 239110 - DNA, 530 bp, Glycine max
tgtaatttacccccttttgtatttatcttttgtcggaattggaaaatgtcattttgattttaaaatttgttaattaacacgaacagggcggtgctgtacgagagaaactattggtttaaataactttgggggatgggagggtcctagaaatggtgttccttgcaatttgtacagagacaagaatattgtactatatttcgttcacggaatagaccacatgaatcctatagacaatgctgttcaagttgacaacatccactacatagtgaaactaatttttccaacaaagatttgtttttttcaattcacaaaattcgaacccaaaatatttacagcctgaaaatggataatttaactttagagattctttaattatgtttctggtctttagaatatatattagataaagttaaagatcttactcttataatctgaagttgaaaatgtaatcagctcattattaagattatgatgttagattttattcagaggtttgttctgtcgttttctcgttcatattaatgaaaaat

SEQ ID NO: 239111 - DNA, 376 bp, Glycine max
ttgagatgttgctcttgctgcccatattttttcggtatggtatatatggcatagtagaaacaagattcactctgataatgtgaacatcccccttaagccaattttctctttgatgtaaactgatgatcacatgacaagaaatgtttctaaaagaactatgtcttcatccatagattacttcttcatcctaaaaaaattttttgttcctagtcaccttaaaaagcctcatgttatcaaatataagtgtgaggtgaagtcccacatcaagtaaaagtgaaaatgttgagcaccactataagtgaggagaagaacccataacctgagccttaaggttttgggttaaaatatggtgtcaagttcccttatgtagttgctc

SEQ ID NO: 239112 - DNA, 558 bp, Glycine max
  unsure (1)..(558): unsure at all n locations
tgcagtgaaactttttaagtgtgtgacataggagtaagctgagataaaatattttaggtcatcttgtaaaatatcaatgatttttcttttttcttaaaatatgtttcgaaagaaaatcaaagaaactttttttacaaagataaaatcaaaactcattcctcttataaggatggaaaacaaatttaaatctaaaatataatgtactatatcttatctttaacgtaaataatgtaacacagaaatcttgacatcgcctaattaaaaatcttaatgtaaatagaataatcttaacggaaataaaaaaaattataaaactaattaaaatcaatccaaaattaaataaaaagcatattctttctatatatagttataaaaaaaattatttattaaatcaattaaaaacaaaattaaatcctaagatgtaaagaaaaagagtttaatattttgagaacaacgcatttagtacttaagataacaactatcaacatagacctaaatattnttaatagaacaattattattttattataaaagagtaaattactttttggcccttat

SEQ ID NO: 239113 - DNA, 582 bp, Glycine max
  unsure (1)..(582): unsure at all n locations
agcttagcatcaatgcgattctcttcccaaagtgacacgactcatattaacaattggcaaagcgaaacattctagtcgtaattggacccacaatcggttataatttttctcacacgtctcgtagatagagctaaaaaaaactagtattccagtaagaacgacatcagatgaaaattgttatgtacattaaacagtaacaacaattaaaaaaaaaaaaagccaaccttacacctttgtatattgtagtgagcaaagatgttaaaaagaaagaataagttggtgataaaagaactagtttctttaaataaaaatagttgtcgaagaatcgccgtcacatttgtcgcatacgaacatgcatctccctaggcacggtcattacctacgcgttcataaaaaaaatagaagggaaaaaaaaacgacacaattagaatataatggtttgacaaaacctgttagcaattgctggtaacttcacgattacgttgacgcanaacacaaaaaacattgataaaattatattccaaaagcgtaaaaccattatgaatcagcatttttacccatggatagtttacatttttatta

SEQ ID NO: 239114 - DNA, 578 bp, Glycine max
  unsure (1)..(578): unsure at all n locations
tatccactactcaagctntggataaatctcagcctgggactggtgaagataataacaaaacggatttggatgtttcagaatcatctgatcgggatgaagatgatgccactgacagcgaagcctctggttctgatgaagacaaagatgcaccaaatagtaatgctaggaatggagtccacttgcaagaacatattgattttcaagatggaagatggaggagaagagcaatatttggaaatgatgttgatcaaaatgatctgatggtgagctttaagcaatttgtgtttgtttttgagtcacgcctcacttatacccacaggaaagaaactagattgtgttaaggccattccctcagttattatttcttcttccaggaatctgtgtacataggctcaagctaaaaattttattgaattactgattgtgcagttaataaaattatttttcttttgtttgtgatatgtgtatcagtttgcattgattaatgctctactgggttactcataatttcagactgacttctttgataggattcaaaaggggatgaggatggtgctaccagtaatgatgatgtagaa

SEQ ID NO: 239115 - DNA, 496 bp, Glycine max
  unsure (1)..(496): unsure at all n locations
agctttgagccaaaatcctgactcaccataaaccttgacccatgtgagaatgtcaatccttaccctcggaagcaaaaaaaagaatagaagggaaatttccaatcaaagaaaaagagaaggaaaatttccaatgaaagcaaaaaaaagaaaagaaggaaaattccccaatcaaagagtgggagaaagcaaaaagaaaagaaaggaaattcccaatcaaagaatgggagaaagtaaaaaaggaagaagaagaaggaaagaaagctcctgatcagggatcgaaggaaaaacagaagaaatgtgcagagaggtctttggaccggacaatatctgaacaatacagaattgtcaccgaatgaacaaaaaagaaggaaaggaaaccacgacctaaaatggtcttctccctttgattaccaaccaaaaatccgtgcgctagcgactttttcgccccgcncttaacaaaaaaaccgaaaaagaaaaaagcccaaccaaaattcaa

SEQ ID NO: 239116 - DNA, 475 bp, Glycine max
tccgactatgctcttgtgtggtggaacaagcttcataggtttatacaagaaatgaagagcccatggttgatacatggacggagatgaaaaagatcatgaagaagcggtatgtgccggctagttactcaagggacttgaaattcaagctccaaaaactaacccaaggcaacaagggggttgaggagtatttcaaggaaatggatgtgctcatgattcaagcaaatattgaagaagatgaggaggcaactatggctcgatttcttaatggtttgactaatgatatccatgatattgctgagctgcaggagtttgttgaaatggatgatttgcttcacaagatgtccgattcagtagcataatataacgagacactctaaattgaacaacggatactctcgagaaattcaaatggtaataacttttaactcggaagtccgattcatgcgcataatatatcgagacgcctgaaattgaa

SEQ ID NO: 239117 - DNA, 612 bp, Glycine max
  unsure (1)..(612): unsure at all n locations
agcttcagattactaaggcagattcctatatttggntctatctgttctttctccatatccttttccacctgaattgactcattgactgccatgtgtttttttttccaaaggaaaatatcatcatatacccaaaaaatattagctagttccctagaatagagctatatcacacaaaaaaaaaaagcaaatcttttcaaataaaaggaaataaaacaacaaacttgtacttgtacatagaaaaaaatggaaatagcatcctaaagtagtactatttacaataagacagaaataaacctatcctacaaatctgttctaataataaaaaatcaacaacagtaactagtaacataattattccttttatatttataacataaaaagtgtaactttatcctctacagttcttttttcaatcaactttttcctcagcctacataaattttcattggatcccttttccttcttcacaagaaaacgtaaaagcatgtttataatgttgtatcaaattgatattttcattggtaacatgatgttactaattttaaacataattgcactttaccatcctgacttattacaagtttgatgctgaagatactatctaaaagtatg

SEQ ID NO: 239118 - DNA, 518 bp, Glycine max
tgttattgtaaatatgtagagcgtgtttgacacagcaattacgcaaaagcagcgagaaagaaaccccaaaagctccatttaataattgaaaaaatcatcattgtacaggggtgatcctacagagcgaagcaaacagaacatttaccaacaagattactttgttgacacaacagaattgatttatttatatataaagcagtgagattgtgtttgccattaatgattcactggatctatttcacatttgcatgttgaataagataatcctatggcaaatttatgctgttaaagggtgttcgtgtgggacgggttatattgagttctaaccggtctgaattttttatagggtcaattctttaatctaaaactcaatccgattaaaacataaaatacatggaacaggacaaggccaacttgttagcataatatatttgatacatctgctacacataaaaaagaccaaattaagagtgtgcgactaataagacctaattaagaatgtgagtaaaggaatgtca

SEQ ID NO: 239119 - DNA, 500 bp, Glycine max
  unsure (1)..(500): unsure at all n locations
agcttgtaccttcacagtctacaaaatcgcattctaaattgattgagaggtgttttggctaaagaaaactttagattttttgtattttagagcccggccaaatgcagcttcctaatcacaaaagatattcttcaaaataacattatcttgcaaattttctctagaaaacaatcatccacgaataataaatgcaaaatcccaggtgctttcccacaaatcttaatgccatgaatatccctcctattttcaacccttctcaataaagatgtaagaccttgagctaaaattataaatataaaaaagggagaagggatctccttgccagagatctcccaggggagataggatcaaccttgtcatgattcactaccactacatactaaacagttttgacacacatcatcatccactcggtccattgattgcaaaatcacaacttgacaaggattgcatctagaaaccccagtcaacgaggtcatangccttacatatatcaatct

SEQ ID NO: 239120 - DNA, 545 bp, Glycine max
actcaagcttcaacaattggtttcttatgctattaattatgggaatcgagactgctatagttgatagttgtaattcatatataggattcgcttaagacatgcttaatcttatctacttcgtggggtaatctaataccaaatatgttggattcaatcaattaaataataatacattaatgcatactattgattttattttaaactcttcttacctagtttgacttttagtttcatgacaatgcaaatactaggattagtacttaattaattaaaaactctgaaatgtgtcattatcagtctccttattattaatttttatacaagcccttaaatattggccaagcacaagccaatctcattgacacgcatttcattgctttccacgcggttcaatgacctttgttttttttaatcaacacttccgtcatcgtttggataagacaaagtacaaagattcacgttagctttgaaaaccagtttggcatcaattattgacatatagtagtgcagaatttgcctaatatatccttcgtcaaaataaatta

SEQ ID NO: 239121 - DNA, 515 bp, Glycine max
agcttgatagacctgtaattcttacacttgctgggttaccactctcaacattgggcaatgcttgtccgtacttaggggctcgacaaaattatcaccccctacctgtcaaggctaccaccccggacattagacaatcttcaacgcaggacaatctcttttgcctgcaagtcggctcagagcttggtgttagacaagtggcctcagaaatcttaagaagggggggttgaattaagattatgctaactattcccccaattaaaacctactcagatttttatgcaagttctaagtttcctttataacaaattacttagatgatgaatcaaatgagcaaactgaaatgagactaataaacaacagtaaatataagagataaagggaagagagaatgcaaaaccaaatttatgctgcttcggtcacacccttgtgcctacgtccagtccccaagcaacccgcttgagagttccactatctttgtacattctttacaagtactgaacaccacaaggactttc

SEQ ID NO: 239122 - DNA, 529 bp, Glycine max
tgatggacgaatggcctcactccaagcaacaagaatgttcaccgcaggagctcctaagttaggctttagaatttcaagggtgagaaaattaggccttcttgatgaaaatgctggtactacaggagatggtttgattcccaaccttgtgcctttaaaagctagagttgcagtagaacttttacttgataggagataacttttgagcttttttccttctttctctcctatttcaactactagaaggaggtgagaatctgcaaccaattcttctccattggcttccgtgtttgtgagaatcattcccacccctcctaaacttctcaccacatcacccttttgcactctaggactaaggcttctatcacaaattactatctttcctgacagcactttaggatccaaggtcccttccaagcatatagatcttggatcaaccctactagaattgctcaccatgtaccacccaaggtattgtttctcaattgatagcacatttttccatttatagagtgaaactccaatcattttt

SEQ ID NO: 239123 - DNA, 439 bp, Glycine max
agcttgcgtcgatcgtacatggtacaaacattgtctttttttatcgtgacgtgatactggttgccctataactaaacctaatgagagagagctgactcctgtggcgtgacccataatgatatgtactcataagcgcccgactaggactttcagtgacatggcccaatattgtgtataggaataatacttggcatatatggagcataatgtcaaagcaatggtcagcgtaactcgttacgagacagcgtgcaatcataatggggaagagaggtaggttgtgaagtaattaacatgtgtagtttctgacctgctactaactgctcatgagcatgtgtttcaatcgagaggtataccacatagatcgcgatcagtgccacaagataaatcagtgtttaattgatgcaaaatacaatcctcctgtaaactgaaacaccattta

SEQ ID NO: 239124 - DNA, 966 bp, Glycine max
  unsure (1)..(966): unsure at all n locations
atgggcctctgagcgnggnnatgaannacctacgtcccntttgcaaangcccnnnnnnnnatattantaaaagactttctctacttgantgcatttttatcaattaacaagtgccaaatggctcgtttattaaatgtattctcttaggcgcctatagctacctggctgcgaaatggactttggtcttagttatgcggggtcatctgatatagtaaacccaccaagaaacattctcatgaacgagacacaataaacacatgtactcccgattctgcctgctggataacattttacgcacggggtagaaccaatttataacgaccgcccaattaggatttgtccaccatatatacaaacagccgtggtgaactctaaaggatgcatgtggtttcttaaaaccaacccaaaaccatgcctctttgtattgggcctgggaggagttcacggggacagctattgttggcctatgtccaaatgagagtaaaacaaaatgcatattaattataacgcgagtaagttcattatgcaccctggcttcaagctctaaagtgaactcaaacttacagaggagaactagggattttgtcttttttaataaacgtctaacaccgggttatttgcctttgccccttaaaaatgacattcttattaaatgctttattattccaggagggcagtttcaaatcctccggatatttattcccttattccgtgccggtaacttaatcacctaactctactccaatctagtttatcgatatttattaatcaatttttaccaaaccactttatttttctcacgccagcccatcactccaacagttctcacatccttgtacatacattgcctgtgtccatgcattcctcttcttccactccacctcatgctccgccgactctttcattacagtctcgtccaatcactgaattactcggccctgtcatcatctgatcgtgaactcttcc

SEQ ID NO: 239125 - DNA, 320 bp, Glycine max
agcttgtgtcgatcgtacatggtagaaacattctcgcattttagcgtgacattgactggtttccctataattttacctaatgagagtgacctgactcctggtgtgtggtccattttgtcatgtacttctaggcgcccgacgaggttttcactgacatggtacaatattgcatataagataaatcttgatatattggtgcataatgtctttgaatgatcattgtaacttgttacgtgatagagtgcaatgaatcgtgtgagtgtgagatggtgtgttgcacttaagatgggttgatttgaacatgccactaatcattaatg

SEQ ID NO: 239126 - DNA, 455 bp, Glycine max
tgcgaggcttaatagtagtgttggacccaagatgtgaaatgcgtgaagatttatatgcgaaatatgatattgtgagtggtgtttgctagtggaccacatgtattcattgtgtacgttatgcttgggacttgatgttcgttgcttatggcttttgaggggatggaggactcactccattgttatcattttttaggttctaatggtgaacgtcaagacaaataacctattatggattagtgtatgcgagttcgtgtggttgcacaacccagtgtcttactgacactttttccaaccacatccaatgtcacttagtgtgggtggacatataaaaagtgctctcataccttggacttctatgcattgtggacttagcccacaccatcttactattcgttatgtggagcttgtttctttatggaactctcattcttggactcttcttttccgatcacttt

SEQ ID NO: 239127 - DNA, 415 bp, Glycine max
agcttttggtacaatgaagaagaagaagttcaaagagattttatgcttgtaaaggattgtaagagattgattggaagagtattcaagattgaatgaattaatagaaaatgcaaaaacaaagtcttgcttttatagactcttcatgtctggtcaagaagaccatttagaagagttataacatttagaaaagcttaaaaccaatttgaaaaagtcaaaaaccttttgaagagttacatcttttgatttattcagaaacagtcactggtaatcaattactaaatcagtgtaatcgattacacaaagcttttatgtgaaaagatgtgactcttcacatttgaatttgaatttcaacgttcaaaggcactggtaatcaattaccaaaacattgtaatcgattacagctttttgaaattaa

SEQ ID NO: 239128 - DNA, 364 bp, Glycine max
  unsure (1)..(364): unsure at all n locations
tctaaactttatacaagaatggagctctgataccatttgntaatttatttttctcagatatcttaagaagggggattgaattaagatatcacaaactattccctaattaaaaattctattttgattttaacccaaatcccaagattccttttaaaatgaattcctaaataattattcaaattaaacttactgaatagaagccatatacaataagaaataaaagagtttaagggaagagaaagtgcaaactcaattttatactggttcgaccacacccttgtgccttcgtcgagtccccaagcaacccgcttgagagtttcactagcttggaaaaatcctttacaagctctttaccacacaagga

SEQ ID NO: 239129 - DNA, 377 bp, Glycine max
tgctctgatgcaacatttggagaggttaatgaaacatttttattatgcgctccatgagaggttgggtcaaatggataatatagatcatactcgaagcaaaacggatgagaagagggaacgatggctttcctaaacaaacccgaattgatggtattaaactcaacattccttcatttaaaggaaataatgatccggacgcctacttggagtgggagatgaaaatacatcatgttttctcatgcaacaactctgacgaggaccagaaggtgaagcttgccctcacagagttatccgactatgctcttgtgtggtggaacaagctacaatcggagagagcaagaaatgacaagcctatggttgatacatggaccgagatg

SEQ ID NO: 239130 - DNA, 473 bp, Glycine max
tgcagaggatgcttcaatggaggaaaagaaagagggagagaatgtgagatgttttagcacgaaattggaggaataaaggagggagagaagtggaactttgaaagatgtctcacaagaactctcattcatcaaagttacaaccaagtgttacacatgcttctattatagactagggtagcttcctttgagaaagctcttctttaagaaatacttcccttgaagaagtttccttttgagaaaacttccttgagaagctagagtttagctacacacacccatctaaaaactaagctcacctccttgagaagctttcttgagaagctagagcttagctacacaccctctataatagcttagcttacccctatgacaaaaaaacatgacaatacaaaaaaagtccttactacaaagactactcaaaatgccccgaaatacaaggctaaaaccctatactactagaatgggccaaatac

SEQ ID NO: 239131 - DNA, 554 bp, Glycine max
gctgcatgcatgctatcttgccattgataggttcacgaatcttgggaaaccatttacctcaaatcctctgcctcacacctccgaactcgcaatcggagttatgaggccctccctttcgtatgatgcatccttttgtagaacctttcgcttgaaccatgtgaatcactatcgccccattttgtgtacaaccaacttagggctgcctgatgtacttcttccactttgtaagagaggcctccacagaatcactttcagcactgcaacatttccgcgatttcctgtttctgcggccattccgaaaccaacaaataaacagaaacatgttgcgactttgcacttactttcttcaataaaacgttggctaacgtctcagactcgacacaatcacatattgaaacataacggaagcataacaaaacggagcttatgcagctaccacaaattgattataacaaatagcgcgtgaattgagactataaagaatatttacattgtccttcaatcaatcataaactatcctgtgtgacaatccatgaaaaataaatttgactgaa

SEQ ID NO: 239132 - DNA, 579 bp, Glycine max
ttgcaacttttcgtccctagcacaattgtcaagattcaaactattcatgctctagacgagtctaaccaaccaatcccaaacaaggtcttatttcatcgatttttttggtcatttaaggcatacattgacacatttgcattttgtaaacccattgtgcaaatcgatggaacatagctatatgaaagatacaaagagacgcttttagttgcagttgcacaagatgacactaacaacatatttccattggcatttgtcagtgtcgagggtgagatagcaaatgggtgacacttttttttttttgcaaaacttgagaacacgtgacaccacaacatggtatatgtttaatctctaacaggcacaagttaatcaaaagtgcatacaaacgacctggcagtgggtggatagcagacaactcatcacatgtgttctatattccgcacatagatcaaaactacaaaaaacaattcaaaaaggaggacgaaagaaaaaaccttttgagtatagggtaaatatttctgttatattttaacgcacaaaattaattatttaacattaaagtacatttaaaattacattttt

SEQ ID NO: 239133 - DNA, 887 bp, Glycine max
  unsure (1)..(887): unsure at all n locations
gacgcccccccggcgggggtgagcnctgcggttagcaaccncccgattatatacaancgacctgcacgcatgcaagcatgcattttccttagaagagacctacttttgtatttttatgcatctgtccgctcgaccatgagtgcgagcatacgaaaatgtaccgactttgagcgagtgacacattaagtgctgtactctgaagaacccgatggcggaatggaactgcacgactctgatggcctggatggaaaaaacctagcactgttggatagactagagctattgtcacgagcaccgcaactagttgccagcaaacagggcatagaaatgtgtgagatcaacatgctggggaaaccccaaaacgtgaagatgagcaagccctatttatgcgctcacgagaagggcagcactgtgtgttttccacatcagagattcatctccgacgtagatgtggcctggcactccatattaaaccgatccatgcgcattgcacaactcaaacttttgaggaaaaggcaaagacatttacattcttagcatcatggcccgtctcatcgcctccaaacagtttctcgccccaatcataaccgcgggagaccttcatccaattcaattcgtccaacccccccacattggttgatcccccgacaccagaacccttccttacctatcgacaccgtctacacaagcattacacaacactctgcaactaaccgaacccctcataataccgcgcccacgtcgccagcataacctccaccaatcgactttgctctccttcaccactcgactcacttaccgtctctccacttctccaacagacattactcctcccccccatcacgtatattcagcctactctctctctctcgcccccaccactgccg

SEQ ID NO: 239134 - DNA, 1328 bp, Glycine max
  unsure (1)..(1328): unsure at all n locations
ctcccgcagctncgngnnatttgaaaanaccttacgcgacanactcngcaannaannncnnncancnncngnnnangnnnagcgccaagnctntacacacgggcgtctacncaatncancactggtcgcggctccttacgnatcgacgcagacacacagtttatatgttanatacatctgataccaaggcgtncacagaagatacatgacacatagctgcagaggaagagcanaatatatgcatagacagatactgcggtgtcggctgtctaccactcagcatcactcatgcgatcngtcaggacatcgagtanccgcatcttgcgctcactctacgatgtaacttcgagttatatgacttgataacaagagatactggtctgcctctgttgactcatcgtgactcgtaaagtgccgtatgctgcataagcgacggcacgcacatcgactacagttctctcatcatacgacaatgtctcacataggttcataatagagtacatctagtaagaagcacggtcgcttgagcgcggtacagtgaagtgcgtttcctgaatacgtctatgcaaagtcgtccataacccacacgttcactgcgagcgacgtgatcagcacctcacgatacgatactatcttacgctcataagagtccatacttgcaattcaacccgacggagatcaacatcttcaaatacgacacgcagacagaggctataaaaagaatacaacgccagaactcgcaaccaggtcagcttattcactatgctataccactctcacaagctcgatgacttgtatttagatctgtattataaaggtaaccgaacacaactaacaagattatatgttcacattccgagcatatattagctcactcattaattcatcagctaaatatatctcggagatagtggccggattcctaacaataacgctcatctcttgtagataatactgacgttatgctatacactacgattgacctatcgtaaggaattcaaattggttcgaagcccaaatcgtaatacgtctatactactataaatctacatggaattcggntgtgcatacatctacttgattcaactagatctccatatggctataaccaatgtaacgacatgtgtagtgagccggtgcataacgagcctgatgacgatactgtgacataatcggaactggtgctgactgaacgatagcatagaacattggcgtacctactcaagatcaataatcaatatagtcacagagcatagtctgctcacgggcggtgtcatctggtcaccaagtgctatacatatctaacacttgcgctcactcgtttaccg

SEQ ID NO: 239135 - DNA, 418 bp, Glycine max
agcttattggcccatggtttcatttcatctttgtatccccatgaagaagcatttccatttgatgtagccctttccttattataatgaggggtcagatcttcaaaaggcaaggacaacccttggcctagaaaatctagttcccatgctctagtgtgatgtcccaaatctctaaggtaggttgcacacagtggcgctgagatggtctaggtggcacaacgtcttcagggttgggtgcaagcagcactcgacaatgcttataagggtcgtgccaacattagatcttgaggtaaaggtaacccccaacgccagagaagggtgacagggttggtgcgcaactaaatttattggttaagggggtggtgcaattatgcgatgacggtgttggtcgttgatggcgatggcggcacacgtggatgct

SEQ ID NO: 239136 - DNA, 615 bp, Glycine max
tttatgagtggccaatataccaaaatcaacatttttttaactaaagtttttgttttattttctttttaatgtaaaaatgtgtaaaactagttgacactcctctgtaattggtttggataggatgttaagtacatgtaaggactattagtagcaaaatttcatcttgttgttcaagtctaaattataagcaatcataagtttacaattattcaactagtttttaagtgttaggagaatctacgtgaaaaagatcatccacatcaaataaaattttagtaacatcaaaagagaatcaaatttatatccacaaaaaagataagagtcatttttagatttttattaatttgtatcgacctgtcttgttataaaaatttaaaatagttctttttttaattattttatacttaatagttcttattaaaattaaaagatttatcatatagacagtataataatttgtgaataaataatataaaaaagtaaataaattatataataatcataattataatatataataaacttattgaattttaaataattaaatatgcacactgaaatttgattaatagtcaacataattctcatatacataaaattaaaaacataaaaaat

SEQ ID NO: 239137 - DNA, 605 bp, Glycine max
agcttcaggaacacaaaatggaactcatgagactaaatcttcatgaagaaaatgacaagaaaaagaaaggaatgacacttaaagttttatcttcagttcaagaagaaagtgataaagaagacttgaatgaagtagaagagatgatgatttcagtttcttcgtaaagagattaaataaattcctaagaaacaaagaaaatcaaagaagatcaaacttcaaaccaaagaaaagaggagaggattcatcttttgttccaaagtgttatgaatgtaaccaaccaggacatctgagagttgattacccgagtttcaagaaaagaatggaaagatctaagaggaaaactttcaatgataagaaagcaaataaagcttacatcacttgggaatataacaatatggattcatccgaagactcagaaaatgaagtcatgaatctaagtcttatggcaaaaaaatatgaaagcgaagaagaggtaacatcttctaacaataacttatctatttcctttgatgaacttcaagatgcattcactgatttacataaagaatcagtcaaacttgcaaaacttgtttcattttccaagaaaactattttaaacttagaaa

SEQ ID NO: 239138 - DNA, 618 bp, Glycine max
  unsure (1)..(618): unsure at all n locations
tgtaggattatggggtacccatcacatgtggtactaggtggcggtcgggcgatggtgcacaacaagctttccacatccacaatgcgcgcataaacccaccatcccctgttgcccacctccaactgagctcacgtactcccacgtagcccatatcctcgtttctctcaacaccgggtccccatcaatcctctcaagcttccacaacatccaagcaaaacaacattcaaacagcacaagctatcacagccaagcaaaacagagcaaaggcagaaaactctgctcaacacatcaaccaaaatcacagcttttctcacgtaaagaccacagtaacaattccttcgatccaattcgttaaccgttggatcgactccaaaattttactggaagtctatagtgtataagcctgcattttgaccgttgggatatactagcaaacatccagaactcattctgcactagactttccacagccaaccacacacaagcatttttctgcacttgtgcaaaattctgctgcacaatttcacagcaaaaactctgcataagtgcagatntcgaaaatcaccctttctctcatccaatcttgcccaaatcaaattctacaggtcccaaatcatg

SEQ ID NO: 239139 - DNA, 438 bp, Glycine max
  unsure (1)..(438): unsure at all n locations
agcttccatcaagtggtaatcagagcacaagagcttcaagttgtgctccttaaacctccattaattntttttctttaccttctcttccattgntgnttcttcatttttctccatgtatctcctcacatgtcttggtctaaatgttgttaacatgattctttagaatttccaccgattaaacttgctataaaaactagatttgattttctatggttcaaatttcttgttcttgttcttgaaccatgaattgtgttgagtttaagtccctttgagttttgtcttgatattttttgcggctgaaacctaaaccataaaattcttacaaaaatattaaagtagaagaaaacctcaaaaatatagagggacttgttcacctattgtaatttcttcatagaagtcatgtctagtcatgaaatttgccacataagatttcttatg

SEQ ID NO: 239140 - DNA, 630 bp, Glycine max
  unsure (1)..(630): unsure at all n locations
tttcgattcattctatgcacccgtagtggtccacattgtgtttcgggcatttttattctcattttgnttactttttataccccctgttgacgtgcttaagccgttttacttaagtcatttctcgcttaacttaaaaataaaataaatttccaccgaacgtttgaattatattatccgttaacttcggttaaaataaattccgaccgttcggtcgtgccgtaaccacgttggaaatcaaaaagaggtaaaaaataatataataatcaaaaagacatcttttagtaaaataaagcggaaaatcaatcggacgttttctctttgggatttctcattcttaatcgaattgattaaataactaaagtgaaactaaggctaaaatcaactcgcctagtcaagctcgtccacaaaaataggcttttgaagtttgtcatttcaatttctcactaagtaaaatggattcatttttaggtccaacgccttaaaatgatcacctcttaaagtaaaaaagaatcacttgataagaaagaactacgtaggtctgatttcctcatcgcaattgaggaatacgtaggagcaaagggaaacactcttggcgaccacaaaaagggaaaaaatataaaagggtttaag

SEQ ID NO: 239141 - DNA, 193 bp, Glycine max
agcttagtaatttttggtggagaagatgcaaagagaactctattgttttatttacatattcttgatttggaaaccatgacttgggatgaaattgatgctgcgtaagaagtttcctgaagcaacctttctctctcacttatttcttattttacctttttttggttgggtggggatgggtatggaagtttttaca

SEQ ID NO: 239142 - DNA, 527 bp, Glycine max
tgttgatgatgcagtgtttttagtgtggacatggctctcaaacttggacatttatttcttgcttcctttttatcaatggtcaactcacatcagagaaggttttttgttttaagtttcagtggctcttattatgagctgtaccagatccttgtattttgtagccatgctatggttccttttcaaactgctttagttttttggaaccatgactttggctctacctctgtacttttatagtacctctggtacttatatcaatatattatatttttgctgatcaaaaaaaaaaaaaaagtaacacctatacatgttctgccaattatgacccacaatatgcttacacaaaacaaagtagttaactactcattgtgaatttatgatcaggatttattaccatgataaatttccaacaaagtcatgcttactagttactatatgacgtgcatacagtaatgagaagcttgcccaattgcctagctttagttgatgaaacaaaaagtgtgcagaaactataatgaaaaactgat

SEQ ID NO: 239143 - DNA, 467 bp, Glycine max
ctacctgcatgcatgcttcacaattatgaactcgtagctactatagaattttcattatatgattcattatagtttactgctctatgtacattctttctaactatttctagcatttttcccccgttcaaaatcatcattcctgttttgatgctctacaacatctcatgttaaagtctctttgaactatccataacatatgatgatgtacaattcccccatcccacgcaaagtcatctattataactttagatgaactcattgtcaatgacgtaattgaaagtccatattttccatctctaatggatagagaacaacatattaaaggcagtggtgatcttcgtagctgctccaacaacactgaaactgacattcctcctatttctaatccaagcattgataaagtaattacatcaagtccagatgcaagatttgttaaaaaaaggcgacatcgttgcttggaggtaaca

SEQ ID NO: 239144 - DNA, 489 bp, Glycine max
tgagctattaggtagaagcacaagctgcacaacaacaatggctttattttactaacaccatatgtgtcaaacctttatgcatgccggcagtcttgtttcactgtttttaggttaaaattgtggagtacagattatttggattgtccaacttttactttttgttttttaaattttaatgtctcactcgcttggaatctattcttatccaatgtgaaagatatgtgaaggttttatagccttcacaacgatgacttaacctaactgaaagatgatacaatatgtagcaaatatacctgtgatgccatctgttactatttgttgggctcaaatgtatgttactcatgtcaggtgaacccgcacactcatcagctgaaactatgtgattttgggagtgcaaaagtgttggtaagatattgatctaagtgctctgttagttgatggaagctactgttttttgtcctcaaagttcatccatgtgcttctaattca

SEQ ID NO: 239145 - DNA, 926 bp, Glycine max
  unsure (1)..(926): unsure at all n locations
atgaccccccncccgcggggggatgagcgctgctgttngcgaccgcngatactctacaagccgcctgcaagcctggcttcttcagtgaataaccttcatcttgagagaaggatttgttttctatcaggacaggggacaaagacgcgcacgtgcaatttgtttgtataaggagaccccaccgtacgtgtctttgtgtgagatttcagagccgcgctacacaaattgaaccagtgacagcgatatgtttaacatcgttgtcacgcagagcgagaatattaccatgaacccttcggcaagaccgcacttgaagaacggaacaaaaaaaatgcatgttcaccaaactggatgtagaagggatcctacctgtggtagaagaaaagccacgtgggcttgaacataggtcgcatggctttctaccagatgcatcaaatggcgtatattgctgggcccaacacctgaaactggtaaccagcagccaccagcagaagcgttgtgatttgctaatatgcacccccacgtgccgaaccctcttgagtggcggtccaccaggacaagaccgtccctatttttcttcatcctccaacggccccccccactaaaccgatgttcgccttacttcccctactacataacaaagcttcactcggtactccaaccttcacctaatccgccccggctggcctgtcttatccccaccaaacactcccctgccccccttaaccaccgcccactttactcctctccactattcgcgcaccgcgcgctacccgctcacctctctccctcgcctattcaactagacctccgcactctcccctatattctctccataccccagtgccgctgcccacgcccactcctctgtgtcttattccgaccaccgccgcacctcctctcactcatcctttccactgtcttctcccccc

SEQ ID NO: 239146 - DNA, 454 bp, Glycine max
actcaagctctcttgagaaaacttccttgaaaagcttctttgagaaaacttccttgagatgctagagcttaactacacacacccctcttataactaagcccacctccttgagaagcttccttaagaagattcctaaagaagctagagcttagctacgcatacctctctaatagctaaggtcacctccttgagatgagaagttagagcttagctgcacaccccctataatagctaagctcacccccatgaaaaaatacatgaaaatacaaaaaaaaagtccctactacaaagactactcaaaatgcctcgaaatacaaggctaaaaccctatactactagaatggccaaaatacaaggcccaaacgaaggaaaaacctattctaatatttacaaagataagcgggctcatacttagctcataagctcgaaatctacccgtagactcatgagaacc

SEQ ID NO: 239147 - DNA, 178 bp, Glycine max
agcttgacacatagagggacttacaaggaaaagtatttatatgaactgtatccgaccccgagcacggaactacacgctctacgaccgtgatacccaaaacacgctcaacacccattgatgccaggcaatatttgccctatcaactccaacacttatgggaccattgaccttctgagtc

SEQ ID NO: 239148 - DNA, 258 bp, Glycine max
  unsure (1)..(258): unsure at all n locations
tcaagctntaatttgtcccatttaacccaagggatctttctttgaccttcttcacactcttaaaaaaaatctttgaatgttaactaatcgctttcctacttttaaagtcagtattataaagaaaaggaagaacaaagacaaagaggatagcactgaatttatgagacgaattttaccagcaaaagatataaagaccttgtattccccaaggggcaacttacaaaatctaccttaaactgattttcaagtaatttataa

SEQ ID NO: 239149 - DNA, 495 bp, Glycine max
cctgcggctgcagcttgcctaagaggtcagaagacaggcggttcttgaactagttccgccccggagtacgacagtcatcgctttaagagcgttatacaccagcagcgcttcgaagccattaagggatggtcgtttctccgggagcgacgcgtccagctcaaggacgacgagtatactgatttccaggaagaaataaggcgccggcggtgggcaccactggtcactcccatggccaagtttgatccagaaatagttcttgagttttatgccaatgcttggccaacagaggagggcgtgcgtgacatgagatcctgggttaggggtcagtggatcccgttcgatgccgacgctatcagccagctcctgggatatccgatggtattggaagagggccaggaatgcgagtatggccagaggaggaaccggtctgatgggttccatgaggaggccatcgcccagctgctatgtataccggggcaagattttgcccggact

SEQ ID NO: 239150 - DNA, 467 bp, Glycine max
tgccacccagctcgcccaggcgagcatggttgcttgttgcttctggaggtatcttctggagggcccaagtgggcctggttgctatttgcacccccatttttactaagtacaccccctgcccttttttttggtgattctttttcgtaaagttacggaaacttactaatttcgtaacgatacttgttttctttccttaatgttacggaaccttgcggattacataatcatcccctttttgacttacgaaatgttacggaacctcactaattgtgcaacgatgcttccatttgatttccggtgagtcacggaaccttacagattgtgcatcaatattttcttttgttttccggcatgtcccggaatttcacaaattgcctaatgatgggtgccaagcacctcacaaggaccaaacaaaagttgcatgccatcaagcaaaggtccccggacgaaattagggtatgacacat

SEQ ID NO: 239151 - DNA, 245 bp, Glycine max
  unsure (1)..(245): unsure at all n locations
agtggattggctgaaacaaaaatctattttcaattatccctcttggcaatcagccatgttttactctaacaccccacttcttcgaaatctttgttagaaaatgtctcgaaatccctaggatttactccacaatacataaaccttctacttcgttttgcaacctgtctcacactgctaatctctttcaccttctcgtntncntttcttatccttttcccgcactctctctctctccctgtgccccc

SEQ ID NO: 239152 - DNA, 563 bp, Glycine max
agctttgaggagcccgcaaggtaatctggaaaggagaatgttttgtgtccaaatattatctcgtaaggtgtggagcctgtgctactattccacgaagtgttatgggataactcaacccacggcaataacttgccccatgtttctggccaacgatgcacaaaggcacgcaaatattgttcaattaccctgttcattacctctacctgaccatcactctgaggatggtaggcagaactcattcgaagatgagtgccactcagtctaaagagctctttctagaagccgctgatgaataagggatcatggactgaaactaagcttctgggaatgccgtggagtttgacaacaatgtcaatgaacaacaaaggtaccatgtgagctgtatgagcctgaggtataatgccgaagtgaatcccctttgaaaagcggtcaacaaccacaaggagtacaatcttgccctgaaaaaaaggaagaccaatgacgaaatcaagggagaggtcctcccatggtctgaatggaactggaagagggcacaacaagcccacaatatgtttcgtttcata

SEQ ID NO: 239153 - DNA, 509 bp, Glycine max
ggtcggatttatcgtgaggctctttgatagaagtctgtcagtggggtcgatttttgagcataacccaatcccctatttggtaattaacgtcacagtgtcgagtatctgcgtgttgtttcattaaagcctgggccttgatcagcttcttttagatgtagttgaagttgtcttccctatgggccaatattgcatcgacgacagcaacgtttgaagttcctattccgggaaattaaaaggcttatggacaaacattatttcatatggtgtagtgtcggtgccgacattccacgaggtattatacgaacactcgacccaagggagtaatttgtgttatgtccccggtcatcggtgaacaaaagtgcacagatactgttcaacgacgcgattcagaactttggtttggctgtcactttgcagttgataagctgagctcatccgcaattttgtaccactcaatcaaaaaattcttgccaaaagtgactgacaaagagtaggtcacaaatcgagac

SEQ ID NO: 239154 - DNA, 890 bp, Glycine max
  unsure (1)..(890): unsure at all n locations
tgacccccccccggcnggttggcactctctgtccgcgcttcttatagagaactgcaggctgtcagcttttagaaccgattgtccattatatttatagagttattgttttcaccctgtgaaatgggaggggggtgaatgttccacatgttattaaaaagagaccacacctctcaaggctttgaatggttaaacaaaggcttccacaagacattgtaagtggggggggttattccaaaattgcggttccacaaagagctgtgtgagagcattggattcttttcctgtccttggtggaaaaccatttcattaaagtgggattgaccacccccttatttaacaagccacgcttcttgagctcgttaaaaaaatccaaggccttgtccaaaatggccaatggcgaaaagcccaaatgagaattttttaaccaaggaattactccctcggcccttaaaaagctcttgcgcaagaaggccacggttttccaatgcgtctcaaaaggattcaactcttgtgcaaaggcattatgcatcgcgctcgacttaaaatagtggctcaccaacacggcaaagttgtgagattcatacacatccttattagaagaacctcttgaatttcataaacttcctcctgagatgataaaaatgtaccttctgctttggtgcataaagccaattttttctactcactttgtactctttatcttcaacttatgaactttatcgcgtctctgctatttcgtcatcataaattctccatatacttaccgatcctcttttcaaactcaccatttctacttcacattacgcctccttctccttcccttctatctaactatctcccatttcctccaccaagctgtttctccgtcttcctacccacaaccccttccc

SEQ ID NO: 239155 - DNA, 431 bp, Glycine max
taccactgcaagggaaaatcatcaaccttgacacaagtaactactttaaatatttcttcaactaacatcagcacttgaacatattacatgttgggttagtaaacaacatattccgatcatttcactacagtttatgaagctacatcatgaaaccacatattaaagaaagtcaaaccaaaaatacaccacctaaatttatattaaaagcacataaaatcactatttacagttcaaacaaaatttcacaaaaatgacaataatgtaaagaactaaatattatatggaaaattgtttcggatagtaaaaatctcagagaatcaatgatgactagctctacagcaatatgaactcattaatagtattctataatgcccatgccagaccaagagataattcaaaaactcgtaaaaaataccaataaggggactttt

SEQ ID NO: 239156 - DNA, 541 bp, Glycine max
agcttgtagggttaaagtctcacgattgtcacgtgttgatgcaacaattgttagccgtggctatacgagacatcttgccaaacaaagtcaggttagccataactcgcttgtgttttttcttccatgtcatatgtaacaaagtcgttgatcctgtcaagctttagtcaaacagaaaaatccaaaaatgtcaaagaattgggtgttgaaaaagcataacaagactttctgtgattggattaaagatacaatctttgcagatgaaaatgcttcagaaacattaagaaatctagtagatgggcctaaaagaaatgttattacttggcaaggatacgacataaacaagtattcattttacacaagagcacaagacgataaaagtacaatgcacaatagtggggtcaccctaagggctgaatctcaacaacttgcaagtgtgcatgatgtcaatccctatgtagcttccatcccttactttgggttcattcatgaaatttgggagcttaactatgggaaatctactgtttggctttccaaaggaaat

SEQ ID NO: 239157 - DNA, 650 bp, Glycine max
tcagaccaaagcaactcaaaatctaggtatctaaaacccctcaattttttttattttcaaggtttgagaagtgaaaatgagaatggggtaaatttggagcaaactctcacctcacacaagtctataacattaatctaaacttgctcaaactggttttacgcctaaaattccaccgaatcaaaatttgacctttcaacaccccatttaccctagaaatggctcttgtttttactttggtcactcattttcttcatttgttcagtctaagctttcccataagtcctaaatgacatttaaaactaagattaactcactttaatctccaactaccactaaatccaaatttagcttttcaaaccctcaaagcatcacacttttccactcatatcactacattctcacttttcaaccctaggttaactctacccttcatctctatcaatttttccatcagcaatttcagcacacaaacatcacagagcatcattataaaaccctaaaacagaatgggtatatttagctcacatcaaacatgacaagttagcaagctttcaacaaatttcttcacaaataactaccacaaggcataaatctagtaaaaatacccaacatatctcccaaaaccaatacccacgaaaatcatgtgagaa

SEQ ID NO: 239158 - DNA, 282 bp, Glycine max
taaaaacattgaacgcacgaaaataatttcttattgatcataaaaatatttacatccagtgctccgcggaaattttcaaccaaggatgttagccctccattcaagggaggagctttcacaaatacgagaagggtttcagagaaaataccagattaccaagcattggggaagtatcctgcacctctacctccacctctaaaaacctagaaaataactttaacaactataatctacctaaaagctaagacctttgcatacgtgctcaacttttcccctggtctc

SEQ ID NO: 239159 - DNA, 363 bp, Glycine max
tgcctcaaagagatccaggaaagacaaggcggttgaaggaaccagttcctctcccaaatatgacagccatcattttaggagcgctgagcaccaacagcgcttcgaggccatcaaaggatggtcattcctccgggagagacgtgtccagctcagggacgacgagtatactgacttccaggaagagatagttcgccggcggtgggcatcgctggttacccccatggccaagttcgacctagacgtagtcctcgagttttatgccaatgcttggcctacagaggagggtgtgcgagatatgcgatcttgggtgaggggtcagcggatccctttctatgcggatgccctcatgcagatcctgggatt

SEQ ID NO: 239160 - DNA, 477 bp, Glycine max
agcttgattttggtttagacatgattgatacatgatttgtgacttgtaggatttgatttaagcaagattggatgaggggaagagtgattttcgaaatctgcacttatgcagaattttgctgtcaaaataggtgcagcaggattttggctttgtgcagaaaaatgcttgtgtgtggttggctgtggaaagagtactgcagaatgagttctggatgtttgctagtagatcccaacggtcaaaatgtaggcttatgtactatagacttccagtaaaattttggagtcgatccaacggttaacgaattggatcgaaggaattgttactgggatctttaagtgagaaaagctgtgattttggttggtgttttgagcagagttttctgcctttgccctgttttcttggctgtggtagtttgtgctgcttgaatgttgtattactttgatgttggggaagcttgggaggattgatggggacccg

SEQ ID NO: 239161 - DNA, 551 bp, Glycine max
tgtagggttaaagtctcacaattgtcacgtgttaatgcaacaattgttagccgtggctatatgagacatcttgcgaaacaaagtcaggttagccatgactcgcctgtgctttttcttccatgccatatgtagcaaagtcgttgatcctgtcaagtttgatgagcagtgaaatgaggctgcaattatactgtgccagttggagatgtattttccccctgctttctttgacataatgattcacttgattgtgcagtggatgtacccggttgagcgatacatgaagatcttaaaagggtatacaaagaatcaatatcgtctagaagcatctattgttgagaggtacattgtagaagaagccattgaattttgtttagaatacattgagaaggctaaacctgttgaccttcctgagtctcgacatgatgacggagtgggtggtaatggttcaagaggactgcatgtgatcactccaagtctagaagatttgttacaagctcacttgtttgtcttgaacaacaataatgaaagtttgccatacatacttaagcatg

SEQ ID NO: 239162 - DNA, 530 bp, Glycine max
agctttgatgtttgtgttgaatgcattaaaggtaaacagattcataagcaagaaattaggtgcatatagagctacagacgtgttgaaattgatacatacaaacatttgtgggtcatttcgtacacctttatggaatggtcaccaatattttatatcattcatagacgattactctagatatgcatacctgtttcttatacatgaaaagtcacaatctctggatgtgttcaaaaaatttaaagttgaagttgaaaatcaaatcaacaaaagaatcaagagtgtcagatctgaccgtggtggagaatactatggaagatatgatggttcaggtgaacagcgtccggggccttttgccaagtacctagaggaatgtggaatcgtcccacagtacaccatgttggggtcacctaacatgaatgatgtggttgaaaggcgaaacaaaactcttaaggatatgataagaagaatgatttgtcattccaacttactagagtcactctggggagagacactaaagactgtagcttaca

SEQ ID NO: 239163 - DNA, 532 bp, Glycine max
tgcttttgcttctacaaataataacaataataatttaagactaaatgccagcattttactatactttcaaaataaatacaaatattaaaaatatatataatttagaataaacctcattaaaaatatattgatatttttgcaaagtgggacattaaagtaaaatctcataaacttaacaagtacaagtatgcaaaataagctttgttcttcattcatttgaagaatttatgcaagattttaaggaatgtccgcaaccacaattccagccgcaatataaggcgtttggttttacgtcacaatggccacaattttgtcggtaaggcgtttggttttatgtcaccgctaccacaatttcagccacaaggtgtccgcttttatgtcactgaccacaacttcggccaaaacataaggtgtttggttttacatcaccgcaaccgcaatttcagctgcaaggtgttttgttttttgtcattgtggccacaattttgaccggaatgtaaggtgtttggttttatgtctctggcagcaattt

SEQ ID NO: 239164 - DNA, 408 bp, Glycine max
agctttcaattcattcttgttttgttcgctttcattctttatctcgtttactttcggtattattttcttccgcttttacgagctttcaaccgtttatttaagccattatctcatttaataattgataaaatgaatttcaaccgatcatttgtgttgtaatctcatttaatcacactgttaaaacaaaatccaatcggtcgttcatgttataacctcggttaaatcaaaaaaggcaaaataataataaaataatcaaaatatctttgaaaaagaataataataaaatagtcaaaatatctttgaagaaaataataataaaataatcaaaatatctctgaaaaaaataataataaaataataaaaaaaatcaatcgaacattttactttgaaagtttcctttaaatgagt

SEQ ID NO: 239165 - DNA, 511 bp, Glycine max
tatgatagctgaccctttgacaaagggattactgcccaagacatttatagaacatgttgaaagtatgggcattattgttattgatgatcattaagtgtaatttaccttatgtaattttgctgacactctgagctcaattatgatatgtttctgattacctgttctctatgtttgcatgcatgtttgtgttagagtaatgttaacaggctttgtcttgaatgaagacattatgttggaccaattatgtactcctaactaatggtcatattaaggagaagactaatttgtagtacatggaagggactatgtcgattagatgatgtacaaccgccatgactcgaattggttcctattcttaatcatgaaattatgatgtacccaatgtatagaacaatttagtcaatttttaatgcgcattatgttagttaatctatttatttatttagtccataatgtttattaatgtcacatgagccaagtgggagaatggtagaattaatgtctcatgtga

SEQ ID NO: 239166 - DNA, 430 bp, Glycine max
agcttgtcaatttaattgatttggatccatatggcaaggatcatacaatacaagatttaaaataggaattagaggatttgagaaagacaatggaaataagaataagaatgtgaaaatgtgtgtaaattgcttcccacaatggcccaatttataagattcatgtataattctatttctaaaatattttaatgtgaaaagtcccttctggagtcagactaatagtagacttgtaaatgcatttgtgttgtgtgtaaacggttaaaaaattcaaccagcattcactaaaacacctattattgacaagcaatgtccactgaaattcctattattgacaaacaatgttcactgaaaaacatattccctatatgtggccccctaccccatctcttgtctcagaattttttttattttcccttccttctctaccccc

SEQ ID NO: 239167 - DNA, 554 bp, Glycine max
tgtagggttaaagtctcacgattgtcacgtactcatgcaacaattgttagccgtggctatacgagacatcttgccaaacaaagtcaggttagccataactcgcctgtgctttttcttccatgctatatgtagcaaagtcattgatcctgtcaagtttgatgagttggaaaatgaggccgcaattatactgtgctagttggagatgtattttccccctgctttctttgacatcatgattcacttgattgtgcatctagtcagagaaatcaaatgttgtggtcctgtttatctacggtggatgtacccagttgagcgatacatgaagatcttaaaatggtatacaaagaatctttatcgaccagaagcatctattgttgagaggtacattgcagaagaaaccattgaattttgttcaaaatacattgagaaggctaaacctgttggccttcctgagtctcagcatgatgacaaagtgggagggaagggttcaagatgactgcatgtgatcactccaagtgtagaacattttgttacaagctcacttgtatgtcttg

SEQ ID NO: 239168 - DNA, 242 bp, Glycine max
agcttatttgaatcttgaagttcttcatcttttagacgtgtttgctaatttgacatcactacaattttgctttgagtcttgtttttaatttgtcaatctaatctagtgtcattctaggactttctttgtgtccaccttggcttgtggtgttgcccttttgctttatttttccttgaatctcattgaaataatggcatgttcaatttccatttgtttcatccttcatatcatcctttggtttc

SEQ ID NO: 239169 - DNA, 388 bp, Glycine max
ttacaacaagagatattgggaacaaccttcacaacgaatgtgggagcagcttcacaagggggtcacattgcataagagggggttcaccgatgcaaaggttaggctaaagaaacggagggagcaaccatatgagaaaggtggtcgcgcaagggttcaagagagttccaatttaggtcttttttgaactgcaagtgttttccttcttttttatttttttcattttttaatttaacattttatttcattaaaaaaataaaatataataaatttttatttcactaaaatcaaaacgtagctttgttacctctttcaaaaataacaagagatcattaatggtccaatgccttaataattcattaatggttcatgcacagagaaaagaggggaa

SEQ ID NO: 239170 - DNA, 377 bp, Glycine max
agcttgtgcacgaaaatatgtagtagacgctggccttttctatctttaactaagttaaatggatgatttatcaaggcaacagacgaccttaataacgatcacgcttttaagaaagaacttcggtggcctgatttgctgactgcaaatgtgggatacgctagaagcaaaggaaccacccttgggtactactatatttgagacaatatatttagggtattatggatataaagcacctaatgggatcatgtaaatgaaaggcctgtctgcacattcaaataaaggttgacgtcccttgggactgacgagtggggtgctaatacctttcccgtgcgtgaatacaacgcccgaacctttgacttagaaggtcgtagatcgcg

SEQ ID NO: 239171 - DNA, 314 bp, Glycine max
tcccttacctattcataatccaaaagatgactttgtaaagattattaattattttaagaaactctgggttcacgaaggaagctttcttcaacttcactagtaactccacaccatctataccacctaaaccccaaaatctacagaaaccacatcaaaaccatggaaatgaaaactgttatgaacttccaaaatgctcatgaagggaaaacacaaatgaaagatgagaaggataaaagagggattccttaccaatgaactagcccttaaacttaaataaaacaccgttacaaggtcccttgagcaaaggaattcat

SEQ ID NO: 239172 - DNA, 438 bp, Glycine max
agcttgtccacaaaaataggttgttgaagtttgtcatttctatttctcactaagtaaaatggatcattttcaaggtccaacgccttaaaacgatcacctcttaagaaagaactacgtaggtctgatttcctcatcgcaaattgaggaatacgtaggagcaaagggaaacacccttgtcgaccacaaaaaaggagaaaatataaaaagggtataaaggatataaggacataaaagggaacataaaaatcaaagtcatgtttgcacattcgattaaaggttgccgtcccttgggacggacgagtggggtgctaataccttccccgtgcgtaaatacaactcccgaacctttcacttaaaagttcgtagatcgcgtcttttccggtttttccgacgttttcctcacataaacgttgttggcgactctgggcgtattccttt

SEQ ID NO: 239173 - DNA, 470 bp, Glycine max
tctagccaaatggacttaccttgacttaattcctttgatagcccttttgatccttgtttccctttccttgttttgaagctcactacaagccttaagtgaaaaaccatgatatcaccatatccttaaggaattttggagctttggaattgttttgggaataagtgtgggggttttttgtttcattggataacatgttttgttggccatgcttcatgatatattttgagccatacttgatgcacattgcatattggttaaatgttggacatgctgaatgagatgctgtttctcaaaggctacagagtaaaaaaaattcggaaaagaaaaagaaaagcagtaaagttgagtgaataagatcttaaatgacaaaagaatgatgagactcttggttctactctttatgtttaaattttatctctacttccttttattttcttattttttcttaatatgcacttattccccattac

SEQ ID NO: 239174 - DNA, 509 bp, Glycine max
agctttgatggtgttgagaagaaatcacatgtttgttatttcaaaaagggggagaatgtgaatgtatgtatacatgattttgatgatgtcaaaagaagaatcaaacaaggctcattttgcttcaagattaatacaagattgtttcaacaaacaaagccttgattcaatatttcttcaagatcaagccttgcctcaaagtgtagagatttcaagtcatccaaggcacatgtaatcgattaccaatacatgtaatcgattaccaaggcacatgaaagtgtgtaattgattacacatcatatgtaatcgattaccagagactctgaacgttgggaattcaaattataactgtgtaatcgattacacaaacattgtaatcgattaccagttgaaagttttcagaaaatctgccaacagtcacatcttttcattagatttgtgaatggccatcaaaggcctattaataggtgacttgggcacgaattttatgcagaaagttttgcttgcaaaaa

SEQ ID NO: 239175 - DNA, 571 bp, Glycine max
  unsure (1)..(571): unsure at all n locations
ttaaccatgatgatcaatctatgatgaagattgcatgatccttatgcatcttattctcatgagaaatgtagaaaaatcccctttgttgactcttaaaagtgatttcagaaggtaaggttcataaaatgagttacaaaagagaaaaaaacaagatatggtacttatagattttaactaatataattgtaataatcgattaccaaaacttgtaattgattaattcaatcaaatacccttagttttacatttctagaattgtgctaatcgattatcttgatcaagaaagaacaaacataactcttttagaagcaatgtaatcaattatgatatttgataatcaattatttcaacttccagaaagcttcctaaatttttcaaaggcaatgtaattgattacaagaaatgataattgattatcttgatgtacaaagccttccttcttcttgattatcttgatttgcaatatttattggttgttaggaaatgatgtaaacccatttgcacaagggttgaggatggatctttaaaggnttctttttttacttgtatgaaaatttaaaaatggaatgga

SEQ ID NO: 239176 - DNA, 72 bp, Glycine max
atcttctaaatatatatgcgcatatgtgtatatgaacctttctttttcagcagctatagatgcatggacaga

SEQ ID NO: 239177 - DNA, 528 bp, Glycine max
  unsure (1)..(528): unsure at all n locations
nttagggatttcgtgatattataggattagggttagcgagtntctgacatgctcttatggataggaaataaaattatcacatttgattaaaatgacacaccatatatagacaaatgaaaacgtaatacctgatagttaacgtttaaatttaaatttgggaactaaaattacataattgatataaaaggaggatgaaatccgtgaataaatttaaaaaaagattaaaatcgaaattagaaacaattaggtaaccaaatttataaatttatataattgctatggatgttgttgctggccttttttggtcaagtttagaccggtcaataatagatattgatttcctgcactactataattgcatcggtcagtttccatttgcatttcaatgaattttttaaaatgtaataaaaaatgcatgatgcaataatacgagtgcaaatacaatagcctcaataataacgataagttactcgttggttttggcctaaagctcttcttaaatttcttaaaattggggctatgaactca

SEQ ID NO: 239178 - DNA, 129 bp, Glycine max
ctgcatgcatgcttgcgtaatcgttgcgttatactaggacctggactatgttttattttgcgagataatatgctgggctagacctcacccgcgctgggggcggctcgggactgtggatcccacactcat

SEQ ID NO: 239179 - DNA, 484 bp, Glycine max
ttgatagattgcaagtgtataattagttaagaaaactatatgagggaagttttacccaaatcatttttgtatggcaataatgctgcagtcctatgcttaatctccttacactaatctccttacacctaaacatgtacataaaaaaatgatttgatcaggtaaaaggaggaacattgagagcttctgattcattccctactggtcgacatctagttgagttatgggctccaaattcccaaaagcttccaaaaacatcagttttgaacagcataaaacttcagcaacctaatggcatttactatgaagacataacatttagggacatcctctttgattctagctacaagggtggagggatattcattgttgattctgttagaacaaggatcaacaactgctttttcttgcatttcaccacagaagggattctagtccaaagtggccatgagaccttcataacaagcagtttcccttggcagcactc

SEQ ID NO: 239180 - DNA, 462 bp, Glycine max
agctttaacctcatcgtctctcacagtctttagatttggtagccaatccagtccttgtgttcggactctcagccacttatgatagccgccgatgatcccattactgcttcccctaagctctctgtcctttcttcacgccgcatcccatgccttgcgaactccttggagtaccctcgcgttgtggtcactgaaacctcgtgcgatgaaaggcgtgatgctttcgtctgatggcactcctctcatgggacatccttcgcatgaagatagaaccctgattcttccttccttctagcgagggaaccatttaatagacgcccctccatgctagccaagaggtggtgcacaacaaacaattcttgcgccgctcttttcacatccccggtcgaacgtgtcatacatggccaaaatggcgacgaccgggctttccttgccatgatgaaaggcgaggaaagcgtcaatcgc

SEQ ID NO: 239181 - DNA, 489 bp, Glycine max
tgcttgaatggaggttgaaaatgaaggaatgttggtggatgtgtgagcttgaacaaaagagagaaaaattttaaattgtgcatgtgaagggtggtttttgactaggatgagaagagatggagggagtgtacatagttgtgtttaaagagaggaataagctttaaaagggagagagagagagagacattaccatgcttgtgtcacattgtagttatgcttaatgttatattactatgtttatgtcatattgtacacttaatattatataatttttcaaataaacatgtgcttaatgtgtgtgtgacatatatgggcgtaatatcaactgatgcaatcctagcccccaagggcattggatagaagactccaagaagattgggccagagatgcaagagaaggcccaagggtttttaagggccttatgatagattggggcccttgggctaatgaattttgggcccttttatgctcttttcttctttccttcac

SEQ ID NO: 239182 - DNA, 824 bp, Glycine max
tagttaggaaaaaggccatattggttgctaaaggatacaaccaagaggaaggcattgactatgatgagacctatgctcctattgctaggttggaagctattacattggtgcttgcttttgcttgtataatgaatttcaagttatatcaaatggatgtgaaaagtgtttttctcaatggatacattgaagaagagatatatgtggagcaacctctaggttttgtagactttgatcatcctaatcatgtttacaagttgaaaaagacactatatggattaaaagaagcacctagatcttggtataaaagattgagcaatttattaattgggcaatcttttgtaagaggtcaagttgacaaaaaattgtttatcagaagatcaaacaatgagttgttacttgtgcaaatttatattgatgacatagtttttggtgcctctaatgaatctttgtgcaaggagttctagttttatgcagaaagagtttgagataagagaattcactttcttccttagacttccagtaaaggaaaatgaagcatggaaccttcttattgccaagaaaagtactacgcaaaatcatttaaaaattcaatatggaaaaatgcaaggaagccatgacacccatggccacattcacttatcttgacttatacaaaaaaagtgaatcagtagatatatcaaagtccacagggctgaatggtcctctcccaattttgacggcacccgactcaaattcggctcaatgtctgcttcttggcaacatatctaacccaccccacggaaccctattttttgtgttccacgcacatcacgcaccctccgccg

SEQ ID NO: 239183 - DNA, 500 bp, Glycine max
  unsure (1)..(500): unsure at all n locations
tccataacatccaagcaatttcaacatccaaacatcatgaactatcaaattttagcaaaaacagggcagaggcagaaaactctgcccaaaacacaaaccaataccacaacttttcttactcaaataccccagtaacattctcttcgttccaatttgttcaccgttggatcgactcgaaaattttactggaggtccctagtacacaagtctacattttgaccgttgggatctgctagaaaacgtcgagaacccaatatgtacaaccctttccacagccagccatgcataagcattttctgcacaaacacaaaattcagttgcacactttaacaacaaaattctgcatataagtgcagattttcgaaatcacccttgccctcatccaaaattgcccaaattggatcctacaagtcctaaatcaagtataaatcatatctaaaccgaagacaagctntagaccaaagcaacttaaaatctaagtatctaaaaccccacaattt

SEQ ID NO: 239184 - DNA, 495 bp, Glycine max
agcttgacaatgtcatatgataaatgatttaataaaaacatattaacaaatcaaagtatttttttttaaatttagaaaaaaaaattaaacccaaaaaaaataaaaaaataatttaattttatgtttatatattttaaaaaaatgtataaatgatagttaagataagctttacaatggagtgccatgagattgtatattatttcttattcttgttccttaatatcgtctccatcatcatccccgatcctcgatgacattagtgtaatatttcagtaacatttgtatttaatttgaattttttacacacatatcacaaaatgagaaagaaagaagagggattaggttaagtcaatgcaatttgatagtatttttaaggtccagtcaatgcaattatttcaacaattttgatagtagtaaagtagttccattgcatatcattcctctcatagcatgcacaccacgcttgtggcattacctgatgaggagatcagagag

SEQ ID NO: 239185 - DNA, 472 bp, Glycine max
tcttgcgtagccgctcttggagctcagaaaatcccaaaaacaaatccctcttattactagctattttgaattctttagttcctgaatgtacaaccttcaaattgttgctcattcccctctttgttttctgcaaaaaagaaaatcaatatcaaagaaaacatggatgaagccctaaggatgccatgtacatgtgtatttctgaagatatagtatttatattccatcaagcatacattgactgctgattacatgtaatagactttttataacatggttgccccaaatcacaattaaaaagcacaactaccaatctttcagagtcctttggttaatttgtcttgtctccttctgtggtggggttttaattaataatattatacttttgccttccaaaaaaacacttatgactaatccttttttcattaatcctattttgtatgttattgtatacaagatcatgggttctccacct

SEQ ID NO: 239186 - DNA, 440 bp, Glycine max
agcttccacaacatccaagcaaaacaaaattcaaacagcacatgctatcacagccaagtaaaacagggcaaaggcagaaaactctgctcaacacaccaaccaaaatcacagcttttctcactcaaagaccccagtaacaattccttcgatccaattcgttaaccgttggatcgactccaaaattttactggaagtctatagtacataagcctacattgtgaccgttgggatctattagtaaacatccagaactcattctgcactaccctttccacagccaatcacacacaagcatttttctgcaccaagctaaaatcctgctgcacctattttgacagcaaaattctgcataagtgcagatttcgaaaatcacacttcccctcatccaatcttgctcaaatcaaatcctacaagtcccaaatcatgtatcaatcatgtct

SEQ ID NO: 239187 - DNA, 498 bp, Glycine max
tgaatcggacatccgtgtgaaaagttatgaccattttaatttcccgagagcttccatttttcattttcgagcgtctctatatgtgaccgaatcggatatccttgtgtaaagttatgaccatttaaatttcgtgagagtttccgatgtttaattttgagcgtatcgatatattataagcctgaatcggacatccgtgtgaaaagttatgaccatttgaatttctcaagagctttcgttgttcaatttcgagcttgtcgacatattatgcgctcgaatcggacatctgtgtgaaacgttatgaccatttgaatttctagagagtttccgatgtttaatttcgagcgtatcgatatattataaacctgaatcggacctcagtgtgaaaagttatgactatttgcatttcgcgagagtttccgatgtttaattttcagccgatcgatatattattagcctgaatcggacattcgtgtgaaaagttatgaccatttgaatttc

SEQ ID NO: 239188 - DNA, 517 bp, Glycine max
agcttgataacacgcagagactaacgtcgtcttctgcgctattcatcaatcgcggccgacaagcccgttgacacgtggagatttacgttatcttccgcgctcacaagatctgtcatactgacttttgagtcacgctgacgggcggaaatacccgagtggttatccgtataaactttttgcattctgcaagacgaaaagcttgataacacgcagagactaacgtcgtcttctgcgccattcatcaatcgtggccgacaagcccgttgacacgtggagatttacgttatcttccgcgctcacaagatctgtcatactgacttttgagtcacgctgacggccggaaatacccgagcggttattcgcataaactttttgctgtctgtaagacgaaaagcctgataacacgcacagactaaccgcgtcttctgcgaccttcgtcaatcgcggccgacaagctcggtgacacgcggagatttacgtcatcttccccgctcacaagaattggaatactgacttt

SEQ ID NO: 239189 - DNA, 427 bp, Glycine max
tttcgtctaacagaatgcaacaagtttatacggataaccactcgggtattttcgcccgttatcgtgactcaaaagtcagtatgacagatcttgtgagcgcggaagataacgtaaatctccacgtgtcaacgggcttgtcagccgcgattgacgaagggcgcagaagacgacgttagtctctgcgtgctatcaggcttttcgtcatacagacaacaaaaagtttatacggataaccactcgggtatttccgcccgtcagcgtgactcaaaagtcagtatgacagatcttgtgagcgcggaagatgacgtaaatctccgcgtgtcaacgggcttgtcggccgcgattgacgaagggcgcagaagacgacgttagtctctgcgtgctatcagggctttcgacttacagacagcaaatagtttttacggat

SEQ ID NO: 239190 - DNA, 485 bp, Glycine max
agcttatcggcctgacaaacccaaaaagcaatcaaaagcctcagattgataagtaactgttactactaaagacataaatcttaatgttactactaaagccatagatcattgatgtcatttctttttatgatcaataatagttcactcacataaaaaatttcagagggcaatccaaccagacaaggagccatgcaaaacaaggtaaaagtgtcgtgcatttcagttgtgaaaagaacagaagcagcataacatagaaagaaggccagcaacaccacaacaggacctcacaatcagactagacagacaatgggatctctttgatctagagatgccaaaagaagacaggttccagcaatacaagtgttatcaatggcatatcacgcaaaatgacaaaccaataacccagtatatcatataacagatagtgttgcaggcaaatagcagaagtcttattcacatattggttgaaattcatgatatatcaa

SEQ ID NO: 239191 - DNA, 485 bp, Glycine max
  unsure (1)..(485): unsure at all n locations
tgaaggaaaactagatgcattggttaacttggtaacccagctggccttgaatcagaaatttgtacctgtcgcaagagtctgtggtttgtgctcctctgcagaccaccatacagacctttgcccttccatgtagcaacctggagcaaatgagcagcccgaagcttatgttgcaaacatttacaatagacctcctcaacctcagcagcaaaatcaaccacaacagaacaattatgacctcttcagcaacagatacaaccctggatggaggaatcaccctaatctcagatggtctagccctcagcaacaacaacagcagcctgctccttccttcaaaaatgttgttggcccaagcataccatacatttctccaccaatccaacaacagcaacagccctagaaacagccaacagttgaggctcctccacaaccttccctcgaagaacttgtgaggcaaatgaccattcagaacatgcaatntcaacaag

SEQ ID NO: 239192 - DNA, 523 bp, Glycine max
agcttgtgtattgttgcattctactaatatatggaattgttcactattttgcctgagaataacaattgcttgaccacaacaacgctggagacggcaagggacaatggtctttcaaataaacctgttttacatgaacaaacattatatcatgcgatgaccgtgtcaaacgaaccagcgaagtcattgcataattgttatactaactatattcaatgtacctgaacaaaatgatttccaaacacgtgaccgacacatatcatgtggtggcccagaagaatcaggtggtagttgacttctaagagggaaaaatgtcatgctttgttgtcgggacaacgatacaaggattacgttataccgtgaagcaatcacatatcccatgttcgttatatccatccacttgtccacactaacctgaatgaaccaaacatacacatgtaagtaatttaaacattgttattaaaaaaaaattaacctaaaaacatacctttgaaaacccatcaacaagtagggacaactttaattg

SEQ ID NO: 239193 - DNA, 470 bp, Glycine max
ttgtttaagtctatgtagtcaatacacattttccacttcccattagactttttcaccattaccacgttagccaaccacttggtatactacacctctctaatgaaagcaacacttagtagtttctttgcttcttcatctaccgcctttcctctctcaggttgagcttcttctttctttgggcaatgggtttagcctctgggcagctgaataacttgtgatagtggaaatttgagtcaattcctggcatatctgatgcagaccatgcaaataggccgacgttggctggtatcactcaggccactaactcttctacttttttactctcatcaaacacctaagtttggttaactctgagggatctttgtcgagttggaatagtttgacttctttttttggcttggctctctgttctgcttctcatggatcgagttcagactctactaggctttttattaagagaggtgcatgct

SEQ ID NO: 239194 - DNA, 352 bp, Glycine max
agcttatctaccttactataacaaggccatatattttcttttgttttagaagggtgagtcaattcatgcagactggtcattgtgatcattgggatgcagaaatccgaattttgagatacattacacggaccccaggaccgtgactactctatgaagaccaaggaaacactcacatagttggattgtgcgatgctaattgggaaggatcacctattgataggcgtactatttcaggatctagtgtgaatattgttagaaatatcgtttcctggaagagtgaaacacaaacagttgttgcaccgctatttcaaaggctgaaataaagctgaggctgaagccacatgtagagccg

SEQ ID NO: 239195 - DNA, 477 bp, Glycine max
tgagttgttgtgtgctgtaaaagatgttcctctaatctaacattctgtattaccacgtgttatctcacagactttgactgcagttatggtcaaactaatccatggctctctgcttctgggtacagattacagattacacctgtttctgttccttccattaattgctgaagggctatttctactcactaatttcctttgattaagttttataaatttgaattttaacaattaaatttaatgtatttcgaaatgagtacattttaataacaataagaataatgatatattagtaataaaatttcttaacttaatattatttattttcaaatatatatatatatatatatatatatatatatatatatatatatatatatatataaaataaaatatgtcattagtttaatattaccttttaaattttataatgtaagtatatattggctaatataaaacgttaacgaaattaactaattt

SEQ ID NO: 239196 - DNA, 472 bp, Glycine max
agcttatctacctcactattacaaggccagatatttctctttgcatttggagtggtgagtcaattcatgcagtctcctcataatgatcattgggatgcagtaattcgaattttgagatacattaaaaggaccccaggacaaggactactctatgaagacaaaggaaacactcaaatagttggattttgcgatgcagattgggtaggatcacctattgataggcgttctatttcaggatatagtgtgtctattggaagaaatcttgtctcatggaagagtaagaagcaaaatgttgttgcaaggtctagttcaaaggctgaatataaagctatggctgtaaccacatgtgagctgatttggattaaacaacttcttcaagaattgaagtttggaaatattcaacaaatgaagctatgttgtgataatcatgcagccctacattagcttctaatccagtatttcatgagagaac

SEQ ID NO: 239197 - DNA, 634 bp, Glycine max
  unsure (1)..(634): unsure at all n locations
ttaagaaggagacttagcttggaatttagcaaagaatattttttcctttgttctccaagtctgttccagagttgaacagatctccaaaaactctatcacatatcaatcatctattatcatcaagcatcataataacaaatacggccatgaaatttcatgggaaaatctatcatgttttggtccaggcacaatcataatccaagaaaattttctccaaatttagcaacacatccacaagggaaaaaaatgaaatactgtaaaaaaaaaaaaaaactttagctatgtttagacgataaaagaaataaaaagaaagaaaaaataaagtaatctaatagaaaaaaatgtatccctattttcaaaaaaaaaaaaagctcagtatataaacacctttaatcccacatgcaagaatggttgtgttataaaaagtataggctaaattataatttatttttttaaaaaaatttcaacttcatgaatttggggctcttgatttttaattatatcatttggncatgcatnctaggtttataaaatttctattttgtccccctatagatattaactaataaatgtgatattaaaaatataaattaatataatgtaaaaaaattataatcattaaaaactttaataa

SEQ ID NO: 239198 - DNA, 550 bp, Glycine max
agcttttgtaaggcctccttcaaatcttccgttccattgatgttaggaagcttatgtgctcctttagcagctaccaagattgttatctggtataaagtacatctcaagtgtaagaacaaacgatgcaaaacttttcccttttagattgttcaactttgacaagaaactattgttaaatgatacaaaatggagcaaagaaggaagaaaatattgtggcactgaagcacttgaaattttataatgcttgaattagcagtaaaatgaaagtttatgctggtacacaaacaaagttttaattaggaataatatatgcatagagagagcataccataccactatgtactcgtcaccaaactcgttgagaagtttctcttcttcaattttttttgttccctctttaatccccttttgatcaaactgcaataggctattagttggttaaaactctattgctgtattagatgcaaaattatgatttgcctaacagctgaaattgaagtagagaacacttttttttgaaggcacatcacaaaaaccattttgcatgctg

SEQ ID NO: 239199 - DNA, 499 bp, Glycine max
  unsure (1)..(499): unsure at all n locations
tatgctacattagcggngccactaactgatttgttaaaaaaagaagcattatgttggaccaatgccaccgagcaggccttcatcaaattgaaacatgccattacatcaacccctgtattggcactgcctgactttactcagccttttgtgttagaaacagatgaatttgaaattggagtagaggctgtgttgagtcagaatggccacccaattgcatacttctccaagaaattgctccctagaatgcaaaaacaatttgcttacactagggagtttattcactgtaacagcagcattggctaaattcgggcattatttgttgggctagaaatttgtcataaaaaaaattgaaaagtttgaaaagtctcttggatcaatcgctacaaactcttgaacaacaagcatgttttcataaattcattggttatgattntcgaattgaatacaagccaggtaaggataatgtcccagctgatgctctttcccgagtgttctttat

SEQ ID NO: 239200 - DNA, 1012 bp, Glycine max
  unsure (1)..(1012): unsure at all n locations
cctccactctaatactctgactcgcctcctccataccgctnaggacacgtcacttctcaatacaagcatacctaatcacccacccacccccgcannttgtgatcgcatctcctccggcgncaccnatanaacaagctgcacgcatgcaagctcgtgtaataataagtctcatctacatcatcacattatatgtttaactcacttcagcgcaacttaaccaactaggtcaatttcttcacccactacaaaaaaccagaataacacactatcgcggtgacgtttacatctgacctgcctctacaaacttacgtatagtaagttccaccgctctcccaacctggatatttgcagctcaacacgaaatttgatcactccaaaactaacaacctcctaactgaaagcgttactccctcctgcgcggtcagaatcccacctctttttttgctcactacggaacatcattttaaccaaacctgaatccgacaaagagaacagccacacccgattaacaatcctccttaattaaggccataccctgcacgatcaaatcctaactccaaataactaaccccttatacccccgataatagactctgcacttctcacctactacatcactaattcctaaagacctgccctcgacaactcatcaatgcccccgctttagctgccccacacacacatcccgccagatccgcatccccaaccatcccctcccgccgtcgcacctcaccctcccacgaaccaatcctacaacctccacaatcacttccaacaatcttccctctccccaccctacatcaaccccccccttacctcctctcacctccacaccgaaaccccgactccctcaccttctacaccccccaccctccccacctctgacaaccgtttccccaccctcctctanactcctctgatcaccccactccccaccacatgtcagtcatctgttctctctccctcanacataccangtcgtcctctcctcacggtcgtcgcacgctccccg

SEQ ID NO: 239201 - DNA, 504 bp, Glycine max
tcacatgcaagctcaaaggaaaattataatcgtttagaaacaattttcacatgttttatgaaaacctataaatactagatgctttgaagaaatgagtaacgaacctacacgctatcattcaaattctttatgtagaaaactctttgtatattcttataaagtttgaaaagctctcaaaacatcttgaatactctaagacaaaaaactaaatgcttagatttcacacttgtttgtaagatgattaagatttaatcagttagcaaatcaaacaacatatcttctgatttgtatagaaccaacagtggcttggaaggacaaagaatattcggttgttaaagcttggcgataaactttgttgtgatagctaaaagtaacagtgacaaatacttgtaacttttgtgaaattagtgaaacttgatcgctaaccaaaaactgaactttagttgaatgggagagaccaaccaatattatatgtggcttactctcttctaggtatatcttggc

SEQ ID NO: 239202 - DNA, 570 bp, Glycine max
agctttcatctcattcatctgtagaattatatttgataacatacatgaattgcttcagccaatgccatgctacaagttacacattttcaagatatcattacaaaattttaacttgtatggattttaatctatatataaatataaaatcaccaagagaataaattaaaaataaaagcagatgtttgcaggcaatctagctgctgatactaatacattatgttaagaaatcagggaaaatcatagtaagcataattcgacaaggatctgccatgtattacactccataccttgtattagataagcaaagaaaattaattctgactgggtatctgatctagggcaaaaacaactgcaacttttatttcacatgaacaagtgttaaactaaagctgagtgagcttaaaccacaaaagtagtagaccttggttgtaaggtaggcaggtgaaaatttgcactatgaagattcaacagcataactttctatggtaatttttcaatgcccatacatactccatataggagatatactaatttatttgatggaaaaatagtaaaactatgtgttgggtg

SEQ ID NO: 239203 - DNA, 416 bp, Glycine max
tgtgaagaaaatggaggaatggttcagggataacggggcagagtatgcatatatggctacggagaaggacaacgttgcatccgtcaagttgttcaccgacaaatgtgggtactcaaagtttcgtaccccctgcattctcgcgaatcctgttttctcgcatcctgctagaatctctcacaaagtgactatcattgaactctctccgagcgatgccgaaatactctaccgcagcaagttttccacaacggagttcttcccgcgcgacgtagactccgttctccgtaataagctctccttaggcacttttcttgccgtccccaaaggcttgtaccgggctgacacgtggcccggctcaacccgctttcttgagggtccaccaccctgttcttgggccctagtcagtgtgtggaactgca

SEQ ID NO: 239204 - DNA, 372 bp, Glycine max
agcttggtgccttgatattctgtcgacataaatttttagttttcatcatgaggattttacactccattttgattgagtttagacgaatctgtctggcaattataagttataactacaacaacagacgactcaagggagtacccaccattaaacacaccgactttacagcacatgatggtgattacactactcatctcatgtgaggatctaaggttgaaaaataaatttatgaattttaagatgctatgacaaaaaatcctgtgccctagatgaatgaaaaaattgatgattgcatagggaaaatacttttagactctctggactttgtgcaaacaccatttcaaacacggggcataatattgcatttggatt

SEQ ID NO: 239205 - DNA, 413 bp, Glycine max
tatgaaactcagcttatttaaagatcagagctaacactcatttttttcatgttttttcacaattttatgtttagctactttaaagacctgatttgataggttgataacattttgtaccaaaagacaactactacaatgcaagactgctattaagaagatgaaagctccaacaaccaatatgtaagcttgtctaaagacttttaaatatgagcttgaactttgtagtaaagaagagcttatagtctggatggttgccatgagaggtttataactcaagctcattgcttagttgaacctatgagaagcatctacacatgcagtatcatgagatacgacctattataaacttgactatacttgcttactagaaactcttttacatggctgccttggacatggagttttgtatgttg

SEQ ID NO: 239206 - DNA, 417 bp, Glycine max
agcttttacaaaaaggttcatcaagtcaagttgaaatatggaagtaaccatcctgcaaaattggggcaaaagatgaatcgagtcacatcactgcttcgtctactgccaaacatatttaggattattgatgtccttgttacttccagtttcaccttgacaaagatgtcatggaccatgttgaaaatctaaattgattcaaccccatatcctgcgtaaaaattcgcaatacttcgactgtacatcattcgcatgcatccatgctcttcattggttgcattgctcattgcattctttccttgaaaaataagatgaaataccatgaacttatcttatagagaaggaaacgctttacggcgtacttaccgaactagtgctatacctatatctatgggtgaagcacaaaaggggcctaaaaca

SEQ ID NO: 239207 - DNA, 162 bp, Glycine max
tctcgatatattatgcgcctgaatctgatcttcgtgtgaaaagttatgtttatttgaatttctcgagagcttccggtgttcaatttcgagcgtctcgatctttcatgcgcctgaatcgggcattcgagtgaaaagctatgaccatttgaatttgtcgatagc

SEQ ID NO: 239208 - DNA, 557 bp, Glycine max
agcttccatcaagtgatatcagagcattagagcttcaagtatgtgctccttaaacctccattaattttcagctttaccttctcctctattcttgtttcttcatttttctccatgtacctcctcacatgtcttatgctaaatgttgttcacatgattctttagaatttccactgattaaacttgctatatgtcttaccctaatttcgtctgggaaccatccgttgttgggatgcgaccctcgtttgaccacttcgaggtatttggcacccatcgttaggcaatttgtgaagttctgagacatgccggaagtcaaaagaaaagcgtcgtaacacaatccgtgaagttccgtgacatgtcggaaattaaaaggaagtgttagtgcgaaatccgtaaagtttcgtaacattttggaaggcaaaaaagggatgattacgtaatccgtaaagttccacaacattacggatagaaaacaagtatcgttatgaaattcgtaagttttcggaactttaccgaaaaagaatccccaaaaaaggcagggggtgtattaataaaaatga

SEQ ID NO: 239209 - DNA, 591 bp, Glycine max
tctttgaaaaaacttccttgataagctagagcttagctacacacatccctctaataacttagctcacctccttgagaagcttccttgagaagattcctaaagaagctagagcttaactacacacacctctctaatagctaagctcacctccttgagatgaaaagctagagcttagctacacaccccctataatagctaagttcacccccattccaaaaatacatgaaaataaaaaaaagtccctactacaaagactactcaatatgccttaaaatacaaggctaaaaccctatactactagaatggccaaaatacaaggcccaaaagaagaaaaaacctattctaatatttacaaagaagagtggatccaaccttgacccatgggctcaaaaatctaccctaaggttcacgagaaccctagggccttctttagtagctctagcccaatcctcttggagtcttctatccaatacccttggggggtaggattgcataagcttcttacccctttaacattcaccggagagggtagtttctctatcacatcaatctttgctttatctacttttatccccttcacagaaatcttat

SEQ ID NO: 239210 - DNA, 558 bp, Glycine max
agctttcttacagtacttcctgcaccatctgtaccaataatgatgttacagtgaatgttctgttctacacgcttccctttaatgatagaagatgcagttactgttacaaagtcattgctggcatcaatggaaacacactcatggcccatcattatttttttctcacaagactgttcatttccttccaaactttcaggcgcacatatttggaagcctaggttttcaagtcgcttgagtagtaacatagttagcttgtactgcgagaagtgtgcaacagagaccgggctgacaaaatgctcaagatctgataacaagtacaagatatatgaatattctaaaactcaatattgtccaaaacgaacaatatcatgcagtctatgtgttgatatactgcatattttgaaggctatgtataaatattgtcaaaactacacttgaaatagaaatcttcctattgctatcagactggaaattggctctcatgaactacagaatagcaccttgaggttgtatgtgatcaaccgatccaagaattgaaccagagagggaagttcaata

SEQ ID NO: 239211 - DNA, 618 bp, Glycine max
  unsure (1)..(618): unsure at all n locations
tataataggtggtgaagactaagttttttttggtatgtgctaactaaaatttgtttttcttcctataaacttgcctagcttgaattcaaagtcctgtttattagtgaaaattaatttattggttataatatgtcaagagtttttttgttaaaccaatggcgtatgtctttatcctggaattgagcaacttttctctcgtcgaacaatttgaattcgccagccaaaaaaaacaatgataattttttaatatgaataacactttttagctagttatcaggtagtggtctcctatatatgtcaatatctcaaatgaaatcgttcatagatggtcattgatcatttgccaggtaggttcatggttgcatattatccttgattccatatccatacaataaattttccaaggctagtgggtaccctagcaacccggcctgngggaataacactgttaattcttcagttatggagacttttggagcatattgacagacaatgccgcagtcagcttatagtatattttattttattttgagggttaattggaggaatgactgtagatatataattttcataaagaattttaacgtattcccctantattttattgtactagtgaaa

SEQ ID NO: 239212 - DNA, 560 bp, Glycine max
  unsure (1)..(560): unsure at all n locations
agcttgaagctcaaggaaaagcttgaagaagttttggcttttacttgcccaactcctttgagtgacatttgtattggttgttatcttgattgatgcatcttattacattcgttatctgctttgcatcctgcatcatcatggttagtatcaagaaaagtttctaagttaaaaaaatttcttcagaggtaaaaactctctattttaatcgattacagagttgtcgtaatcgattacaacaagctgtttgaagcttaaagagttaagtctcatatcggtttaatcgattacaatagtattttaattgatttcactgttgttagaccatgactgatctttttcaggagtctcaactttaatcaattaccaagtggattaatcgattacttctctctcgttcaagtgttcaaaggtgaactagaacactctaatcgattatattgttcttgagttattttccagatgttgcatgaacactctaattgattactttggtaaaacaatcaattaccttatagatttaatcgattatagacaattataattgntcactctataaataa

SEQ ID NO: 239213 - DNA, 519 bp, Glycine max
  unsure (1)..(519): unsure at all n locations
ttgagccaaaatcctgactcaccataaaccttgacccgggtgagaatgtctatccttaccctcggaagcaaaaaagaaaagaaggaaaatttccaatcaaagagaaagcaaaaagaaaagaaggaaaatttccaatcaaagagagagcaaaaagaaaagaaaggaaattcccaatcaaagagtgggagaaagcaaaaagaaaagaaagaaaattcccaaccaaagaatgggagaaagtaaaaaaggaagaagaaaaaggaaggagagaaagttcctgatcaaagaaactagaataaatgtgcagaaaggtcttttgaccagacaatatctgaacaatatagcattgtcaccaaatgaacaaaaggaaggaaagggaaccatgacctaaagtggtcttctccctttgattaccaaccaaaatcctgtgtgctagcgactttntcgccccgcactaaaccaaaacagaaaaggaaaagggccaaaacacacaaaagccgaaaaacccaccaaaagaaccca

SEQ ID NO: 239214 - DNA, 526 bp, Glycine max
agcttgtgagcgtttcttcttcattcttcaaataagacaattctatgattttttatgagttctgttagtccaatacttgtaatcattgtatgtggcacaaccgaaatcattgtgttaaattatctaatgtttgaatttttaaacttataacctctggtaacaaacctctcaattcttgttgcagttcataaaccatctcatcaatttggttgccaggcatcagtaaaaaaagatagcttgccaattggaaaagaagcaatgcttggagcattttcgttactcaaggttattgagtctgagctacaagcatacttgtctacaactgagggtcgagtggtatgtatccttagaatttcccattgcactttttctttaattttgtatgattctttggtcattgctcttattttatttcaaatattcaacttgcttgttcctctttaatttgtctgattattttttcacttgggtactcatggagtgaatactaattttctagacccctttaacttttttttaagtgggg

SEQ ID NO: 239215 - DNA, 561 bp, Glycine max
  unsure (1)..(561): unsure at all n locations
tacacaatcaatcaactgttggaatatcttcctacctacagcttcttttagtttacctttggatgcctgtgaagacaaatagttcattgattgtcattgccaattaggcaatagatcatcatgtatgtattatgaataataaacaagcaaatgctccttacaattttgtcaaataactctcctccattcacatactcaagtaccatataaattttggttttgctagccaagacctgcataattacaggtacaaatcataatcagaacatcaaggtttcatagagtcaagctgctttgtaaatgcaataaatcactttattgttctacaatctgaggtttgaagctgttagagatgtgacaaatcattcacatgtcttacacctattagtttaaacatttgtgtctcaatattcttctactaaaaagctgaatagtaatacaagacaaatgttcttgtgcaatatttacgttttaagcctaaacccttcgtgtaaagggtgtaatatataatataaaatcattcatgtgtttctactangcagattaatcttttggaatata

SEQ ID NO: 239216 - DNA, 491 bp, Glycine max
agctttgtcattgatagaaattgttgggttattgattataagcattgtttcctcccccaataaagttgatctcatccatggctgcaactagcttgttgtcaatagtgcattctcttggcccacgcacaatcccacatttatcacaggttgggaatgaaggtgtagtgatggggacttgagcttaagctttcatgagtgtcttaatcttcaatgttagaggatgcatatacattcccaattaagtttgggaatcatcttgctccacctgggtgacatgtctcttcataatcctcttatcctattggatgaggacacttcaccataggatatatggaccaatctctattgagtaatgccatggtgtggatagcttatgatcatttcttgcaactttacctaggcttcaggtaaactctcttgctgtctctgcataaagattccaatgatcatgttgcactgatccatcttcataggagagaaatgcctcctta

SEQ ID NO: 239217 - DNA, 505 bp, Glycine max
tgtttgttagaaagacccaacatttctacctactactgtcactttgacttaccttgcattttatagcttttagcataaaggtttagtttaaattctgtttgaaattatcaatcatacatgttctctcaacaatgcttcatttctgaacttaactcaagctaacattagttccctgtgttcgttactcggattcatccgttttaatttttaaatacttggcgatccggtacgctttccggcaaaccgaatttcccttgaatatatttgtacgaagaaaaagtggaacaaaaagtaaccgcaggggaaatccaacaatgtatttatggcgctgttgctggggaactaagttgttagtagagtttagtttagttgtgcagcattgctttatttttgctttctttgatttattgattcttttgactaacatagtagttatagcacattcattggtcttttgaactggataactggtgttcctttttcttgtatgccaagatgatctact

SEQ ID NO: 239218 - DNA, 299 bp, Glycine max
aaaactgcatcttcacatcttctccaagtacctccaatcatgttgtacacgaaaagctgctcacatgattctgaacaatgtccactgaataaaccagctatatgtacaacactcatgacaccagagaaccgtccgatgatgggactcaacccttaaatagccactttgacgaattaggcacccatcattacgcaattcgtgaaatactgagacatgccggaagtcaaaagaaaatcgtattaacacactccgggaagttcccggacatgtcggaaattaaaaggaagcgtatagtgcga

SEQ ID NO: 239219 - DNA, 556 bp, Glycine max
  unsure (1)..(556): unsure at all n locations
tgcctcanagagatccaagaaggataaagcagctgaaggaaccatttccgttcctgaatatgacagccatcgttttaggagtgctgagcaccagcagcgcttcgaggccattaagggatggtcatttctccgggagcgacgcgtccagatcagggacgacgagtataccgacttccaggaggagatagttcgccggcggtgggcatcgctggttacccccatggccaagttcgacccagacatagtccttgagttttatgccaatgcttggcctacagtggagggtgtatgagatatgcgatcctgggtgagggggttagtggatcccattcgatgcggatgctctcagccagttcttgggatatcctttagtgctggaggagggccaggagtgcaagtatggccaaaggaggaaccgggccgatgggtttgatgaggaggccatcgcccagttgctatgtataccanggcaggattttgctcggactgctgctggaagaccggtgaggatcatgcgcaccaacatgaccaccctgactaagatctggatgacttt

SEQ ID NO: 239220 - DNA, 346 bp, Glycine max
agcttaattgttttgttaaatgatatatctaaacttaatcatctttgtgataacaaaatttgttttaaaatagttcaatcatgtgaaacaaagtataaaaactttcaaaaaacatgcaaatgattttgtgcatgaaaagcttcaaataatgttttgaacaatgtctttctgagtataacattctaagtaacaacattctgagtactacagtcttgttggacaagtggcctcaataacttaagaggggggtgagatctgttataaacgtgaacagaaaccgtcctgacctactgtttaaaatcttatatcatgcccctgatctttcaattttccacaactcaatatt

SEQ ID NO: 239221 - DNA, 610 bp, Glycine max
tgcatatagaaattaattaaggataatccatgcatgatgcctaaactggtatatcaagaaaggctctcttcacttttatgtagcagccattgtaatcaatattgatcctcatcaccatgcaaaagtactgcaaaccaaagaaaacaaaaatgattcaaatggtatttatagaactaacttaattaagaaaaccaaaagatggtgattagagcttgccttcaatgtcatgaaaacaatcaaagagagagagatagtaacaggaatttgaaaatccaaaatagtatgagtgagctagcaaaggcaaaggcagagtgaatcttaaaaggcaagcaacaacaaaactttgagagccaaaaagggtttataatgagctgggtagcattttcgtttgatggcattgatgctccttttaattgctaaatctgattcattttgtgtctataggtttaccagcaaggaaagcatataatatcagcaaaaggcaagaaatatgaccattggagatcaaagcatccaagattttacaccaataaagggaaaaccatcttgggcttttaacacagggaatgggaagctctgaattaccttcaaacctgattcaccaaaaaaa

SEQ ID NO: 239222 - DNA, 1045 bp, Glycine max
  unsure (1)..(1045): unsure at all n locations
cccgacaccaccgcatntacatccgcccctctncatatnacnnnnnnncccactanagactactccctacacgacacanacagctctatacccacctatacatacactacttnntatatcctccccccagcccaccacccggcaattgttgacactgttcgtaaccggagacctataagacgaccgcagcatgcaaccgctaacccaggaaactcctaataactcccacactttttggggtgggccaatcttggatggcctcgaatttctcaaggtccacttggaccctatctctaccaactaccaaacctaaaaagactatattatctacacaaaaggtacacttctctatatttgcatagagggcgctcttcccaaagactgaaacaaccaccccggaaggccccatgagataacacaagcagctaccggaccctaaaatatacaacaaccgtcgaccctaccgaatcctccctcaaaaaccccttaccaagtcacgcacaacccccctaacaccccccactgaccacaccacccccaccgtaacactcatccacccaccaccacaacctcccccaccccccactgcctcacctcccaccacacccctacccacctactcactcatcctgccacccgccccccaccccatccctatcggccacccacctcccgaccaccagtcctccgccaccctactccttccccacccaccccccccacatcgccaaacaccccaccctgatcataaccccagcacccgcccaccctcccctgtccacctccaatccatatacaatcaccccgcgccatcccaccccccatgttccgaacccctcccatctacataccgcccaccccactacgccctccaccagcctcatccctatatacctcccctccccacttccatctctcctctcactcacagaccacacgtcaccctctcaacaccaccatccatacctctatttaccccaccctccaccactccgtcgctaactgactacacatacccaccactacccttacccgactagccccc

SEQ ID NO: 239223 - DNA, 418 bp, Glycine max
tcttctgctcaacagtatatgccgttcatggctccttttccatactattattctccaatgccttatgtgccaaatgctggaatccaagccaccattgctccttcagctccttctcaagccaacatagctactgctagttcagcaccttcaaacagatggaatccggattctagtgcatcccaccatgtcaccaatgtttctcaaaatatacagcaattaacaccttttgaagggtcagaccagataacacttggtaatggacagctccttgacattaactccacaggtctaacttcatttcaatctcctttaaaccctacgtttcctctaattcttagcaatttgctatatgttccttcaattactaaaattcttattagtgtgagttagttttgtaaggataatctaatttattttg

SEQ ID NO: 239224 - DNA, 171 bp, Glycine max
  unsure (1)..(171): unsure at all n locations
ctataaatactcagcttcatcggcatactccacacaaagatttgatgggatnattatacttcatactccacacaaacagattttgaagacaaaaattgggcaagtttctgcggatcgaatgctatgagttgtatgaccattttattcggcctcaggagagaggtcttatac

SEQ ID NO: 239225 - DNA, 559 bp, Glycine max
agcttatacgaccttgtttgagccgagatgactttattatttatttggacacgtttgaatatgatgtagaagaaagcgaatgtgagccttttacccctttggaaggctcgcttttaaaaacgttttaaaaatacttccaaatagcatttgaatctttattcctttattagcatatatgtgaagggtgcagggtgtcacaattttcatatatgtatctcgctagaacgaccaccattaagaaaagagaaggagcatggatactaagttgcatacaacatgatcaaacatggtctaatgttatgatagcattaatactaattataaacaaagtgactactacacactttcgttacatactaatcaattatagtacatgcttcagtccaaagtaaattatagacaaggttacgaaataatcataagttcacctttgacatagcatatattcctgaagttacaaaataatcataaattcacgtttgacatagaaaagcggaagaccaatatgccaaagttgtgagatttcataaacatcctcattagatgagtttctgagatt

SEQ ID NO: 239226 - DNA, 458 bp, Glycine max
tttgactataagtacgacacatgaaatgcagctgcatatatgttaccacactataagatgttactttgtttagatgcttgtttaggctcttgaaaagtctccatttttcatttattttaatggaattttcagttgaacgctaggaataaatctgcagccgtagaatgctatacaagaatagaggtttgtctggaaggtagtacttgatgcactactatttgccagtacaagctctcacaggcttgacatgtttgctctttgtttatttctgcatgtattaaacaactcttgttgactttggtatcagtatttggtatcagtattttaaaaatagaacacagtcctatcatataactaattaacatggtctaaacagtctcaatatatttaacatgctttccatctcacaattgtgtagttatttaacgagtttgttgtgatgcaattttactctgtgt

SEQ ID NO: 239227 - DNA, 443 bp, Glycine max
agcttcaagagcatttgagttaaggttgggtttatttttttcatctccgggcgtcccagcatttaccaagtctttcgattcctccagtaacggagctaacctttcaccattatttggaccagccagacttgccaggttattcagcagagagatagaatattctggttacctgtatgagccgagccatctgctggaatttatacaaagcataacctgaggagtcatcctggatgaaggtgaaatgcagaaatgtttcaacaccacagacatcataagcaattgtgttctttttcaagtcatattaaatacaactgcaccatttaagtacaactataccattttcaggtgtccgaaatcctctaaattagcatctacacggatgacagctaccttagtaagattttgcaactaaaaagaattatcatacagtaaccatcagtagc

SEQ ID NO: 239228 - DNA, 497 bp, Glycine max
  unsure (1)..(497): unsure at all n locations
tcagcaattacaccttggacatttcaccaatatgaattagtattagttttttggattagngaggaattaccttagaaacttcatcaacaacttcgttggagattttggttcctccaaatgaattgatgatatttccaaagtcattaaggccatggagattccattcccaatagcaccaacagaccccataaacatcaaaaaatgatccaaaggatcatcatatgagaaaagcttctataagggcactgtttttgcagattcatctttggcctcactgttctttgagtctttcttgctggtaggatctccattcaagtcaatatcctctgccattttcttcattgaagactttacacacccttatactaattagtaatcactgtaaacggaaaaaacctgcagaaaatgcattacaggttcaagttagtaacacacaagattgtgctcttcaaagcgtaacctcatagtgaaatttcatttttttcttcttcttggat

SEQ ID NO: 239229 - DNA, 584 bp, Glycine max
agcttgaaggtgcgtaacccaccattttttcatagtaaaacactggtaatgggtctactattattatgatcattttcttctccatcattggaggtgccacttgagctgccaagtctctccatctttaggcgtattctttgaaagatttgtgcccctttttacccatgttctttagttgcatcctatccggagccatatcagaattgtactgatattgcctaacgaaggcaaccattatgtccttccaagaatggactagggaaggttccaagttagtgtaccaggtgacagctaccctagtaagactttcttggaagaaatgtatcagaagtttctcattttttgcgtatgcccccatcttctgacaatacatctttagatggttcttggggcaagtagtcctcttgtacttgtcaaagtctggcaccttgaacttgggaggcgtgacaaaattgggtactaggaacaactcttctatgttagcaaaggcataatctctgcctcctttaatggcattgagcctttcctctagatgatccaactttcccattttttccatagcatgaaggttttacttgctgtgg

SEQ ID NO: 239230 - DNA, 501 bp, Glycine max
ttgatgatgttggtcttcaccgacgaaaggatcaaagtaggtctaaaaaatgcaaatctgatcatcatgctttgatacatgccaaaaaaactagggcaaatgaagagggtgagaatgagggagaagcccatgctgtggctgacattcctatacagccaagtttcccaccaacctaacactgtcattactcagccaataacaacccttttcattacacaccacccagtcatccacaaaggccatccctaaaatcaaccacaaagcctacctaccgcacttccaatgacgaacatcaccttcagcacaatccaaaaacaccaaccaagaaatgaattttgcagcgagaaagcctgtagaattcaccccaattccggtgtcctatgctgacttgctcccatatctacttgataattcaatggtagccataaccccaaccaaggttcatcaacctccatttctccgagaatacgactcgaacgcaacgtgtgcttgtcatggaaa

SEQ ID NO: 239231 - DNA, 607 bp, Glycine max
agcttgtagaattcacccaaattctggtattgtatgctaacttactcccatatctactcaataatgcaatggtagccataaccccaaccaaggttcctcaacctccatttttctgaggatacaactcgaacgcaacatgttcttatcatggaggagttatggggcattccgttgagcattgtatgaccttgaaacataaggtgcaaagtctaattgatgcgggatggctaaaatttgaggaggataatcgcttgtgaattctgacattggcaagcgacactatgtatggggcaatgtgaaggttgttgttagatgtctccaatgactcattaggattttaaagtttatgtcattactgtaaacaacagtcacaatgctaattatatggataagtttgatgtctctcattctctcaattacatctttgcttacttaactttcactgaaatatgagtgtaagccgatgatttgtttgcccaagagagttgtgctcctgagtttgacttccgagtctgttcaatcataaatttctcgctctgcatgtttggggagggtggttgaagccgacagtaaaataaaaaatttaaaaaaaaacctttgaatgact

SEQ ID NO: 239232 - DNA, 547 bp, Glycine max
tgagatgaggaagtgttgaagggtgaaacttcctgcttttattgttgaccacagagtgttacctggagatatgtcgcgggggtcaggagaccttggggacgtcaggtggggtgctattgcccaaaaccaagcttgaccaatcccgacccaacccgggcatagtcggtcagtgagaacctgtgatgtacctaagcaggcgagctcctggcagtcaacagataaaaggaacaaagaccacaaagcaaggaggcttgtggtggctggccagctctgaattttgtgtgatatgtggattatggcctctggtaatcgattaccaagggtgggtaatcaattacaaggcttaaaaatgaagacaggagactaagatggtctctggtaatcgattaccaaggggtgtaatcgattaccaggcttgaaaacgaagtcaggaaactaagggagcctctggtaatcgattaccagccagtgtaatcaattacacagaaggatgggtcactggtaatcgattaccaggtatgtgtaatcgattacacaatgcattttt

SEQ ID NO: 239233 - DNA, 519 bp, Glycine max
agcttcttttacttgttattgattgtcactttttggatggtatgatggactgatacaaattcgcattgatataggaaggggtaacagattgttggatctaaatatgagaaatgccatgcgtcataccttaatttcgtccgaggattattatttgatgatatacaacctttgattggccgcttcgagatacttggcaccctctgttgcacaatatgtgaagtcccgagacgtgccgaaaatcaaaaggaagcgggcttacgtgatccgtgaaaattttgtaatgtgacggaaatcgaaaggaggtgtttttcgcaatccgtgagttttcgtaacttcttcgaaagctaaaaaagagtaaatacataatccgtaaggattcgtaaccttgcggaaggaaaataagtatcgttacgaaattcgtaaagtttcgtaacgttacggaaaaagaattaccaaaaaaggtaaaggggtgcatttagtaaaaaggggggtacaaaaagcactaaggcccacttgggc

SEQ ID NO: 239234 - DNA, 572 bp, Glycine max
  unsure (1)..(572): unsure at all n locations
tgaaggtgtgtagcccaccatcttttcatagtagaatactggtaatgtgtctactatcattgntattatttttttctccgtcattgaggtgccacttgagctgccaggtctctccacctttgggcgtattcttttgaaagattcgtgccccccttttgcacatgttctgtagttgcatcctatctgaagacattatactgacactgcctaacgaaggcaaccactaggtccttccaagaatggactcgggaaggttccaagttagtgtaccaggtaacagctaccccagtaagactttcttggaaggaatgtataagcaattcctcatcttttgcgtatgcctccatcttctgataatacatctttagatggttcttggggcaagtagtccccttgtacttgtcaaagtccagcaccttgaatttgggaggggtgatgatattgggtactaggaacaactctcctaggttagcaaaggcataatcttcaccttcttcaatggccctgagcctttcctctagatgatccaactttcccatttctgccacagcatgagggtttttacttgtcgt

SEQ ID NO: 239235 - DNA, 353 bp, Glycine max
agcttttatgtgaaaggatgtgactcttcacatttgaattttaatttcttcgttcaaagacactggtaatcgattaccaaaacattgtaatcgattacaactttttgaaaataattggaaagttgtaaattcaatttgaaaactttttcaaaaccattttgctactggtaatcgattacaacaatctggtaatcgattaccagagagtaaaaactctttggtaaaaggttttgtcaaacatgcatgtgctattcaaagtattgaaaatcttgttaaaacttatcttgattgagtctttctttccttcttgaaacttgagtgtagaaacttgatcaagattcttgacatctttg

SEQ ID NO: 239236 - DNA, 559 bp, Glycine max
tcattaatagcaccaaaaactattccttgcacaaagcttcattagtagcacctaaaactatgtcatgaacataaatttgcacaagcaacaactcattgtttgatctcttgataaacagtgttttgtcttaacctcttacaaaagattgctcaattaagaaattgctcaacctttcataccaagatataagtgcttgtttgaaaccatacagtgccttttctagcttgtaaacatgattaggatgtttgaagtctacagaacctacaggattctcaacatatatctctttttcgatgtatacattgagaataacacttttcccatccatttgatataacttgaaacccatattacaagctaaagcgggaataaccttatagctttcaaccttgcaactgaggcataagtctcatcatagttaatgccttcctcttggttgtatcatttagcaaccaatatggccttgttcctaactatgatgcttgatgaatcaagcttgtttcgaaacacccatttggttctgattggcttgtgagaggcacgtttatggactaaatcc

SEQ ID NO: 239237 - DNA, 210 bp, Glycine max
agctttgaagctttagtgcaatgtagagggatcaagagcatctcatgatggaaagagcttgattataacttatgaggaagataggaagcttaattaagaactatgtccttggcaagtaaggcttgtcttcttccaagctcatacatatattatttggtaaatagtcacttttgtctctaaatgtgtaattcgctgacaaatgcgtttttt

SEQ ID NO: 239238 - DNA, 309 bp, Glycine max
taacgagttgagggtagagctttgtttcccttaatttgatgacttcagcatttgtagtctccatagcatggtaaacacatgaagcacactatgctgagacaaattcaataatcctaagtactttattaaacatatgtattttgtttttttgatgttgaacttgatatttaacatagggtaggggtacctgtccccttgtgctttaagtaaaggaaaatgaccctttaagaaaagatggagttgaattaaaaccgtttgacaatcatccaaactgtccaaattcatagaactggcagaaattggttgtgg

SEQ ID NO: 239239 - DNA, 444 bp, Glycine max
agcttatacgaccttgtttgagccgagatgactttattatttatttggacaagtttgaatatgatgtagaagaaagtgaatgtgagccttttacccctttgaaaggcttgtatttaaaaatgttttaaaaatacttttaattagtatttgaatttttattcctttattagtatatatgtgaggggtagagggtgtcacaattttcatatatgtattttggtagaacaaaaacataaagaaaagagaaggagcgtggatactaagttgcatacaacatgatcaaacatggtctaatgttatgatagcattaatactaattataaacaaagtgactactacacactttcgtacatactaatcaattatagtacatgcttcagtccaaagttaattatagacaaggttacgaaataatcataagttcacctttgaatagcatatatt

SEQ ID NO: 239240 - DNA, 171 bp, Glycine max
actcaagcttcggtattcaatttcaagcttctcgatatattacgggactcaatcagacattcgagtttatagttattgacgttggaatatgctctgaccataaacattcaatttcacgcgtctcgatatattacaggactcaatcagacatcctagtaaaaagatatcctc

SEQ ID NO: 239241 - DNA, 297 bp, Glycine max
acctgcagcatgcaagcttacaccaggggtgaaagaggtgagtgccatcaactgtttttctcttaagacagatatgactcaacggctagtgatacaacacatgtatcagagtcgcataccctacttaaacaaagaccctacataccgtgaggatgaatacttcttcttcactggagatcatgtcacaaacagtaagtatggatttcatacactagagagtccaatttctataccttgtcctcgaaaatcacatgtatgagggcccaattaccgaaggattttggaagagggattagc

SEQ ID NO: 239242 - DNA, 459 bp, Glycine max
tgtaaggatttgggtgggaaatgatagtgagactcaacttggataccaagcttgtgcttcaacaattgcaacaagacccactatccataatgagagaacaatttttttttaaaaccttgcatctcgtatgaaatatgttctctctttaggtttgggttaggtcagcggatttactcccaaggagccttctcaccattagaagatcaccttcttcatagggtaaacctcttcaatatgctcatcacccatggcttcaccttcatttccacttgaggaaggagaagaagtagcctcctcttggctactatagatgtcttgacccctcataatcatggttttctttgtgggggtattgagaagcaatggggcctttcccaatacatttaaagcacttaatgctactagcactatcttaagaactagcccgttggagtgatttccttcctgcatataccctta

SEQ ID NO: 239243 - DNA, 358 bp, Glycine max
agcttattccaaactttctaggtggtttaacttcactttttctttaaaatctggatttgcaaaattgtagtcttacagatggaagttttcgtatgtcatcttctttcattatgagttcttcattttctcttgcgtaccttgatctctgctcaaatctgttgaaatcatcaactatattttactggctctttaactccaccaccaatcttcataaccttgtccttgattataacatgttagaaggtccaattccagatggatttgggaaaagtaatgaactctcttcaacttcttgacctatacggcaacaaactgcaaggcgagattccatctttctttggtaacatgagtgcattgc

SEQ ID NO: 239244 - DNA, 471 bp, Glycine max
  unsure (1)..(471): unsure at all n locations
tggtcttaagacacaacaatnttattggagacctaccattactcttgatttctgcactcgtttagatatactagacttgagtgaaaatttgttgtctggtccaataccgtcatggattggacaaagtttacaacaattacaaatcttgagcttgcgtgtaaaccactctaatggaagtgttcctgttcatctctgctatttgaggcaaattcatatcttggatctttcaagagataacttgtcaaaaggaattccaacttgtctaaggaactatactgcgatgatggaaagcagagtaatcacaagtcaaattgtaatggggcgaagaatatcatctacatcaatctcccctctcatttatgactctaatgtgttattgatgtggaaaggtcatgatcatatgtattggaatccagagaatcccttggagaagaattcatcttactttttctaaattgaccgccttgctgt

SEQ ID NO: 239245 - DNA, 625 bp, Glycine max
agcttccacaacatccacgcaaaacaacattcaaacagcacatagctatcacagccaagcaaaacagggcaaaggcagaaaactctgccaaaacaccaaccaaatcacagcttttctcacttaaagaccccagtaacaattccttcgatccaattcgttaaccgttggatcgactccaaaattttactgggagtctatagtgcataagcctacattgtgaccgttgggatctactagcaaacatccataactcattttacattactctttccacaaccagcaaatacatggatttttctgcacttgtgcaaaattctgctgcacaattttacagcaaaatctgcacaaagagcatatttcgaaaaccacacttcccctcatccaattttgcccaaatcaaatcctacaggtcccaaatcatgtatcaatcatgtctaaaccaaagtcaagcttcaaaccacagcaacacaaaatctaggtgtccaaaaaccctcatttttaatgatattttaaggtttgagaagtgaaatttataatgggaacaaaccttgaagcaaactctcacctcacacaaggttataccatcaaattaaactttgtcaaactggatttatacccaaaattc

SEQ ID NO: 239246 - DNA, 500 bp, Glycine max
  unsure (1)..(500): unsure at all n locations
tatgctgcaaacatttacaatagacctcctcaacctcagcagcatattcaaccacaacagaacaattatgacctctccagcaacagatacaatcccggatggaggaatcaccctaatctcagattgtctagccctcaacaacaacaatagcagcttgctccttccttccaaaatgctgctggcccaagcagaccatacgttcctccaccaatccagtaatcgcaacagccccagaaacaacaaacagttgaggctcctccacaaccttcccttgaagaacttgtgaggcaaatgactatgcaaaacatgcagtttcaacaagagaccagagcctccattcagagcttaactaatcaaatgggacaattggctacacagttaaatcaacaacagtcccagaattctgacagattaccttctcaatctgtccaaaaatccanaaatgtgagtgccattacattgaagtcgggaaagcagtgtcaaggactttaaccagcaac

SEQ ID NO: 239247 - DNA, 442 bp, Glycine max
agcttgcgtggctctatccatatttgaagcagagtatttctctgctggaggatgttgagctcatatcttttggatgaaacaacaactagaggatttcggtatctttcttgatcacattcctttgatatgtgacaacacacgtgcaataaacttgaccaaaaatcttgtcatgcattctagaactaagcctataaaaataagacatcatttcattagatatcatgtgcttaaaggagattgtgttatagtatttgtagatacaaccaaccaactagttgacatctttacaaaacccttgtctagggatagatttataaaataggacatcatttcattatatatcatgtgcttaaaggagattgtgttatagtatgtgtagatacaaccaaccaactagctaacatctttacaaaacccttgtctagggatagattctactcca

SEQ ID NO: 239248 - DNA, 538 bp, Glycine max
  unsure (1)..(538): unsure at all n locations
taagtatgaaatttattaacaagtacatatcaatggcctttaatgataagtctccaatgaacattcttagtcctagctctaactgtaattctatgatgtatctctgtgaaatttgggtcaagggctggttgagatatctccaatccttatcccttcacaatttcaatgtatctagaaaaaaaaacaagtgtccatgttaacgtattctctttgatgagagcacaagtctatcatgaggtgattaatgtgtctttaatagaagaacaagataatgactaaatgtgtttggctcaacttgttttagagaaataatcccttattttatttagcttctttagagagctttgaaaaaaagagtatttcttaaaagtaagttgttctaaaaaaacattctaagaggtagttatatgtaaataatctattaacgcgcacgagcagaccagaatttattaatacattagctttctcggttgcagtacttgtatctagttcaatatgagtcaattntcatatttcctctaactctgaactcttctta

SEQ ID NO: 239249 - DNA, 183 bp, Glycine max
gggctccacaaaattatcaccccctatctgcgaaggctaccaccccggacattacacgaactgcaccccaagacactttcttttgcctgccagtcggctcatagcttggtgtgagacacgtggcctcaaaaatcttaagaagggggggttgaaataacattatgctaactatgcccccaatta

SEQ ID NO: 239250 - DNA, 258 bp, Glycine max
ttgagcaaattcaaacaacaataacgttttactcggatgtctgattgtattttctgtaatatatggagacgctcgaaattgaatgttgaagctctgagcaaattcttacgacaataactttttactcggatgtctgcattgagtcctataatttaacgagacgctagaggaacattgatagagccctgtaccatttcaaacgaccatatctttttacttcggatggctgatcgagtcccgaaatatttctacacgctc

SEQ ID NO: 239251 - DNA, 233 bp, Glycine max
agcttgcttagtagatgtttatcggcaaggaaaatattcactttatttaagaagttgtacaaattcataatatttaatttattggattatgtcaccactgtatattatttcatgaatgtacctttttagcttgggaatttttgtttttgtgtcaagttttaaacttttcattcttttgttacctgttgggaatggaatgcatttaaagtattctcttttatttggtaaaatct

SEQ ID NO: 239252 - DNA, 421 bp, Glycine max
  unsure (1)..(421): unsure at all n locations
tcatggatttccttctacaattatatcggataaggatgcaatttttctcatcagttntnggagggagatgtttaaattggctagaactagtcctaagcatagcacttcttatcatccccaaacggatggtcaaaccgaagttgctaatcggtgcttagagacctatcttaggtgctttgctggccctaagcccaagacttggttgaattggttgcattgggctgagttctggtttaacagtaactacaatatctttgctggaatgacaccttttaaacctttatatggacgagatcctccattgttgattaagagctgcaccattccatcaaagttggatgatgtaaatcagttggcccaacaacgagatgatttgcttgcggaattgcgacaaaaattgttgaaatcttaagacccgatg

SEQ ID NO: 239253 - DNA, 339 bp, Glycine max
agcttgcatttggaggggttccatcaaccgccctaattccttgatgctggtggtatctaggcttttgaccttgacttggtagaacctcttgccggtttgatttgttcccatgcttaccaaagtgagacaaaagctggtgcaaatcaaaactccgatatctcatgggtggggtggatgaatgcatgaaggaatgcctatgacacagatgcaatctaagaatgcggggggtccggggaattgtctacttcttagacacaacgtctaagggtaccaaagtgccccaacgtatgtatttaaaacggtgacctgcaccctccggtgatttgtttatttagggga

SEQ ID NO: 239254 - DNA, 423 bp, Glycine max
tgagatgaggaagtgtagaagggtgaaacttcctgcttttattcgttgacctcagagtggtacctggagatatgtcgcgggggtcaggagaccttggggacgtcaggtggggtgcttttgcccaaaaccaagcttgaccaatcccgacccaacccgggcatagtcagtcagtgagaacctgtgatgtacctaagcaggcgagctcctagcagtcaacagataaaaggaacaaagaccacaaagcaaggaggcttgtgtggtggctggccagctgtgaattatgattgatatatgggatatggcctctggtaatcgattaccaagggtgggtaatcgattacaaggcttaaaaatgaagacaggagactaagatggtctctggtaatcgattaccaaggggtgtaatcgattaccatgcttgaa

SEQ ID NO: 239255 - DNA, 554 bp, Glycine max
agctttgagccaaaatcctgaatcaccataaaccttgacctatggtgagaatgtcaatccttaccctcggaagcaaaaaaacaagagaaggaaaatttccaatcaaaggaaaaaagagaaggaaaatttccaatcaacgagaaagcaaaaaaggagagaaggaaaatttccaatcaaaggaaaaaagagaggaaaggaaattcccaatcaaagagtgggagaaagcagaaagaaaagaaagaaaattcccaatcaaagaatgggagaaagaaaaaaagagaagaatacgaaggaaagaaagctcctgatcaaggatcgaaagaaaacagaagaaatatgcaaagaggtctttggaccagacaatatctgaacaatacggaattgtcaccaaatgaacaaaaagaaggaatggagaccacgacctaaaatggtcttctccctttgattaccaaccaaaaccctgtgcgtcggcgacttgttcgcctcacgcaaaacaaaaacagaaaaggaaaaggccaaaaacacacaaaagccggaaaacccaccaaaagaac

SEQ ID NO: 239256 - DNA, 650 bp, Glycine max
  unsure (1)..(650): unsure at all n locations
tgccaaatatggagagctaaatcctttgttggttcttccttgtaggtacttgatgtaaatacctgtatatctatttaatgatattttatgtgttctctatgctattagtacctcatttcagtgtgcttttgccttgatcacgtagatgcatgctttgttaggatcattcaatagtgggaactggtctaattcttagaacttgataggacagggctagtttatcgtattatcatgaggaatcggggtacgataacctagttttttgtatgtttgtcttaatacgattctggtcgagtttagtccaacaagaggaatctgaggatgatgcttgatcaggattaggctagactatcacgagggatcggggtttagcatttcaggagacactatagaacacatgagcattgttaagtagagaatatccttataacatcaggcacctaataggaagaccaatatgttgtctacttgtctttacacatcattactcacgtgattttcctttttaatagttagtttacatacatgttcatagttcacacatatattttcatactagacacctattcactgaatatagctttacccaataacacaagttccccgagagtttgatactcgattcttaccaattatactactngcgtgat

SEQ ID NO: 239257 - DNA, 532 bp, Glycine max
agcttccaataagggacattggcctaaactctcccaacacttatttcattttgcttctttggaatgagtgtcagaaaagatgcatttgtttctcttggtagtcttccattaacatgaaattcattaagatccctaatgatatcaacttcaaccacctcccaacaagattcaaggaagttaaaatcatcctcatccttaccattcatttgcttaagatataatgattgtaataagtaattaattttaaccattagatctcaagaaaatgaatgatgagaataagacataactttaaaaaacttgcttttgaaataagtgaattctttctctcatatattcctctctctctatatataatataatataatataaaatttacattaccagaaaaaagtaaccataaaaaaggacattatgacttattttggttttatatcatgtaggaatcaattaatcccccccaaatatttatcaatcaatccttagttttgaacgtattgtcacattatgacaattaatgcatgtattatta

SEQ ID NO: 239258 - DNA, 628 bp, Glycine max
actaagcttccccggggccatttcctgcgaaggcaaacatttggaaagttagttttacccgtgggacactactcttaaaacaaaaatggcatacaacctcctcccatatatacaaacatcaatgtaaatttagagcaagcttatgcgcatatttccttacgaacgttcacttgcacaagacattctattaactaagaaaaatgcacccatatacaatcaaggcagcttcgttacctagattatttacatgtacttccaaggtgtatttgttacttacatcacacacatctccttggctaaatttacatacatgcatactcaaagcattttggggtaccaaaaattgcacatgtgcacatcttggaatttctaatacctatacatacacaaacttcatgatgaatcttgactatctacaataaggcgctacatttcttgctcttttcaaatttttgctacctaaagccgcatgcaaattcaagtatattttcctttgctgactaaaattgtattcaaattaaaaggtatatatttttttggtatgtattttctttacataacatgcaacaaatttatatatatatttttttgggagaccatttgactaccaaaaattacatgcacatac

SEQ ID NO: 239259 - DNA, 442 bp, Glycine max
agctttcaaaaatcctatttttgtggacgagcttgactatgttatttgattttagccttagtttcactttagttattagtcaattcaattaagaatgaggaatcccaaagagaaaacgtccgattgatctttcgcttttattttactaaaaggtatttttatattattattttacctcttttttgatttccaacgtggttacggcacgaccgaacggtcggaattcattttaaccaaaattaacggatgatacaattcaaacgatcggtggaaatttattttatttttagattaagtgagaaatgacttaaataaatggcttaagcgcgtcaaaagggggtataaaaagtaaatgaaaacgagaataaaaatacatgaaacaaaatgtggaccaccacgggtacatagaatgaattgaaaagcttggtttgaggtacttacc

SEQ ID NO: 239260 - DNA, 339 bp, Glycine max
tgaccaatcccgacccaacccgggcatagtcagtcagtgagaacctgtgatgtacctaatcaggcgagctcctggcagtcaacagataaaaggaacaaagaccacaaagcaaggaggcttgtgtggtggctggccagctgtgaactttgagtttatatgggatgtggcctctggtaatcgattaccaatggtgggtaatcgattacaaggcttaaaaatgaagacaggaggctaagatggtctctggtaatcgattaccacggggtgtaatcgattaccaagcttgaaaacgaggtcaggaagctatgagggcttctggtaatcgattaccaaaggggt

SEQ ID NO: 239261 - DNA, 368 bp, Glycine max
agcttgcactgcccaaagtggacaaccttccagaaaacgttgattctcaccattgatgtcccttatgatgtcgttcagtatctcaaaaaagcctacgatgatttggaagaacccttgacctgttttctcaaatcttccaaagttgattggcatttctatgacccatatatgttacagttaccaaaaaggttcaaagagaaaaccaaatggtgtggaatagtaagccccggttgggcaccatagttgaaggtattgagccacaaggcagttggtggggttttgactcactctggttggacctctgtggtggaggttgtttagaacgaaaaacctctagttttgttaatgcttcttgtataccatggatt

SEQ ID NO: 239262 - DNA, 644 bp, Glycine max
  unsure (1)..(644): unsure at all n locations
ntacaagttagggtcacttataatttaactcattgatttgccgagaaaacttatgaattaacgagagtgtgtaatgatttttttttttgtcttgtatgaacatcctttagtaaaatgaacatttctctctatatgattaactttggattttgagtcataccttatccaaaactagacatacatgactttttatacaggtaaagtttataaaattttgttatctaataagtataagttatgcaatagttttataaatactctataaaaggaaaaaaaatgaaaacttgagtattaatataaatttataatccgataaatatatttatgtataaatttggtttgggttggattagattgaattttaaaatcaaatccaaaatctgattttatccaaaacaaatgggtttattaaattttaatttgttcgactattggtttatttgattttcagttttttgcttgatttattcataaagttatttgataaaattagtttatgaacattcctaagaaaaccgataaagtaaagacatcanatgtacaattaagtctattaactagtaaagtacgccttttgtgacaaatctacagtgttaaacattcggagattaatatgtatagtacattcttttgcctatgattct

SEQ ID NO: 239263 - DNA, 462 bp, Glycine max
taacatgaagttgacctaaccaaggacgagccatggtgtttcttattttcgtcaccagcaccaatatgtgagtgggagaaaccgaatgtataccttattccattcttgacggatcgcttctttttcctttgtgaaaaaactaccttattgcatcagtatcaagagtcttttctaggcatttatatgaggggtgctgggcgtaccattgttcaaacttgactcacgatataacgcccttcattataatagatgacgttcatggatactaggggtgatactacatgatgaaacatggactagtgttatgacaccattaatactaattgtaaacaaagcgactactacccactattcgtgaatactaagtcattatattacatgcttgagtccaaagccaattatagacgagggtacgagataatcataagcctcacctttgacatagcatatattcctgaaagt

SEQ ID NO: 239264 - DNA, 126 bp, Glycine max
  unsure (1)..(126): unsure at all n locations
tattntgatgaccaacgaaacataattaaataagttaataatctcttatcttagctgacggggttggtgtaatggtggaagacactcttgtatttacatgtgggacgggagaacaatctatttatc

SEQ ID NO: 239265 - DNA, 382 bp, Glycine max
atacgtataataacggtgctattaggagctactatacctattgctcaacaagatattaagaaaaatttggcttattccacactgtctcaattgggttatatgatgttagctctcggtatgggatcttatcgagccgctacatgctttttgaatactcacgcttattctttgacatggtagaattattgtgagtgatcaaattatttcacaaactatttagctcgattatatatacaaaacttgaatttatgactactaattaaagttcgaataatttggccacaattaattcaatcattttggcttttataattcgttatctggctgactttacgtacaaatgttatttaccacctatctgatccaatttaagtctacctac

SEQ ID NO: 239266 - DNA, 285 bp, Glycine max
taacacctctcattcttattactttttcaatattgaaaaagtaataagaatgaaaaatgaaaaggtcgtcttattcaaaaccccaaccaattatgaaatcccctatctcccacttcacacctcggaacgcaccgttcttatagagagaggcgctttcacatcttcttaggctggggagaggaaatgttcccattttttaggatactccggggaacagatatccagtggagatgacggggtggggcctgtacctcataggattaaagcacgtggctacgaaccacg

SEQ ID NO: 239267 - DNA, 440 bp, Glycine max
agcttatttgaattaatgctcggaaatatatagaaccactttctattaagatgaactattgatattatcagttaaaacaactaactaaagaaggataaaactgtcatcaagaaagttttttttttttttttacaaaacacatgcatcctttataagaaccaattttatttgagaaggtaaaattattatgagtgataaaattatttcacaaactatttaactcaattatatatacaaaacttgaatttatgactactaattaagtttgaaataattggcaacaattaattcaatcattttggcttttttaattcattatctggttgattttatgtaaaaatgtaattcaatcatatctgatccaatttaagtcgatctagattggatcgatttttcttattttaatcatacttttttagaaaatattaaataaatgataa

SEQ ID NO: 239268 - DNA, 483 bp, Glycine max
  unsure (1)..(483): unsure at all n locations
ccgcttaaggttatgcggnggtttggcggttgttctggagtggcagtgagtgtgtttattggaattggaagggttcgggcgagttcgagttcttcttcttctgaggaggaggaggaggcagtgagtgtgcagtcaaaagtgactcaaaaagtatacttcgacgtgagtattggaaatccagttgggaagtttgtgggacggattgtgattggactgtacggcgacgatgtcccccaaacggctgagaacttccgtgccctttgtactggcgagaagggctttggatataagggttctaccgtccatcgtgtcatcaaggatttcatgattcaaggaggagactttgacaaaggaaatgtatgtatgttttaatggttgatgctttgctttctcattttcgattcattctaaattccttcccttccttgtagggaactggaggcactagtatatatggtcgtactttccaaaatgagaatttaa

SEQ ID NO: 239269 - DNA, 377 bp, Glycine max
attatttgatctacctattataatttgtttttatcatttgacctgcaattgcataagtttaaacattgaatctgattcgatcccatcttattgaaaatagttcggattgagtgggattatgattccaattggagtgataatctttgtctaagaagaggtcagatatataatgtattcaatcacaaaccatctaggagagtcaagattgaatttatatggcactatatatctaataataaaatagctgtgtatcttaacttagataattagtaaaaaaattaattaaatatattttttcataaataaatatgtcatatgacaattttataaacatataaaaaataaaaatgagtcgatattataaactcatccaccaa

SEQ ID NO: 239270 - DNA, 450 bp, Glycine max
tgctttatgtcaggccaccttctgctttctactccttgttgaccttttttaaaccgattatttgaccctgttgattaattagcatattatatatatcttttctgaatatcaggatgattactaacttggagattgcaatatgcatgatattttacagggtataactttccctccgatgttgtcgatgctatgggaaagtacagtatgcacttggctaactcagtcatggaaagagctgaaactgtctgcagagactggaacgctactaatgtacctagcttccctttttttttctttcccctttctatatatatatatttttcattctttgaaattgggttgggatttaatttgcagatcaatatggagagagtggttggtgtacgacatgccaagaatgtaatatgcagtgctgctaaaaaactagaggctgacaccttgggcatggga

SEQ ID NO: 239271 - DNA, 590 bp, Glycine max
  unsure (1)..(590): unsure at all n locations
agctttatagacctacaattctcacacctgtcgaggttaccacacccgacatcgaataacactcatccgtgcttgggggcttgacaaactcatcaccttcctacttgtcaaggctactacctcaggcatcagacaatgtccttcaacactagaaaacctatttcgcccataagccgacttagagcttagggggattatgtactatctagggtccataaaatacacatggcatcctatgtgacactccgagtcatgtgtcaacccttcatgtcaaccttagcactggagcacgaatgtctgacccttagcagtcaggctccctaactgacaggttatctctaaccttttattatttgaatatattgcaacccttctatctcttggcaggtagttaattatctacaaagtcacacattatctataaggtacaattatcctctagcttttatctttaagctacatattatctctaactntatttataatctattggtaattatctgctggggctgtagcattccctacaaataaggacccacaacacctactcaatcctataagtatcaaggtcccttgtactctctcaacac

SEQ ID NO: 239272 - DNA, 502 bp, Glycine max
  unsure (1)..(502): unsure at all n locations
tgtaagaagaataacaatataggagaatgtttntggttgattgataaagactatattntaatcataggttaaggagttgtacaactgatggagatatattacacttagttagggatgcttttgaaaatgagaatgagataaatgtttattttcatcatgaagtagatccaattttagaagaagtcccacagatgttgtacttggaatgtgatccaattccagaagctgttgagaatgaggatgatttagatgatgtacctgttgctggccatgaggaaactaagttttaattcatttgtacttggtccgacatggttactataattaattaatatgattaatttttacttgatcaccattgatgcagatgttggtgctggtgagcatgttggtgctggagagcagagagatggtggtgagcaaagggatgctgatgctattgaatagagagatggtggtgagcagagggatactgatgctggtgagcaaaaggatgctggtg

SEQ ID NO: 239273 - DNA, 375 bp, Glycine max
  unsure (1)..(375): unsure at all n locations
agcttgattgagaagcctcagcctcagcctcagcctcacaatcacatgatcgctgacacacacacacacacatgttttcttcctttctcgcgtgctccctgcatacctctatttttgtaattcttcagaaccacaccaataaagagaagccactccaacaataaatttcgccccctctttagcaatgatactattttttccccttattcttacttaaaaaatacacttgaagaacagctagaaatgaatgttattattaaatataaaaaangtgacgtgatggtcctagtaattgtgtaaggaaaccttatccatgagctaccgagggttgattagtaacctgaggatcagagttcgggccatctggactcaatc

SEQ ID NO: 239274 - DNA, 445 bp, Glycine max
tattaaaactaaggtgtatgaaactgttttcttttagtaagaccttgtttttacattcgttgacgtattggtctactgtatttttattattttttgttcaatttttactgatttttttatcctattttcagctagatgtattggctattgaatttaatttatggatcttttttactgtttgattattgatacttgcatgatagagttttctatatgggggtgacatatatatcaaactttttgtggcagagcacaagttgtgggatggccaccaattcgatcttttcgaaagaacacgatgatggcttataatttggcaaaatgtgacaacgaagctgaggagaaatcaggagtaggttgtctttacgttaaggtcagcatggatggtgctccatatctcagaaaggttgatctgaaaacctacagcaactatattgaactttct

SEQ ID NO: 239275 - DNA, 169 bp, Glycine max
tatcatcatctctatacccatgaccatcaccatactttccttgatgagcctccaggagccattcagtcaggtgtaggcacaacacctgtattcgaacaagccgactaatgcaatctgatatatacgctgctgcaagcactgctgtgagcattgtccgcttagcttaatc

SEQ ID NO: 239276 - DNA, 420 bp, Glycine max
  unsure (1)..(420): unsure at all n locations
tcaaagagctatgaatttggtcctttcgctacagctngcgttcccatttttgtatcctcncacaataataatatgaagcaggtgcatgactggggcagtcttgcaactgcccatagtcctcaggatcaaaacgaaggtcataaagtatattataccttaccacagttcaagcagatagaaaatgtttggcattggttgttaatccatgtaatcaatttacatatttatgatcgcttggaagattttaggaatttgttaattatgaaataagattttaggaatgttttgagatacaaaaggattgagttcttatcattcggacttgtgaatattattggtttagtttcatctagctgttcacacatcttttacatccatctacacactaacccgcttatttcccttcaccttcgttggtat

SEQ ID NO: 239277 - DNA, 510 bp, Glycine max
  unsure (1)..(510): unsure at all n locations
agcttggttatgtgttgattttaacttggtttctcttatttactttcaatctcattaaaagacgacttgtgaagtaaatgatcggttgaaactttattttacaatgatgaaatgagattacgacacaaacgatcggttaaaactttattttacaatgataaaatgagatcatggcgcaaacaatcgggtgaaactcgctttacataaagaaatgagatcactgatggtggaagaatgagatgaagatgtgcaaatcaacaaaagggacccctaatggtgcatagagcgaattcaaaactttaaaataaaaactaaccgattgatgaacgaagaacgatgtaggaattgatcacggatgtgattcagaagcgcatcgaccttattttttcttcttctttctctttcttctccttaatttcactaaatctttcaatgttgaaagtctgaacccattccttcagccccctcatgcctatttataanaaatgaagggagaaggttgatcagcag

SEQ ID NO: 239278 - DNA, 504 bp, Glycine max
tcatccaactgaaacatggaaagaagacagtatataccagacaccgaatgtttttgaaaccttttcacccgtatcagcgattgaagaaagctcttaatggaagtcaggagaatgaaagtgtgccgcaaccattagctagaaatgaagtttatgatcgggtgaaggacatcataactatctttggtaagacccaaaagtagacgtcatctgagatgaacatatggaagaaaaggtctatattctttgatcttccatactggtctgatctacatgtgcatcattgcctagacgttatgcatgtcgagaaaaatgtttgtgataatttaattggtacccttcttaacattaaaggcaagaaaaatgatggtttgaaaagtcgtcaagacctggttgacataggaatacgagagcagttgcatctaatatcacaaggtcgttgaacatatctgccccagcatgccacacaatgtcaatagcagagaagagaagtttttgtcaatgtct

SEQ ID NO: 239279 - DNA, 346 bp, Glycine max
  unsure (1)..(346): unsure at all n locations
agctnggctgcattgtgcagagttataacattttgattnttcaagttcttgtctgtcgacttgtcttgagccttgcatgttggtttcagggaaaattaattatgttcatttgaaagcagtagtataagatatggtctgaaagtttgaaccctagatgaaattgcttgcattatttctttgtttgataaagtttaataaaactattctcatagcttatttgtcagtcagtgcactttatggaaatgagagcaaaaaggattgtgtttgatttccccaacctgaaattcccacaccactgaatgtggttcacaaccaccattccgtgatattttgcctctttatctct

SEQ ID NO: 239280 - DNA, 53 bp, Glycine max
ggctgcagtaataacataccactatcctgaagaatatatctcttggatatatc

SEQ ID NO: 239281 - DNA, 343 bp, Glycine max
agcttatctcacttttttcttattatcttctcctagaagctctggagaaatttatccaagcatgcccttagtaattattttgctggaggtttgcttgctatacttggctatatttacttttcttttttaaatgtatgatgataatactaatcaatgtttacggatgacaggctcacacagtgcttgagatgaactatactgagcagcaattaacagcagctgtcgtttctgatggattacggcctgtccttgctgccgatgacttgggtataccgtcaagattattatcaatgattaaaaaatgctgggatgcagatcctaataacagacctgcttttgatga

SEQ ID NO: 239282 - DNA, 433 bp, Glycine max
  unsure (1)..(433): unsure at all n locations
cttcactacatcaagaatcatcgggttgagtcttctttgtggctctcttactggtttagccncatcttctaaatttattcgatgcatacatgtggatgggctaataccaggaatgtctgccacggtccagcctatagccttcttatgcttcttgagaactgataacaacttctcctcttgctcatcaacaagggaggcagatataattactggaaaacttttgctatcatccaagtaagcatattctacatttgatggcagaggcttcaattctggtgtggatggctggatagtggcagaaagagatggtttctcancctgtacctcataaagaaagtcagaggtattgtgtacttctgacacatgcgtatttctatctgactctatanattcaatctcaagagggtaaacatcagcagacatggtatcaata

SEQ ID NO: 239283 - DNA, 452 bp, Glycine max
  unsure (1)..(452): unsure at all n locations
agctntgagggtgcgtagcccaccatcttttcatagtagagtatcgataatgtgtctaccatcacgatcatcgtctccctttttgcacatgttctgtagttgcatcctatccggaaccatatcagaatagtactgatactgcctaacaaaggcaaccattaggtccttccaagagtggactcgagaaggtttcaggttagtgtaccaggtaacagctaccccagtaagattttcttggaaggaatgtatcggcagttcctcatcttttgcgcatgcccccatcttccgataatacatctttagatggttcttggngcaagtagtccccttgtacttgtcaaagtccagcaccttgaacttgtgaatgaccatgtttgggtattaagaacaactcttctaggttagcaaaggcataatcttcacctccttcaatggccctgagcctttccttt

SEQ ID NO: 239284 - DNA, 429 bp, Glycine max
  unsure (1)..(429): unsure at all n locations
gcttgtattgatacacacatactgtaatcgattaccagagaagattntcagacaatattctcaacagtcacatcttttcattgtgttcttaaatggccatcaaaggcttatatatatgtgacatgagacacgaatttgctaagtttttttcagaacaaaaaggtcttatcctcttaacaagcaaaattgttttatcctcttacaaattccttggccaaaacactcgtgattcaataaggaattatttgagtgctcaaattgttcaatctatctctttcaagagagatttcttcttctcttcttctttattctgaagagggattaagagaccgagggtctcttgttgtaaaagaattctaaacacaaaggaaggattgtccttgtgtgtttagaacttgtaaaaggaatctacaagatagtggaactctc

SEQ ID NO: 239285 - DNA, 353 bp, Glycine max
  unsure (1)..(353): unsure at all n locations
agctntaacctcatcgtctctcacagtctttagatttgggatccaatccaatccttgtgttcggactctcagccacttatgatagccgccgatgatcccattactgcttcccctaagctctctgtcctttcttcacgccgcatcccatgccttgcgaactccttggagtaccctcaggttgtggtcactgaaaccccgtgcgatgaaaggcgtgatgctttcgtctgatggcactcctctcatggggtagccaagctgtcttatggcgaggacgggattataattaatacaaccccttgttcccatcaagagaacatttggacatccttcgcatgaagatagaatcctgattc

SEQ ID NO: 239286 - DNA, 366 bp, Glycine max
  unsure (1)..(366): unsure at all n locations
cttagcacttctgtatggtttcagggctttccatcagctctgattaatctgccatatactcagccggtattacgcctcatgagctttctcatatccagcttactggatttagtttgggtgacttcccttttagatacttangtgttcccctcttatcatcgagattaaatgtatgtcattatgctcccttgcttctcaagattactggcctgacttatggatggagcaagaagtctttatcttatgcangtaagttagagttgattagagcacctattcaacgaattgtgaatntctggatggagattctctctttgccgccatctgttctggaccgaatcaacgcttcgtgccgtaattttctgt

SEQ ID NO: 239287 - DNA, 464 bp, Glycine max
  unsure (1)..(464): unsure at all n locations
agcttcttgcgtagccgctcttggtgctcagattatcccaaaaacaaatccctcttattactagctattntgaattctntagttcctgaatgtacaaccttcaaattgttataaaaagtctattacatgtcgctgtgttttttaattgtgatttggggcaaccatgttataaaaagtctattacatgtactgaacagtcacctacggtatgcttgatggaatataaatactatatctttagaaatacacatgtacatggcatccttaggacttcatccagctgatgtttgtcgccagtttcatcatccaccacccttttcttctctgccttctcacgtttgttgttgtaatcccatatttatgccttcttcccttcatgtcttggtttatcacaactctagccgaatgtcctatcttcagcacagttgaatctcttgtcttattctccaatgacacactttgat

SEQ ID NO: 239288 - DNA, 414 bp, Glycine max
  unsure (1)..(414): unsure at all n locations
tatgttcttctaacagttatatctcttgtgaatgacctctttgaccagacatgaagagtctataaaagcaaggctctgttttgcattnttaatcaatctttctaacaacaatcttgaatacttttgcctttccaatcaatcctttacaagccttgaaatctctttgaagttcttcttcttcttctttgtacgaagagctttctgaagttctctanttctctaaaccttgaaaacttgcgctattcatcctttttattctcatctacctttgccaaacagaagttgccaaggactaatcgcctgaattctttatgtgtctctcttctctcttttacaaaagaacagaggactaaccgcctgaattcttttgtgtcctccttctcccttgtcaaagaattcacaacgacacagtct

SEQ ID NO: 239289 - DNA, 361 bp, Glycine max
  unsure (1)..(361): unsure at all n locations
ttaagtcgcctgcngctgcagctttggcaaggaagaagaagattataaattttngcaaagttctctcaacagtggctctaaagaattgttaanaagttattgaaatgcaagtcaaggtcttgcttttatagactcttcatgtctggtcaagataaccattggaagagttataaccttgagaaaaacctcaaaaccattggaagagttacatctcttgattnttattcaaaacttgtcactgacaatcgattaccaaaaccatgtaatcgattacacagagcattttatgaaaagatgtgactcttcacaattgaatgtgaatttcaacgttcagatacactggtgaccgattaccaataca

SEQ ID NO: 239290 - DNA, 353 bp, Glycine max
  unsure (1)..(353): unsure at all n locations
ctgcacaagactcttaatatttgaagagtattcttgcggaaccttcaaccgatgaagacactaacaaaaacttatattcttctttatggacaaagtatggcaagcccggggcaagcaaattttggtgccatcagaccctggatgcaactgtgatcgaatccacatatcagctagatcttgatgggtattcaagccatccttcgtcttgccttgaatgttaagaagcgtccccatcacactgtcacatacatttttctgcacatgcataacatcaatacaatgtctaacgtctagatcataccagtacggaagatcaaagagnatggacctcttatttcatatgcaactcttac

SEQ ID NO: 239291 - DNA, 331 bp, Glycine max
  unsure (1)..(331): unsure at all n locations
cacaatagagatgtagcgaaagataaggagaagaggtgtctcacaagtttcacattcatcaaagttatgacaagtgctacacatgcttctatttatagcctaggtcactaactatatgagagctctcttgagaatcttctttgagaagcttccttgagaagctagagtttagctacacaccccctctaatagctaagctcaccttctcgagacatttccttgagaagcttncttgagaagctagagcttaagtacacacaccctcttaatagttaagctcacccccatgcgacaatacatgagaaatgctagctacacacatctccctaat

SEQ ID NO: 239292 - DNA, 420 bp, Glycine max
  unsure (1)..(420): unsure at all n locations
agcttggaaggaaacaccactgtcgttgttaattatggatccatttggaaaaataaaacctaatgtggagttcacaactgtctgactgcttgtctctcccaagaatgccatagttntttgtaagacttgggttgatactgaaacttgtgctttcttacaaggttaggttgtgccatatatatagatgagttctaatattagtgctgcattttttaaagattgaaaatacgcatgcacatgctttctgtatgtgttgtcaactacacgaatgacatgacatgctttagcttcctgacacccccatcgttgtatctacaaaaagggaaaaaaagattatttactcatcataccacttcctgganaactattgaggttaacccattcaatctcattgatccatcttgtaatgttatcaacata

SEQ ID NO: 239293 - DNA, 326 bp, Glycine max
  unsure (1)..(326): unsure at all n locations
gctactntatgctttcagcanagcaactttacaaacttaatcgctcggatgcttatattatcctgaccagtgttactattntaatatatggcatatatggaataatgagaagggtctctgaaagatattntatatacagatgtcctacaatcttccctaacaaactcatccactcaatctcatattatgcaggagtacctcaatgtgtgtccattataaaatatgacggcttatactgtcattcttggtaatgaatagatatgggtctacgatcaaccatacgatgacactgatctccacatctacattggatatcatataaatga

SEQ ID NO: 239294 - DNA, 393 bp, Glycine max
agcttatccggcctctcatcaggagagccttcattaagaaatactgcatgcccaggcaggcacaggagcagctagctacagatgcaccgtcaccgcctctacaggagacaccatccctggggtctatctctgcccacttgcagaggttagaactccagatgcaaacatacatgcaacatgtgactagccagaaggcgactaatatcaagggccaggtgcagctaaacgagactttctaccagtacattatgcaccagcagggccaggaccccagtcctttcccttggcctacccccgagcagtttggtgccacagtggccttgcctagagatgagcccaactttgagacaggggcaagacctataggggcccctagggacgacagaggagctt

SEQ ID NO: 239295 - DNA, 408 bp, Glycine max
  unsure (1)..(408): unsure at all n locations
ctggtgaatatgtccacgagttgcatggaggatgagacaggatggagctctacgagacccgcggtgactntgtggcggataatatggcaatcgatctcgatatgcttagtgcgttcatggaaaacgggatttgttgctatctgaattgcagactggttgtcacaatacaaggtggctggctgaatgaatgctacaccaatgtcttggagaatatatgttagccattgcagctcacaggtagtagatgcgagagcttgatactcgacttcggaggagctgcgggagacagcggactgcttctttgactgccaccaaatgagtgaagaacccagatagacaaggaaccctgtagtggatgtttgagaatctttacatcccgcccaatctgaatcactgaaagctcgaagt

SEQ ID NO: 239296 - DNA, 435 bp, Glycine max
  unsure (1)..(435): unsure at all n locations
agcttggatcagccatggcctacagttaatgtcaatccagccactgggagaggatcaacccctcataaagagaagtttcatagttatctgggagttgtagcacgagagaaaattcctattgtccactccaattggaatgttgtaccagaaactttaaagaatcttatatgggatgacatttttgtaagtccttatttaagttgacatttgtatatgatttcatataataattgcaaaaatattatatttgactaattgttactgaacaattttgttttggagggcaaatttgacatccccgagggtggcaatgcgaacaagaaggtgatgtcaatggtcgctactcgatgagggcaatttaagtccttcctgacaacaaaatatgtttatgctaatagtcanggtcaagcanaagatgatccttctattaagtat

SEQ ID NO: 239297 - DNA, 411 bp, Glycine max
  unsure (1)..(411): unsure at all n locations
tattcctttctcatgataagggatattctatattacttggttgatatggaccaaccttgagataaacacgtcgtatttcatctctttgatcaaaaggaaactcccacatcattgaacgcaatccaggatcttgctctatattaataacatccatatcttctacttcaattcttctacattttaaaggttgtacttcatcaaattaaattaacaatcttgtgtgacatttgaagcttgtggaatacgaataagctgagatgaatcaataatattattgttgtctttcttctttaagaatgaacaaagagttttttgagttgacatcttcaacaatacacctgtagtatatttcttttacaaacaaataaacatacaaaataaaagtaanataataatatattaagttaagat

SEQ ID NO: 239298 - DNA, 83 bp, Glycine max
gctacctagtctattaatataagcatgtgtaacacttggtgtaagtttgatgaatgatagtcttgtgagacacaactcaaagt

SEQ ID NO: 239299 - DNA, 556 bp, Glycine max
  unsure (1)..(556): unsure at all n locations
cgcgcatgacccctggttgacgcgttgataccctgcattccgcgcacatagatacttcgccgggtagatgtatcacgcgttgaagactgtagatacacaagatcgaacgaggaatctttgaagaactgtcgagaatctacgcgtccttacttgacgaacacgttacggaaacgttacagaagcgtctcgggttggattntattgaccgagataatttttctcagcacattctcatgagagagaagtgcctaaggggctgaacgctattcttcatcacttcttcccctatntatagcaaaataagggagaagcttgccgaccatctcgtccaggcgagcaatggtgatctctccataagaacaaccttctggaggaatcttatggagggccccagtggacatggatgctatatacacaccccttctactaaatgcacgccttattatctgtctgcatatttgttgccgaacgtacagacttactaattacgacgatactgctttctgttccggcggtacgaatcctacggattgtgattactcgcttgcttaagacg

SEQ ID NO: 239300 - DNA, 338 bp, Glycine max
agctggcaagtaccttagataggggttaattaatataacagcaggcctccagaaaatatggatcattaattcgataatatggatgatgtaaattattagttctcctgcagaagtgaaaacatactcactgcttcacaatacaactttttttctacaacggatccacctgtcttttctcccttgtgttaaaatgaatgtgactatgggtgaccatcaaatattccttatttttatccccaatacatagatcaataaaggccagactcaaccttatacaaataaaagtcccaataattcttaagacataatttgtatatagcatgccaaggacatgacac

SEQ ID NO: 239301 - DNA, 414 bp, Glycine max
  unsure (1)..(414): unsure at all n locations
gactatatcaaactcattgatgtatgccgtactacaattatgtgcaacacaacagacatggatgatgtgaacaggaacgagacattcaacgtgctggcagaagattaaactacctgaacatgcattgctaatcttctgtctacacttctttcataattctgctaagatcctttatgcactgctgggtttctacaacacatataagaggccaatttccctccattcaagtgtgttaattgaaccacaaggttcacaactagtgcctctctttcttcatacctgtaatgcgagattntccatctttcattgtcttatcatcacagggtaactgaactcgctgtgatttcatcttaattgatttaaccaacgatgataattcatatatatctttcgttgacttcagagcatctaatc

SEQ ID NO: 239302 - DNA, 126 bp, Glycine max
  unsure (1)..(126): unsure at all n locations
agcttctatataagctgaaccatnttatcaatattcacatgttgagttttactcagaaacacagagtttatctctgtatttttaggagagtgatactcctacattctttattgattctagaacacc

SEQ ID NO: 239303 - DNA, 409 bp, Glycine max
  unsure (1)..(409): unsure at all n locations
actcctacatctcatctgtagcatgcattttctttctttacccactcctcacgnttggttttttatggaaaaacaccataactaaacgcgccgcaagggatccctatcgcaccagatccaaatctagaacgatgggtgatcaagaggagacacaggaacagatgaaagccgacatgtcagctctgaaagaacaaatggcctccatgatggaggccatgttatgtatgaagcanatcatggagaagaacgcggncaccgccgccgctgtcagttcggctgccgaagcagacccgactctcttggaactacgcaccagcctctctcanacatagtaggacggggaagggacacactgnggcacgatggcagtcctcacctgggatacaaccgagcggcttacccttatgga

SEQ ID NO: 239304 - DNA, 402 bp, Glycine max
tggctgttttccaaggctacacgagaaaataaggcttgcaacactcaagtgtttctgctctcgggaaaagaagcatttctcacacaccagaagacatatcgcagatcgaacggtcagatcatggacatttgtcctatgaacgtccagatcaaatttcgagaagatccaatggtaaatgaatgtaggagggcgcttttaccgagacagctcagacaacttccttgagaagctttctcgtgaggcttccttgagaagcttctttgagaggcttctttgagaagctagagttttaactacccacacccctctaataaataaactaacctcctagaaaataaaacatggataaaataacacaacagataaaatcaaacatcaattatcattgctaataatattcca

SEQ ID NO: 239305 - DNA, 473 bp, Glycine max
  unsure (1)..(473): unsure at all n locations
atacaagaatgaagctctgataccacttgttagacaagtggtatcagatatcttaagaatggaggttgaattaagatattacaaactatttccccaattaaaattatatttcactttctattcaagttacaaattcccttaacaatgaactcttaaataataattcaaatagaacaatctgaatataaatataaaacaataataaataaaagagtttaagggaagagaaagtgcaaactcagatntatactggttcggtcacacccttgtgcctacgtctagtccccaaacaacccgcttgagagttccactatcttgtanaatccttttacaagttctgaacacataaggacanacccttctttgtattcagaattcttttacaacaagagaccctcggtctcttaatcccttagagaaatagaaagaagagaagaatgaatctctcttgacagagactagatttacaatct

SEQ ID NO: 239306 - DNA, 419 bp, Glycine max
agcttcagagggttacgtcactcctttagcatctgtgatgtatatataataaaagctctctcggcatactcctctgtaatgtgtgaaaaagtaataaatgttatattggaactatattccaaaaggaatttaattggtggcattaagactctccacttacattattagttcattcaatatgggggtgatggaaatattcttggtggtagtgatcgtgaaagatggttgtgagattgatcatggcaataccttcttgaactaaccagtgttacttatcatgggttaccaaacaactgacgttgatcatgatgacatggtgacatttgtacctaacttgtactaattaacgagagttacaaaacatgtgctataattgtaatgaacggaaaggaatttttctttttcaacaaattgcaata

SEQ ID NO: 239307 - DNA, 434 bp, Glycine max
gtatatcgatcttgataatcctttggccaaggaattaatggaagtctatgagtccatgggcgacacattatcctttcaatatgggggctctgcatgacaccatagggtaatctctctaccttctggagttgggactttatggattatgaaatgtcatttgggatcagaatttctacacataattattatatttaagatatgcatgagtttatcttaagcttaacattgaatacagaatgacatcagttaatctaaatctgacagcttattgcttctattacgatgtctcgaaatccaatatatatatgccattttattgtattgccaatcttctgcactccgcttaatttgttgaggcttggatactatatggatgccttattacatcacatgattcttgtctaactaggtcctatacttttacaatcataact

SEQ ID NO: 239308 - DNA, 400 bp, Glycine max
  unsure (1)..(400): unsure at all n locations
agcttatgctgcanacatttacaatagacctcctcaaccttatcagcaaaatcaaccacagcagaacaattatgacctctccagcaacagatacaaccctggatggaggaatcaccctaatctcagatggtctagccctcaacaacaacaacatcagcctgctccttccttccaaaatgttgctggcccaagcagaccatacattcctccaccaatccaacaatagcaacagccccagaaacagccaacagttgaggcccctccacaaccttccctcgaagaacttgtgaggcaaatgactatgcagaacatgcagtttcaacaagagaccagagcttccattcagagcttaactaatcagatgggacanatagctacacaatngaatcaacaacagtcc

SEQ ID NO: 239309 - DNA, 446 bp, Glycine max
  unsure (1)..(446): unsure at all n locations
gctccttaactgcacaaggctcttaatattngaagagtatacttgtggaactcttacccgatgaagacactgacaaaaacttatcttctcctttntggacaaagtatggcaggctgngggcaagtaaattntcttcccatcagaccttggatgcaactgtgatcgtatgcccatatcagctagatcttgacgggtattcaagccatccttcgtcttgccttgaatgttaaggagcgtcccaatcacactgtcacaaacatttttctccacatgaataaagagtttagtccncattgagcatttcaagaagagcatggagggagtgtgtcacaattcggtgaagcagaagccctttcttggacaataaagagtggaatacccanngtagtggtcttgactatggcaatgacttcgtgcaatgtctggagacaaacaacaaagttcta

SEQ ID NO: 239310 - DNA, 357 bp, Glycine max
  unsure (1)..(357): unsure at all n locations
agcttctatataagctgaaccatcttatcaatttagacaagttgagttttatgcagagaattagagtttatctcttttatcttagtgagagcgattcttctaaattcttgagtgattcaagaacaccttggctgtatcaaaggactttcacaacctttgtgtgttgcccttgctggaaagagtgaatctttccttcctttcatcatcacccttgttctttcanaccacaattccagaaaatccacctctgcccagaattatctcgtggccataactcccattttacgcactcaaattaagtgattcttgagcctaaattgaatntcagaacgagacctttcacctgcgtttggaatc

SEQ ID NO: 239311 - DNA, 440 bp, Glycine max
  unsure (1)..(440): unsure at all n locations
catgggaccaactcattntatttcacaatgtcgtatctagttcatgtctgatagaccgtacaagtttactagcgatttctaattatgtgggtcattaagtctatcatatgctgacaatagctgagaagcccgtgaatttcttcgggggcggagtaggtgtctgccatcgacttggccttggctaacaatcggagaaaggctagactcctgttcacggcaagagcaaaccgatccatccacatggatgcctcttggtgtacagagtcgatcacccttcctctagcctctttctccgcgtatacttgtgcatactcgtccgccaccctatgctcgtgggccgtggctagacctaacacctcttggtactcggtgatgatagctagcatgttggtctctgtctaccataaacgctgagacaagcgtctcttggaccttgaaca

SEQ ID NO: 239312 - DNA, 420 bp, Glycine max
  unsure (1)..(420): unsure at all n locations
agcttctcattntccaccacaagtttatcaatgatttgtcgctgtttcataacatagatccataataataattaataaggctgataattgaagtgaccgaaccattcaaaaagttcaaaaaaaagtacactcctgtttactaaggttgagaataggtcatcatttacaaaatcaattatgatatgacacgttggctacaaaatcaacagtaatcagacaaaatgaaaaattatataccgtctgaagtagtttgttctctggctgcatgagtccagcctacaatatatctttgaatcagattttcatataatatttgattaactcgggaaaaactctcaaaaagagaaaatgagggaaaaatgtaaaanacgaatattctatcatccacattcatactgattgaaaaatgaagatgattta

SEQ ID NO: 239313 - DNA, 342 bp, Glycine max
taaggaagcagctccattgatatcatttaatttatgcaatgcttaagcccgaataagagaacttgtatcacaggaaaagatctaatccaagtcgaattagggatcatactgattgtggtggtaaaactggcttgaagtagccatctgggtaatatccaaaccacgaagtttcctttggtattaaaacagtgtcgtgctcaaactgttaatgtataaaataagattacaaatatataagcttttctcatgaaatcaattagcaatattctattcataatatcacacaaatacattcagaggacttaccatgataagtaccaaattctgctagctactaaatct

SEQ ID NO: 239314 - DNA, 146 bp, Glycine max
atccgctactattacttattaagcgcacaaccagtcgttaaaggaccaaaactgtgtaaaaaaaatcgcccccccttgcactcattgagtcatgcgtattgataagcttatgccgcctggaggcctcaaaacgcttgatgaccggc

SEQ ID NO: 239315 - DNA, 399 bp, Glycine max
  unsure (1)..(399): unsure at all n locations
agctntctacactgccagttaacaatgtatgatctctaccttagtttgttgctcttcttagtaagttcttaatcagtgcggtggcattgtccgaaggttcttatcaaattattgggtcattttgtccacttggctaaccatataaaagtatcaataagaattgtaatgtggggtttcattttgttgtggctgtggattgtgctttacttggttttcaagcttgacgagagttacacgccgagcaaagtttccatccatgccggtgatggttttcacaacttgaaggtaaatttttactttattggcttggtgtcgactttgggaacatttttatgagattaagaccatggaactcgtgaagccaactgggtgggtttatgtatccttgtatggagctga

SEQ ID NO: 239316 - DNA, 371 bp, Glycine max
  unsure (1)..(371): unsure at all n locations
attctaacctcgaaattcaagaaaacactttgatntattatgttnntgggataaaaatggtcattgaccaatccctattctatgacttgacccaattatctagtgaaggtgtaccatttgaaggtacactgaatgatgattggaaatttgattactttgcgcatgatgcccgccagttggttttcaccaactaagcggatatgaccggaaggctttttgccggatcattggctcttgaaagccgtatccttcactatcttattgtgcgtattntacttncaagatcttcanacattgcacaagtttctaaagaagatcttattgtcatgtgggctttcatactggccaacacattgatggggcacacttag

SEQ ID NO: 239317 - DNA, 401 bp, Glycine max
agcttctcatagaagcttctcaaggatgtttctcatgatagcttctcaaggaagcttctcaaagaagcttctcaaggaagtttctcacggaagcttcctaggctataaatagaagcatgtgtaacacttgttgtaactttgatgaatgagagtcttgtgagacacaactcaaagttcaacttctctccctttcttcttccttcaatttcggtctcccccctctctctttctatacctatttcttttcctccattgaagcatactctccaaacttattatccaagacattctcttgatggcgaagctccttcttccatggcttattccctagtggatggcagctcccctcacctcttcttctttatcttccgctgcatcttcatggagggaaatcaccattg

SEQ ID NO: 239318 - DNA, 426 bp, Glycine max
tgtcagttataatatataccgtgctgagacatcaagacaacattatacaataacaacaagggtgtctgcaatcatcattcacttggacgatatttctagttcaatcaaatagggtcactagtcacaacagcaataatctctcaaccaaaacatcaagataaaaaacaggataatgcataacaattttaagataaaagcttgtcataaactggatgatccactaatccaattgacagacaattataaatggatcattctttcttcttttactggaggagcttcggaatagattgactctctctacgacccatcttattgacgggaattatcactacgttagcggctcactcggttactcgagaatccaaattattctatttcctgactgtagcaatgcatagcggtcaataggaacattttcttctc

SEQ ID NO: 239319 - DNA, 442 bp, Glycine max
agcttgagacccatcttcaagaaatatacaagactcaacacaaggacatgagttcaaatgaaataggtttagtaacagtaccacctatgtttcatacaaacaacagagcgagagtagatttcacttcatggataactaccctgacctcatcattggaaattacactgatggaaacttggtatgatccttaatggcttctaaacttcgactaacttagcttggtttgtggtttgttaatgctactatggtcataacagtataaacacactacaaatagctaggttgttttggtgttggcagttctctaaatgcaactcaatgttgtgtaatagagttagggctgtcgacattacctatttcacgacctgagttagggtttgaggtagagactgtagctatgggccgcttcgctgcgcctgactttgacggacacaatatgcac

SEQ ID NO: 239320 - DNA, 388 bp, Glycine max
  unsure (1)..(388): unsure at all n locations
taagttcatgactgcacaatgaaatgcatggaaattgacctgtacgtagtccagattcctcttccaccatttgatatattgattntggtatggacatatttcttctcaaatagagttttcgcaatgagaaaaatgactttcaatgttgtctaatgtgcctaataaactatgttgcaaaaattaaattataatcactcttaaaaataaaaagaggacacgctaaaagaaaataaatttaaatnctaaaaaagccaaagaaataataattaaacatacccataatttcttcatagttgaaaatataattaaagaacagtgatgagaatgatttaaaataaagtataaatggtcacttattaaatngaatttggaagtaagtgataaatat

SEQ ID NO: 239321 - DNA, 312 bp, Glycine max
tgatgagaacttcatgtcatttctcgttaacgttttgccaacactcaggtggctagatgacgaagaattatcttgacaaaggacatgttttaacccagtgctcatctggtgctcattggcatcacatgctacattgctactatggattgtgctaataatagtgggcaacatattgtactgtccatacataatatcaaagtgacgccttgatgagtaagacaagctcctttttcaaatctgagtgcttcgccttagtcatggagaaggtgcagtgtatttatacagtccttatacatgtacacgatctatgat

SEQ ID NO: 239322 - DNA, 381 bp, Glycine max
tctaacatatcgatcgggtgttagtacagaggaactcgtcttactagcacatcaataatgtcttgcctctttttcattcatgttttatatcctcataactctaattcttattcaaacacacaattctatgaataaaagaatcttaattaatgtatttgaaagtcttaaaatttaaaatgtctcaacattttagatttctccatccaaacacactctaaaggaataaaataaaagaagaaaagttgaattacattcatgaagaaaatcattatctccaatttctttttatttatctatacgttgtttaatggaaaccacatactacaatcaatcttcttaattgtaataaaatacctatacaatttctattccttgcctttc

SEQ ID NO: 239323 - DNA, 364 bp, Glycine max
agcttaaaacaataaacatgtccttcttttaattgtctttgggctgggcgaccacgagcaataaagtacttttggcacctacaatatgttgacttcgccaacgctgatattggaatgctgcgacaatctttcaacaacttattcacacattgtgataagctggttggcatgtgaccatatcgccgtccagatgcatcgtaagccatgctccattattcctgtgagattcgtcaatccatcttgctatagctggactcaattgacgaaatttttctaagttttgatcaaacacatgcttgcaaggagtgtacgctgcatcaaatgtgttatcatcaacagctgtacgtatacatgaaactcaaat

SEQ ID NO: 239324 - DNA, 146 bp, Glycine max
atctgatcatcatgacttgataaacgccatatacaaatcaggcacatgaagagggcgagaatgagggacaagcccatgctgtgactgccattcctatacagcccagtttcccaccaacccaacaatgtcattactcatcgaataac

SEQ ID NO: 239325 - DNA, 440 bp, Glycine max
  unsure (1)..(440): unsure at all n locations
agcttgcatttggaattgcgaaagccccactctatcattatgattagtacctgacatctcanacaaacaaatcaaacgtaacaagacaattatagttgttgtttgaatacctcacccactcaagtgtatcacacaattatggcttttctctaatgaaacactcttgccttttaccactctaattccccttgagttcttaggcaattcaagagattatggccacaacaaagaacaattcaccaatatgtgtaaggtaaggctagagagacaaggaaaaggttaaccaagaaaaaggctaacaatggttttaggcacaaatgaaggaaataaaattcagaatttaggaattcaagtaacaatccttcatgcaaccaatatattaccttaaagagatttttttaaagtcttaagcatgaaccatcagccaattttttttttta

SEQ ID NO: 239326 - DNA, 457 bp, Glycine max
acatgcctcatgacacctaagcacacttagtggagaatcttgaactcgatattggattagtgggctgaaccatatatgaaattcactaatcataattagtgaaatattggctccacaaattcaatttcaaattcaagtgaaatttgaattgaaattcaaatttccctccaattttgtgtgacacttaggctataaatagaggctatgtgtgtgcatttttccaactttgatcatttaaaaattaaaattcaaattttatagctctcttatagtacaaaatttcgtgcttttctcttgctctcacttcattcatctgcttcttcctccaagctcttatccattggcctctatggtggtgagcttcttctacgctcatcttctccttgaagtggcgtctcctctctctcttccttctccattccactggcattcatcttccaagaagcaaaggaatcca

SEQ ID NO: 239327 - DNA, 475 bp, Glycine max
agcttagctacacacacccatctaaaaactgatctcaccttcttgagaagcttacttgagaagctagagcttagctacacacacccctgtaataactaagctcacctgcttaggaagagaagctagagcttagctacacacccctataatagctaagctcacccccatgacaaaatacatgaaaatacaaaaaaatcctactacaaagactactcaaaatgccctgaaatacaaggctaaaaccctatactgttagaatggccaaaatacaatgcccaaaagaagaaaacaaaacctattctaatatttacaaagaagagtggacccaaccttgacccatgggctcaaaaatctaccctaagggtcattagaaccctaaggccttctttatcagctctagcccaatcctctaggagcctcttgctcatggctctggtaactggtccttttctagggaggatagcatcacattatg

SEQ ID NO: 239328 - DNA, 363 bp, Glycine max
  unsure (1)..(363): unsure at all n locations
ctgagaggaacgaggattatggctacgtgttggtacgtgagctcagttgaaggtgggcaactggcgatggtgggttcatgtttaatttgtggatgtgggagagttgatttgcaccatcgcccgatcgccacctattaccacatatgacgggtaccctataatcctaccagcttgaagtgagaaagtgtggaagagtcaatctgtctacctttatttgatgactacagagtggcacctggagatatgtctcaggggtcaggataccttgcggacgttctgtggagtgctatttnccacaaccaagcttgaccaatcccgacccaacccaggcataatcagtcagtgagaacctgtgacatacct

SEQ ID NO: 239329 - DNA, 466 bp, Glycine max
  unsure (1)..(466): unsure at all n locations
agcttgtgccttttcacgtctggaatatgaatgtagcatatagatccaaagacccttaggtgctntgttgatggcttcttcccgatccaagcttcaattggagtcttgtcttttacagacttagttggacatctgttgagtatgtaaacagcagtgtagactgcttcagcccagaatgtgttaggtagtcccttctccttgagcatcgatctagccatctccataactgtgcgattctttctctcggacactccattntgttgagaagaatatgcgactgtaagttgtcgctcaatgccttcatcctcacaaaatctttcaaactcgcgagaggtgtactctctgctgcgataacttcttagtacttttatccgttttccactttggatttcagcaagggccttgactttttgaatactccaaagacttcttgattttcttttagaaaatatacccatgtcattct

SEQ ID NO: 239330 - DNA, 368 bp, Glycine max
  unsure (1)..(368): unsure at all n locations
ctgaaactcatgatgtaatgttctaactatctatttaatgttattntctagtgttctttttgcttctatctacaattattttacatgcttgtggcttgatcacccatttgtatgtttagttaggttctttagtcttggaaaatgctttaaaaccttataacttgatagagcatgctacaaatctatttgtgtacgaatgaaatacacgactctactatattttacattgtatgtttagtacaactctcttagaacgagtttcgtgatgaatcaagaacaaaaactaagagagttaggctcgatcattcatgtgaagaatcatggtctgagtattgtctcagtgtacgaacactaggataatattaaat

SEQ ID NO: 239331 - DNA, 494 bp, Glycine max
  unsure (1)..(494): unsure at all n locations
ggatcttaagcaccgcggctgcagcttgtgggtatctgggccggatccctgaacttagattaatgagttaagcttgtgaacatgtctctactacgccttaattaattttanttatcgtgattgtacgtaaggtgttgattaatttattaacgttttatataaatttcattagtgagataattggtactttnttataccaacatgttgcaaatggatattttccaaatatttactagcttttcaataagcttaatttcttctcttagactgttgattgatagtaggtgaagtctatcttttttttttctcctttgtgtacaagagcgagaatgtttggtaattagatacctgaacgtggattaatgagttaatcttgtgcatttgacaaatatttagtgtgaacatgtctcaactcttatactttaattgattntattatcatngattngtaggggatgatcaatttacatgttttatataaatgtaattattga

SEQ ID NO: 239332 - DNA, 488 bp, Glycine max
  unsure (1)..(488): unsure at all n locations
attcaacaataagaggtgcagtttactgtatcaccattaaattaatcactctctaatatgcattaaattagaaaaatatcaggattaagttaaggattcatacccccttaacgtctctatataaatgagcaagttcctagcctattaaacaaaccagcacctaatttcacaaacaagaaaaaacctaccaattacgtgaagtcagtgagtgatattcaaggagatgagtggccaaaactcccatcaatcaaacacctcanaacattattccagttcccttcaaaatcacaagcatggcaaatctgtgatccctagtgatggtgatcacacatcattgcacaggttcatcagctctagtcatcattntgggcaatcgcggaacttcaacatcataagttatgaacaacaagtgtatcaagcaattcagagtgcanaatacactatcgaatggatacaacgcctacagtcttatgaacgagtagtggatc

SEQ ID NO: 239333 - DNA, 444 bp, Glycine max
agcttctgaattgtcctcatctctctgttgtcttatttattcctctaagtaaaaaatgacaatgaaagggacagatacgatggaattcacgggaacatacaatttgatgacggtggcatatttgaaacgtaaatatgtaaggcaaattatattcaagtcgcgtccaatttgtaagaatatactggtttgagtaaaataattttactaaaattttactagttaaactttgactgaatgcatgctgacgccaatctctgtgcatagtacaaatgctacaatacaacatatgcatccctcacagttgcagtgcaagtttaatacaaactataatgtgattattgtataaatgaacacaatagaatcgagtacttaatcgacacaattaaagcaacaagttcagaatattcagatatcaggagttgcagaggagaatagaataataca

SEQ ID NO: 239334 - DNA, 470 bp, Glycine max
actgattgtatacatctctatgctgttaaatgatcttgtttacacaatgtaatattctgtgtgaagatgctgatgtgttttaagagtatatgggaaacaccaattccttcgaagatggctgcttttgtaaggagggttgtgcaggatacgatacacacaaaaaggaactcgaggaggagaaatatctaattacagccagcagactatgtgtgtctcttttgcactctataggaggaacctatggagcatttgatgttaagctgtacattctcatcaagcatctggaataagtgctatgcttggttggcgatacatactgcccaacagatatcctacaatgcacctaaggcaacattcatgtgggatctttggaaagaagttggcggtgaaacggatggtggtatggtgtgcagtggtgtgatctctatggtcacagagaaatattctgcttttaacgatggaacatggat

SEQ ID NO: 239335 - DNA, 440 bp, Glycine max
  unsure (1)..(440): unsure at all n locations
agcttaagagcgaanactacggntgctaacttattatcgngtatggaataattcctttcatgtatcttgagctgttgagaagcatangccactacttgtccccactgcataagcactccacccaaacccatcttagatgcatcacagtacaccacanagggttcactcgggtcaagtaacactaaaactggtgcagtggtcaacctttccttaagggtacgaaaactactctcacactgtgcatcccacacaaaagcttgacccttacgagtaagcttagtcaaaggtaaggctagcttagaaaaaccctctatgaatctacggtagtatcctgctaaaccaaggaaactcctaatctcaaacactgacttaggactctcccaactcatcaccgcctctaccttggaaggatctatngctatccctcccctggatataac

SEQ ID NO: 239336 - DNA, 290 bp, Glycine max
  unsure (1)..(290): unsure at all n locations
aacagactggcctcaaaatcttatgctcacacatgcacagttacataaaacattgcaaacagttgcttgagattaataaaaaagaacagagattgcacgaaaatcaattcgaattaattgtaagacattataaatcacttacatcgaaactnttgagattgttcttccaagacccacaggagcaatggggatcgatctctaacgcttgggggtaagataaaagaatacaactcttgagattgtatgcgtaatggtgaaaaggttgaattacttagtctgtctctaaacta

SEQ ID NO: 239337 - DNA, 442 bp, Glycine max
  unsure (1)..(442): unsure at all n locations
agctntataagtgcgggtctgggagacgaatgttaagtgttcgcgatatgtgaagatgatgttccaagtacttcggatttggtccgaccatgccctcctgatttccagctgggaaattggcgagtggaggaacgccccggcatttacgcaacgagcataatgtaaacctttacggttttaaaagctctatagttgggcctaggctttagagttttcattttgttaaggctttgtgtcttttggttttgaatttataatacaaggatctttcttcatctgttcctggtctctacccattctcattcatttgcatgtttacttctttntctgaaacggcagattcgatgacgagtcccccgaaggtactaatacctgtgacccgtctatcaacttcgagcaagaaatgaaccacacggaagatgaaggagatgangatgtggga

SEQ ID NO: 239338 - DNA, 376 bp, Glycine max
  unsure (1)..(376): unsure at all n locations
atatacaaaagttagtcatataaagtgactaacaagcatgtgctaagccgaaatccactaatgcatgttgagcggtccatagtcgcgctaagcacgctagcacaaacaaagccacctatttaagcctaacatcaaattttggagaggattttggccattttctcaacgagcttctgcatgtgagagattctacagagagaacggtttgaatccagagaatttgagaggtntgttgtgcgaagacctgcagagaactgaacttgaagagaaagtcgtcctgagagcttgagatgagtttgtgagtgattgtgacgttagaggtggaggagacatcttcaccacttatatntcttcaatctttcattnntctcttctc

SEQ ID NO: 239339 - DNA, 310 bp, Glycine max
  unsure (1)..(310): unsure at all n locations
agcttgccttgccccttgatatattttatggactcatggncactatgaatgacaaattccttgtgataaatgtagagttgtcatgtcttcaaagcccgcactagagcatacaactccttatcactaattgaatagataagggtaggaccacttaactttcttctaaaataagcaatgggatggccttattgcatcaacacagtcctaacccatcatttgaagcatcacactcaatctcaaacgatttatgaaaggttggcgacgcaagtatgggggcattagtcagcgtttgcttaacatagaaagcttc

SEQ ID NO: 239340 - DNA, 462 bp, Glycine max
  unsure (1)..(462): unsure at all n locations
agcttcccacacaacaaattcccaatatcctattacaatacaataacacagaaaccctatntctgttcactggttccttcagctgctccttttgcctacttatatgccaagcttcacattgtccgcgttctggattgccatttttgctgccatcatatcacatattctttggtgctgttatgggaacccgatgactgctaagttggcataatattttctgcattacacaatttgctcaagatacaatagtggttatattctctcaagcaaaattttgggattcggcttaccacaatatctgcattgtcctggttagagccacgcttacctttactcactactacataaaagagatttaacaatggttatgattcaagttgtacacacacataaaaaattggtgtatatataaacagaagaaatatatgagatatgtttcaataaatttgaagtattaataaa

SEQ ID NO: 239341 - DNA, 184 bp, Glycine max
gcttcttatggaagctatctattctatatatagaaacatgtgtaacacttgatgcaactctgatgaatgaaagtgttgtgagacaccactcagagttcaacttctctaccttgttcttacttgaatttcgtgcccacctctctctttctctcactctttcttttcctccattgaagcatcctct

SEQ ID NO: 239342 - DNA, 446 bp, Glycine max
  unsure (1)..(446): unsure at all n locations
agcttgcattnggaggggttccatctaccgntctaattccttgatgctnggggtatctaggcttttgaccttgacttggtagaacctcttgccggtttgatttgttcccatgcttaccaaagtgagacaaaagctggtgcaaatcaaaactccgatatctcatgggtggggtggatgaatgcatgaaggaatgcctatgacacagatgcaatctangaatgcggngggtccggggaattgtctccttcttagacacaacgtctaggggtagcaaagtgccccaacgtatgtatttaaaacggtgacctgcaccctccgttgatttgtctatagaggggatcaagacagaacccatatgtgatgcatatgcaaaagacgcaatgcgggaatgtgcacagtatgacaatatttaccgaacataagcaaaagggtatatgatactcatg

SEQ ID NO: 239343 - DNA, 340 bp, Glycine max
agatgaggaagtgtagaagggtgacacttcctgctcttattctttgaccacagagtggtacctggagatatgtcacggtggtcaagagaccttcgggacgtcaggtggggtgcttttgcccaaaaccaagcttgaccaatcccgacccaacccgggcatagtcagtcagtgagaacctgtgatgtacctaagcaggcgagctgctaccagtcaacacgatataaggaacacagaccacaaaccaaggaggcttgtgtggtggctggccagctgtgaattatgattgatatatgggatatggcctctggtaatcgattaccaagggtgggtaatcgattac

SEQ ID NO: 239344 - DNA, 381 bp, Glycine max
acacattacaatgactcagtgtctgacatgtttatttcatgactccaacacatgtttatgtgtaaaaatacttccaaatatatgcgtaggcatgtagatgatatgcgtccatagttagtagagatcaaacatgcaactgatgatgagtaggggtgaaaataagttgaaaatttcttagagacctagggtccaacttatttaaggtgtaactcaacttggttgatctaaaacaaaattaaactcgaacttttttaaaaatctttttaattaaataggctagatcataagtcataagataaatctataaggctcgatagatcgaccttgttaataataatcattctaatatgatatatcatattataatttcctttctaaagc

SEQ ID NO: 239345 - DNA, 590 bp, Glycine max
  unsure (1)..(590): unsure at all n locations
cggcacgacgcgttgacanccgttggtttgacgcctttgagtaccatcgtcatctacgtgacactatanactacgtaagcttgaggaatatgacactgcacatgctgctctggatgtgggtgcatcttgtatcccacaccccaatgcgtgctgctctgatcacagaatgtgatcatcntactcgcaggcaaaccttattctctctagtggcacgatgatctctatttgatgaagcttatgtgccttttggatatactctttatgttgtcgaatgttctatatgaccaatgattgtatcttgactgtctgaaagggaaaaggtggagtaaagccgcttttggccttgatactgaaatgagcttgaccgacatattgtgttgaacagaagagtgctagtacccctctattatagaggaaaaggccacaccacacgattgttctctctacgactgtcaccatcacgatgatgttctagagaaggcaccagtatcagggctaaagctacattacgtcacacctggtctactctactgcagtgcctatcattgcttgactatatcatatatttgacgaccgctactgccgctgcn

SEQ ID NO: 239346 - DNA, 421 bp, Glycine max
  unsure (1)..(421): unsure at all n locations
agcttcctcggggccattcctgcgaagacaaacttttggaaagttagttcacaagaaatataacaatcattacaaacaagggccaaacaacacttcttatggcacgagtgtcaacatgcactttataaaataatcatattggggtcatgctattttatgacacatacgtatttgcacacataaaaattttgtatgaagcattttacgacacctatccatgcatatatttttttttttgacaaaccttttcatgctacatcctatatatatacacacagtttttttggaaggcttcttttgttacctactcacanatacacatatttttgaaaaacaactattacgctacccaatcaacacttttgtaggcacttcatgctatatatattcatattatgcaaggcattttcatgctatatat

SEQ ID NO: 239347 - DNA, 426 bp, Glycine max
  unsure (1)..(426): unsure at all n locations
tgtcgtgccttcactgtttctgtctagacccatttcgcgctcatattcgccccataacataacccgagccaccatcaaagcggcaccagataagcgtggctgcatcagaggagattaaacaacacatgcataaagttgggcaacaaggaaaagaaaacacaatccgccaaaggcgagtgaagaaaaaaaagagacaaagatctccagatnttacaagaaacgcacacaagtgcaacgaaagactaatgtataagacaaaaggagtagagcccaacccaagagttgaaaggaacaaaagtactatcaagcctctgaaggttcttactcaatataaccctcacacactctntgagccctctctaatctttctttcatagcccntcttacccctgaccacattacaaacccaataaagcccatgtggat

SEQ ID NO: 239348 - DNA, 419 bp, Glycine max
  unsure (1)..(419): unsure at all n locations
ctgcagcttgacagaatcattctaatttcaagatttctgtaaaagatgaactgcccttttgttctgcttgttgtatgggaaagattcatagatttccttctaagttttctcanaccgtgtataattctcctttggaattaatatacagtgatctgtggggccctgctcctatgaattctcattgccaattcagatattatatgtcctttgtagatgcttatttgtggtttacttggatatattttttaaagaataagtctgatgccttgtctgtttttaaacagttcaaatctcttcttttctgtcagaattggggattgttcataggctgacttgtccacttacacatcaccagaatggtatagtggaaagaaagcatcgtcacatagttgaattaggtctttctcttcttagtcatg

SEQ ID NO: 239349 - DNA, 405 bp, Glycine max
  unsure (1)..(405): unsure at all n locations
atcgaggagtcaaanatcttatttatgatgattaaaaataaaacttaagagcagctccaacgatacgttgttcactaacatggagatgcaaaataaactcaaaggcagtttcttaaccattggagtactgtatgagtttctcacttcgtgctagtgagttctttgcaaagaaatagttctctaccgcanaagtangtccattgcaataaaaagtaatattattatattaagttaaagtaatgtgaagttcttttttatcatgcatcaatntttctacctttaaaaaatatatccattgcacaataatggcaataaatgaatagtaaattctgttagtgtaaatcgtaacatctttgtaattntctcacacacaacaatctttcaattgcgtctatattgtctctt

SEQ ID NO: 239350 - DNA, 463 bp, Glycine max
  unsure (1)..(463): unsure at all n locations
agctnntggggcatatgtactttaagtgagagatatgatatttaaaattggaataataattaatattacgagtaaataacatatacaaagatgattaattnttacataatcaatcacatattatcatataatgtaaattgattgatagtaataataaaaatataaaattcatattaattatgatttaagttctaaacattatagatgatatgataaaaaaaatgtgtataaaaatgagaaattaagcaataatgagagataataaaattgaataatgaaagagagaaagagtgtgaccgtcacagcttccaatagattggtggtgtcgtgcaagtacttgacgacccatgttagaacacttgctgtggtgtcatgtgcagcanagatgacaccaatgagaatatcaacaactcgagactctgtgtgctgctgatagtacatcttggtcttctcacctcgagct

SEQ ID NO: 239351 - DNA, 505 bp, Glycine max
  unsure (1)..(505): unsure at all n locations
cgttattccgactacttgtctaaaccactaaccaagcgacatgtatatatgcagctcttgagaaccttattcacaacatatcgttttctgtattagagtatgatttgactatatcttcggatggaatagatgtttcataaactcctttaatgcattctatctatattcatgaatcataagacaagttattctcctcggatgatttggattattaaaaatgtacataatgttatatgtgtgtatgtacgtacgtataagttggatgaggcatttcttatttatgagacttgctngctttgtgtcacggaatatatattgtgatgatatagatgcatgtgtgggcgattaatgcagcatatcttacgaatctattctaatgacaatgacaagagattgtgaacgcttaatggtgcgcataattaaggagcgaacaccganagaccatatcgacctatctatatatatatatgaatcttctccacattatattttgcgttcctatgtt

SEQ ID NO: 239352 - DNA, 429 bp, Glycine max
  unsure (1)..(429): unsure at all n locations
agctnttatgtaaaaggatgtgactcttcacatttgaattttaatttcaacgttcaaaggcactggtaatcgattaccaaaacattgtaatcgattacagctctttgaaattaattggaacgttgtaaattcaatttgaaaactttttcaaaacaattttgctactggtaatcgattacagaaatctggtaatcgattaccagagagtaaatactcattggtaaacatgttttgagaaaaatcatgtgctactcaatttttgagaaaaacttttcatacttatctcgattaagccttctcttgattctcgaatcttgagtcttaaaccttgatcttgattcttgagatcttaaaccttgaatcttgactcttgactcttaactttcttcttgagtcttgaattcttcttgagtctatcttgaactcttg

SEQ ID NO: 239353 - DNA, 491 bp, Glycine max
  unsure (1)..(491): unsure at all n locations
actctacctttacagctntactatttccactgcttcatattgttctcaaactaccacttgtaggccttgcattctgtcatttgtttatgatttgctgattatatttatcaagaacgtacgagatttgcattgttatccatgatatttctatttcattatttttctttatagatttttaatatgatatttaataatacatcttacttggctacatgctcacagtggtataatattctatatgcagtgttnttttgatacaccagggctcatgttgaattgcggtggatttccttatanggatgtcaaggtccgtgttgaaagtgcttggagttcagtcaatctctatgaagtgctcatagtcatttctgacgttcatagacatattaccaggtcanagggttatttattaaatggatgagtagtcctatactcgtgtttaccctatttcttctatatatagacttgttcgataacttcttataagactatag

SEQ ID NO: 239354 - DNA, 442 bp, Glycine max
  unsure (1)..(442): unsure at all n locations
agcttcacatgaagctacatcacttacaatgaattgagtatatcattngctataagatggaaagatgaactagagcctacgtgacatctgctacactctagtggcaacatgaactttgtcacatataaccaagatttggtaagctcagctctatttgttggatggacgaaacttatagagttctatgggctcactagaaatcattatgtcgccttgacccactatggatagagtgttttcctcctcaccatcttcaaaagcagctttgaaccaaaagtttttcctaaatggcctccttgtaccaccaagttcctaactcagtcacttttaaagtcctactcactgagtacaaagtgacttgcatcagtntggtgagtaattaagcactcctatntgtatgtcaaaatttgatatcatataattatctaatataaatttcttt

SEQ ID NO: 239355 - DNA, 404 bp, Glycine max
  unsure (1)..(404): unsure at all n locations
acacaggtcttgactgcgatggngagaagattaccattgcagctagtgatgaatggtgggaagccaaaattcaggtatgtattattcaacgaaaatagagtttctgtgtaggccactcttttgttttttatgtgtgattcttgactgtgcggcaaaaattgaagttgcagactgttttttagaaacttgtgtctaaaattttagttgataattcacgtcggttattactctgttactcgttgcaattgaggtagtttacatgcaaacaaatgaatgtgttgatatagtgatgtttcttttaaaacctaatgaaatggaaatntattggcatgttctttattactctatctttattgtctgctgcatgtttatctgcatcgttcggtattgcatacaggcatgtt

SEQ ID NO: 239356 - DNA, 74 bp, Glycine max
ctcctctgtggactctgggaacaatcccgtcatagccaccgttttgaagagcaacttccagctctatggtcgtg

SEQ ID NO: 239357 - DNA, 400 bp, Glycine max
  unsure (1)..(400): unsure at all n locations
agctnttaccaattcagagtatactttctattttggagacataaagggaatgagatntgagttttgaaatgcttgaatgcattctaaactctcatcaganaagaaatacatatctatgaacttagggtcaatgatacaatgagaggagaataggtttgtgtactgtatacgttgttcatccgatgagaacaatgaggaggaggaaatagaggaaggaattggaatatcctgagtctcggagtgtcgttggcttctactcgaagaacctttgtgcttctttaatggttccaccatttgagagattntttcanaatttcaatcggttgaaatgaaagagaactgaaaaagatgaagtttgggctttgtggggagtgatttggataagaaatgagtgagttat

SEQ ID NO: 239358 - DNA, 329 bp, Glycine max
atggactcttacatttgaatctgaatttcaacgttcaagcacactggtaattgattaccacaacattgtaatcgattacatcattttgatatccattggaacgctgtaaattcagttgaaatctttctgaagaccattctactactggtaatcgattacaataatcgggtaattgattaccagagagtaaaatctctttggcaaaaagggtttgagaaaaatccatgtgctactcagtttttgaaaaaactatctcatacttatcttgatggagtcttctcttgattcttgaatcttgatcttgattcttggaatcaaaattcctcttg

SEQ ID NO: 239359 - DNA, 438 bp, Glycine max
agcttgcaatcactaagagactcttttaacatcgatagactaagacttagctttcttattgatctttgttttcttggtcttgatttggacttaaaataaaacttgtgtttcttttgtcttggcatcatcaagaccatcatacacatacattcacaaacatcgctatattgtcgtaacaacccattgtcttttgaaccatggatccctcccactcaagttttggtgttatgcattgtaaatcgcaacgtgtctcatcaatcggatgccctctcttacactaaaccaaaaagctccattagaagtcttgtttcatcgtccatcaaattatagtaaactaacagcttttggttatctctggtttccttgggtcactccatatacaactaacaaacttcagaccaagtccgtaccatgtgtttctaggttacaatcttactc

SEQ ID NO: 239360 - DNA, 337 bp, Glycine max
  unsure (1)..(337): unsure at all n locations
gcttcattaatanatcgagtcctactagctctagtcctcttcatattatctattctgatgtatggcggccaacttcaataaatccaataaaaggatattcctattatgtcatttttattgatttattttcacattatgtttgctggctgtatccaatgaaattcaaatccgaaatttccattattcttccagtttttaaatcctttgttgaaaaccaataaaatgtcaaaattaaaattctttatactaacaatgatgatgaatacattaagttacggtcgctccttctaacttatggaatatctcatgtaacaacttcccatacccgtgaatatta

SEQ ID NO: 239361 - DNA, 467 bp, Glycine max
  unsure (1)..(467): unsure at all n locations
agcttcgaagggctgagagagaccagtcgagagtctaatgcatgatattggaagacaggttgaaggcttgctaaaggtaaaaaaagagtttgtttgaggaattgagcaagacggaagaaaacatgtgggccatcattgaccaatacattgatgtggatggataggttctccttcactttgaatgggattcaagagcttccaagactactagccaaagctaaggcgatggcggacgtgtactcgacccccgaggaagttcatgggctcctcgattattgtcagcaaatgatcgattcgatggcctacataattaggagccgctaaggcggttgtattntcgctttaattntgacaagatgaacatttttgttccttaataaaaaataagtgtggtttaatactatgtctctgcttanaantctacgtgagaccaatgcttcgacaacttatctttagcatgcattcat

SEQ ID NO: 239362 - DNA, 213 bp, Glycine max
agaatatgctcaaacgtggagagacgtaccagcccaagttgtcccacctatgactgaaagggaaatgatcacaattatgggtaatacgttggctacgttctactatgagaagctgatagaatatatgccagctaactctacagacctcatgtttgccggagaaagaattgagttcggacggatgaaaggcacgattgaatatgcctccaacgc

SEQ ID NO: 239363 - DNA, 451 bp, Glycine max
agcttaataaatcaatctatggcttgtagcaagtctcctgccaatggtatttgaagtatcatgatgtcgtcacttcatttggctttgaaaagaacatcatggatcaatgtatataccaaaaggtcagtgggagtaagatttttttcttgtgttatacgtggatgacattttgcttgcaactaatgataagggtttgctatatgaggtgaaataatctctctcaaagaactttgatatgaaggatatgggaaatgcattttatgtcattggcattaagatccatagggaaagatctcgagcgaatttgggtttgtctcaagagacttatattaacaaatttttagagagatctaacatgaaagaatgttcaccaagtgtagctcccattgtgaagggtgacaaactcactttgagtcagtgcccgaaaaatgattttgagcgggaacacatg

SEQ ID NO: 239364 - DNA, 432 bp, Glycine max
ctaagcttcttcccaatccattggcaaataccaatgcaatctgagttggttactctaaaggccaataatacttggtttctcacacctctccctcctggaaagcaagctattagttgccgttgggtctacaaaatcaagtgcaaatcagatggttctcttgaacgctataaagcacaattagtagcaaaaggctacacataacttgaagggattgattaccatgacactttttcatctactgctaaaatgcgtacaatacgttgtttattagctctggcagttgctcaaaattggtcacttcatcaacttgatgtccacaatgcatttcttcacgaagatctttttgaagaaatttatatgtctcttcctcctggttctcagcgacagggggagaacctagtgtgcttctcaacaatcttatatggataaaac

SEQ ID NO: 239365 - DNA, 313 bp, Glycine max
  unsure (1)..(313): unsure at all n locations
agcttctatgaaggctggatctatgatcttcaataaggtccttcaatggngattttcagccatggaattgcagcggaagataaaggagaagacgtgaaagaaggcgtcctccactatagaataatccatggaaggagaagcttcaccaccaagagagtgccttggataagaagcttaaagagcttcaatggaggaagagaatgagagagagagggggggggggggcctgctaattaatagtgattacgtacaacaggactgccttgactagttattaactgaatctcaactgtttgggatgccattggagaat

SEQ ID NO: 239366 - DNA, 431 bp, Glycine max
  unsure (1)..(431): unsure at all n locations
acaacatccacgcaatntcaacatccgagaatcatgaactatcaaaaccaagcaaaaacaggacagaggcagagnactctgcccanaacacanaccaataccacaactntttcttactcaaataccccagtaacattctctttgttccaattcgttaaccgttggatcgactcgaaaatcttactggaggtccctagtacataaatctacattgtgaccgttgggatctgctagaaaacgtgcagaacccaatctgtactactctcttcacaaccagcacatacaaatcattntctgcacaaagccaaaattctgctacacatttcaacagcaaaattctgcataatagtgcagattattgacatcgcacttgccctcgtccaattntgcccaaattgaatcctacacgtcctacatcatgtataaatcat

SEQ ID NO: 239367 - DNA, 234 bp, Glycine max
cacttttaatgtggaatatttatgcacatgcgtatgtgtagaatatcccactatttatgtgaacgtacaaggacatccaacacattccaactgccatacatatattattttgaacagaacacacaatctcatgctctaggctctgcgccagaactcacacctaatcacatcctaaatattttgctatcagaaactacctacacatatttgaaacatatatcatacagggcttca

SEQ ID NO: 239368 - DNA, 270 bp, Glycine max
  unsure (1)..(270): unsure at all n locations
tgtctttagaggttacttcctccttgacatcttttgttntgaatggaattgccatgacaggtttattattactgtntttgatatttggcacgcgatattgtgttgtgggaggtaatttcgattggattaactcaccatctctcacttgccagtttgttatgacatttgctgttggatcacctatgatttcttgtttcccagggtaatctatatcctctttgatggcataagcatgacaccaatcaaagaataggacattaattctgactc

SEQ ID NO: 239369 - DNA, 504 bp, Glycine max
  unsure (1)..(504): unsure at all n locations
tcaacttatatcttattaaattaaatatttatccaaantatncacaacagttgaccttgtgcaccatctcgacccggaccctaagtcaccgagcagcaagcaaaaatacattttatatttatttccgagaaatatgattcctgactctgtgatgtntccatgactataaatactgaacgttttaaactctcattataccatttcatgagattaagtgaaaaccttgaatatactattacatataagagaagtgttgactcaacaattgaatggttccagaaatataacgccatcaaattntcataaacaccacattatgagcctatgtgattttctactatgataatatacctgagcgcggcgtccatctaactaatttcagtattactaaaaaatcgtaaccgataactatgaatatgatgatattgcaaccgcatgtgacggtgatgggtacttatatattgaaatgacactatggattgcgtgcttacctactgatgcacg

SEQ ID NO: 239370 - DNA, 292 bp, Glycine max
  unsure (1)..(292): unsure at all n locations
attcataaaagttgttgggtgcaccagcaatattgctgcgcgcacctaacatctcccgagaatcaatagtatcataccaagtatgttctgtcttgattgctgtcatgcttattctgtgggggcctacttaaaatctaaatgtccatgtattgatatggttaacgatctaactcatttcagatttaattattctatttaaatccttctatatcatgtctatatnattttagaaattttactttttactccatgacatgactactttcacattctagatgattatattatttaa

SEQ ID NO: 239371 - DNA, 416 bp, Glycine max
  unsure (1)..(416): unsure at all n locations
agcttccaatcatgcttctgtacagactntgatcaacactggtgccagcttcatcctttgacagcttcaagtgagtaggtgcaggtgttcttttatggctggaattttccatcccaaacttcttgacaatgttctttgcatacttgctttgtgagaggaacatgaagtcttccatctgcttcacttggagtcccagaaaataagtcagctctccaacaagactcatttcaaattcagattgcatctgttgaacaaaatgtcgaagcatctcattcgacatccctccaaacacaatgtcatcaacatatatctgtgctatcatcaagtttctagcatcttgtttgacaaagagagtcttgtcaattcctcccttcctatacccttgctgagtaagggaactctgtagcctttcatac

SEQ ID NO: 239372 - DNA, 281 bp, Glycine max
  unsure (1)..(281): unsure at all n locations
taagcttctagcacaatagacttaccttgacttaattcctctgatagcctctttgagccttgtctgcctttccttgttttgaagctcactacaagccttaagtgaaaaaccatgatatcaccatatccttaaggaattttggagctctggaattgttttgggaataagtgtggggctctttggttcattgaataacatgtttnggtggccatgcattatcatatatttnnagccatacttnatgtacattgcatattggctcagatttggacatgctgaat

SEQ ID NO: 239373 - DNA, 321 bp, Glycine max
  unsure (1)..(321): unsure at all n locations
agctntgcggatntggtcttcaccggcgaaaggatcgaagtgagtctgaaatgaggaaaanttgatcatcctgctttgatgaatgcaaaaactggggcaaatgaagaggatgagaatgagggagaaacccttgctgtgattgtcattcctacacggccaaatttcccatcagcccaacaatgtcattactcagctaataacaacccttctcattacccaccacccaatcatgcacaaaggccatccccaaatcagccgcaagacttacctgccacatgaccaatgccaaacaccacctttagcacaaaccanaacaccaac

SEQ ID NO: 239374 - DNA, 429 bp, Glycine max
  unsure (1)..(429): unsure at all n locations
cgcaatgaactcggtaagcgagcatgctgcgctaagcaagttcatcagtactcattgtgtatacaggcgttctcggaagaactcgctaagcgcacctaccgcgctaagcgagttcatcctttgaggatgaacactcattgtcgcaacgtgcccttttgcgggcgggcgaaggcgaggctcacgggtgcgctttccaaatgaggaaagatgcgcggagtcgccaccaacgtttatttgtggagaacgtcggacaaaccgaaggacaccggtcaaaatgaatattctaagttcgggagttgtatttacgtttgaggaaggtattagcacctctcacgtttgtctcanaggacaacaacctatctttcagaattgtggcaaatggtgtatcttaactttaagttctttctaatttttgagggcgacaaaagc

SEQ ID NO: 239375 - DNA, 457 bp, Glycine max
  unsure (1)..(457): unsure at all n locations
agcttctagccaaatggacttaccttgaattattttctttgatagcccttttgagccttgtttccctttccttgttttgaagctcactacaagccttaagtgaaaaaccatgatattaccatatccttaaggaattttggagctttggaattgttttgggaataagtgtggggggtttgtgtttcattggacaacttgttttgttggctatgcttcatgatgtattttgggccatacttgatgtacattgtatattggttaaatgttggacatgctgaatgaaatgttgtttctcaaaggctaaagagtaaaaaaaaaaaatctaacaaagaaaaagaaaagcaataaagttgagtgaataagatcttaaatggcacaagaatgatgaaactctnggttctactcttcatnngttaattttatctntacttctctttaatttcttattntcttttct

SEQ ID NO: 239376 - DNA, 403 bp, Glycine max
  unsure (1)..(403): unsure at all n locations
gcttggcaataacacaacctcgactctcattgagtgtagaacactttcaagtggtgctcagttggagaatagtcatgagctatgatgcaatcctaccccgcaagggcattggatagaaaactccaagtagattgtgccagagatgcaagagaaggccctagggttcttatgagccttacggtagatttctggcgcatgggctaagtacgagcccacttatctttgtaaatattaaattaaggtttcattatttttgggccttgtatttacggctccataatgtatgtagggtaccctacaaatatacgatttttcagcccttgtattttacggcacctagactagtttttgtattaagggtagatntgtaatcttacatgcactaagtggatattngatgtgt

SEQ ID NO: 239377 - DNA, 468 bp, Glycine max
  unsure (1)..(468): unsure at all n locations
agcttgaagaagtnttgtcttttatgtgcccacctcttttttggcatttgtattgattattgcatcttaatctctatctatctatatgtacatcatgcatcatcatgtaaaggtaggaagattgtttctaaagttagaaaattcttcagtgcataatactctctattttaatcgattaccaggttgttcgtaatcgattacaagagttgcttgtagcttgtagagagattatagtttcgatttaatcaattacctagtatctataatcgattacatagttcagttgataccatgtctggtttttcatgagtctctgctttaattgattaccaggtgatggtaatcaattactttgttcttaaaagtggttccataagtgttcgacggtcgggtagtgcaccggatcgctcaagtagtataaaacagtaagtgaatactgagtatcgaactctcgagtctcacaacatg

SEQ ID NO: 239378 - DNA, 391 bp, Glycine max
  unsure (1)..(391): unsure at all n locations
gagatccaagaaggataaagcagctgaaggaacctgttccgctcctgaatatgacagccatcgttntaggagtgctgagcaccagcagcgcttcgaggccattaagggatggtcatttctccgggagcgacgcgtccagatcagggacgacgagtataccgacttccacgaggagatagttcgccggcggtgggcatcgctggttacccccatggccaagttcgacccaaacatagtccttgagttgtatgccaatgcttggcctacagtggagggtgtatgagatatgcgatcctgcgtgagggggttagtggatcccattcgatgcggatgctctcagccagttcttgggatatnctttagtgctggaggagggccacgagtgcaagta

SEQ ID NO: 239379 - DNA, 461 bp, Glycine max
  unsure (1)..(461): unsure at all n locations
agcttctgagagtggtaacaaccaaaataaagtgctatggcctatgggtacagtcagataagaacactcacagaatcaacggtcttcatagcctgaggcccaggaaatgtcttgccagaaccatggctctttggaagtagtcgcccctcaacttcttccccactgattcctctagcaatattccacaaccaagtactgcaatgctgtaaaagctagaatcaggaatagaataccaacagattgcaatgaagacaatcaaatggacagtcatgagtaattaagtaactaaatcaaaactgcatggcatgcaattggagaataacacaaaagttgcaatttaaaatatgagatcccanaaatgaaatcagcanagacagccaaatgatgctttggtagtagatatatataacatcatgtaagaacttagaagacatactcacccagtattgatcccataccac

SEQ ID NO: 239380 - DNA, 374 bp, Glycine max
  unsure (1)..(374): unsure at all n locations
tacctggtatcaatctttaagattatttatgaatagttctggatgttagtctcatgctattcacaatgcaattttgacagctacgttgaaattggtcgcgtaatatcaatacttcacattagaataagaattntagatatgattgactacgtaggcttagaataactattgtggtcactacattcttaaaaatgtgtgataactaaccaattctatctcatagctggatcaaggtaggagagaactgtcaacaggacttgattgcatcattgtagtaattntagaccatgggaaattaaattcgagcaaacaactaatgagaagcacaatcaagcattatgcacagtagagaaacaaaagtgcaattatgctga

SEQ ID NO: 239381 - DNA, 439 bp, Glycine max
  unsure (1)..(439): unsure at all n locations
agcttagtacacanaggatgattctatatttctttagaatcttntaatggggaggaccaaatgcttgcacatagcttgtaacatcactttcaaagctactcacatctataggaaagacaatcactataacattagagaattacttgagtaaagattctattcttgacataggttttggcctagtctaccatggactttttgtaactcttctctcctttcattaataactttgctcaattcgctacattatcgattattcagagtgggcattgatcccatttgtgtcgtcataccctgcatttatgaaagatttcttttactaggaaagcatctgtttgaccctggacgtgagtcgaactatgttctgtgcttaatcgacattattagatactctnttataagcatcaatatcattattgactactaattatgatattct

SEQ ID NO: 239382 - DNA, 392 bp, Glycine max
tcttgaccaagactactaatccttgactaatctaattaagtgtctttgtttatgaacaagagttagaagacgacaaataagccttctctatccctagacacaacacccttgaggagtttctctccatttctaagttcagaaatattttctaatgacaattcaaattacaacatcaagtaaagggtgatcaaaccaaaacaagcattaatgcatagaagaaaacacttaataatgaataataaacatggattaataatcaaaatataagcataaggataagttcagttacatcaactcccaaaatggataaatctaactacataaccacaagaagaaaataagacaatagatgacagagatgatgataaatggtagggaagtcatggagagca

SEQ ID NO: 239383 - DNA, 442 bp, Glycine max
  unsure (1)..(442): unsure at all n locations
agcttgttaacaaatgttcagaaatcaagaattctaatattgtggacaaggttcgttaccagacaaaactaaagtcacttaattcaggagattttcaatattaatattcaagctgacatcgcacaagatgtaaaggagaacttgctcatgtctaatagaattgaattcaagcaatcccttattatttatgttgaggcaacagtttctgttgtttgtagtttattccttcttaaatgattccgtaaaaaaaaaaaaaaaaaaaaacaagtcaataattaagcttttagcctttatttatcattattttgccgccctctgagtttttgctttgctccatctggattattattattttttatttcagtttttaccgtattacttcagttcttgtaaaattgtatcctcatgtggaagaataagaatngtcactttgcacattata

SEQ ID NO: 239384 - DNA, 477 bp, Glycine max
  unsure (1)..(477): unsure at all n locations
ntacgttgcatacaagaaacaagagatgctagaagcacagattataacaaagaaacacgaattaagagatagaatattaaagataacgaataaagaatataagcccaagtgaacaaaaagtgcacaattggctaatattgacacgtaagtgccaagcagcggcaccaaaaacttgttaacaatatttggcaagtgaaccagatcaaacaagtagcataaaatagaagtgtaagcattatttaaaagatgatttgattaaaaactaacattattctacccttagattcagtagcagaaaataaaatgtaattaatagaagaacacctatctaggcattcttatcaaacacgtactatgcagctaaattgattaactaatgataacgaaacattgttggggtggacttcttgcacaccattcttcatgtatataacaataataaataacttaaccatacactatcaatatgttcatgca

SEQ ID NO: 239385 - DNA, 468 bp, Glycine max
  unsure (1)..(468): unsure at all n locations
agctntacaaattatacagctgatctatagccatcacataattactagatttctaacaatatacatcaaatagttaactagattttgttatactttctttctggtggcagatgtgtgctatgacttggggcaagtgccttctctaccttaaaatttattttggaatatgcattattggtccactaaatatttttaatttcccactaatcaataagttatataaacatggaaaaaaaataaaattttgttacctgtaaactacaagataaaaaattatattattttgaaccccagacctaagaaacccccttactcttttgtctattttgctgttggtatgtgagagtcattgcctatgcataaatttttaataagaaatcagttgtagatagtaacttcttgatttcccctgtaaaatatttcacatttcaatatanactaacactagtatgcaatgagtatgtttct

SEQ ID NO: 239386 - DNA, 420 bp, Glycine max
  unsure (1)..(420): unsure at all n locations
tctcagcttcagcctatcgtgcactattggtaaggtcctcaacgaatccgacgtagcacacaacatctcagtcgagggttttgaaggcattgctaatcacataactactaataactatctcgcgtttgtggaagaagagattccagttgaggggagagggcacaacaaagctctacatgtgtctgtcagatgcatggaccatgtcgtcgctaaggtactcatccataatggttcaagtctaaatgtgatgccaaagaccaccttggagaaacttncttttaatgcgtcacgtctaaaaccaagttcgatggtagtatgagctctcgacggtagtcggcgggaggtgatgggggaaatngacattcccattcagataggcccccacacttgccaatgtggtttccaagtgatggacataaa

SEQ ID NO: 239387 - DNA, 461 bp, Glycine max
agcttataaatcaagagatcataaattcaaatttatatggggagtatgggataagtgaacgttctatattgtatatattctatcttgtatcttgatttcaggaattaaattgtcatcataaaaaagggggagattatataagcaaagacattttgatgttttgatgatgccaaaggatcatgcgcttctcaagtttaattcatgacaagaatccaagagattcaagatatatgatcaagataatctctagagatttaggaagggaattccaatttgaaacaacaagaggtttggccaatgaatttaagctaaaatgtttttacaagagattaactctctggtaattgattaccagtggccaaaatactttctgaaatacttttaaaatgtttttagatgtatctgacaacatgtaatcgattaccagcagttgataatatttataacagctattataaatt

SEQ ID NO: 239388 - DNA, 436 bp, Glycine max
  unsure (1)..(436): unsure at all n locations
agcactcatgacacatgtgctcatgcttcccttctttgtgagttatagttgcaaaggcatgtcggcatggcatccctacatcaaagttgttaaatcagcacacatgtatgttaggaatgacaaaaaaactataaagaacacaacctgttagttgccatactccacaagtgcatgtccattcacctaaattgacctcaaccttatttcccacatgtggacctcatatctcaggcccatgttatcaccacaccaaatgggagtccattgattancaaaatggaatcctttttctagtcttttatactgcactggacataatgcgccacgttnttcagatagtataaccttgtcggcagncatggttctcatgatataacttctaatttcttcaagcattgtgataataggcttgcatctatactgcagaactctggaa

SEQ ID NO: 239389 - DNA, 458 bp, Glycine max
  unsure (1)..(458): unsure at all n locations
agctntggagtttccaagtgccaattcgtcttcttcttttgtccagacttcttctggcttcaattcattagagggctttccttctgtgtccagcatcttgggatgttcccagcctttgatgacagctttccaggttctgctatccagtgatttgaggaaggccaccatccttgctttccagtattcatagttggttccatccagaattggtggtctgttcactggtcctccttctttctccatgttcatcagaatttatctccctagatctcactcagtgatttcgagtgcctgctctgataccaattgaaattctgatactggggacagatgtcgtacaggatgtcacgacatcacgcttcagaacatgcagattgtctttgactgtatgaacaaattaaacaagttaataacacaagagaattgttaacccagttcggtgcaacctcacctacatc

SEQ ID NO: 239390 - DNA, 351 bp, Glycine max
  unsure (1)..(351): unsure at all n locations
tttgtattcctcacaatgtattctttgatatccttaataaaatgacatgaatgtgtttccttataaaaaatctctatagtgccatgtaactaatatgaaagtcacaagaggtaaagaatactcaagagaaggttaacaagcggttgttgaaactgacgttcttcacaagaggtttttcattaaagcacacaaagtgccctacttgcttgcagtaactagcagagcactcgtattatactctttggcactcntcatagtcttttttcctctctacgttcaactgtaacataagagtaaacaggaatccgaacaatctaagttatggaaagcttcacgtgacaaagaagttct

SEQ ID NO: 239391 - DNA, 389 bp, Glycine max
  unsure (1)..(389): unsure at all n locations
gcttctttgccgcgcctcaacactgaccacaccgttcccctcccaaacatctctctctctctctctctctctcctgtaatgcaactctgagttcagggtttaaccaaggttttgttttgcccaagacgcttatttctaccacctttcgtaggcctaaccattgtattgaaactcaaatattattcatataatttttacaccttttaatttcattgttgtacaaatcaatataaatataatttctcaaataataattatataaataaaacacaaactggttgtggccgcctgtgggcggtaggcgctacctgtgggctgtggctgttgccttcttttcactttttttttttaanaaaaaaaaaatacatactacagtngtcttggttttg

SEQ ID NO: 239392 - DNA, 479 bp, Glycine max
tcatgaagcaactctcctagggtcaaaagtcaaaatatagtccctaaatgttcttcgatgaggatccagaatatgcaccagaataagcctcaatatcctccacttgcaaagtaaatagggcacaaacggagacaaaagggctgggatcagttgaaaagccctggatttagccaatcccttataacaatagaatatgtattatgtaaagtccgttagagctgcacagataaataaaatactactatggaaagaaagaaatgctgcaagccaaaagcacttacttgcttatgtcatcaagatggtcatcaaaatctacaacgtcattccacttctcggatgcaatatagtccaacaagactagatatgctgatggctctttgagagaaaatcgatggttcccatctgactgaaccaactctcagttcttagatgtatccctaacatatagctaaatcataagaaaaggcaatcttggtaat

SEQ ID NO: 239393 - DNA, 616 bp, Glycine max
  unsure (1)..(616): unsure at all n locations
ctacacagacgactcntaaacgtgtactcatcgtangactaattctaantttcacaaatanntnannnnnanaaaagaggtttgaaaccctagttgcatccccatagcagnacccgcgannccctagagnncanccgtcggcatgcaagctttacaacagacgcctctttactcctagtttttgaacgatangncaacaaggaaacataagtatattcaccacgacaacatcatatggggaaagagaatgaagtgctatgaataaaaagagccttccacccaagcataaagaccctgcgagggtaaccatgccccgtacaataggacacctcactatgggaaaggcacacattgacccgcgagccacaactaaatagatgcgactctccacgtgcaaaaggtggggagagtcggagatcacgcccactaggaggactctacaacatgctgaccgcgccatcacctcaccaaaatggagtacttgacgatggactgcgcagagtgaaacaacttatcttacacggccgacatagggggaacggagatntgggacgaaactgacatacctcgaagagtgggagaggtatacacgagaactacaaactgatagccgaag

SEQ ID NO: 239394 - DNA, 529 bp, Glycine max
  unsure (1)..(529): unsure at all n locations
agccgcggtgagcctgatgacccttgaacgcttgaagccgcgcncatanaaactcagcgttgagcgcagcacacagattctatgtgtgctacactccttatttcagtgggcgtagtatgtctgagaagagaaagtgacaatgaaggatatattggagcaaactctatcctttcaggaggctataacatcaatctaaacgtgctccagctggatttacagctaaaatctcaccggctctaaatttgactctcccacacgcaaatttaccctanctatggatcttanttcactatggccatttgttcttctctctagataggctaacctgtttacatgttgtaaaggatttaagctagggtaactcatatacacccatttacccagaaacagatttacctttcactctcaagcctcctatatacacttatagacacatctacttctacctaggtactctgcttcacctaaagcttcctaacattgcgactaactcacagcacatataaacctaccctgatggcatgtaccg

SEQ ID NO: 239395 - DNA, 347 bp, Glycine max
  unsure (1)..(347): unsure at all n locations
agccttttatctatagactccttnttggnttcttggatgcacatgatatcaatnttattagataaggtcagcttcttgatagctgaccatttgataccattacccaaccctctagaattgtgggacagaatattcatgagtcaagttgttcctttcccatcacagcttgtggtgttgttgatatgtcagcttgttttaattcattcttcatgctgactatgttgcctgaattctcttcgaaagtcattcctaaatctctggctacatcccaaaaaacactctcttgggcctccttattctgtttggttgagttgcatggaagggtagggctgagctgaggctgaaac

SEQ ID NO: 239396 - DNA, 223 bp, Glycine max
cactaatggatattctgttacagtaaatctcttagcctgcgatattacacattataaaagatacactggttattaattaaatgcggaaagtacagatcagaaacatacctgctgccattgctatgaagagcctcttgttatggatcttccaagctctctcttactgtctctagatggcgtctcagactgaattcgaatggatgagatcatggaccagattcat

SEQ ID NO: 239397 - DNA, 411 bp, Glycine max
  unsure (1)..(411): unsure at all n locations
agcttcacaccatagcaacacataatctaggtatcaaaatctctcaatgcaatggattttcaacgtttgagaaatgaaattgagaatggggttaatttggagcatactctcacctcacacgagtctataacatcaattgaaacttgttcaaatcggatttacacctaanatgttcccgaaccaaaattngactcctcaacccccaattataccctagaaatggctctttattcactttgggcatctgattttctctctagcacagcccaaactttctactaagtcctaaatgaacatgcaagctaggattaactcactntaacctccgaataccacttaatccagatttagccttaccactctcagaacctcactcttctttcactcataacaccatattctgactttcta

SEQ ID NO: 239398 - DNA, 417 bp, Glycine max
ctcatcttggtggtgaagctccttcttccatggcttattgcctattggatggagcctcctctcacctcttctcctatgtcttctgctgcatctacatggtggaaaaccaccattagaggacctcattgaagctcacagatacagcctccatagaagctccacaagcaagcttccatcatcctcttaatcacccatcgtcatagatctggatttggtgcgatagggatgccttggggcgcgtttagttatggtatttctcctataaaaccaaacgtgaggagtacgtacaaataatgaatgcatgctagatataaaatgtgggagtgatttgattcgcactgacttttggagtagaaacgcgggataaactcattttattcagacagtgtatactactcacgatcagagtgacaatac

SEQ ID NO: 239399 - DNA, 386 bp, Glycine max
  unsure (1)..(386): unsure at all n locations
agctntaactgaaacattaagtaagttgccaatttatctttctgctattcaaccttcaccttcttctgttttgcaggttgcatgttgtgctatttgtggtggtgctcatgagtcaagctgctgtattcccactgaggatcatgcacatgaagttaactacatgggaaaccaacctagacaaaattttaatgcaagtggattctcaggatttcagcaaggccaaaattataactagtagtatggacagtggagagctcatcctggtaatcaattcaacaaagaccagggagggccatctaataggctgcaacaacaagggcataatctctacgagaggacaacaaagctggaagagactcttgcttagtttatgtagggttcaatat

SEQ ID NO: 239400 - DNA, 466 bp, Glycine max
  unsure (1)..(466): unsure at all n locations
tggacttaccttgagataattncttggatagtctctttgagccttgtttccctttccttgtggtgaagctcactacaagccttaagtgaanaaccatgatatcaccatatccttaaggaattctggagctttgcaattgttttgggaatatgtgtggggggtttttgtttcattggataacatgttttgctggctatgcttcatgatgtattttgcgccatacttgatgtacattgcatatcggttaaatgttggacatgctgaatgagatgttgtttctcaaaagctacagagcagaagtcactaatcgataaagacaaagagtagctatacagttgagtgaataagatcttatatggcgaaagaatgatgagactcttggatctactctctatgtgtaaatcttatctatagttctcttatttttatttctcttaatatgcatatatctccccattctcatcta

SEQ ID NO: 239401 - DNA, 458 bp, Glycine max
  unsure (1)..(458): unsure at all n locations
agctntgagggtgcgtagcccaccatctttccatttagtgtatcgataatgtgtctaccatcacgatcatcgtctccctttccatcattgggggtaccacttgggccgccagatccctccaccttttgggcgtgttctttgaaagatccgtccccctttttgcaaatgttttgtagttgcatcctatccagaaccatatcaaaattgtactaatactgcctaacaaaggcaaccattaggtccttccaagaatggactcgggaagattccaagttagtgtaccaggttacagctaccccagtaagactttcttggaaggaatgtatcagcaattcctcatcttttgcgtattcccccatcttctgacaatacatctttagattggtcttgggacaagtagtccccttgtacttgtcaaagtccagcaccttgaacttggaatgaccatgtttgggtat

SEQ ID NO: 239402 - DNA, 486 bp, Glycine max
  unsure (1)..(486): unsure at all n locations
gctttcttggagaaacttncttgagaagcttctntgagagaactttcttgagaagctatagcttagctacacacacccctctaatgactaagctcacctccttgagaagcttgcttgacaagattcctaaagaagctagagcttagctacacacacctctctaatagctaagctcacctccttgagatgagaagctagaacttagctacacccncncctataatagctaagctctaccccatggcaaaatacatgagaatacaaaaaaaaaagtccctactacaaagactactcagaatgcctcgaaatacaaggctaaaaccctatactactagaatggccaaaatacaaggcctaaacaaagganaaaacctattctaatatttacaaagataagcgggctcatacttagcccatgggctcanaatctaccctaaggctcatgagaaccctanggtcttccctgggatctctggcccaatctac

SEQ ID NO: 239403 - DNA, 343 bp, Glycine max
  unsure (1)..(343): unsure at all n locations
agctntggttttcaattacgagtgtcgcgatatcttactgttcacattaggacatccgagtcaaaagttattacgtttgactctttctagagctcccgttttcaatttctagcgtctcgatagattgaagggctcagtcggacatcctagttaaaagttattggcgttcgactattcttacagcttccgattcatatttggagcgtctcgatatattacatggctcgatttgacgtccgagtatgaagctattgtcgtttgacttttcttatagctcgcattttcaagttcgagcggcgtgatatgttacagggctcgattagacatccgagtcaaaaggtat

SEQ ID NO: 239404 - DNA, 291 bp, Glycine max
  unsure (1)..(291): unsure at all n locations
atcaacgacataactntaactcggatgtctattggccccttttatatctagacgctcgaaattgaacacggccgcactgcgatgagtcaaacgacaataactnttaattcggatggccgattgagtctcgtaatatatcgagacgctcgtaaatgaaaacagaagctctgagaaaaatcaaacgacaataacgatgtacttcagatgtccagttgagtcccgtaagatatctagacactcttaattgaaaacagaggctctgcgaaaaatcaaacgacaataactcttgac

SEQ ID NO: 239405 - DNA, 206 bp, Glycine max
gactcaatcggacatccgagttaaaagttattgccgcttacatttgctacgagcttccgctttcaactatgatcgtgtcgatatattactggactcaatcgaacatcggagtaaaaagctattgccgttagaatttgttcagtgcctccgctttccattcagagccgctcgatatattacgggactcaatcgaacattcgagtaaa

SEQ ID NO: 239406 - DNA, 325 bp, Glycine max
cgcacccttcttcaaacattcggtcataggacttgctatagtgctaaaattctggataaagcgtcgataagatgatgcaagaccaacgaaagatctcacctccgaaactgttgtaaggctcgggcaagtcttgatagcatccacttttgtttgatcaacggatactccatctttagacaccacatatccaacaaacaccacactctctaccaagaaatcacactcttccctcttcccatagagtaattgtgctcttacggtctcaaatatctgtttaaatgagtgaaatgctcctctatagacttgctatacaccaatatgtcat

SEQ ID NO: 239407 - DNA, 420 bp, Glycine max
  unsure (1)..(420): unsure at all n locations
agctngacaaactntagccaaatagcagttgttgttagtgggcattttttnttatccataggaattaaacacaatactaggaggtttacaacactcacacaccctgctcaaccaactaagctggatcccttggttagtaggcatctacacaagttgaataaaatgttttttattctttatttctaataaagacttgaatgaaacacaaatgtgcagtatcctgtacaataatatggtctgaattctgaacagcaattgtgaaacaatttttatataagcttcctaagcttgttattgatttctttgtgttttctcatgcagggagttcgtccctgcgacaaaaggagaagcatcagcgagtatcaatccctatttcctgcaataggattttcactggcaagtacctaaaatttatcatgc

SEQ ID NO: 239408 - DNA, 302 bp, Glycine max
  unsure (1)..(302): unsure at all n locations
gcagcttcagtacttgcaagaatgccacaggtnattattatataaactaacacacattagttgcatgaatgtactaaaagtaaacagagacatagtagaatcgaacaggttatttcatcagaattgattccagtaaagcaaagagatgtctgaagtgaccaagtaaaggttatcacttatcaacctttgatttaaagtgggttaagttcatgaggtgctcttttcaaatccacagtatggtatatttacttttccactttacacatctcgcttttcaggatccaaatcctacatccatgacc

SEQ ID NO: 239409 - DNA, 358 bp, Glycine max
  unsure (1)..(358): unsure at all n locations
agcttataattataggatagaataattagtntctaactttgntctcatgaatttcttgatttcattgcttctaactctgaagggtaagacattaatatacctctaggtggatgtatatttctctgtgagtaattcattatttgccatattataaatgaaattcttttttctcattttttactcacttttctattgcaggtgcagataagattattatccattatggtggcgacactgctcaaagccaaccactaggaacctatatatggtatacaagttatgctcaaattcattgtgttttactctcatggtgatactgctctttcaggataatcactagactnttattctgcaccag

SEQ ID NO: 239410 - DNA, 292 bp, Glycine max
  unsure (1)..(292): unsure at all n locations
gaccacacagtggtacctggagatatgtcgcggnggtcacgagaccttggggacgtcaagtggggtgctattgcccaaaaccaagcttgaccaatcccgacccaacccgggcatagtcggtcagtgagaacctgtgatgtacctaagcaggcgagctcctggcagtcaacagataanaggataacaagaccacatagcaaggaggcttgtggtggctggccacctgtgaactttgtataatatgtggattgtggcctctggtaatcgattactaanggtgggtaatcgatta

SEQ ID NO: 239411 - DNA, 366 bp, Glycine max
agcttattacaatattataaggaatataataaatttgttgatattcaattatgattatttacatcttaaagaaaatcttataatattaaaacatatatgaacgtcaatgggctctcttgttgaatggatttcacaaaaatatttggtaaaaaatacacattagacaatctcacataaatcttgagatttcatatactttgttttcttttattggcaatcgacatgtttccttatcttactcatacataatttcatgtctatatgttgaaagttggagatatttataaggtatttttactctattatcccatcaacaacatgtcctataatgtgttatttgagagatctcccaacttttaaaataca

SEQ ID NO: 239412 - DNA, 386 bp, Glycine max
  unsure (1)..(386): unsure at all n locations
taccatggatggttaaacattagttagtggtttgcttctgtcctttangtggtcaagtgtgtttgcttgtgttgagtggctaagccttgtgttatggcttctgcttaatggttaaacatattccaattgtctttgaatgttttcagtcattgtctatcttttgctgatgtatatacggcatgtttcattgtattgcgctctcattatgtacttgtattgttcatcccacgctggaagtgttgagtccaccttctagcttgtggaggggctgttagagataagtcccagatgcattggttgtcctagtcattgactcacttgctgttcttcgggttcgatctggtcaagaaccatcttctgggtcaagatattgtattgtaaatgct

SEQ ID NO: 239413 - DNA, 460 bp, Glycine max
  unsure (1)..(460): unsure at all n locations
agcttgccgctagagctgacccatctactgccctaactcttttagactggtgatccctaggctcttgaccttgacttgatagaacctctttttaagcgaaggcgtttgacttgatcccatgttttactaaagtgaaacaaaatctagtgcgaatcaaaactccgacatctatcatgggtggaatggattaatgcatgaagaaatgcatatgatacagatgcaatttatgaatacgggagcccgggaaattgtctccttcttagatacaacgtcttggggtagcacagtgcccgacgtatgtatttaaggtgacatggacccttcgttggtttgccaaagagaggggatcaagacagaacccgtgaacgatgcatatgtgaaaggcacaatacgtggatgtacatagtacggaaatattcacaagccaatataagaanaagggtacatgacacttatgcat

SEQ ID NO: 239414 - DNA, 393 bp, Glycine max
  unsure (1)..(393): unsure at all n locations
cctcatcgtccctcacagtctttagatttgggagccaatccaatccttgtgttcggactctcagccacttatgatagccgccgatgatcccattactgcttcccctaagctctctgtcctttcttcacgccgcatcccatgccttgcgaactccttggagtaccctcgcgttgtggtcactgaaaccccgtgcgatgaaaggcgtgatgctttcgtctaatggcgcctctctcatgcggtagccaagctgtcttatggcgagaacgggattataattaatacaaccccttgttcccatcaagggaaacattggacatncttcgcatgaagatagaatctntgattcttctttcttctagcgagggagaccaataacagaacgcccccccatgc

SEQ ID NO: 239415 - DNA, 391 bp, Glycine max
agcttgaacagttaccaatctccaaatgaatcttccctgacaacatgttatcatagagaaacattatcttcaatttaccaagcctcccaacctctctggggagatcaccctgtaaattgttgcgaaacaatgcaagtgtctgcatgttagtgaggatccctatgaaaggagagattgaaccaaccaaagtgttggtttgaagcaatagatcagttagccccaacaacccataaacctcaataggtattgacccattgagaaaattgtttgacaaatcaagttgcttgagtgagtggcaccgacccaactcagctggtatctcaccatgaattccactacctgacatcattaaattctacacacttgtaacattggaacatatggttcttgg

SEQ ID NO: 239416 - DNA, 349 bp, Glycine max
ctccatgtcaacgctcatcattgtgatgtctgtgatgatattagtggtggtgagtcgcaacaagatgatctgttagagtatcacttgaagttctgcacatatcctctgatggcaatcagaacaaggagaagtgaaacagacggtagagagaataagttgtcactaacattctagttcaaaacattgtgtgttgatgtggaatgtcccatacacatgtgcgatttgacatgttagcaatgacgtgctacgtatgcactccacattaacagacatagaaatcactcgatgatatgactaaatagtcatcatatctacacaattgatatttttatactagcagagaaaattg

SEQ ID NO: 239417 - DNA, 338 bp, Glycine max
  unsure (1)..(338): unsure at all n locations
agcttattaatatatgatttaaaacaatgattattgaagagtctatacatgtttcctttaatgagtctaatgccattcttccaaggaaggattttntagatgatatcttagattccttagaagatacacatattcatggaaatgactctactgaaaaagatggaggaagcaatgaagattcttacgataatggagttagagcaaataatgaacttccaagacaatggatagccttcagagatcatccccttgaccacattattggcgatatatcaaatggggtaacaactagacattctcttaaagatttatgcaatattatggcttttgtatctatg

SEQ ID NO: 239418 - DNA, 352 bp, Glycine max
  unsure (1)..(352): unsure at all n locations
cttcataagaatggatccttctcttagtttgtcttagaagctatcaggaaacactccaagcagacatgtgaagagatcttgaagaaagctgtgattgggtaccaatccatacttctttaatgacagcttccattctagaatagtttcaacacgtttagaaattcccgatctctgcaagttaataatagaactatatatgaatacattgttctttacttctacactacaagtatcaatatgaaagatatatgtgataatctggtatatttgggataaattctacttataagaggagaaaatgatactaanggtaaaacttacatacagtaccatggtatggtaccataagtac

SEQ ID NO: 239419 - DNA, 511 bp, Glycine max
  unsure (1)..(511): unsure at all n locations
agttggccgtgtagccggatccttaagcacctgcggctgcagcttgacagtttgngaagaggttntgattgatcaaaaagaagaatctacttcaaccgatatgcccttaggcacggcaatacataacatagaaatcacactcggaaagggtggacaattagctagagcagcaggtgctgtagcgaaactaattgcaaaagaggggaaatcggccacattaaaattaccttctggggaggtccgtttgatatccaaaaactgctcggcaacagtcggacaagtgggaaatgttggagtaaaccagaaaaatttaggtagagccggatctaaatgttggctaggtaagcgtcctgtagtaagaggagtagttatgaaccccgtagaccatccgcatggnggtggtgaagggagggccccaattggtagaaaaaacccgcaactccttgtggtttcctgactcggaagaagagcaaaaatggaagaaattactgatattcgattcttcgcgtcg

SEQ ID NO: 239420 - DNA, 395 bp, Glycine max
  unsure (1)..(395): unsure at all n locations
cttctcatcaatggactcctgacgtatacgaatgagtgcggttcgttcgataaattcctatctctntatctatttctgagatgtttggatttttcaaaactccatggacatgcagaagagaaatgctattcccactcggaccaagacataactttacttgttcaaataacaattaaggtgaagcagagtcaggaacaacgaatccctttatgataaacagattcattttgcaagttcgttattacgggtagttcctacaaaggatcggactaatgacgtatacaatacttgaattctcgatgtagatgctacatagttggttctcatccttcacagactacgagtataatangagcatccgtcaacanaaggatcaccctaagatgatcatctcg

SEQ ID NO: 239421 - DNA, 455 bp, Glycine max
  unsure (1)..(455): unsure at all n locations
agcttgttttgtgtataaaaaatgatgcatatgttaccaataatgtgagaaataataactctaatttagggggaaaaaggataaattgaaaacaatgaatgatatatgcctaaaaaatgaaacttattagacatatgaagaaatataaaaatcaaaattgatttattaatataatatccagctcaatatttaaccagttaatttatattatgaagttattttttaattaattgactgcgtgacatttgttataaatctgaattagaatatacattattgttatcatttaataagttgaatctagatatatactcgtggtagtaatttgaatgcttaaatcataaaaattatacttattataacgaccttacttatgtatnttttaataaatagagaaataatacaaattattctacttcaatgaaatatacgatatataatattttatatgaaat

SEQ ID NO: 239422 - DNA, 452 bp, Glycine max
  unsure (1)..(452): unsure at all n locations
ctaagcttagtcctgttgatctgangttgaaggtaggacccccatacttggggtatccacaactctggcatgctgtcctcttcttgaaatttatatgctcgcaaacaccacacatccaatctcctccagaccagctcattttcctgatcaatatccacacttgaatttttgaattataagaatttttggttccatcaattctcggtgcaaccagataaggactatatgtgcatgtagcctacttacacagtaatgagaaatattattagtccttgttttatgcattatgagttatgacttatgaccctaacttctattaaaggcatgcaattttctatccatatataggttatntgcacaaagaactactgtcttgggtgatagaatactctgtcaagatggcatagcaatcttgtcaagttttctactctactcaatattaatctattcat

SEQ ID NO: 239423 - DNA, 417 bp, Glycine max
ggatcttaagcgactgggctgcagcttataattgctagattgggagggattttattatacaaatttgttttcaatatcaaaagaattcccattgtgattgacaggttgcaggctattagattagattagacaaacttcttttcaatatcaaaataaatttagaaacagagtaacacaggaactttgttttcttgtctcatattttttcttaattacaagtctaacagtagtctaatagttgcatattagtatcctaacttaccttttttttttcttaaccatctcattcatcagggaaaaagaatcctaactaatccacataatttatgcagtgtatacagtcatctatacatcctaaccaaatgacagaagataacaattcaatttagacatcctaaccaaatgaaagcaaaatac

SEQ ID NO: 239424 - DNA, 453 bp, Glycine max
  unsure (1)..(453): unsure at all n locations
atgtcagtttactgcaactgacaatggctgcgccgaacccttttcaacctgccactcgctaaatactctggtcctatgctctctgcacattgatgcanaagtactcttcatatctaattctaacctttccattctgaacctgaaagacctgaagatcttggacaccattcaacaaaaaattgtgttttctactccaaatcttagttctctcacaatcaccaattatttatgtttcagtcatcaaccattctcctccacatgcaatctttcgtgtcttgaagaaggaactattcacaccactacttatatatcttactcggtctgtataggctggctgcaactcttcgctaatgtaaagatattgaaactttcttacgataccctgagaatactgaaagtaagttttctttagttaggtttctactctccttttctttntgatataatcctcat

SEQ ID NO: 239425 - DNA, 423 bp, Glycine max
  unsure (1)..(423): unsure at all n locations
actaaatcttgtcttttctcgcttgaagctctccaattgtctgtagaagacagctcaaaggactcggcaagccagtctgacgtgagtaagctgttggcagatcagtcctttgtatcttctatccttgcatcggtatgtctataaatccagtaaatgttccgtgttctttaaatgtattgatagaatgattgacaatatgttctgcactgaataataattcgtgcttctgcagcttcctggggttgacccaaatgatccatctgtcaaagaattgctggcttccttgcaaaatcagtctgaggtaggttttcttttatggagaataatcattgagtctgaagagaatctcttagaatatttcacagggggcatanttaaattagcttacctagatagccttgactcctttcatctctccctctt

SEQ ID NO: 239426 - DNA, 493 bp, Glycine max
  unsure (1)..(493): unsure at all n locations
atgataaatctttatatataaaanagtagacatgacggtattattgtaatttaaatcttgccgctcattttgagggtacatgcaattaattctatcacttcttttgtttccataatcagatttttaaaacgtaatttataactaattntgattacgattatttcttcttcttttaaaatataagaatggttaaatacttaattgcccattctaaattctcataaattatttcttattttccgttntatattctatgtagtgtgtaaggattttaacaaattagtgtgttagtgatcaaggttctctattaatatgagttcttataagtcacattgtcatttagtttgtttcctttcaactgattgtaattatcgtatgtaaaaatcacgatgttggaaatggatgatggttggtccgcagctattgttgttcaaaanaaaaatattngcgggacacatggtncactagtgagaactatgcatatcttatatac

SEQ ID NO: 239427 - DNA, 224 bp, Glycine max
  unsure (1)..(224): unsure at all n locations
acggtctgctaccaatattcatggttgacgggtaacacagngcccgacgtcattatttaacgtgacatggatccttccggcgtttcgaccagacgagggaaggcacacataacctgcataacaaacataacgccaaggcctgaccctcatgcgggcactgttgtgatactattaacatctctgctacatagaagcgatcctgacacgtatgctaagcctggtcg

SEQ ID NO: 239428 - DNA, 468 bp, Glycine max
agcttaatgattatgtaattctctttatactgtttctctggaagaaattatgcttagagataaagatattagaattgtttcactattttacttttatagtaaatgtaatcttattctattgtttgagtaatacacttttaagtgaaacaaaatctgtgtaaaactgacggatttgggctgttttctaaggagaaggtatgcattccataataattataagtggtacaagaataatgtttcttccattttatctatgcaagtaattcttgtttattgtttatcttcagctctttactaatactagtatatgctggttaatttcaaggtatatagttagaaagagcataaagagtgcagaagacatagttcgtttccctttccaacagaatgccaccatactttacttatcgcacactgtgtacagaggcagagagaatcttccattacttactgggcactatgtaagtt

SEQ ID NO: 239429 - DNA, 312 bp, Glycine max
  unsure (1)..(312): unsure at all n locations
ctaatgtgtgttcccgtatgatgcacaagttgataaaataatattnttcattttctaaaaattaatttaagattaaatatatctttaacagatagtacagttaattatattatgagaaaaaagtcacgcattgacatatataaatgtgtattatactcttacttttttttaacataccactcttttctttatataccactctgagctgattatgtaaaagagttaagctcaagtttttcttttaatttcatatattacatgttaagctcattcttttaattatcttatataaaaacattgattaaatattat

SEQ ID NO: 239430 - DNA, 443 bp, Glycine max
  unsure (1)..(443): unsure at all n locations
agcttgcattnggaattgcgaaagcctcactctatcattatgattagtacctgacatctcaaacaaacaaatcaaacgtaacaagacaattatagttgttgtttgaatacctcacccactcaagtgtatcacacaattatggcttttctctaatgaaacactcttgccttttaccactctaattccccttgagttcttaggcaattcaagagattatggccacaacaaagaacaattcaccaatatgtgtaaggtaaggctagagagacaaggaaaaggttaaccaagaaaaggctaacaatggttttaggcacaaatgaaggaaataaaattcagaatttatgaattcaagtaacaatccttcatgcaaccaatatattaccttanagagatttttnttaaagttcttaagcatgaaccattcacccaattttttntttttt

SEQ ID NO: 239431 - DNA, 362 bp, Glycine max
  unsure (1)..(362): unsure at all n locations
cattccacccaaacgcacccttcttcaaacattcggtcataggacttgctatagagctaaaattctggataaagcgtcgataaaatgatgcaagaccaaggagagatctcacctncgaaactgttgtatggctcggccaagtcttgatagcatccacttttgtttgatcaacggatactccatctttagacaccacatatccaagagacaccaccctttcaaccaagagatcacacttttccctcattccatagagttnttgtgctcttaggggctcaaatatttgttcacatgagtgaaatgctcctctatagatttgctatacaccaatatgtcatcaagagtaacaacaacacacttac

SEQ ID NO: 239432 - DNA, 361 bp, Glycine max
agcttgtagaatggctagacatgatacatgtcttggtttggtttggctcaaggataaaagggatgccccacattatttccatgacacatatgcaaaaatgatgatttggaaactttatgcaaaactggtcatgcatgcacctatgtggacactcaagtgtcaaatttttatggtcatgtgatgctagggctcaggattcatttcctctattatagtcaacccaacgtttccaaaatatgttcttttatcaatttgcgcattcatccgagtccatattgagcgtctgggaaaatctttacagcattcacccttcacgtgtatacacattttttcaaaaactaactatgatcagtgatatttt

SEQ ID NO: 239433 - DNA, 306 bp, Glycine max
  unsure (1)..(306): unsure at all n locations
agctgacccatcaactgccctatactctttagactggtgatccctangctctcgaccttgacttgatagaacctctttctaagcgaaggcgtttgacttgatcccatgttttactaaagtgaaacagaatctagtgcgaatcataactccgacatctatcatgggtggaatggattaatgcatgaagaaatgcatatgatacccatgccatttatgaataccggagcccgggaaattgtctccttcttagatacaacgtcttgnggtagcacagtgcccgacgtatgtatttcaagtgacatggac

SEQ ID NO: 239434 - DNA, 147 bp, Glycine max
agcttgcttctacagcttggagattgtatgtatgtactgcttgttgccgaaccagtataaaatactggcgtctgtcttcttctctccctacacatctttatctttccgctagcgcactgtttagattatctgcttttacattttggt

SEQ ID NO: 239435 - DNA, 373 bp, Glycine max
  unsure (1)..(373): unsure at all n locations
gaagtgccttatgaatcctcccgtacttatgccaccagtacctggaaggcctctcatattgtacatgacaatcttatacgagtcaatggggtgtatgctgtggcaacatgatgaatccggagagaaagagcgcgctgtttactacctaagtaagaagttcacgacctgtgaaatgaattactccctgctcgaaagaacgtgttatgctctantatgggcatcccatctcctacggcagtacatgctgagccatactacctggttgatatccaagatggacccggttaagtacatctttgataagccagctctcactggaagaatcgcccggtggcaagtgctgctattcgagtgtgatatagtctacgtcacc

SEQ ID NO: 239436 - DNA, 397 bp, Glycine max
  unsure (1)..(397): unsure at all n locations
agcttgttactatgataagagcatacctgttgtttcctgaagtccaagtacaagactttntgtcaataatatcaccaaaaactatcacattaacaaaatcacagcctctaagatttcgacaaattattaggtagccttgaagcattatgtttttatgattctaatctaccattctctttatatataatacataactatattttttaatttgtaatttatttataatattcaattatgttatgtaaaaaaatagttaaaataattaacattataatgattttagactatctaataatttctagtaagattttaatgtataacaaacctggaagcacagaaggctaccacataatccgtcccagaacaagtgaaaatactagttggatcatcataagca

SEQ ID NO: 239437 - DNA, 392 bp, Glycine max
  unsure (1)..(392): unsure at all n locations
atctcataataatggaatctttacaaataatggtacacgtactagttatctttttttaaaatttaaaatattnttttataaaaaaaaccgtattntaacaaatattggttttggtgttattttaacaaatatagttggacatacatgattataaaaaatggttatataaaaatttctatctataacttcatttgtacgggtgngtaaagtgggctgacccaccccgcttaaagttcgcccgcattggcagcggactgtgtctgtccgtcccgcattcttacactgatcaaataaatagatctgtcccttgctcgtgaacnccgcgggtcacatgagcatgtntgcangcataacttttaaagaatntcaatcttaatanaaatacaacataa

SEQ ID NO: 239438 - DNA, 394 bp, Glycine max
  unsure (1)..(394): unsure at all n locations
agcttgaagtgagaaagtgtggaagagtcagttttcctacttgtattcgttgaccacagagtggtacctcaagatatgtcgcgggggtcaggagaccttgnggatatcaggtggggtgctattgcctaaaaccaagcttgaccaatcccgacccaacccgggcatagttagtcagtgagaacctgtgacgtacctcaacaggcgagctcctggcagtcaaccgataaaagaacaaagaccacaaagcaaggaggcttgtgtggtggctggccagctatggatcttgagtgatatttggaagatagcctctggtaatcgattacaaaggatgtgtaatcgattacaaggcttaacaatggagacaggaagttaagatggcctctggtaatcgatt

SEQ ID NO: 239439 - DNA, 364 bp, Glycine max
  unsure (1)..(364): unsure at all n locations
tgaaggtgtgtagtccaccatcttttcatagtagaatactggtaatgtgtctactatcattatcatttnttctccgtcattgaggtgccacttgagctgccaggtctctccacctttgggcgtattctttgaaagatctgtgcccctttttgcacatgttctgttgttgtatcctatcccaagccattataccgacactacctagcgaaggcaacaattangtccttccaggaatagactcgggaaggttccaagttagtgtaccaggtaacaactaccccagtaagactttcttggaaggaatgtataaaaaattcctcatcttttgcgtatgcccccatctttngacaatacatctttagat

SEQ ID NO: 239440 - DNA, 369 bp, Glycine max
actaagctcacaccatgccaaaatacatgaaaatacaataggaagctttcttgagaagcaaggaaggtagcatccttgagaagctacaggggggctactcacacctctccattagcaaagctcgcccccatgccaaaatacatgaaaatacaatggtaagcttccttgagaacaaggaaggtagctttctttggaagcaaggaagaaagcttccttgagaagctagaggggggctactcacaccccttcaatagctaagactcaccccatgccggtatacatgaaaatacagacaatgtctttactacaaagattactatgatgccctgaatacaaggccttaaccctattctactatggtacccctaa

SEQ ID NO: 239441 - DNA, 425 bp, Glycine max
  unsure (1)..(425): unsure at all n locations
tcatcaagacaaacatctaatcattccaatccactcaattcatacacttgctcaatcaattcattctcaaacactcatttcatacaaaacaatccactgcataacattttcaatcagctcactgttcaaacaagctttctgtacaagcaatcaaacaactacactacaactgacatttaaataactgaaatctaaagaactaaaacataaagactgaaatttanatgactgaacataaatcataaaataactgagataaactaaatcgttcaaattgcacaaaattacatgtcctgctcctgtgattgctcccgtgcatgctcattgagatccaacacctgagcagctggtgaatcctgaggaataagctgctctagctcaaatagctgtgcanatggcatggaatcatcacagtatggtactgg

SEQ ID NO: 239442 - DNA, 467 bp, Glycine max
  unsure (1)..(467): unsure at all n locations
agctntatcaaatttcccttctaataagttttgtattccaagactttcggtttggtatgtatgatttcctagtcttggaaattagtggtataattntcaaggggatacctgtgactcgattggtgaaataggatctctcttcaaaaaagcatgttttttttaccattgcaaaaagaaaagattttgttgcgaatgaacaagatatcgagaaattgtccatacgtaaaatcataattattgatacaggccttttccacgtaaaaagagaatcttttgttacaatagaagcagaagtgatattgattattcaagaatcgaagtcaatttgctttatacatttacataatatatggcataatagagcctgcgattctttgatttgatgtctagtcaaatntcaaggtggaagttatagttctgaatttatccatgttangatgggaaaatgtgaaaaaaagttggatatg

SEQ ID NO: 239443 - DNA, 439 bp, Glycine max
  unsure (1)..(439): unsure at all n locations
acatccgatgacttagtccaactggacaagtaacatgtctagaaacctctttaaggataagctcaatatactggtattcaagtatactcccgttcctgctgggagttaaggtgaagttattacactaaataactcatggatgacatttataggtttacctgaatggatagatatacaatgatttaccaaccaaattggattaagatntaaaaatatattatgttgctattcttttcattgacttgtaactataaattgcatgagattctttcagatcttacaacatcattaaaatgtaaacaataaaatcatgattataattncttatgaataagaatcttataaatcattatattctgtataactaattagaaattacatacattttctatgccagaatagttttagaaatctcaatcaataccttcttaattcaacg

SEQ ID NO: 239444 - DNA, 284 bp, Glycine max
  unsure (1)..(284): unsure at all n locations
agcttcttctagacttatctcctcactactagataatacactttcaacatcggttatttagaacattctacatcggttctaaaaccgatgttgaaagtgacgatgttgaatgtatgaattttaacatcggttttggagaaccaatgttaacatacatatgacaacatcggttctccaaatacccgatgttaaacacaatgaacaacagcaaaaaaagtgcaggcatgatgaacgttgacatcggttnttcagtaaaaccgatgttaatatgttagtttaacatc

SEQ ID NO: 239445 - DNA, 361 bp, Glycine max
  unsure (1)..(361): unsure at all n locations
atgtatatgtttggtcgaagtgaatgataaatctaagttgtctcttatatcatgtgaagtaacgaatgcttgaagttactttattaggctgtttctttntttttttttaccgatggggtgcaatttttttcactatttttcaaatgggagtagtgtttgaattatttttcaaaagagggtgagttataacagtgttgcgactttagagttttcaagtgtaacacctgttatgactttaattttttttaactaaaatagaaaataattctacaattttagtgtaattttttttgacttcaaagatataagtttcttttttcttttccactactctgacagtgtaatatatatatatatgatt

SEQ ID NO: 239446 - DNA, 343 bp, Glycine max
  unsure (1)..(343): unsure at all n locations
gctngagatgaggaagtgtagaagggtgaaactttctgcttttattcgttgaccacaaagtggtacctggagatatgtcgcgggggtcaagagaccttggggacgtcaggtagggtgctattgcccaaaaccaagcttgaccaatcccgacccaacccgggcatagtcagtcagtgagaacctgtgatgtacctaagcaggcgagctcctggcagtcaacagataaaaggaacaaggaccacaaagcaaggaggcttgtgtggtggctggccagctgtgaatcttgtgtgatatatgggttatggcctctggtaatcgattaccaagggtgggtaatcgatta

SEQ ID NO: 239447 - DNA, 436 bp, Glycine max
  unsure (1)..(436): unsure at all n locations
tatgccaaaactntcattatattcttcggatatagtatcttcaaagcttgagtgttgaagtgaccaaatcttcaatgccataaccatgaatcatcaattgtaactctcatggcaatgccagtattagtagtatacttaaagcttattggaaaaaacttatatttcctttctccattttaactntggcaatctcttgccttttgggtatttttatcatagataatgcacgtatcttcttcaaggtgaagataatagcctttctccatcatttagccaatgctcaagagattatctttatgatttggaactagtaagacatctttttatgatctcttacctttctttgtctncaccatgacagtgcacttttcttttgactctaccatggtggtcatttccaattgaactntgactctgacagtggtcgcaatttcct

SEQ ID NO: 239448 - DNA, 468 bp, Glycine max
  unsure (1)..(468): unsure at all n locations
gatctctgagtcacctgcggcatgcaagctnttcgattcattctatgcacccatagatgttcacattgtgtttagtgcatttnttctcgtttagtttactttttataccccctgttgacgtgcttaagccattttacttaagtcgtttctcgcttaacttaaaaataaaataaatatccaccgaacgtttgaattgtattatccattaactttggttaanatcaattccgaccgttcggtcgtgccgtaaccacgttggaaatcaaaaagaggtaaaaaataatataataatcaaaaagacatcttttattgaaataaagcggaaaatcaattggacattttctctttgggatttctcattcttaatcgaattgattaataactaaagtgaaactaaaggctaaaatcaatccacctagtcaagctcgtccacaaaaataagcttttgaagttcgtcatttcattttc

SEQ ID NO: 239449 - DNA, 294 bp, Glycine max
  unsure (1)..(294): unsure at all n locations
gagaagtgtagtagattatggttcagttctttacgcacttctctctctttctaatatgcttatgaaaattgtttgcgtgaagaaaatccaagccgaggcgcttccgtagcgctttcgtgagtgattctgcgaaggttntcgaccggtcttcgacggtcttcattcgttcttcatcggtctttcatcttcatctggtatgtacctgagaccaagcttgtcaattcattctatatacccgtggtggtccacatgtggttccatgtatgtttattctcgtttcatttactctttata

SEQ ID NO: 239450 - DNA, 351 bp, Glycine max
ccaacttagttgattgagaccgattgggatacatgatgaggttgtcttttgcgggtatagctatgatgaattttccttcgagtctttgacatggtgggctcacacgagagattccgttgtgtgcacgatatgaaggaatcttgatcataacattttgagatgaagatttcccactttgccaggtatataaatacggcaacgcttaaaactgctacagcacgttatattatgtgttaatttatatgtgatgcaaccgaaaacaccaatgaatgatcaatctatcatcgtcaatccatagataagtaggagggtgatactctaataatgtcggttactttattgtattatcac

SEQ ID NO: 239451 - DNA, 430 bp, Glycine max
  unsure (1)..(430): unsure at all n locations
tgaatctggaagttgtccactgatacgtgatgcacttggaattctggtttcgacgaccagagcctccaaaacggtgatgaaatgaaataactcacaaaagataattctcatattcatccctctttctgtgaatcattacatctatttatactgattcttataacagaattgctattctatggaatattcacgattcaagtcttgtacaattatctcccacntctagtaattgctctaacagaatgcatatatgcctttaataccatcccgcccctttcagatgtaatctctgaggtacgttggtctctctacccttctcttgggcctctgctctttgttttctgaaattgcttggtgcaccttatcctgctggctgttaatctgcattgctagttgcacctcattctgttgattgtctccctctgctatg

SEQ ID NO: 239452 - DNA, 364 bp, Glycine max
  unsure (1)..(364): unsure at all n locations
agcttgagatgaggaagtgttgaatggtggaacttcctgcttttattgntgaccacagagtggtacctggagatatgtcgcgggggtcaggagaccttgtggatgtcaggtggggtgctatttcccaaaaccaagcttgaccaatcccgacccagcccgggcatagtcggtcagtgagaacctgngatgtacctaaacaggcgagttcctggcagtcaacagataaaaggaacaaagaccacaaagcaaggaggcttgtggtggctggccagctgtgaaatttgtgtgatatatgggttgtggcctctggtaatcgattaccaagggtgggtaatcgattacaaggcttaaaaatgaagacagg

SEQ ID NO: 239453 - DNA, 360 bp, Glycine max
  unsure (1)..(360): unsure at all n locations
cttgtctccaacgcgagctntgaccactgctcttncttcccgcgatgcttcttttcatatccgcctgagtgggcttatagcctaaaccatacttcccacgattttctttggcatttatcaggctagttatgtcgccgttgtctttgcctaaacccattccgggttcgtaaccgttccccaacataactcgggccatcattaccgctgcatcggacaggcaaggctgcccagagaaggagtccatagaggaaatgcttaccacctcacaagactggaaagcaggttctaacgattcctctgcggcttccacataaggcatagaggatgggcagctcaccaagatgtctttctcgcctgaca

SEQ ID NO: 239454 - DNA, 420 bp, Glycine max
agcttctcaaggaggtgagcttagtttttagatgggtgtgtttagctaagctctagcttttcaaggaagttttcgcaaagaagcttctcaaggaagttttctcatgaaagcttctcaaggaagttatctagtctataaatagaagcatgtgtaacacttgttgtaacttttgatgaatgaaagtcttatgagatacaattcaaagttcgacttctctccttcttttcttccttcaatttcgggctccccccttctctctttcttttcctccattaaagcatcctcttcaagcttcttatccaaggcaattcttggtggcgaagatccttcttccttggcttattccctagaggatggagcctgccctctactgttctcctttgccttccgctgcatctccatggtgtaaaatcaccattg

SEQ ID NO: 239455 - DNA, 393 bp, Glycine max
  unsure (1)..(393): unsure at all n locations
ctccccaattntctatanatagggggagaagtgaagtgaataagggttcagccccttaggcacttctctctctttcgaatgtgcttggaaaaattgtttccgtgaagaatatccaagccgaggcacttccgaaacgtttccgtgaggaatttcgcgaaggttttcgaccgttcttcgacgttcttcattcgttcttcatcgntcttcagtcttcaacgggtaagtacctcacaccaagcttttcgattcattctatgtacccgtggtggtccacacttggtttcgtgtattattattctcgtttcatttactttctatacccnctttngacgtgcttaagccattttatttaagtcatttctcgcttaacctaaaaataaaataaatttccac

SEQ ID NO: 239456 - DNA, 320 bp, Glycine max
atccttacgcgatgtgcacacctttcattgcgatctctaaacactctggcacgctccccttctacatgcgttactcatataaaagaagaataaaactattgactgccgtacagaagcaatgtcctctctcatatcaaatatgatgcatatccatcacacatttgaggcgggctttaacctagtcggacatctatttcaagcatacaaaaatatttgctctcgcttacatcatgtatactaaaaatatgaatatatacatacatattacatgtttgtaattatacacttaagatagtctatacattcatttatgatcttat

SEQ ID NO: 239457 - DNA, 342 bp, Glycine max
aattcatttttatcgtttttgtaaaatacttggatgaataatacaattaatattacgctacattgaaatgtgactttatgtataatgcatactctcacttatcactacaaccaatatattatacataaatatgtactataatacactacacctttatgattctatgctatgcaattactaataatttatacataatttgatataatatacaatatcaaccattatcttttacaataaaatattactatacaaatctatataaacatatgataactatcctatgattttattttttaatcctaaacttattcatttaacataaactataatactattgacgta

SEQ ID NO: 239458 - DNA, 326 bp, Glycine max
agcttgtaagtatttggtttataatttgcctgttccattaagcttttaatgtctctagaggttacttcctcgttgacatcttttgtcttgaatggaattgccatgacaggtttgctgttactgtctttgatatttggtagttgatattgtgttgtgggaggtaattccgactggattaactcaccatccttcacttgccaatttgttatgacatttgttgttggattacctatgatgtcttgtttccaaaggtagtctatatcctttctgatggcataagcatgaaaccaatcagagaaaaggacattaattttgactctatcgac

SEQ ID NO: 239459 - DNA, 393 bp, Glycine max
gcttggagaaccaagcctatcagaatgtctttcgaaatatagatgggaatagaggtaacaatggcggtaatgacggaccgaggcagaaccgggttgagggagtaaagctcaatgttcctcccttcaaaggtagaagtgatccagatgcctacctgcaatgactacactgatgcgcagaaagtcaagctagcagcagctgaattctccgactatgcccttgtttggtggcataaataccaaagagaaatgttgagagaggaacagtgagaggtacatacatggactgagatgaaagggtgatagaaaaaggttgtgccactactatacagaacctgcgaagaaactcaagggctgtccaaggaattaaccgtggagaatattataaagatgaat

SEQ ID NO: 239460 - DNA, 166 bp, Glycine max
gtccgcaagaattacaggaagatcttagagtcgaccatagcttagatatccatagaagccattgcatcgctcagcccatactacgaccagcctctgagatgcttcacgttcggagatgtcctattattacccaccattgaagaatctgaggacattctatgatgtc

SEQ ID NO: 239461 - DNA, 195 bp, Glycine max
  unsure (1)..(195): unsure at all n locations
ccaaccgacgtgtggacccgtacatcaaccaccacccttcttcccatcttatcacttagggagggggtatacccacatgtatgccgtcacccatcactgtcttgataaatacacactctagccagaactctatcttcgacacagggtgaatcactaggttatttctctgacaggacactatactncccggtatcg

SEQ ID NO: 239462 - DNA, 531 bp, Glycine max
  unsure (1)..(531): unsure at all n locations
cggtttgantcattccgtcgtcgagctncctagagncgacctggaggctgcgagcctcttccctattttttctattaatangggggagaatgtgtttaagaanagggttcaaccccttatgcacttctctctctctcgaatttggtgaagaaaattatttccgtgaagaaaatcccagccgaggcgctttcgtaacgtttccgtgagaaattacgccgagattctcgaccggtcttcaagattcatcggtcggtcttccgtttcttcagtcttcaacgggtaagtacctcaaaccaagcttttcaattcattatatgtacccgtggtggtgcacattttggttcatgtattnnttattctcgtntcatttgctttntatacccncttttgacatgcttaagccatttatttangtcatttctcgcttanatctannaatanaataaaccttcaccgatcgtttgaatgtatcgtcaatcattttgttaaatgaatctgaccgtcgtagtgcgtaccacgtggaatcaaaaa

SEQ ID NO: 239463 - DNA, 438 bp, Glycine max
  unsure (1)..(438): unsure at all n locations
tactaagctctgtaatttatgattganacctgcagtagtcccatattgatttatatgaatgaactcttaaacccgaaagccatatataactggactcaaacactggtgtacacatacggtttgatatataggaagcttcacatccagaaagaatgtaatttctgttgcaagacggacaaaacgaaatcaaacttcaatgatatattaaaaaatagtcaatgaaatacataattaacattatatatactgatagaaaaatcgatagaacactcaattcttgccacgatttattaaataaagggaaataatgtctggtacgaaggttaatgctcgaatattatacacgaagtatccttggcgggtntccgttaattccttaattntattcatttcttgagctatatgattatccaatcaaaacaagacanatacgattcg

SEQ ID NO: 239464 - DNA, 275 bp, Glycine max
  unsure (1)..(275): unsure at all n locations
ttcctcttttttctttatctctttttgcangccctgcagaggtaatatcttctacgtctgtagtatccccaccacctaaagatatatcatcattggttggttcactttccacagatctaatggtatctgctctagtttcatcagctgagagaacattctagagccatcaaccagaaacccaaaagggagaagggaaaggaaatgaaaagaaaagttagaattagacaatgcagctagaaaatagaaataccaacaaacatggacctatggacatg

SEQ ID NO: 239465 - DNA, 497 bp, Glycine max
  unsure (1)..(497): unsure at all n locations
tactaagcttgcacccagctcgcccaggcaagctcggttggcttctccagaaagtaccgctttctggagaacatcctggaaggcccaagtgggcctggttactatttgcaccccccttgtttactaaatacacccacttgcctttntttgctaattctttttccgtaacgttatgaaactttacgaatttcgtaacggtacttgttttccttccataatgttacggaaccttacagattatgtaatcatcccttttttgcctttcggaatgttacggaactttacggattgcgcactaacactctcttttaatttccagcatgtcacggaacttcacggattgtgctacaatgctttcttttgacttccggcatgtcttggaacttcacgaattgcctaacgatgggtgccaagtacctcgaagtggtcaaacgagggtcgcatcccaacaatgggatagtcccggacgaaaatanggtatgacaatgattatatga

SEQ ID NO: 239466 - DNA, 270 bp, Glycine max
  unsure (1)..(270): unsure at all n locations
aaattgttcaaatcgtgtctcaatagaattaattgattgatctaatatgtataaaaaaatactcaatatgaacagattcttcacgtgaatgtgtaatgtcattactaatattttcatcacaatgagggtttctatgaattntacgttnttcaccgaaatttggctctatatccatttcgatagccattttttatgtggattctaaagtccatgcaaaccccgtttccctattgtgttttaaataagtgataagaccttttaaatgatcta

SEQ ID NO: 239467 - DNA, 481 bp, Glycine max
ctaagcttaataaaatgtgaaattctacatcggcaaccaaacataatgtagtttaatgaacaagagacagaactcggtgacaagttactgacacatagaaataggtaaattgtatcagcacattactgtagaagaaagcgaattctgatataaaaaaaaatggtaattcagacaaaaattttcacacatactccggacatgacgagaagcaattgaatcagcaagccaacaaaatttctctatctcattacataagagatatctgagaaattatgtacgtacacccaattctcttaattataaggtctgactatgaatcatttaatattctgtattaaatacttttaattatttaaaaaaaccaaaactaaataaactgagctctttatataataaaaacactctctatgttatctaagataaattgattagtttgcttaaccataactttagcatacttgccttaattctgatatgcatg

SEQ ID NO: 239468 - DNA, 402 bp, Glycine max
  unsure (1)..(402): unsure at all n locations
caaaaaaatttcttggacttttactgctgcttttggttccctgttatatttcttggacttggttactcaccttgatgacttgaattatngcataatattctgggtggtttcctggttttggctgattctcttattggtgggtaatcaaattaagaaataaaatgattatggtgttcaacaataaagcaacatcagtaattagtacgtataagtaattagcatttgaacttctttggtacctttgaactgcctgaagcgttaattaattagctggggattcaagtcttgaaggagattgaaaaatcgttcatggccaagagaacaaatgctatctnccttagacctttcanntgtgataatacaatacatatatattatatttataatttatcatagatatat

SEQ ID NO: 239469 - DNA, 490 bp, Glycine max
  unsure (1)..(490): unsure at all n locations
ntctcaattaagaccaatcactcaactatggtattctttcttctgatgcatccacaagctactatacctagtattttaaacctatgcaggttttagttagtattctctgttagtctcggttggttgtaccaccactcagtattctaaacctcttcaagttgcactcaatattcgctaagtctttataacctctatccaagtattatttcaaaaagtctcttcaagtttcacacccaaagtaacaactactacttgacccaaacaacagttgttgtgttcacaccaacttaagaagcaataattcccgtggtgatcttctaagttatttcctctatcttaaggagctcgaacactatgcaattcgagatttccttntattgtgactcctctgatgaaggtgtttacaaatattctttctgaatatgatcaatgacatgtaaagtttaaacttgacgatgaaacaagttgcaacaaggtcaaatgagttgtt

SEQ ID NO: 239470 - DNA, 460 bp, Glycine max
  unsure (1)..(460): unsure at all n locations
agcttctcatccaccanaaagccaaaaagtaaacgtaataaccttcagttatagtatcgcttaatttgttttgaggagtgggagtttattatataatgactcgtaaaaaatgaaagcatatactccatatagtgatcttgatctatttggaactgcacatgtaatgagaggaaggcatgagcatgacccaccttgctttataatagcagtagtagtttattatgtcagccaacaccgcanataccanagaaaagaatcatgcttcatttccctaggtgtttgggaaaagtcatcgccacaatatagtttacatggaaacattaaattagaatttggtatagaaggagagggagacagaaagagagatgtggtgatggacccacccacgtgcaggccccatgaactcgatcgtcactagtcttcatgcgccaccacaaccgaaggaaacctatatactatg

SEQ ID NO: 239471 - DNA, 324 bp, Glycine max
tgacaatctaatgtagctcaacgctcctttggagtggcacgaatgatacacaatacacattctcattgaagattagatatccatggagtgacttctatgacactacaagagaagaattattgaacatggcaatataggcaacatatatttttatcaaatctttcacattttttatcaatcaccgccaattgttaatttttttgttagaatattaacgtgaagatttgaacctataacctctatcccttggtctttcattctctgaatgtcaattatcaaacacatcttatcagttgctttcagactcattttatatgccgatta

SEQ ID NO: 239472 - DNA, 317 bp, Glycine max
  unsure (1)..(317): unsure at all n locations
tcactcaatggataatgtattaccttatcttaatcactcaagaatgactcttggcatctcatggaaatcgtgtacatcaagcccacaattagtattgtttccatttgaattntctactataaatggttaaagtacagctttgcaaaaaatggatattcttgtttttttatcaaaactagtaaatactatcctaaacaccttgattactgtgctaatctccctagaattaagtgtaaccaaagtgaacctcacacagagatcactctcacatagagctaaattacactgtcactcagtgtacaacacaactttgtcat

SEQ ID NO: 239473 - DNA, 475 bp, Glycine max
cttcttccgcgtacgtgacttctcaccatctaatgcataggtgcagtggatattagataattgaattgactaaagctatttgtatgaattgactaacgctttattcacatttataattaggcatttactggatgtccatggcttcgttgaaatatatttaggatataggtatacatgttttctatgtaaatccatataagtatataaattttttatttgatatatatgtataccatatatttatctaatgatatgtttgatattattgttattattttatattaatttatatatatatatatatatatatatatatatatataatgaactctatgtgaatattttaatatatttatgttaatgtttttagtacgttaattacttatatatatattaatgtgtataatacatataattacttacatatatatataatgtgtgtaactatctatgcatgtatatatataatatatat

SEQ ID NO: 239474 - DNA, 242 bp, Glycine max
catgcaagcttgcaagttcattggttgttgatccacatattatctactccacgatgaggcaagtcttacttgaaaaatatggaaccataccttcaaatgatatgcaattgtatctggctaaaagaaaagtgcttaacacaaataatggtatacatgatgtatcatataatgatttgccaccatatgcagctgctgctccacataacaattgaagaagtataatcaaattgagtatggagcct

SEQ ID NO: 239475 - DNA, 501 bp, Glycine max
  unsure (1)..(501): unsure at all n locations
cagttgggcctgatgacgtacggaacataaatactaagcttgcatgtctgccataaaactcggctgtttgcattgataatgtatcccgaatcaagacaagcaccacgtagagatagagctgactgagatcgtattagatgtcattttcatgactataatccataccgacctatgcattgaatgtactaatgccggacggatgaagtctcactacatttgttgcagtgcttgatacgctacgataatgttattgatgcatgcgaaggaccagatcgttcatgttggaagttaaaggatgataacatacttatccgcgcgtacacgttcacgtttatatgttccatatgtaccccaccgtgacagattgcgatccactatccaataaaaatgcggctaatatgatcgacacaatatacttattatcatactgaactcatatatatgacaagtgcggacccgcatacatcactcgacgaattacgtattcaacatattgatccn

SEQ ID NO: 239476 - DNA, 276 bp, Glycine max
  unsure (1)..(276): unsure at all n locations
taatacaagatcttttgctcatctgttcttgcgccttcacccttcctcattcattngcatatttatttctttctgctgcgatacagatccgacgacgagtcctgtgaaggtactaataccatggacccgactgtcgatttcgggcgagaagcagatcagatggatgaggaagaagacgacatagggttatccccggagatggaaaggatggccgcccaagaggaccgagcattgaagccgcaccaagaggaaacggaggtcatatatcttggtgct

SEQ ID NO: 239477 - DNA, 488 bp, Glycine max
tattgaagatcctaacactgtccagagattcaaataatatcatgaaaacctaatgcacaatatgttataccacatacgcagcacacttttgttgatttatcatttaagaatgaattcaacatcatatctttgaataaccttttaattgattttctatcatccatgagcataaaactgaatagtttatcttcccacccccaaggagaattcatgttttaattactttacttttcaccatgatgatgttcattctataatcttatataagtaaaataaaattactttataatctcaccttcctggtctttactaaaaattaaatacaataaaatttaccaaaaaaaatgtaactgcaattacttcatcaataaacaaaaaggaatttcaattagaaatacgacattaaccaaaattgtgagattacaaagaattagaataaaaaacaagtggtatacaatcgtcaactaatcactcttacaaagtttaca

SEQ ID NO: 239478 - DNA, 295 bp, Glycine max
  unsure (1)..(295): unsure at all n locations
gctatctttntcctganaaaaaaatcaaataataacatgccctacttccctaaaagtgtgcatttttaagtgtttgtgccatgaaaagtaaggaatagcaagcaaagtacctcttttgaaatcccgaattgggagaaatcttctgcagcatttgccatcctgcaagcaattgtagcagagaatgatgatgcattggtttttaaattggaaaagcgcgtggtgaaaaaaggaatgaaaaaccttaagaagggtgaaggaatcgtaatcgggtggaaagtcgaaacctttttttttt

SEQ ID NO: 239479 - DNA, 435 bp, Glycine max
ctatgtggccccatccgatttcctggaatttgttcttctttgtgcatcttctttgatttgattaagtcttcattttatatgcaagatagcttacgaaacaagttgaagtataattagtcgggccaccctctctttctattatttgattgctattcggcgttgttatgcatttaccttctctctcttttattcatttgatcgtgtgagttgtatacaagtgttgcatactactggcagcaatttcttctttacacgagagaaagagcgagaaaacacgccccgtacaaatttcaaggcctggaaataaacttcttgatgcatactaactacttatcgacccactctatattgggtaccctaacttgctactactgtcgcgtgtatgcttatggttgtttctacttctccatcgacgcttgaatgctagctacactt

SEQ ID NO: 239480 - DNA, 429 bp, Glycine max
  unsure (1)..(429): unsure at all n locations
agcttggagaggatgcttcaatggaggaatagatagaatgacagaaagagagaggggggagcacgaaattgaaggaagaanaagggagagaagttgaactttgagttgtgtctcacaaaactctcattcatcaaagttacaacaagtgttacacatgcttctatttatagagtaggtagcttccttgagaagctttcttaagaaaacttccttgagaagcttctttgagaaaacttccttgagaagctntcttaagaaaacttccttgagaagcttctttgagaaaacttccttgagaagctatagcttagctacacacacccctctaataactaagctcacctccttgagaagattcctaaataagttagagcttagctacacacacnctgtataatagctaagctcacccccatgccaaaatacatg

SEQ ID NO: 239481 - DNA, 395 bp, Glycine max
tatttcgatgatgccaaagactcaagtcaagaatcaagattcaagccagtcttatgaatcaaagagtcgttctatctggaatcaacattcaagtgaagaatcatgagaagactcacgatattcgagaacatcaagaacagcatcgagacaagtataaaaagaattttttgaagaaaagattgaatagcagaatttgtccaacagaatttttgaaagaagaatcttttatcgaagtttttactctctggtaatcaattaccatgacgcagcaatcgattaccagaagcccaaaacaagtttataaatattttacaaagtagctatcgattaccatgggcctgcaatcgattaccaatgtttttgaacgttggatttcgcaattcaagagtcaccac

SEQ ID NO: 239482 - DNA, 245 bp, Glycine max
cttctttgagaagctacatccttatctatccacccctctattaactaaattaacttccttaaaaataattacggatgaaaataacgcaacaaataatcaaacatcaaacataattactaataatatatagatatatatatcagggtgttacacatcatatattgagacgctcgaaattgaacaatggaagctctcgaaaaattaaaattgtcataaattttcacacggatgtgcgatcaggcaca

SEQ ID NO: 239483 - DNA, 383 bp, Glycine max
  unsure (1)..(383): unsure at all n locations
tctgttgttcaactttgagtgtctcgatatattatgctcctgaatcgaacatccgagtganaagctatgagcattcgaatttcttgagagcttacgctgctcaatttcgagcgtctcgacatgtgatgttcctgaatcggtcccccgcgtgtatagttatgaccatctgaatttcacgagagcttccgctgctcaatttcgagggcctcaatatgtgatgtgcctccaacatcccagtgaaaagttatgacaattcgaatctctagagagcttccatcgctcaatttcgagcgtctncggatattatgcgcctgaatcggacatccgagtgcaaagctatgaccatccaactctcttacccgcttcatagttcgatttccacc

SEQ ID NO: 239484 - DNA, 373 bp, Glycine max
  unsure (1)..(373): unsure at all n locations
agcttatccagaggatgtgttttatttacattcacgtgttntagaaaaagccgctaaatgaagttctcaattaggtgaaggaagtgttgaatgacagtttggggtttctcggagcttacaatgggtgagtctgcttgatggctggatttgacatcaaattggatcaatatcacgaataaaaatatctgagttatctaatcgattataaagcaaacgtgttgtggaaaaacgtttgaagacacggactgtgttttattccatcctgagtgcagttgttacagttgttgtttgctatcacgtatgggtttggctatgataatctaagtgacacttacaaatgaagatgaactccactctaatagttcacgtattg

SEQ ID NO: 239485 - DNA, 436 bp, Glycine max
tctacttcatagtctaccacattcatatgatcaattcatcatcaacattattgtcagtcgtctaacctttgatgatgttgccagaactattcctaaagaagaattctaacaaaagaataagaaagatacgcaggaaaattccaagcatgcaaaggctttaatgatgacgaaggtagatcaatgtaatgtggctctaatgggagttaaaatcatggcagatcaaagtcttgaagaagaaagaacctcatatactataattgtggcaggagatgacacttaaagaaagattgttggcctaaaaagagtggaggagataaactatagagaatcgagctctcaacgttgtgttgctagcacctcacataatatggaagccatgtgtagtgaaacaccaattggttttagaggtggaagacaacttcatgatcgttggata

SEQ ID NO: 239486 - DNA, 341 bp, Glycine max
  unsure (1)..(341): unsure at all n locations
aagaaaaaaagttacgagttgggacaagaccttgcccaattcatgaatgtcacaccaaaatcttgaaaactgattggaagtaaaacttgcatcttttataaaattccattattatttgaagggcatataaaaaaaatgttcatagtagaagaatttacactatttaattaaaaaatgtttttctaaaaaacacccacatttaaaaatgtagaattgattacaaaaaanaatgtagaatcaaatttataataaataaatatacagaaatacggaatgcgagggaaaatatccattaaatatatatntagctntatacatgttgataagttattagttattta

SEQ ID NO: 239487 - DNA, 469 bp, Glycine max
agagtgagtcattatgaaacatattcttgttaccctactatctttttgtatagtggaagaatctccatattagagaattataatcgtgtgctcctattactacctttaattactaagtgcctatcttagctttcccaacagtaataatagagtttagttgtgaatttgagaaaaagaattatgcaccttaaaaagttttatatagtcattcaattataattattatatatgataagtttattaatttttataataattatcttaaaatagttcaaacataaatctatgattgaatgactctaaaattattgtatatgcattacattctctgaattgtgatagattagttgaccatttactaaaattgaatgtaacttttatctattagtatcgtaaaaatctacaccttcaagtcaatcaatcaaaaaccattgttagtatcatattttacaatagctatgggcatgat

SEQ ID NO: 239488 - DNA, 556 bp, Glycine max
  unsure (1)..(556): unsure at all n locations
nnccccagggaggtcagcgacctanagtacgagncnnccntanantnngancnnganngcntgccagactctaacggcacagttggccgtctaaccggaacntggtttactttcatcattaatgggcntaaagcaatcanaggcttgttatagcctctaattctataaataagagaccaaattaccgtttaagtgagcaccggctcgcttagccgcatgcaccaaaaattctacaaaactaaattggccttgggcttaacgagacagacttgcttagcccagacttattctcaatagaggcatgctatgcttatcgagcgtggcttatttctccaaaatttcttagttccctgttagaaacttcagcttgaccatttgttgtggatggtatggtaggctacttgtgtggacattgaatgccttancaccttctgaagctggttgttgaaaagtgagagccccatcctgattangacccttgacacccaagcgagcaaaatactttcttcagacttactataatttacatcgtctttgggcagcactgctcacccat

SEQ ID NO: 239489 - DNA, 188 bp, Glycine max
  unsure (1)..(188): unsure at all n locations
tactaagctgctgtgttacatacctgctcacgatcagtgngcggatcttctttctagccaccctcatccaccagatttcagcttattagggacaaactcaaggtgtttgagctctctgaagctcacccaccttaagtttggggggggggggcctcccctcatcctactcacttttacctcccctcctc

SEQ ID NO: 239490 - DNA, 454 bp, Glycine max
  unsure (1)..(454): unsure at all n locations
tccccgacgagcttcttcttcgcgaggcttctctggcagcccttggacccatttgcattcgaggtaggtggccttcttcttagctttggttttggtatgcactacattagggtaggttagtggaaccttatggtagaaaacggaaccttatgatagaaaacgaaaccttatggtagaagacgccngaaaaatggcgacagcttggtgacggtggctcctttccgaagacccgttaggggttcttctggaacttccggaagatttccgaaagaatagttgttctggaaccattgaaacgtctttcagaagtactggtctttcngaaagctcccggaacacctattccgataagttccggaacaagtggttgttcctgaaacattccngaangaaggttctttccgatgacctttcanntggttccgaagcacttttcggaagagcccttctttct

SEQ ID NO: 239491 - DNA, 436 bp, Glycine max
  unsure (1)..(436): unsure at all n locations
ggataagagtagtaaatgatgaagtgatacctttaggcaatgatgcactgccatgaaattcctgaatgccttcacaaatatcagctcccatcgtgctccaacaagctttgaaaaaatcgaagttgaagctgtatggtccaaggcttttgtctccagcacagcttcaaacaattgctttgatctcttcacaagaaaatggagcttctaaccaattactatcctcattgcttatctgtttgaaatccaccctttccatctggggtcgtgaaacatagttctcctaaagcatgttagaaaagaagcgtttaacttctttcttaacccctaccacatcttcaatataactgcatcagaattaacgcactntagtttattcttctgacattctgttcaaaggcaagagtggaaaaattgggtattgataatcccaagtttc

SEQ ID NO: 239492 - DNA, 311 bp, Glycine max
tttcgagcgtctcgatatactactgtacacaatcggacacccgagttaaaagttattgtcgtctgaaatggctcacaacttttgtttcaattacgaacgctttgatatattacgggacttcatcggacatcccagttaaaagtttatgtcgtttgaatttgcttaaagcttctgttttcaatttcgagcgtctcgatatattaccggactcaatcggacatccgagttaaagtttttgtcgtttgaattttctcaaagctctctgtttcaattacaaagcgtctcgatattctacgggacacattcggaca

SEQ ID NO: 239493 - DNA, 488 bp, Glycine max
  unsure (1)..(488): unsure at all n locations
ntctacaaaatcaaacgaacaataactttaactcggatgtctgattgagtcgcgtaatatatcgagacgctcgtaattgaaaacagaagcattgagcaaattcaaacgacaataactttttactcggatgtccgattgagtcctgtaatatatcgagacgctcgtaattgaaaacagaagctctgagcaaattcaaacgacaataactttttactcggatgtccgattgagtcccgtaatatatcgagacgctcgtaattgaaaacagaagctctgagcaaattcaaacgacaataactttttactcggatgtccgattgagtcccgtaatatatcgagacgctcgtaattganaatagaagctctgagcaaattcaaacgacaataactctttactcggatgtccgattgagtcccgtaatatatcaagacgctcgcaattgaaaacagaagctctgagacaatcaaacgacaataactttttactc

SEQ ID NO: 239494 - DNA, 362 bp, Glycine max
  unsure (1)..(362): unsure at all n locations
agcttcatggngtttcctgaattgngttatcaaattactcaggtggttatttgagcaattatgcaaaattttattttctttcctcttcccatctcatgtgttggaataaactatactacacggtttctctgggttttgatcttttcttcttcttttgtcaattttcttgctttgttgcagcatgaagtttggtctaatgtatagattcttcttgtctgtttcttttttgtaggatttgattactactggatgcctgacttgagttgtgtgaagtgatgaactgtgttttatgctcgtttgttttcaattgtttctcacgatgtgttattgggagggttgtagtgctatggagtntatatgtg

SEQ ID NO: 239495 - DNA, 98 bp, Glycine max
tttttaaagggtaaattactcatgtgatctctatagtttcaagattcttacctctttagtctctatagtttgaaagcggctgttttagtccctatagt

SEQ ID NO: 239496 - DNA, 375 bp, Glycine max
  unsure (1)..(375): unsure at all n locations
agctntgagcanattctaacgatagtaactcttttctcggatgtccgattgggtcccgtagtatatcgagacgcacaaaattcagaacaaagcctctgagcaaaatcaaacgaaagtaactttttactcgtatgtccgattgagtcctgcaatatatcgagacgctccaaattgagaacagaaactctgagcaaaatcaaacgacaataactttttactcggatgtccgtatgaatcccgtaatgtgtcgagatgctcgtaattgaaaacggaagctctgagtaaattctaatgacaataactttgtactcggatgtccgaatcgtaatatatcgtgacgctcgtaattganaacagaagctcttagcatattct

SEQ ID NO: 239497 - DNA, 488 bp, Glycine max
  unsure (1)..(488): unsure at all n locations
cttcattntcaattacaagcgtctagatatattacgggacactttctgacatccgagtaaatagttattgtcatttgaatttactacgagcttctgttttcaataacgagcgtctcgatatactacgagacacaatcggacatccaagtaaaaagttattcctgtttgaatttgctacaagcttccattttcaatttcaagcgtctagatatattacgggacacaatcggacatccgagtaaaaagttattgtcgttaaaattttctaagagcttatgttttcaatttcgagcgtcacgatatattacgggacttaatcggaaatccgagttaaaagttattgtggtttgcatttgctacaacctttcgttntcaatattgagcgtctcgatatattacgggacacaatcgaacattcgaataaaacattaatgtcgtttgaattgctatgagcatctgttctcaataatgagcgtctcgatatacta

SEQ ID NO: 239498 - DNA, 379 bp, Glycine max
  unsure (1)..(379): unsure at all n locations
tggcagtatcatgctccttctatacctgcgcgtttgaatgtcgtatcggtgttgatacaacctgtgtgcacccaaatcatgtcgacaaacaccatgaagacaataatagcttatttttcataatgaggttctcgttgatgttatgctcctgctaagaaacctatatctggttttcttgtcaacaacattgttgtcgtgtaagcttgtgacattgacaatgggacacaactgtcgtaaagttgacgacacacattatctttctcattctatgttcctaaaggttttcattcttgacaaaagaatttggtggtggaacacatgcttgtcgtatcngatgtcatataagcgacgatggtactggccagaatcatgactataa

SEQ ID NO: 239499 - DNA, 292 bp, Glycine max
  unsure (1)..(292): unsure at all n locations
agcttgtaggattatggnggacccgtcatatgtggtactaggtggcgatcgggagatggtgcaaatcaactctcccacatccacaaatcacacatgaacccaccatccccagttgcccaccttcaactgagctcgcgtacccccacgtagcccttattctcgttcctcttagcaccaggtccccatcaacccctccaagctttcacaatatccaaacatcatgaactaccctaaaccaagaaaacagggcagaggcaaaaaaactctattcaaaacacattccaataccaca

SEQ ID NO: 239500 - DNA, 459 bp, Glycine max
  unsure (1)..(459): unsure at all n locations
tcttgcgtagccgctcttggagctcagaaaatcccaataacaaatccctcttattactagctattctgaattctttagttcctgaatgtacaaccttcaaattgttgctcattcccctctttgttttctgcaaaaaagaaaatcaatatcaaagaaaacatggatgaagccctaaggatgccatgtacatgtgtatttctgaagatatagtatttatattccatcaagcatacattgactgctgattacatgtaatagactttttataacatggttgccccaaatcacaattaanaagcacaactaccaatctttcagagtcctttggttaatttgacttgtctccttctgtggtggggttctaattaataatattatacttttgccttccaaaaaaacacttatgactaatcctcttttcattaatcctattctgtatgttattggatacaagatcat

SEQ ID NO: 239501 - DNA, 418 bp, Glycine max
cgatgatcctcgtaccgcccgcgtccttgagtcacctgggctgcagcttaacattcatttcagcgttagattattacggactcatcaacatcgagtagatgttctggcgttaaattgctcggcctccagcataaatatcagcgctcgatatatacgggactattcatacatcgaaaaaaagttgtgcggttgaacttgctaaaattcacatcatctcgagtgctcgttatatacgggccaatatacatcgagaaaaattattgtcgtggatcgcattagcttcatatcatacacggctgataatacggactaacaacatcaaaaaagtatggcgatgatttttatacttacattaattgacggttataatacggactcataattccacaaagttttgtcgtacttgtaactcccatct

SEQ ID NO: 239502 - DNA, 426 bp, Glycine max
  unsure (1)..(426): unsure at all n locations
ntaagcaaattcaaacgacaataactatttactcggatgtctgattgagttccgtaatatatcgagacgctcgctatcgaatgttgaagctgtgagccaattcaaacgacaatgactgtttactcggatgactgattgagtgccgtattatatcgagacgctcgaaattgaatgttgaagctctgagccaattccaacgacaataactttttactcggacggcctattcactgaccgattatatcgggacgctcgcaattgcatgttgaccctctgagctaatacaaacgacactaactctttagtcggacgtctaattgagtcccgaatataacgagacgctcgaaatagaatgttgaagctctgagccaattcaaacgacaataactttttactcggatgtctgattgagtcacgtaatatatc

SEQ ID NO: 239503 - DNA, 362 bp, Glycine max
  unsure (1)..(362): unsure at all n locations
agctntagtcaaacagaataatccanaaatgtcttagaattgggtgttgaaaaagcataacaagactttctgtgattggtttaaagatacaatctttgcagatgagaatgctttataaacattaagaaagctagcagatgggcctaaaagaaatgttataacttgacaaggatacgacataaacaagtattcattttacacaaaagcacaagatgacaaaagttcaatgcataacagcggggtcaccctaagggctgaatctcaacactttgcaagtgtcaatgacgccaatccctgtgtagcttccattcctttacttgggttcatagatgaaaattgggagcttaactatgtgaaatttg

SEQ ID NO: 239504 - DNA, 460 bp, Glycine max
  unsure (1)..(460): unsure at all n locations
tgcatggatttacattctccnctttctcaagcaaattcttaattcttcttgacatcatcaaaatcttcatgatttacattctccctctttttgatgatgacaaccacctgtaggttaggagcaacaacaaagaaaatatctatttgcatatagtttactcccccttggttttacaatgattgcttatatgagacaattgaagatttcatatttttcatatataaaaagttgtctcataaaacaatagataatctntcttactattgtatcttttatctttctcttcccctctgtcaacatcaaaaacaaatcatgaatagaaaggagaaagatgttaccactctgtgcaatgtatgagaataagtgataccaacaggcattaaaacaatcattcaatattaatcaagcaaaaacaagtacactaacacatcaatcaaacacaatcaaacaccatcaatca

SEQ ID NO: 239505 - DNA, 218 bp, Glycine max
  unsure (1)..(218): unsure at all n locations
tcttcattcttcacatgtacgtacgttctcctggacttgattttctaacataataataaaacacctgtttgatagatttattattagttattattatccaatattttaagtatgttgtgtggtttaaatattctatgtgatttaagactcagattctattntaaataggtttaattactattttagtccttgaatttgaagagtgtattttttttagt

SEQ ID NO: 239506 - DNA, 231 bp, Glycine max
caaccgttgctgggacaattgtttccgcttacatagtatacttcagttcgcaaacagtcattcattattctttgagtgtttcttgcgaatagttagaatccatatattatgtcttgacttggatagatgctgctctgtatagctgcttcttgtttgcgacgctcaacttcctcgggaatttagctccatctgatctagagattgaagctacttgtctgagatgcatcacac

SEQ ID NO: 239507 - DNA, 297 bp, Glycine max
  unsure (1)..(297): unsure at all n locations
agcttatggatgctgcagntatattaacgtcatatatgactctgatcactttttagatactttgcactcattagaaagctagtattttgcagaaacctcaatattgtcgatacatacaatgatagggcagcaggagttaaacaccatgtgtaaattaatattatgggtcctattactttaataacactgcttagactctgccatattaatataagaactcacattcggaaagttgctatattttggttagcttttcatccacctgcatagagaattattcatatacatatgcattaa

SEQ ID NO: 239508 - DNA, 185 bp, Glycine max
caacaagctgagtgggtaaacgcgcagagatagattctgcaccctttatcattcaggaacaacaagttgagtgggtaaacgcgcagagacagattctgctccctttatcattcaagagcaacgaggcgggtgataaacgcgtagagacagattctgcaccctttgtcatttagatttcacaaagt

SEQ ID NO: 239509 - DNA, 479 bp, Glycine max
  unsure (1)..(479): unsure at all n locations
tctagccaaatggacttaccttgaattaattctttgtagctccttttgagccttgtttcccttttccttgttttgaagctcactacaagccttaagtgaaaaaccatgatattaccatatccttaaggaattttggagcttttgaattgttttgggaataagtgtggggggtttttgtttcattggacaacttgttttgttggctatgcttcatgatgtattttgggccatacttgatgtacaatgtacattgtatattggttaaatgttggacatgctgaatgaaatgttgtttctcaaacgctaaagagtaaaaaaaaaaaaaaaaaatcgaaaaaagaaaaagaaaagcaataaagttgagtgaataagatcttatatggcacaagaatgatgaaactcttggttctactcttcatgcttaattcttatctntaccttcttctattttcttatttttcttcttaatatgcacttat

SEQ ID NO: 239510 - DNA, 365 bp, Glycine max
atctctgcaaaagctgctcctcttgctgcctccagagttcttttcccgaaataagcactatggtgtgctttggaatctatgcaaatcatctacttaccctaattctgcaaaaaaataggctttaaataggctctaaattcgtaacgttgcgcttaacgcaagtaagtgggtttgagcttagcgccagtcgtgcattgagcctggctgaagacaactactgcggttagcgcactgatctcgcacttagtgcgcgaccttgatattgatgccctgccagattcttctgtcgcgctaagcgggctgaagctgcgcttagcggtggatgagcgcttagcccactgatgagctaagctcaactgtcactt

SEQ ID NO: 239511 - DNA, 492 bp, Glycine max
  unsure (1)..(492): unsure at all n locations
ntacatgaattntattaacataaaaaatttcttcaatcatagtacctttgatatatctaataattctcttagctccttgtagatgactaacgcgtggctcctcaatgaatctgctaagcaaactaactccaaattatctggtcttgttgcaaccagatatctcatatttccaatcaaactcttatatagagttgcatccacctttttttccttcaacatctcttgtcaactttagctcttcttcaactagtgtggaaacatgctttgaattttccatctcgaatttcttcanaatatcacatgcatacttcctctaggagatgaanatcccaccatctcgctaattgacctcaatgccaagaaaatangacatcaggcctaaatctgtcatctcacaacatcttatcatagcttccctagattctgaaatcaactntgaattcgtgtcagtgaagattagattatcaacatacagacacacaatgagaatat

SEQ ID NO: 239512 - DNA, 294 bp, Glycine max
  unsure (1)..(294): unsure at all n locations
gctcctgaatatgacagccatcgttttaggagtgctgagcaccagcagcgcttcgaggccattaagggatggtcattttttcgggagcgacgcgttcagatcagggacgacgagtataccgacttccaggaggagatagttcgccggcggggggcatcgctggttacccccatggccaagttcgacccagacatagtcctttgagtttatgccaatgcttggcctacagtggagggtgtatgagatatgcgatcctgggtgaggnggttagtggatcccattcgatgcggatgc

SEQ ID NO: 239513 - DNA, 467 bp, Glycine max
tctacttatgtggcagggcgggcttccttcaccttcttgtctttaacgcgaactttgaccattattcttccttcccgcgatgcttcttttcatgtccgcctgagtgggcttatagcctaaaccatacttcccacgatttccttgggtatttatcaggctagttatgccgccgttgttttttcctaaacccatcccgggttcataaccgttccccaacataactcgggccatcattatcgctgcatcggacagacaaggctgcccaaagagggagtccacggaggaaatgctgaccacctcaaaagactggaaagcagtttctaacgattcttctgcggcttccacataaggcatggaggatgggcagcttaccaagatatcttcctcgcctgacacgatgaccaagtgccccttcactatgaatttcagcttttggtggagtgtagaaggcacaactcccactgagt

SEQ ID NO: 239514 - DNA, 347 bp, Glycine max
agcttataagtgcgggtctgggagacgaaagtcatgtggtcgcgatatgtgaagatgatgttccaagaactctggatttggtccgaccatgcccttctgattttcagctgggaaattggcgggtggaggaacgtcccggcatttacacaacaagcataatgtaaacctttacgggtttaaaagctctatagttgggcctaggctttagagttttcattttgttaaggctttgtgtcttttgtctttgaatttataatacaaagatctttcttcatctgttcctggtctctacccattctcattcatttgcatggttacttctttttctaaaacggcagatccgatga

SEQ ID NO: 239515 - DNA, 431 bp, Glycine max
  unsure (1)..(431): unsure at all n locations
ctaagcttgagccaaatcctgactcaccatanaccttgacccaggtgagaatgccaatccttaccctcggaagcaaaaaaaaggagaagagaaggaaaatttccaatcaaagaggaagcataaaaaggagagaaggaaaatttccaatcaaagagaaagaaaagaagaggaaaggaaattcccaatcaaagagtgggagaaagaaaaaagaaaagaaaagaaagaaaactcccaatcaaagaatgggagaaggaaaaaaagaagtaaaaaagaagaaagctcctggtcaaagaaactagaagaaatgtgcagaaaggtcttttgaccggacgatatctgaacaatacagaattgtcaccaaatgaacaaaaaaagaaggaaaggaaaccacgacctataatggtcttctccctttaattaccaaccaaaat

SEQ ID NO: 239516 - DNA, 443 bp, Glycine max
  unsure (1)..(443): unsure at all n locations
agcttcttatccaagacactctcttagtggagaaactccttcttcttagcttattccctagtggatgacgccttccactcatctcttctcctttatcttccgctgcatctccatggtggaaaatcaccattgatggacattattgaagctcaaagatccagtctccatagaagcttcacaagcaagcttcgattagttagaccacaaatttcattttatttaagggtaaaatataattctaaggtaaagtttcgcctttttttatcgttacaagcataatattataataatcacttcaaaaagtgacaacataantaaaagagatatatataaccatttattaattacaatcataatgtgttatacaataaaattatcaaaataacatctttcattacctagtaaacatgatcatgtaccatcattacaattatccaatatat

SEQ ID NO: 239517 - DNA, 272 bp, Glycine max
cccggcatagtcggtcagtgagatcctgtgatgtacctaagcaggcgagctcctggcagtcaacacataaaaggaaaacaagaccacacatccacgaggcttgtggtggctggccacctgtgaattttgtgtaatatgtgagatatggcctctggtaatcgattaccaagggtgggtaatcgattacaaggcttaaaaatgaatacaagaggctaagatggtctctggtaatcgattaccaagggatgtaatcgattaccaggcttgaaaac

SEQ ID NO: 239518 - DNA, 317 bp, Glycine max
cgctactagaacacacaggagtccacttataagtaagggatgagattatcgtaattggggttagaatgaacatctgtaggaatccttacggtatcaaattgaggcttattttgggatgtctattgtatcgaaattttgcctgtatgatcatgtaaaattgtgtgaggggtttactccccatggattgagaaacattgttgttcaattcgtttgtgtttatgataatattaacgtgataaatattgggatcatgaaataatgattgacaatatgtataagtgataaatttaatatgtgatgaattgtgggacaacatg

SEQ ID NO: 239519 - DNA, 460 bp, Glycine max
  unsure (1)..(460): unsure at all n locations
tanagggattatttagatggaattcttctagtataactttattcaatgatgccatactcatatccatatgatctattcttgacaacagaaatctattgctcaataatgtgagatcctgtcccagcaatgaatacaaatatatatgtgatcattatattaaagcaaatacagtttacggcccaagacaaaataaatagatataacgcccacacaaagtgtcattcagcaaaaacaagtgtaaaattatcctagaattagcaaccaaattagtagttctaaagagaattgtgatatttacgcttttgtaccaagtaaagtaaattatgaaataccttctttctattctattttcattttctttagcctgacagcctcacataaaattaataggaagtaaagttcataaggagcttgacactactcaacctcaggagattcacgactatcatagcaaaataac

SEQ ID NO: 239520 - DNA, 570 bp, Glycine max
  unsure (1)..(570): unsure at all n locations
ttatattcactgntcantcaccaacttaatgattctaaatcttcnttacacctctntcttcntnncccgcgcagggtgatgcnttgatctactancccgcgacctnnananncnacctgcaggcatgcaaactaggactatntaatctgataagctctataatttttgagccaccatttaattaaaaaagtaggttaggccagactttatgtaagccaggacgtaagcccctgctcgcatggcccggcctattctcacccctaagaatagggatttcggaatacatcggcaatccacaaataaatatgccaaagacctattccaaaatatttacttatggcatcggattggcacactacatttatggcacataagactacatctgaaaaggaatgagtcaagccgaacaaagctcacttcatggcgtggtggccaagcacacatagcaaaacctgctttgaactgggcgcccaaaggaaaggaagtgacgtgtcggtctgaccgacgaaagaacgcagaggatattaaattatgagggcggaacaatttctaacgagattcctttaatcn

SEQ ID NO: 239521 - DNA, 362 bp, Glycine max
  unsure (1)..(362): unsure at all n locations
actatacaatctcaaccttgggaatagcctacatatcacgttctgtgcgcgctgtattgtctaatccaatanaaagcacacgttactaactgaaactaaggtgcgtgtggattatcgttgaaaccacgctgcacagagaaattgcatgttccaacgcaaaaattatcaagcaactatgctgtagctttcatacagtatgttgcagctgggttcaattgcttctcaaacacacaccaagtgccaacagagttcgcattacctgctctgacaaggcggcatcatcatccaagctatgagaggtcactttctcagtaatatgaggtccatttgcttcaagtatcatcctctcacgaaaaataata

SEQ ID NO: 239522 - DNA, 338 bp, Glycine max
  unsure (1)..(338): unsure at all n locations
agcttctcccgcaattttctataaatagggtgagtattgaagtagaaaaaggttcagccccttaagcacttctttctctctcgaaatagctgaggaaaattagttccgtgaagaaaatccaagccgaggcgcttgtgtaacgtttccgtaacgtttctgtgagtgatttcgcgaaggtttttgaccgttcttcgacgntcttcattcattcttcatcgntcttcagtcttcaccgggtaagtacctcaaaccaagctttgtaattcattctatgtacccgcggnggtccataatatggttcatgtatttgtattctcgttntcatttactctttatac

SEQ ID NO: 239523 - DNA, 475 bp, Glycine max
  unsure (1)..(475): unsure at all n locations
tctacttatgtggcagggcgggcttccttcactttcttgtctctaacgcgagctttgaccaccgctcttacttcctgcgatgcttctcttcatatctgcctgagtgggcttatagcctaaaccatacttcccatgatttcctttggcatttatcaagctagttatgccgccgctgtctttgcctaaacccattccgggttcgtaaccgttccccaacataactcgggccatcattactgctgcatcggacaggcaagcttgcccaaagaacgagtccacggaggaaatgcttaccacctcacaagactggagagcgngttctaatgactcctctgcggcctccacataatgcatagaggatgggcggctcgacacgatgtcctcttcggctgatacgatgaccagatgccctctcactacgaattctaactgtcggtggagtgtagagggaacaaccctcactgagtggatccat

SEQ ID NO: 239524 - DNA, 440 bp, Glycine max
  unsure (1)..(440): unsure at all n locations
ccatatattatataagatctgaacaagataagataagattggatgaaataaaatctccattagactagataagaatggatgaaataatctctcaatgaaataaactcctcatcagatcacaattaataaaataaaattgtctgctctcttcaagttcaagcccaattcccggatccaagcccaattgcttataattctccctgaattaaaataaaaacacacaattagtccagtaggccccaatgataaaaatgcataattaatttaaccattaaggctaatcggtaattaaaatggtgacaaacacggctacgaaatangagaaaataatgacacctctctttgcaataaatgccactctactnncgaattcttgaagatatgttgatgatgaaaatacatacctccccccgacactttgttgggaaagcacctgcccg

SEQ ID NO: 239525 - DNA, 385 bp, Glycine max
  unsure (1)..(385): unsure at all n locations
tgttcttgattgttcctcagttattctacacgcatggagacatttacttggccttcattcaactgcccttgggcttgacggccacgctcaacaaagtactttcgagacctactgtacggtgatttcgccaatgctgttatgggaatgttgcgacgatcctttaaaaccttattgaatcattctaagaggctcgatgtcatgtgggcatatcgacgcccttctctatcgtacagcatcgaccgtttttcctttgagatgcgatcaatccatgctgctatggctggactcagatcacaaattttctgtaaattgtgatgacgacatgtgatcgcatggagtgtccgctgcataaacttagttatgaataacagttntaactatctat

SEQ ID NO: 239526 - DNA, 489 bp, Glycine max
  unsure (1)..(489): unsure at all n locations
taagtcacctgaggcatgcaagcttgataatgatcccctatcaatgataattctatattatatatagtggagcagctatttgtgaagaataaatggtatatgtacgaacaataattttttttatatgttgttatttaatcagaaatgattatacataataaatttattaatatttataataattaaataaaaagttatattaatattttctttattaacgctatatattgtaaatttgacactaataatacatgtatattaaactcattntgaaatcttgaacgcttactcattctaggtataatgtcacactgaatgtttggagtaacaagaggtgaaatccaagacaaaagttntatgatagggagggaaattangtatagagacctatatttaagaattatgatcaatagtaacttctaaattattggtatagaatttatcaagtcttttttaacgtaatagtagcatagagtagagtttatgata

SEQ ID NO: 239527 - DNA, 270 bp, Glycine max
  unsure (1)..(270): unsure at all n locations
agcttgtcctctccgatggaagaataccgtgacatatgtctcctgggccttataaaggacaatgaagtcaaagtcaacctatgcttgtacctactncatgccaattgaatggccacagcaacccaagttctccaccctggtgagtaataccttgcacttctcttcaccttttccttaacaaatgtgtacctgaaatgttgtgtcacatacttcacgtcctgtgctataaggccgaacgcctcggtggtttccaacgtgatgagtgtggat

SEQ ID NO: 239528 - DNA, 287 bp, Glycine max
  unsure (1)..(287): unsure at all n locations
tacccttcacagtcgacactgatgcttctgcaaacggaatggtggcaattctgtcacaacatgactcacccaattaaagcttttcatgaaaccctttactcagaaaacgcatcgggcgtctacttactgaacacagctgantcctactcccacctgggtgaagaaatggcgactatatattctcggacacagcttcacacatcttaactgatcatcctagcttgatacaagctatgacccacgtcgcccaaactctacagaaccatacctacttagtgcgattaatg

SEQ ID NO: 239529 - DNA, 353 bp, Glycine max
  unsure (1)..(353): unsure at all n locations
agcttctaagtcattttctgcttatctctcacacttaactnngaaacccttttgttcattactaaacaagctaaaatcacaatcacaagcaagatgtactatctacatgctagaaagaaataaaatgagaaaagagaagggaaagaaaagtcgggttgcctcccagtaagtgcttctttaacatcactaccttgacgcatcatcctgatatccacgatccaataatgttcccacttccaagaccttcttctcacgtcttctttcttccatcacatgaaccttatgatagatattccggtcaggtggctctctatcattacgaaatagatcaaagctgatcttctgatcttcta

SEQ ID NO: 239530 - DNA, 309 bp, Glycine max
  unsure (1)..(309): unsure at all n locations
tatggacaataaaatacgcggtattgagaagagcattttgaaagaagcttctgtgcctgatgctgagaaagatgttncactatcttacaccccgaatgtttctgtgcctgatgatgagaaagatgattctacatcttccggcctaaatgctgagggactccctttatccacgggagaagaatcaacagaagaagaggatttagccctaaatgagactcctgtaacgcgggcgcctgaagctgctgcagtgaactaatgacctgtagacattaatgtgtgaagaaccattgccacacgtggccctcgttt

SEQ ID NO: 239531 - DNA, 360 bp, Glycine max
aaagctaaaattcattcatatatcttagaaaccaaaatcagcttctatctaagagaaaatcatcttcaaagtaggtcacttaatcatgaaaaactctaagtttcatattggacaaaataacctcatgagcccctttcttttcctatatatagaggagaccaacaaaccatatatgaccaaagaattaagtggaattagtgttaggcaagaagctcctcaatcaatatttttatatttccttttgagttttcaaactcaaggaatttagacggcttgagaatgtgttttaaatcacaatcaagtttttgtcataataagaagtgtcgtggatatcatggtggacaaagccattgggtcaat

SEQ ID NO: 239532 - DNA, 487 bp, Glycine max
  unsure (1)..(487): unsure at all n locations
tagcgtgaaagaggcatactgagactcaactctctaatgaatacatcataagcctgagtatctcattgttgggagcctgacagaccaacctcttgtaatataactcttccttactatctatttaatgcaatcctgcgttttattgttcttttatgtgatttgttgctgttgattgttgtctggcaactcatactcatgcattgtttagaaaataatacattgaaatatggttattttctaaagaattgggaaaggacatcaatatgaaatcattgctaggaataaactgatgtttgtttagcctatttcatgcatctttattcttaatctaatttactattttatctctactaaggaattcgggaaagaaaatagataaattangcttatcatgcggcgaacccaagatagagtatcatagtagaggtgggtganaaccgagataacattagatagagaaaaattattaaagtcgcatcacaagtag

SEQ ID NO: 239533 - DNA, 226 bp, Glycine max
gtagtcaaagagaagttcaagtccatagccatcaaagtctgaagagagtatgatgaactaatggacgtcaatatggtcaccgatgaagccttggaatgagaaacccagaatgcccgaaaggaagaacacgaccaaaacaagttttgaggggctttatatggcagcaatagtgagctcaagctccgaagaggtgaaaggaatcatcacgggtcataggcatgatctg

SEQ ID NO: 239534 - DNA, 463 bp, Glycine max
tagcgctcaataatgttcttgtgaattcgagtaactaacctgcgaattcacaagacacgatttcacacgagtaaaagacaataaacccatacaaaaaagtggattacaagtatcatataaagatttatgattttcgcgttataaagtcgaaattactttcacgacttacttttaaacaaaaattaattcacaaaataccttatttaataattttgaaaaaaattatcccaaatgataacaaaaacccatgtagcaccttcaagttctacggtcacctctctcatttatagaaccaccaagattgaatttacagccattgcccatagatcaaagtacctcagctttctgaatgtctcattggccatatctagttccggaaaaactcttctctatttatctattggaatcttcaccaaaagagatatagacacacaatcttatgagtcctaagtctgacccatag

SEQ ID NO: 239535 - DNA, 328 bp, Glycine max
  unsure (1)..(328): unsure at all n locations
tgcaagctggaatcatttatcctatctcctacagccaatgggcgagtcccgtccaggtagtcccgaagaagaccggcctcacagtgataaaaaatgagaaggaggagttgattcctactcgggtgcagaacaggtggagagtctgcattgactataggaggctgaaccaagttaccaaaaaggacaattttcccctgccattcattgaccaaatgcttgaacgcctggcaagaaaatctcactactggttccttgatggtttttctggttatatgcacaatactattgctcctgaggatcangaaaagaccacattcacctacccctt

SEQ ID NO: 239536 - DNA, 479 bp, Glycine max
  unsure (1)..(479): unsure at all n locations
ctcagcttctaaggaagttntctcaagaaagcttctcaaggaagttttctaagaaagcttctcaaggaagctacctagtctataaatagaagcatgtgtaacacttgttgtaactttgatgaatgagagtcttgtgagacacaactcaaagttcaacttctctccctttttcttccttcaatttcgtgctcccccctctctctttcttttcctccattgaagcatcctctccaagcttcttatccaaggctcatcttggtggtgaagctccttcttccaaggcttattccctagtggatggcgccgcttcttacctcttctcctttgtcttccgctgcatctccatggtgaaaaatcaccattaaaggacctcattgaagctcanagattcagcctccatagaagctccacaagcaagcttccatcaagtggtaatcagagcacaagagcttcaagtaggtgctccttanacctccatt

SEQ ID NO: 239537 - DNA, 345 bp, Glycine max
  unsure (1)..(345): unsure at all n locations
agcttgatgtgtttgttgaagctaataaaattatgctcaatattgaggtaacaactttccatttgaggtattntatgcgtttcttcctgcatatatctgaagccacccagaatgaacagtttcacttttgagtctgattggttcttttcgtgcaaactcggttccatggccaagataatgtctaccaggcatttctagccatattgaagatgcacaaagacggaaacaggactcccctgcagcttacgaggaggttagcctaatattttatggcagttttatattggtccttctatttttcttacacttcttttgggaaactcatttaattatttattgaacttc

SEQ ID NO: 239538 - DNA, 466 bp, Glycine max
tgaagtgaacacgatatgacttttgtacaacacacaaaaaggatgcctgatagatcaaatatatgattcttgcctacgaacttaataggatatgatttttgtataggaatacggtgcgataggatatgatttttgtttggttaggaacgtaaagtaaaaaaaacctgatagaaaaaggatatgatctttgtataggaatgtaatacgatatgatttttgtatagcaatgtaatacgatatgacaggatatgaattttatttgctctagaatacaggaacgtactaaaagataaaagaaacctactatgaatagaacaaggaatgttaatagaaatacgagaactaatacaaaatcatgagaaatagaaaggaacacctgactcacaccttgtaattaaaattttacttaattatacgaatggaatctgctcgtttcttaaacaataatatacgtatctatatatat

SEQ ID NO: 239539 - DNA, 146 bp, Glycine max
  unsure (1)..(146): unsure at all n locations
gtaactaactaactaaaacaactaacactaatatatagagtgactactcacaaggaatggatgggccttgattangctcatctaatctatttaantaaactaactacacaacacaaaacctaaactcaacccaattattcaagtga

SEQ ID NO: 239540 - DNA, 90 bp, Glycine max
atgatgatgctcgtgatgtttatgtgctgaaatttatgatggacacactgctacagatgaagggtagagttaacctacggctagaaagcg

SEQ ID NO: 239541 - DNA, 347 bp, Glycine max
agcttatatagaaagttcgttcctaatttctctattattgcatcacctctcaatgagatagagaagaagaatgtggcatttacctgtggtgaaaaacaagagcaagcctttgctttgctcaaagaacagcttactacggcacttgttctatctcttcctgacttttctaaaacttttgagctacaatgtgatgcttctggagtgggagttggagctgttttgttgcaaggtgggcaccctattgtcttatttagtgaaaaacttcatggtgcgacccttaactactccacctatgataaagagctttatgccttaataagagcactcagaacttgggaacattacct

SEQ ID NO: 239542 - DNA, 382 bp, Glycine max
taagaggtatgacggtgctaatggatgttttccttgatatcttatggtagaaagattgtttaagaaggagtgcccttttgatatcaccttttgttgcaaaatgattctccttcttaataatcttcttggaggaatccttctcctctctttccttccccttggcctctaaagacaaggccttactatccttgcttttctagtttttcttccttatccctcttacctttcatagttagtcgatctttggccacctgtgaaggtgtttgacgatgctacacatatacagtgccaagatgggtgaggtgtattccactcgatacgccatctgaaaagatcttcatataaatcgacatggccttcctagaagaatatgtcctgcctc

SEQ ID NO: 239543 - DNA, 168 bp, Glycine max
agcttgacttggcgatttgattatacccttatttttactttagttattagccaattcaattaagaatgagacatcccaaagagaaaatgtccgattgatttttgtgcttcatcttactaaaagatatatcttcttataattatattattattatacctctttttttta

SEQ ID NO: 239544 - DNA, 342 bp, Glycine max
  unsure (1)..(342): unsure at all n locations
cttcgtcttacagacagcaacaaataatggttatactgttctccactcgagtatttccgccagtcagcgtgactcanatgtgagtatgacagatcttgtgagcgcggaagatgacgtaaatctccgcgtgccaacgggcttgtcggctgagattgacgaagggcgcaaaagacgacgttagtctttgcgtgctatcaggcttttcgtcttacagacagcaccaaataatgtttatacggatgaccactcgggtatttccgcctgtcagcgggacttaaatgtcagtattacagatcttgtgagcgcggaatatgacgtccatctccgcgtgtcaaccggctc

SEQ ID NO: 239545 - DNA, 313 bp, Glycine max
  unsure (1)..(313): unsure at all n locations
agcttcggtattcaatntcgatcgtctcgatgtattacgtgactcaatcagacatctgagtaaaaacgttattgtcgcttggaattgctgaaagcttcaacattcaatgtcgagcatctcgatatatttcgggactcaatcagacatccgagtaaaaagttattgtcgtatggaatttctgagagcttcaacattcaatttcgagcgtctcgatgtattatgggactctatcagacatctgagtaaagaagttattgtcgttggatatgtgccagagcttcaacactcaatttcgagcgtcttgatgtattac

SEQ ID NO: 239546 - DNA, 436 bp, Glycine max
  unsure (1)..(436): unsure at all n locations
tgcatttggaattgcgaaagccccnctccatcattatgtattgttcctgctatctcanacaaacaaatcaaacgtaacaagacaattatagttgctgtttgaatacctcacccactcaagtgtatcacacaattatggttgttctctaatgaaacactcttgccttttaccactctaattccncttgagttcttaggcaattcaagagattatggccacaacaaagaacaattcaccaatatgtgtaacgtaaggctagagagacaaggaaaaggttaaccaagataaaggctaacaatgtttttacgcacaaatgaaggaaataaaattcagaatttaggaattcaagtaacaatccttcatgcaaccaatatattaccttacagagattttnttattaaagatcttcaagcatgaaccattcagcccaatttta

SEQ ID NO: 239547 - DNA, 268 bp, Glycine max
aaacatgctctatattcatctcccactccaaggaaggcctcggatcattcttttcctttaatggaggaatgctgagtttaataccatcaattcggttttgtctaagaacaccatcattcccttcttctctcctttcttcttcattatgatctctattctccatttgaaccaacctctcatggagcgcatcatctcgttgtttcatagacctctccaaatgttgcatcataacttgcatttggaatcgcgaaaacccctctccatcatt

SEQ ID NO: 239548 - DNA, 518 bp, Glycine max
ccgtgtgcatctgtcctacgaacagaacactaagccttactcgatgtgcggcgtgcgcataccacatagatactctgcatatttaacagacgacgctctccacagagccatatggtgatgacgtcttcactatcgtgtaacactgcggcgcaagacagtattgagatatcttgaagaacgtcaactgcaattctccagaaattcacacggatttaagtgtgaactagcatgtaagaccctcgcgcatactatatgcagactcttacaataggagccgctatgttcctaataacactatcaggttatgactcttaatgtcgcaggccaaatcacgcacctgacttatgtcgaggctggcagtctaacaccgagaactctctagagatctcaatagtattagcgtgcaactccgatgtgcgcttcgagcccatggaacctcaccatcccacaggattgcgaccgatgctctaagacaatatatggtctctctttcacatgatggccacaaagccctgtcg

SEQ ID NO: 239549 - DNA, 411 bp, Glycine max
  unsure (1)..(411): unsure at all n locations
agctntgatgttgttattgcaggcaatatcacatatagaaacagcttatgctttcgttggagagagctctgcaaccaaatcctttatagagaacatggaagaacaatatcttatatgcaaaggggaggcacttgtgaagggagttaggatagggatatatcacacagagagtttctattctttggctctcattgtatgggttggagttgttgtggttagagccgaaagagcaaccccataagacataatgactgtcgtgatgagtattctctctggtgccatgtaaggaagacatcaccttcacgattgtttagaatggagaaaatggttaataattaataactaagtaacaatagtctccttgtgaattgcatatctctcacttacgcatcaccagacatgtnnaatatt

SEQ ID NO: 239550 - DNA, 56 bp, Glycine max
tatgaaacacattattgtttctttatcatatttctagctagcttgcagttaatctt

SEQ ID NO: 239551 - DNA, 312 bp, Glycine max
  unsure (1)..(312): unsure at all n locations
agcttctccanagaacacaggatcatcatcatactgcaggatatccacaggaaccttgttcttccccaccaggaagcttttgaaacatgtttgagatacttgttgcctcataaaccctgttaggccttcagccactaaatcaaagagaaaaggggccaaaggatctccttgtcgcagccctctttgaggtttaaactctgaagtagggcttccattaacaagaatagatatggaagctgaagagaacaggcctttatccatctaatccatctctcatgagaccccattctcttcatatataaatgagaaatt

SEQ ID NO: 239552 - DNA, 294 bp, Glycine max
tcttgaaccctcaccgcgcactctttcataatacggagactcctgacacccatcaagtgtacccctttctatgctctctggacatgaatacgcctggttggtttgcaccaaccacgcggatatgaatggaaggcttcttgccacttcattggctctttaaagtcgcatacttcactatattattgctcgtatcttactccccagatcttcaaaccttgcacacgtttctgaagaagatcttatagtcatgtgggcctttcatatcgaccgaccaagcgattgggccacttaacc

SEQ ID NO: 239553 - DNA, 405 bp, Glycine max
agcttgccgatatagcagagcttgctgtgagagagtatccaagtgagcgtccacctatgtcagatatagcatcttggttggagcaaactgtgaaggacggattgatcttatagcattaatcattgccctgtgagaaacttgtttcgaattttgatccatccacaatatcttctttttcataaatttctgtgagtaatgctctcttctgcgattgtaaaatgttttgagtttgttgtaaattgcttatctcctttgtagtagttctttgggtttacttttcctaatcttcacgaagtgaaggacatggcattattgcaacatacacacattgctgtgaatttttttcctctcatataagcctaagaccattttcagcatacagatagaatcaattacatgtcaaca

SEQ ID NO: 239554 - DNA, 375 bp, Glycine max
tctctagcgtggcgtgcgtatgatgatctacttcagatgaattatactctggcgctgatcgaagctgtgctattagatgctgagcaaaaaagatcgcacaacaatgcgttgcatgaatggctgagatatacacagcatgtgttccgcgatgcccaaaacatattccacgattttgagtgtgaagcattgcacaaccgcgttgtcgacactcacggtagcatttcagagaacgcgcccggtcttgactaataacactatcatttatcgccttacaatgacgcatgagatacaagacattaacatgaggctgaggaatgtcgcatatgatagattcgcatttgttggccttgacatcattggtggtgatacacgtgt

SEQ ID NO: 239555 - DNA, 463 bp, Glycine max
  unsure (1)..(463): unsure at all n locations
ttgagcaattcanatggtcataaatagtcactcggaggtcctattcacgcacataatttatcgagacgctctaaattgaacaacggaagctctcataaaatttaaatgctcataacttttaactcggaggtccgattcaggcggataatatatcgagacgctccaaattgaacaatggaagctgttgagcaattcaaatggtcataaatagtcactcggaggtccgattcaggcgcataatttatcgagacgctctaaattgaacaacggaagctctcaagaaattcaaatggtcataacttttaactcggaggtccgactcacgcgcataatatatcgagacgcccgaaattgaacaacggaagctctcgagcaattcatatggtcataacttttaactcggaggtccgattcaggcgcataatatatcgagacgctcgaaattgaacaacggaagctctcg

SEQ ID NO: 239556 - DNA, 366 bp, Glycine max
  unsure (1)..(366): unsure at all n locations
ctcaatagtgtaatggttggacacatcacaaatgatagtaccactttgttaccatattacaattagagttttaagtacaataagaaaagaaaagagacgaaaatactaagaaattgatattgacttgacatgatgtgatttgctaaaatgtgtggatatgatatataaaatcaaaagcatcaaccctttttaaggaaaaaaatcataaaatattagaaaacatttaaactaagaaaatagaagataataaggaaataaagaaactaatcctaaataccaattaaaatgctctatgatatgacaaagatnactatggatattttcatatactttaccaantattagtctatgtaaagcaagaatcat

SEQ ID NO: 239557 - DNA, 493 bp, Glycine max
  unsure (1)..(493): unsure at all n locations
aaggtagtcatacctcacaatatatatatatgtatgtttatgtagaaagataccttggatatgcatgtatgtaacaaaaaatatacttcacaaaatatatatatgtatgtttaggtaggaagataccttagatatgcatgcatgtaaacaaaaaatatacttcacaaaatatatatttgtatgtttaggtaggaagataccttagatatgcatgtatgtaaacaaaaacatacttcacaaaatatatatatgtatgtttaggtaggaagataccttagatatgcatgtatgtaaacaaaaaatatacttcacaaaatatatatatatatatatatatatatatatatatatatatatatatatatatatatatatatatgtgtgtgtagggacgaagataccttatatatgcatgtgtgtaaacaaananatacttcacaaaatatatatatgtatgtttaggtacgaagataccttatatatgcatgtatgg

SEQ ID NO: 239558 - DNA, 352 bp, Glycine max
  unsure (1)..(352): unsure at all n locations
gcttatgcgcatacttctttacgaacgttcacttgcacaagacattcttataactaagaaaaatgcacccatgtacaatcaaggcaccttcgttacctagattatttatatgtacttccaaggtgtatttgttacctacatctcatgcacttccttggctaaatttacatacatgcgtactcaaagcatttggggtaccaaaaattgcacatgtgcacattccggtatttctaatacttatgcatatacaaactttgtgatgaatcttggctatctacacaataaggtgatacatttcatgctntattcaagtggttttgctacctaaagccgcatgcaaattcaagtatag

SEQ ID NO: 239559 - DNA, 476 bp, Glycine max
  unsure (1)..(476): unsure at all n locations
actaagcttgcaactcttacaacanagatcgatcattntgaagtaattcacttagtatatataatttgtgcaagttgttgttgttggtgttgtgcaatttgtccttcgtgcaatctccattatgatgtttcacatcagattctaaaactcaactttcaacaaaaaaaaagcatctccaaatgttttcaacttcattcgtgtaacgaaccctcagtaattgtgattcatatggaagatgagatgttgccttatgtacaaaattgatactacaaactcaaagcaagtaatcctgatgtagtttctgctacaacttcattctgattctggctnttcatagtagtctctaatgcttcctcttagagagaccttcttaatgtctttgatactctttcaaaaagagaaattgggggagtcgccactaacatttatttaagacaaacatatggaaaacaaacaataaataacgaatgatctac

SEQ ID NO: 239560 - DNA, 442 bp, Glycine max
  unsure (1)..(442): unsure at all n locations
acgtgatagttgcnttgtttttctttatgttgtaattgagattgagtctagatttgcatttaccaaaagcactttgtgtgaatgtaagaatgtatttggcttctcttaaattttttatttgttattctggcaaatgttagttattagtttgtgagttctctcacttcatttcttcctttaatcaccaaaccaaccttataacttctttggtttctcttagttattaacaagaaaatcaattattgatatttgaacatgttcatgatttgttatgcatatacacataacattatgagctctttgantttntaattaatgactgagataacttaatttaccctttagagtgaattgctcactacaaaggagctagatcttgtanggaatgaagctntangtctatacactggtttttaattttactttctgtataacaatcatg

SEQ ID NO: 239561 - DNA, 486 bp, Glycine max
  unsure (1)..(486): unsure at all n locations
tctagggattaaacataattaagggtattgaaaaacaaatatttaacagaaacattgtatgattctttttcttgggaattccaacggcatgaatgagttgataattggttgattttgatccacaggtcactcaattgagatttgaagccaaggctccaattatgtggtaaattatgactattattgttggcaacacctaaaggacatgacaacttcacgacgagcatttaagatagatagaacaatcttggttcagatctggctggagagactgcagcagccatggtagttacttccattgtgttaaggaaaaccaacccacattactctcacttgcttctacaccaggccatgcaagtgagtcattactcaatgctttgtgtcctagagatcacaattgaatgcactattatactntgaattaaaaataaaatagattagtactgcaggtataattcaatctacgtatagtatatatatactact

SEQ ID NO: 239562 - DNA, 90 bp, Glycine max
ggctgaaaaattccttaaaagtgacccttttgcccttctttttaaaattttgcacattttcttctgaaacatcacaaaaccctaccgaat

SEQ ID NO: 239563 - DNA, 299 bp, Glycine max
  unsure (1)..(299): unsure at all n locations
ctacttgatccacatgggctctattgtgcttgttactcggtcacgggtaagagggccgtgaaagaaaggattataggctcacagagtgtttgagggttatattgagtaaaaacctcaagagcattgctcgtacctttgggttggactctattccttttgtcttatacattaatcttccatcgcacttttgtgcctttcttgcaaaaaatgaagatcttttgcctctctttctcttcactcgcctnttgcagatangatttattatgttttttattgctacccaacttcatgcatgtgtt

SEQ ID NO: 239564 - DNA, 379 bp, Glycine max
atcttaagtcacctgcggcatgcagcttaacatttcaattcgtgcgtctcgtatgttactggactcaatcagacatccgagtaaaaagttatggtcgtttgtattggctcacagcttcaacattcaatttcaagcgtctcgatatgttacgggactcaatcagacatccgagtaaaaagttatggtcgcttgaattggctgagagcttcaacattcaatttccagcgtctcgatatgttacgggactcaatcagacatccgagtaaaaagatatggtcgtttgaattggctcagagattcaacattcaatctccagcgtctcgatatgttacgggactcaatcagacatccgagtaaaaagttatggtcgtttgtattg

SEQ ID NO: 239565 - DNA, 469 bp, Glycine max
agctgaccttctggtcctcctcatagttgtggcatgagatttcatgctctattttcatctcccagtccgagtaggcctccggatcattctttcctttaaatggaggaatgctgagtttaataccatcaattcggttttgtctaggaacaccatcattccctcttctcctcctttcttcttgattatgatctctattctacatttgatccaacctctcatggagcgcatcacctcgttgcttcattaacctctccatatgttgcatcacagctcgcattcggaattgcgaaagccccactccatcatcatgattagtacctgacatctcatacaaacacatcaaacgtcacaagacaattatagttgctgtttaatacctcacgcactcacgtgatcacacaattatggctcttctctaatgaaacactctagcctcttaccactctaacttcccttgagttcttacgca

SEQ ID NO: 239566 - DNA, 271 bp, Glycine max
  unsure (1)..(271): unsure at all n locations
agtgaactttatagcgggggtgatcacagaatggaaggatattccagttgagcttttgatgcagattttgtcacttgtggatgatcaaacggttatgatagcttctgaagtttgtcgtgggtggagagaggcaatttgctttggcctgactcggttatcactctcatggnacatcatctgtttttttaccttcccttctaatgctttatttcacttttgaggttattatgcttgtggaggcagtgaatattgaaaagggtgattttttttt

SEQ ID NO: 239567 - DNA, 474 bp, Glycine max
  unsure (1)..(474): unsure at all n locations
gaagaagaagaagttcaaagagattcttggcttgtaaaggattgtaatgaattgattggatagaaagattctttataagattgaatgaataattgaatccaaaacaaagcctcgcttttatagactcttcatgtctggtcaagaggaccattttgaagagttataacttttagaaaaacttacaaccaatttgaaaaagtcgtaacccatttgaagagttacatcttttgatttattcagaaacaatcactgataatcgattaccaaaacagtgtaattgattacacaaagcttttatgtgaaaggatgtgactcttcacatttgaatttgaatttcaacgctcaaaggcactggtaatcgattaccaaaacattgtaatcgattacaaatttctgaaatcaattggaacgttgtaaattcatttgaaaactttttcacatccattntgctacaggtaatcgattactatagag

SEQ ID NO: 239568 - DNA, 407 bp, Glycine max
gcaagcttggcttctacttttattgccgacgttttatgatgtatacaaacatgccactcaactttatcatataacattcataaaactaatatatatatatatatatatatatgcttggccaacatacacgcctggtcacgaaattacagtgctttaatttggaagagaggattgaaattaattcaggatgtgaattgcgaaatatagaaataaactaatcagcgtgcaacaaccgggtttaccttggctgagcaattacttgtgtgagcattataaattctcttacacttactttaattcttatgggaaaagaaactaatctatccacaagtaagtcattgatttgaatgtattacattcgaacttttagtgactatttggattccaatctgaaaaaatgtgacgat

SEQ ID NO: 239569 - DNA, 475 bp, Glycine max
gtaatcttcattacctaatggtttattatgctcccattttggactatatgtcatcaaagactaaaatttgtgctataaaggcatgcatatctatgaggacagaatggaatatccaacaatcgctactatctctgtagataaatgaaacggaagctacatttatttctggtggcctgaacatgctagtaagtaattccattgagatctgaccactatatacatctttaatgagatatatccaccaataccggagagaatcagtctatgaagaataatattaccatgatgcaatacaacaaagtagaagaactggccataacttcattcgtgctaaattaattaaaccaaatacatatttaatgggtataacttaattgacaatactagatagagctcgcgggaaaaaaactaccatacatttccataaatacattcttgtgaagggatgaaacatgttaagatgtgcgactaagat

SEQ ID NO: 239570 - DNA, 342 bp, Glycine max
cttatctctcacatggatttcggttttctgataaagaaaaaactaaccctccctttggaaggaaagttgtggtattatgaggaagatttagaaaaatacttccaatcattccaaaagaaagaagataaggtgttgttcatgctagcattaattcataataatctttgcctttatgtaaggttcttactttaacaaaaaatatgagtcttcaatcaaggtcttctaatgaacatgtttcttaattgaaagaatttgtaaattgggtgtggatattggaatgaaactattggtgagattcatgacaaagaaaatgccattgacattccatcttatatgcttatt

SEQ ID NO: 239571 - DNA, 51 bp, Glycine max
aacatagacactcaagactgaggaaacactaaattgcgtctcttcacacac

SEQ ID NO: 239572 - DNA, 441 bp, Glycine max
  unsure (1)..(441): unsure at all n locations
agcttccttaagaagattcctaaagaagcttgagcttagctacacatacctctctaatagctaagctcacctcctcgagatgagaagctagagcttagctacacaccacctataatagctaagctcacccccatgacaaaaaacatgaaaatacaaaaaaagtccttactacaaagactactcanaatgccccgaaatacaaggctaaaaccctatactactagaatggccaaaatacaaggcccagacgaaggaaatgcctattctaatatttacaaagataagcgagctcatacttagcccatgagctcgaaatctaccctaaggctcatgagaaccctagggccttcccttggatctctagccaatctacttggagtcttctacccaatgcccttgcggggtaggatggcatcatttggcacataactaanatttcat

SEQ ID NO: 239573 - DNA, 317 bp, Glycine max
cactttcttgtgtacaacgcgagctctgaccactgtccttgctttccgcggcgctgtttttcatgtccgcctgagtgggcttatatcctaaaccatactctccacgagttccttgggtttttatcacgctagttatgccgccattgtctttgcctaaacccatcccgggttcataacccgttcccaacataactcgggccatcattaccgccgcatcggacagacaaggctgtcccaagagggagtccaccgaggaaatgctgaccacctcaaaagactggagagcggtttctaacgattcttctgcggcttccaca

SEQ ID NO: 239574 - DNA, 257 bp, Glycine max
  unsure (1)..(257): unsure at all n locations
agctttcttgctctctttggtctccatctaccttgaagntgnatgttctccatctaaccatcattttgtctaaggtcgagcatcgtgttcgtcgcactcgagcatcgtcagaagtctgtgcttcttctccttcgccacctcacgtaggtatgtttggtctaatcctgtatgaagtattgattgcattcatgtatcgcacacttagtgaactaaacatggctagggtatctcatatttaactcgagcatcgtgacaac

SEQ ID NO: 239575 - DNA, 395 bp, Glycine max
cctgtattggccttacctgaatctacaaagactattttagtggaggcggatgctatatgagtgggggtcagagccgatctcataccagatcaccattgcatagcctttataagtagaagcttaaatgttcagcaacaatccatgtcaacctataagaaggaggtactacctgtggtgcttgttgtacaaaagtagagacattacttattacctaagcagtctgtaatgaaaactgatcacacaagtctccagtatattcttgaccagagactttccacagctttccaacacatatgcgtggtaaaacctatggaatttgatttcattattgaatacaagcacggaagtgagaaccaagctgctgatgcactctcaagagttgaatgtgctactat

SEQ ID NO: 239576 - DNA, 413 bp, Glycine max
  unsure (1)..(413): unsure at all n locations
agctnttcgattcattctatgcacccatggtggtccacattgggttttgtgtatttctattcttgtttcatttgcttttttataccccttcttgacgtgcttcagccattttacttaagtcatttctcgcttaacttaaaaataaaataaattttcaccgaacgtttgaattgtattatccgttaacttcggttaaaatgaattccgaccgttcggtcgtgccgtaaccacgttggaaatcaaaaagaggtaaaaaataatataataatcaaaaatcatcttttagtaaaataaagcggaaaatcaatcggacgttntctctttgggatttctcattcttaatcgaatggattaataactaaagtgaaactaaaggctaaaatcaattcgcctagtcaagctcgtccataaaa

SEQ ID NO: 239577 - DNA, 415 bp, Glycine max
ctcttaatttcattctctttctcgagtctccttaccaattttcttcaaagaatgataaaggtatgaaatgttacacaattaacaaaataccaatttaacaatttcagatcaaataaaacaaaattagcattactatccatttcaaccattgaactaattcattaatagaaggataagttaccttaaaacgctggaaaaaaagttcctgatgatcttttggaattgctcccgatgtagaaggcttaatggacaatgtgacagcctttgctgcaaccttagatggatgcaacctaaatacaaaaaataatttgtgaaaaactaaaagatcaaatgatgtatcatatataatgaacaataatgtaaattttgtaatacttacactccattgataagtgtaatcatacgacgatcattg

SEQ ID NO: 239578 - DNA, 333 bp, Glycine max
  unsure (1)..(333): unsure at all n locations
ttatgtcacatccttccatctgaatcttggtgattcatgtttgaatctatatgcattccactggacatgcatagcacatttacatacactgctgaatgataaactgtttgacctcactatcaaagctgttaatgatncttaatggtttccattttttgatagggggccaagtgaatgggatgcctttgaatggatgcatgttgagtgctttcctaattagatacagctggcttgcttgttacctcagaaagaaataatttangaagttaaatntcaaggtcacttgtctatcttttgaagttttaaatttaataatttatgacttctgatcat

SEQ ID NO: 239579 - DNA, 495 bp, Glycine max
  unsure (1)..(495): unsure at all n locations
ntanacttgttcttacttgataatggttatagacttatagttataattnttaagcaacaaacaaaagaactcatgtgagaattgactcatggtcaagaagatgttctatttattttaattactatcaatttagaatttatggtgaaataaaaaaataaagcaacctgttaaactcggtagaatgatagaaaatttagataatttatatggcatcttaagtatacatcttattatcaccattatataaaacaaataaataaaattaacaaaaggagaaaataatttatctgccaaccatggattttttttttatacttttatctaatcataaattaacatatacaataaaattgttgattnttttatagtaattattttcaagttatagttatcataattnttaattaactgatagtgtaaaattatatattaataaaatataaattaaattcattaacaaaagaacattataaagtgtctgtgcaaaatgaaatg

SEQ ID NO: 239580 - DNA, 259 bp, Glycine max
atataaacttcttcaaacaaatctctattcaaaaaagcattattaacatctaattggagaagacactagtttctaacagcaacaacacagagcaaaactcttacagtggtaagcttggccattggagaaaatgtatcagagaaattgattccagcttattgagtataccctttggcaaccaatcgagctttgtatctatccacaaagccatcattttatatttaaccttatacacccatctacaaccatacatgcttat

SEQ ID NO: 239581 - DNA, 496 bp, Glycine max
  unsure (1)..(496): unsure at all n locations
actaagctatcttgaactaaccaagccctctggtatggtaatcgattacaaggaatagtaatcaattatcaaaccctaaaacatagttntttctataaaaacttactattgtttactcataaaacctacacactcattgtaactattatcaacaacaattaaagatccaaaatagacattgaaaaacaagcatcataaacttcttaactacaatcatcaagcacaatcaaaaatacaaaaacaatcatcaaaacacaaacaaagacaatcaacgacaatcattaatcttcaaacaacaattaacatgactatcaaaacacaatcaaagacaatcattaagccacaattaataataaccatcagaaacaaactcaaatataaagaaagaaaataatcaaccgatttaactatgtatctaagtcattgctatctaaaagtcctaattctcttctaatagcaaagaaggtttctttggggagaggttctgtaaagatat

SEQ ID NO: 239582 - DNA, 333 bp, Glycine max
  unsure (1)..(333): unsure at all n locations
gcttataactctntcgaagcaatcctccaacccttgcctatgaatcactctgcttgcatgagccttgtcagagctctgtataacctgtgggaataaacatgacaccaacattatgctgaagagaatatttatgaattaggtcctatttttggtcattaaacaagaacaaaggaacttacaacttttcgaacaggcaagcttagcaaaattcccctgagaacagggtcagggttcagcatatcatatggcaatctcccatgaacaaagctgctcaacacacactatatactttttggatttcattatatttaacatgatttctacgattaaaat

SEQ ID NO: 239583 - DNA, 502 bp, Glycine max
  unsure (1)..(502): unsure at all n locations
atactcagctagaagaaataagactagtggctgaggatagatgattagtatctctggcggtttaagttatatgagtgacaacaactctgtacaatattntgatgcacttcaagaacacacacttgagggttttaatctaataagaaagtttgagacggaattcacctaaacttaaatntttataaaatggatttatagaattattaatttgtgatatcgacgatactaaaagattatatatattacgatagaaaatgttattatattaatttattgaaatgatagattttgcttgtatggccgaagttatggccacaaatatatattttagagaaaattattaatttttgaaagtttatatgtaacttgaaaaacttagccaattgttataatgtgaacttatgcttggtattcgactggcgacgattgttagtggagtcggggactgtaacttaccttctagagcctatattattaccataactgtgatgtaatcattata

SEQ ID NO: 239584 - DNA, 339 bp, Glycine max
  unsure (1)..(339): unsure at all n locations
tcatccataaccaatgcgtaatccgaatccactacactcaattgaaattagatcatttcagaccaatcaacatagttcaacccactgaactngattcttaatttactaaaagcaaacatattaagcatagctgtatacacttaaaccaactcacataccttaatgctttgagaaaacttaatggattcaaactacattaactctaatcatgcatctaagttcaccgttgggtgataaataaacacatatccatattaataatgatgcgaattaatatactttaatgggaaataaatcatattattcttgacatgcatgttttctctggaaacacataca

SEQ ID NO: 239585 - DNA, 486 bp, Glycine max
tatctctagaagacaaataaatgagtttctttgtactctcaaattagtttatgcactttatagaaactctcttctctcatatatagctcctttaaagatgaacaaatttctaaaaattaacttatataatttatgtagaaactcttgattcttctttttcttaaagcgtatatgaaaaaacttaccaaaaaagactctgtcattaagaaaaaattatgaagcttatccgttggttttgttttattataagctttttatcttcatgtgcgttgttccctgattcgtagtaattgctaatgtaacatgagtttaatggaacatattgtcggtgtcaaattacagaataaagaaagtagaaaatcataactaataagactcttaacccagtaaataaactaatcttatagcttgatttgtaattaaataatattatacaactacttttagttattgatacatagcctatcctatcatcttacatttcat

SEQ ID NO: 239586 - DNA, 330 bp, Glycine max
  unsure (1)..(330): unsure at all n locations
gatatttcttgcacatcattttctttatttgataacccctggagtgagtagggttggtcacaaacttcatctacagcataaaagtcacctggaattttattagcaagttcatccacttttaatctgtatcttgttggtcaacaactagcagccagtcctgaaataagatagaaatgagatatcttatggtagaaacanaacacatatactctatgtattaatacaaagataaaaaagagtgtacaatcactagttaattaagtgaatgcctaacaaaatgaacgctgctgaaggaaaacaacaatagntactagttaggaattggtaatt

SEQ ID NO: 239587 - DNA, 290 bp, Glycine max
ctctggtttctctgctagggtttccaagtgttaaagagtatgttaatagatcgaagtctgcattccattgtgtgcatgccatgagtatttctcccttcccgaatattaatttaaaaatcccgacggtgaagatgtggataaatgaattatgaacctggcgtccaagttttacaaagatccaacggttaacgagtctgagaccgatgtttgattgtagttttactggaatatgttgggtatatgtggcggaaaaagctacggtgtgaatggcatttatctcacctgaaaca

SEQ ID NO: 239588 - DNA, 342 bp, Glycine max
  unsure (1)..(342): unsure at all n locations
gtcctgcttatattctaacctggataactctgnagatgcatggatcttcagacagactcaaacatatatatcatcatgatataataatttgtgggcaaaaaactctgcgcacaaaagattaataaatataatggaacacacataaattaactatactgcgaaaaaaaaaaaaaatacagaaacatttacattatttagcaccttttagttacatttatttatggaaatacaccccaagacagattactgcttaacaggattatttgtttggttagttaactcattaaattatatataactcataattatttatttatcaaatatttnttatgttaaatcaac

SEQ ID NO: 239589 - DNA, 486 bp, Glycine max
  unsure (1)..(486): unsure at all n locations
catagtctgacatgaatatctaaatataaagttatatctattaaagagtccacataggtgacctcttgatttgcaatcaaatgctctaccactaancgataaacccatttgatattttaatcatcgatgatatactagatttgcaagccagaaacaaaattcatttttgagaagaagcctattgttccacgggaagttgtgcgtaaggccatgatggaaagcagttgcaaacgttcaagcttgtttatgaggaatctatgatccactgctgagctatgtatgaacccatttgatgttttaaaatcaataatattctatttaatgaaaatgttactttggaaaagaaaaaaattaatacaaagggcccaaccgggttcgaaccggtgacctcttgatctgcagtcaaatgctctaccactgagctatggacccaagttactgtcagaggcagatttaacacatnatagtaattgtccattgttatgg

SEQ ID NO: 239590 - DNA, 315 bp, Glycine max
gcttgtaatcgattacacatatactgtaatcgattaccataagagaatttcagaaaatattctcaatagtcacatctttttatttcattcttaaatggccatcaaaggcttatatatatgtgacttgagacacgaatttgctaagagtttttaagaacaaaaaggtcttatcctcttaaaaagtaaaatcgttttatcctcttacaaattccttggccaaaacacttgtgattcaataaggaattatttgagtgctcaaattgttcaatctatctctttcaagagagatttcttcttctcttcttctttattctg

SEQ ID NO: 239591 - DNA, 487 bp, Glycine max
tctacacatacgagatatttcagctcaacttaagaagctaaaggttgatatgtctgagtccttcctagtgcactttattttgaacacccttccgcatgaatatgggtcgtttaagattctctacaacacacataaggataaatggtctatcaatgaattaatgatcatatatgttcaggaagaagaaacgcttgtaatggagatgggtgagagtgcattgctgacaactgcttatgggaagaacacagaaactaagtctcacgctaatcagaagggaaatggtaaaataccacctctcgctgatattaagaaggtggcaaagtgtttcttttgcatgatgaacggacacatgaagaagaattgtcccggattccataaatggtctgagaagaaagggtaatcaatctcattagtatgttatgaatctaatatggttagtgctaatattaacactatgtggatcgagtatggatctactattcatatc

SEQ ID NO: 239592 - DNA, 401 bp, Glycine max
  unsure (1)..(401): unsure at all n locations
atgcattcgggcacctactttgaatctcctatgctatctctacatatataaaacagtcccaccattccaatttcgcaaaatcatattcatatatcattggggcatttcatcgagcacttggggggtgcacgtttggacacaaattgcaagagaatggggacaatgtggcataccccattgcttcagaatacaacataggcctaatgcattctcacacaaaccctcaactcaacaaaacaagcatggattcagatgcgaattgcttcacgaattntgcaaaaaatgagcaactaaagcaccaaaacacatcaatggagagccaaataaccaagggaaatngcacttacttgtggggagtgaattanagcgtganaagggaagcaaaactcaacaatggaagc

SEQ ID NO: 239593 - DNA, 322 bp, Glycine max
tcggacgaacgacatatctggcgccaatgaagacggagaagatgatagaaaagcccgtgttgtgactgccattacaactacagccaagttgtccaccttcccaacaatgtcattactcatccaataacaaaccttgtccttacccaccgaccagttatccacacacgccattcctaaaattaaccacacagcctacctacctgcactttcaatgacagacaccacctttaggcttaaccaacacacctcccaagaaacgaattgtgtcgcgagaaatccttataattcaccccaattccagagtcctatgctgacttgctcc

SEQ ID NO: 239594 - DNA, 427 bp, Glycine max
  unsure (1)..(427): unsure at all n locations
catatgtatatttataaatcttaaggcgaaatgcatacaagaaaacagacgggatttgattcttgtgattaaccctgcttcccaagaacacagccgtaaattcaggtgagcaggttattttctttaccatgaccatcggcaaacaacctgcatgttccaagacaaatattatgggttctactctatttatcaaacattaagcacaaagcaaatttaatctaaacaattaaaaagaaggatattcttgatgataatacatgggagaaacaaaactcatggtgtttctattgagggtggaagacaatcatgccnatttgatttcatcacacagatgcaggttcctagagcatgaaaatatgccaaaccatcctttaatatcaaagtggcactcttactgttccttcagcagagaagatattacttagag

SEQ ID NO: 239595 - DNA, 471 bp, Glycine max
taaagtttgtaggcctgaggattctctattatctctctcacacgcacatatataatagttctatatataataatatattcatgctgataggctcgttggcgtatttgacttcgacaagtttcttcgcttgtttataaaccttaattcaaaatagacttattataaatagacttttgtgacaaatctaactcttaaacaactcagactagacttaacaaatcaataaatagtttctttgagtaatattagattctattcttttaagtaagattttatatttaagttttattgatagaaaaatatgattggaagaaaaaatctcattaaaaatagctcattaggttctttgatagagattaattatcgacaaaactaataaatactctattccaatagcataattaagaaaaataaattaaacttaacaaggatatataataggcaaatgagttacgctagactttgtaatta

SEQ ID NO: 239596 - DNA, 442 bp, Glycine max
  unsure (1)..(442): unsure at all n locations
agctttaagtaaagagacaaaatgctatatagattttaaatatgagaaatatataatcatttatatcaaaagatgcatgagagttaagaaatgattacatttatcccttacaacaagagaacttagtcactcatgacaataagcgacatgggattatccatggtggggaagaagatggatgaagaaaacacaaaaacagtacaaaagttgcaaactgttacaatgatgaaagcaaaagggagggagaatctatctatattcacgggttagacctanaaatacataaacaacatttccatttcaagtgtaaatccactcagccatganattttggcttgaccatatgccagtttttattcttccagaattttgttgaccaagttgatccgtttgaagattcaacacatcatagttgctcgccaagataaattctccatcttca

SEQ ID NO: 239597 - DNA, 430 bp, Glycine max
  unsure (1)..(430): unsure at all n locations
tgtcctnctttcatggtctacctaatacgttntcatgttccactaattcagcattcaatccctccaagaccacctnccaatcattntctggttgctgatccaacccttcaactagaaccaacacctttacgtcacagtacttgcattcgtaaaccacaagaaaagtatggtttttcgaacctttatctttgacaacaactttaccatatattcctattacttcttcatataaataggcaatggagcataaatgttggtgggatgctattaaaactaaaattcttgcactagagaaaaatcagacatgggacattgttccatgtcctccatcggttaaacctcttggcagtaaatttgtattcactatanagctgcattcagatggatcaacatattgatacaaggctagatcggcttgttcttggaaata

SEQ ID NO: 239598 - DNA, 309 bp, Glycine max
  unsure (1)..(309): unsure at all n locations
tctgtctactgactatcaattctaatngcaagntcacattcttgttctttctttgtctaacatacacacttgttcaaactcatgaaaaggaacacaaactccatcacaatcatccattcaattcaaaataaaagcatacaaccattttcacaaatcaataaaagtgcttcactgccatgtcatcaaaatcaagccaaactgttccatatgcttcagaataagcaaaccaactacccaaaaataaaactagcagtgtatataaacataaaagagatactgtactanaaccataattaaaataataataaa

SEQ ID NO: 239599 - DNA, 416 bp, Glycine max
tgagacagagggagagagagctgtctgaaatctttgggctgattgaggagagagaataccgctttttggctttaaataaaggagtttctctttttctattattatatttaagctatgccacatgtctgcatctgagcggagcgaagagggcccactttctcttttgattgtgacccatactcagccactgaaagtgagaaaagtctgacctttgaaacgctaaaatcctagctcagattgcatgccgtttctctgattacaactactcgcgtatctctacgttcgtcggggccagctttctaaagttagcactatatatatcataacgctcagaattaaaccccgagcgtggctcataggatggtttcgttaaatatatagtcgcgcgcacaatgatgatgctacactattactta

SEQ ID NO: 239600 - DNA, 353 bp, Glycine max
  unsure (1)..(353): unsure at all n locations
agcttccaagaatcaagatcaagattcaagactctttattcaagaatcaagagaagacttaaacaagataagtatgaaaaagttttttcaaaaattgagtagcacatggatttttctcaaaacatgtttaccaaagagtttttactctctggtaatccattaccagattattgttatcgattaccagtatgcaaaatggttttcaaaaagctttcaactgaatttacaacgttccaattgatttcaaaaagttgtaatcgattacaatgttttggtaatcgattactagtgtacttgaacgttgaaattcaaattcaaatgtgaagagtcacattctttntacaaaaagcttt

SEQ ID NO: 239601 - DNA, 620 bp, Glycine max
  unsure (1)..(620): unsure at all n locations
cttcacttcgcattctctctactcctaccntantcttcngtnttgatatnatttttatctttnnnnnnnaaggccccacggtgttgctttcgtggccgctgcatatacgagacactatacaaaactcangctttaataataatggcctccaccacactctatttcctttaagatattctataacacagcctcctaatctttatggagaggagtaccacttcttgcagacccgcatgctaattctcattgacgccatcaacttaaacattttggaaaccatccaaagtggaccttatgctcccaccatggcggctggtaatacaacaatacacaaaccttcagaagagtgtgctctagaacaacgaagaatagtgccgtacgatttaaaggctacaaacatcatttcatttgctacgaatggatgaatattttatggtgacaaattgtaagagagataaagatatgtgggacactcttcaatctacacattagggaacaatcgaggtccacagaactatgataaatactctaactcatgagtgaattatttacgatgaccacaattgacagtgtaccatatatgcccaatagatttacacatatctcttatcttcttgccg

SEQ ID NO: 239602 - DNA, 256 bp, Glycine max
  unsure (1)..(256): unsure at all n locations
gcttatagtcattacttgttgagaaccttaagccatagtctattgtttcatttatatagtggagaatatcatttgtggccttgagatagtagtgggcggagtctccattttttggcctttgatataaaatgtttggtcttatgcacatcaaatatcacaaactacccaccaaactcttgaaatttgtagcatccaccttttatgcttcgtcaaactatgataacttcattntgcactccaccggagttctaattgg

SEQ ID NO: 239603 - DNA, 481 bp, Glycine max
  unsure (1)..(481): unsure at all n locations
tcgattacatagttatttttgagacaatgactgatttattcaggagtctctgccttaatcaattaccatgtgatataatcgattacttctctttctataagtgtttcagaagtaaacaagaacactttaatcgattactttgagtatctaatcaattatattgttcttgagctgtttctagtttcttggaagaacactttaatcgattaaaaagataatctaatcgattaccttgtagatttaatcgattacaagcggttataaatgttttctctataaataaccacctcgtgttctctctaataacaccacattttgagcttctgaatgagctaggatcacgtgctgttattagttcaagaaagaagagaagaanagtgcttagaaactgtgactcacaacttctatgctntgattatgaagatcttnttgtcatacgtgagttgtgctactttcttgagttcaagaagacacctcattt

SEQ ID NO: 239604 - DNA, 150 bp, Glycine max
ctgatgatgcggcaactaacattaatatccaaggtattatataaaatgaatatatatatatagatagatagatatttccactaattcctagaagtggaatgttgtacacacctgtgggttaacctctacattgttctggtcactcttgac

SEQ ID NO: 239605 - DNA, 461 bp, Glycine max
tcttatccaaggctcatcttggtggtgaagctccttcttccttaatgtatggcgcctcctctcacctcttttcctttgtcttacgctgcatctccatggaggaaaatcaccattaaaggaccccattgaagctcaaagatccagcctccatagaagccccacaagcaagttttttgcaatctccttcaagaaaagagagttatatttccgacatacttggtgagtatttaagaaatattgtaaattatcctattgtgtaagattaagatcattgtagtcctacttcatagcggagatattattctagactcggtcccataattcttatctttcatactgagggggtttgccacgctaaaatttcttggtgctgatctttgtctcttactctcttaatatattttactttctgctcatcttaatcacatatagaggagaatttatttttgctatctcctaac

SEQ ID NO: 239606 - DNA, 341 bp, Glycine max
acatgacaatggatgacagatgatattaaattcaatcatagaagaacaggtaattctatatatgctaaattagaagttattacccatactcacaatggttattactatactaatcacaggtattcagctgattgaaaaggaaacaatccatctatgcttgactgaaattgaaaatatgctgcaagccaacagaaaaagcctatgagattttcctttgatgccatacccaataagatatgcaggcaacccacaccataataagctcatctacaatgaaatggcatatgacaaacaaatactggtggcagaaattaacagatcctaccattcattgacaagta

SEQ ID NO: 239607 - DNA, 495 bp, Glycine max
  unsure (1)..(495): unsure at all n locations
tccttgagaaaattccttaagaagctntcttgagaagctntcttgagaaacttacttgggaagcttctttgagaagctttcttgagaaactagagcttagctacacacacccctctaataactaagctcacctccttgagaagcttccttgagaagcttccttgagaagctagagcttagctacacacacctctctaatagctaagctcacctccttgagatgagaagctagagcttagctacacacccctataatagctaagctcaccccatgccaaaaatacatgaaaatacaaaaaaaaagtccgcactacaaagactactcanaaggccctgaaatacaaggctaaaaccctatactactagaatggtcaaaatacaaggaatgaagcccattcaccttgatccaccaaagccttttctttctgctcccaagttcttcttgggattccgaccaccccatttctatttggtttactcggccaattcttgact

SEQ ID NO: 239608 - DNA, 365 bp, Glycine max
  unsure (1)..(365): unsure at all n locations
actttctcttacctggatacatttattatattttttttattggtgcaaaatattcatttaaatgatttttggcagaaaatttggcttccgatcactttttgttttatcaaaagaccttgtttctgatagcttacttaaaagtacccaaatcccatttcatttgaaaataatggtatctaatacctcctttgaaatattactctctttaaagaaaaattaattaagtactctcagatatatcagaatggggagcctcatggagtacgaaatttnttatcaaaaaattacttaaatagttttattatgtttggagaaaatacaatattcttgtcaccacattagtatttaattccagattttcatga

SEQ ID NO: 239609 - DNA, 357 bp, Glycine max
tactcaagcttgcacatatactgtctgttaaagggtttcaatatctaacattgtcttctttctgagtttcagatactggaaattcctcattctgctctcagtcttgcggctcttggccgaggtatggttatttttcttctcttccttctctcgctggataggggtcccttatttttatttttaatgcgaaagtggaatttattgcttcttttttaataaccatttgtttgatgttgttttaaaaggttctatttgaatgggtgctaattgtgtgtggatttcgttcccacttttattgtgcttatgttttgttagaatcccccaaccttgcgagctattttttaatcccttgttatg

SEQ ID NO: 239610 - DNA, 364 bp, Glycine max
  unsure (1)..(364): unsure at all n locations
agcttctaaggaagtattctcaagaaagcttctcaaggatgctacctagtctataaatagaagcatgtgtaacacttgttgtaactttgatgaatgagagtcttgtgagacacaactcaaagttcaacttctctccctttttcttccttcaatttcgtgctcccccctctctctttctctccctctttcttttcctccattgaagcatcctctccaagcttcttatccaaggctcctcttggtggtgaagctccttcttccatggcttattccctagtggatggcgccgcctcttacctcttctnctttgtcttccgctgcatctcgagggtggaaaatcaccattaaaggacctcattgaagc

SEQ ID NO: 239611 - DNA, 422 bp, Glycine max
  unsure (1)..(422): unsure at all n locations
agaccctgttggacttcttcgggtccactgggtgtcttgcatgcgcgatccctgcaaacaatagatgaaatcagaaatcagttgagcgatgtgcatacttacctatgatgacgtgaccttgccgggggggtacgggcaccctgtangactgataaaggcccgtaaccagagctggaaaccccagggccctgttggacttttccgggtccactgggtgtcttgtgggtgcgatccctgcaaacaatagatggtatcagaaatcagttgaactatatgcatacttacccatgtcgggacgacacagaccaactgatactttctcanggggagattggcatcgcggtcgctgggcagaatattgctaagtagcaatgtcatctatgtaagagtggtcatgttggtgcgcatgatccgcactcgtc

SEQ ID NO: 239612 - DNA, 328 bp, Glycine max
gcttgcatgcaattcctggattcagatgtgatttattggttcacttattggatcatgcgatcccttatgaacttttcatcaactctaaacatcttggtgatccatttgaggcaaaactgaatcttcttatatgtgaaaactctactctaagtgtttcatcttctcctactctatctaaagattggatatcttgccatcatgtataaattaattgtgtagattttaattttcttggtacgatttatagacatgcatatagctaatgaatgtcattcaagtaacaattgcaaaggtggtgtctaattagtctacctcttgatttagttct

SEQ ID NO: 239613 - DNA, 441 bp, Glycine max
ctcaagcttgtacaataatggaatcaagattaacttggccgtttttttcaattatgttctaagaaatgagacctaatcgcttatgccataatgctcttgagtttgtattatcaattctacgcttacaaccacgcaattaaaggattcaccataggaagctacagtatcatgtaaatatagattatcgttaaccaagagtgaaccagttccaacaatatctgaattaatagacaacatgaacatattgttctcaaatgaacacaaataacccaatttgttcaaataataaactgaaaccaaatttcgtctatatgacagcacaacaaaagtgtctttcatatccaaataagaactactacgtattaataatgtatagtgccctatagctgtcactttcaccgatttaccatctccaacgtacattcatctttcagaatcaat

SEQ ID NO: 239614 - DNA, 334 bp, Glycine max
  unsure (1)..(334): unsure at all n locations
agcttgatgtcattcaaacacactatgttaccttatgaaactaaactgccttgttatgtattgattcatatgcgatataatttgtgtaacccgttactaaccaattaatattatcaagtactcgtttggttaagcaaggaaattagtggtccaacaaaaatcatttacgcgtgccgcaaacatcattatgataattgacaacacataatgacatgcatgcgtattacagtttgagcgcgacaacacattggctgacttaagtacacattgccgacaacacattggctgacttgactacacatttacgcgtgtctatntttttgtaaacaaagtt

SEQ ID NO: 239615 - DNA, 431 bp, Glycine max
  unsure (1)..(431): unsure at all n locations
cgcttgccttagcacactntacttncatctatttcagactatattatttatacgggttggacaaaatgtttccgaagactaatatcatattgttgattaccttgtatatgtaacaatttaccttattattgtggagtttggcattgggtgcataaagggctcgatgacataaaatcactttacaaacatcttctttctactcatcacatctacaacaaatagaacaatatatccctatttgctgatgagtacataatacatttgacttgtttttgccaatatacggatgagttcatcacatttttcttattttggcatcaaaatattattatttaagataaaatatgtgttacatgttattctatatcattatgtgatgtgtcggtttatgatataactatgttcttcctactcgagatatactcattttt

SEQ ID NO: 239616 - DNA, 469 bp, Glycine max
  unsure (1)..(469): unsure at all n locations
agcttacagcaaatgatagaatgtctatagttttatcatttgacaatttattggtattatatgtcttatccttcatatatatagactctcttttttcatctttttcaactgtgaatttttacataattcataaattttatttgataccttgcatagcattgcatttagcaaatacaatttaacatgcttggtttataagtattgacacaaaaaaggcttatgaaaataccttgtattgcatgttgctagggcttattaaaaatatcaaataattttacatgtgtctgtgaaatcagacttattaatgatgcgataaattatgtaactatcatgtctctcgttgatgttgctaaaaaaattgtttaggaagtatanggattaaaagtgcattttgcaaaaagtttaaagatcgagaacataattaacccatttaaatattatcaatanaataaccttaaatttaaaatac

SEQ ID NO: 239617 - DNA, 394 bp, Glycine max
gagcttgaataattgaggaatagctcaacccatttacgttctttaggataccattctcgtgttccaacttacaagactatcaactgtatatgcaaacaataattttacagattctttcacgattatttaacgaatttacggagcagaacagatctgtggcacatcttcaatataaatattatcaatgccttgtccaaaccaaaattgagatcgatggtttagctgacaaattcttcttctgtttaacctatgtttctgactacaaaatgtgtatttggtgaagacctaactatgaagcttccaatctatgccgactttatagatttctcaatataattattatttcatatacaagcgatattcacgtggttgagactagctcacaacttagaga

SEQ ID NO: 239618 - DNA, 237 bp, Glycine max
  unsure (1)..(237): unsure at all n locations
atcaatatctgaaaaatgaaattgttaatttagaaatctaagtaaatattgattcctaattttttaaatggtggaaagacttggaagacaaaattgcattaaaatagaacatgccaaacatatagtgggactgagacacattagcagcgnttcctcaactcaaaaattataagaatcagaaagtaagagtatgttaagaagtgtgtaacatactctatacagctttgatcaaatgac

SEQ ID NO: 239619 - DNA, 511 bp, Glycine max
  unsure (1)..(511): unsure at all n locations
tcggacctataaaactaagctgggtatctccttcttcactacatcaagaatcaccgggttgtgtcttctctgtggctgtcttactggtttagctccatcttctaaatttattcgatgcatacatgtggatgggctaataccaggaatgtccgccagggtccagcctatagccttcttatgcttcttgagaactgacaacaacttctcctcttgctcatcagcaagggaggcagatataatcactggaaaactcttgctatcatccaagtaaccgtattttaaatttgatggcagaggcttcaattctggtgtggtcggctggacagtggtagaaggagatggtttctcancctttacctcataaagaaagtcagaggtatgtgtacttcctgaaacatggttagtcctatctgactctataanatcaatctcaagaggtaaaacaccaccaccaggcatgcaatcaatatcactctcagattcactctcagcatcaaagtcagacatatga

SEQ ID NO: 239620 - DNA, 430 bp, Glycine max
  unsure (1)..(430): unsure at all n locations
agctntacattagaatttagtaatgatccactaacctagaattaaaagaacttaataccattaacctagggaattaaaataacttaatggctgagtgtaactgaaattatggcaaccaaaagtcacccccaacagccatcaagtcagccaccatttggtctcccaaaaggctgatgcctaggttgccaattaggcccttattacaagttgaactcaacctaactaaagcccttttagttgattaaccaaaaacatatntttggtcagccaactttaaaggattgggccattatttatacaaactaaacactctaaaattgagacaaagtggtgacatttagtcctcctccatttgcaccatgatacaactcacaaccttggacttttctccttgaaacttgggcttgtattcaaatagtatggacaacac

SEQ ID NO: 239621 - DNA, 505 bp, Glycine max
  unsure (1)..(505): unsure at all n locations
tattaggacctataaaactcagcttggtattgctgcattctactaatatatggaattgcccactgctttgcctgagaataacaattgcttgaccacaacagcgctggaggcggcaagggacaatggtctttcaaataaacctattgtacacgaacaaacattatatcatgcgttgaccgtgccaaacgaaccagcgaagtcattgcataattgttatactaactatattcaatgtacctgaacaaaatgatttccaaacatgtgaccgacacatatgatgcggtggccagaagaatcangtggtggttgacttctaagagggaaaaatgtcatgctttgttgtcgggacaacgatacaacgattacgttataccgtgaagcaatcacatatcccatgtccgttatatncatccacttgtccacactaacctgaatgaaccaaacatacacatgtaagtaatttaaacattgttattaaaaaaacataacctaanaacataccttt

SEQ ID NO: 239622 - DNA, 422 bp, Glycine max
  unsure (1)..(422): unsure at all n locations
ttaagtcacctgcggctgcagcttaaaattgaataaaacgttcagaaactgctggtaatcgattaccatatatgtgtaatcgattacacagtgcaaatttttaattcaaattntaatagcttgtgtaaatcaattttggccactggtaattgattacatcctctggtaatcgattaccagagagtaaatttcttgtaaaagactttttaacttaaatttcttgaccaaaccttttgctacttcaattggaattcccttcctatttaatataccttctaagactctaaagactgtcttgatcatccatcttgaatatctntaatttctttgtcttgaataaagctttgagacgcatgtgatccttttgcatcatcaaaacatcagcttgatccttttgtctacacaacgacccatgatggtta

SEQ ID NO: 239623 - DNA, 412 bp, Glycine max
ctataaaactcagcttgtgaatcgatacactaatttggtaatcaatttccagtgattgcttctgaataaaatcacaagatgtcactcttcacatagttcttgactttctcaaattggctcttaagtttttctaaaagtcataactcttctaatggttgccttgaccagacatgaagagtctataaaagcaaggctttgttttgcatttcaatcatcttgaacatttcatacaatcctttacaagccttgaatctctttgaacttcttcttcttctttgtaccacaagctctccaaagttttctggttttctaaaccatgaaaactcgtgctattcatcttttcattctcttcctcctctgccaaaaagaattcgccaaggactaaccgcttgaattcttcttgtgtctctct

SEQ ID NO: 239624 - DNA, 290 bp, Glycine max
agcttatcaccttgaagaccatgtttctttctgattgtgtgaaagacgatagcaaggcatcagctgctacatatattcgaccgagaaggaagaacagagcacccacatccctcaatgactttgtctgagcaagattgctgagctggataacctgttctgctgagctggacatctaaggatctgagccttgatcctgtctgccattactacgaatattctgtcatttcttgtaagactcgacatcatagaaatacaaattttgttattgtaatccattataaataccatct

SEQ ID NO: 239625 - DNA, 277 bp, Glycine max
  unsure (1)..(277): unsure at all n locations
tcttctttccactcttttcattttcaaatttcaaaacatttccagttcaaattccaaatcgcagtctacagttcggctatgttgcaggctatgcccattctataatctgatatgattgattcacgttgacgaattattgtgattgagagagcctatgaaacattatgcaatattgtcagtaggtttcgatttcacttcatttctagaatccatttttttgcataaatcataagctnttgatttcacctcattttctaaattcaagtggatatactat

SEQ ID NO: 239626 - DNA, 420 bp, Glycine max
  unsure (1)..(420): unsure at all n locations
ggtatcctatgtntganattaaataaacttaagttaatccattatattctaagttactaatctttatctacccaattataccatagtaacttaacttcatttcaaaatgttatcaactaaccttacccgaaacctcatttgaaacgagccttccccggaatttatggacctcacagttagggatctctttatccctgtgagtagatgttggaacagggacctaacttaacttcatttcaatatgttgttaactaaccttacccgaagaccttttggatgctatgttggataggccggttattgaagagattctaatagtccctatattactacatgatagtgaggataatacgatatgtacgtggagtaaagatggtgttttctctgctcgatctgcctatcacggcgctaggaatatgg

SEQ ID NO: 239627 - DNA, 491 bp, Glycine max
agattgatgcatcagtcccgggactcttagagtcgcctggagccttccaacctcttaggtagcttctgggtcacggtcctgttatactcatcatcttggctaacacaaccttaaggcctctgaactgtgaactccaataatctttaggtgccaatatggatttttcaagagatggtcttatctgaaacttgagaagtgtcatgccttgcaccaaaccaagggtgttcggagatatccatatattaccttgcatcatctacatattattccacattgtaaaatcagaggtacgaaaacaatcatacaatgatgaattaaaaatattccatagggtcatttgtgacaaatagcagattgcaagttccaaaagaaatttggttggggcaaacacttaacattttgtagagctatcaccactaacccaaaatgatgaccttctatggtccttatccaacattgaagaaaatagatttttctagctagtatggagg

SEQ ID NO: 239628 - DNA, 479 bp, Glycine max
  unsure (1)..(479): unsure at all n locations
cgcagtaagtatgaaaagcaatattcattgttgagggattaagtgcgctgctcaatagcctctttaactatgcactaaaatttttgtgtccggtctcccatgtcacatcatataattaatgtctttaccagggacatatataaaacaatatagacaaccaaattaaaaaatcaaaattaaaaaaatatcaacaaaaaggtgctaactattgtaagaaatctttcaatttccctacgtttctagattttaaacaccaattataatatcaatgaccaaatcaaataaagaaattcacaaacctcattaagcaaagtcttgagagagcagtcaaatgtgcttttgtaggatgaatcccccatcatcctggatttcacctggagaattatgagcatggatataacgcaacccttgatcatacaagtagaatgtgcttattcatacgaatntcaccaatattgttaggaaacttcaatagttct

SEQ ID NO: 239629 - DNA, 368 bp, Glycine max
  unsure (1)..(368): unsure at all n locations
tgctccttaaacctncattaattttttgctttaccttctcttccattgttgtttcttcaatttatctccttgtatctcctcacatgtcttgtgctaaatgttgttaacacgattctttagagtttccactgattaaacttgctataaaagctagatttgattttctatggttcaaaattcttgttcttgttcttgaaccacgaattgtgttgagtttaggttcctttgagttttgtcttgttattttttgtggctgaaacctaaaccataaaattcttacaaaaatattaaagtagaagaaaacctcaaaaatctagagtgacttgttcacctattgtagttntgtcatagaagtcatgtctagtcat

SEQ ID NO: 239630 - DNA, 456 bp, Glycine max
  unsure (1)..(456): unsure at all n locations
gttcttaaaaaaaagaataataagggtagaaactaaataggtgccataagtgcagttagaacaataaattgaggctgaaaaaaaataagcctagacagaataagtggaagcttttctaggataaatgctctcttataaccctaatttttgaaataccattaaaaccataatttctttaattagccaagccaaattacaggccaataaaattccttagtgatccaccaaatgtaagcatgataactttaactgagatgaggtgcaaaattgggaacattaattgtaggttgtagaaactatcaacactcatccaagacacttgtgcacagagagaaacactanagccttgtgaggaaaaagtgaggcaagccgaccttgatgatttctgctactgaccaattctatctcaatggttgtttatgcttccattgcaagatcatggcaaatacaagaagc

SEQ ID NO: 239631 - DNA, 347 bp, Glycine max
gctaacaacacttaatgttcaatgccccttcgttactatgtgttcaactaagcaatgcattaaagacatgttaatttaattgaataataaatgcgagtctttattacgaggtgtgactaattcatctaatataataaatgggcggattattcacggagtagttgaagacttgatttattctagactattactttttgctgaacaactgacctcaataacttaagagggggtgaattaattaaattttaaaattttcccgctaacaaattctaacccccttttaaatgatacatgattgactcagaatgcagaagaagaagaagaaacaatcaatttaataatcgtct

SEQ ID NO: 239632 - DNA, 396 bp, Glycine max
  unsure (1)..(396): unsure at all n locations
tgatgatgacaacttatgagtttttaaacacacacacacacacacacacactttttgctagtcgatcactcacataaatttccattctccccctttgtgtttgaatttatgcttctcttaaaattaagttgattactcatgtgagttcttgatttaatccatatttctctccccctttggcatcaacaaaaagccacagtgcgttacaagtataatacaaacatatactattaatcgttcacaaggcatacattgaagaatataaacccatcatgaagcaagaaacctccttagatcagatatatagaacaatcacatagtcatgtagcatagatcataattggtcagtcatactaagcacatattataaagaaataataagtgctcanatgtcat

SEQ ID NO: 239633 - DNA, 255 bp, Glycine max
acctttctcatttatcatatcccatgtgttcaggaagctcatgcaatcatttcaataacaaatcttaacctttctgaagcatttgtgtacaagaaccataacatgagttattgctgttggtaggatgtggaggttccaaatgtttcctgagatgatattggaggcttatagaatgtcaagagggagctttatgaggggcacacttgcttttgatattccatacctttaatatgttgcacatgtacattttaatta

SEQ ID NO: 239634 - DNA, 317 bp, Glycine max
gagtgtcgctgtcagcgacaattgtatattgaacaccatatctgcgtatgagatgtttccaggtgaacttttctacctcgctggctgaaatttctcacaatggccttgcctcgatcaacttattgaaataatctatggcaaccaataagaatttgacctatcctgtgacttttggcaatggttctattatgtccatccctcacatggcacaaggccaaagggagcttacgatatggaggttgtcatggcgtatgcatggaacatctgcacattctatgcatcatatgcaccttcttgtgaagtcaatggtgacgacc

SEQ ID NO: 239635 - DNA, 256 bp, Glycine max
tataaaatcatttgattttaacatcaagcaccccttgacaatctgaatcttgagttgaatcgctggagagtatgatcacagagggattgctcttgtccatgtttaatcatgggatcatttatcctggtgaggcagaagacggacaaaatcacaaggttggggtcatatgatccagtttgggcaaaacccctttttctccttcaaacaatttcctttccatatgtgactatgtgacttctctaacctaatctccatc

SEQ ID NO: 239636 - DNA, 188 bp, Glycine max
  unsure (1)..(188): unsure at all n locations
tctctctctattccctatanatagggcgaggagggaatatcttctctgttctaccctcctggtctctgcgaataacttataattactgagatacattgtttccatgaataacatacacgccgaggcgcttccgttatgcgtccgagacgctcccgcgggtgattccgcgaggattatccaccgttctt

SEQ ID NO: 239637 - DNA, 315 bp, Glycine max
  unsure (1)..(315): unsure at all n locations
cgctgagttctttgttagtaccgaaactctaggaggaggccaagaaactactgtgtaagaatttctttttttccttgttagtgttcttgatttgtgaatctcacttaaattttgagcttaatatgtggcatgcattgtgaatcacatttttaatctttatcagctaagttgagttgtttatgtatgttgtagggcctttcaaggagaaacgaagcaatgagcttaaattctaatagctcagaatcacatataattntcacatttgtcattgagtctttgtgtaaggtactggtcaaatttgtaattctacctaac

SEQ ID NO: 239638 - DNA, 449 bp, Glycine max
ctaatgtgttctcccttgtagaactactaactgcagtaacagttgcagcccaactatccagtagtgatgacaatagaatcaatgccttcacctcatcctcaaatttaatctgcacagattccaattgggcaagaatagtattaaactcattaatatgatcagttacagagataccttctcccatcttgaggttgaacaaccggcgcatcaagtatactttgttggctgctgacggcttctcgtacatatctgataatgccttcattaagcctgcagtagtcttctcgttcacgatgttgaacgcgacgttcttggctaatgtcaatctgatcacgccaagagcctgtcgatctagcaagttccattcttcttgcttcatgtcttctggcttaacccctgataagggctgatacagctttttctgatatagataatcctctatctgcatc

SEQ ID NO: 239639 - DNA, 525 bp, Glycine max
  unsure (1)..(525): unsure at all n locations
cattatgatgcatcgatctcgaccgggatccttaagtcacctgcggcatgcaagcttgcaaccaaatgctcaccactattatatgataaaccttcagattctttcatataaacctcctcctctaaatcaccattaagaaaagttgntctcacatccatttgttgcaactcaatgtcaaaatgagcaactaattccaagattatatgaagagaatctttcttagatactggagaaaaagtctctttgtaatctattccttccgtttgagtaaatcccttagcaacaagtcttgtcttgtatctctcaatgttgcctaatgaatctcttttggtcttaaagacccatttacatccaatggccttngccccattangcaactctacaaggttccaaactttgttactctgcatggaattcatcccatccttcatggcatcataccataaatttgactctttacaacttatggcttgatcaaaagttcaggatcattttcagctcaatatatagtcagttcttgcaaaa

SEQ ID NO: 239640 - DNA, 466 bp, Glycine max
ttgatctcaaatcttgaattgtataataattatatatatgtgtttatacgatccttcttatatacgcgttaattgtcattacaaaccattgcattggtttcaattgcaaaactcacgtgaattgccaaacctcaaattgattttttttttcgtatgaataattcttatggcctagattttctaattttggcattcatagcaacatcacacccttgtgtgctttggttataataattaacaatatgtgtgtgtgagtgtcacatagatatatgagttggttttcaaatgttctaatagtctaaacgaatttgcaacgcgaaaaaggttaatacattacaggcttcccttgaaggtgcaatatatatgtttaatacgttaatcattgtgcatattaaatcggctgaccatattaagcattgcgcatattacatcgggaacggattgcagcagtaaatatattgatatg

SEQ ID NO: 239641 - DNA, 306 bp, Glycine max
  unsure (1)..(306): unsure at all n locations
gcttcgatatcaatttcgagcgtctcgatatattaccggactcagnccaacaaccgagtgaaaagttattggtcgttgaatttgctgagagggtccataatcaatttcgagcgtctcgatatattacgggactcaatcagacattccagtaaaaaagtattgtcggttggatttgctcaaaaattccataattaatttccagcgtcttgattaattacggcactcagtcagaccatccgagtaataagttatcttccgttcaatttgctcaaagcttcggtcttcaatttcgagcgtctcgacata

SEQ ID NO: 239642 - DNA, 337 bp, Glycine max
  unsure (1)..(337): unsure at all n locations
ctgagcanattcaaacgacagatcactgtttactcggatgtcttattgagtnccgcaatatgtcgagacgctcgaaattgaagaccgaagctctgagcatattcgaacgacacataactttttactctgatgtctgactgagtcccgtaatatatcaagaagctcgaaattgattatcgaagctctgagcaaactcaaacgacaataactttntacttggatgtctgattgagtcccgtaatatatcgagatgctcgaaatggaataccgaagctctgagcaaattcaaacgacaataactttttactccgatgttcgattgagtatcgcaatatat

SEQ ID NO: 239643 - DNA, 335 bp, Glycine max
gaagctttaacctcattgtctctcacagcctttagatttgggagccaatccaatccttgtgtccggactctcagccacttatgatagccgccgatgatcccattactgcttcccctaagctctctgtcctttcttcacgccgcatcccatgccttgcgaactccttggagtaccctcgcgttgtggtcactgaaaccccgttcgatgaaagggcgtgatgctttcgtctgatggcactcctctcatggggtagccaagctgtcttatggcgaggacgggattataattaatacaaccccttgttccatcaagggaacatttggacatccttcgca

SEQ ID NO: 239644 - DNA, 378 bp, Glycine max
agcgttaggatcggaagagtgactatgataatctattatggccaacggaaaaatgaggggttgattgtcaatgcaatttgggggtagctctgctggcttcgacgtcattggcaaaccgcggaatggtttgagtgtggaacaatggaaaatatggtgaattcgtgctccttttggtacttgcaagcggtacgccatgggacctattctctctatgatctgaaatggcccgtaatacctctttgctaatttgcccatactagccggagttccttttgtcgatgtttctcggtatggtcggagcttgactataacccagtcaccacattcataattgaccttgtgccgcttcttatcagcatatgtcttcatacatgcttg

SEQ ID NO: 239645 - DNA, 395 bp, Glycine max
  unsure (1)..(395): unsure at all n locations
agctngataacacgcagagactaacgtcgtcttttgcggccttcgncaatcgcggccgacaagccccgtgacacgcagagatttatgtcattttccgcgcttacaagatctgtcatactgagttttgagtcacgctgacgggcggaaatacccgagtggttatccgtataaacttcttggtgtctgtaagacgaaaagcctggtagcacgcaaagactaacgtcgtcttctgcgctcttcgtcaatcgcggccgacaagcccgtngacacgcggagatttacgtcatcttccgtgctcacaagatctgtcatactgactttngagtcacgctgaccggcggaaatacccaaatggttatccgtataaacttttgcattctgtagacgaaaagctt

SEQ ID NO: 239646 - DNA, 546 bp, Glycine max
  unsure (1)..(546): unsure at all n locations
ccgtgtgcctgttcactgcattacggacctttaaactaagcgtgtcgcgtgttgacaacggccatatgtacattgtgtctctgcgagctaacatcgcggtgacgagcttactagacaagctataaactctcatacctgatgaaccacatcgtgttatatgtcgacagatgaggcgtgactcaatatgtaaactctgacggtatcgttgcggagcgcaggagatatcgcacgtacctatctctgcatgtngaccaggccttgtgcatcagngagtgcactaaggcgcgcagaacgactttagtacatacgtgctaaaacgcttgttaagccacccacagtcttaagtttatacgggtaaccacccaggtatttgcctcctgccccgtgacaccacaactcaatctcacagatctagcgagcgccgaagatgacgtttatattctccgtggcatcagccttgttggccgcacatgacgattggtctgaatacgacatcttctactggctctatcaagatctgagactacggcaacaactatttaaccg

SEQ ID NO: 239647 - DNA, 362 bp, Glycine max
gctttgtatgccctctcccacttgcggtgatttcttcttcggcaaaggcgagatagttgttggcagtgatattattgaccagcccttcgaaaccttctaccgagatgtcttgggccacatgggcctcgttcaaaaccttcactattagagcccgatgaggctcggagctcatgagtaactccaacagcgagaccctggccggggttttgttgtgctgttcgataaccttgaattcgctctgctgaattatacggaggaactcactggcttcctctagtgacacctcctttttaccatcctttttctccggaagacctttcgcctgaatatctttattcgaagagaggggtgcttcgtcatct

SEQ ID NO: 239648 - DNA, 327 bp, Glycine max
agcttgacatgtgatgatggagttgaaaatcaaccaccctcgaacatggtggtcttccctttttgcacttattctctagtataatcatccactccataaccaagagcttgaacgatgatgctatatccctttttcttactccatccagggtcttttggaattactgtcttctttggagggtcttccttccccacacttgggtgaggtttagccagaatagttttcatcttgttggtggcttgcacaaaatggaggggaggaggaggagttaattgtcggctcaaccactttaaacacttccttctcatggctcaaagagaaatattg

SEQ ID NO: 239649 - DNA, 451 bp, Glycine max
  unsure (1)..(451): unsure at all n locations
gctgaagcntttttgttatttggtccatatagttaacaagaccatgacaaataaattggtaagtgtttggtgattttagaaacactattataatctaaccagacttaatatatctcaatttgtaattgatatgttaagatgtgatcacttggttgatagtcatatttgacaacaactaaccaatattcacaataagcattgttccttacttcaattacacagtcatattaacagtgacagacgtgatggattaaaacacaattgcagtcaaagctattgacttgtgtactacacacttatagatattgtgcttatgaaatgataggttaacagtctcaggattacaaatattgtgaagtaagaaattgcaatgcagaaagcacacagcagaggtgcgttcgtgtgattgtagcaatctgatttaccaagctgatttcagaacacacaacat

SEQ ID NO: 239650 - DNA, 409 bp, Glycine max
  unsure (1)..(409): unsure at all n locations
cctggtagaatagagaccattagggtctgcttgccataccataatatcctgcaactgctgatgaatagaaaagggagatatatcttccatgaaagctatggctngctcattctcataatcaaaataggttcttctccatctaaaatcccaacttcatgtattttgagaaaatttcccatgttagaaatggacaggttttgctgtctgctaatcaaaaataattgattgtacttctgctgaaggctacatccctgacctatccatggatctntcgcaaaccttacnctatcctcacatccaaccctncaggtcatattntggtgaataatctgaanatctggctggtgatatagttttctgagatcctccaccaccaagaatgccacctttaactctactgctctgcaag

SEQ ID NO: 239651 - DNA, 436 bp, Glycine max
  unsure (1)..(436): unsure at all n locations
agctnttacatcctgaatgctgcatccactctctaatttacttaaatcttttcgaacagcctgtatatacacgagataaaatatataatcttacatgaaattccagagtgagacactatagcaataaatatataaagttatgtacattaactgagaattccagcttccccattgtaatggtcttctccacaacatttctcaacgggtgagtatgagtagaagcaaatgtgtgcttttctaagacactctccaatgtaattgatgatctagcttctgtaaataaagtcaacaaactacaagggaggaaaacatctttagtattaactattaagtccttgcaatatcataatgacagcttcagctttcacggttcaaacaagaatctaagacaatgctatcagtgtaaacattaaagatagacataataaatgatcaa

SEQ ID NO: 239652 - DNA, 347 bp, Glycine max
ttatttgcacgtgtacctatattgaaaaggatgacttaattcaatcgtttaatggtaatggaactcgtaaatctaaaacctagacttcctgcattattatgctatttcaagtgaaagtcgcaatattcaaataaattatatccattttcacagcatgatgctaaataatatctcggtatttctttcctgtaaaccatattcatgttatgatgtggatatctttgttttatcacatataaataaccgatctctcagatgaatctaccaaagtttgattataataatgtgcgttattcattcttctgagaatacacgactgaaagatgacagtgatatattacaccaac

SEQ ID NO: 239653 - DNA, 427 bp, Glycine max
  unsure (1)..(427): unsure at all n locations
agcttactaaggcacctgttctatctcttcctgacatttctaaaacttttgagctagaatgtgatgcctctggagtggaagttggagttgtattgttacaaggtgggcaccctattgcttattttagtgaaaaaattcatagtgccaccctcaactaccccacctatgataaagagctttatgccttaataagagccctccaaacttgggaacattaccttgtttccaaggaatttgtcattcatagtgatcatcaatcacttaagtacattagagggcaaagcaagttaaacaagaggcatgcaaaataggtagagtacctagagcaatttccatatgttatcaaatgcaaaaagggaaaaacaaatgtagtagctgatgccctctctaagagacacacattgttttgctccctangatctcaaat

SEQ ID NO: 239654 - DNA, 395 bp, Glycine max
  unsure (1)..(395): unsure at all n locations
aaaatgcacccatatacaatcaaggtagcttcattacctagattatttacatgtacttccaaggtggatttgttatttacatcacacacgccctcttggctaaatttacatacatgcatactccaagcatttcggggtaccaaaaattgcacatgcgctcatcttggtatttctaatacctatacatatacaaacttcatgatgaatcttgactacctacgcaataaggtgctacatttcatgctttttnttttnttttcaagtttttgctacctaaagccacatgcaagttcaagcatattttcctttgctgactaaaattgtattcaaattagaaggtatatatntttttgaatatgtttcttcacataacatgaacacattatatatatatt

SEQ ID NO: 239655 - DNA, 380 bp, Glycine max
gcagcttaccattcaatttcgagcgttccgatatattacgggactcattctaacatccgagtaaaaaacttatggtcgttggaatttgctcagagcttcgatatatcaattcgagtgtctcaatatattacgtgactcagtcagacaaccgagtaaatagttattttcatttgaatttgctcagagcttcggtattcaatttcgagcgtctggatttattacaggtctcaatcagacatccgagtaaaaagttattgttggttgaagttgctcaaagcttcaacattcaatatcgagcgtttcgatatattacgggactgaattagacatccgagtaaaaagttactgtatgttgaagttgctcagaactaaggcattca

SEQ ID NO: 239656 - DNA, 381 bp, Glycine max
  unsure (1)..(381): unsure at all n locations
gagaggttaatgatacaacgagatgatgttcttatgataggttgcatcaaatggagaatagagatcataatgaagaggaaaggaggagaagagggaatgatggtgttcctagacaaaaccgaattgatggtattaaactcaacattcctccatttaaaggaaagaatgatccggaggcctacttggagtgggagatgaaaatagagcatgttttctcatgcaacaactatgatgaggaccaaaaggtgaagcttgccgccacggagttttccgactatgctcttgtgtggtggaacaagctacaaaaggagagagcaagaaacgaagagccaatggttgatacatggacagagatgaaanagatcatgatgaagcggtatg

SEQ ID NO: 239657 - DNA, 460 bp, Glycine max
acctgcggcatgcaagcttctaagtgtagacataggtgactgtttgttcaatacaattacttcactcacatcagctgtttcaataagtagtgtctccaagagtggcttctcatttattaaggaacacaaattaagtcttttcgtgttgtcccctaaaatctagcaccaacagttcccttaactgctttaactttcctacctctttaatgaccactccatcatcatctataatcactggaggtatctcttgtagggatgtcatgcctccaatatccttccattgaattgaagatatatagccactcagaagatgacgtacctttttaagcttattaatctaataaaaattgaccgaatgggtgagcttcctatacttccactaatatcatcggttgcaattgtcatgcattgaacagattgatcacgcccgtcaatatactggacaaaccctgtatccttg

SEQ ID NO: 239658 - DNA, 413 bp, Glycine max
gaagtgaaattgagaatgaggtaaatttggagccaactctcacctcacacaaatctataacatcaatataaacttgcttcaactggatttacgcctaaaattccaccgaatcaaaatttgacttctcaacacccaattttaccctagaaatggctcttgccttcactttgatcatttgtttttctctcttgcacaacccaagctttctcataactcctaaatgacatttcaaactaggattaattccctttaacctccaaataccattaaatccagatttggccttccaactctcagagcctcacttgtttttcactcataacaccacattctcactgtctaaccctaggttaaccctacccttcatctctaacagttgtccataagcaatttcagcataccaacatcaaaag

SEQ ID NO: 239659 - DNA, 281 bp, Glycine max
gtgaacatggtgtcacatttgcgattgaaacaacccttctagactgaggctagctgaaactttggtgtagctcttcatcacttgtactataccttgccaagagcttattctttgtggattaccaactataagtgcccattggactcccacatatctgtgtacactcagggagggcttcatgtcccatgtacttatctacatcactggaagacctattggaagtttcttgttcttgcaaatggttaatcattgagctggagtttctcccgtaccctctcgtt

SEQ ID NO: 239660 - DNA, 482 bp, Glycine max
  unsure (1)..(482): unsure at all n locations
tgtagaatggctagacatgatacatgtcagggtttggtttgttttattgataaaagggatgccccacattatttccatgacacanatgcaaaaatgatgatttggaaattttatgcaaaactggtcatgcatgcacctatgtggacgctcaagtgtcaaatttttatggtcatgtgatgctagggctcangattcatttcctctattntaaatcaacccaatgtttccaaaatatgttcttttatcaatttgtgcattcatcctagtccatttcgggcgtccggngaaatttcacagcattcacccttcaggtgtagacacatttttcaaaaattggttatgatcaatgaattnttttcaaagaaaagttggaaatcatctcttttcanaagcatgtcnggtnttagctagacaacttaatttctctttttccaccttttttcttacttgctttctttttcttaattgctcctcttgtcttt

SEQ ID NO: 239661 - DNA, 326 bp, Glycine max
agcgtttgttggaccttgttcaggcaactatctcctctctcaaaaccatgctatgtgctcgcgaccggtccctttcttcccttcgcaacttgagttcactattgctaccccatatagctccgcgaaatttgttccggccatactcttacttgcgagccctcttggtctcttgttcaagggctcttgcggtaattgcattctcttcccgtaacccggcacactacttccgaacgtgtgtagcggccaacttgaacttctccttggcaagtattgcctttcctaactcgctcttgagagcttggacttcttcgtcctcttccggtgct

SEQ ID NO: 239662 - DNA, 378 bp, Glycine max
  unsure (1)..(378): unsure at all n locations
agcttaaacaagctgactattgatggatctatttatttagngcttcatnttgccctgctaatttctcttcaaccatgatacaaatgttcttctatcttcaaacacagctacacaaatccttaataattagtgatctatcatatattttataacctttctctttagatttttttctcctcataacctacctttatattctcaaaccttttgtagtttggtaatcaagatggaatatgctctgaggtacttcttcaacatccattgagggttgttttgtggaaatgatggtgaaatttttattgcagatagctataatcacaaggtagacaactcaaatacttttgaattgttatggttctcgcatgcagtatatcttat

SEQ ID NO: 239663 - DNA, 389 bp, Glycine max
  unsure (1)..(389): unsure at all n locations
aggagcacgaaattgaaggaagaaaaagggagagaagttgaactttgagttgtgtctcacaagactcccattcatcaaagttacaacaagtgttacacatgcttctatttataaactaggtagcttccttgagaagctctcttgagaaaacttccttgagaagcttctttgagaaaacttccttgagaagctagagcttagctacacacacccctctcataactaagctcacctccttgagatgcttccttaagaagattcctaaagaagctagagcttagctacacatacctctctaatagctaagctcacctccttgagatgagaagctagagcttagctacacacccnctataatagccaagcttcaccccatgacananaacatg

SEQ ID NO: 239664 - DNA, 427 bp, Glycine max
  unsure (1)..(427): unsure at all n locations
cacctgaggcatgcaagcttgagatgaggaagtgttgaagggtgaatcttcctgcttttattgttgaccacagagtggtacctgtagatatgtcgcgggggtcaagagaccttggggacgtcaggtggggtgctattgcccaaaaccaagcttgaccaatcccgacccaacccgggcatagtcggtcagtgagaacttgtgatgtacctaaacaggcgagctcctggcagtcaacagataaaaggaaacaagaccacaaagcaaggaggcttgtggtggctggccaattgcgaattttgtgtgatatgtgattatggcctctggtaatcgattaccaagggtgggtaatcgattacaaggcttataaatgaagacangaggctaagatggtctctggtaatcgattaccaaggggtgtaatcgatta

SEQ ID NO: 239665 - DNA, 408 bp, Glycine max
  unsure (1)..(408): unsure at all n locations
agaaagacacactcattccagatatatatatggtccaaaacggttttgcaacactaatccacgcatcaaaggagaaataagcttacttacaacatacacacaggacgatagaggttcgttaacacattatcaatcaatatcaagactacttgcatcacccaatggcttgccataatgtccaaccgcacttcgcanattatagagatggtcagtcttataacttatgactcaacagtggatttatggtatagcagacattaaggatgcaaggcacatacaagcattattattaagtcttatttaatcacctangagaanatacaaataanaattcaagcatgctcaacaaaagtactcataagtaaccacacagagtgcacaccagaantatggtagcacataacacat

SEQ ID NO: 239666 - DNA, 473 bp, Glycine max
  unsure (1)..(473): unsure at all n locations
ttaagtcacctgatgcatgcaagctntataagtgaagtcaggtgcagccatctcctttttattcctctcacgaggtaaagtttgagccatgttctcaatatgaaaattagcagccgaatgctcaaaatcagaatgttcagaatcaccagcaacaaaatgctcagaatgcatggaatgctcataatgctcaaaatgatcaggatgcacactatgcctaactaatctatgaaaggttctatctatttcaggatcaaagggttgcaaatcacctgtattgcccctagtcatgcactatatgcagcaaatcatgtatttctcaaacaagcaccaggggtaaaaaggggtaaaactacaactatactctaacgatattgaaatgagctgaaaatttgtgagcaacaccctaaaatcctgaatagatagcacataaattntcagacaaaaattcaaagtctaactatgaaaacttccta

SEQ ID NO: 239667 - DNA, 239 bp, Glycine max
ttttttttagaatgggttatacccacaggtgctcaggggctaaccctgcactaaagtttggaagttccgctccctttttgttttgttgtgaggaaagcacgtgatcactgaaacacaggctccttttctataaaaattgcgacctatcctatatcctgatctcaatggagtggaatatacgacaagcgacattgtatagagtataaaagctagcaccgaataccatttcgaccaaccga

SEQ ID NO: 239668 - DNA, 412 bp, Glycine max
  unsure (1)..(412): unsure at all n locations
atcttctcccacattatcttataaatagggttttatgttgtaanaactttcgttcagccctcctggtaattcagattctcttataattagtgaaaaaaattggttctgtgaagaaaatccgagctgaggcgcttccgtaacgtgtacgtaacgtctccgtgggttgattacgcgaaggtttaccaccgttcttcgacgatcttcatcgttctgtcggacattaaccgggaaggtccctaattcaaactgtacaattcattgtatgtgcccgtattggtccttatttgcttttacatgctttcatttacatttctctatacttccataccccgttttgacgagctttagacatttgccttaattattcttccgctaatcacaacatgatataattttcacacgacatttgatt

SEQ ID NO: 239669 - DNA, 270 bp, Glycine max
atcgcttgctgcacctcggattcactgccacccgcatctccgggaacactgatcacagggatgctgtttttctaaatgacactgtggattgctgctcgggaatgtctcagatccgatgcggaggacaatcagcttagcgaacagaagggctgggtgtcaattgcatggaaagccgcgtgaatcttcccaggcatttccttttagatcctcacaacctagaacttcctattgtggcgaagccacagcactggagccatcccactttcactc

SEQ ID NO: 239670 - DNA, 459 bp, Glycine max
  unsure (1)..(459): unsure at all n locations
agctntgaataatgaaaatagcatagcagattagattgccctgtacgaatcccaaggcagctatttaaaaagagtcactcaaagtcattgggccctattacaatactctgacccataacgaaataaacactgaacaacataaaataaaattgcgaaatttcctaattagaaattaactaaggtaagcgctgctttattttccctcttcaagtccacaaccaaaatccggattaagcccaatgtttcattaattcctgaaattagattaaaaacatcaaattagctaaatgagcccaaataataaaactgcctaattaattgacaattaagaccaatcaataattaatatggtgcagaaagggtttagaaaatagaagataatgatggcacatcacccaccttgcaacaacatatctcccacacctacaccagaagcatcacactctagctcaaaagttt

SEQ ID NO: 239671 - DNA, 429 bp, Glycine max
gtttctagaaagctttcaggagctttttttctataatagaaacatgtgtcacacttgctgttactttgatgaatggaagtctatgagacacacttaaaagttcatttctcctcgttattccttcaatatcgtgctccccccttctctctttcttttccaccattaaaggatccttttaagcttcttatccaatgcacattcttggtggtgaagctccttcttccatggcttattccctagtagatggtgtctcccttctcctcttctactatggcttacgctgcatctccatggtggaaaatcaccattgaagaaccttattgaaactcacagatcctagcctcatagaagctccacaagcaagctttcatcttgaaatgcatgcaaactttcactcaaacaatttgcatcggttatagaatctcacta

SEQ ID NO: 239672 - DNA, 258 bp, Glycine max
cttgagagcttagcttgctcagttcaaagcgtggagattaatacgatccgtactcggacatgccgtggaaaaggtatgacattaccaatctctttacaggactgcttgcgcaatacaagccccagcatatattattatcctgtactcgacatccgagtgaacaaggataaccatttacaattctcaaaagccttcagctttcaatgttgaacgtctagagttataataatccatgtcccgaattccgcggtaaaagtg

SEQ ID NO: 239673 - DNA, 264 bp, Glycine max
tgatcaatttagcataaattgctaaccatcatcatcatatgcgtggcatggaaacgattggacgcattcccttattcctgttccacttgctaaacaattatcctgacatacatcatgtctctacatctgtaagcctttagagccaaacatcattatttaccataacctcgacttaagatggaaatttccgaccttacccttgttagatagaaaccatgggtcttccaagagaattttcctttaccttgtgttgcaattatgact

SEQ ID NO: 239674 - DNA, 477 bp, Glycine max
  unsure (1)..(477): unsure at all n locations
agctntgaagtgcgtgagacaagtaattcatttattgtttggtgaacgaaactcatgacaaggaatatcaggacgtaagagtgtaagacaataattttcatttaatgaaaccaagcttcatccattctctggtcaatacctcattcgagtcaatcctcaaattatacaaatatagtccttctatgcataaatgcctgacaaaatgttgggtgatcgaattatacaagcatctattctatctacctaaatagagtattaagcaaataccacaagtttttttgtgtttcagtttggtaaaactcattacttttatcaacaatgtattatttagtatatataaaaatgtatgtgtcctacaaaataattaaggctatgaataacttatgacttaataaaatcaaaataattctttgagctcacataatagaaataattcgttcgagttaatgtttgtatgttatgttatttcaccttact

SEQ ID NO: 239675 - DNA, 272 bp, Glycine max
tacagggaatgcatatagctcaacacccgtgcagcctaaggcaccctcccaaagggaagctccccatagttgacaactatgaacacagaatcggctggccgtgaattccaacacgacaaggaacttccctgcgaggccattaacagaattcaccccactcccaatgacgtacgaatacatgttgccatcactcatcgacaatcatttggacgtggtaactaacggatgggtctccaaccccgtgtaaaaagtggtatgacactaatgcaact

SEQ ID NO: 239676 - DNA, 335 bp, Glycine max
agcttcatctatgttgctgggttcattttgttatataaaagccatgttattgcataatatcccaagtctatggtgagatgatactcctttcgatattttcttcataatgttgcccacagagaggttcttttgagttcttcattctcttgggaggtctttaagaggtgtgggactgatttctttgctttgttcaaactcttcaagtttggttcatcttcgagtgtttttccttatactgaaactggctcttcatcttccaaaaattttttgaacaatagaataggttctcacaacaattgtattattcttcaccacaagttctttataacactcta

SEQ ID NO: 239677 - DNA, 418 bp, Glycine max
  unsure (1)..(418): unsure at all n locations
atcaacatgttntacaagaaagagctcaagtgaatgttggctagcggatagtggttgtaccaaccacatgacccatgatcaagagctttttagagagttggacaaatcacaggtatcaaaacttagaattggcaatggtgatcttatcactgtggaaggaaatagaactatagccattgaaagttatacaggtacaaaattaatttatgatggtttgaatgtacctaagattcatcaaaacttgctaagtgtgggacaattgattgagaaggggatcaaagtcatctttgaaaatgagcattgtttgattaaagatatcaacaacaaagaaattttcaatatcataatgagagaacaaagttctcatttgtcaattgaaggaggagcaacaacctatccattatctgtaatatacaaa

SEQ ID NO: 239678 - DNA, 262 bp, Glycine max
gtacacacacccatctattaacgatgcttacctccctgataacacaatctagagcgttagtacacaccactataaatgcttagctcaccttcatgacatagacacatgaaatggaccaaaaaagaacctaccacatagactactccatccgcatgaaaacatgggtaataccctgtactactaaaatggccaaaagacatggccgcaacgaacgataaacactactctaatagttaccaggaagaggtgatccgcccttgac

SEQ ID NO: 239679 - DNA, 287 bp, Glycine max
caccctaaagacccttcagaaaagatcgttatcatttaaaagaactctagtctgattttttcatgaggtcgtagacaaacccgtttgcgactcaaaataaaaagaaagtaagtaccatttcacatctaaaaatgagtgtgccttgaacaactgaaggctaaccttctaactaaacactccgctaaattcattgacggtcttgattttgagttccaatacgtgggactcacctttctcttgagccccggacctgtcctgctgaagctgtgacgattctccataattaa

SEQ ID NO: 239680 - DNA, 353 bp, Glycine max
  unsure (1)..(353): unsure at all n locations
aaatgtatganatgatatgggggtgataggttggannngatgttanttgttaattattgattagnnttaaaatttgagattgagtgataaagtganattggantggttaggaattattgattgaaatatgtgtgatgattaagtttattaagttgtgttgattaataaaaatgatattgtatataaaaagatgnatgtattatgaaaaaaaattgattgagtnattgtatagatgtntnatnatatggttaatgtgttggaaagaaannaaatttgtaaataaataatgaattatttttgaaattgaggaaaagtgagtttgtttttatttggttaaggaaaagaaaaattgt

SEQ ID NO: 239681 - DNA, 434 bp, Glycine max
  unsure (1)..(434): unsure at all n locations
agcttgaattttctttgctccggaaacctcttctttcttatgtgaaccaaaacccatcctctgggttggataacaacctttttgcaccccttgtttgcttgtctagcataactctcattcctcttttcaatttgggccttgactctttcatggagctttttcacatagttcgctttggcttgtccttccttatgcttaaaaattgaaatattaggcattggcaacaaatcaagaggagttagtggattgaaaccataaacaacctcaaaaggagaacagttagtggtgctatgcacaaccctattataagcaaattcaatgtgaggtaagcaaacttcccaatttttaagattcttttttaaaatagtccttagcaagatacccaaagtcctattcacgacccctgtttgttcatccatntgagggtgacaagt

SEQ ID NO: 239682 - DNA, 398 bp, Glycine max
  unsure (1)..(398): unsure at all n locations
catgctgacctaaaaatcaaccttctttcatagaatagttcgtattacacaatctaagaatgttatatccttgctgaaaaaagatgaaagatgaattgattattcaagatctgattgagatcgagcaacatgtcttggagttttataccaatctttttgcaacagataataatataaaacatagtgatttggtggagaaggtgattcctagcctcatcactcccaaagagaacaccttgcttactaatctgcgttcttttgaagaagtgcagcttgcggtttttggttgaaaacttgtgcaatttctctttatcattnttntactgagtacaccattagtttgaaaatagaaataaacaaactactattaataaaccaacacttgggaaaagaaattc

SEQ ID NO: 239683 - DNA, 434 bp, Glycine max
agcttgtatataccaaagagacagagatatattttgtttatccagtctaagtcttatcgtacttgagagggatgtgtgcagcatacgagtatggtacaaatgttttgtgcactcctttgatcaatgtgtcagtttagccttgttgtgaaattttggcctctttgagaattgcatttttaaaatacgttgttacaaaaaaaaaccatagaaagaaataatttttctgaattgatttttttactgctttgagttgcttactaattataacaaaatctcacttctttcacatttgtgcatttgctgtcacatgaggcttgtctgtgttggccttattgagaaatattatggagtacactcgttgacagcaattgtgtgtgtctactactctactgtcatataaaaacactaaaaagaatttggctatacaccatgaa

SEQ ID NO: 239684 - DNA, 331 bp, Glycine max
  unsure (1)..(331): unsure at all n locations
tttctaaaccatctagatacaatcctgtgatatctgtaaggttttgaaacattgctatgtgttggcttgttatgtggaattacgtgagttatgcttaagtaagttgtatctcatttatatgatatgtatatctagttgtcttgtttctctatttgttaagaatatgataactcactccatgtgtgttgttcgtgtttggatcctgngatgatcttgaaccttgtgttcacgggagtagatgactaggtgaattgttttaaggaatcttatgctaaaagatgtccggacacaatgctctgatacgatgtgacattggggtataggtctctat

SEQ ID NO: 239685 - DNA, 451 bp, Glycine max
  unsure (1)..(451): unsure at all n locations
agctngagtgtatagatcatatgcatccagctttgttttaaatgtaagatgtcctcgactgtctaagtgacttggtacaaataactagtactagtgacttctccataaattaacttctctcgcataaagtgacagtcaatttcaatttcatttgtggaagacctataattattcaaattgaaggcaagactaatgcatctaggacaattgttgggactagtgcacctatgacataaatggggccagtatatttgggacaaagactagggctagtgaatctaggacatagacaagggccatggcatctatgacaaagtcaaggccattgcatgtgggacaaagataagctagtggaagccattgttgagagagacgggaaccaaaaaacacataacagtacttacgtgttagagatctctatgacaaacagagatcagatttgggaagattg

SEQ ID NO: 239686 - DNA, 360 bp, Glycine max
  unsure (1)..(360): unsure at all n locations
ttttatatatatacaaatgtttgctggttgctcttgaatcttgatttcaggacttgtattgtcatcatcaaaaagggagagaatgtagatgcaaatgtctttggtgttttgatgatgatcatgatgatatgatgcaattaatgcacatgggcttttcaagtttaaattcaagacaatacttcaagattacaagtcacaacatcaagatgatcactagtatattaggaagggaattcctaattgaattagcanaaggtttggccaagtaattcatattaaaaagtgtttttcaaaggatttactctctggtaatcgattaccagaggatgtaatcgattaccagtgtgcaaatatgcttta

SEQ ID NO: 239687 - DNA, 342 bp, Glycine max
  unsure (1)..(342): unsure at all n locations
cttgcaccanggacacgttcatcttgtgttttgtctagacttacctaggagggaccttgggtttgtcgagccttttgatatgcgatactcaccaagggtgtaccttgggtttgatgagcctttggcagaccgagactcatctagggtggaccttcagtttgacaagcctttggagaaacgagattctccaatggcagatcctgtgtttgacaagtctttggataaacgagactcaccaattgctgaccttgggtttgacgagcctgtggataaatatatttaccaagggcagacctcaggtttaatgagcctttgctgaagcgagactcaccaagggcggac

SEQ ID NO: 239688 - DNA, 351 bp, Glycine max
gatatggctccggaccgtactcaactgcagaatatgtaccagaaagagggtgaaacccttaaagaatacgcgcatcgatggagggatctggcggcacaagtagctcctcccatggttgagagagagatgatcaccatgatggttgacactctgccaggcgtctactatgagaagctagtgggttacatgccgtccagctatgcggatctggtgttgccggagaaagaatcgaggttggattgaagagaggatagtctgatcacgtttcctccacacacgtgaacgccacaagaatcggggcaacaggggctaaatggaaggaaggagatgcccatgccgtctcttcaacac

SEQ ID NO: 239689 - DNA, 458 bp, Glycine max
  unsure (1)..(458): unsure at all n locations
agctatgacactgtagactgtagtttattttttattaatatacttattagtgggaactaatataccaagtttataagagtcctagttatttgacaaaaatatattatgatgaaaatactagttggatttagcggcttggcaagcgatagtcttcatgacatgaaaatctattgaatactctcatttgagcactattttggtcttttaaaattgtagctgaaacttacatgacttcaatgtacagttaagcttcatactttctggcatgaattctccttaggttggtttgctcgactacattgaccatatcattagttaagaatattatgcttacgattatctcttcttattggacatataatctgtattggatcaattacactgcattacctttctctgtcaagtttggaaattctctangtatgaaatcagatcgggaagtccaaaagaaatcctta

SEQ ID NO: 239690 - DNA, 294 bp, Glycine max
caaaaaaccaaaaaatgggccaaaaaggatagcagtgccccacaaatgtgggcatcagcaatattgaaagcatttgcctcataaaaaaaaaagctttcttcctcttcaaacttccttttacttcctctcacaagctttctcacttctctggacactcttccgcagctcctgaagcctgaccattgatcaggagggctctctactaggctgcagacatataagattaggaggcaggaactaggaaaacccgcaaaggacactgggacggcgctccgaacccgaggcctcgactcg

SEQ ID NO: 239691 - DNA, 477 bp, Glycine max
tcacctgcggcatgcaagcttcaccgtccatcctctcttaccactgtctcaatcttccacctcaaacacaaacaccaacaccgacacattgcttcgtttccacacccttatacctcattgcctcgctcacgccctctcaatctcatcatcgcctccagaaccttctctccttccaatactctccaccttcacttcattcctcaagctacactcactgcttccgaagctcaaccccggtgagttttcgttgcaattgcaaacaccccacgcctctctattttcacgagctttaattactacaggatgtctgctacaaaaattagtttttgctttgtgggcatttgcgattcacttcagtttcaatgaatttaatcaaaagaccaccttttttttttttttgtttactcgtgcatttttcaatattactgctagtcactcttgggagaccggatatgagaatggtaatgggaaagatgc

SEQ ID NO: 239692 - DNA, 436 bp, Glycine max
  unsure (1)..(436): unsure at all n locations
tgtggttaataaaattaaataatactattaatcctttttacaattagtataaaaaattaattaattntggttatatctaaatctgaggagagtgtatcattttttttataccaaaaacaaaaaaatgagtaactattataagctactagtagtctcactctcaatttataactttataatatggaaggtttcttttaagttttcctgagaaaccaaaaaatatgagtaaacaggtgaatgcttaattagatgggtcttagaataaataaataaaaaattcttagtgattcttaacataaaaaaataacaaattctgagtgaatcctttangtagagaacttgtgtgtctctagatagactttacccggaagacttaatcaacaagaaaacaagcgtgtcactctcaccctttatatatggtggctctatctaactc

SEQ ID NO: 239693 - DNA, 438 bp, Glycine max
  unsure (1)..(438): unsure at all n locations
actcacctgctgcatgcaagcccacaaaggaagcttcaatggtgtttagtgtatganagananagagaggagggcgtgggaatcgaaggagattanggagataagttgaactctgaagtgtgtctcataaatttctcattcatcaatattatgacaagtgttacacatgtttttatttaaagcctatcacatgggaagctcccttgggaagcaagaaaggtagcttccttggaaagctagaggggggctactcacacccctccaattgctatgctcaccccatgccaaaatacatgaaaatacaatgggaagcttccttgagaagcaaagaatgtagcttccttgtgaagcaaggaataaagcttcctcgagaagctagaggggggctactcacacccctctattatcttagctcacccccatgttataatacatgaa

SEQ ID NO: 239694 - DNA, 472 bp, Glycine max
  unsure (1)..(472): unsure at all n locations
ctggtgggacatcttgacttgctatccaatctgacattctttatcatatctgccctcttctattttcagattgggaatgcctcttacagcaccctctgcaatgattttcttcatgcctcttaagtgcagatgtccaaatctttgatggccatatttgacttcatcttctttggagaatagacatgtggaggagtaactggtttcttgaggtgtccataggtaacaggtgtcctttgatctgctgcccttcattaggacttcactcttctcatttgtcaccaagcattctgactttgtgaagtttacattgaatccttcatcacacaactgactgatgctgatcaagttcgcagtcagttccttcaccagcagtactctgttcagactangaagtccatcatggactagctntcccattccagtgatnncttctttagagccatcttccaatgtcacatagctagtggagcag

SEQ ID NO: 239695 - DNA, 275 bp, Glycine max
atcaatattatgcctatggttggccttccactaagtatggattcaacaccctttcgtattactgataaattcctttggaagtggagctgactaaaggaggaggaaccatcatatttgaggtcaaactcttctaagggggaggggatgatgcactcgctcctatgaaaggaccatttactacagccatgagcaatatgatccaagacgatcgggctatagctgattaagatagccttatggatctgatgaaccctgaggtacactttagatcctat

SEQ ID NO: 239696 - DNA, 438 bp, Glycine max
  unsure (1)..(438): unsure at all n locations
ggatccttatatcacctgctgcatcaagctgagatatgaatgtagaaggggtttcttccgcttnattcgttgaccacaaagtggtacctatagatatgtcgcggggggtcaggagaccttgtggacgtcaggtggggtgctattgcccaaaaccaagcttgaccaatcccgacccaacccgggcatagtcagtcaatgagaacctgtgatgtacctaaacaggcgagctcctgacagtcaacagataaaaggaacaaagaccactaagcaaggaggcttgtgtggtggctggccagctatgaaatttgattgatatatgggatatgggctctggtaatcgattaccaagggtgggtaatcgattacaaggcttaaaaatgaagacaggaggctaagatagtctctggtaatcgattaccaaggggtgtaatcgattac

SEQ ID NO: 239697 - DNA, 464 bp, Glycine max
  unsure (1)..(464): unsure at all n locations
actcagcttctcaggaagctacctagtctataaatagaagcatgtgttatactcgttgnaactttgatgaatgagagtcttgtgtgacacaactcaaagttcaaattctctccctttttcttccttcaatttccggccccccccactctctctttctctccctatttcttttcctccattgaagcatcctctccaagcttcttatccacggctcatcttggtggtgaagctccttctttcatggcttattccctagtggatggcgcctcctctcacctcttctcctttgtcttccgctgcatccccatggtggaaaatcaccattaaaggatctcattgaagcttaaagatccagcctncataggngccccacaagcaagcttcatcatgtgggataagagcatcttgtcaggtgatgtcttttgcttctctatcttttgtcgagaatatcttaatacctgtct

SEQ ID NO: 239698 - DNA, 450 bp, Glycine max
  unsure (1)..(450): unsure at all n locations
tcacctgatgcatgcaagctttgagccaattcaaacgacaataactttttactcggatgtctgattgagtcccgtaatatatcgagaccgtcgaaattgaatgttgaagctctaagccaattcaaacaacaataacgttttactcggatgtctgattgagtcccgtcatataccgagacgctcgaaattgaatgttgaatctgcgagccaattcaaacaacaataactttttactcggatgtctgattgagtcccgcaatatatcgagaccctcgaaattgaatgttgaagctctgagccaattcaaacgacaataactttntactcggatgtctgattgagtcccgtaatataacgagacgctcgaaattgaatgttgaacctctgagccaattcaaacgacaataacattttactcggatgtctgattgagtccccgaatatatcgag

SEQ ID NO: 239699 - DNA, 160 bp, Glycine max
tctcggaaagtatgcgtgaatgctaagtaattcattcagcgtgatttacggagcatcaatatcagaacgatgcgttgatggtaagtcacatcattcagcgctgattgtatgatatcgactcataaagttgcttgaatgtaagtacataatcacgctgttt

SEQ ID NO: 239700 - DNA, 444 bp, Glycine max
agcttaacatggatgaaacagaagaactttgtttgtttcatatgtggacataaatggaatagctacagaggcaaacacataaattatatatattaatatattaatgtggtctaagaacagagcatggtgtgataggattttttttctgatcaagtaaatctgaaaacagaacatgaatattacatggtctataaaacataaacactataagagacagcaaataaatatgagatcactatagcagggaatgtgtaagatgagcaaagtagacaacaatatcgctttatcaacaatgttcagtttaccataccaaaaatttgtagtacagcagttataaattactaatatagcagattaaattaaacagagtcatttcattcaaattcaaaccatgatatctcataattgagtgatacatttgttaacaatgtcatatgacaaaac

SEQ ID NO: 239701 - DNA, 405 bp, Glycine max
  unsure (1)..(405): unsure at all n locations
actttcagccttgaactctgattaccaagaatactagcgacgtttctctgttatgattactgtgagagggttgtagttgtgccactttttgtgagtgcgaaaacttctttntgtagttgtggcaccagtanggaatataacttcgttttcaaattctagaaactcctttgtggcgagtagacccttcataaagatgtttccaaactcgagaaacttgttccaaggtgacagtatccctcaagagcaagctcagattccagtattgtggaaagctccacagaaagggttatataagatacatgtcgagataaagaataacataggtaggagcatgagtntgatagtttgtgattctcaaggggaagtaataaccaccacaataaaatttatggagtcagagctcga

SEQ ID NO: 239702 - DNA, 383 bp, Glycine max
  unsure (1)..(383): unsure at all n locations
tgcatgcatgcaagctntgaacaatagacttgtgctgtcattttttatgtttaagctcgttttccacgctcaacaaagtactttcaacacctactgtacgttgatttgaccaatgttgttatgggaatgttgcgtatatcctttaaaaccttattgatacattctgagaggatggttgacatgtggacatatcgacgtccttatgtatcataagtcatcgcccatctttcctttgaaatgcaatcaatccatgttgctagggctatactcagttgaccaagtgttgctaaattgtgattaaaaaaatgtgcttgcatggaatgtgggctgcataaaatttgatatgaaaacaatggttacttattttgaaagtgtataaacgt

SEQ ID NO: 239703 - DNA, 394 bp, Glycine max
  unsure (1)..(394): unsure at all n locations
tatagcgcacaaaagagaagagaaaaagaataattgaagaacttcagcacgcagagacaccgcatggggagataatacctatgaagcctcagcctgtgagagtgaaacgttgatatgagaaggtacaacacaaatggaagacaatgttcttgcttttaccatgcaacctaaattatacatatgccaatgaatgagcaacttgcacagatgatgaactcatttaattgagtcatttcgtggtcaagaactatagatgcattgctgaattttggtagccgacatatatatctgtagtatatatttaaacgagctagcatcngagaactaaccaatagtatttttttttataattatacagtattcttatcggagataattttgctggaatcatgta

SEQ ID NO: 239704 - DNA, 454 bp, Glycine max
  unsure (1)..(454): unsure at all n locations
agctntctatgganagtcatagtctatgaatttttttgtacggcttggagggagatgtggagtaactcccgatatatccgtaacgtccgggtcaaaatatggttttcaaattaaattccaaattatccagaagaggagctcaccagataggagggtcacatggaaggagggaaggaggttcgcaagtttattcaatttgtcctaaagatttgttgtgaggagatggtagatgtagggatgaggactcaaaacatattaaacaaatttgtaatatttttctatttggcttatggtattggttcttgttctttattgggtgaatttttaataataaagatataaatgtgttgttgtaacaattgacatcaaagcttaatgatctcgtggcttggtaactagagagagaagagtattgaagaaacttaagatagttgatggtgaatctgtgcgggat

SEQ ID NO: 239705 - DNA, 393 bp, Glycine max
  unsure (1)..(393): unsure at all n locations
ggaaaaaaagggattctgaggagggaattgtgatgagaggttgacaaaaaagaaaagggtatgtcgaaagtgatggagaagtgaacaaaaaatgagaatgattcgaagaataccacacaaactgaaaccctatagggagagggaaagcttgcttaccccactcaaaggtggagacatttttggcctttgatcaaaagggtgtggcttggcattgagaacgtgtggagtgtggctggcgaaaaggaaaggaagaattatacttntcgtttcgtttgggacacagcatcgaaggataatggtggatgcaagcaagagtccaaagggaatgggtttgtggtttgttctcccgagagaatgacagtgacacacgcacacgcagaaacagcacaggga

SEQ ID NO: 239706 - DNA, 397 bp, Glycine max
  unsure (1)..(397): unsure at all n locations
atattttgtgaanacattgctatggatttcatcagttatctacctccttcccgtggatatactactatttttgttgtggaggatagactttcaaaatttgctcattttataccactgaatgctgcttttaatagcaaatctgtttgaaatgcatgcatttctaatattgtcaagatgcatgggtttccaaaaacaatactctctgatagagatagtttttttatcaattcatttcggcagcatgtgttcaaagcacaaggaactatattggctatgaattctgtctaccatcctcaatcatatggccaaactgaggttttaacaagacttataaatgaattgacatgctttgtatctattatcctaagcatgggtgatatgctccatggctcaattt

SEQ ID NO: 239707 - DNA, 429 bp, Glycine max
  unsure (1)..(429): unsure at all n locations
aaaaagagagagaaagcttcagatcgagtctatatgtctataaaaacacaaatcacaatcgctatggctaggtaagaccgagcaatcactgtgttctcgcccgacggctatctcttccaggttgagtatgccctcgaagccgtccgcaagggcaatgccgccgtcggtgtccgcaacaccaacaatgttgtcctcggcatcgagaagaaatccaccgccaaactccaagactctaggtactactattcttttcaattaaattccctccgtttcagatccctttccccttcgattactagggattaaccaagaaaactatgagttataaggagaagggcaggagggagagatcangggttcaaatcctctgctaacgaatacttaacaataacatttgcaatcaaagaagaaaaaaataanaatgacatc

SEQ ID NO: 239708 - DNA, 469 bp, Glycine max
agcttctacttatgtgagagggcgggtctttcttactttcttgtctcaaccgcgagctttgactaccgatcttacttcccacgatgcttctctttatatctgcctgagtgggcttatatcctataccatacttcccatgatctcctttggcatttatcaggctaattatgccgccgttgtctttgcctaaacccattccgggttcataaccgctccccaacataactcgggccatcattactgctgcattggacaggcaaggctgcccagataaggagtccacggaggaaatgcttaccacctcaaaagactggaaagcggtctctaatgactcctctgcggctcccacataaggcatagaggatgggcaactcaccaaaatgtcttcctcacctgatacgatgaccatatgcccttccacttcgaatttacaactttaggtgaagtgtagagggaacaactcccactg

SEQ ID NO: 239709 - DNA, 456 bp, Glycine max
  unsure (1)..(456): unsure at all n locations
acagctagtactattgaatgtagaagttttttcttctgcttgaaactgtttatacttgctgaattcaattactcataggtcaaggatgtgcacgcttctttagttgtacacatcatttagcttatttggtataataagaaccaagctaggtgtgaaagtggcccttttcagtatgagcacattgtccacaaagttatctcataagggatggattaagtgcaacattgatggtgcaacaaatagttgtctggggccttgagctancaggggaatatttcgtaattctaagggtgctatattgggttgtttctcgcactctttggatatatcaattgctcttcatgctgagttgcaagtttcatatttagctattgnaatagcacaaggcaaaggtccggatcaattatggttgataggtgactcattgtcattgccacaagttntcaaatctcatct

SEQ ID NO: 239710 - DNA, 473 bp, Glycine max
  unsure (1)..(473): unsure at all n locations
agcttcaacaccaagagagtgccttgtttattattcttanagatgtttcttcaatcgaagaaaagaatgagatagaggagggggcatgaaattgaaggataaaaagaggagagaagttgacctttgaagtgtgtctcacaagtttcacattcatcaaagttatgacaagttttacacatgcttctatttatagcctaggtcactaactaaatgaaagcacccttgagaagcttccatgagaagctagagcttagctacacacacccctgtaataattaaacttacctcctggagaagcttccttgagaaacttccttgagaatcctccttgagaagctaaagcttagctacacacccctctaatagctaagctcgcctccttgagatgagaagctagagcttatctatgcacacctctctaatagctacgctcacccccatgccaaaatacatgaaaatatataaaagtctct

SEQ ID NO: 239711 - DNA, 465 bp, Glycine max
  unsure (1)..(465): unsure at all n locations
gtgctgcatttctccctataagaatgcaatttattaattagcggcaagcgaagccaaatgtgggatattcatataaaagaagaaatctctgctaaaagagtcatggaagtcaagaactcaaccactaaattcagatgaattggcagagtgaagcaaaaaaatattacctgtcagaatcgacgttcttcaagccactgtttgacaggcatcactttatcattagcatctttccattcatttgcaaccacaacagctactctgtttgctgttaccttggcacgagccaactccctgtctagagtctttctttcctcctaaagaatgtcaaataaaccgtgcacaaataaatatgatcttaactagaggcagtacaatcaagaataaagcaaatgtgagtttgaacatgctgaagacttttcacacattacattcatntcttgaactttccgctgatgatacctcact

SEQ ID NO: 239712 - DNA, 424 bp, Glycine max
cttttatgtatcgaggtttattactttatgctacaacatataacacaagaatatgattaattagagaaatatcctcatatgcattaacttgtctgttagaaagacccaacgatttttacctattgctgtcaactgttacctatttgcatttactggttttaccatacaattagtttatgtctatttttaaccataaattatcaatgtgtgttccaacaatgccttacttctgaataaaactctgtctaataagcaaggtccctaagtttgatactctgatcactccgttgtatatttatatacttgacgacccagtgcgcttgctggtatttcatttccattgattatatttgttaaaaattggagaaaaacgaaccatatgggaaagtgaactattaccctcttacctacttaaaatattaac

SEQ ID NO: 239713 - DNA, 452 bp, Glycine max
  unsure (1)..(452): unsure at all n locations
cgtcttaaaaggggcttctatgacgagtggtagttntctttcttagaaattggataagaacccgcttaaaagaatatccttgaccttcaacgatgatttcctaataaaaggtcaattaaaaccgtcatataagatactttacaaccatcatagaagacaattcttcagaagtgttctcactttctttattagaaactcttagcattctgtcttttttatttatttggaggcgtacttcacacactatctctataattaagtaaaaagaatgtctcaatcattaattatcttcattgtatttttgtgtctaaattcaatttcaatagttttattttaaaattaattaccaatcgttaaaaaataatcttatattactatttaaattgtttcttgtcatataaacaatgaatatatatatcatatatatatatatatatatatatatatatata

SEQ ID NO: 239714 - DNA, 385 bp, Glycine max
agcttggagaggatgctgtaatggaggtatttattgagggagataaagagataggggagagcacgaaattgaatgaagaaaaaagggagagaagttgatctttgagttgtgtctcacaagactctcattcatcaaagttacaacaagtgttacacatgcttctatttatagactaggtagcttccttgagaagctttcttaagaaaacttccttgagaagcttctttgagaaaacttccttgagaagctagagcttagctacacacacccatctaaaaactaagctcacctccttgagaagcttccttgagatactagagcctatctacacacacccatcttaatactaagctcacctccttgacagaatacatgaaaatacaaa

SEQ ID NO: 239715 - DNA, 468 bp, Glycine max
  unsure (1)..(468): unsure at all n locations
actcagctcaaccacgcaacacnaatctaggtatccaaaccccttttttatatggattttcaaggtttgagaagtgaaattgagaatgaggnanatntgaagccaactctcacctcacacaagtccataacatcaatttaaacttgttcaaactggatttacacctaagatttcatcgaatcaaaatttgactcctcaacccccaaatttaccctagaaatggctctttgttcactttggccatttgtttttctctctagcacatcgcaaactttctcataagtcctaaatggcatttaaagctaggattaactcactctaacctccaaataccactaaatccagaattgggcctgccaactctcanaatctcactcttttttccactcacaacaccatactcccaccttctaaccctagggtaagtttacccttcatctctaacaggtttccataagaaattcagca

SEQ ID NO: 239716 - DNA, 435 bp, Glycine max
agctgtcaacatatttattaatgaccctctttcctagaattaaaataacttaatgccattaacctatggaattaaaaaaaacttaatggctgagtgtaactgaaattgtggcaaccaaaagtcacccccatcagccaacatgtcatccaccatttggtctcccaaaaggctgatgcctatgttgccaattgggcccttattacaacttgaactaaacctaactaaagccctttaagttgattaacccaaaacatatttttggtcagccaactttacaaggattgggccattatttacacaaactaaacactctaaaattgagacaaagtggtgtcatttagtcctcctccatttgggccatgatacaactctcaaccttggactcttctccttgaaacttggacttgtattcaaatatgatggacaacacttgtt

SEQ ID NO: 239717 - DNA, 346 bp, Glycine max
  unsure (1)..(346): unsure at all n locations
acccttggccttgttacatcccaatttttgtaatctatattaaaaaggattgttatttataaataaatagaattttcgaaaaatgattagattttattaatcaataaataacgggatataattattaattaaaataatgatttgagagaaaataaaaaggatatttcatttatctgtttgatagaaaataacataaagtttgtttttataaaataaaccaataaatatatatagagccaataataggccgagtactctangtataaatagttatgttaaatcacgtacttccctttagcttcatttttcgttttccccctctcctctgaaactccttctttttctg

SEQ ID NO: 239718 - DNA, 470 bp, Glycine max
  unsure (1)..(470): unsure at all n locations
agctngctcattacaacatgtttgaagagtgtggcttattaagaaatatatatttgcttagttctgccaatgtaatgtgtgttttaagttttgaccgtgatgaggatcacattgcagcaggaggagtttcaaagaaaatcaagatttttgacctcaatgctatttcaagcgattctgttgacatccagtacccattagttgagatgccaaataaatcaaagcttagttgtgtcaaataaatcaaagcttaatcatgaataaaatggatgaattggtttagcctttgtaattgcatattttctgtgaattcagccatgtgattttaaaatgagagtgacttgagttgtgtttatgaggtgttttaagtggtgtaaggtgaggtaaatcgcagtccattngaactattagttaaatgagtgagtcgaaaatgaaattggantcaagtctgtaaccaaactggtaattacttg

SEQ ID NO: 239719 - DNA, 421 bp, Glycine max
ccttcttcctcacgggaatgcaacaaaccctttctttctccaaccctttaaatgctgcttatcattacttaaaccattcaaatgcgttcaacccggttcagactgaaccctgctatctcctgctccatgcttactacctcggagctggttattccctcgaagctggagcacctggcggaggagtttggctccctgcaggagccagtggagcaactgaagcgcaagagtctaggggatttcaaattaagtacgcgtggcaatgacgtgattaggggaaaaaacaacaacgtttttatatagaaacccatttgtcattaagttgtccctagtacattctaaggcggttcgatagaactatcttagaatgtgtgtcataaaaggaaaattatttcttctaattacaaaactaccattcactatt

SEQ ID NO: 239720 - DNA, 496 bp, Glycine max
  unsure (1)..(496): unsure at all n locations
ctctatttcgacctgctcgcatgcaagccttagttttccctctaagcgctgtaaatttttttttctggaactctaagcctataaataagtacatttattctggagatttccctttctttccatttcaaatcttctatcatcattccgagataaaaaaaatccataataaaaattgtgacatcattcaaattgaccttaataaatgtaaatgcactccataggcatcatcgtacatgatgatgatgttgaatttgtttaatctcatcaaaatgttaaaagtgacgaacgaagtctattctttttgtatgcttgatcgcgtttattcttttaaataattctacccacaccattgtttatatattacaagcgcaaacaaatttaatacacattattaacttgaatatcacatgccaaacatgcattggtgtntttcgcatatgcttatagtattgttctttaattcatgctcggaattggctttatatcattattactc

SEQ ID NO: 239721 - DNA, 285 bp, Glycine max
agagagcaagacatgaagagcccatgggttatacatggaccgagataaaaagacatgagaagcgataggccggctattactcaaggacttgaattaagctccaaaactaaccaacgcaacaaggggtgaggagaattcaagaaaggatgtgctcatgaacaagcaatattgaagaaaagggaggaacaatggctcgattctaatggttgacaatgaatccgcgaattgtgagctcacgagtctgtgaaaggagattgctcacaagcaatcaagaagcacactaaa

SEQ ID NO: 239722 - DNA, 304 bp, Glycine max
aattacaaaaacctttccatagtttatggatcaaacagacgaatctgaatctttataatatttcctttgtttgagatcaaaagcacaaatgacatgatcatctttatccaacgagaaaaccatccattgaagagtgacccattgagtttaatcaaaacaatcacatggtaaatagatgcgcgttgaagatctccaactaatgatgaatgggccgcgagaaaaacatataattatagactaaattggaatttaggtgagcaaatcaaatgatatttgaagtgtaataatcaatagcaaaccgagt

SEQ ID NO: 239723 - DNA, 395 bp, Glycine max
taatggatagactcgatgatgtgagatgaatggaattcgtatatcatatgccttgaatgagcatgcagtgattacgaatataaagaacatgaaattaggattatgactgaaaatgctatgcggtttgtcagattgattgtgaaagaatgcgttaaccataacccggtgagagtatgaatgaatgcatgaaattaaggatgatgaaggccatgttttgattgacagtaaccgtttagccaacaagcttaccttgtgtatgaatgatgtatccctcgcgcctagtttgagctgaaagaatgattgtttgattaaaccttgagcctgacaagttatttcctctgaattctgatccaatgacaatgtcgacccgatgtacgacatccgcttcagacatg

SEQ ID NO: 239724 - DNA, 462 bp, Glycine max
ctgcagctataagaacaaaaggccttattcatttttaaatatgctttttaattaggacgcatcaacaataatcaagccatggctattgtgcatgcaatcaatgtggcataacacaccaaatgattataatgatggatggctcaaattctcacaaaggtaaaatcatcactttcaaattgagctttcataactatcatgacatgtagagaagaatcaaggatgtcaagtcacaaaatgtcaataacttttattttcaaaacatatacccatttcttgaacataccctataattcaaagaaaaacatgcaaagtcgtacgtgcacatgaaattgacccaaaatattaaactgaaaatccgacgatactaacaacattaacaaatatcacaactaacatattaacatatccaactatactatcataaccaatgaacactccgcgccatacttaaacaacacattg

SEQ ID NO: 239725 - DNA, 398 bp, Glycine max
  unsure (1)..(398): unsure at all n locations
ttctggaggaatcttctggagggtccaagtgggcttggttgctatctgcacccccatttntactaaatacaccccccttgctttattatggtgattctttctttgtgaagttacggaaacttacggatttcgcaacgatacttgtgttctttccgtaacgttacggaaccttgaggattacataatcatccccttttttgacttacggaatgttacggaacctcactaattgtacaacgatgcttccttntgatttccggtgtgtcacggaaccttacggattgtgcatcaataccttcttttgatttccggcatgtcccggaacttcacacattgcctaatgatgggtgccaagcacctcacaaggaccaaacaaaagttgcatgccaccaagcaaa

SEQ ID NO: 239726 - DNA, 368 bp, Glycine max
ctatctgggaaaggatcagtattatcaatgggatcaaaatcccaacttccaaaccctactatggcggtacgacaaatggattctgcttcaccttgttgctgcacctgtgactgaattatatatactaatttatattattgggggagtaaaataattaaggatatcttaataataaaaaatggaaacatgactcttctaaatagagacgtgaaaattgtaaaagaatatattttaatcagggaccacggaagtagtattccacattaggaataaccttgtggtgaagacatatagctctagctctatactacaaatattttcacttattgagaatatcttctgtataaataaatggtcgattaatttat

SEQ ID NO: 239727 - DNA, 306 bp, Glycine max
aaaccacaaacccttgcgacaggcaccaaatttctgattccaagccacctgggttaccaagctaaccaatgcattcagcttgcctccaaagcttctaaatttcacatgatgtacatggggttgagctacctcacgcactcccctaatgactatggcatcaattccggcgctacactgctgggagtcggaggccatcctctaattaaattcctggcttcagcatgagtcatgtctccaagggctccaccacatgcagcaatcatcatacttctctccatattactgagtccttcataaaaacattga

SEQ ID NO: 239728 - DNA, 462 bp, Glycine max
agctggggagacaaatggagatgatctctatttttcaaaggattttggaaaaaaggaagacaatggatgatcaaatggacatagatagtgatagatagtggattgtttcatgaataaactttttgctaagtagcccttccaaataaccatgaagatcctctggttgaactgttgtgggcttgggaacccattatcagttagagctttacagatgctcattattgatgaagatcttgaccgagtttttataatggaaatcaagaaaatggttactaatttacattttttgaagaatgtggcaaaaattaattgtatagtgggagtggattgtagtagaaaggtatatctcatgcaagaggatcggaattactatgggagggactcgtgaaagaagatgtggcttctttctcccttaaccttactcaaaagataattcaaaagatttatctctactataaacat

SEQ ID NO: 239729 - DNA, 416 bp, Glycine max
  unsure (1)..(416): unsure at all n locations
tggagagatngatggngaccangtgttgagaggaacgttatatttgtctacgtcggagtacgtgagctcaatgaatgtgggcaactggggatggtgggtttatgtgtgatctgtggatgtggagagttgaattgcaccatcgcccgaccgccacctattaccacatgtgatgggtaccccataatcctacaagcttgaaatgaggaagtgtggaatggtgagacttcctacttttattcattgaccacagagtggtacctggagatatgtctcggnggtcaggagaccttggggacgtcaggtggggtgctattgcccaaaaccaagcttgaccatattcgacccaacccgggcgtagtcagtcagtgagaacctgtgatgtacctaaacaggcaagctcctggcagttaccgata

SEQ ID NO: 239730 - DNA, 330 bp, Glycine max
aaaaaaaatgaagctgctatttatatatggttgcaaggagagcatccctgctgaaatcaaattctaagatttcactctgcctaatcaaataccgtccgccaatgcaatcaaaacccatatgtaacgcaaattcgctcagagactcttcgatgccgatatcctgaacatcgttcttgcgctcaagtctcaacgcctacgagatacgctttttcttcataaacctgaaaacaccaaataatgatagaatcgaaaaaggacaccgatatacatagagatagagagagagagactgagtatagacctctcttctgttgtggagcttgaagcggt

SEQ ID NO: 239731 - DNA, 422 bp, Glycine max
agcttgagatgatgaagtgttgaagggtgtttcttcctgcttttattgttgaccacagagtggtacctgtagatatgtcgcgggggtcaagataccttggggacgtcaggtggggtgctattgcccaaaaccaatcttgaccattcccgacccatcccgggcatagtcggtcagtgagaacctgtgatgtacctaagcaggcgagctcctggcagtcaacagataataggaacaaagaccacaaagcaaggaggcttgtggtggctggccacctctgaattttgtgtgatatgtggattatggcctctggtaatcgattaccaagggtgggtaatcaattacaaggcttaaaaatgaagacaggagactaagatggtctctggtaatcgattaccaaggggtgtaatcgattaccaggcttg

SEQ ID NO: 239732 - DNA, 453 bp, Glycine max
  unsure (1)..(453): unsure at all n locations
ttgatctaccaccaccgccaccaccatcatcttagtttcctattatttaatactactagtaccttgatatccagccgtgtatttggctattttattatgatatntgaacaatttactatntctttatttgcatggtatgtttgaacaaatattaattatgttatttgactatgtggcttttatatatttgatctattcatggttcttgcttcatgatttggtttatatttttccatggatgttgtatggatgcttagttatatttgtatgcttcacatttgttacacactttggctttttgttgatgccaaatggggagagaaataaggattaaatcaaaaactcacatgagtaatcaacttaattttaagataagcataaattcacatacaaaggcggagaatggaaatttatgtgaatgatcgactangaaaatgtgtgtgtgtgtgtttc

SEQ ID NO: 239733 - DNA, 464 bp, Glycine max
catgcaagacttgcttctacaaattataccgcatccctttagttaaaaacattgtttctcttggaaaacctgcatgcacatcaaggacaattatatcgcatcccattaattaaaaacatagttgtcttgaaagaaaatcagcatgcaacaaggacagacagatattctcatatctaggttccctgaccctaactatggtgtcaaaacggtaagttatataataaactctcctcacctattgtgagctccccacgggttcctcgtcacgtcacttgaagatttctttttcgtccccgctcgtcggttctacgcaagcccacgtcactacatgaaagggctgagggcatttcgggttttacaaagggacatcattttgaaattccgatcacgccaatgtgaccgggattcattgatgtcacgataataacacccatttcctgaagaaataacgtttacaaagtttc

SEQ ID NO: 239734 - DNA, 348 bp, Glycine max
  unsure (1)..(348): unsure at all n locations
gagtnngtattggacaaagaanaggtaaagagatcagtactgtggcatgtnttgttctaattaagtaaccctggttgtgaatatcttttgctactttatgtagttcatctaatgtgaaacaagtaaacttcaaaatatactattatatggcatttgggatgaatgattgaacaatcagattcatgatgattgatgatagtaaacaaacatttatgttatcttagacccttcccttntattcaactaaaaataataggaaggggttagacacaccaaataaactggtttctcatctgatatcacaacaatatcggntcatcttgatacttaaactcgcaaatctaacct

SEQ ID NO: 239735 - DNA, 379 bp, Glycine max
ctgcactactagtatcacttgtacaagatattgttttcccactaatatataaaaaacataacagaaatggagttccacaaaaaaacatttgaaggacaactcagagatgttgacgaagtcttcgaatattgcttgaaaaagagagagctggaaaacacttcagcctcataaggttcaaagcaagcttcgactttcttaaaaccaatagttggaagcttcataaccaatggtggagactcaacagagggatagagaaaaaaagaacagttgaaacggaattggaggaagacaatcaccatggtggtagtgggtgcacctatattgctctgaataagagtagatttgacaaaacgtgaatagattaaaaaagagggccgga

SEQ ID NO: 239736 - DNA, 399 bp, Glycine max
  unsure (1)..(399): unsure at all n locations
cccctaaaagcaaccactaacccttttcgcgcagaatcacgcccaattggcacctggaagttctaataactttaaaataaaaccagccctaaatagacattgcatatatcacaaaggatttttgaatgctccatacaccattgaaaaaatcttaaaatatagagaagtggacttattgaagaggatataagaaaacacctgtgtgtctgtggatgcattatctaagaaacatnaattttcaaattcagacttaatgaaactatgttggcccagtgaagtggccaacattgcccaagcctccatggcactgtcagcagtagaaaaangttctttcatctcctcagatctttatcatcaacactaatcattctgtggctaagaaactctgatagtaaatat

SEQ ID NO: 239737 - DNA, 328 bp, Glycine max
actaattttttacaaacatgacagaaatggaatggcactaactaacatttgatggacatctcttatatgctgtcgaagtcttcgaatatgtgcttgaaaaagagaaagctggaaaacacttcagcctcaaaaggtgcatagcaagtttcgactttcttaaaaccaagagttggaagcttcataaccattggtggagactctacagagggatagagaaaataagaacagtttaaacggaattggacgaagacaagctccatggtggatgtgggtgcacctacattgctctgaataagagtagattggacaaaacgtgaaaagattataa

SEQ ID NO: 239738 - DNA, 399 bp, Glycine max
  unsure (1)..(399): unsure at all n locations
cctaaagcaaccactaaccttcttcgcgcagaatcacgccaaattgcaacctgagagttctataacttagagaatagaaaccacgccatagaataagacattgacaatatatcacaaatggatttttgaatgctacataaacaattganaaaatcataaaatatagagaagtggacttattgaagaggatataagaaaacacctgtgtgtctgtggatgcattatctaagatacataatttttcaaattcagacttaatgaaactatgttggcccagtgaagtggccaacattgtccaagccttcatggcactttcagcagtagaaaaaagatctgtcatctcctcagatgtttatcatcaacactaattcattctgtgtgctaggaaacttctgatta

SEQ ID NO: 239739 - DNA, 402 bp, Glycine max
tgcaagcttgcatcttcagagtggtctgccataccttcttcttccttgtcaacactcatatcatagtccatttctacactgggaagatcattcaagtccggcttcttatattgatatccctcaccactgatgggttgttgaaaatttgctccatcaccactcatggtacaatattcaaatcaatagaatttgaggattttgattgtacggtattggcatcattattcaataatggagcttcattttcgttttctgtgtcacggactacattcaagttgaaatccaagttcacacttttattgtttatggtgtttgtgaatagtatgatacctctctgatgccgtggtgctaaaatcatattcaaacttcgccttgggtatttaaagataccaaacccacact

SEQ ID NO: 239740 - DNA, 443 bp, Glycine max
  unsure (1)..(443): unsure at all n locations
gtttctcaaaagcttctagggaagcttttattcttaaatagaagcatgtgtaacactcgttgtaactatgatgaatgaaagtcttatgagatacacttcaaagttccactcaattttgataccacttgatggaagcttgctcgtggagcttctatgaaagctggatctttgagcttcaatgaggtccttcaatggtgatttttcaccatggagatgcatcacaacgtttccaagttatgttatttcatcagttcaatgaattcatccattcttatctcggtttattccggagaacaaactattagcatcagtcccttggttccagaagatacgtttgctctttacgaatgatttatacttcttaactatatattcagagnaatatacacctatggtcctctatgaagaaattattctttgtatatctacacttttatacatga

SEQ ID NO: 239741 - DNA, 303 bp, Glycine max
cctcggaggctccaaaatagatggaacatctaacatagcactcttctacctttctattacattctttttgctctcattatttcgcctgtgatattatggggctgcctcaatataaatgtactcttcttaatgatgtagctccatgtggagcttgtatgacatatattttcttcatctatggagacctttgcttcttggagatcaatgacatcaaaatgaacatggaagaaagatgattggagatgccacttgaaggataagatgaattaataacaatctcaccaccataggaagtcatggata

SEQ ID NO: 239742 - DNA, 341 bp, Glycine max
  unsure (1)..(341): unsure at all n locations
cggacaaaactggcagctaaccttgatgatccccattggcaatgcggaagggattttgcgcttcactatncatgttnacatattattgcagcttgtggttacgtgagcatgaactactaccaatatatagatgttgtttataccaacgagcacatcttataagcttactccggacaatggtggcctcttgggaatgaagcggctattccttcttctgatgacgcatggacacttagtcctgacccaaccacaattggcgcgataggtcgggcaaaatcaacatagactagaaatgagatggattgggtcgaaccatctgagccccgaacaaatgcagtata

SEQ ID NO: 239743 - DNA, 417 bp, Glycine max
catgcaagactatgaacttggtgaactgggtgattgtctctctgaatcttcttggcaaaggcatgtccaccatatgcttcacaatttctcctttgctcaatagtattaactgacacatcaaatgttggaaattttgaatatatgaaaatattaagttgtaccacatcaaactctcgggcaatcaatgatgttcatgaaaattatggtttccgcatccacacactccaatattccaaatggacacatccatgtcacgcaatgtgtttccttgagaaacaccaattggtgttttgattatgacttcattgactatgtacgaattttcttttggccagacattattggccttcaaaaataggtcttatttgatatattacaacacatcaaggtggacatatgttgttatcccaccctcca

SEQ ID NO: 239744 - DNA, 412 bp, Glycine max
  unsure (1)..(412): unsure at all n locations
gatgcactgaagtacctcttccaccttcctcttttgtttcagttntctcccaggcttctgagagtcactattaaaagtgcttacattcacctctgatacgccagagagtgattttctcttacgcctaactgcattgtcaattttattggtctttctcttcttacttttggtatccagtaaatcattacacacagatttccccagtgntttttcttttgcattaacctgggaagtagcaagttcagcctcatcatggtagtttgatactctgtatcttgcaaagaaccgctcaactaaatcaaaactcttattcccaactggaaacatacaatcaacggcagtagaataaagtcctgaaagtagttcttctgcacatgaattcatgaatttcgtatggctggacatagtatta

SEQ ID NO: 239745 - DNA, 218 bp, Glycine max
tctataaggcttatctttgttggtgcatatgcgcgatcacaaagaatggcatgatcactacccaccatagtttatatgatggcaattgcctcatctgattgccttatctagatcctcctcctgtggatgttccagcatttgcgtcgatcgccgccctaggccatctatgaagatctttagatgcaccgtgtaacaaacccatgtagacgcggttcctg

SEQ ID NO: 239746 - DNA, 253 bp, Glycine max
actaactcgcgcctagcgggccagactcgctaagcgagccttaaaaatccaaaacgtcaagggagcctttaataccctcgaagctggcaaaaaaactatgagaggagtcgataaaccagagccaagagagaagctagagcgacaaaaacacgcctctatgagaagttagatcacacgagtgagattagggttctagaggttgaaagagacatcctcaaccattcttagctattttcttacctcaaaatttatc

SEQ ID NO: 239747 - DNA, 379 bp, Glycine max
  unsure (1)..(379): unsure at all n locations
catgcaagctncactactcctatgtatgcgttcttattctcctatatctcctttcacattctctgcatccttttttcattatcatagctcattcttttcatttgatcaccaagtttaatcatctctgccatgaattctgcgatttttggagatggtggagtaacatctttatctgtataagccatacctactataatagttagtgcacaatgtatttaatatgatttgacctccccacttaaacttattgtttcactcttgtatcactctctcaaggatttttcttgtattatatgcactcttgctcctcttcaattcttaagcagaacctttcagctcaaaaccagaggtattcattggaaatatgtccaattcaaac

SEQ ID NO: 239748 - DNA, 457 bp, Glycine max
  unsure (1)..(457): unsure at all n locations
aactcgaagaaaggagagcgggttatcttttattgctncgaaatagcgcttcaataaatctattgtatcaccttgttgagtcttcaaaaaacttataaaaaagacttgagtcatagtgcttctggaaaagcagtccacacatcataccacgtnttttcccctcattgtgtttacattacaccaatacaatgttgacaaagttatcaacagatagtaccattttgccagcttctttcgatgtgaaacaattatggattgcttctttcgtggcctcaatcatccttgcattatcaattgctaaggtgtagctaccttgttattattattactattattattattttcatcttcactgggaatgaatattgagactaatgaatcgctaccanaaaagggattngtgcaatattattactatgataatgaggcaggattagaatatcatgtctactataaa

SEQ ID NO: 239749 - DNA, 417 bp, Glycine max
  unsure (1)..(417): unsure at all n locations
agcttatgcaattgttcttgtcccatcactttcctcataccaacaagcaatgcagccatagctgtccaacacactgttgaggtaatatcatcttttctctcactgagaacaaacatgtcactgtcatgattaaagtgaaaaccagtctttccgggactcctgctacactgaattgaaaataacataataacaatggtcagttcccacaccataaccactattaataaatgttcaaaagttttggtgaaacctttagtatactacaacttaccaggtagataggatatgcaagcaatggaaaaggtaatgtaaatcttaaaatacgtgttacattatccaagctcttgagaattttctccgccaactgcaagattcactataaacattttgaattacaccnctcgatatatacaaaat

SEQ ID NO: 239750 - DNA, 365 bp, Glycine max
  unsure (1)..(365): unsure at all n locations
ggacattactcctaaagcgaatatggtatataacctcctgcgcataatacaaacattcactgtaatatttacagcangcttatgcgcatgttctcttacgaacgttcgcttgcggaagacattctaataaccgaaaaaatgcacccatatacaatctaggcagctttgttacctagattatttacacgtacttccaaggtgtatttgttacttacatcacacacatctgcttgctaaattacatacatgcatactctcaagcatttgggtaccaaatattgacatgtgcacaacctggtattctaatacctatactacacaaacttatgatgaatcttgctgttacacataaagtgtacatttat

SEQ ID NO: 239751 - DNA, 367 bp, Glycine max
agcttacagatgtatcttgtttcgtaagctttttattacaacatacagatgatgttcatcacgtaaaatcatacggatgaactacttacttatgtttcttacggattaactaaatccgtatgttataattcttacttacggatgtacttcatccatttacaacttacgaatttaccaatattactagaataccagttattcagaaaagctagaaaatgtgtatctccgctgaaataataccaccaccagttagagtttcaccttcattgaaccggtacctctcttaacacttgctaaaaccactaccaacaattgaaaccggaccacaatgatataaacaaatctttaatcacaaaagaaaacgcat

SEQ ID NO: 239752 - DNA, 263 bp, Glycine max
acaatgcatgccttggactacagctctgcaccatatgtcactgttgaaactctgtatacctaatctaaagcaaatttcatggttgatctgactatgcatatgcactttgttagcctactatacatgggctatatggtgtatgatgtaagtattcagcgcgacctggtcgtaactatgtatatacaacttgtatgtgactatattaattagaaagatctatatatggcgtagatgatactgatggtgactattcttattgttgt

SEQ ID NO: 239753 - DNA, 432 bp, Glycine max
agcttgactaggcgagttgttctagccttattttttctttaattatttttcgatccaagtaagaatgagaaatcccaaagagaaaacatccgattgattcttcgctttattttactataagggtatttttttgattattatattattattttacctcttttttgatttccaacgtggttacggcacgaccgaacggtcggaattcattttaaccgaaattaacggatgatacaattcatacgatcagtggaaatttattttatttttagattaggcgagaaatgacttaaataaatgactaaagcatgtcataagggggtatatatagcgaatgaacacgatatttaaaatacatgaaacaaaatgtggaccaccacgggtacatagaatgaattgataagctcggttgaatgacttacccgctgtagactg

SEQ ID NO: 239754 - DNA, 407 bp, Glycine max
  unsure (1)..(407): unsure at all n locations
gagcttagctacacacacccctcttataactaagctcatctccttgagaagctctcttaagaagattcctaaagaagctagagcttagctacacacacatctataatagctaagctcacctccttgagatgagaagctagagcttagctacacaccccctataatagctaagctcacccccatgacaaaatgcatgaaaatacaaaaaattccctactacaaagactactcaaaatacctcgaaatacaaggcataaaccctatactactagaatggccaaaatacaaggcccatacgaaggaaanacctattctaatatttataaagataagcgggctcatacttagcccatgggctcgaatctaccctaggctcatgagaacccanggcctcgctcgatctctgg

SEQ ID NO: 239755 - DNA, 458 bp, Glycine max
  unsure (1)..(458): unsure at all n locations
tgcaagcttctaanatacatagacaacgatgaaacctttatgttttttctaacgacaatcatgcaccacatgctgtattagtctcagacgtaggagttgggaaacactcatgatctctgacccagaaccaaaaaaatatgaaataattttggtataaatacatgtgtaatatgccatctttaagggcagtcaattaaaataatgtacttgtaaaataaaataaagaaaagaaaacaatttataacaaaaaaaagataacatgtaacttaattaacaataatgtattccacctattgtgtgtattttaatgtcaaatgtcaatatgttttatgttaacttactatacaattatccatatgactaaacatgttagagatttaattaaattgagaaacaataatttaatgctagttgagataatagacaaaggaatgtttgggttcacgaaacaatatatt

SEQ ID NO: 239756 - DNA, 407 bp, Glycine max
catcctattaactaagataaatgctcccatatacaatcaatgtagcttcattacctatattatttacatgtacttccaaggtgtatttgatatttacatcacacacgcctccttggctaaatttacatacatgcatactcaaagcatttcggggtaccaaaaattgcacatgcgctcatcttggtatttctaatacctatacatataaaaacttcatgatgaatcttgactacctacacaataaggtgctacatttcatgcttgttgttttcaagtttttgctacctaaagccacatgaaaattcaagcatatcttcctgtgctgactaaaattgtattcaaattagaaggtatatattgttttgtaatatgctttctccacataacatgcaacacattgatatata

SEQ ID NO: 239757 - DNA, 458 bp, Glycine max
  unsure (1)..(458): unsure at all n locations
gcaagcttgtnggcaactcatttaatatcaaatatatatttgttcattttctccagcctatttgtggttctggctttcgggaacaaccaagtccattcaccgtgttttgttataataataataataataataataataataatttgaaatgagtggttgaggaatatgaataatgtatgtagagagtaaactcaagaataatcatataattttttttcgtgtgaaataaagctaaccctcaaatgatagatgcttgcaaaatactatttccaatgtgtttgatctatatatagcccatattcccgtttaaatgacaatcaaaatgaaagctcaagtttaatatataacaatctgcaggaagttggactcataaagatagactaactaataatggaccttatatgaacaacatcataatttgtttgtatctggggggagtatgagtaacatactgaatg

SEQ ID NO: 239758 - DNA, 368 bp, Glycine max
  unsure (1)..(368): unsure at all n locations
ctgcanagcagatgcaatcatatgaaggaaagcaagtgagaaacaactgcgttattctactattctatactatgagggtgtgccttatgcactctttactaatggggttgtgtttcatttcagtgttcaagagacctttttatnctgaagttctgaacctctgctttgacaaatatgaagtggctgtatggtcttcaagaaccttccaagggtactgtgtgcttggctagaagagtaaatgtaaaactatcttacacaattatctaataacaaatcatcataaataacacgcttaataagaatttttacaatactaccaacgacttacataagacaaagtggtggttgtattcttctacctaccctgc

SEQ ID NO: 239759 - DNA, 283 bp, Glycine max
ctaagaccggggggggagggtttttttttcctccgtacaggactgcgaccctttgactgctaacctttaatagtattctgctaactaaataaaaacattcacgacgctgatgatttccgtactcgataaatgaattcaccgtcggcaccgtaccactgggacatatcgcgtgctttagtaatcacatgaggttttttgactcggaatatcgacgttttttggatctatctaatgttgcttactaggaactcgtgatcatcctatactctccaaaaagttgaag

SEQ ID NO: 239760 - DNA, 429 bp, Glycine max
  unsure (1)..(429): unsure at all n locations
catgcaagcttngaagaatagcacatacgcatatttcttatgctctccgatactacgtcgacacgaaaagagaatataggtaaaggtaaggctgcggcgttcatacgacggaaccctatagttcttggtcgccgccatatggctaataatgtggacactattggccttgctcttggcatgtcattcgccgctgatatggctcaagtatgtgctgctattaaagttcgcttctagatgccgatctttgtttctcttggatttaattttgcctttgatcaacgaatgttgggtctaattctgtattcttaattcgatactgatgtgatatgtcttatatgaactgctatcacgtgtttctttaacgctaaaacaatcaattatgtagtaataattggtgttgtaatgtctacagttaaatttattttttcg

SEQ ID NO: 239761 - DNA, 454 bp, Glycine max
ctgggttagagaaaatctcaccaaacataggtcatatcattatgtgagcgtcaacaccaagtatggtggcattaagttccttcacataagactcaatagttacatgcatcagaggatcatggtaaaccaaataaccttttccaaaaaacaaaatgtccttttctctgtcccctcaattcaaaaattatactttatccaaaaaaagaatcttaactatgagaaaacgttgccttttaactgtggataactctttaattagaagatgaaaaattattacatgaattacgatcatttgatctcagtcaaattttatgacacgctattaaaatttttaattaggtgttgttacacattataaatattctgaaataacaacagatatgaaaatgtcaaaccactaatctcgacattataattctttggaagaagggaataagcaggaagggattcattc

SEQ ID NO: 239762 - DNA, 364 bp, Glycine max
  unsure (1)..(364): unsure at all n locations
tctttgagaaaacttccttgagaagcgagagctggagctctttctctcatcntaaaactaagctcacctccttgagaagcttccttgagaagctagagcatagctacacacactccctctaataactaagctcaccttcttaagaagagaagctagagcctagctacacacccctattatacctaagctcactttcatgacaaaattcatgataatacaaataagaattctactacagagactactccaaatgccctgaaatacaagactaaaaccctatactgctagaatggccaaaatacatggccgtacagaagaatataaacctattctaatatgtaccaagaagagtggactcaacctt

SEQ ID NO: 239763 - DNA, 384 bp, Glycine max
gatcctcttagtcgacccgctgcatgcaagctggtagaatggttagtcatgatacatgtcttggtttgagttggttcaaggataaaaagggatgccccacattatttccatgacactaatgcaaaaaaatgatgatttggaaactttatgcaaaactggtcatgcatgcacctatgcggacactcaagtgtcaaatttttatggtcatgtgatgctagggctcaggattcatttcctctattttaatcaacccaatgtgtgcaaaatatgttcttttatcaatgtgtgcattcatccgagtccatttcgggcgtgcggtgaaatttcacagcattcacccttcaagtgtggacacattttccaaaaattggttatgaacaaaga

SEQ ID NO: 239764 - DNA, 482 bp, Glycine max
  unsure (1)..(482): unsure at all n locations
ctataaaactaagcttgganaagctatttcaccttctcgctaagccaatattctggcttagcgagcatccactaagcgcaacactcctgtgctaagcgcgaggaagaatccaaaagaagatgagttgtataggttcgctaagagcactgcttcagttcatccgctaagtgacaaaggcgcgctaagccaaaaatcactaacgtgcgctaagcgcacaagcacgaacaaggccacctatttaagcctgaaatcagattntgtggaaggagtttggactgggattcagaagcttgcatgtctagggtttctagagagagaaaggtccaagttccagagatntttgagagatttcgctgtgttaagatctgcagagaccaaagctcgaagtangagccaatttgagagctcgagatgaagttgtgagtgattgtgagatcctatangtgagcgtgacattctcatcacttgtagttttgcaatat

SEQ ID NO: 239765 - DNA, 412 bp, Glycine max
  unsure (1)..(412): unsure at all n locations
agcttaagcaattgttcttttcccatcacattttccanaccaacaagcattgcatccatagctgtccaacaaactggtgaggtaataacatcttttctctcactgggaacaaacaagtcactgtcaggattaaagtgagaaccaatcttcccgggactcctgctccactgaattgaaaagaacatattaacaaatgtcagttcccacaccataaccactaataataaatgttcaaaagttttggtaaaacctttagttactacaacttaccaagtagatatgatatgcaagcaatggaaaaggtaatgtaaatcttaaaatacgtgttacattatacaagctcttgataattttctccggcaactgcaagattcacattaaacattgtgaactacaccccttgatagataca

SEQ ID NO: 239766 - DNA, 295 bp, Glycine max
gcttatgcccatggttccttaccaacgttcgcttgcggaaaacatcctattaaccgaaaaaatgcccccatatacaatcaaggcagctttgttacctaaattatatacacgtacttccaaggtgtattttgtacttacatcacacacatctccttggctaaattcacatacatgcatactccaagcattttggggtaccaaaaattgcacatgtgcacatcttggtatttctaatacctatacatacacaaacttcatgatgaatcttgactatctacacaaaaaggtgctacat

SEQ ID NO: 239767 - DNA, 340 bp, Glycine max
gttgcatttattatatggacatagttcaatgacctgagatgaagttgttgataaatttctaaaaaaatatttccccgagtctaaaactacagagggtataagctatattttcttgattccatcactttcccatcgaatctttgagtgaagcattatatagattctgtagcttgctgcataaaactcccactcatggttgtgcacagactatactactgatacttcttcaggatgtggtacggtcgcagacaaagcagctactcaatgctttggaatgaggaaaattaattcgacacacctgaagaaccatgggcttattgtaattatggtccagtgacac

SEQ ID NO: 239768 - DNA, 427 bp, Glycine max
  unsure (1)..(427): unsure at all n locations
actaagcttatgagtagataactccaaagatcttgtcattttcaaaggntgaaggagcgtaaaagtaaatgaagaaagttataccccaagaacttaagaaatgatatacagactataggtgttaatacataattgttgtaataggaaaatgatatataatttggattgaccagatagtgtactacttagtcaattatgcttaaagatgattgtgattgaattatgttagggaatgttgtttcttttgactatgaacatgactttatgtatattgaaatgagtgtgacatgtaatgtgtgattcttatgtgtatgagatgtggatgccatattgatggaagcttgcttgagaagcttctatggtggctggatctttgagcttcaataaggtcattcaatggtgatttcaaccatggagttgcaatgga

SEQ ID NO: 239769 - DNA, 435 bp, Glycine max
aacacaacacacatataccacccttgttatctttgatggaccttatctatttgatcctcattgtaatcagactcctcttccatgtccgagttattttcttcagtatcttcctctgcttcatcatcatcagtaggtatccaagtcaaaccaaacattggaagaatgacaaggagaattttatcaattttatgggtgctccattttttcagtctctccaaaaacaatgctggagctacaaccaatcctgctccaaccccaaaacccactccaattgatacataagtccagtcaaatttaactccaaaaactggtttatgtatttctcttgcatttttcgaatcaaagcactttttagtcataggtgctccacacaattctgcattaccaacaaaggaagatgcatcaaattgttgaagctggttacctacggggatt

SEQ ID NO: 239770 - DNA, 309 bp, Glycine max
gaacacttctgttaccaaatctgcttcggaatcaagaatgagttcaaattaatcaatacacttcagggtcagagaaattgattcagaacaaatcatgtcaagatcagtccagaatatatcagatcagaccaagaagactcctcagataagataaaaatttttaaaattggagcacatgaattttctcaaactttaacaagagtttactttggtatcataccaatattgatcgataccagaaaaaggtttaaagcttcatgattacatgttcaatgatcaaagtgatcatacatgattgatgtactctaa

SEQ ID NO: 239771 - DNA, 471 bp, Glycine max
  unsure (1)..(471): unsure at all n locations
agcttcaagaaaanagatggcgctgagcgaatcttcttattttctgtgaagggaattctatcaatagaacctccaatctttaatggagagggttaccactactggaaaacccgaatgcaatattttatcgaggcaatagatctaaatatctgggaagccatagaaatagggccttatatacccaccacagtagaaaaagtttcaatagatggtagttcatcaagtgaaagcataaccatagaaaaacctagagatagatggtctgaagaggatagaaaacgagtacaatacaacttataagccaaaaacataataacatctgccctaagaatggatgaatatttcagggtttcaaattgtaagagttctaaggaaatgtgggacactcttcgataacacatcaaggaactacagatgttaaaagatctatgatatatgcactaactcatgagtatgaattatttagaatga

SEQ ID NO: 239772 - DNA, 432 bp, Glycine max
  unsure (1)..(432): unsure at all n locations
tactcaactctccctatttgcttnaatagggggagaagtgtagaataattttgtntagcctcttaagcacttcctctctctctcgaaaatgcttaggaacattggttccctgaagaaaatccaaccgaggcgcttccgtaacgtttacgtaacgtttccgtgagttattacgcgaagattctcgaccggtcttcaagattcatcgntcgttccttcgttttcttcaggcttcaacgggtaagtacttcaaaccaagccttttcacttcattctatgtatccgcggtgggacacactctgtttcatgcatttttattctcgctntcatttactttttatacctccttttgacgtgcttaagccatttatgtaagtcatgtttcgcttaatctcacaataaaataaatttccaccgatcgttagaattgtatca

SEQ ID NO: 239773 - DNA, 346 bp, Glycine max
gataaccctcttgagcctatgtatacctttctttgttttgaagctcattacatagccttattttattaaccatgatctcaccttaaccttaaggaattttggagcattggaattgctttgaaaataagcgcggggagggttttgttggataacatgtttggttggctatgcttcgcgatgtatctttgggccatatagataaacatggtatatgggttaaatgatggacatgctgctgaatgatatgctagttctcatatgctacttcataaaaaaaattcaagtggaatcaatcagataaagataaagaaaagcaataaaggtgagtgaattaggtctgaaataa

SEQ ID NO: 239774 - DNA, 390 bp, Glycine max
cttgtaaggatgtgaggtgtactaatcttcttttaacaatggcccgagctcatcaatatgccatgattttatgcaaaatggttttggctccatgagtgataaagaaaataaagagactgtaatgcaggttcccgaagaactatctgaaataaaaaatatgaagaacatgtatatcgaactaactctaacagcactgcatacctgggagcaaatcaggggtagaagctcaactctaagcatgttcccatcttctccacacaactaggatttgcaattgcaagaggattgaaagaaaaaaaaatattgcactagagagagcaacctacttgatactgagaataacatggatcttctcgcgttttatatggttaatattatagagactaatgc

SEQ ID NO: 239775 - DNA, 236 bp, Glycine max
gcacagactggcccgcacgaagttaaacacagcggaccacgcaaccaaacacaaaccgccaccaccgatctactaccagagcgtcaatacgagcccatcaacctccaggcaagctacgagggactgaattacccccaacctgcgatacgcgcaaagacgagcaaaagtcctcagggatcagacaaacaagtaaaaagctgtacaacgaatcacgtgaaaaacgcactttaaaaaga

SEQ ID NO: 239776 - DNA, 279 bp, Glycine max
ctaattatcatatgcagcctattgtgggaccaatgatctctatctcaagcaattataataacaatatttggttacatccaaatgtcatggccaatagatatacagctgatcatggacaggatgaaggagttgatacaactctgcccaaaaggttggtatggaagaatttatgtttcatgacaaaagctaactgtttgatttcccttttgtacttttgaaataattctaacgttggccttatgatatgcagtgtagtattgacaacctcttggaacgtac

SEQ ID NO: 239777 - DNA, 403 bp, Glycine max
  unsure (1)..(403): unsure at all n locations
ctaagaagaaggaatgatcagcggaggctggttggtatcctttataaagaagaaataaggagagacgagtgaaccatcgtcggctagctggctcgagaccgcataaggaacgttgcacgcggcatacctggtgaggattatcaaccaagagacctggaggaagttgcttgtatacctcctcattaagctcaccgtggagacaagcatttttgacgttgagttggcgcaaatgccaaccatgaagaacagcttaagctaacaggaaacgaacagtggtgaggtttgctatggtggagaacgtgtccggaaaaatcaagccttccattngagtatatcccttggtcacaaagcaagctttgtaacattcgactgaaccatcggcgctgcacttgatcttgtacac

SEQ ID NO: 239778 - DNA, 428 bp, Glycine max
  unsure (1)..(428): unsure at all n locations
agctnggtttgagaaagcatggaatattcagtcttcctactcttatctgttgaccacagagtggtacctggagatatgtcgtgcgggtcaggagaccttgtggacgtcaggtgggatgctattgcccaaaaccatgcttggccaatcccgacccaacccgggcatagtcagtcagtgagaacctgtgacgtacctaagcaggcgagctcctggcagtcaaccaataaaagaacataagtccacgaaacaaggaggcttgtgtggcagctagccaactatttatcttgggtgttatctgaaaaataccctttggtaatcgattaccatccttgggtaatcgattacagggtttaaaaattgaaacaggatgttaagtagcttctggtaatcgattaccaattgtgtgtaatcgattacacagtgtgata

SEQ ID NO: 239779 - DNA, 426 bp, Glycine max
  unsure (1)..(426): unsure at all n locations
ggggagcacaaaattgaacgaagattaagggagagaaggtggactttgagttgtgtctcacaagactctcattcatcaaagttaccacaagtggtacacatgcttctatttatagcctaggtcactaactaaatgaaagcttcctttataagcttccttgagaagctagagtttaactacacactccatctaatagctaagctcacctccttgagaagcatccttgagaagctagagcttatctacacacacccctctaacagttaagctcaccccatgccaaaatacatgaaaatgcttagctacacacacccctntaatagctaagctcacccccatgcctaaatacatgaaaatacaaagaagtcccaactacaaagactactcataatggccctgaatacagnggctaaatcctatactact

SEQ ID NO: 239780 - DNA, 385 bp, Glycine max
agcttgtgcatccaataccctgatgaggatgttccatatgttcttaaaactggactgattcatgtgcttccaaagtttcatggccttgcaggtgattacccgcacaaacatttgaaagaatttcacattgtctgctccaccatgatacccccatatgtccaagaggatcacatatttctgaaggctcttcctcattcattatagggagtggcaaaggactggctgtattaccttgctccaaggtccatcacgagctatgatgaccttaaaagagtattcttagaaaaaattgtccctgcttccaagaccacagccatcatgaaggatatctcatgtattagacaactcattggacagagcctgtatgagtactgggagagattta

SEQ ID NO: 239781 - DNA, 397 bp, Glycine max
  unsure (1)..(397): unsure at all n locations
acattataattgtcccatgagtagagggcaagtcacacctcacacttgtggcgcctcgggctgttacacctcttaagtagaaagaaatgtgccctaactataagctatagcttttggcctagtggtaagcgctggattcaacaattggtatcagagccaaggtcatgagttcgattcccagtggggcaattgctgaaggggagataatttttcaggtagtggcatcaattgtcctattgcggaggcccaagtgggtcaagtcacaatcaactcgtggcgcttaggctattgcgctcttaactagaaagagttgtgccctgactataagttatagcttttgggctantggtaagcacttgatccacacggatgcatgaagaattgactttaagcctga

SEQ ID NO: 239782 - DNA, 432 bp, Glycine max
  unsure (1)..(432): unsure at all n locations
agctgggttntgtgcaatatcaccccacctgtcgtccccaatgtctcctgacccccgcgacatatcctcaggtaccactctgtggtcaactaataaaagttggaagactgactcttccacgctttctcacacagggcttattgggttatggggcacccgtcatatgtggtactatgtggcgatcgggcgatggcgcaaaacaaatatcccatttccacaagcccagacataagcacaccatccccagttgcccacctttaaattgagctctcacttttctacctacaaccctatcattctcacatttaactctaagctaactctccccatcctctctaccatgtttctatctacattttaagcacacatatatctcataacatcattattgaaccctaaatcaacatgtgcagttttgcttacattaaacat

SEQ ID NO: 239783 - DNA, 429 bp, Glycine max
  unsure (1)..(429): unsure at all n locations
ntgagcctcatcgngcactattggtaaaggtcctcttcatagcccacgtagcacacgacatctcagtcgagggttttgaaggcattgttaatcacataactaccattaactatcacgcgtttttggaagaagagattccagntgaggggagagggcacaacaaagctctacatgtgtctgtcagatgcatggaccatgttgtcgctaaggtactcatcaataatggttcaagtttaaatgtgatgtcaaagaccaccttggagaaacttccttttaatgcgtcacgtctaaaaccgagttcgatggtagtacgagcttttggcggtagtcgacgggaggtgatgggggaaattgacatccccattcagataggcccccacatntgcaatgtnggtttccaagtaatggacatatatcccacctacagct

SEQ ID NO: 239784 - DNA, 433 bp, Glycine max
agctggtgattctttatacatacttataatttgtttaattcttactcttaaatgttcgtgttatacttgttataggaaccttataattctaagtatatatagtggtagtatggcgttttgccttaatttcataaataatatgattgtctgtgattttttgttcttagtgatgctaatattctatagtaggaagactcatttcaagttatatttcataaggaatactcttttgatcgtaccttctaattctagtgcaatctattctttgtgttgcatgcttaagtcaagtaatttgattacacttgaaagcttgagtttaattcattcgttgtgttatgagcctacatcatacaattggattactgatgtttctgtcacaatcaagcgattgttaacggcttcatatgggtgtacgttgggccatgttttcgtt

SEQ ID NO: 239785 - DNA, 391 bp, Glycine max
gtttttagttttcgaaatttacttttgtgagtgagcaaaagcaagtgagaatactacagattgtggaaagtgtgaagatcgttaggagggttgaaatctgtaaggatttatctcctttttattcattatgctctcttatgtgattatatgattccccatgtttgtggctagataaatcctttaagctaggattgtgatgtagcatgtatctatgaatcgtaactctgtgtattttaattaaattcttgtttattcaatcaattggactattgtgttgaatttttctaatttgggactgatgattcacaaacctaattaattatttgttggaacccactactcttaataattgacccacacagtattgaattcttgtgacattaattttgac

SEQ ID NO: 239786 - DNA, 438 bp, Glycine max
  unsure (1)..(438): unsure at all n locations
gctttggctatattggagaaactatncatgtttatatctatctgcaacaagttgcttctgaaatgacatttgtttctcctccaaatgagggaaggtacaccacttaagggacatcttgatgagctaaactctattctaatggagttacgcaacattaatatcaagatagaagatgtagatctggcaataattttgttagactttcttcctcccgcctatgagaattggtgagttgtcttagtgtagacctggactccattacacttaaagaagtcaagtccaatctctattcttgagagcttcaactaaaggtgtctggaaatggtgataaagccttttgatctgaattatcagtgactaattatgctagaacgcagaaaaagatgataggaaaatgtggcaagaagagtatagatgattctaacgacatctacaatt

SEQ ID NO: 239787 - DNA, 373 bp, Glycine max
aagataatgcacattccttgcctttggtttctcaccactcaatacatattatttagcaaaaaaagaatccaagggagtagaccaaaaccattgaaacacgtttctttgattcctaaatgatgttatggatctatcttatcatgtgacatccaatcataccaaagtaaactactaagtattacagatatgaagcagtacaatgtgcaatgaatgagaatgaaacgaaccttggattaatattactgatgaacaatgattccttgaacaaatgatgtgcgttactttccttaacaagcttaaatttcagaatgaacatgagactcgagagaggctactatagagaaagatatacatatcatattgccgaaactta

SEQ ID NO: 239788 - DNA, 379 bp, Glycine max
ctgcagcatgcaagccttgagccacaaagcagagagaggatattatttgacccagtgtgagaatgtcaatccttaccctcggaagcgaaaagaatagaaaggaaatttccaatccaagaaaaggaaagaaggaagatttcctatccataagaaagctaaaatgaaaagaaggaaaattccccaatcaaagagtgggagaaagcaaaaagaaaagacagaaaattccctatcaaagaatgggagaaagtttaaaaggaagaacaacaaggatagaaagctcctgatcaatgatcgaaggaaaacacaacaaatgtgcacaaaggtttttggaccggacaatatctgaacaatacagagatgtggccaaatgaaaaaaaag

SEQ ID NO: 239789 - DNA, 236 bp, Glycine max
tggagaatagacatcataatgaagaacaaaggaggagaagagggaatgatggtgttcctacacaaaaccgaattgatggtattaaactcaacattcctccattaaaggaaagaatgatccggaggtctacttggagtgggagatgaaaatagagcatgttttctcatgccacaactatgaggaggaccaaaacgtgaagcttgccgccacggagttttccgactatgctcttgtgt

SEQ ID NO: 239790 - DNA, 374 bp, Glycine max
catgatagtttggcacattatttcagctttctagttgcgtgcttaagtttccatttatattggttatattttgaaactatttctctctccaaagagcgattttttatttacaaggtcagggatctgtatatacattttgattagaatgtgctttcacaacttaaattagaatgagaaaccatctttcctctccaatattcgacacatacacattgaaccttcacaccaacaaaggaaaaaaaaacaatgacctgcattggggtgtacagaagcaattacacttggggttgatatgagattttgacacccacaccctcacgcccgaaacttgacatttggagtgtgacaaatgtgactgccaatactccaccttt

SEQ ID NO: 239791 - DNA, 453 bp, Glycine max
ctcaataagctctgaatctgcgacgtagcacttagcgcttctcttgcgctaagccgggagtaagggagatttgagcttaatgaccgtcatgcgctgagcctagctgaagacaactgttgcgcttagcgcgcagcctagtattgatgctctaccagattcttctatcatgctaagcatgctgaagctgcgcttagcgactaatgagctgagctaaactgtcactttaagcacttcatgacttagcttggttttaacctgagagtgcacaaatttcatcattaaatccaatggaaatattctagagacaactttaacaataaaacaagagttatttacaaaattactacaaaataaccataaattggtgaactatacaaggtttagaaaatgttgtttatacaaaaggtaggccgaaagacgactaacaagtgttcatacaacaatacgatcaat

SEQ ID NO: 239792 - DNA, 301 bp, Glycine max
ccaactacctcccacataaaaattattttctttctttcgaggatagactcccttacaatgaacttctaaaatataattcagataacacaatgtgaatatgaatgtgtaccaacattacacaaaggagattaagggaagagaaagtgtaactcagaattatactggttcggcccacccttgtgctacgtccatgccccagccacttgcttgaaagtccactatcttttatattcctttacaagtctaagccacaaggacgatccttcctttgggttaaaatcctttacagcaagagaccccg

SEQ ID NO: 239793 - DNA, 331 bp, Glycine max
ttgctccaacatgaacgatggcgtgatcactgactgctatagcctctattaacttcatggcctgcaaactcaatttaatcttcccactgttggatgcattcgagggatgcttaggaatgacgtcacaagctttaattggatatggtgagtcgaactagcttactaaactcaagtgtacagagtcttctgagcaccccttgaaagcggcaacggcttcattactgatgacttgggaataggtgcaaattataattgcctttctcccacaatctggactctcaagaacttttagaattttccctactctgcctttctcggtatcactcgacaa

SEQ ID NO: 239794 - DNA, 359 bp, Glycine max
tgcaagcttatggctgcaaatttacaagagacctgcttaacctcatcaggcaaatcaaccacagcagaacaattatgacctctcagcacagatacaaccctggatggaggaatcatcctaacctcagatggtccagcccttagcaacaacaacaagcacctgctcctttcttacaaaatgctgctggcccaaacagaccatacattcctccaccaatccaacaacagcaacaaccccagaaatagccaacaggtgaggcccctccacaaccttccgtctaagaacttgtgaggcaaatgactatgcagaacatgggacaattggctacccaaatgaatcaacaacagtcccagaattct

SEQ ID NO: 239795 - DNA, 462 bp, Glycine max
ctcaagctttcactctggtggatttcccctgcaccttacttttggtcctctttttctttatacaaatatgttcaagggaaatccggcttgctggaaagcgtaccgggtcgtcaagtatttaaaatttaaagcggatgaattcgagtatcaaactcacggaactagtgttagatagggttaaattcacaaataagacattgttgaaagaaacattgataattgatgatttagaacagaattaaactaagtctaggctaaaaaaatagtaaaaatgcaagtaagttagattgacagcagtaggttaaggtgttgggtctttctaacaaaccagctgatgtatataaagatgtttctctaatcaatcatgcttttgtgtgtatggtgtagcctaattactaaacctcgatccctagttagactgaatcaatccaagcttcgtcctcagatccctcttggtggact

SEQ ID NO: 239796 - DNA, 418 bp, Glycine max
  unsure (1)..(418): unsure at all n locations
ttccatatcgttggncgttgcctctattacatctccccccccagcccnatgatgctctgcggcccttaacactgagctgcactgagnngatgaaagataagtaattacanagcaaaatagtcattagagctacatcctctgaattgaacatcaacattggggccatcatacccttatggaaggcaaaatatttatatcattctaacgatactcaatatctacttgttctatacatgaanatccaatctttggatgtgttcaaagattaaagtaagttgaaataactaacaaaaataagtgtgtaatctgatggagggaaactttgagaatgacgttagtaataactcggcctttgcagtactaagaaatgaatgtccatgcatatgtgggcactactgaagggggtaaaacaaatact

SEQ ID NO: 239797 - DNA, 350 bp, Glycine max
taaccgcgcctgtggtccgactcaccaccactgattcatttcaatgggctcctgaagcccagatagcgattgattccctgaaacaagccctatcatttgcccttgtgcttgctttggcaaacttcgagctccctttcactgtggaaacaaatgcgttgggtgttggcatgggaggtgttctttcacagtagggccaccccatcgccttcttcagcaaggctttcacccctaagcttctacgatcctcgacatatgtccgtgaactattcaccatcatgtcggcagtgaagaagtggcgccaatatcttctttgccaccacttcactattaatacagaccatcgtagcttg

SEQ ID NO: 239798 - DNA, 417 bp, Glycine max
  unsure (1)..(417): unsure at all n locations
agctttgagccanaatccagactaccatatattttgacccanggtgagaangncaatccttaccctcggaagcgaaaaggaaagaaggaagatttccaatccaagagaaagcaaaaaaaaagaaagagcacaaggaatattccccaatcaaagagtgggagaaagctaaaagaatagaaagaaaattcccaatcaaagaatgggagaaagtaaaaaaggaagaagaagaaggaaagaaagcttctgatcagggattgaaggaaaacacaagaaatgtgcagagaggtctttggaccggacaatatctgaaccatacagaattgtcccaaatgaacaaaaagaaggaagggaaaccacaacctanagtggtcttctccctttaatcgccaaccanaatcttggtgctaccgacttttt

SEQ ID NO: 239799 - DNA, 406 bp, Glycine max
cattattgaaaatttacttcttgcaaaagctcacaaaaatgagaaatgaggcaaatacgtaccttgcattgatgctaaactccaacgaatactgcgtgcacaaaccccagcgacgatgatggtgaggagcatatggcggtgacagggtgcaaacgacagtcacaagtcacaaacgacggtgataggtcttgcgggtgagggagaaaagaaaggctttgtttgcgagattgagcgtgcggcgggaaaaaggggtttgggttctaacttatgtataacacaacatccgattttaaaataaaactgatggtaacatcaactggttaacatcattttataataaatcgatgttaacatcgcgtttctcacaactgatgttaacagttgatgtaacattgggtgtccaaaa

SEQ ID NO: 239800 - DNA, 395 bp, Glycine max
  unsure (1)..(395): unsure at all n locations
ctgcagcatgcaactntacacggcctccgagatagaagccatgtgatcttttaaggccggcaggncggccttcatctgttcttgcactccctcttcattatccatttttctggaatgagaggtataggggcgcctctgcgctttcttaattattgagagctccctaaagaaacaaacaatggtgagtttgcccccaaaacatgaatatgctaatgaatgatccgagcacttggatccacctcaagatttttagataacgcgatgagtttcagaacttctcgttatataaaaaagaacacagcttttatctagccaagatcatacaaaagtgttacaacagaacctaacgtgtttaattatatgggccataaatctatatgtgggacagtattgat

SEQ ID NO: 239801 - DNA, 255 bp, Glycine max
agcaagaggccacgaactccaggaggactacttttcaggggggcacgagcctcctctcccgagacctcacgaacccaaagaacgcatgccaaacatctaaagaacaccatctataaaacacgtgcgtaacaccgcggaccccgggaggagaccacggagacacactcaaaaggactcaatgcccaagtcgcacacaacaggccccccccactcattcctaaacgaatcccccgccaacttgtatgcaggccaact

SEQ ID NO: 239802 - DNA, 473 bp, Glycine max
gcttgaagggcgagagacaagtaattcaattaagttttggtgaacgaaactcatgacaaggaatatcacgacgtaagagtgttagacaatacatttcatgtaatgaaaccaagcttcatccattctctgggcaatacctcattcgagtcaatcctcaaattatacaaatatagtccttctatgcataaatgcctgacaaaatgctgggtgatcgaattatacaagcatctattctatctacctaaatagagtattaagcaaataccacaagttgttttgtgtttcagtttggtaaaactcattactgttatcaacaatttattatttagtatatataaaaatgtgtgtctcctacaaaataattaaggctatgaataacttatgacttaataaaatcaaaataattctttgagctcacataaaagacataattcgttcgagctaattttttatttaatctaattcacctacta

SEQ ID NO: 239803 - DNA, 115 bp, Glycine max
aatccgtatatggaaggctgctctaaacagcccttggctttcgtggcacttgcactctatgcgaaaaaatgccagacttgaattgtaaaaggactgtttgctggaagccatctcc

SEQ ID NO: 239804 - DNA, 66 bp, Glycine max
  unsure (1)..(66): unsure at all n locations
aatccccccccaggcnattgtgtcagcaccgacaacccgggcgacgcccaaggagagatttttccc

SEQ ID NO: 239805 - DNA, 322 bp, Glycine max
agccaagcccctactttcgacgggcaactccccccttatgaccactatcccgggcaagacgatgaggaaagagatacccatcttggccccctgctccacctcaaagaaccgtccccccatgaactaccccaaccgaacatagcttcctagatccgatcatggaaggacttggcaactgccttcattaggcaataccagtacaatacggacatggctcccgatcggaccagcttcagagtatactaagtgagagcatgagtccattaaagaatatgcccaaagatggaaagatctcacagcccaagtcgtacctgccatgacc

SEQ ID NO: 239806 - DNA, 410 bp, Glycine max
  unsure (1)..(410): unsure at all n locations
tcattaagtatcaaccttataatgggtaacaagattaaactttgatacccatcaaaatgctcaaccaagtacattcttcttatcctcattgttagaagcaagtattatgtcaaggtgcattgtaaatttttaggttcaaatagttactacttgtgatgtacatgacatattgtgttagacacatcattttaaagaaaatcttatatattcatactgattatagctatgaattataagtctgcatattcaaatacaattttttattaataaaatatatttnttatattaagtattttaagactaatataatctctttaacatatttatcgacgataatctagatattaatgtagttcatgaaaagattaatcttctaaataccttacttataataaaattatagatttcat

SEQ ID NO: 239807 - DNA, 479 bp, Glycine max
tactcaagcctcctcttattagttcacagcctcttcaagaatatagcatatcttgtaatttgctttattgcatccagcagagagatgtatacctctactcttctgaatgtttccaagatctctttctctgtctcttccatttattatgtggaaactgctcttggagggaatggaagaggaaagatgtgctgcttctgcaaatcacaattaccactggaagattcacctgcacataaatggttaggtaaatttttgtcattacctttttctgagtagagtgaaactgggcaagttcatttgcagatgaggaaagtgctactggttgaggtccttgacactgctttcccgacctcaatgaaatgtcactgacattcttaggattctggacagcttgaaatgcagcttgcaaaatttggactgttgtgatacaattgtgacccattgtccatctgatggtaaacttgaatgagctctggctc

SEQ ID NO: 239808 - DNA, 382 bp, Glycine max
taagcgactaacactctgcaaagatttaatagataaaatgcatgaagctctaattctagatgcttgctttgatgcatgggcataatgctatcattctatgtctagcaatgaatttattaagataccctttctttttgttctactagaaactaccctttgtcaagcgactaattcctaaaaatgatgcatgcaaaactttccttgtattcttattaaggattaccatttgtcgagcacttgacccctaaaataatgcacggatgaatgatgcctgaaattaaaagtcagaaaggataatatgaaagaaaacacttgttgcattgataaatacaagggtgacaatacatcttttggcttttaggcatgcaagccctacctctca

SEQ ID NO: 239809 - DNA, 416 bp, Glycine max
  unsure (1)..(416): unsure at all n locations
ctcaagctnctcctttgaccactacattatcaatggttgtgaatggtgtctatctctcatgtgcctatcatggaaatcaacaactgggacaagcattcaccatgcttgaaaatgcctgtcgtgggagtcgctaaagaagggaaccccatgaatggggagaatatcctgcatcatgagctcgatgatcatgctatgatagtggccatgcacaaagagatgaacatgctcaagtgaaacaacgcacaacaaatggagaacctctaaaggaaaatgccacccttaaggaccagtacctgaagcttcacgaagaccataatgcaaccaggactgaggaggcttacacgacatggaaagaaagaactccctctatcacacaaccaaccccaagtcaacaaatgccaaanatcgactttatc

SEQ ID NO: 239810 - DNA, 262 bp, Glycine max
aaactatactaattaaggcaattctgaatatatatatatatatatatatatatatatatatatacatccagtaccacatccccccttatctataacatatatatctatattcggaacaattaattatgaacaaaacatttctatgctgtactcaagcttcaaattaactacaataacaccatcgatatgtattaactctacacacacacacatatatatatatatatatatatatatatatatacatatatccatctataca

SEQ ID NO: 239811 - DNA, 379 bp, Glycine max
tcatcatcaaagaacctgtaccatcatctcctccttgttgagcaaaatcatcatactcccacttctctccctcaaaccgctactactgcaccctcatcctcatcatcatcatcgtctgagaaatcttccccaagagagcttataatacctaccaccaacggggtctccattggatactccgatgtgatgcctaatactcccactgctcttgtgaaccagacctatattcagacccgaattaatgagtccattatgctgtcgccaccaccaccaccaggtgaggctttcttcttcccaggcaacaacaacatcatggagaaacaaatcatcacaagggttgtgcttctctgaactgtccaatgttgttcatcaacacaac

SEQ ID NO: 239812 - DNA, 388 bp, Glycine max
accttaaaactcacgctggcttcaaaccctgtgagatgcccatatgttttttactggaccgaccacctgttgccaagctcatggtctgcagagaagacctcataaacatgtaaagaatccatattgtctgctccaccatgaaacctccaaatgttcagaaagatcaacatctttctaaaggcccctcctcattctttaaagggcgtggcaaaagactggctatataaccctgctccaaggtccatcccgagctgggatgacctcaagagagtattcttagaaaaattttccctacttccaggaccacgcgcatcagaaaggatatttcatgcattacgcgactcaatggaaagagcctatatgaatactgcgagagattaagaaacta

SEQ ID NO: 239813 - DNA, 331 bp, Glycine max
agcttgttaaagcagaagaaagaaaataattgttactacattaaaaggaaagtacacaaaacaagtgtggaccactaagggtgcatacaatgaattgaaagatttgatttcgagaacttaccggttgaaggctgaagaacgacgaagaacgaacaaagaacggtgaagaacgatgaagaatttccatagaatcgcttacggaagctttacggaagcactttgactcgatttttcttcacgaaaacgtgtttttttcccaaaataactgaaatgcatagcttatgggtcatgaatattttgaaacagcccccttccctatttataaggaaaa

SEQ ID NO: 239814 - DNA, 397 bp, Glycine max
  unsure (1)..(397): unsure at all n locations
ggagatgaggaagtgttgaaaggtgaaacttcctgcttttattgttgaccacagagtggtacctggagatatgtcgcggaggtcatgagaccttgtggacgtcaggtggggtgctattgcccaaaaccaagcttgaccaatcccgacccaacccgggcatagtccgtcagtgagaacctgtgatgtacctaagcaagcgagctcctggcagtcaacagataaaaggaaaacaagaccacaaagcaaggaggcttgtggtggctggccagctgtgaattttgtgtaatatgtggattgaggcctctggtaatcgattaccaaaggtgagtaatcgattacaaggcttaanattgaggacaggaggctaagatggtctctggtgatcaaataccacagg

SEQ ID NO: 239815 - DNA, 280 bp, Glycine max
ttttgcaaccaatctggctttatgtcttactaagatgcttgattcatcaaattcgtttccaaacacccatttggttttcattttctagagaagggcgtgtgtaagagctaattcccacactgctggtttcactttaaaccgatttagatgttcatgcatagccatcaaccaataatccttgtacaaaactttatctatgtttcttgggtcactctgacaaaaaaaaaccatgttattgctaatatcccccgccttgagtgagtagaaactccctcttata

SEQ ID NO: 239816 - DNA, 378 bp, Glycine max
  unsure (1)..(378): unsure at all n locations
tgctcttttagttacagcttcttctagaatatggcgtttctttttatacgctntattgcatccagcataagtgtagttacctctacttttctgaatgatttcaagatctctttctctgcctcttacacttatttgttggaaactgctcttggatggaatgtaacacgaacgatgtgctgcttctgcaaatcacaattaccactggaatattcacctgcacataaatggttaagtcaatttctgccattaccttcttctggagtagagtgacagtgggcatgttcattaccagatgatgaaggtgctactggttgatgtcctcgacactgctttcccgatctcaatgatatgtcactgacatctttatgactgttgaca

SEQ ID NO: 239817 - DNA, 437 bp, Glycine max
  unsure (1)..(437): unsure at all n locations
agctntttcagaaagttggaatttaaattttgactcctccttacataactgtgtaatcgattactagtgaggaactcttaaaagttactctgagaagtcacatcccttcataagttcttgaaaagccaccaagggcctataaatatgtgacttatctaagaaagcttttagagagtttcttttcaaaactgtattgtcttatcctctcaaaaacaaatcattggccaatcacttgcaaataaattaaggattcttctaagaacttcatcttgaatcttcttctttaaaagagagaaaaaattgtagtttctttaaagacttattgagatgaagaggttgtttgtctcttgactgtgagtttttgacacaagganatggatcctcggtgttcaaattgaaaaagattctacaagtagggaaatccagtggtgctgaga

SEQ ID NO: 239818 - DNA, 418 bp, Glycine max
  unsure (1)..(418): unsure at all n locations
tttcacatncactatgcgcgcataaacaccaccattccttgttttcaccttcaactgagctcacgtactcccacattagcccaatctcactcgtttcttctcaacaccgggtccccatcaatcctctcaagcttccacaacatccaagcaaaacaacggtcaaacagcacaagctatcacagccaagctaaacagagcaaaggcagaaaactctgctcaacacatcaaccaaaatcacagctgttctcacgtaaagaccacagtaacaattccttcgatccaattcgttaaccggtggatcgactccaaaaatttactggaagtctatagagtataagcctgcattttgaaccgtgggatatactagcagacatccagaactcattctgcactagacttntcacagacaaccacacac

SEQ ID NO: 239819 - DNA, 277 bp, Glycine max
tattgaaaatattagtggaatacccataatccgaatattcagaatcaccagcaacagaatactcagaatgctcaaaatgttcaaaatgcatagaatgatcaggatgcacactatgcctaacttatctatgaaatgttctatctattttaggatcaaagggttggaaatcacctggattgcccctagtcatgcactatatgcaacaaataatgtgtttctcaacaagcacctaacaaggaggtaaaactatagctatacttacacgatatccaaatga

SEQ ID NO: 239820 - DNA, 442 bp, Glycine max
actcaagcccggaatgatctgcagaagttaaaccctgcttggtggacatagtctgttttatagaaacacaaagtgtgatttgcaagttaataacatgtgagaggcattccataatgtaaaaatggagtacagacataagccaattattacactattggagggaattcgattgtacataagttctagaattgtgaaattgaggactaccctgatgaggaatgaggggtcagtctgtcctaaaattcatcaaatcatggaaaagaataaaaaagcatgtgaaccattgcgggctcattggtgtggtgatgctgatctgtctctgtttgacgtgtcaaagggcatggaaaaatatggtgtcaatcttaaacaacagacatgttcttgtagaaagtgggagtaaactggaattccatgcactcataccatagcatgcatgtggatc

SEQ ID NO: 239821 - DNA, 457 bp, Glycine max
  unsure (1)..(457): unsure at all n locations
ttaagtcacctgcggcatgcaagcttcgatgganaatctgggctctcctgaatggtctgtcncaattgctccatgaaaacaaaggtgggtagagaaaggatgagacattggccctcgggaagtggttcaatgcataaaagagcatccgccacgatgttggaagcaccgattttatactagattatgtaatcataactgtcgcaacctaatcttctacgggagggtgaggggaaaggttaaagagcttcttccaagaaggaaaatgcatgggagtcctccccacattcttttaggaaaattgttaaaaatcaaatgaggtctcgaatattgaaataagggtttagagttgttaccatggggaaggattaccctcccgccccgtacaaggacacacctttatcaatgtcccatggacttcaatagtatttacctttgatttatattttctggtcacaag

SEQ ID NO: 239822 - DNA, 391 bp, Glycine max
gagagaggggggagcacgaaattgaatgaataaaagagggagagaagtggaacttctaagtatgtctcacaagactctcaattcatcaaagttacaacaagtgttacacatgcttctatttatagactaagtagcttccttgagaagctttcttgagaaaacttccttgagaagcttctttgagaaaacttccttgagaagctagagtacacacacccctctcataactaagctcacctccttaagaagcttccttaagaagattcctatagaagctagaacttagctacacatacctctctaatagctaagttcacctccttgagatgagaagctagaaccttactacaccccccctataatagctaagctcacccccatgaccaaaaaa

SEQ ID NO: 239823 - DNA, 260 bp, Glycine max
gctattggagacatcttgccaaacaaagtcaggttaacgatcactcgcctgcgctgtttcctccaagctatatgcagcaaagacattgatccaataatgtatgatgcaggggaaaacgaggccgcaattatactgtgccagatggagatatattatacccctgctttctttgacatcatgactcacttgatagcgcatctggtcagagaaatcaaatgatgtggtcctcgttatctaccgcggatagtcccgggtgagcg

SEQ ID NO: 239824 - DNA, 124 bp, Glycine max
ggggaaaaaagggagaaagtgtattattaggaaagagagagagaagtaagtgaaacagggaaaaggaaggggaaaagagaaaagagggagagaagggagaaagagagagaatggagaaaagggg

SEQ ID NO: 239825 - DNA, 415 bp, Glycine max
  unsure (1)..(415): unsure at all n locations
gcggcccggcgatggcgcacaacaagtcttccacatccacaaatcgcgcataaacccaccatcgcctggtgcccaccttcaactgagctcacgtactcccacgtagcccacatccttgtttctgctaacaccgggtccccatcaattctcccaagcttccacaacatccaagtaattcaacattcaaacagcacaaactatcacagccaagaaaacagggcaaaggcagaaaactctgcccaaagcaccaaccaaaatcacacgttttctcacttaaagaccccaggaacaattccttcgttccatgtgcgtaaccattggatcgactcgaaaatttactggaagctctagacataagcctacatttgccgggggactactacanacatcaaactcatctgactacttgtcacac

SEQ ID NO: 239826 - DNA, 403 bp, Glycine max
ctgacatattctcaactagctcagttgcctcttcaaaggtctccatctttatttttccccctgctgaagcatctagtagatgcttggtttgtggactcagcccatctattaacatattcaattgaattggctcaaagaacccatgggtgggtgtctctctcaataaacctctccaacgcttcactcaaggactcgttacggaactgatgatatgaagagaatgcaactttccctttcgcagtctttgactctgggaaatatttcttcagaaactcttcaacaacttcttcccacgttgtcaaactgtgactcttaaatgagtagagacacctcttggcttctcctgccaaggaaaatgaaaatagactgaatctaatggcttcatctggcatgcctgcaatct

SEQ ID NO: 239827 - DNA, 330 bp, Glycine max
cagtcaccgctttatgagcgcttgtcaccacctacgcttctaagccatcaagggatggtcgcttctccgggagcgacgcgtccagctcagggacgactagtatactgattttcaggaggaaatagggcgccggcggtgggcaccactggttactcctatggccaagtttgatccacaaatagtccttgagttttatgccaatgcttggccaacagaggagggcgtgcgtgacatgaggtcctgtgttatgggtcagtggatcccgttcgatgccgacgctatcagccagcttctgtgatatccgatggtgttggaagagggccatgaatg

SEQ ID NO: 239828 - DNA, 440 bp, Glycine max
agctttgcaactggtgtaggaaggcttagcatttaaatgtatctcacacacacaaagacccaggtgttggacaagtgacctcaataacttaagagggggtgaattaagttgcaaaatttcccactaacaaactgttaacctccttccaaatgataggctcagaatgcagaacaataagcaacgatccaattaataatgttctttaaacatgcaagacaaaattaattgcaataacataaatgagataagggaagagagaaatgaaaactcgatttatactagttcaaccacttcccgtgcctacttccagtcctcaagcaacccacttgagatttttcattatctctataaatgctctacagaacttgaacacaccttgtgatccctcagcctgtgttcaaagatctccaagagacacccatctcttgattacaatctac

SEQ ID NO: 239829 - DNA, 475 bp, Glycine max
  unsure (1)..(475): unsure at all n locations
tgcatgtncaagttnttcgtgccatacccagtgccaaactctatttatgttcaaggactatcatgcactgatgttttgattctcactagccgaactgcattgttcgacaccaggtactgtacaagacgaaagattgttcaatgttttgattaaaaatgcgaaagataccaaaagaagggacaaaagggtcttttttctgagtttctgggaccctggctcgcccaggctagcatctggctcgcctgggcccccaagttacttcagcctgaaaggactagctcgcctgggcgagctgccatggtcccaaatgccattttttcctgtaaatatgcgtgaacaggggttgaggaatgggttccagcattcagcatcgagaganatcgagagaactaacggagaagaagaagaaataagagaatacagagcctatgcgctgccatatcgcgactgtaatcatctctccaacggtctggtt

SEQ ID NO: 239830 - DNA, 375 bp, Glycine max
  unsure (1)..(375): unsure at all n locations
tgatactcaagctgtcatcgatcacatatactgtaatcgataaccagatttttttttcgaacacattntcaacaggcacagctttttgtgtggctcttgaaaggctatcaaaggcctatatatatgagacttgagagacgaatgtgacaagagttgtttgaagaaaacataggtcttatcctcttaacaagcaaaattgtgttatcctcttacaaattccttggccagaacacttgtgattcaataaggaactatatgagtgctcaattgttcaacctatctcttttaagagagagatcttcttttcgtcttcttcattctgaatagggatatagagaccgacggccccttgttgcgaaagaattctacacacaa

SEQ ID NO: 239831 - DNA, 267 bp, Glycine max
  unsure (1)..(267): unsure at all n locations
cttactgaactactagctaacaaaaacttattaacatctatattatgtacgacaaaccctaaaataattgataaataaaataatattgaatccaagttattaaaacacaaagcttatcaaaagaaaaggaaaaaaaacattatatttaaatcatacatggattacagatgatctatactaatataatccaataaaaatatttaaattgtctgaaaatatccttacaaaatattctgtnttttaggaatataaatctggttgcattat

SEQ ID NO: 239832 - DNA, 364 bp, Glycine max
ctcaaaggttctatccgcatgccattaaatacctcccacgctgagtacaacttcccacatttataatacctattcagaacggcgttctctaaatacccttcaatcttatagccccctgcgttcagatactcgcgtgattttgctacccatgttcagagcaccagtttctgcacaggcacccagaactgaaataagtggtacttctgtcgggcttacttcagcattttgcatatatgaaaacaggcccattgctccttcgtaatccctaacagagacacaaccagcgatcagagagatccatgacacaacatccctctgaggcatatatttggagcacccttcttgcaacctcaatataacctaa

SEQ ID NO: 239833 - DNA, 424 bp, Glycine max
taagtcgactgcagcatgcaactatgctgaaacatggaaatatacctcttaacctcagcagccaaatcaaccatagcaaaaaaattatgacctctccagcaacagatacaaccctggatggaggaatcaccctaatctcagatggtctagccctcaacaacaacaacagcagcctgctccttccttacaaaatgttgctggcccaagcagaccatacattcctccaccaatccaacaacaacaacagccccagaaacaacaaacagttgacgctcctccgcaaccttccctcgaagaacttgtgaggcaaatgactatgcagaacatgcagtttcaacaagagaccagagccttcattcagagcttaactaatcagatgggaacaatggctacacaattaaatcaacaacagtccctgaattct

SEQ ID NO: 239834 - DNA, 410 bp, Glycine max
aaatactcagcttgaaaacaaaactatccagggaatgtttattttgggattcctttgcttgcgatgattgattctggtgccacccattcctttatatcctgattgcgtggaagaaaacttaagctttctgtgtcttctttaaatatagatatagtagtagagacccctactagcggttctgtgataacttctgatgtgtgtttgaattgtcccgtggagatttctggtaggatattcttgactgattcgatttgtttgcctttgagccagagtgatgtcattcttgggatggactggttatctctcaaccatgttttggtgaactagatcgagaaaagtgtggtgttgatgattctggagtgagtaacgatatgatgcttatctctgccaaccaagttgagacatcttta

SEQ ID NO: 239835 - DNA, 249 bp, Glycine max
acacatccttgcaaccctactattcttttgtatagcggaagaatctccatattggagaattataatcgtgtgctcccattactacctttaattattaagtgtctatctaaactttacatgctaacacttttgcctccttagtacatgtactagttgcataatctgaatttcaaaattgcgatacggggtctttgtgatctgttagtggctcatgacatctttaactctgtcatgaggtgctactataga

SEQ ID NO: 239836 - DNA, 476 bp, Glycine max
  unsure (1)..(476): unsure at all n locations
actatanatactcaagcttgaacgaatgcaagacacatgttctacaaccgttgtgattcttttctacatttcattgaagagcatatgcacttgtaattccatagagtccaacctctcaccaacaaaagtttgaagaccatcacacctgtccattatctttgataggagagatgaattctttccatcatgttcttcttcaccaacatgttgagcacctttctatacccgagagccatcatgctccttttgataaccaaaagatgctatgactgaagcgcctataaagaaatatctcttgaatggaacataaggttcagaatcaaaagggatgttggagtgttgaaggaaaacggtcacaagatgagggtgaggctatggagcattcatcgcaatgccttatgcatcgatattaacaagatggccccatcaatctgaaacccttatgaaaaggccacatgacaaagagatctttctta

SEQ ID NO: 239837 - DNA, 285 bp, Glycine max
cacatgcgttcaagaaacaacctcttcaatcttccatgtgtaccttcaaccctttaaagcatgttaatgtaatgtcaacacaagattattcttataaaaaacaaaatgtgaaacaagtaggccattacatgaatgtacctattagttgttgtgtttccaatatgcataacccaatcagtccatgcttctacaaacttctccttatgaggcatcaacaatgtgtagtaaacatactaataaaatactaaaaactatgaacatagtgtcataccctaatttcgtccg

SEQ ID NO: 239838 - DNA, 386 bp, Glycine max
  unsure (1)..(386): unsure at all n locations
ttttgctcagctggagaataatgatgctttatcttttacgngagctttggggagcatctgaagatgatagtgcaattgaagaatttcacgccgtcagcaataatgatggtagtgattcggccaccaaatggtcacagatcttggacgaaccgcattctacaggttgcgtcaaggtgagttcggcagtactattagacaatatgcaacattctgcgcttggaaatctgttccccatcttacgtgcctaatagattgcttaccatgtcaagagaaaaacaagcacattaccagaattagatcagctggataggggagagaattcatctccataaaacaaaacattctctcttgataacaaacacatatttaaatccctactcgtgcac

SEQ ID NO: 239839 - DNA, 380 bp, Glycine max
attggaagggggctactatcattggcatcattttttcgtcattgaggtgccacttgagctgccaggttctccacctttgggcgtattctttgaaagatccgtgcccccctttttgcacatagtttgttgttgcatcctatccgaagccattataccgacactgcctaacgaaggcaaccattatgtcctcccacgaatggactcgggaaggttccaagttagtgtaccaggtaacaactaccccagtaagactttcttggaaggaatgtatcaacaattcctcatcttttgtgtatgcccccatcttccaataatacatctttagatggttcttggggcaagtagtccccttgtacatgtcaaagtccagcaccttgaac

SEQ ID NO: 239840 - DNA, 469 bp, Glycine max
gaccttaaataccagcttttatttcagagatgcacatgggtttgtagctaccttatgctctcctctaatgactatggcatcattactggcgctaaactgctacgagttgaagccatcttctctattatatttctggcttcagcaggagtcatgtcttcaagggctccatcactggtagaatctatcatacttctctccatattactgagtccttcataaaaatattggaaaagaagctgttctgaaatctgatggtgggggcaactggcacatagtttcttaaatctctcccagtactcatacaggctctctccactgagttgtctaatacctgagatatatttcctaatggttgtggtcctggaagacaggaaaatgctatctaagaatactctcttaacgtcatcccatctcgtgatggaccttggagcaagggtatacagccagtcctttgccactctctctaatg

SEQ ID NO: 239841 - DNA, 318 bp, Glycine max
  unsure (1)..(318): unsure at all n locations
atgagtcacaagtaacaagaatgagagnacagacatacagcacaggacccatgaacccaagtgtgcacaaccccgagtgctaaatcaccagcatcacaaggtcacaacacaacacagctatgcggatatagaaaggagagatcgagagatcaatgcgaaacaatgtagaacacataaacacagagaacgtatcattaggcgctagaccaattgaaacggaaggtcagtgctccctataatcacatgcttcgacgcagacgaaccaaacgcgagcgatgcaaatcatcactcaaaaggggcgtcggacaatataaaaac

SEQ ID NO: 239842 - DNA, 298 bp, Glycine max
acctttatgaaagataatcctacttgaaccaataagataccatgagtgataaaactatcattctaaatatttaatgcactacatacctgatataaggttaaatctattaacccacctaattctataaagataattaaataacttcaataaaactcatttcttttaaaaaaaaacccacccttatatcatatttgaacccttaatcttgaaagaaaataatgtcataaatactctcctcctcacgtggtttaagctgtaaataaaaattcttataactaattattcattcaagaaaata

SEQ ID NO: 239843 - DNA, 321 bp, Glycine max
tcaagccctcggaccatcaaggaggcgagggaaaataagacggatgtcattcaaatctgcagccatacatcatgacaaaataagcgtagacaacactaatcatataaaagaaaatatcccagatacagatacgcaaagaaggtaaaacaccacctctgcaagcgtcaataaaagaacgcgaagcaaaaactgaatcaacacgcacaggaaggtcagaatcctgcattctggatacaacacactgcaaagcgctccgaaaattatcctgatccgagaagtaatatgggcatattgccctgcacccatgctgcctgtgttcac

SEQ ID NO: 239844 - DNA, 451 bp, Glycine max
ctatagaaactcaagcttcccagatatggagagctaaatcctctgtggggtacttcttgtatgtacttgatgtaaatacttggatatctatttaatgatgatatatgcgtgcttagagctatcaacacgtcatttcagtgtgtttttgccttgatcatgtaaatgcatgctctggtaggatcattcaacagtggaaactggtctgagtcttagaacttgataggacagggctagtttatcggattatcatgagggatcagggtacggcaacctagtatgatgtatatttgtcttaaagcgggcctggtcgaggtgtatccaacaagaagaatctgataacaacgcttgatcaggataaggctgactatcatgaggaatcctgggttagcatttcaggagacaccatagaacacatgagcgattttaagaagaaatagccttctaacatcag

SEQ ID NO: 239845 - DNA, 261 bp, Glycine max
taagaaaaaaacctacacacacacattctaattcacaggataatgtctctccctaatacttcaccattcacgaaaccgtccctctaaatgcaggaaatgcgctgatattagaggataacgagcccgctgcaacaaggcttgctttaatcaaccaaacactcaaaggtacttcacacccggctgcccacggactaaaactgactgcatcttttggaggcccattgttctcgcaaaagccttccttgaagaagaataagaaaa

SEQ ID NO: 239846 - DNA, 280 bp, Glycine max
ctcagcttggaaggctgtttcacgactagcttaccttctttgcttgggagcaccgctaagcgcacactaatggtaagctcgagaaaatccacaaaagagagttatcttgttcgctagcacacccttatctcactaagcgcatagctcattcatccgctaagcggaaatgtgcgctaaccaaaaatactaacgtgtgctagcggccataagtgcgctaagtcatgagacaaacaagcacctattaagcctgaatcagatttataagatatttggactggat

SEQ ID NO: 239847 - DNA, 259 bp, Glycine max
gatgtacctttgggacaccacaaacctacattgtgtatgctcttaagatactgaatgatcctacaattaagtgagattccttatgacaggaccggcttcttgcccataacaaaacacttaacacgatatccgatctactcggccgtaagcagagaagtgatccaatcatacctctatatcgtgagtcatccgctgatttacctctcccatctaagtcaaggtggatcgaagcaccattggaggagatgcttctttgaat

SEQ ID NO: 239848 - DNA, 408 bp, Glycine max
gaccccaaatgaagaataaagaggagagaagcggaactctgaacgatgtctcataagactttcattcattaaaggtcaacaagtgttcacatgctcttatttatagactaagtagcttccttgagaagctttcttgagaaaacttccttgagaagcttctctgagaaaacttccttgagaagctagagcttaggtacgcatacccctctaataactaagctcaccttcttgagaagcttccttgagaagattcctatagaacgtagagcttagctacacacacctctctaatagctaagctcacctccttgagatgagaagctagaacctagtacacacccctataatagctaagctcacccccattccaaatacatgaaaatactaaaaaagtcctactacaaagac

SEQ ID NO: 239849 - DNA, 414 bp, Glycine max
  unsure (1)..(414): unsure at all n locations
ctaagcttgactacgcgagttgatttatccttagntacacgntagttattattctatccacctcagaatgagaaatgccgaggagaaaactggcgacttgaatgtctcgcttcaatctactagaagatatggtttagcaggataggactatctgacctcttgttggattgccaacgtgagtacggcacgaccgaacgggcgaaagtctatttaaccggaagtaacgcgggatacaatgcagatgatcggtggaaattgatgttatttcgtggagacgcgagaagaagcgtaaataaatgactgaagcacgccacaggggggaagaaagcgaaggtaacggaatgaaataccgaacagacgtggaccccacgggtcacagatgaacggaaagccggccggcgggcgtacatggga

SEQ ID NO: 239850 - DNA, 432 bp, Glycine max
  unsure (1)..(432): unsure at all n locations
ctgcngcttaaatttctattgtagagagaatctaattattacatctcggccattaatgagttgaccattatttgaccaaagaattttctttgaattgtccttattctttctagatttttaaaaacttaaaagcttaaccatactagggtatcctatggtaataccttattgtctaccatttcaatagtctaaaaacactacccaatcacaacaaagcaataacactatctaccatatgataactgttgtgtatagatatattttgggattaaatcatataggaattgttaattctcctctcttatttcttccttcttatgttaataattggccatttaatatcatttaagcttttgtgcagaatgtgttcaagttttgtgaatttatagttcttggtgaataattgccgcagaacaacaaagtataactcga

SEQ ID NO: 239851 - DNA, 321 bp, Glycine max
ttaaatggtgcgggaacgaaggaaagaatggagagaagttgaatttcaagcgtgtctcacaagactcttattcattcagagttaccaccagggttacacatgcttctatttatagcttatgtagcttcctttagaaacttccttgggaagcaagtgttacacccctccaatagctatgctcactccatgtgaacacacccccctccaatagctaatctcaacccccgctcccccccaaaacactgaaatacacaaatagctcttctataaacacactttaaatgccctatatacaatgctaataccctattctactaaggt

SEQ ID NO: 239852 - DNA, 319 bp, Glycine max
accctgcatatgtagaaacatccataacctcatatggttcatgcctcagctacgaacactagttgcctgttcctttcttccaaaatgctgcttggcccaaacagaccatacattcctccaccaatcctacaacaacaacaaccccatatcaaccacaagtgggcccctccaaacctttcctcgaaaacttgtgagcgaatgactatgcaaacatgcagtttaacatgagacaaagcctctatgcaagcttaccaatacatgggacattgctacccaattgatcaacaacagaccaaattctgacaagttgctttcaact

SEQ ID NO: 239853 - DNA, 379 bp, Glycine max
caagattattggaaatgaagtgagttacctataattcacaaatgcttgcgaaccaatgtggagatcgttgattgttggacgatccacgatagagataaggtggacaacaacattggtcatcttgcctagtactcttgtcttctatataggtcatctaatcttttgtaatctaatggaatgtctagtcacgtagaagggagcgtccagcttggttgatcattaacataggttgagttgaattgtaactattttttatctttactttgtaaccattctcgggtagacaagtatatgtagtctcctttataaagagccttggattatgggttcagagagcttgagagtgctttgaaccctcttattggctattctattattt

SEQ ID NO: 239854 - DNA, 308 bp, Glycine max
gggactatgtttcggatcagcgagggtgacaaaaaggggtcacaatcaaaatgcgcgcataaacccaccatgccctgttgaccacctccatcagagctcacggactccgacatagccgatatcctagtttctctacacaccgggtcccaataaatcctcccaagcgtgcacaacatccacgcgacacaacatgtcaatagcacaagctatcacacccacgccaaacagagaaaagacagagaactccgccaaaacaccaacgaaaaacacagcttttctcacttaaagacaacaacaacaataccctc

SEQ ID NO: 239855 - DNA, 391 bp, Glycine max
  unsure (1)..(391): unsure at all n locations
aacatcaccctcttttcttgaaccctctgccatgtatataccaagcccatgcatggtttaccgtgaagactcagcatgcccaaacatactatggagaatggagaggagtggaggatatcacaggctcagaagccccgtggatgcaacaacgtttgtttgcaatgatggagaacccttcatgatggctcacttgcttggaaatagggataaaatcgagaaaaagaatagcgaacaaaaatcatgggcatngaatctttcacgattaaaaaatctaaatataatatcctttcccacacaggagacatgcgaaggtcgcccaccttaacctgttattggaagggaaagtacacngaaaactatacttatatggctatattccctgccccccccc

SEQ ID NO: 239856 - DNA, 280 bp, Glycine max
tgttctcaaatatccaattagcatctatgtatttcagccaatatcatctcccttccttttgtccgttcttcaatattatgccgtgaagacttatattaactccataaccactggtcccattcattatattcatacagttatctcggattgtccaggctgctggacacctatccatggaaacactggagaaaggaatgctcacaccacagagcaacgtatggagttatggaattttctttggagctactccacgaaaaagaatccgatagcgccccccaag

SEQ ID NO: 239857 - DNA, 375 bp, Glycine max
tgatatgatctttgaaaagaaagattttttataaaacataactaaccatgctggatggcaagtgcttaaatctgtgataacagtagtcaaaacaatcttctttataagacccttagacctcacaattcgaagtggaacgtgctgcatcaatggatgcacactgattattatatctggctgatatttcattatgcccttaacaacctcgctgtaaaaagagaaaaagatattttaactgtgacatttgatggtacatcatatttgagaagagaaacacacgcgcaagaaagtattcttctgatacatggaatgcagaacaaatcaataatgtttggtctaatattaacacaatgcacaacaaacattgcaagctgc

SEQ ID NO: 239858 - DNA, 436 bp, Glycine max
agcttgtgagaatatgaatctggaagtgaattttctctaaagcatcacattctgttgtgatgccattgatgatcgtcaccaagctctagataccataaaagcattcttaacaaaactgaagatgagataaagagaaagaactcttagaatcagaaaatattattatgattgggcaactaatttctgttacaaagagaagtatatatagagttctagaacaattagttattattactaactaaccttctaacaaactcttaactaacactgacacttaactaacttggtaactgtcataactaactaagaactaacttggtaactgtcatagttaagtgagtgtgcagttgaatactgcacctccctttctactactctaatagtccttagttaatgagaagtgtgcactggtgcattttttgatccttttccttgg

SEQ ID NO: 239859 - DNA, 450 bp, Glycine max
agcttctaccccatggaatttatgaaccgtcattttatagagaattgttctgtaacttccaagagatggggtttctttctttatgcaatggcaatttattgtggagaattcacacgtgctagtaatgaatgacaccatgtattttgagaaacagataaattctgacttacatattctcttatgttgctaaattgcaactgttttattgatttgtcgaactaaatttgagtcatatggtagaagtattgaaaaagttgcactacctcagttttatccttgataagaaatatccatgtcacatgagagcaatcatcaatgtaagaattaaaccataaataaaggcaggtccccacacactgcaatggacaagagggaaagtctcaacacctttattattactacttttgaaaattgtacctgataatggtccggagagagcaagaaaatgat

SEQ ID NO: 239860 - DNA, 278 bp, Glycine max
tttacaagacacttgctcacaatctgaccgccgtgatctttgagaagatgtcaagagtatgcactaagcttctgttatcgagagcatttgtcacttgagcagttgagcctttacttacgtgtagctcataagagatgacatttcttctcctttcttctttctcaagtcatttctagcgtaccaaactctatgtccattgcccacagtcaccattgtccaccacaaaccgtcgttgttctccggtgcgaccacactgcgataggaaccctgtaaccgat

SEQ ID NO: 239861 - DNA, 304 bp, Glycine max
  unsure (1)..(304): unsure at all n locations
taacctacctgttctgtatctttattcacaagcattgttaggatccctgtatctgaggtattattctcttacgtactcgacgatcatcatgattttgtccttgcaaaaggtgtcttggtgggttataaggaaaatgtgtttataaataatagtacctcatcgagagtggcaagggttatttatagacatcatgtcctctcaacccattgagacactctttacaaggaaaaaatcgcgatggttattaagtacctataccgataatacctcatatatggtgaccntaatgatgcctttggatttg

SEQ ID NO: 239862 - DNA, 463 bp, Glycine max
  unsure (1)..(463): unsure at all n locations
accttctcgctaatgcnatgtgctggcttcgcgagcgttcgctagacacatcgctcatgggctaagcacgatgaagactctggaagatgatgagctatacatgctcgctaagcgcactgcttcatctcactaagcgcactgcttcatttcatacgctacccgagaaaggcacgcgctagacctatattcactaatgtgcgcttagcggctgatgtgccattattttctcctatatcttaaccctgtttgcaccatcctaatcactgattacccttaattgtcagactaattatgcacctgtatcatttgggcctactggattaatgttgagtgagtaattaaatttctagagaattataagcaattaagcttgcatgcataattgggtttggacttgacgagagcaaactattctatgctacgcacatttatcttatctagattgtatcttatctacatatta

SEQ ID NO: 239863 - DNA, 310 bp, Glycine max
atacctgcggaagaaaaataaacagccatgctgtctatttttctttaaaaatgcaacaaacatttaaagtactatgccaatatcttacaatcttaatgaaacattacaaagtatttaaaataaaaatttaagaggaaagttcacaattacaagaatatgtttaattaattcaaaaaataaatacatttagctaatatttaaggaaaatagcatttctaaatatcaaaagacaaataggcaggaatcaattgaaatgcataaataattaatatttggataaaaaaacataaaattaaatacatttattcta

SEQ ID NO: 239864 - DNA, 311 bp, Glycine max
acggacactattatactaccctacgcatgctgcttgcacatcctatgcgctgagttttttagttcctctcgccgtaactctagacgctgatctcgcataacaagccgtcagcaaggctgccgatattgacagagaccctctgtttcaggatacatctaaccgtcaatccgggggagaaactgaacctttcatgcccatgcaatgcgtcttgcctcacctctcacgacgatgtattctgtacatacataaaaattgcggaacgtgtgctccaatccacaggatctatctccatctaacggaagcaagcctac

SEQ ID NO: 239865 - DNA, 360 bp, Glycine max
ttctaacaccaaggccaacaatcatgcttaaggtattgacgacgactcggaaatcttatatgagccgcaataatgtatacaaatgaattgcgactttcgacgaagatatatgtaaagagctgccgactaatggattatgaatactcatacattggcttagcttctagagtcattgggtacatcaatatccatgtctctaacgagatagttgattagaccaaagcctaaaacgagataaccgagagacatctaaagaagcatgggatgggagatgtcgaccacgaatgggttatagctggagagccaccagtcgccagacaacacaataagatggaagatcacgcggaagagaaacacaac

SEQ ID NO: 239866 - DNA, 411 bp, Glycine max
tgatcctacatatccttaatcgcaatgacataatctaacctacagttttcttgcacaagtggtcaagttacatgtgagattgtatgcttgtgaataggccatgttaaccgataaaatcaaagaagaccgcttaaagaattggaccttataacggcttacagtgacttttgcggacaaagcttgaaatgtgagttgatattacccttacgttcactctggctatatagcaattcattccaggaaacttccagagataaccgtacgattgatattctagattattatattcaaagatattcatgatatgtgattattatggatagccttctcgatctaactgagattataacgtgaatgatcgggtggattatattttactagtgaatcatctagaataccactaccatgatc

SEQ ID NO: 239867 - DNA, 454 bp, Glycine max
  unsure (1)..(454): unsure at all n locations
agcttctgttttcaagtttcgagcgtcttgtatatattatcgggactcacatcggatatttggagttaanaagttcttggtggtttgcgatttgctaacgagcttctgtttttcaatttcgagcatactcgatatattagcggggactcaatcggacatccgagtaaaaatttattgtcgttggaatttgtaagaacctctgttctgaatattgagcgtctcaatatacttcaagactcaatcggacatccgagtaaaaaggtattatggtttcaatttccaacgagcttccggtttcaattctgagcgtgtcgatatattattggactcaatatgacatcggagtataaattttatgtcttttgaattgaaccgagctttcgtcttcaataccagcgcctctatatatatgggactcaacagacatccatgtaaaaattattggctttgaatt

SEQ ID NO: 239868 - DNA, 434 bp, Glycine max
atatggagaggtaatgaaacccgatattatctctccatgataggttggatcaaatggagaatagagatcataatgaagaataaaggaggacaagagggaatgatggtgttcctagacaaaaccgaattgatggtattaaactcaacattcctccatttaaaggaaagaatgatccggaagcctacttggagtgggagatgaaaatagagcatgttttctcatgccacaactattacgaggaccacaatgtgaagctcgccgccacggagtattccgactatgctcttgtgtggtggaacatgctacttaaggagagagccagaaatgaagagccaatggttgatacatggacggagatgaaacaaatcatgacgaagcgtgatgtgccggctagttactcaaaggacttgaaattcaatctccaaacactaacc

SEQ ID NO: 239869 - DNA, 303 bp, Glycine max
  unsure (1)..(303): unsure at all n locations
aacatcctggaatgcccaagtgggtctggatgctatttgcacccccctatttactaaatacacccctttcgtaacgatacttgttttctttccgtaatgttacggaaccttacggatcacgtaatcatcccttttttggcttccgggatgttacggagcttacggattgcgcactaacactttctttngacttccagcatgtcatagaacttcacgggttgtgcaacaatgctttcttttgacttccggcatgtcacggaacttcacgaattgcctaacgatgggtgccaagtacctcgaagt

SEQ ID NO: 239870 - DNA, 403 bp, Glycine max
  unsure (1)..(403): unsure at all n locations
acaccttttggggggggccattcttggatggccttgattttctaaaggtccacttggaccccatttctaccaactacaaaccctaagaaaactatattatctacataaaaagtacacttctctatatttgcataaagggtatttttcctaaggactaaaagaacttgcctgagatgtcttaagtgatcatctaggctcctactatacactaaaatatcatcaaaataaacaactacaaatgtacctatgaaatcccttaagacatgatgcataagcctcataaaggtgcttggtgcattagtgagcccanaaggcatcactagccattcatacaaaccaaacttggtcttgaaagcgggtttcactcatcccctttttcattctgattggtcataaccacttt

SEQ ID NO: 239871 - DNA, 199 bp, Glycine max
acatatcggactaatgtcatattacctacgaaaggaagtcactcctatggaaaagcgtatctgggactcacacgaaagcctcacaaaacaagcgtggaatagaattaatgtgcttgattgctctcccgtgaccacacctatggatggaggcttgcagctatcaaagtacgatgaaggagacaaagtacaccacacggac

SEQ ID NO: 239872 - DNA, 412 bp, Glycine max
tgcaagcttgtgaattgatacactgcattggttatctattaccagtgattggttctaaataaaataaacaatatgtgactcttcaaatagttgttgacttgttcaaattggttattaagtttttctaaaagtcataactcttataatggttgtcttgaccaaacatgaagagtctataaaggcaacgctttgttttgcatttcaacaatcttgaatacttttccaatcaatctcttacaatcctttacaagccttgaatctctttgaacttcttcttcttctttgtaccaaaagctttctaaagttttctggtattctaaaccttgaaaacttgtgctatttatcttttcattctcttctccctttgccaaaaataattcgccaaggactaaccgcctgaatactttttgtg

SEQ ID NO: 239873 - DNA, 385 bp, Glycine max
gaaactgagataagcgaaattcttgtgacagtacacaaaacaagtagggaccgctactggtacatagaatgaattgaaagattcgatttcggaaacttaccggttgaagactgaagaacgacgaagaacgaatgaagaacgatgaagaatttccacataatcgcttacggaaacgttacggaagcacttcgactcgatttttcttcacgaaaacgtgttttttgcccaaaatagccgaaatgcatagcttaggggtcatgaatattgtgaaacagcctcccctcccctatatatagggaaaaagggaggtgcttgccgcccagaggcttcttgaggaagatttctaagcgcaccccaattactaagttcacccccttttcgtact

SEQ ID NO: 239874 - DNA, 441 bp, Glycine max
ctatgcgcatattaccttacgaacgttattattcacaagatatttaaccgagaaagaatgcgcccatatacaatcaagggagcttcggtacctaaaaaatgtacacgtacctccaggtgtatttgttacttacatcacacacatctccttggcaaaacacacaatacctgcatactcaaagcattttggggcaccaaatattgcacacgtgcacatctgagcatatctaatacctatacatacccaaactccatgatgaatcttgactatctacacaataaggtgctacatttcatgctcttttatacaagtgtttgctgcctagaaccgcatgccaattcaagcatattctcctttgctgactaaaattgtattacaatcaaaaagtatatcttatgtaatatgttgtcttcacataacatgcaacatagtaatggatat

SEQ ID NO: 239875 - DNA, 444 bp, Glycine max
  unsure (1)..(444): unsure at all n locations
atgccctttactacagatgcatcaacttacgtagtcctcctccctttagctaacttctgagattaagttggattcaatccattctttacactattcataactttgtcgttgtaacaagaaatgtgtgtgtgtaatgatttaatgatttcaataatcatttattcgaaagtataaaatgcacccattatagtatctctaaggatgcttatgtcaacacaaactgataaaaatcatgatggtgcttttactgagatgtggaaggtcaaggcccctagtcaagctgcattcttcgcatggagactactcatggacagattaccaacaaaaatgatcttgcgcaggcaatatgtgataatatttgatcccacatgtcctttctgctatatacagatgatgatgcaacacacngattctcttgttgcgcaaggtaatgccactctggtg

SEQ ID NO: 239876 - DNA, 421 bp, Glycine max
  unsure (1)..(421): unsure at all n locations
gcttgaagggatngaataatcaaaaagaaatattatatgatctctattgattctaactgatgtaaagaaattgaattttgtattcactattggaaacaatggtacaaggattccttagatacatgatattatgaatggtaagaataacttagactctaacagggaaactgtcaagcagttattaacaaaaaaaaaactaactatagaaattaactaactcagcctaatacttgaaaaactaaataaacacataaatttagactttaagaatgcagacaaaatatatttcatagttgaaatgtagtagttaactaccagggggaagaaatgaagcactgatactctaatttaaactcacccatacggagccttttccaattacactttgggtccaaggaagattttcatcaacgccaacttt

SEQ ID NO: 239877 - DNA, 343 bp, Glycine max
ctgagacaatcataggtctctgtgttcaaagatcagagtcgatcatatcagggaaagagcctctatgctttcttcaagagtgcactacctatattgctacactatgactggcctaaacgtagggtattgttaaatctcatacacatatcggacttatcgatagcaacaagcgttccaatcatgtacacagacaaaccaccgccatcttcatcatgagatatgcggcttggggcagttgacatgcaaaatgaaaatactatactttagttcaaatgcactagatgtgcagagcatttatcaccgaaataacatttgcatatgtgttgtatttgctatacacata

SEQ ID NO: 239878 - DNA, 407 bp, Glycine max
  unsure (1)..(407): unsure at all n locations
agcttgatgaattagggatcatagttaggatcttgtctataatggtgctaaaggatacaaccaagaggaaggcattgactataatgagacctatgcccctgttgcgaggttggaagcaattatattgctgcaagcatttgcttgtataatgaatttcaagttatatcaaatggatgtgaaaagtgttttttttcaatggatacattgaagaagagatatatatggagcaacctccaaggtttttagacttcgatcatcctaatcatgtttacaagtgccaagatcttggtatgaaagattgaacaatttcttaatngngaaatctttttgtagacgtcaagttgacaaaatattatttatccaaagatcaaacaatgaattattactcgtgcaaattatgtgatgac

SEQ ID NO: 239879 - DNA, 479 bp, Glycine max
  unsure (1)..(479): unsure at all n locations
agtagaacttgcctttctctcgtacttaagaggtagtcttgatagtcattgataatcgtgatgttggttttatggaaaaacaatctaattacgagatagagaaaaagatatagaccattaactgcagttattctaaaaaaaatacctctatagtgatcgggattgtagttgctctaaaattaagtattattctaaattgatactttagatgttaaatattaatttaaaaatataaaatgtttaaaaattctacattattgttctataatttttagaagataaaactaatttatctaaataaatttcaaagtcaaattttcttgaaattttcctcgatatataaatgtctaataaataaaccaaatacaacaatcaactgcagagaaccccaacaatgaaaatctacacaaagaaatcatgcgagtattaatgaaagagagagatacattacangaacaatctttggtattagacttttc

SEQ ID NO: 239880 - DNA, 444 bp, Glycine max
  unsure (1)..(444): unsure at all n locations
agctttgnagggcgtgagacaagtaattctatttattgttggtgaacgaaactcatgacaaggaatatcaggacgtaagagtgtaagacaataattttcatttaatgaaaccaagcttcatccattctctggtcaatacctcattcgagtcaatcctcaaattatacaaatatattccttctatgcataaatgcctgacaaaatgttgggtgatcgaattatacaagcatctatcctatctacctaaatagagtattaagcacataccacaagtttttgtgtgtttcagtgtggtaaaactcattacttttatcaacaatttattatttagcatatataaaaatgtatgttccctacacaataatgaaggctgtggaatacttatgacctaataaaatcaaaataaatctttgagctcacataaaagaaataaggccgcccaaa

SEQ ID NO: 239881 - DNA, 271 bp, Glycine max
gctggctctagaacatttccattggattaatgatgaaatctatgcatttcaagtgaaaagagctcagcttgaatctctaaaagcaacagcattgctagatgcgcatgcaccgccaaacgcatgttcatagcgcttagcgcaaatgagaatttggcgagcatcaacatcgacccgtgcgctaatcgcaagatcagtgcggttagcgcagcatgcgccttcagataagctgagcgcgagattgatgctcagctcaatttcacttactcgcgct

SEQ ID NO: 239882 - DNA, 384 bp, Glycine max
gcttgaccctcatatctcaaatattttttggagctttctatgtccaccagatgtatctgaattgaagttatgaaattttaatgcccaaaaagcgttatgttccaactcgacaggtaggtgacaagattttccataaaccaactggaaagacataagtcctgtgggggctttatatgctattctgtatggccacaaatcttaatctattttcagggaccaatccttccttgattgagcaactcatttttctagaattttcttaacttccctattaaaaacttcagctttcccattggtctgaaggtggtaaggtgaggctaccttgtgtttgacactgtaatgttggaagactattgttacctgtgtattacaaaaatgagatcc

SEQ ID NO: 239883 - DNA, 143 bp, Glycine max
ttcatgctcaatatgatgcatgcacctgaccttaactcttatgagcaatgtggtatcatcccaaggaaacagcctaagtgggtccacacgacactctcacttatgaaaactatgtagtaaatgtcaagttaccctgtcagcac

SEQ ID NO: 239884 - DNA, 352 bp, Glycine max
gcttgcttgggagctttatggatgctttattttgagcttcaatgaggtcctttaatggtgattttacaccatggagatgcaacgaaagacaaatgagaagaggtgagaggaggcgacatccactacggaataagccatggaagaaggagcttcaccaccaagatgagccttggataagaagcttggagaggatgcttcaatggaggaaaagatagagggagagaaagagagaggggggagcacgaaattgaatgaagaaaaagggagagaagttgaactttgagttgtgtctcacaagactctcattcatcaaagttacaacaagtggtacacatgctactatttatagact

SEQ ID NO: 239885 - DNA, 502 bp, Glycine max
ggaacataaaactaagcttgtaattaggactgcactgctgaacttcttgagaatatgtgttgataatgaagagttagcttactggtcactctatgaaggaatggcacgctacatgcatgatcacaaaactgaatgtaattatgcttcaaaaatgcaatcaagagctcaggcttattacaaatctgaatgaataaaaactgcaacagctcttgaaccaaatacattgaaaacaaaaagccaactagagattaagtccaaacaacttgaagatgtaaaaaggcacagggaccaagcttacctcgaacccgaacagtgacaatggcagtgagatctaaaacaatggcgcagagacttgaagctttcctcgtacctcaatcaggtcaccacaaaatgtacctatggttaaacgacacaacacagacctattatgttagacgaaatgaagcttagacatcaaataggttacctcactcaatatgacacctcgcgagcaagaacctaa

SEQ ID NO: 239886 - DNA, 293 bp, Glycine max
gctaaccgcaacactcatgggctaagcgtgatgaagactcctttagaagatgaggtgtcatgttggataacacactgcttcatctcactaagtgcaccgctttagttcatctcactaagcaagaaaggcacgcgctaagccgaaattcactaatgtatgctcagcggtacataagtgcgctaagcgcacgagcacgaacaaggccacctattcaagcttgaaatcacattctagagagggagtattggactgggattcaaggctttgcatgtctagggttcctacaaagagaa

SEQ ID NO: 239887 - DNA, 474 bp, Glycine max
  unsure (1)..(474): unsure at all n locations
nttgctacaaaccttttctcctccttgagaacatcaaattgtcaaagaactcggaaatcaacacagttataacaatggagaagcaagatataagtatcagagtattaaatacaatatgccaaactcataatcaagaaataatcaaaccacaattcaaataacataaaatgtcaacaaccacaaaatatccaagactgaaatttaaaaacacaagataaataagcaaagtacttagcataataatgtaaattctaagaaactaaaagccaaaatacacggcttatataagataaataatcagaatctaaaatctaagaagacggaggaggtggtggaagatcgaaactctgacgaatgtatccgacatcctcttcaagctgtgtaagacgaatgtccataccggcaaagcgtgaatctaacgagtcaaagcggtcaccaacatacgaacgaagaacccgtaattcggagaggact

SEQ ID NO: 239888 - DNA, 460 bp, Glycine max
  unsure (1)..(460): unsure at all n locations
gctgtaggattatggggtacccatcacatgtgttactatgtggcggncgggcgatggggcacaacaaggttttccacatacacaatgcgcgcataaacccaccatcccctgtagcccacctgcaactgagctcacgtactcccacgtagcccatatcctcgtttctctcaacaccgggtccccatcaatcctcccaagcttccccaacatcaaagtaatacaacattcaaacagcacatactatcacagccaagaaaacagagcaaaggcagaatactctgcctaaacaccaaccaaaatcacagcttttctcacttaaagaccccagtaacaattccttcgttccaattctggtaaccgttggatcgactccaaatattttactggaagtctctagtacataagcctacatgttgaccgttgggatctactagcaaacatccagaactcattctgcact

SEQ ID NO: 239889 - DNA, 449 bp, Glycine max
  unsure (1)..(449): unsure at all n locations
ctgggcttggtttagacatgatngatacatgatttgggacttgtatgaattgatttgggcaagattggatgagaaggaaggtgattttcgaaatctgcacttatgcagaattttgctgtcaaaataggtgcagcagaattntggctttgtgcagaaaaatgcttgtgtgtggtaggctgtggaaagagtagtacagaatgagttctggacgtttgctagtagatcccaacggtcacaatgtaggcttatgtactatagacttccagtaaaattttggagtcgatccaacggttaacaaattggatcgaaggaattgttactggggtctttaagtgagaaaagctgtgattntggttggtgtttgagcagagttttctgcctttgctctgttttgcttggctgtgatagcttgtgctgtttgaatgttgtttntcttggatngtgtggaa

SEQ ID NO: 239890 - DNA, 451 bp, Glycine max
agccttaaatctaccaagatagtacaaatgtgttttcacataacctaacgggttctaattatatgggccatcaaatctatcatgtgttgatagtaattgattaacccgtgaatttcctctggggctgaccacacttcagcgatggcctttgctttgtctaataatcccgggatatcttgacttccatttaaggtcaaggcgaacctatccatccacatggccgtttcttgatgcaatgcatcaatcactctccctcttgcttccttttcggcgtacgcttgtgcgaaatcctctactagtttttgttcatggttcaaagactggtttaactcttctttatacttgcctattataactagcatgctttgcttcatggcttctaagtgttgggccaaactcctcttggatctcgatgcaacagctaactcctcctataagatcatgccatgta

SEQ ID NO: 239891 - DNA, 487 bp, Glycine max
  unsure (1)..(487): unsure at all n locations
aactaagctgggtggtgccctcatttctatgagttgccatcaatcatacttatattctctctattngngaagagtcagagttctcatatgaccattctcctagttaatgttgatgatgtggntttgactggtaaccatcttgaagaaattaattttgtcaaaagttttctagaccagcagtttaagatcaaggatctatgagaacttaaatatcttttttggcttagaggtggctcgatccaagtctggaaatgttccttagtgctaatatgcctatgagttaatcaccgattttggcttgttaggctgcaagcctgtttcggttcccatggtacctaattccaaactttatgctacaattggtgttctcttattcaatccagcaagttatcgaagactttattggcacgccaatatattggactaataccatacccgatttatgctctgttgtgcataaattgagtcaatatttatccaatccgac

SEQ ID NO: 239892 - DNA, 440 bp, Glycine max
  unsure (1)..(440): unsure at all n locations
agcttcagacaacttgtgtaatcaattacgatagaattgtaatcgattaaaatagagagtttttcctcctgaagaaacttttctaacttagaaactcttcttttcacttactcatgatgatgcatgatgcataaaagatatgatatgtactaaagatgcaacatccaatataacaaccattacaaatgccactcaagggagttaggaatgtaaaagacaaaacatcttcaagcttttctccaagcttcaagctttagctttcttgttgttcatgttgctccccttatctctaaaaaattcattgttacatacatccatcatccttagagtatgtgaccggttaacgtattctattattcatggattagatgcccagaagtcctatgtattcccttgcactctattacatgtngaaaaatcctttggaagacaatccctta

SEQ ID NO: 239893 - DNA, 482 bp, Glycine max
  unsure (1)..(482): unsure at all n locations
tatgtntagatgattctaatgttatactagggtgattanaagtgaattttcttnttttgattaatatatatttttgttaactttatacataaataaagtgcgagtatgtatttaccggtacccaatgagtatgcagatattgttacctgcatgaattttctttcagatattgaagaanaataatataatactctaccatgactctacccattatcatccttaagtgcaatgacaataaaattggaacaagaatatagagaatgaatgaaattaaagcatggcaaattagtcaacacaaaaccatttaggtagttatgggtatccaataaccactcaaagcccaaaaatatttgagaggtgtgaatcgaggaaagacataaaagaaataaaattatttaatgcattaccatatttatgctcgatgtaccccaaaattcctaatattccctttntaccctnttctctatgaagaanaccctaat

SEQ ID NO: 239894 - DNA, 349 bp, Glycine max
  unsure (1)..(349): unsure at all n locations
agcttggatttccttttagtagggaatctatccttcctaatatggagcccaacctagtcaccttcattaagaactagctcttttcttcctctattgcctttagttgaatacacctttgtttggttctctatttggttcttaaccctctcatgcaacttctttacaaattctaacctagatttcccttctttatgtataaaagaagtgtccagtgggaggggaatgaggtctaacggtgttagggtattgaacccatagacaacctcaaaaggggactgcttggtggttctatgaacccncctgttgtacgaaaattctacatgacgaagatactcatcccaagacttat

SEQ ID NO: 239895 - DNA, 399 bp, Glycine max
catctggcaagaatccccacctactttactagtgataaattttcaatttctatatgaaagtctaatattaaggcgttttatatttacatgcatcactacgaatgcctacgttaatttgactcactttatgaactaatctcgatgttttttctctcaacttaaatatctcatgcatttaatctattctcgcaatccaataactacgatgctttcttatcctatcattaaaacttaaaaggaatgctttccaatatcactaataaaatagtttctctttaattgtgaagctgtttgttatctttaagcatgaatacaagactactacatgaagtctcagtgataacaaaccaatttactctcgaacacaaaccactaactttctgcttaaatatttattca

SEQ ID NO: 239896 - DNA, 415 bp, Glycine max
  unsure (1)..(415): unsure at all n locations
gattctggaaatgagttctcgtattcggcttctgggtatttgcttgtggctgcacctgacatgcttcaccttcatttntggcaacatcatgagtgtaagaggagatgcaactttgcaagggactgttgccattgatgacaaggttgtgattggaaccattgatgatgattttgtttgtgcaactttggattggtggcctcctgagaaatgtgactatggaagatgcacgtggggacttgcttctcttctcaatctggtacttttgcttcttttatctttccttattttntcaaatagattatgaatctggatggtgaagtctggaattatgatggctgcatattgttccaacacccacactaaagatgttttttcttttttgctgtggctgtcttgatttcatggactgatgtct

SEQ ID NO: 239897 - DNA, 468 bp, Glycine max
  unsure (1)..(468): unsure at all n locations
gagacacctgcatcttcttcaccacaagctttctattcaagcaaggatnngnncattccagaggcacaagcctctgctatggtttggtccaaaattccaatgtaaatatattattatatatatgtacgtagtggttatatttacgttctaattatctatatgttttaacttgaattaggggtgactacataggtaggtaatcaattacatatgtaactttcagtttttcttcttcttatatgttacctttggtttgctggtcaatgcttgcattccaactagtctatgtcatcttttaacctttatggtaagttcaaaataccccctttcacaatacatggttaactaattgatgtttgttaagaaaagtaattaatttagttattgacattaaatatatctataattataatatttgttaaaaattatcgttaactataatagacatctttgtatcttctctaatct

SEQ ID NO: 239898 - DNA, 448 bp, Glycine max
tcacctgcaggccatgcaagcttgaacaatatacttggccttcatttttctgtctctgggcttggcggccacgctcaacaaagtactttcgacacctactgtatgttgatttgaccaacgctgttatgggaatgttgcgacaatccttcaaaaccttattgatacattctgagaggttggttgtcatgtgtccatatcgacgtccttctctatcataagccatagtccatttttcctttgaaatgcgatcaatccatgttgctatggctggacttatttcacgaaatttttctaaattttgataaaaaatgtgcttgcaaggagtgtacgctgcataaaattagttatcaataacaattttaagtatataacgaagttaaatacacgtgaccattaaatatgaaatcttacccaacttctgcaacatatctttttgtttgcgttattg

SEQ ID NO: 239899 - DNA, 469 bp, Glycine max
  unsure (1)..(469): unsure at all n locations
actaagcttctatatttccaactaagatggataacaagaatatgttttgatncatgttagaacatgaattagagaaataataataaatcgcatgtgatttaaaaaatatatttaataaaataacaactatttctatttaataaaaatatatttaataaaatgaattaatgcaactatttttattctaaataatcataatttagaatatttctttatggtttgttgcatgtcacctatcacacaatacaaagaacaaatcaaatgtcttaccccaaatttttatttaggtttctcatggtttctttttcaatttagtttagttgatttatcttcaagtttataaaagtttaagtcaatgtcgtggtttaatttagactccattgatgtaatgaagtggtgggttgattcactatattggcactaaatgatntcaacanaggatccttttattagcattatgcagttgtat

SEQ ID NO: 239900 - DNA, 331 bp, Glycine max
  unsure (1)..(331): unsure at all n locations
agcttcaacattcaatttcgagcatctttaatgtgacaggactcaatcagacatccgagtaaaaagntattgtcgttcgaatctgctcaaagcatcaacattcaatttcgagcgtctcaatatatgacgggactcaatcagacatccaagtaaaaagatattgtcgtctgaattggctcagagcttcaacatttaatttcgagcatctcgatatgttacgggactgaatcagacatccgagtaaaaagttattgacgtttgaatttgctcagagcatcaacattcaattttgagcgtctcgatatgtgacaggactcaatcagacatccga

SEQ ID NO: 239901 - DNA, 464 bp, Glycine max
  unsure (1)..(464): unsure at all n locations
ntataagcgcgggttcgggagacaaaggcgaggcgttcgctatatgcgaagatgatattccgagtactntggatttggtacgaccatgccctcctgatttccagctgggaaattggcgagtggaggaacgccccggcatttacgcaacaagcataatgtaaacctttacggttttaaaaagctctatagttgggcctaggctttagagttttcattttgttaaggctntgtgtcttttgtttttgaatttataatacaaggatctttcttcatctgttcctggtctctacccattctcattcatttgcatgtttacttctttttctggaacggcagatccgatgacgagtcccccgaaggtactaatacctgtgacccgtctatcgacttcgagcaagaaatgaatcatacggaagatgaaggaaatgatggtgtgggacttcctccagaactagaaagaatgg

SEQ ID NO: 239902 - DNA, 351 bp, Glycine max
  unsure (1)..(351): unsure at all n locations
accactttaccttgttcatatccgttatttctaaacacccatcttgttccaataatatttttgatctccggcttggtacaagtgctcatacttcatttttggtaaactggtaaagctccttttacatggcaatgatccaatcattattttccagtgcctcgtctatcattttaggttctatttttgacacataggcgtaagacacaatatctgtgaataatgatctagttttgtctcctttaatatgatctccaacaatcttatcttgaaagtgggagttcacanacctccaatactttgtgtgagcttgctgatcaatgatccttcaactgaggagaattcctagacttt

SEQ ID NO: 239903 - DNA, 428 bp, Glycine max
ttacgtgtgtccaagcgcagcagcttctgcgcgtttatcattaactgataaaccatccacaaaaattgatatttggtgtaaatttgctgcattcatataataatgctggacacttttggaatgaatgagcttatgagcatctgctaaatttgactgcagtgtgttgcatagctaaatggatgaaagttttgtgctgttatagaagaactgtgcagaaattattctctttaattggttctaaattttttttcttttccagctatatatttatatatttatgtttatgatattattttatcattagaacatgcatttaatcttggatcttgcatccacgttgcccaccttaataataggtagtccacttctccggcctattactaacttctgctaggacacatatattataataaaatataacgtgacga

SEQ ID NO: 239904 - DNA, 358 bp, Glycine max
  unsure (1)..(358): unsure at all n locations
gacttggagattaattgggcaaactggagaaagcagagtggttttcaaaatctgcacttatgcagaattctgctgtcaaatacgtgcagcagaattttggctttgtgcagaanaatgctatgtattgctcggtgtggaaagagtactgcaggatgacttctggatgttttctagtaaatcccaacggtcaaaatgtatgcttatgtactagagacttccagtaaatatttcgagtcaatccaacggctaacgatatggaaccaatgaaatgctactggagtctgttagtgagaaaagttgtgagtttggttggtgttccggcagagtttctgcctctgccctgtttattggctgagat

SEQ ID NO: 239905 - DNA, 441 bp, Glycine max
acttagaatctctagctttgctgcacatccctatgggcggttgtgtactttttggaacgcgctaaaggagggcttcgtcattggaagtgcggtacacaggctctgtggatgatttaaggatggcctttgtggataactgggtggtgggtaaggaggaggtttggtattgactgagtaatgacattgttgggtttggtgggaaacttggccgtacaggaatggcagtcacagcatgggtttctccctcatccttaccctctttatctgccccagttttctcagtcgtctaagcaggatgattaaatttgccttttttcagatccacttcgatcctttcattggcgaagaccaaattccgaaagcttagacggtgcttatcccaccatcttttcatagtggagtatcgataatgtgtctaccatcacgattatcgtctccctt

SEQ ID NO: 239906 - DNA, 324 bp, Glycine max
tgactgcgagggaatgcattgatctgatccctgggagagtatgatccttaaatttggagaaaaacgactatcatttaggactgatttttgcatgaatccccgaagtatggactgaatgcatgaatttgacgatgatgaaggccatgttcagatagtgatagctacttgccaacaagctgaccttgtgcttgaatgagttatcccttgcacccagtttgagctgaatgaatcagcgactgattgaaccttgggcctatacagagtatctcttgctacctgcctatgtggatgaaacatcatccaccaaaacctggtcaagaaaat

SEQ ID NO: 239907 - DNA, 441 bp, Glycine max
caagttatgaccatttgaatttttcgagatcttccgtgggtcaatttcgggcgtctccatatgtcatgtgcctgaatcggacctccgtaagaaaatttatgaccatttgaacttctctagagcttccgttgtttaatttcgagcttctcgatatctgatgtgcctgaatcggacatccgagtgaaaagttgggacaatttcaatttctccagagcttccgttgttcaattttgagcgtctcgatatgtgatgttcctgaatcggacctccgtgtgataacttatgaccatttgaattgctctaaatcttccgtggttcaatttctggcgtctccatatgtgatgtgcttgaatcggaccatcgtgtgagaagttatgaccatttgaatttctcgagatcttccgtgggtcaattgcgggcgtcttcatatgtgatgtgctt

SEQ ID NO: 239908 - DNA, 473 bp, Glycine max
  unsure (1)..(473): unsure at all n locations
tcaccggatgatgccgatcgaacatttcctaatcgacatctattcaattgttattcacggattgaatagaataaacaatggccggtgtcggtccttatatggccccgactgatatttttcagccgacattgcgcaatttcttttacaaatgctggccgataatgttctttattacgatagaggaagttttttgttttggtgttgcctaaaaaatttacaacgtatgtcggctaggtttttccgtgcgacctcaaccgagggttcgttccgaccgacactggcatgttgatcttctcatttaggaggcctagaaaacgttggcccaccccggcaaaaacaaaaaaaaacattattcacggaaattgatcgaanaaaatgatagctgacgtcggcatggagagatgaccgatcgaggtctaaaaaagaagcatcaacggatgacgccgatcaaacatttccaaatcgacatcatg

SEQ ID NO: 239909 - DNA, 280 bp, Glycine max
ccccccgagatgctgagactcgatcatccatcttgtgacctcagtcagatggaccttctttaatgtagatgcgcttcaaaggcatcgtcgcaccagaagatgatggtgaagtaggtgactcttatcgctaggaacatcgtgacgaacgaaggctaatctttttatacgcttgatcgcgatgatttatttaaatagccctacccgagccatcgtttatctattacaagcccaaacaaatgttaaactcattcataacttgtatattccatgccagacatgc

SEQ ID NO: 239910 - DNA, 367 bp, Glycine max
gacatgagtagccactgcggttattcatcgacggagatgaaacagatcatgaggaagcgagttgtgcctgctagtgactcaatggacttgaaagtgaacgctacaggaactaaccccaggcaacaacgagcgtgaggagcatttgtaagaatcggatgcgctcatgattcaagctaatattgaataagacgaggatgtcactatggctcgatttcttaatggtcagactcatgatatccatggtattgctgagctaggtcagtttgatgaaatggatgatctgcttgacaagacactgcaattcttacgactgtacacaaggaaaggaggggcttagacgaaatgtaccaactttggttcttctaat

SEQ ID NO: 239911 - DNA, 453 bp, Glycine max
  unsure (1)..(453): unsure at all n locations
agcttcaagaattcatggcctcatcaaactatttgtttcccgaaggcaattcaattaataggcctcccatttttaatggagtgggttaccactattggaaaacccgcatgtaaatcttcatagaggctatagatttaaatatttgggaagccatagagatagggccttatattcccaccatggttgttggaaatacaactatagagaaggctatagaagagtggagtaaggaagaaagaagactagtgcaacataatttaaaggccaaaaacataattacatctactctaggaatagatgaatactttagggtatcaaactataaaagtgcaaaggatatgtgggataccctacaagtaacacatgaaggcacaacagatgttaaaagatctangataaacacattaactcatgagtatgaactatttangatgaatgcanatganagcatac

SEQ ID NO: 239912 - DNA, 485 bp, Glycine max
  unsure (1)..(485): unsure at all n locations
cttgaatgctctattcaatggagttgacaagaatatcttcatattgatcaacacatgtacagtggccaaggatgctngggagatcctganaaccactcatgaaggaacctccaaagtgaagatgtccagattgcaactattggccacaaaattctaaaatctgaagatgaaggaggaagaatgtattcatgacttccacatgaacattcttgaaattgccaatgcttgcactgccttgggagagaggatgacagatgaaaagctggtgagaaagatcctcagatccttgcctaagagatttgacatgaaagtcactgcaatagaggaggcccaagacatttgcaacatgagagtagatgaactcattggttcccttcaaacctttgagctangactctcggatagggctgaanagaagagcaagaatctggccttcgtttccaatgatgaaggagaagaagatgagtatgacctggacactgatg

SEQ ID NO: 239913 - DNA, 386 bp, Glycine max
gcaagcttaactattaagcagaaagtaaactctattatttacaactcaacaaacaaatacctgcggaaccatctaagaaatgtacaagctaaaatcaagccgatagaggccaattaaacaacaaaagcaatttgcataggaacatcaaaacagcttgactagctcacttgacaaccgtaaactcattcaatctagtctctcctctgtgcaaaagactcaaaagagcttggtattctatgcggagaattaatatcagaacctaaaatacgactatggagaatctatgaaccaaaattggataatcatcgctgaatgcaaaatcctaacccatcattataaaaatgttgtgagtctgcgaagcggaaattaaacaattcaactgaaaa

SEQ ID NO: 239914 - DNA, 474 bp, Glycine max
  unsure (1)..(474): unsure at all n locations
tcacacgacagatgagttggtttgacattgagaacaaacatcatcttcatcaatgatcgtaacatctcgcaacatgtcctcctttatcatcaaattttctggtgtaaacctgtcatctcataccaaccgcttatagctccttatgcatngggatgtaaagattggagagaaggtaattaagtgcatcagttccactaaaaccatcatagatccccacgaatacccaactatgttcctcaaacaccacaacatgaacacgatcctcccctgctttcctctacgcccattgaagattatgactctccattgaatcatcatcctccagactaccctcgctgcttaaattcacgcttagattctcgttatgcttctccaatgtcgctgtcaccgttgccaccatccactttggctccttcaccactacgcccttgattggagccacaattgaattatgccttcaagacagtcttggaa

SEQ ID NO: 239915 - DNA, 482 bp, Glycine max
  unsure (1)..(482): unsure at all n locations
tttcctctgtgtgctctgctanggtttccaagtattagagtaattgagaagggattgaacgcttcactccactgtctgtgtgtgatgagtatttctccctccacgagaattaatttaaaaatcccaacattgaagatgtgtgcaaatgaattggaaacctggtgtccaaattttacgatgatccaatggttaacgagtccaagattgtagtttcactatgacagatttgggtatatgtgggaaaagaaaaagctcagtgcgagggacatttattctgccacagacattatttcagaaatcccaacggtggatntgtgcagagatacgttccaagccccatgttaaaatttcatgacgatccaacggttaaaaagtccaagatcattgttttactgagacaaagtttgagtgtatgtggaaaaatganaagagagggttttgggagagggagtatggaaaacgacattgataggaagagaaat

SEQ ID NO: 239916 - DNA, 268 bp, Glycine max
aaggaaaaatgttgaaacgcaacgaacccagcaagaaaaatacacatcctttaagaagacaccgcgacagcagcaatcccaactatatcacaaggcgaaagacctggccacctgagtgaaagggaatgaaaagtttaaggaagcaaccattactcggaaaacacaaggcggaaccaccgcaatttggtgagcatcgcgtccatatgggaagcaacatagggagaaacaccgaatagcggcgcacaccacaaaggccatataggactgc

SEQ ID NO: 239917 - DNA, 277 bp, Glycine max
gcatgccacagctcttgtgcatacgatcaatggggcaaaacacaccaaacgatcataaagatggatggctcctatactaacaaacgtgtaatgattactttccaactgtgctgtcaaaactatcatgacgtgtatagaagaaacaaggattacaagttacaagaggcaacaacttctattaaaaacaaagtgacaccttctcgacctgccctatatgtcaaaaataacatgccaagttgacgtcacctcgaaatggcccaaatctaaaggaaaacgg

SEQ ID NO: 239918 - DNA, 351 bp, Glycine max
tgccaaccagctgactcaggcgagcactgatgctccctccggaatcatctgccttcaggaggaatcttctggagggaccgagtgcgctacggtgctatccgcacgcacatttttactgaagccacccgccttgctgattcttggagaatctggccttgtatacccaccgcaacttacggatttaccaacgatgcttgctctttttccgaaagcgtacagaaccttgacgattacataaacgtgctctatatggacttacagaatgtcactgcacctcactaactcgacaactatgccatctttcgatatgccggtgtgacacggaaccgtactgatagtgcatcagtgcct

SEQ ID NO: 239919 - DNA, 398 bp, Glycine max
tcttttaactaatttatttggtcaagatttttgaccttggttagggttaccaaaaagagagttgattaggtctcaactcttagggttttcctaattttaagggtcaagctggaagagaagttttgaatttatctgattatgcaatgcgcttgtaatctttgaaattcatacctgaaatattcaactagggttgctaggcataactatatgtaagtcctcctgaggactaaactaatagcaataaatcaccactatcaggagatgttgacacaaaccatgtggtaacagtggtcaaatcaagatgtatgtatgtaggtgttgcactaccataacatggatcccagcatcaaaagcctcgcacattcctagtatgcgattacaatgtgtaagtctagata

SEQ ID NO: 239920 - DNA, 479 bp, Glycine max
  unsure (1)..(479): unsure at all n locations
tgcacttcttcgctttcttcagggacttcagcttctttcttacttgggccttttagcttcgggagccaatttatcccttttgtcctagaattcaaccacttgtgatagttgccggcgacgccattgctacttcccctaagttccttatctttcctttctattgtattccacgctttctggattctctgaagtatcctcgcattggcttcactgaaacctcgcgcgacgaaaggtgcgatgatctcctccaacggtgcacctcacatagggtagcctagttgtcttatggccaacatgggattataattaatacaacccctcgttcccatcaaggggacgtatgggaatccttcacacaagcacaacactcctgcccctccttctttccatcgggggaaccagctattggacgctcctaccatacctgccaagagttcttcccaatttgattttccctttntggcgcacatgcgatgacc

SEQ ID NO: 239921 - DNA, 447 bp, Glycine max
gcttcaccatttggtcctcctcatagttgttgcatgagaaaacatgctctattttcatctcccactccaagtaggccgtcagatcattctttcctttaaatggaggaatgttgagtttaataccatcaattcggttctgtctaggaacaccatcattccctcttctcctcctttcttcttcattatgatctctattctccatttgatccaacctctcatggagcgcatcatctcgttgtttcattaacctctccatatgttgcatcaaagctggcatttggaatagcgaaagccccactccatcattaggattagtacctgacatctcaaacaaacaaatcatacgtaacacgacaattatagttgctgtttgaatacctcacccactcaagtgtatcacacaattatggcttctctctaatgaaacactcttgccttttaccactc

SEQ ID NO: 239922 - DNA, 442 bp, Glycine max
gcttttacaacaggttatcactggcatcttacttcctgttggatccgacaaactttattctggcagcactgatgggacagttaggatatgggactgccatactggtcaatgtgctaaagtcatcaatcttggtgctgaggttacctctctgatcagtgaggggtcatggatttttgttggtctgcaaaatgctgtcaaggtaagctcttatctgtcattgttttgttttgatgtattataatgtctaatcataggagtagtacatccaaactgattatgtggctgtggttgttgtgaaagcttggaatatccagaccatgtcagagtttactcttgatggacccaaaggccgagtccgtgccatgactgttggcaacaatacactctttgctggtgcagagagtactaaccatgtattaatattggccaatgatattcccct

SEQ ID NO: 239923 - DNA, 475 bp, Glycine max
  unsure (1)..(475): unsure at all n locations
ntgagccanaatcctgactcaccataaaccttgactcatggtgagaatgtcaatccttaccctcggaagcaaaataagaagagaaggaaaatttccaatcaaaggaaaaaagagaggaaaggaaattcccaatcaaagagtgggagaaagcaaaaagaaaagaaagaaaattcccaatcaaagaatgggagaaagaaaaaaggagagaaggagaagaaggaaagaaagctcctgatcaaggatcgaaagaaaacaaaagaaatgtgcagagaggtctttggaccagacaatatttgaacaaatacggaattgtcaccaaatgaacaaaagaaagaaaaggaaaccataacctanaagtggtcttctccctttgattaccaaccaaaatcatgtgcgtcggtgacttgttcgcctcgcgtcatacaataacagataaagaataagccaacccaaaatcanaagccataaacacaca

SEQ ID NO: 239924 - DNA, 382 bp, Glycine max
gaatcaagaagaagaattaatcaggattagcttgcaaaaagtttttcaaaaactgaatagcacatggatttttctcaaaacttgtttaccaaagagtttttactctctggtgatcgattaccagatttgtgtgatcgattaccagtagaaaaatgttttgaaaaagtctcaactgaatttacaacgttccaattgatttcaaaaagctgtaatcgattacaatgttttggtaatcgattaccagtgtgcttgaacgttgaaattcaaattcaaatgtgaagagtcacattctttcacaagaaagctctgtgttatcgattacactgatttgggtatcgattactagtgatagtttgtgaacaaatcacaagatgtaactctt

SEQ ID NO: 239925 - DNA, 454 bp, Glycine max
  unsure (1)..(454): unsure at all n locations
tgaagaaagcanacaattcattngtatgagggagggcctcttagatcacatggtgattgataaactcttgactcgatttatataacttgagaaattcctcaatggtgagcaactccaaccttgcaatgtgttgcaatatgggaacccaatacccaatgaaattggcagcaatgtctaccaatcctatgctctgtcctccacagattacttgtctttcaatacttcctgcaagatcttcaatgcttccaaggcttactccactgctttctcacgcccattctcatcactccagctagcattccatataataggcaagatctaaaaccaaaaaagacaacttaaaaactctaccctatagtagtacactgctagcaaataatctctgaacaacaaatagaagaagagaacccccaattccgatctctaacactatcattcacttgtttatacaaat

SEQ ID NO: 239926 - DNA, 341 bp, Glycine max
  unsure (1)..(341): unsure at all n locations
gaaactttcttgagaagctttcttgagaaaacttccttgagaaacttctttgagaaaacttccttgagaaacttctttgagaaaactttcttgagaaacttctttgagaaaacttccttaagaagctagagcttagctacacacacccatctaaaaactaagctcacctccttgagagcttccttgagaagctagagcttagctacacacccncataatagctaagcttacccccatgacaaaatacatgaaaatacaaaaaaaatttcctactacaaagactactcaaaatgccctgaaatacaaggctaaaaccctatactactagaatggccaaaata

SEQ ID NO: 239927 - DNA, 473 bp, Glycine max
  unsure (1)..(473): unsure at all n locations
tgcacaacaattaactaaatatgtttgtgtacanaatgaagtaactaactaactaacttatagtaatatatacagttactactcaaaaggaaggaatgtgccttgattaggcctatctaatctacctaattaaactaattacacaaagcaaagcccaaattcacagcactttcaagttcaatntgaccctcaaaatgacagatatagaccaagcttatntctaaaacaaaattgaagattgttttcttagctttccagaactactcacgtactccatttggagttctgtagtgtcctataggccttgcacaaggcagataggtcaagtaaactcaaaaatccaaaaataagccgcaattatcaattaagctcaatcatttgcttaagatcaaaactaagttaaagtgagaaaataatgtatgttgagttaagaagaatagaaaaatactaaactacaaatgctcaatcactca

SEQ ID NO: 239928 - DNA, 372 bp, Glycine max
tatgcaaacactcctaagagagaatagaaaaaaagataagaaaccctctccaattaatgaaaaagggtttacaaaaagagcatgactaaaataaaaagctagtaatataaagtagatcgacttgtcaaattaactaacttccgggatgtagcaaagttaattaatgatcggaccacaacgcttgattccccacaaagaatgaagagagagacattacagtaccataccctcgttcggtgagaaactaggaacaatggtctcagagagaagaaagtgatatcgatgatgttggctagcttttttgttttctttcttcaatcaacaacaacacatgagagtggaaggaatattgagatcttgttcatcttctaa

SEQ ID NO: 239929 - DNA, 429 bp, Glycine max
  unsure (1)..(429): unsure at all n locations
acacgaatactttgacacactttatatattatggtacactatnttgacaaaacttatctaccacaatttggtgtaacaagttgtttctacacatgtaagactgcaagtcatattccgcagcaaggatggaacaaacagattcatatcaacatccactttagataggtaacaacaatggcagacttattttttagcttctttagtgttcatggcaggaaaaccatacatcaatgtatttgggtgctcttttccttctttgtttatggtacttggatgcatctttgctacatggtgtccattgccatttgttccttggttctacactcatcaaccacgcctgcttcagctgtttatcctatgattcataagaattgcactgtagctctgtctgaccagacctccttgtactgacctggaatatgataattt

SEQ ID NO: 239930 - DNA, 411 bp, Glycine max
  unsure (1)..(411): unsure at all n locations
agctcttatatttcgatctaagcattatctctcataagttgtaccggaanaacgttggcatcgtacgtgagaagaaagattttcacgtgaattactttttcgttagattatattttagtccttatatttctattatgttttaaataaaaacttacaatcctcactttatatatattaaaataggtgttttaaaaataataattntagaaactattcttcaatgacgacatctttaagaattttctccaacaaaaatgttgttagggatttttctaatctattatctcttttaatccatcactctcatatacacctttaaattattaaagtctattaaaaaataaataaaaatataagaagctatctagagaataatttatcctaaattctctttatacgatacattatatg

SEQ ID NO: 239931 - DNA, 442 bp, Glycine max
  unsure (1)..(442): unsure at all n locations
gtgtanaagggtgaaacatcctgcttttatttttgaccacagagtggtacctgcagatatgtccgggggtcaagagaccttgggacgtcangggggtgctattgtcaaacccagcttgaacaaatccgacccaacccgggcatagtcagtcaatgagaacctgtgatgtacctaagcaggcaagctctctgccttcaacacgacaaaatgaactatgaccacatactaggaggcttgtgtggtggctggccacctgtgaactttgattgatatatgggatatggcctctagtaatcgattacaaggcttaaaaatgaagacaggaggctaagatggtctctggttatcgattaccaaaggagtgtaatcgattaccatgcttgtaaacgaggtcatgaagctatgaaggcttctggtaatcgattaccaaggggtgtaatct

SEQ ID NO: 239932 - DNA, 398 bp, Glycine max
agctttagataaatacaacatatcctaagtatattgttatgcataatatgacctacagtgtaacacatcaataggctggtaacattattggtacaacaagggaaaacattgttattgaataaacggctacttgacgctactctatcataatggaagttcataccacaagaccattggtgaaattatttgtcccttgaggctctaaatgaagaacactaattctgtgggagatcttatgtccattagattctgttttgtcaaaaatgtgtcatggaccttcctaaatatattctgcatgttttctcttaaaaaatgtcgctaatacgtcattaataacactgttacaggagaaactaaatagttctcgttcaacaaaaaaactttaccgctattttttt

SEQ ID NO: 239933 - DNA, 434 bp, Glycine max
ccacgatcaacaaagtactttacgcacctactataatgtgactcgaccaacgctgttattggaatgctgtgacaatctttcaacaccttattcacacattctgaaaggttggttgtcatgtgaccatatcttcatctaaatgtatcgtaagccatgctccaattttcctttgaaatgcgatcaatccatcttgctatggctggactcagttgacgaaatttttctaagttttgatcaaacacatgcttgcaatgagtgtacgctgcatcaaatttgttatcatcaaaagttatacgtagacatcaaactcaaattaaattaatgtataaaataaaccttacccaatttcttgaacatctctgtctgttacgcgttgttgaatatgcaattgaaatagctggctatgtgtctcacccagtacacatgataaccgt

SEQ ID NO: 239934 - DNA, 398 bp, Glycine max
tttcttctacatcatcatttgcctacgtgcctctaaatgcccttttatcattgctataaaaatagattctgggcctccataaatcgcttcgaatcgtcttggcctatcttcatctgtggtatcatactgagtagaaagaggtgttcatcaacattatacactggcttaggatgagtgggagccactccaggaacgatttcaatgatgtcatcatttgcttccacaagggatgcttcaatgactgactaatgtaacatcctgtcactaattataaatcgatgtttaattgtatttattgcgttatatgactatgtattctcaatagatttccaagtgttcgcccaacagaatttgagaaaacatttggcgactaaattctcttagaatatttctctctt

SEQ ID NO: 239935 - DNA, 421 bp, Glycine max
  unsure (1)..(421): unsure at all n locations
ctacttttcttcccccccccccactttaaagtaannaaagaaggnagtgtgctctttacgcattaaaccagcttaaactgactgatgaacctcttattcttcttctaatagccctggaaatcctgacattacaaagcctcacaccttgttctctgaagaaaaacaggtgaattgttatcgcataaacgataaggtagtcttggcaacaaccaacagctctgattggttaaccaacatggtggaggataaaatctggttaacagctttggaatgctgagtaatacagagtggaggataatacttgaactccaaattctggacttggggttggaaaactaactgtctagggtgaacaaccagataatctttgcactatctatatcttttatcacaaccaggtgaactatttgtttgaaactat

SEQ ID NO: 239936 - DNA, 406 bp, Glycine max
ctgcacgcatgcaagctattcggagtagaaacatgggaccaactctttatatttcagagaaaaggaagacgtatctagtcaaggtccgagagaccatactatgtttctaacgatttctaattatgtgggccatcaagtctatcatatgctgacaataggcgagaagcccatgaatctcttggggggtggagtaagagtatgccattgccttggccttggctaacaagcggggaagttcttgactcccgttcaaggtaagagcaaaccggtccattcacatggatgcctcttggtgtaaagagtcgatcacccttcctctatcctcttttgtcgcatatacttgaacatactcattcgcgatgctatgctcatgggccatggctagacctaactctactaggacttg

SEQ ID NO: 239937 - DNA, 486 bp, Glycine max
  unsure (1)..(486): unsure at all n locations
ntatgctcctatctacttacagacgttctattgcacaagacattttatctataaatgcacccatatacaatcaaggcagcttcgttacctagattatttacacgcacctcctaagtgtatttgttacttacatcacacacatcatctgggctaaactcacatacatgcatactcaagcattttggggcaccaaaaattgcacatgtgcacatcttggcatatttaatacctacatacgcaaacttcatgatgaatcttgactatctacacaataaggtgctacatttcatgctctattatttatcaagatttcgctacctaaagccgcatgcataatcaaacatatattcctttgctgactaaaattgcattcaaatataaaaggtatattctttgcaatatgttttcttcacataacatgcaacatacttatatatattntattaggagacatttttgactaccacaaattatatatacatacat

SEQ ID NO: 239938 - DNA, 392 bp, Glycine max
  unsure (1)..(392): unsure at all n locations
cctgctcttattccttgaccacacagtgcgacctggagatatgtcgcggtggtcaggagaccttgtggacgtctagtggngtactattgcccaaaaccaagcttgaccaatcccgacccatcccgggcatagtcagtcagtgagaacctgtgatgtacctaaacaggcgagctccttgcattctacagataaaaggaacaaagaccacaaagcaaggaggcttgtggtggctggccagctgtgaatcttgtgtgatatatgggatacggcctctgggtatccattaccacgggtgggtaatcgatcacatggcttataaatgaagacaggaggctaagatggtctctggatatctattaccacggggtgtaatcgatttccagacttgaaaa

SEQ ID NO: 239939 - DNA, 346 bp, Glycine max
gaattactgcgacatgtatgactgtatgttgcaaaaaaacatggttctgggagagggggaaatataaccaatttcataggaggaaagagcgtatagacatattgtatatgtaagactgacttaatatgtctctatttataggtagggtactctcaacctattattcactctatttttgattttatcattctataaaatgaaactgtattttactacctatcaaatgaataaataaaatctccgttttatttctaagaacgtatatttattttatttaccttaaaaccattattctaattaagtaaactatttattcttattaattaatcaccaaaccttcattatt

SEQ ID NO: 239940 - DNA, 450 bp, Glycine max
  unsure (1)..(450): unsure at all n locations
cagccagcaagcttggaacacaagacagcaaaccgtctcttatacctttgnaggcacaaaatagcgtggacctcaatgtagcacactccacttgcatggcgaatattttcttcagtatcttactctgcttcatcatcatcgatggggatccaagctaaaccaaacattggaagaaccacgaagagaacgttatcaatgttatgggtgctccattttttcagaatctccaaaaacaatgatggagctacaaccaatcctgctccaacgccagaacccactcctattgatacataagtccaagcaaacttaactccaaaaactgtatgtacctcaagcactttttcttctgcattgctcatatcagagcaagttttaggcgaaagaactccacataattctgcatttccagcataggaagatgaataaatgattgagctgtgtaccacagga

SEQ ID NO: 239941 - DNA, 349 bp, Glycine max
acaattttagccatgactatacaagacatcttgccaaacaaagtcaggttaaccataactcgcctgtggtgtttcttccatgccatatgtagcaaaagtcgtgatcctaccaaatttgatgagctggaaaatgaggccgcaattatacggcgccagttagagatgtattttccctctgccttctttgacatcatgattcacttgattgtgcatctcgtcagagaaatcaaatgttgtggtcctgtttatttgcgggggatgtacccgattgagcgatacatgaagatcttaaatggtatacaaagaatctatatcatccagaagcatctattggtgagaagtacattgc

SEQ ID NO: 239942 - DNA, 470 bp, Glycine max
  unsure (1)..(470): unsure at all n locations
taagctccagagagagganagagaccagtcacgagtacatgtgttggtcttaaaggaggagttagctgcctgctcaagatccaagaggagtttggcccaacacttagaagccacgaagcaaagcatgctagctataataggacaatacaaagaatagttaaaccagtctttgacccatgaacaaaagctagtagaggaattcgcacaagcatacgccgagaaggaagcaagagggagggtgattgatgcattgcatcaagaagcaaccatgaggatggataggttcgccttgaccttaaatggaagtcaagacctcccgcgactactagccaaagcaagggccatggccgaagtgtgttcagccccagaggaaattcacgggctaatcaattattgtcaacacatgatagaattaatggcccatataattagaaaccgctaggttctggttgtaacactattgaaaatct

SEQ ID NO: 239943 - DNA, 390 bp, Glycine max
gagtcgtgtggttgtgctggataaacatggctccgcagcagccaacgaatgcccgcaatgatgatggggaccaatgtgacgcttgctggagatgcatcatgtgcctgaacttcacgtgccaggcctagcgtggggctgcatgcagcggtgttttgagttggttgcgcacgagaaccataaggctctaatatcatataacagatgtttactgttatgttgtgtgtcttaaatgaccacatctcatgtgtatttataatggagagatcagaattataggtttctatgttataataaatacaagataatgtaaagataaatgcaatctagcaatctcccttagctcgagcatatgcatatgaatcgagattgttacaatgtggcaactcgata

SEQ ID NO: 239944 - DNA, 378 bp, Glycine max
  unsure (1)..(378): unsure at all n locations
gagccatgttctcattatgaaaaatggcagccgaatgctctaaatcacaatatttagaatcagctgcaacaaaatgctcagaatgctcaaaatgcacataatgattangatgcacactatgcctaaccaatctatgaaaggttctatctatttcacgatcaaagggttgtaaatcacccggattgcccctagtcatgcactatatgcaccaaatcatgtatttccaaaccaacaccatggttaaaaagggggtaaaactacgggttaaactacagtttactctaatatattcaatgaaccgaaaattgtaggaacaccctaaatcatgaaagatacacaaatttcagacacaaattaaagctaactataaaactgcct

SEQ ID NO: 239945 - DNA, 442 bp, Glycine max
  unsure (1)..(442): unsure at all n locations
ctctaagtcacctgcggcatgcagcttgatggtaaagtctatcgatttttgtgctcatgcaacaattgtttgtcgtggctatacaagacatcttgccaaacaatgtcaggttagccataactcgcctgtgctttttcttccatgctatatgtagcaaagtcattgatcctgtcaagtttgatgagttggaaaatgaggccgcaattatactgtgccagttggagatgtttttccccctgctttctttgacatcatgnatcacttgattgtgcatttggtctgagaaatcaaatgttgtgatcctgtttatctacggtggatgtacccggttgagcgatacataaagatcttaatagggtatactaagaatctatatcgttcagacgcatctattgttgagaggtacattacataagaagccatttgattttgttcagataca

SEQ ID NO: 239946 - DNA, 476 bp, Glycine max
ctttgtcactccaaccatatctggccatgacattaaccaattttaacaccgcccacaacagcgtcaaggaattgatgcaccccggatacaaaggcatcattgagtcactctacaatccttcatacacaagggcaagtgctagctggaaagactctcgtccaacgtcacgaatcatatcctccaagcgatctaccatttctacatcaaacaattcggattggtgcccactctgcatgtttgtcattacaccatgccatattcacgtcgaataattcctcttaattctaccacacaacaaatgctctcatatgacatccaatatttggcgtcctccattcaaacaattgatgcaaggacaataatacttctcatcttcatacggtcgacctcattctgaagacaaatgtaagaactgatcgacgccatactcatattctgggctgatgcaactttcattcatccaacatcaatccatc

SEQ ID NO: 239947 - DNA, 480 bp, Glycine max
  unsure (1)..(480): unsure at all n locations
cggatcttaagtcacctgcggcatgcaagcttaatagaagaagcccacaccccaatgttatcactcttcattttctactaaagaaatatgtgaagcttcatgaaaaagtcattttaagtttcgtagagacccaacaccctaaccatccaacgacactgtcaaaccaattaagtatacgcgtagggccatagtgaaagaaaaaaacatatgaagcttcatagaatactctctttaagtttcgtagagatcctagggtcatactaaaaaaaaaaaaaaaagatatgaaacttcacagaaacgcaataagattaaggctatatataagtttgcttgttttattagaatggagaccgaanactcacacaaacctttattcaaaattctgatggctgtgcgatcattctcttacgatgtgttcctcagcttccgaggggaagatactcgttatnggttcactggcaatctctacaatgtccttcg

SEQ ID NO: 239948 - DNA, 478 bp, Glycine max
  unsure (1)..(478): unsure at all n locations
tgtcagaatctggcatatatatatcaacatgaacctttttaattaaataaatatattatatntaataaaaagcccttagttgtctctgcttaattatttcctttttattgtaatctatctccaaaaaagccctttttaatttcctaagatcatcatcacttcacttgacacttgctcctaacattcaattgagttaaatcaatcctcggtattcactggcttgccactcttttctcactttttaagttataaagatatttacatgaaaaatctcaaagtttctttcgtttagtttatgttattgtttggtaggcatgctaatttaacttaatttattgcttttctcaacatgttcctttctttaaaagagttttagtctctatctcagctgcatgcctgcatgtttctttaaaagtgtttaacgctttctacatcggtcgtatcacaaccgccgtcgtagaacacgtgataaacgaca

SEQ ID NO: 239949 - DNA, 374 bp, Glycine max
  unsure (1)..(374): unsure at all n locations
atataacgagacgctcgaaattgattgttgaagctctgagcttattcacacgacaataacttttactcggatgtctgattgagtcccgtcataatatcgagacgctccgaattgactgttgaagctctgagccaattctaacgacaataactgtatatcgcgatgtctcattgcgtcccgtaacatatcgagacgctcgacattgaatgttgaagctctaagacaattcatacgacaataactttntacttggatctctgattgagtcccgtaacatatcgagacgctcgaaattgaatgtttaacctctgagcaaattcaaacgacaaataactttttctcggatgtttgattgagtcctgtgatatatcgag

SEQ ID NO: 239950 - DNA, 425 bp, Glycine max
agcctgtgatacacaaccaagtactattgctgtgtctgcaaaggaattcactttttcaggacggcttgataacctctgcatgtcattttgctcgctgaaggtttaacttttatacagatattttttcaagtcaagtttcaaacgcatctgtatggtatagatatgaactctgaaatataaccttgatttggaagtttaccactcaagatattgcatctaaaatctaaactggggcattctggactagagttattctatagtgcaaggaatagaaaaaatttctgaatatcaataatgtatgtttataacatcattataatttatgctctaatggaatgatttcagccaatgatctctgggtataattgcatcttctcccattctatgaacttgtgaaatgatagatcattaattcaaacccacat

SEQ ID NO: 239951 - DNA, 476 bp, Glycine max
  unsure (1)..(476): unsure at all n locations
gtntcttggtacgacaacgagtggggatacaggtaaatgtacacctttatacctttcttgtatgtgatagtagtgggttagtgtgtcaataagttcttaattcggccaaaaatctaatcacgcgaaatttagatgctctattattaattcagctagatctaataccttcttgtccctggttctgcagctcacgtgtcattgacctgcttgtattcgttgccaagaagtctttttaaggtggtgtactgcaaagttgcttgtctacacattatgtgcttgtctagttgcgatttagtgtcttgctcgtgcaaaaaatgagaggtctgaataaatcggtttctggaaccagtggatntaccttgttaggagcattagctctattttggactctgcctcttgtggaggaggatggagtctctggaattttatatattcgctaacgtacttgtcgctattgattgttatagtacatattc

SEQ ID NO: 239952 - DNA, 385 bp, Glycine max
cacttagatgcctcaccgttagaagtatttgattgataaattgacactttcccaaaataataataataataattatatatgaaataaataataccttttatgtgtggtgtaaagaacaccgcgtctgtgaaaaattatatttctaaggttcctttgaggtgatttttaattttaagtttttaattttttttataaaaatcaaaagcaacttttaattagtttatagtttcaatactttttttttaaagttttaaaaatttgttttcaatcttataaattgcctttaagaagttcaccaaaaaaatacgaaaatcttcatttgaggctgtgatgaatctgcatgattgattcaaaggctgtgatgaatctatagtaagaacagggg

SEQ ID NO: 239953 - DNA, 452 bp, Glycine max
  unsure (1)..(452): unsure at all n locations
actcagcttgcacaattattaactatataaaacacttgagggcgtttgcattccataaatgcatcctaggaatgacagtaatatgagtaacaaatattgagtttgtgcatgagcttgagaaatctctaagaccccattgaaaggagaaacaagaactcgatttgttgttacttccttgatttcaaatcagacacaaaattttaaaatacataagatataccacttgttttccttatttttggattcttgttttcctttccttctttttttgcatttgaatgaaaaaagaagcttctttntggctgaagggtggagggcaaccaggaagaacaaagggggaaaaaacagaaacacttggtgatcaatttcagcaagtctggtgacacacattctagtgaagaactggtagagaatattgagggatgtacaaatgatgaatggacaacgtttgc

SEQ ID NO: 239954 - DNA, 442 bp, Glycine max
agctttgtccaatacattactccagtcttatctcttattttgaaacaggaaacagccaaacaatatttcgtctataccaaattgcccaaataatggtgaaatgcagttccacatgctatcaatctcgatggattatatccctagagatgtcaatgatttgggccattacagttccacatgtgtaatacttattaattcttgtatatcttaatgtttctttaagtcataaaggttaattaactgaattcacgaatgttctatggtgaaatatatattattctattttattggtaaaatgcagattttagcacactgaagttgaaatcatcttttatgttttgggcataattctccttcggtaacaaatataatgattattattattataggtacatctgtgttctaacacatgtgctcactttagaaccaattatataatggt

SEQ ID NO: 239955 - DNA, 480 bp, Glycine max
  unsure (1)..(480): unsure at all n locations
ntgcccggtactgtggaacaccaacctcctntaaacatgagtcccctcntttagactcagcgcatgtaatgatcatatgaacacaatatgtctatcaattctaattggctatatatggttctaagtgtaccaattcattgaatcatattgactacgtggttgaaaaacaaaactattccaattaaataaaatcacaacattactattagttagctaaagaaaactaattctctttgttcattacttaaaactatgcaaaaattaattatggtattgatacgatttaacaataatatgtctaaaaacaaacttacaaaagttcaattggttgtatcgagaacgcttgaatcaatctttaattgtcaagaatttaaattttttttagcataaaagatgtacgaatgataaatgtttcttttatgaaatttaaaatcattctgatgaagataagattaacaaatatcataagcaaatattatc

SEQ ID NO: 239956 - DNA, 374 bp, Glycine max
  unsure (1)..(374): unsure at all n locations
atgctntntcactctactctagcggtgctaaatgaacacaacctaactaatatgtattcaaacaacataaaatgattgagaaaggtaagaaaagttgggttgcctcccagtaagcacttctttaacatcactagcttgacgtgtatcacctctaaaggtcctataaatgcaaaatggtagttaatctctcaatttttccaccatggtgcaacttcaatctttacccattcacaatccatcttttttcaagagttgttgactgaggatacattaactcgactgctccatatggcttcacttctttgatagtgaaaggtccataccatttacacattaatttacatgggaataagcttagccctgagttgaacaat

SEQ ID NO: 239957 - DNA, 456 bp, Glycine max
  unsure (1)..(456): unsure at all n locations
aaactcgcttgtgacatacatattggagtcataccttgttgttctgaaaatctaaatgtactcttcaaaaggttttgactttttaaaatggattttaagtntttctaaaagttataactcttctgaatggtcttcttgaccagacatggagagtctataaaagcaaggctctgttttgcatttcaaatatcttgaacactttgctaatcaatcctatacaagccttgaatctctgtgaatctctttgaacttcttcttcttctttgtaccaaaagctttctgaacgtttctggttttctaaaccttgaaaacttgtgctattcatccttttcattctcttctccctttgccaaatagaattcgcacaggactaaccgcctgaattctgtttgtgtctctcttctcccttcttccaagagaacaaaggactaaccgcctgaattcttntgtgtctcc

SEQ ID NO: 239958 - DNA, 442 bp, Glycine max
  unsure (1)..(442): unsure at all n locations
acacataaaactcagcttttaaatntatttacgaaaaagtgtgatgttacaagcattattgtgatcaatatcatcctcatnttttgtttcattcattcatgatctcatggctttggattgggttattttgttccgtcacacgttagggaagacaatgcttgcgcatattatcttgcaaagcatgataatgtttttctgcactggatggagtgcccctcttagctaggcaaaccaccaaatggtggttgacctccgtcaaacaccgttgagctcgaataaaagaatattatattcttatttgatcaattttaataaaaatgtaaataatagaaagaacagcagagtgacaattccaaaaagggaaaatttccaaaaattatattaaatgaaaagaccaaaaaaggggtgaagttccacaaattcctaaattattttctgctac

SEQ ID NO: 239959 - DNA, 299 bp, Glycine max
cacacccagcgcaaatttttgacccccaaccaaccacacagaaaaaaaaaacctgccagcagcaaaaacaataccaaggggaggaaacaaccaaagcaaagaggggcaaggtccgcacaacaacaacagcccgacccaccaaaccagaaagctaacaggccaaacaagcccatatgaacctaccacaatacaacagcagcagcaagcacaacagagacaacaagcaattgaggcaccgcctcaaccgtccctaaaagagacagaaggaaaaagatcatccagaaaagcaaccacagcag

SEQ ID NO: 239960 - DNA, 346 bp, Glycine max
aatctatcattgcgaggggcctttataatacagaattgtttgatatggttgaacaggaaatattaaaacaagacgtttctaaattttatatacgtccattaataatgagttatcttatcttttcttcgaatcgtaatctttatcaataacggatcatatttgaattcttatctcaatgctctaaaatcttgatgactattcccctctttttgtcttcacagtggtggacactctccaacactgaagaaacttgagcgttttttatactcacaacgttacacgggatgggtggtgtctgtttcatacattggtatcatctatggtgcatcatgttctaaacactttt

SEQ ID NO: 239961 - DNA, 364 bp, Glycine max
ttaagtcacgcggctgcagctttagagaactgcttataaaacattttctctcaatgcgggacgacactggagtcattgtatatgacaaaggcccttgcaaatcggctatgcttgaagcaacaactgtacaccttctatatgacagatgcaagaacaaccacagaaaaattggctgatttcaacaagattcttgatgatttggaaaatattgaagtaaagcttgaagaggaggataaaactcttctgcttttaaattccttaccataatcctttgaacatatcaaggatgcaaatctttatggcaagaatcaagacattattaccctagaagaagtccagacctcaataaggaccaaggagatgc

SEQ ID NO: 239962 - DNA, 443 bp, Glycine max
  unsure (1)..(443): unsure at all n locations
tgcagcttatgcngtagcgtggatgcactagttttgtgtgtacaatgataatgtccccttggacttaaagcatgaagatcttggngaaatagcacatggtgatcaatggttgaacatcattgttaattatggattatgtaagtaaatttaaattacaatccattacctaattcattgctttaaattggtgcataatttactttattttaacaataggcatatgaatgagttaagtctgcgatcaaggaatgcctctatgtatggattcattgagccacagtccatacagagatctagacaatcgtagtttcaatatgacgattatattaagaaatgaatgtagaattcacagagagatgtttacctaggagcctacttgaatgggtaagtaaaactaaacaaatcaatttaaataatgtattcattatgataacttaatgttc

SEQ ID NO: 239963 - DNA, 383 bp, Glycine max
gtttttcacatgcacatatcgcgcataaacccaccatcccctgttgcccacctccaactgagctcacgtactcccacgtagcccatatcctcgtttctctcaacaccgggtccccatcaatcctctcaagctttcccagcattcaaggtaaacaacattcaaacagcacagactatcacagccaagaaaacagagcataggcagaaaactctgccaaaacacctaccaaaatcacaacttttctcacttaaagaccccagtaacaattcctctgttccaattcggtaaccgttaaatcgactccaaaaatttactggaagtctctagtacataagcctacaattttgaccgtgggatctactagcaaacatgcagaactcatt

SEQ ID NO: 239964 - DNA, 482 bp, Glycine max
  unsure (1)..(482): unsure at all n locations
aagcttctatataagctgaaccattntatcaataaagacaagttgtttttattcataaaattagagtttatctctgttatcttagtgagagtgattctcctaaattcttgagtgattcaagaacaccctggctgtatcaaaggactttcacaacctttgcgtgttgccctcgctggaaagagtgattctttccttcctttcatcttcacccttgttctttcaaaccacaattccagaaaatccacctctgcccagaattatctcgtggccataactcccattttacgcactcaaattaagtgattcttgagcctaaattgactttcaaaacgagacctttcacctcgttttggaatcacctcatttggagccctgtagcttcagttattgccatttctatatttctggccagccaccacttaacctacattttaccatcccattcatccattttatgccaagaaccaccttattaagaccca

SEQ ID NO: 239965 - DNA, 322 bp, Glycine max
acagccctggaacaccaacttgtgcgtcatgttattgttcttgggcttggcgaccacgatcaacaaagtaccttccgcgcctgctctaagtcgactggaccagcgctagtatggagatgctgcgacaatccttgcgcacctcattaacacatactgacaggaaggtggcctgagaccatatctactgtccgatgtatcataatccatgctccatgtctcctttgaaatgcgatcaatccatgatgctatggctggactcaatagatgaaatttttctagttgtgatcatacacatgcttgcaaggagtgagcgctgcataaa

SEQ ID NO: 239966 - DNA, 408 bp, Glycine max
  unsure (1)..(408): unsure at all n locations
agctttcatcacaaaccatcaccatcatcatctctcccaccttctccatgttcttctctttacacttcttggtcctatttcctttgctgcaaatgatgaagttagtgcattgatntcatggatgcacagctcctccaatacagttcctttagctttttctagttggaaccctttggattccaatccttgcaattgggcctacatcaaatgctcttcagcaagccttgtcactgagataaccattcaaaatgttgagttagcccttcccttcccttcaaaaatttcatcctttcctttccttcaaaaattggtcatttcaggggctaacctcactggagttatctcaattgatattggaatctgcctcgagcttgtagtccttgaccttagctcaaatagtcttgtggg

SEQ ID NO: 239967 - DNA, 451 bp, Glycine max
tataaagtgaagatgtcccgtgaaaattaaaatacaataagttacatacaatattaccttctatgaagatgggattcgatcatgttcatttcaccaattagagtcacgaaagaaatgtacacacgcacatttaaaaactatttagcagtaatagttgtagcagtagtgagtagtctactattactacctgatcataaatcgtgttgatctcggatccccctatcttcctactttgccacgtagctagagaaaagattattacaagttgagtaacaaaatgagagaaaaaatgtactagggataataataaaataataataataataataataatatatttttaataaaaatgtaccacggataataataaattaataataatatatattgtgttatatattattattaataataaataaaactattccttgcatatggatagccacatctg

SEQ ID NO: 239968 - DNA, 368 bp, Glycine max
agcttctaaactttatacaagaatgattctcttattccacttggtagacaagtggcctcagatatcttaagaagggggagttgtattaagatatctcaaactttttaagattaaaaattctattttgattttaacccaaatcccaagattcctttcaaaatgaactcctaaagaattatgaaaattaatattactgaatagaagcaatatgcaataataaataaaggagtttaagggaagaaaaaatgaaaactcagatttatactggtttggccacacccttgtgcctacgatcagtccccaagcaagccgcttgagagttccactattcttgtaaagccctttactagttttaaccacacaaggac

SEQ ID NO: 239969 - DNA, 284 bp, Glycine max
cccacggcgcattaaaaggagacaaacgtcgaaagactgggctaggacagaagaaaagtgaaaccccccaggagcaaacgcaagaatgtcaacaacaaaaaaccacacgcactgaaaaaagtcggacccgaatggccactgcatggcttcaacagacaaagtagggcatgacggatgccacacggaaaacgggagcacgaaccatcattaatcagaatgacaaaagcacaagacagagaacgagggaaagcttctggaatatatcagccatgacaaaagatgaa

SEQ ID NO: 239970 - DNA, 463 bp, Glycine max
  unsure (1)..(463): unsure at all n locations
tatactgttacaggcttatgatgttgattctntacgcatgtccagttggcctatagatagtgcttattcaggctcatcatgtgacataacttgcagcaaccgtgagcaggaggttaatgatgttgatttgcagaaatccttggaacagtgtcttctacatccatacaaacaaaacaaggttttcatgcaaaatgatcctcaggaaaaacttttgaatgaaaaagaaaagataaaatcagacctagaggccaatagaatcctggatggaatagaagacacatatttcacttttaaaaggactctgttagatggatctccagcagaagagggtctgaagaagcttgacagtttcaaccaatggatgagtaaagagcttgcagatgtggaagagtctaataaaccatccacttctggtggttattgtgaatacagtgaaagcgaaaatgaggttggcaacacaact

SEQ ID NO: 239971 - DNA, 413 bp, Glycine max
  unsure (1)..(413): unsure at all n locations
agcntgcctaagtaacctgagatngatatataatgantattaaacacacgaaacgaaaagactaactatttattacctatacttaacagaaaatacttataacactaccaaatagcgcataaattgtgagaggttgatacaatttatacaagttttatacacaaaagttagtcgttatcaccgactaacagtgggctaaagaaatgggaaaaaaatgaagacaaaaacaactaacaatataggaattgatgggagaaggatggacgtgtctatgcctatgtataatgattcatttatctgggatggagttgcaatgtgctcatgtggactggacggtattgaacttgaggcacaaagtacattaccatataattgtagaccaagtatttgtgggtagaaaaaagaacaatttt

SEQ ID NO: 239972 - DNA, 484 bp, Glycine max
  unsure (1)..(484): unsure at all n locations
ntattcaagacanagaaattaaagatatgcaagatggattatcaagacaagnctctagtcttagaaggggtgtattatataggaggggaactccaattgacgtatcaaaaggtctggccaagaaatttaagttaaaaagtctttttgaacaaatttactctctggttattgattaccagaggatgtaatcgattaccagtggccaaaactgatttacaatagctattaaaatttgaattcaaaatttgcattgtgtaatcgattacacatatatggtaatcgattaccaacagtttctgaacgttttaattcaaattgtaaagcgtgtaatcgattacacacatactataatcgattaccagaggaatttttcagaanacattctcaacagtcacatctttntatctgtatcttaaatgtccatcaaaggcttatatatatgtgacttgagagacgaatntgacaagagttttcaaaacaaaac

SEQ ID NO: 239973 - DNA, 394 bp, Glycine max
  unsure (1)..(394): unsure at all n locations
ccgganaccaagnnactgctgctgcagcttatgatccttcacagaaccggtatttgtcctttcgtgcacaaatcactaaatctgatatagtaattacctgcacatacttcagacctaaagctgaagtttgatgtgatcttatctgaatttcttgttgcgtaaaacggatgaaatatataatagtgtcaaagccttatgaaacatttccaattccaaatgggccatacataggtagaggtgaattgtagaataagctacatctgcaagagacaagagatgctctcacacactatttgcgaaaaaacattcaccaccacacaatcataagtgagtcatcacaaaggatgagagatccacaattttcgtatgtccaataaatccatcccataagagt

SEQ ID NO: 239974 - DNA, 434 bp, Glycine max
cagccatgaactgaatctcacacgagtgtatttgtctatacacccatagtattggaacatccatactgctgaatcaagcaaagcaaggcacaatttaaacaagcatattatatgtgtatgatacatgaaaattaatatacatcatgaggcataaaattgactacggcactaatcattcattatccccatgaggacggactcttctctttcctgatttattgacatccctacccttccttgaatcattatatccacttgaatcagtgtcagatgatgatgaggccctcttgttctttcgcttgtgccttctaatgaaatcttcataggaatcaagatctgatagacagcttctccatctcctcttctccttcctactctatctatgcctgcgcttatactcgacgtcttcatctgaagaatagtacctcttcctc

SEQ ID NO: 239975 - DNA, 315 bp, Glycine max
  unsure (1)..(315): unsure at all n locations
cttacacaatcccctccacacatctaaccttttccccanataaaattcttaaatgtttaaaaaaatgttccttaccctccacatntancacccttattttccctanccatacatancatctttgccaaacttgatgacaaaaacatcattcaaacaacaagtacttttcaaattccatgcctagattgtagaaaacccaattaagactagttccatcttgtagtatgatcattctcctcaagttatctttagtttgaatcttatggtccaccctccacaacaagcctttaacctttgaccgaacagggtaattca

SEQ ID NO: 239976 - DNA, 290 bp, Glycine max
atgaactattgactgtatcaaggaaagaatgggaacaatcacacttatatgttctatacaatgatgatgcgggtgagccttatgttgaaagaataataaactactttgaagttcaattagaaataggaatgagaattggataacaataaaacacaacgactgttttatattatggctgaaagaacaagtctttccaaagatggctacaaataggtggttcccaagtcaaaagcgcaaaagaaaggatagtgacttgaccttgaaagaacaagtagcattcctcacatgga

SEQ ID NO: 239977 - DNA, 335 bp, Glycine max
gatatcatgaaagccacaagcatattgtcaggccaaaccattcctctccatttcatgtcataaacaatgtttccaaattcatggatctgatctgaaatagattctccatcaatcatttgaaactcactcatttcttcacaagagtaacgacttaaacctttttcagcaaatccatatttcaattcaagtgcttcccataactcaacaaaagttttggtatggcaaaaaatcttatatatgttatcagccaaagcactttaaatgcgttcatgacataaaatatctttatcataaacgtcatgcttaatggctgcatcagtttgaactatatcagt

SEQ ID NO: 239978 - DNA, 191 bp, Glycine max
actagtggggctatgccaaacaactgacaatccaccacccgcatatcattatgaaactgtattcctaacagcactttgcatcaccataaaacaaaccacaacagggctgtgtggctggcactgaatttggtgaatatgatatgcttgtatatacaaggggtatcatacagttaaataaaagaactaatgct

SEQ ID NO: 239979 - DNA, 455 bp, Glycine max
actgttgtcaaattataggatttattgttctatctcataactatggaggtgctgcactccacataatttagcaactatgaagttactatacatgctaacgacgttacttttatatcatggaattatattgcttttagtttttaagcatagaatagtatatcatttatatttgttacaaaattttgtttggttgtaggtaataggttgaggcaagatttcaaaagaaaattcttgtttcacaagcgtcggagttgactttgttgtctttggtttggcactccactcctatgatcccactcgtacatcttgttattcacggtatttgtctggtatgtatttctttcactcccaccaatgataattacatcgttatttatatatcaatcttgtgttagataagcaattatgtgcattgtgagtgatccttagtttcctggttgagattctatacaacg

SEQ ID NO: 239980 - DNA, 456 bp, Glycine max
  unsure (1)..(456): unsure at all n locations
agctngccgcccagctcgcccaggcgagcattgttgcttcctccaaaagcaacaaccttctggaggaatcttctggagggcccaagcgggcctggttgcttattgcacccccctttttactaaaagcaccccttttatttttttggtaattctttttttcgtaatgttacgaaactttacgaatttcgtaacgatacttatttttcttccgcaagggtacaaatccttacggattatgtatttactcttttttagctctcgaagaagttactgaaacttatggattgcgcaaaaacacctcttttcaatttctgtcacattacggaatttcaccgattgcgcaagcctgctttcttttgatatttgacacgcctcgggactttattcattgtgcaaccaacgacgccaagtgtctcgaagcggccaatcaaaggttgatatcatcaaatataatcc

SEQ ID NO: 239981 - DNA, 476 bp, Glycine max
  unsure (1)..(476): unsure at all n locations
tctcagctcgcgccggngaatcttccaactcagcactagttcaagctagggcacctccgcccatccacagggagacccccaagctacggctccaaccccgactcgcccggccggcaatgcccacattggaaccgtttctaacgcggtaaggaactttcccccgaggacaacattcaccccgatcccaatgacgtacaaagacctcttgccatccctcatcgccaaccagatggctgtgatatctcccagaaagatctaccaacctcctttcccaaagtggtataaccttgacgcaacttgcgtataccatgggaaaaccccgagccactccaccgaatagtgcctggcccttaaacacaaggtccaacatttgatagaagccggatggatgacgtntgaagaggaccggcccaaggtaaaaacaaacccgcttgccaatcatggagggggagcagttaatgccatcgagtcgggta

SEQ ID NO: 239982 - DNA, 410 bp, Glycine max
gcttgttcatgtcctcatgggcttgaggcacatgacttctcaactaattgaactataagaaaatcatatctttggcacttgggtatatgccttacttgggagcagccacatttttgtttaaaatatgtttttctattttgaagccgtataatagcatgaaattgtcagaaaatgacaatttatggtggctctaaaaatcttaagagatcaattacaaatattttacaagatcaacgacacaattactatttttttagtttagagacctaaataaaaactcctaaatagttgagggaattaaattaaccttgaatgaacagaaacaaacaatttttcacatggatatgtaaataaaaacaccaaaattcctcaattaaataaagttgtgacttttacggatcacctgatct

SEQ ID NO: 239983 - DNA, 499 bp, Glycine max
acgcgacactatagatactccgctcggggaaaacacaattacagtaatattattgtatcaagtgtaaaacagaagcatcatcatttcatcagatgaagaacttgtttaacaaatattgaaagcatacattatttctcccgtttaaaaagaatacaaggtgtaaaataaatcctcactcgtatatatacataaactcaatgaacaaataaataaagaataaatcatatatcctttctcaagtaggtcaagtaaataaagtaatttcccttcctacacactctcaaaatcaaccctttactcagttgtttggaccttaactccatcatcatcccctgcagctaagtctggtttaatctcctccaattgctgcagaacttgctgaacttcaggcctatcagctggagaaggatccacacaatgcaatgcttacttcaatgtgttaagcaattcattccctatggctggtgcatacctcatgagctccaaatcacacacttca

SEQ ID NO: 239984 - DNA, 378 bp, Glycine max
tccgcgaccacacattaaaacatgatgctgggaaggagtatgcggcttacaccacaaagaaaagacccagtactgatgcataattgttaatgtatgcactcttaagatcgaagacatttcaagttgataggaaagagtggatcactcttttgttgacccagttgtttgttttgagttggaattacatactcggctatctttccatatttttcttttgttaagttgctggtgctgaactggttaaattccaataaatgtgctattgtgggttaatctatattacataagttctccataaccgtatattactcaatagttgatggtcttccttggatggagtgaatgaaatttgtaagaatttgctatattattattcta

SEQ ID NO: 239985 - DNA, 372 bp, Glycine max
  unsure (1)..(372): unsure at all n locations
agatgaggaagtgtagaagggttttatcttctgcttttattgntgaccacagagtggtacctgtagatatgtcgcgggggtcaagacaccttggggacgtcaggtggtgtgctattgcccaaaaccaagcttgaccaatctctacccaacccgggcatagtcggtcagtgagaacctgtgatgtacctaagcaagcgagctcctggcagtcaactgattaaaggaacaaagaccacaaagcatggaggcttgtggtggctggccacctgtgaactttgattgatatgtgggttatggcctctggtaatcgattaccaagggtgggtaatcgattcaaggcttaaaaatgaaaacagaggctaagatggtctc

SEQ ID NO: 239986 - DNA, 295 bp, Glycine max
  unsure (1)..(295): unsure at all n locations
gctacttgcgcagccgctcttggtgctcagaanatcccatttctaaatccctcttattactagctattttgaattctttagttcctgaatgtacaaccttcaaattgttgttcgttcccctctttgagaatgaggaggatctttataggacttcatccagctgatgttnganngtanttacataaccaacactcttcactttgtagcttctcaattagttgctggacaccacatttaagacttattcctttctggtttgtttatgtcatctttagctctatctctcatctttaac

SEQ ID NO: 239987 - DNA, 363 bp, Glycine max
  unsure (1)..(363): unsure at all n locations
ttctctttacttcccccccccccaccctttgannntaaggaggncttgtgctctgacaccccataaatcacataaaaattctctcctaatagcttttgtatatgccctctcttccgaccccttattggaggctgagctcttaggaaacttcctctcatggcttctctactggtgagtcctctgggaatattataactcaattttatattataaataattaaagatagcaacatattaggtaaactctaagaattgtatatcatgtaatagctatatatcgcaaatatttgttacattttaatagatgaatattagctaattaatgcaatactgactaaattaccgaagctaaaataataattg

SEQ ID NO: 239988 - DNA, 379 bp, Glycine max
  unsure (1)..(379): unsure at all n locations
agctngagtcataataataatagagtaaattacagtggacacctcatcaggtttcgtgagattgcacgggatctttctatttttttctatagctataggaccctttctaattattttgaaaaatattacactgatatttcttgtaaattatattaaccccttagttgtttaaaagatattacaccacgtacattgtaagagagacttttttaaacattaaaatatggaaagattttgtgaaatctaacaaaaatcttaagaagtgtgtaatttactctaaatactttatactctctttaacaccattatggtgaattgcatatgcaatgcttcacaagtaggggttaaaaatgaccaaagtaacaatgctacagtggat

SEQ ID NO: 239989 - DNA, 489 bp, Glycine max
  unsure (1)..(489): unsure at all n locations
tcctttcaccaaganatagaacccatgcactaagatgaggatcatgacattcctcacggtgttctggagcgcttggatatgagacgcttcatgtccagatccaaacaacaaagatatgcagaacttgagtccagaagtctaatctgtgagcgaaaagtggacctaaaggctaaggaatatgaagaatttcaggctaccatcactaagaaaaaatgggacattttggtagagcttgaaatgaaattcaatgaagaaatagtcaaagaattatatgtcaatgcctgaccaataaagcagcatgagatcactaagatttcatgggtgagaggggttcgagtgaaatatgatagagataccatcaataggtatctatgggagcccactacactcctaatagatggcaaggacacttatcagagaatgaataagtgacatgaattcaacgatgacaatgtggctaaccttctctacattctaggtcatacatat

SEQ ID NO: 239990 - DNA, 257 bp, Glycine max
gaccaagccgatgttataaatagaatatacacccactcgcccctacaacggtacaatgatccattacaataatgacactgtgcacggtaaaataaacttgcaatcttacatggaaacagtcaaccaaggtaaaccctagattaatttacctcttcagatcaactaactcaacctcagattaagcacaatgttttatcacttccagagatactattaaaacgctgacaaaactatgtgagccccgaaaatgaaaatgt

SEQ ID NO: 239991 - DNA, 454 bp, Glycine max
  unsure (1)..(454): unsure at all n locations
gcatgcactggacttaagacgttataatgtttttttttnccatcttctaccctcacctctttggaatgcagatatgataacgaactccactctggtacaattcgagaaattgagctgcatccctgctccaagcctctgattagcctagtgagacgaaatggcttttagaataatttatcttaagaccagaaaccttctcaaaacacctcaggatacattctaagactctaacattatcctgagtggcacaaataactaaagcacagtgaatttgggtaatatctctgttgccctgttggcttgttgggcatgggctacatgttcaatatttacctaccaacaagaccttgacaaaaatactttttagaacattgaaaacttagtcagatgaaacaacaaccattgagtactctgttgcagcagtttcatgtggtcatacaaccaaacacatccg

SEQ ID NO: 239992 - DNA, 418 bp, Glycine max
  unsure (1)..(418): unsure at all n locations
agcttattaccgaatgtaaattcactatcttataatatgcttcanaaaaaggagattgtgcctcattgatagcaagcacttggtcgttgctcttcttcaaataaaagagatcatgagaaaagatagaaacttaaaaagaaggttgtgcacagagcatgagaagatatatacaaataaccttaccaagtgaagtgagcttcttcaaccaacacaggtgacaacctctgtacaccggagaatgaatcttagatgcatttttaaagtgtttctatgttattttccaatctaaatagagggtttaacacaataatctatgttgatccaatgcagagaatataatacatattatcaagagaaaaactcacggtttgattaaagagcagtactaaactaagcacatattatgataaatgtttca

SEQ ID NO: 239993 - DNA, 450 bp, Glycine max
  unsure (1)..(450): unsure at all n locations
agcttcttgtgaatatgcaaaattgcatctgcttttctacttcttgaatatgctntaagcagaaacttgtgaataatgggtgtaggaacataccccacagctaacatttcatgcaaaacacttattactttttcaattgcaccagttttacaaagcccaccaataagaatgttataagtgaccatatttggcattaccccatagctcttcatctcattcaacagatccaaagcattttctgttttaccttgtatgaaatatgtgttcattacagagttatatgtaacacaatctggagtcagacccaactcaatcattcttgaaaacacagattntggttcatatttccccagcctcaaaagccccttagtcaaagcattgtaagcaacaacatcaaactgcatgtctntctctgtcatttcctgtactacggaaagagcagctgactca

SEQ ID NO: 239994 - DNA, 315 bp, Glycine max
  unsure (1)..(315): unsure at all n locations
agcttggagatgcaatagtaggttattacttttttttcancnaaaagccaagcgacgcgccttatggtagtcgtttagctctctcaacaccacaccgatctatgtgtgctcatactgggtaatgcgtgtatcttaccactccggcaatctaatggacccatccatagggaagatcacccaattccaactctgtacacgactcgtctggtcggtgagttcaacaccacaaagaacttccctacgagggcattacgagaattaaccccactctcaatgacgtgcgaatatctcttgccttccctatcgaaaatcatt

SEQ ID NO: 239995 - DNA, 442 bp, Glycine max
  unsure (1)..(442): unsure at all n locations
agcttacaaatatgttttaagttctttcctctttttaaataaaatctagacaagataagataagatttgataaaataaaatctacatgaaataaaatcaaaataagataagatctagatgaaataatatctagattggataaaatctagataagataagatttgatctagataagataagatttgataaaattgtttgctctcttcaagtccaagcccaattttggattcaagcccaattgcttataattctcctaaaattaaatttaaaacacaaaattagtccaataggcccaaatgataaaactgcataattaatttgataattaaggctaatcagtaattaaaatggtgacaaacagggttaagaaatatgagaaaatgatgacacatcanatcccctcacacttagctttttgcactcctgggcaaaatataaaaaa

SEQ ID NO: 239996 - DNA, 440 bp, Glycine max
  unsure (1)..(440): unsure at all n locations
agctntagtagacactggttgnttctttacttccatatgcaaaagtgttgtacctcaacataattgctttataagtaacataataaccaagactagaactatgtcaggagacataataaccaatggtatagaaaccaaaaatttcactatacaattatctacaaattgtgatatttttgacaattttttttataaataaggcaaacgtagtagatttgcaaccttctaaagaacaaatgatcctaggacttgattttattacacatgataatagatcaattactattacaacatattatttattaatctctacaaactcacaaatatcaccaataatagacgaactcacatcatagttacaaacaaagcgtggtgatacctctaccaaccctacacctaccctcaatacccaatgtccttgtgatatacctggtagttgt

SEQ ID NO: 239997 - DNA, 434 bp, Glycine max
  unsure (1)..(434): unsure at all n locations
agctttacaacagattttagttatgaaccactaacctagaattaanataacttaatgccattaacctagggaattaataaaaacttaatggctgagtgtaactgaaattgtggcaaccaaaagtcacccccaacagccaacatgtcagccaccatttggtctcccaaaaggctgatgcctaggttgccaattgggcccttattacaacttgaactaaacctaactaaagcccttttagttgattaacccaaaacatatttttggtcagccaactttacaaggattgggtcattatttagacaaactaaacactctaaaattgaaacaaagtggtgtcatttagtcctcctccatttgggccatgatacaactcacaaccttggacttttctccttgaaacttgggcttgtattcaaatagtatggacaacactt

SEQ ID NO: 239998 - DNA, 435 bp, Glycine max
  unsure (1)..(435): unsure at all n locations
agctntaagaacctcagtcattatttcacgatgatgggctcgagactgtcacaagataaacaaaaagtaagtaactaccaacaagacatcaagactacaatttttctgatggccactattacaaaaacaaacagcttttagatataatgtataaacacttgttagttcttgacaacagcaatatctagcgtgcacatatccagagaggaaataaagtacataagcaacaaattcaacagcccatacttttatacaacaaatggaacaaattaaacaaggacatctaacaaatatttcctctcaaacagcaagattaccatgagtgatattcatcatacctgaagcccaagggcccatttcctttcaacagggaactgttgcctcgatcctactcctggatattccatgtagcctggaaagcggttccaacaactg

SEQ ID NO: 239999 - DNA, 438 bp, Glycine max
caagcttgaaagggaacgagatgcctaggttatcttgttttcccatctggcctcgtatcagaaatctgcctctgtctcaagagtcagtggactatgctcctctactgaccaccatacaaaccttggcccttctatgcagcaacctggagcaattgaacagcctgatacttatgctacaaacatctacaatagacctcctcaacctcagctgccacattatccacactagaagaaatacgacctctccagcaacagatacaaatcccgggtggaggaatcgtcccaaccttagatggtctagtccttcacaatagcagcaactactacaaccttattttcagaatgctgctggcccaagtataccctacgttcctccctcaagtccacaacagctacaaccacaacaaccacagcaacagcaacaaccctagaaaccac

SEQ ID NO: 240000 - DNA, 427 bp, Glycine max
  unsure (1)..(427): unsure at all n locations
gcaagcttgagacgcatgtggactgggcattataaatanntctctnancccngccgacgagaggtgtggccaaatataggagccaaaatttcactaattatgattggtgaattttggctatggctcaccccactaattcaagatcaagtccaagattctccactaagtatgcttaggtggcatgaggcatgtaaagcatgatgaacatgcacaaagtgtgactatatgatgtggcaatggggtgtagcaagcaaatgctcacctccccctctaaaatataattggattgggcttctctcaattcaattaaatttatttttcaacacacacatcaaatattcacttaatgcatgtgaaattacaaaactacccataatacataaactagtctatgtgccctataatacaagggctgaaaaatcctaca

SEQ ID NO: 240001 - DNA, 444 bp, Glycine max
  unsure (1)..(444): unsure at all n locations
agcttctagccaaatggacttaccttgaattaatttctttgatagcccttttgagccttgtttccctttccttgttttgaagatcactacaagccttaagtganaaaccatgatattaccatatccttaaggaantttggagctttggaattgttttgggaataagtgtggggggtttttgtttcattggacaacttgttttgttggcaatgcttcatgatgtattttgggccatacttgatgtacattgtatattggttaaatgttggacatgctgaatgaaatgttgtttctcacaggccaaagtgtggaccctcaagtgcaatcctccattctccctctttctttttcggagccccatgaatgttatttgcaagcgctgttcatgtgtcctccacctacgaagttggagctatgtttcatgaatgcctaagtgtggaccct

SEQ ID NO: 240002 - DNA, 460 bp, Glycine max
  unsure (1)..(460): unsure at all n locations
agctntgtctcatgctgtataatattctatctacaatgaatataataagattagtttactataaaatatggatatcagaaagatcggcaataattactataccgcagagtggtattcagaatatcatatacctctcatagtatcgggtgcttgccctatccaaaatatacctcttgtagtatcaggtacttagtctagccgaatacttgacaccccttatagtatcagatactcggcctaatcaaatatctgatcccttgttaaatactcggtctaaccaaatatcgaatatgtctaatgttatctttgacaacttattaaagaaagattacctagattaactaataaaaaataattaagggagatatcagttccttaatgataattatacataggagcattacctcaatttaattngatgctgacacggcacctgttaagactntgatgcttaagttcc

SEQ ID NO: 240003 - DNA, 368 bp, Glycine max
  unsure (1)..(368): unsure at all n locations
tgcaagctcaaccaaacgtgccagtctatttgtctacttgttatcgcgngtnggaagaaacggctatatagacgcctgtcatggaggttcagggagtcaggaaacaagttacaaacacgaataaaatacaagtcttaagatgaagtaatgtccaaaagtcaaaataacagttattcagaaaacaccaaatcaagcataagaaatcttggtgatccacattgtgcatttggtagaaagagataagagactttataccatctttggcaacaaatagttaacatgtgacatttgcacatttaacacaccttttggttgattgtaacagggtctcttagcatctttcattaattgtacgaaggcgtattggg

SEQ ID NO: 240004 - DNA, 435 bp, Glycine max
  unsure (1)..(435): unsure at all n locations
agctngntccatgcaactaatataatatnaaatctttgatgncngnagaagtaaaatgaaggggtagaaactaaaaacttgggtaacatttataattnttgacgcagtgcagtacctttcaaactcaattcttatatgcctcaaatggcaaagttccttggatacttcaagatagattttgactactatacgtttaagtggcgagtctttttacattccacatttatgcttcaaaagcatgatagatttgccttaacaatatgatatcaatacatttttatcgtacaactggaacccagtggacaatgatagttgaaaaaggcttgaagagcattctatctctggtcacatcatgaaattttttaatagattcacgtgtttgtatccacgtcacatttgacttatgtaataagatcttaaaagaaatccaagtcg

SEQ ID NO: 240005 - DNA, 435 bp, Glycine max
  unsure (1)..(435): unsure at all n locations
agcttgtccgcataaatcaactcacatgtttctttaatgacttatgncctttcattgtgagacaaggctngatattgaagaaatcttgaatcaaggctttgtttgttgaaacaatcttgtattaatcttgaagcaaaatgagccttgtttgattcttcttttgacatcatcaaaatcatgtatacatacattcacattctccccctttttgatgatgacaaacatgtgatttcttctcaacaccatcaaagcttgcatgatttacattctccccctttctcaagcaaattcttaattcttcttgacatcatcaaaatcttcatgagttacattctccccctttntgatgatgacaaccacttgtaggttaggagcaacaacaaagaaaaaatatctatttgcatatagnttaactcccctttgggtntgcaatga

SEQ ID NO: 240006 - DNA, 433 bp, Glycine max
agcttgtctcagcgtttatgcgagacggattccatcatgctagctatcatcgccaagtaccaagaagagttatgtctagccacggcccacgagcatagaatcgcggatgagtatgcccaagtatacgcggaaaaagaggctagaggaagggtgatcgactctttacaccaagaggcaaccatgtggatggatcggtttgcccttaccttgaacgggagtcaagaacttccccgattgttagccaaggccaaggcgatggcagacacctactccgcccccgaagagattcatgggcttctcggctattgtcagcatatgatagacttaatggcccacataattagaaatccgtaggaaacttgtatggtctctcaaaccttgactagatatgacttccttttttgaaataaatgagttggtcccatgtttctac

SEQ ID NO: 240007 - DNA, 454 bp, Glycine max
  unsure (1)..(454): unsure at all n locations
agcttgcatcagagaaagatgatagcaattccatttcaggatatgttttcactttaaatggtagtgcagtaagttggaaaagttccaagcaagctacggtagcatattcaactactgaagcaaaatatatagcggcaagtgaagctgctaaagaagctatttggatgaaaaagttcatatttgaacttggcatggttccttcgataaaagagttggtcccattattgtgcaacaataatgaggttattgctcaagcaaaggaaccaagatcacaccaaaagtccaaacatattttgcgaagttatcacttgattagagagataatagaacgtggtgacgttaagattgaaaaggtagatggaaaggagaatgcaacataccccttcaccaaggcgcttggcatataagagtntgacacgcacaaatgggaattangaatgaagttcacgaatga

SEQ ID NO: 240008 - DNA, 447 bp, Glycine max
agcttaagaggaagaagctgtgttatattttgtcttccataaaattgcgcaaaatgtagatgtcctgaagttgttacaatatataatgcagttaataatctggaaattaaatttagataatcttaatatgattgctttggaaatgtattgatatcacgacaaatgaccatcatatacacagcggaggcatagccatcctaatttacttgcttacatgaagctcgtcatgttcaaaatatcatatgcaaattgatgataccttgtagataatagcctcagaagatgattatcaagactcaattaaaggctgaaccattacacaatcataccatttaaccacaacaatgaatttaacacagagtcacactaaacttaagttacacaacacctacttaagacataagtataaacattgcatgaagtatagatgcattcagtgtaaaacta

SEQ ID NO: 240009 - DNA, 403 bp, Glycine max
  unsure (1)..(403): unsure at all n locations
agcttgtaaagcgtctgcattgatgcatctttattttggntataacacccttcactatcttctcagacagtgttaccgacctctctgacgatgatgcttattacgcactactatagatctctgtttgtgagaggagtagaaatttaaaaaaatgtgaaaggagcaaggagtgtgtatacaatgtacataggaatgggacatatagtgacttggacgtcctaccgcgcgcacaaaatcaatgcataaacttctacctaagttagggggaggaatcattaacaaagaccataagacagctctgctgttccttanatataagaataaccatgtgatgggattcaagccaacatttgtgaatagtgttatgttcgctataataaacactggctagtggcgactaact

SEQ ID NO: 240010 - DNA, 310 bp, Glycine max
ataaataggtgccacaagtgttgctataataataaatcgacgcctaacaacaaaaaagccttggttgaataagaacaacgtttcctatgaaaaatgctatcttataaccctaatagtgaaacccagagaaccataatttcctcagtaagccaagccacattacaagcacataaaagtccttagtgatacaccaagtgtaagcaggacaactctaactgagatgaagtgcaaaattgggaacatctaatcgcaagtcataaaaattataaacactaatccaagacacttgtgcgtagacaaaaacactaaa

SEQ ID NO: 240011 - DNA, 253 bp, Glycine max
gcagcacaaaagaaagaggcacgtttctttagacacccaagagagagaggagacacagacaaacacccgaaacgccaaagaaaacaacaccccaccaatcaaaacgtcaactcaaaagcaaaaacaccgagccacatcccacaagcagaaatgcacaactagaccaaggagaaccacagatgcccaccagcccaaaacaccaaacggaaccaccacccccacggggaaacaacgcaccaacacgcagaaccac

SEQ ID NO: 240012 - DNA, 369 bp, Glycine max
  unsure (1)..(369): unsure at all n locations
agctttgcgagctggagacatttatcctatctccgacagnccaagggtgagtcccgtccatgtagtcccgaanaagactggcctcacagtgatcagaaatgagaaggaggagctgattcctactcgggtgcagaacagttggagagtctacattgactatatgaggctgaaccaggttaccaaaaagggccattntcccctgccattcattgaccagatgcttgaacgcctggcaggtaaatcccactactggttccttgatggtttttctggttatatgccaattactattgctcctgaggatcaggaaaagatcacattcacctgccccttcagcacttttgcttataagaggaagcctttcggcct

SEQ ID NO: 240013 - DNA, 455 bp, Glycine max
  unsure (1)..(455): unsure at all n locations
agctngaaggtgcgtaccccactattttttcatagtaaaacactggtaatgtgtctactattattgtgatcatctctttctccgtcattggaggtgccacttgagctgccaagtctctccacctttgggcatattctttgaaagattcatgcccctttttgcacatgttttgtagttgcatcctatccggagccatatcagaattgtactgatactgcctaacgaaggcaaccattatgtccttccaagaatggactcgtgaaggttccaagttagtgtaccaggtaacagctaccccagtaagactttcttggaagaaatgtatcaacagttcctcatcttttgcgtatgctcccatcttccaacaatacatctttagatggttcttggggcaagtaatcccttgtacttgtcaaagtccgacacctttgacttgggaggggtgatgatattgg

SEQ ID NO: 240014 - DNA, 390 bp, Glycine max
  unsure (1)..(390): unsure at all n locations
agcttaagctccttcaactgcacaatgcttttatatattgaagagtatccttgtggaaccttcacccgacgaagacactgacaaaaacttatcttctcctttttggacaaagtatgacaagcagggggcaagtaaattttcttcccatcagaccttggatgcaagtgtgatcgtatccccatctcatctagatcttgacgggtattcaagtcatccttcatcttgccttgaatgttaaggagcatcccaatcacattgtcacatacanttttctccacatgcataacatcaatacaatgtctaacgtctagattagaccagtccgaaagatcaaagaaaatggacctcttcttccatatgcaagtcttacttttatccttcttttgggtc

SEQ ID NO: 240015 - DNA, 421 bp, Glycine max
  unsure (1)..(421): unsure at all n locations
agctttgtccgcanaaatcaactcacatgtgccttgaatgacttanaacctttcattgtgagacaaggcttgatattgaagaaatcttgaatcaaggctttgtttgttgaaacaatcttgtattaatcttgaagcaaaatgagccttgtttgattcttcttttgacatcatcaaaatcatgtatacatacattcacattctccccctttttgatgatgacaaacatgtgatttcttctcaacaccatcaaagcttgcatgatttacattctccccctttctcaagcaaattcttaattcttcttgacatcatcaaaatcttcatgatttacattctccccctttntgatgatgacaaccacttgtaggttaggagcaacaacaaagaanaaatatctatttgcatataagttactcccccc

SEQ ID NO: 240016 - DNA, 136 bp, Glycine max
tgtgatcaattgttaaatagaaactgaattgatgtggaagttgtcaattggtgccctgtaattactaagacgggaaacctcaatggttctagaaataaagtgaatctacaagggagagttctaaaagtatgggaag

SEQ ID NO: 240017 - DNA, 450 bp, Glycine max
  unsure (1)..(450): unsure at all n locations
agctntatctctgctccgtatgttaactgtggattctgattcatctatgtatgattatgttaaagtgagtttctgatattcaacttatatctgttgtattaaggatcttgtcttgtttcaatctgttgatatatgaaaataatttcttacaggaattggagccactccctgaattaaaaatatttgatgagataaggaagttccatgaagaattatgccacacttactctatacgcgaccacttattgaaggtaaataagtatcattttccatttaatttttatggctgtagaacatcaagtttcaagataattntctcttgtttctggtacattgttattttcagtttgtgaagaagtcttgctaccttccaccaaggttgcttttatcaaggtgacttcctttgttcaacaatctttcctatnttattatcttccatagntttctatg

SEQ ID NO: 240018 - DNA, 428 bp, Glycine max
  unsure (1)..(428): unsure at all n locations
agcttagtgacatccgtgacttgaccttattcgaagatgttcgcaagatagattaaggagaatcttctagtcatgtgtccaattcaacattaaatactgaaagcagaggaaggactacccacaagggtcagaatggtcgagccaaatcaaagtcaagagggaaaggtcagacaaaattttgaagtgacattatctgctggaattgtgacaagagaggtcactttaccaatcagtgcaaggcgccaaagaagaacaagactcacaaaaacaagaagcgagatgatgatgaatccgcaaatacagcaactgatgaatttgatgatgcattaattngcagcttcgatagtcctgttgattcatggattatggactcangtgcgttgttccacaccactctctctaaagattattgtctaactatatttcta

SEQ ID NO: 240019 - DNA, 369 bp, Glycine max
  unsure (1)..(369): unsure at all n locations
agctttctataaatctttgtatagagactaagctctttttcactttgnataccnccgagagaaaagactaacagtgttaagtgattccatctataagacgatcacaaatttagtcagtgtgcaaacttccaaaaaatcttatttatttgtttagagccagcagtggcttggtaggacaaaaaatattggacttaattcaagccttgggtagagcttgcatgtgtaagagccaaaaatggcagtgaaaaatacttgtaactgtgaaaagttaatggaaacttggtaggtttacaagaactggacatagtctcgggtttgataccaaccggcataattatctgtgtgcttccttttattgctctaactaac

SEQ ID NO: 240020 - DNA, 413 bp, Glycine max
agcttgaaatgaggaagtgtggaagggtgatactttctacttttattcgttggccacagagtggtacctggagatatgtcgcgggggtcaggagaccttggggacgtcaggtggggtgctattgcccaaaaccaagcttgaccaatcccgacccaacccgggcatagtcagtcagtgagaacctgtgatgtacctaaacaggcgagctcctggaagtcaatcgataaaagaacaaagaccacaaagcaaggaggcttgtgtggtggctggccagctgtgaatcttgagtgatatatgggatagggcctctggtaatcgattaccgagggtgggtagtcgattacaacgcttaaaagtgaagacaggaagctaagatggcctctggtaatcaattaccaagagagtgtaatcga

SEQ ID NO: 240021 - DNA, 431 bp, Glycine max
  unsure (1)..(431): unsure at all n locations
atccttaagtcacctgcggcatgcaagcttcacctttttgtcctcctcagttgttttatgagaatacatgctctatnttcatctcccactccaagtaggcctccggatcattctttcctttaaatggaggaatgttgagtttaataccatcaattcggttttgtctaggaacaccatcattccctcttctcctcctttcttcttcattatgatctctattctccatttgatccaacctctcatggagcgcatcatctcgttgtttcattaacctctccaaatgttgcatcaaagcttgcatttggaattgcgaaagccccactccatcattatgattagtacctgacatctcaaacaaacaaatcaaacgtaacaagacaattatagttgctgtttgaatacctcacccactcaagtgtatcacacaatta

SEQ ID NO: 240022 - DNA, 449 bp, Glycine max
cgacccggatccttaatcacctgcggctgcagctttgcagtttaggaagttctatatttagaaaggtccaagttccaaagagttctgagagattttgctatgtgaagatctgcagagatgcgagttcgaagcgaaagccgttctgagaacttgagatgagtttgtgagtgattgtgagatcctagaggtgaaggagacatcctcacaactaatgtttttgcagactttcatcttgttattctctttgttgtaaatgtggtttccagactatggaaagctaaatcctcattggatcttccctgtagatacctgatgtaaatatatttctatctatgtaatgatgtttttgtgttctctgtgctatctgcgtttcattccagtgtgtttttaccttgatcacgtagatgcatgctttgttatggtcattcaacagtgtgaactggtctgat

SEQ ID NO: 240023 - DNA, 443 bp, Glycine max
  unsure (1)..(443): unsure at all n locations
agcttcaagaataatggcctcagcatactttttattttcagaaggaaattcaatcaatagaccttcaatctttaatggagagggttaccactactggaaaacccgaatgcaaatttttattgaggcaatagacttaaatatttgggaagccatagaaatagggccttatatacctgccacaatagatggaagcacaacaagtggaagcacaacaatagaaaaacctacagatagatggtctgaagaggataaaagacgagtacaatataatttaaaagccaaaaacataattacatctgccctgtgaatggttgaatatttcagggtttcaaatngtaagagtgctaangaaatgtgggacataacagatgtgaaaagatctangataaacacattaactcttgaatatgaactatctangatgaatgcaaatgaaagcattc

SEQ ID NO: 240024 - DNA, 306 bp, Glycine max
  unsure (1)..(306): unsure at all n locations
gaccctaagncacctgcagctgcagctcacgaagtgagggaggttcttttgtttgtttcttccccctttaagaggaaactagtgtatgctccttggctgtcagataacgttgaagaatgtagctttcttttatactaatcaaagtctgttggtgtttttatgtttacaacatatagcaactcagactccctttattctctattgataaaactcaagcttaaaatatgtttttataagactcaatctataatactttttaccttaaaagaatagaagaaatgtgtcgatcatcaacttctagagaaa

SEQ ID NO: 240025 - DNA, 412 bp, Glycine max
  unsure (1)..(412): unsure at all n locations
agcttgaagtcttaactgagaccctcagttagttgccaacccaattatctactagtcaaccttcatcttcttttgttttccaggttgcaagttgtgctatttgtggtggagctcatgaatctggtcattgtatttccactaaagaacacaatcatgaagttaactatatgggaaatcaataaaggtagggttacagtcaaggtgcataatcacgtttcccgcatggtcctaattataatcaacaaggacaatggagatctcatcctggcaaccaatacaacaaagaccagggtggaccttcaaacaggccaccacaacaagggccaaatctttatgagaggactacaaagctggaggagactctcgctcaatntatgcaagtcacaatgtctaaccacaagagcacggagtc

SEQ ID NO: 240026 - DNA, 149 bp, Glycine max
  unsure (1)..(149): unsure at all n locations
ttagagtcacctgcggctgcagctagatataaaatacagttcgtttttttattcaccnacggacctgcgtcttccttagagaggtgtttccctgttgcaatcctgcttctacctgcccaacggaacattcacagtattagaatcgtgtt

SEQ ID NO: 240027 - DNA, 408 bp, Glycine max
  unsure (1)..(408): unsure at all n locations
ctgcagctttaagaattaaatagcataacttttactctgatgttcgattcacgcgcataatatatcgagatgctcgatattgagcaatggaagctcttgagcaattcaaatggtcataacttttattntggaggtccgattgaggcgcataatatatcgagacgctcgaaattgaataacggaagctctcgagaaattcaaatggtcataacttttgactcggaggtccgattgaagcgcataatatatcgagacgctcgaaattgaacaatggaagctcttgagcaattcaaatggtcataacttttcactcggaagtctgattcacgcgcatagtatatcgagacgcccgaaattgaacaacggaagctcttgagcaattcaaatggtcattaacttttcactctg

SEQ ID NO: 240028 - DNA, 447 bp, Glycine max
  unsure (1)..(447): unsure at all n locations
agactannnatatttaaagaatactatgtcttatctatctaatttgtggtattatntcgtgatattaatgtctcttcctctcgtcgtctctggcgatacagtaacttccacaaaaataactggcagctcaattaattactgtttttaaatattagccttttgacgtatatacgcacgcggtccacaaatcataatgattcaatcagcctatgaagtgccaaccctgacacaacaaaattattacaaatgtcgcatgactttggtatcttttaaaagaaaggaacaatgagccatgttaataatcctgtgcggataattaactatattctgatcactataattgaggatatttctgataatataatcataataatctatgcacgagaacttacaacgccttgtcgaaatgaagattcatatttaatgtctaccaaccgatgtagatat

SEQ ID NO: 240029 - DNA, 449 bp, Glycine max
  unsure (1)..(449): unsure at all n locations
agcttgagaaacctanaaagaaatgacatattctattatagcaaactgaaagctaaaatgaagttaatcattaagtatcaaccttataatggtaaacaagattaaactttgatacccatcaaaatgctcaaccaagtacatccttcttatcctcattgttagaagcaagtattatgtcaaggtgcattgtaaatttttaggttcaaatagttactacttgtgatgtacatgacatattgtgttagaaacatcattttaaagaaaatcttatatattcatactgattatagttatgatttataagtttgcatattcaaatacaattttttattaataaaatatattttttatattaagtaatttaaaataattataatttctttaaaatatttatcgatgataacttagatattaatgttatttcatgtaaaatatttaatctctttata

SEQ ID NO: 240030 - DNA, 455 bp, Glycine max
  unsure (1)..(455): unsure at all n locations
agcttgnataaataagggaaatgaggcgacattggttcttccatgnngcagtaaaaacacgatcgccaaacgttatgtctttatgcaccacttaactctctttccgattcaccactacaatggatacccatgacttgctctttttatgccacaaacgtaataaggcatttaattaatatcattccacagaaaataaagaaattgcatcatatttatttcttacgaataaaaaagaaatatcacaatcaaatatgctgacaaatgaccctcaagaatatagttttctatatattcgtaggaccatctgtttaatgccaaaatatacatgtgtttccatcaaactccaaagcctgtactgcatgtgagaaattatgacaaaaatatgcttactatagcttttatcattcacaggaacacgatgatgcatgaatgaaccatacaaagaaatgtgtact

SEQ ID NO: 240031 - DNA, 392 bp, Glycine max
tatgtgtctggtgttgccttgggacgatgcgctgagggagcctatgatgtaacagctgaagtaaacgattctctcacaaatagagtgtacaaatagtagcagtcttttgttttgtggtggaatgggtgatgggactctcgtgttccattgaattataataatgtgaaagcttctcaaattcagtcgataagtatttggcggcttctattgctgataatgtaaaatcctctttaagtttgattcattatctacttcatccgcatatagcaaagtagctatcagactgcctctccattattcccctctatacttggagaggtggtagatattaactcgttactatatatgtaagtccacgccatgctctgttacaatgcatgagttacctgata

SEQ ID NO: 240032 - DNA, 438 bp, Glycine max
agcttactatatttaacagcaagcagacctgacatcacctttgcagtaggtgtttgtgcaagatatcaagccgatcccaagataagtcacttgaatcaagtaaagagaattctgaaatatgtaaatggcaccagtgactatgggattatgtactgtcattgttcagattcaatgctggttggatattgtgatgctgattgggctggaagtgcagatgacagaaaaagcacttctggtggatgtttctatttgggaaacaaccttatttcatggttcagcaagaagcagaactgtgtgtccctatctactgcagaagcagagtatattgcagcaggaagcagctgttcacaactagtttggatgaagcagatgctgaaggagtacaatgtcgaacaagatgtcatgacattgtactgtgacaacatgagtgctataata

SEQ ID NO: 240033 - DNA, 381 bp, Glycine max
  unsure (1)..(381): unsure at all n locations
agctngcatattgttgtttagatcttgtttgatgncctttatcaaaacagaaaataagaacattgttttatacattgattctatatattaaataaagggcgagccctgttgcagcggtaaagttgtgccttggtgacttgttggtcatgggttcgaatccggaaacagcctctttgcatatgcaagggtaagactgcgtacaacatccctcccccataccttctcatagcgaagagcctctgggcaatgggatacgaagattctatatattaaatgtttattgtctgtatctctttcttccaattttatactgttacttaagtgtcatcatatcatatgtatgatagaaggaaacatggttcagctatcatgttgtcatgc

SEQ ID NO: 240034 - DNA, 390 bp, Glycine max
  unsure (1)..(390): unsure at all n locations
agctntctggtagcctaagaaagccagatgttatcctatgcaagccaggggtctgaaaaagtcaccaaatgaccattttgccctcccttttgggtattttccgcattctttttcgaaacgttgaaaaaccttacggattgcgcgacaattggtgttaagcagctcaactcgactggaaagaatccaaatgtttgctaatgatcgtccccggacgaaattagggtatgacagttatgaaaaatgctagaagcacatcttttaacacattcttttcaattgattaaactttattgaagactataaaattaaaagaaataatcatttaatatgatgtaggatccacacaactttatagttttggaatatatatcttttttatatcaaccaact

SEQ ID NO: 240035 - DNA, 334 bp, Glycine max
  unsure (1)..(334): unsure at all n locations
agcttgactaggcgagttgattttagccttattttcactttagttattagtcaattcgattaagaatgagaaatcccaaagagaaaacgtccgattgattttccgctttattttactaaaaaaagatgttttttgattattatattattttttatctctttntgttttccaacgtggttacggcacgactgaacggtcggaattcattttaaccgaagttaacggataatacaattcatacgatcggtggaaagttattttatttntaagttaagcgagaaatgacttaagtaaaatggcttaagcacgtcaaaagggggtataaaaagttatt

SEQ ID NO: 240036 - DNA, 284 bp, Glycine max
ggggatttttttttatttttttagtcaaaaggtctagaaggaaaaagattcctggtgtatggaaattgggactgggtgggtgatgggcccgcacgacattgcaattatggtattgtgggaccacacctattccacaaactaggaaaccacacctcacattaaattcttacactgctggcccttggtcgttgcccatgaaaaaatttcaaataagtattatattattattattaaattagataaaacatcaatttagaccttacttctcatcttaatttattatt

SEQ ID NO: 240037 - DNA, 439 bp, Glycine max
agcttgcacacagagtattaagtaattatattcataattctaataaattatgaatttaaaactccaaattaaaattttcattggtcaatgtgtttttatttgttattaattttcatgttagtctcttatgtgcctgaaacgaatccatgccttccttgtactatttggcaattttcaatccaatcttgtttggggcaatgatggttcccttgagctatcaagtcaaaccataagttaaatattatagtcatttgaaataattaacacacgtatcatagatcgttagaagactaagttacacaactaaatggttaggagaatttaaaatgactatgaccacctccatatttcttgtatactaccaatttatatactttaattgtttattgaactaatataagagattttctgcatcgatttgataaatataacatttttg

SEQ ID NO: 240038 - DNA, 243 bp, Glycine max
tttccaatttccctatcaacaaaaacctccttccaagaatgcacagatgctaggaaaactatagcaattaatacgtctctgacagcgaaagcaattatgcttacataattgaatagggaagaacattgaaactcattatactactcaaccctactgtcctattaatgctcaccatccaatgagatataattcttctttaagttacaactagaaaacttggatcactccttgtgtaagaactca

SEQ ID NO: 240039 - DNA, 426 bp, Glycine max
  unsure (1)..(426): unsure at all n locations
agcttgaagagtaactcaagaggaagctcaatacacatagggtttatanagtagagggaagggatttgaagtggctaaatttgagccaaattttagaataggttattatgtgtaattttgcatttgggcctttgtagaccgtattacttgacctctttttgtatgtttgagtctttcatgagagagttttagtaattttaagccatagtataaatagtctatcttgaactttgaaaagactaagtctcattttattgaaagaattataaacttggtgtgtgagaacctctcttggttcttgagtcttgagagcacttctttattcaagcggcgaatcctcctttcaactcatcaattcatcatgaattgtagcgntattcttcatttctagtctgttcatctttttaaattattatctttgctttc

SEQ ID NO: 240040 - DNA, 379 bp, Glycine max
agcttgaacaagaaacgacgtattgtgcgttactattatatatctatccatagagcattcaaatgagtgtaaacttgtgggtcgattgggatcatcaccggttttgagtctggctggaccatatccaaacagcatagtcaaactaaaccaaatactactgtctctattttatctttgttcccttcgcattacaaatggttgctgccggcacgcaagttcatacttttaaagatgatagctacaactcgttgaaatttgtagttacagttgaaaatagaaatgttgtgtcaaatattaatgagaaataattaaattgatagaaaaatcaagaaaagataattctagaataataatattaataattgactaatttaatgtg

SEQ ID NO: 240041 - DNA, 449 bp, Glycine max
  unsure (1)..(449): unsure at all n locations
agcttatggngtgtagatggtgcaatattattgtgttctactaactntcancttcatttaatataattagacaatgtttcatttaaataaaattctatttttattttattctactattgcgaatttatttttcattaatgttctcactcacggaaaatatattatgacaatttgatgtgaaagtgaaactactactgcacggttagacacaattaatatcgaggagctctcgtaaatcatattatacgaaccgctaacatatatgatacatgatattgtggcatgtatattctaaatattntgacaagtaaaaagtacacaattgcttcccctaatctctattcctcaaattataccctccattttcatgagattcaaaccaagtgtcttacagtatagctttaccgcactattttttgttatctttatactttgtacaacaatagtta

SEQ ID NO: 240042 - DNA, 407 bp, Glycine max
  unsure (1)..(407): unsure at all n locations
gacctgcngcatgcaagcttccatcaacatgtagaggagaatctattatttcaagtcacaaaatgtcgagaacttttattttcaaaacaattacccatttcttgaacatatcctataattcaaagaaaaacatgcagagtcgtacatgcacacagaattgacccaaaatattaaactagaaatccgacgaaactaacaacatttgcaaattaacacaactaacaaattaacaaaaccaacaaaactagcaaaaccaaagaacactccacccatacttaaacaacacattgtcctcaatgtatcacaattaaaagattaaaaacaattaaatcatctaatagaatccgacacgtgtaataaaagcaaagaaggagataggaaaagaacaactccctagtcatggtgga

SEQ ID NO: 240043 - DNA, 441 bp, Glycine max
  unsure (1)..(441): unsure at all n locations
agcttaacactggtactgtaattaaatntgtgtggaactttactttactaagaaanaaaaattcatttaaatttgtgagaaaattcaacaaagaaaatcagttgctaatttcgctaataaaatttcgtaaaaggaaagagaagactatacagtttagtaatgtggcaagtattgttgttgttcctgaaacaatcacatttgatgaatgggttgtaagtttgatcagtgatagatgtgtcatcgatggcccttccactgcataggtcaccacttatgttccagtgttcatgattcgcaattatactccatttgtcaaagattgcgtttaaaactctcgctgcataaaaatggagagttcatatttcaattccatgtgttaaaacaaaagcttttgtattacaccatatcacgtatctcctttaatatactaagacttttcac

SEQ ID NO: 240044 - DNA, 385 bp, Glycine max
  unsure (1)..(385): unsure at all n locations
agcatgagctgtattatgtgaaccatatttttaatgatgacgnctatgagatccactgggaggaggtgaagtaactgtccgcggaagaggagcatgacggttctcaaaagaatttccatcgtatctagttaatatttaaagagtcacattaaccacattgctgaagctatgcattagaaaacagatatgcatgtctaacaacactccataatacttacatgaaattatggatggaactaagctcatggggtattcatccactgaaattattgtttgcaacatttctggaaaagtatagagcaacattataaactgaatgcagataattcaacgccccaagggtgaagaacttacaaagtatccaaaggccaaccaaccagagcac

SEQ ID NO: 240045 - DNA, 258 bp, Glycine max
gataaactgaagctgttatatgctgaatagagtattatggcaccaccgatggggacacatattgaatctgacgccagcaattcccaatatcatgttgcaggagattacatcgaatcctcacgctgcacatcattgggtttatgataatgacaccagttacatgtccgctggcggactagctatcaggctcggtacgctcttgctcatcttacatctatatcctctatcacatcaattgtgtgccttctccatgcagat

SEQ ID NO: 240046 - DNA, 439 bp, Glycine max
  unsure (1)..(439): unsure at all n locations
agcttaacaacagattatctgtcattgtttgcaatataatgaacacccgaatgagacaagccattatatccaaatataaatctgagtagtcagaggactagcatagacaatagaaagccactgcctatagtataatgaaaacccgaatgagacaagccactttataaggaaaatatttctgcacaaatcctaagtaatctacctgtaatctacctataatttacatagtataagttaagtccatggcaaaaaacatcatgtaatatccaaatgacacatgacattcaggtccttctgattctcactataccatctcatgtgagatgcagtggccatcgaaaagtacaatctctntagtcttggaatgagtggaaagtaccacatttttttaacaggaaacatcttttcaatacctctcctattaaactgtcagtaccaa

SEQ ID NO: 240047 - DNA, 432 bp, Glycine max
  unsure (1)..(432): unsure at all n locations
agctngcttctacaaaatgaagactcatngttggttcctaagttttgtttttttcttgttaggggttngaaaacaaaaggtaaaagaaactatggttgaaactagccaaaataaacgctaaaagaggtgtgaaagataaggaaaaaactaattagtaaaaggcaagctatctatgcggtttgacaatggaaggtaaaggaaaaaagttatgatagtaagaaagaaatgtaaactaggcgaatcctaagagtgtttggatgaccacatttaaggtttccaacaaaacactcactatcctaagggaaaattgcctaaaattattacacacaaatggaagtagggtggcctattggaggcttccaacttacttcaaatgaaaggcctttctgttacacaaattgaaagcaattaaaagtagtaaattgtcaatta

SEQ ID NO: 240048 - DNA, 445 bp, Glycine max
  unsure (1)..(445): unsure at all n locations
agcttgcctgtccgatgcagcagtaatgatggccctatttatgtnggggaacggttacgaacccgaaatgggtttaggcaaagacaacggcggcataactagcctgataaatgccaaaggaaatcgtgggaagtatgggttaggctataatcccactcaggcagatataaagagaagcatcgcgggaaggaagagcggtagtcaaagctcgcggttgagacaagaaagtgaaggaagcccgccctgccacataagtagaagctttataagcgcgggtctgggggacgaaggtcaagtggtcgcgatatacgaagatgatgttccgagtacattggatttggtacgaccatgccctcctgatatcagctgggaaattggcgagtggaggaacgccccgacatttacgcaacgagcatattgtaaacctttacggtttaaaactcta

SEQ ID NO: 240049 - DNA, 437 bp, Glycine max
  unsure (1)..(437): unsure at all n locations
agcttgctagcaaagatgtgttgttgcctgttgattgagctanaactagagcctgagtcagcccctgaccctgngttctctttctccttttcctctttcaaggcacggattagtcgattcggcagataaagataccgatcctgaaagtgggaacgatttgcgacaattctccgcccagttctccatccccaaatgtcaccatcttccggccaattttccggtgcatatggaaatccctcgccggacatttccggtgccactgcctgtaaattcaggaatccattattcttcatctccatctcgaacgctacttaactagctaggggttatggtttgatcgaatcaaaacagtaataggatcagatcatgtcacaggccaaattatataacggacagctgaagtgaaataaaaaattggttttcgttattgttttatt

SEQ ID NO: 240050 - DNA, 432 bp, Glycine max
  unsure (1)..(432): unsure at all n locations
agcttatccagcgcaagttgttgcagcctatatacgtacactgctatataaacatgaaggctgcacgggtttttaatcaagtcagagattgaagagttattttgtgagttttgtgacttgagtgttttgtgagccaccttgatgttaccctaacatcaagtgttggacctgagtgtgcagagttgatctctattgttcagagagcaatctctggtgtgtctttgatttgtttgtaaacacgggtgagtgattgagagggagtgagaggggttctcatatctaagagtggctcttatgtagaagttgcatgggtagtggttaggtgagaaggttgtatacagtggctgttatatcttcgaactaatactattttagtggatntcctccctggcttggtagcccccagatgtaagtgacgttgcaccgaactgg

SEQ ID NO: 240051 - DNA, 413 bp, Glycine max
agcttgtaggattatggagtacccatcacatgtggtactagggggcggtcgggcgatggtgcacaacaagttttccacatccacaatgcacgcataaacccaccatcccctgttgcccacctccaactgaactcacgtactcccacgtagcccatatcctcgtgtctctcaacatcgggtccccatcaatcctcccaagcttccacaacatccaagcaaaacaacattcaaacagcacaagctatcacagccaagcaaaacagggcaaaggcagaaaactctgctcaacacactaaccaaaatcacagcttttctcacttaaagaccccagtaacatttccttcgatccaattcgttaaccgttggatcgactccaaaattttactggaagtctatagtgaataagcctacat

SEQ ID NO: 240052 - DNA, 450 bp, Glycine max
  unsure (1)..(450): unsure at all n locations
agctntattcaagacagagaaattaaagatattcaagatggatgatcaagactgtctatagagtcttagaaagggtatattaaataggaagggaattccaattgaagtagcaaaaggtttggccaagaattttaagttaaaaagtcttttacaagaaatttactctctggtaatcgattaccagaggatgtaatcgattaccagtggccaaaactgatttacaaacagctattaaaatttcaattcaaaatttgccctgtgtaatcgattacacatatatggtaatcgattaccagtagtttctgaacgttttaattcaaattntaaagcttgtaatcgatttcacatatactgtaatcgattaccagagcagattttcagaaaatattatcaacagtcacatctttttatgtggttcttgaatggctatcacaggcctatatatattgt

SEQ ID NO: 240053 - DNA, 441 bp, Glycine max
agcttctcgatatattatgcgccaaaatcggacttctgtttgaaaagttatgatcatttgaatttctcgagcgcattcgttgttcaatttcgagcgtctcgatgtattatgcgcttgaatcggacttcggcgtgacaatttatgaccatttgagtttctggagagcttccgttgttcaatttcaagcttctcgatatattatgcgtctgaatcggacttctatttgaaaagttaagaccatttgaatttctcgagagtattcgttggttaatttcgagcgtctcgatatattatgcgccacaatcggacctccgtgtgataagttatgaccatttgagtttttggatagcctccgttgttcaatatcaagcttcctgatataatatgcgcctcaatcggacttccgtgtggaaagtatgaccatttaatttctcgagagat

SEQ ID NO: 240054 - DNA, 438 bp, Glycine max
  unsure (1)..(438): unsure at all n locations
agcttctctatgtgcacctactagttccatataatcagngtctgacctgagaatgtcattgtattttcctgattgagttatccttccttctctcatgacctacacaaattgtaagcaaaagatanacattgataacagtaaattctgatatttatctgaattcattagaatgaaaaatacgaatgacttaccaatattagatcagcatcaggtaagaactctacttgatgagttatgtatatcacagtttttgttnttagaaggccaagcagacactcctgcaacgttgtgtagtagtaaatgtaacattagataacagcttgtccttccaaatgcataacacaactagtcaaattgtattacaaagatataatctattacatacaagaagaantcaattcaatgaaggtatagctgtatccatgcccataatatact

SEQ ID NO: 240055 - DNA, 414 bp, Glycine max
  unsure (1)..(414): unsure at all n locations
agcttatcagcagggctcttgatgtcaaagtttctgaagaacacatcggctcggaagaaggttatggcttcatccacaatatcagttctgtctgcaccacgcatcacagtcacagcatatcccacattttataaacgcacagnaatagaacaaaacagaacaaaaggaaaccttgatctgaaacaggagcaggtcccttaatgtggctcttgagaggaagaagagagcacccacaagctctactcactccatcttcattcacaaaactagaatgataaaccttcccatgcataacaacaacaacaacaacaacaataatcattttcaattgggaatcaataagttgacaacaccgccaaattatgaattntgaataagtatgaattgattgannatgaatcccgaccatgtcta

SEQ ID NO: 240056 - DNA, 414 bp, Glycine max
  unsure (1)..(414): unsure at all n locations
atccttnagccacctgcggcatgcaagcttccatcagttactcactgcttgctatcttgctatgagtcttacggatagcaaatgggactatttcatattctcggccgatagacgctgacatctccgggaagggtgctggtgacgacgttagtgactgcttgctatcgtgctttgagtcttacggatagcaaatgagactttttcgtagtgtatgtcagaagacgctgacatcttatgaaagggtgcacgcgatgacgttagtcactcattggtatcgtgccttaagtcttacggatagcaaatgaaactttttcttagtctcagtcggaagacgctgacatctccgagaagggtgcatgtgacgacgttagtcactgcttgctatggtgctatgtagcttacggatagcacatg

SEQ ID NO: 240057 - DNA, 96 bp, Glycine max
cttttttttccatattttggaaaatatcacagctgaatcatttcgtattctacggatggaaagcttatcatgactccgttgtaacctgcaaatgtc

SEQ ID NO: 240058 - DNA, 433 bp, Glycine max
  unsure (1)..(433): unsure at all n locations
agcttgtctcancgtntatgcgagacggagaccaatatgctagctatcatcgccaagtaccaagaagagttatgtctagccgcggcccacgagcataggattgcggacgaatatgcccaagtatacgcggaaaaagaggctagaggaagggtgatcgactctttacaccaagaggcaaccatgtggatggatcggtttgctcttaccttgaacggtagtcaagaacttccccgattgttagccaaggccaaggcgatggcagacacctactccgcccccgaagagattcatgggcttctcggctattgtcagcatatgatagacttaatggcccacataattagaaatcgttaggaaacttgtatggtctctcagaccttgactagatacgacttcctttttgaaataaaatggagtggtcccatgtttctac

SEQ ID NO: 240059 - DNA, 432 bp, Glycine max
  unsure (1)..(432): unsure at all n locations
agctcgaccggcaaagctgtccatggaattgtctcagtgttattgcttttatctttaccacgagacaancaaatcatgttcaaattttcctgtttagtagaactgtgtttggcagaagtgcgcttataaggtgctatgacagtctcccggatgttacactgaaggatgtcttgctttggtgaaagtgcttcaagtcgagtaccacttggagtaattgggagcacctgtggtgctaanatagattattgtcaccgcattattttctttattatcaagtaaataaaatcagcattgaagttgtttgtgtcctttaatttcaatttttacatatattccatttctattggtttcgggtaatgaaattgaaccatttttcacttcatgtntaccatacagaaatagtgacactacataatntctttctgatgaata

SEQ ID NO: 240060 - DNA, 444 bp, Glycine max
  unsure (1)..(444): unsure at all n locations
agcttgaacatataatgtgttgagttgtttttcaatctacacaactagntctntatggctcttactattgtcgatctcacacctgaacttgatgtcgtctgtaattagattttgttaggttaaaatgttcttacctttgacacgattcgtgagcaattgttgtgcctctccactcgatatgcctttggaccttcatctgccctttttgctctcccactcttctatttgtggtgaataaagtggtggtcaacgtcattctcattgcacttattgcaaccactatggtcatattaaagtcaaatgtcacacaaagactatagaaaagtcaaagccagtgaatgtggcacaagttgcctcctttctctccattgcatttgttagaaccaaagtcatcaatgacgtctaatcccttaaaatatcatagtactaattctcgacactgga

SEQ ID NO: 240061 - DNA, 413 bp, Glycine max
  unsure (1)..(413): unsure at all n locations
agctngtcaaaggtgtgagtgaaagctatgaaaatttatagctttcgatcaagtgcataaaggtagctatcaattgttttccaaaagaaagcacaaagcacatgtgtcaacatctaagctaagtagttcaaataagttatacacttgtataaattttataaatcgatcgttaagtcgaattagactataaatagacataatggtatttatttttttcttgattacaaagataacacaaattcacttacaccaacaggctgcacaagagaaaagaaatgattattagttactaagaaaatgtatatgtataaacctatataatttaatggagtttaataattttgtctttcgtttcattgatgggattatatttcatgtaaatctctccttctacatattttttctaaactttt

SEQ ID NO: 240062 - DNA, 452 bp, Glycine max
  unsure (1)..(452): unsure at all n locations
agcttataagaacaaaaacgcctaaatcattttcaaatatgcatgtgaattaggaagcatcaacaagaatcaagccaaggctattgtgcaagcaatcaatggggcaaaacacaccaaaagattatgatgatggatggctcaaattctcacaaaggtaaacttatcactttcaaaactatcatgacatgtagaggaaaaacaacgatttcaaatcacaaaatgtcaagagacttttattttaagaacaattacccattttttgaacatatcctataattcaaagaaaaatatgcaaagttgttcatgcaaacaaaattgacctaaaatattaaactagaaacccaacaaagctaacaaaactaacatatntaacacaaacaaaactaacaaaactagcagaaccaagaccaaagaacactctccccctacttaaacaacacattgtcctcaat

SEQ ID NO: 240063 - DNA, 426 bp, Glycine max
  unsure (1)..(426): unsure at all n locations
agctntaccattctaggattatattcataaattatttgcattttcaagtaattgacatttccatctcacattgagagtaaattaataatcctcactaactagaaacaaaagtacctcccacactctgcttccacaaccactcagatactgcagaatcataggaagcaacatgttgaaaagctttccatgcgagctttagcctgaacttttgatcatcctgggttcttttaagaaattccagaagggcagggtagtcttctgtatcaaccactaccaaaacatccttgtggttctactcaaataagaatttatcaccttatagttagctcaaagaaggtatgcaatgaacaaaggtcctgttactttccacagtaatttaagcccttggtggtatttggccaaaagattaatttctgagccatttta

SEQ ID NO: 240064 - DNA, 409 bp, Glycine max
agcttaccaccatatgaagccacagataatagcttgaaggtaggagaagataagtggagggagaaggagagaaggagcacggaattttgtgcctcaaaagaggtttgaactttgaagtgtaattctcaaatgatcaaagttaaaaaatgcacacacatggcctctatttatagcctaagtgtcacacaaaattggagggaaatttgaatttctattcaaatttcacttgaatttgaaattcaatttgtggagccaaaatttcaccaattatgatttgtgaattttagctatggttcaacccactaatccaagatcaagtccaagattctccactaagtgtgcttaagtgtcatgaggcatgtaaagcatgaaggacatgcacaaagtgtgactatatgatgtgtcaatg

SEQ ID NO: 240065 - DNA, 437 bp, Glycine max
agcttatgcacggaaaatgtaattatgaaattgagatgcccgaagaaacaccatttcctagttaaccatgcattaggtaccatgttcaattattttgttttgttggtgtgtgtttttgtttttttttttttagaaatgggtttatgatcccaacatggttggctcatggtgcctaacacatgcaactaagaatgtagtgtgaagtttcacgcttccccttttttgtttttgttttgtagaggaaaatgcaaggatgagcaaacatgaaaacaaatggtatgcaattttgcagatcaaaaagtttgttgaacgcatatccatgatgatgccatgactcatgcaaaatgtgaggctgtaatatgataacagacaaatgcaggaacgatatgttcattatgatgccatgaagagatgtttatgcgatgcatgatatgaat

SEQ ID NO: 240066 - DNA, 441 bp, Glycine max
  unsure (1)..(441): unsure at all n locations
agctgggcctcaaactttctgataataggctgccacacaacccagcttttagaactcacccctactggaattccaagataagagaaaggaatttccagttggctacaattaagaaattgagctgcatccctacaccaaccctctgatttgcccacataaccgaaatggctttccaaatattcagatagtattcttctatgtttcttggcatagctttccaatttgggacatgataggtgtatagaatgttgcttcatttcatgtaattgtagacctaatagggcagntgtgttggctctgttatgcttttcctttgccaatatgtctatatagttntgtgggtacattaagtcttcaatagtttcgacttgttagtcattaagtattggctttgtgatggtctgaattctctgtttgggctgcaatctttatcatgtatac

SEQ ID NO: 240067 - DNA, 443 bp, Glycine max
  unsure (1)..(443): unsure at all n locations
taaaactaagctttatgtgaaggattgactcttacattcgaatttttttcttgttcaaaggcactggtaatcgattaccaaaacattgtaatcgattacagctctttgaaatcaattggaacgttataaattcatttgaaaactttttcaaatccatttcgctatttttgggccttgtatttagggctccataatataggtaaaggtaccctagaaatgtaggatttttcagcccttgtgttttagggcacctagactagtttttgtattaagttttgtaatttcacatgcattaagtgaatatttgatgtgtgtgttgggaaataaatctaattgaattgggagaagcccaatccaattaaattttatagcgggaggtgagcacttgcttgctacaccccaangccacatcatataatcacacgttgtgcatgtccttcatg

SEQ ID NO: 240068 - DNA, 385 bp, Glycine max
taaaggctcacaaccctgcttattcttcagtctaatactaactgtgacgaaaaagtgatacatttgatggcttcctcttcattgcgctcaattcaaaatcctcataagtctataaaattggctgctagatcttgtgaacaccataacctgcatcctctgatttcaaactgtcattccaattctcaaattctgatccaccaaacattacttgcttgatccccacaaaactatcacaaacaaaaaccaaaaataaataaatcatggaattgaaacaaaatatccaaggggtaaaattaaaagataactaatactctttatctaaatctgaacatgctttctctcctttagagagagattgcaaggaacaattataagatatctaaac

SEQ ID NO: 240069 - DNA, 425 bp, Glycine max
  unsure (1)..(425): unsure at all n locations
agcttatttgtgcttccaaatcttttatattttttcaaactaatgttngacagccaatagaaatatcttgccactaatttctctttaatgataacaaatttacaaactattcttgtttctttgaaaaatagtaagtaggaatgattcttattcttcttccaatactatatttgattgccactaaattttttccattgatatctagctgatggaaactatattaggcgctaaagaagtgtacaagaagatgttaacgtattttgtggagttagaaataattttgtttcttgttattcgattaagattttcatgatctagaatgtaagtttctaaactctttnttagtcattggagttgccacatccttgaaggtgttctacttgacttaagaggaatgcccagtttgctgaatatgtgaaatatat

SEQ ID NO: 240070 - DNA, 425 bp, Glycine max
  unsure (1)..(425): unsure at all n locations
gaaactcaaccgaaggagactctacaggatcttcacaatttgtatttttgagtagncctacaaacaaagaaaaagcagaacatggtcatgatgaaaattaagtgaagaaatccaagtccatccaagtggttcctctgcttagaggaaaaacttcaacttctcacttgaatggatctccagaagaggatgagccatatagagtttcgccgctctcatcgtctactccttcaaggcttcccgcatcagctgggattgtgatcaaggatgttcagaaaccagaatttccaacccaaccatcaactgcaccccctccaatttcaccctcaaccccatcatcctctgcttcttttgccgcgaactccaaaacgaatacttccgcaccggagccctccctctccaatctcagctgaaggagccagcacacc

SEQ ID NO: 240071 - DNA, 356 bp, Glycine max
  unsure (1)..(356): unsure at all n locations
acccctatcatatactaaaattttcacatttatgtctaattgcccttttacttcattgtagtaaacttctaaggcatccattgcccaagaaatctcgggaagtaagtagacataactgtaacgtgaataatcatcaataatgatgataaagtatcattcctttctgaaagaactaacatcaaaaggcccacaaatatcaggatgcacaatttcaacaacctgagcgcttcttgcagctcctttctttcgatgtttagtttgtttncctttaatacaacccacaccaatattctagatccgtaaaatctagataacgaagaactgcattctttataatctttccatcctttctctag

SEQ ID NO: 240072 - DNA, 439 bp, Glycine max
  unsure (1)..(439): unsure at all n locations
aactcagcttttatgtaaaaaaagactgaaaanngagggttaataatttancatcgacataagcctctcaatcattttctcaaagatgacaagtttccaatcccaaaggcttcttcactcccaaccttgatcagagaatcaaacttattttcaaagtttgatttaaaatcaagtttttggcaacttggcctaaaaccaaaagatcggtacaagaaaaccttttgcattccaaatgctcaataccaatggacagtccttccgtttggcctaaaagtagcaccctctgttttccaaaaagccatgaccaagaattttgagtctattatggaaaacacccttgtctatatagatgatgtcctctctttctcaacagatatcgtctctcataaacaccttgtgaatcacatttttgagatagccaatcagcatggcatcatgc

SEQ ID NO: 240073 - DNA, 325 bp, Glycine max
  unsure (1)..(325): unsure at all n locations
aaaacccagcgaaanatcaacgaacaaaagaaaccgacaagaagccacacaagtaacgtccaaatccaaaaataagggagaaacaaaatcatacggaatgcaaggcggcaaagcacaaagaacaccaaaagaaaactataaaagcagaataccaaaaaacgcacggagtagagagggggcacaccaatacagccaaacaaaaattaggattagggaaaaaaacaacctcgaagccaacgcgcgaagagataactagaggaaaaaacgccaaaaaaaaacagccacaagaacggcatctcaggccacccaagccacatctcataca

SEQ ID NO: 240074 - DNA, 419 bp, Glycine max
  unsure (1)..(419): unsure at all n locations
agcttggaattgagccttatgtcgtcctctttttttttattttagcacgncnaattggtaggatggtagcttacagttgtgatctgattcattggatttattttttgtttaatttaatcttataaaatcagcatagtcacataatttaaagttgtcctttcttctctaaaactgcatagtctaatgttgctaaatttgttatgcgaatacatatgaagtcttgaatcatttattcatctgctgcttttgtaggctgagggtgcagcaatgtctggcatttcaccttgagttgctaaatgaagcagaagtggcagcggttgcagaagagaaagaaactcattcatttgaaattgatccttcttaggtaatgtatgtgtgagcttctggagaagattacagtattttctactctcttactc

SEQ ID NO: 240075 - DNA, 359 bp, Glycine max
  unsure (1)..(359): unsure at all n locations
ataaaaccaaccccagggggctcccatctacttaaatcataaagtttttttccttcgcncctggagggaatatcccaatgggggacaagccatttagaccactgatgtgccatcattttcttctattttctaaaccctttttgcaccattttaattattgattggtcttaattttcaattaattaggcagttttattatttgggctcatttagctaattcgatgtttctaatctaattccaggaattaatgaaacattgggcttaatccggatcttggttgcggactagaagagggcaaataaaccagcgcttaccttagttaatttctaattaggaaatatcgcaattctattttatg

SEQ ID NO: 240076 - DNA, 201 bp, Glycine max
cgcaccccgacccgacccacgccacctagagcagacccaaacaaacaaaaggaacaaggcaaaaaggagactctggagacccacaggaaagaacaggagaacatacccccggcagacgccatcacgcagaccccaagacacgccaagtccccaaaggacgcgcgcccccacaaaacgaagcccagaggcaatgaaaggagc

SEQ ID NO: 240077 - DNA, 228 bp, Glycine max
accaccgtcgctagcgacgaatgacgggaaaccaaaattcaggcgtgtaccatgcaaccaaaataaagcgagtgcgagccgacaattggccaatgcgccgcctccaaaaagaacacgaacagaacattgtctccaaaacgagaacagcgttgaacgcccaacgagtgattcttgagcagggcagtctacacccttattaatctctcaatagacacgacacaaagaact

SEQ ID NO: 240078 - DNA, 292 bp, Glycine max
tttgacatgaaaaaatatttagaatccactaggattagtccaataaaaaagccatggaatacgcatgagactccgtattcaaaccttgctatcactattcattttttataaaagcaacaacaaaattcaaacccagcacctcatttaaattacttaagcctctcactacaaagcaaagatattggtgctaccatttaaaaaaagggtaatacattgatatcggtaggctcttgaacctcattgaaaatattatttattaaataaaatcccatattcaatatatggtagctca

SEQ ID NO: 240079 - DNA, 433 bp, Glycine max
acctgcggcatgcaagcttcttttggaccttgaacaatttttctttttttctttcagaaccatgctatgggctcgcgacatggccctttgttcccttcgcaacttgagttcattattgctaccccatagagctccgcgaaatttgttccggccatactcttccttgcgagccctctaggtctcttgttcaagggctcttgcggtaattgcattttcttcccgtaacccggggcactcctttcgaacgtgtgtagcagccaacttgaacttctccttggcgagatttgcctttcctaactcgcttttgagagtttggacttcttcgtcctcttccggggcttcaaaattctttttgctgacgacttttaacttggcgagccaatctatacctcgtatgcgaactttcagccattcgtggtacccaccaattgat

SEQ ID NO: 240080 - DNA, 416 bp, Glycine max
  unsure (1)..(416): unsure at all n locations
tactcaagccttgcggatntggccttctctggcgaaataatcgaagtgtgtttattttaaggcaaanccgancatcatgctttgataaatgcaaaaaaactggggcaaatgaagagggcgagaatgagggataaacccatgtcgtgactgctatttctatacaaccaagtttcccaccaacccaacaatgtcattactcagccaataacaaaccttcttcttacccaccacccagatatccacaaaggtcatcttctaaatcaaccacaaagcctgtctacctcactttcaatgacaaacaccacctttagcacaaacctaaacaccaaccaagaaatatatcttgcagcgaaaaagcctgtagaaattaccaccaatcttgtggcctatgctgacttgcttccatatctacttga

SEQ ID NO: 240081 - DNA, 392 bp, Glycine max
  unsure (1)..(392): unsure at all n locations
agctccttattaaccacaacatctttgctgttttacaataacacgagcttatggcatatcccaagaagaatctcgctgctacatatagctctgtaatgcgatattcgacaaaataaagtctcccattttgcacttataagctaatacgcgaagacacttattgngatcgtcattgggctctattttcttttggtttaattactcattcggcccctctaattacaaaaactttctcttttagaccctatacttaaaacatccccttttagaccctacacattccatttttaatcccttttagcctctacctatcattttaatcccttgcagcccctatggattaaaaatggtatatgtaggaactaaaagatgtgtttaaggatggcgactga

SEQ ID NO: 240082 - DNA, 355 bp, Glycine max
gacatcgaccatctcgcagccttttctcaagcctctgcaggggtcgcgggatgctactggatttgcggggtataataacaatttcccctcgcacataaatcatgaagacatttctgaaatagcacacggcggccaatggctcaacatctctgctatataactacggattctataagtcactctacattattccatattaaccaaccaagggccttaaattcatgcataacttacctcattccatcaacattatgcatatgaccgagacaagaatgcgagtggggaatgcctccgtgcatggattcctcgagccactatccataccaagatatgggcaagcgcaactcgaactaga

SEQ ID NO: 240083 - DNA, 435 bp, Glycine max
acctgcggcatgcagctttcttggctttaagattttaaggttcttgatcactatggatgacaaactctttgggtaataggtaatgctgccaagtttgtaaagccctaaccaaagcatacaattccttatcataagttgaatagttaagggcagcggctcctaacttttcactaaaataagctatcggatgtccctcttgcaataaaacagccccaatgcccacatttgacgcatcacactcaatttcaaatgattttgcaaaattaggcatagcaagaatgggtgcattagttaacctatgtttgagggcagcaaaggcctcttcttgtttcttaccccatttgaaacccacattcttcttaacaacttcagttagaggagcagccaatgtactaaaatccttaacaaatctcctatagaaacttgctaaaccat

SEQ ID NO: 240084 - DNA, 335 bp, Glycine max
  unsure (1)..(335): unsure at all n locations
aactaagcttccataataggctnncaaaatggctcattccattcttattatatttttttgacgacgcttcccatgtggctgatctgtttttcaaggagattgtgagactccatggcttgccaaggagcattgttagtgatagggactctaagttcctaagccatttttggaggactttgtggagcaagttgggcactaaattggtattttcaaccacttgtcacccacaaaccgatgggcaaatggaagttgttaataggactttgggaactttgcttaggatatgtttgaggaagaacttaaaaacttgggaagcttgtttaccccatgttgaa

SEQ ID NO: 240085 - DNA, 433 bp, Glycine max
gttcaagctttcaagggaagagagagacctatcattttttcttagcatgggcttaaaggaggagttagctgtttgcttcacatccaagaggagtttggcccaacacttaaaagccacggagcaaagcatgctatctataatagggcagtacaaagaggagttaaaccaggctttggctcatgagcaaaagctattagaaaactttgcacaagcctacaccgagaaggaggcaagaggaagggtgattgatgcattacctcaagaagcgaccatgtggatggataggtgcgccttgaccttaaatggaagtcaagacctcccacgactactatccaaagcaagggccatgggtgaagtgtgtccaacccccgaggaaattcacgggcttattaattattgtgaacacatgatagatataatggcctatataatt

SEQ ID NO: 240086 - DNA, 439 bp, Glycine max
tcaacatcagaccacttccagggtgctggaactacttcactgtttcttgatggggcctatgcaagttgaaagccttggaggaaagaggtatgcctatgttgttgtggatgatttctccatatttacctgggtcaactttatcagagagaaatcagacacctttgaagtattcaaagagttgagtctaagacttcaaagagaaaaagactgtgtcatcaagagaattatgagtgaccatggcagagagtttgaaaacggcaagtttactgaattctgcacatctgaaggcatcactcatgagttctctgcagccatcacaccacaacaaaatggcatagttgaaaggaaaaacaggactttgtaagaagctgccagggtcatgctttatgccaaagaactcttctataatctctgggctgaagccatgaacaccggatgc

SEQ ID NO: 240087 - DNA, 327 bp, Glycine max
tcctaacatctggaaataactcaagaaccaatgtatccattagatgctcttagtaatcgattaaagtggtcttggtcacttgtgaacaactaaatgagagaaaagtcattgattaatccatttggtaatcgactaaagcttatactctcgaataaatcaatcattgtctcaaacaacagtgtgatctattacaaaactacacgtatcgattaaatcgatatgagactcaactcttttagctctacacaacttggggtaatggatcatgatgaggcggccatcgattaaaatagagaagttttgtctgagatgaaacttttctaacct

SEQ ID NO: 240088 - DNA, 435 bp, Glycine max
tgccacccagctcgcccaggcgagcagggttgttttctctttttcaacagccttctggagaaaccctctggagggcccaagtgggcctggttgctatttgcacccccatttttactaagtacaccccctgcctttttcttggtgattctttttttcgtaaagttacggaaacttacgaatttcgtaacgatacttgttttctttccgtaatgttacggaaccttgcggattacataatcatcccctttttgacttacggaatgttacggaacctcactaattgtgcaacgatgcttccatttgatttccggtgtgtcacagagccttacggattgtgcatcaattatttcttttgttttccggcatgtcctagaatttcacaaattggctaatgatgggtgccaagcacctcacaaggaccaaacaaaagtcgca

SEQ ID NO: 240089 - DNA, 332 bp, Glycine max
gctacagaactacagaaatcaaaacatcggggtgggatgacagagcacgctggagaatcctctcgcttttgaagaccaaaaaggaacagtgggagggccctgcgaacacccatctattgaaattggaaagtactaaaggtcatccttttaccaggggaagttataccacaagtttgaagacgaggttcacaacggaacccctaaatcaggaggaccagccaaggcttttcatcataggcgcacaacatctagagttgacaaccctggtagggatggaatggggaagctataactggcgcgagccttcttgatgatactatatctggaaacca

SEQ ID NO: 240090 - DNA, 398 bp, Glycine max
gaccttgcgccatgagaggtaccatcacgatgtggcctttgtttggtgtctctgccattggagcgagctcgatcgaggaatgatgtgctacaccctgcgctgtctgtggtacaagaacactatactcaactcttgttgtcttggtttctgctaagaagtgtacaaaagaagtagcaaagagacagagatgatgaagtaacgtgaaactcttgttgtcttggtttctgataagaagagtgcaaataaagcaaaaagagccaaaaaagcaatctgaatcactgcactcaactacctatgcatgttgaaccagaccaggttttcgatgctgcgggacctgactacccaagaagggaaagaaaagtcataaacgttagataaactataggaaaaaaaaatgc

SEQ ID NO: 240091 - DNA, 248 bp, Glycine max
agaaatgaaaagaacttgatgtgcgagatgcttctagaaccaatgttgagaataccttccaattaggctaaccattttacctatcttttgacattagcagccacattaacggaaaaaatgaattaataatttatttaatacttactttattgaatattcaaaagatttatataaaaatatattagaaaaacttaacatttttcaaaattaacacataatataaagtgggtgaaagaaaatgaaatgct

SEQ ID NO: 240092 - DNA, 431 bp, Glycine max
agcttgtaggaatatggggtacccgccatattttgtactacgtggcgatcgggcgatggtgcaaatcaactctcccacatccacaaatcaaacatgaacccaccatccccagttgcccaccttcaactgagctcacgtacccccacgtagcccttatcctcgatcctctcagcaccaggtccccatcaacccctccaagcttccacaacatccaagcaattcaatatccaaacatcgtgaactatcctaaaccaagaaaacagggcagagacagaaaactttgcccaaaacacatttcaacaccacagctttccctactcaaataccccacgaacattctcttcattctgattcgttaaccgtgggatcgactcgaaaactttactgaaaggccctagtacataagtctacatctcaaccggttggatctg

SEQ ID NO: 240093 - DNA, 426 bp, Glycine max
  unsure (1)..(426): unsure at all n locations
ntgcttctacaatgtaaacattatttatatcaataaaaatcttttattctataccttggataacccatccacgtgtaaggacaaccccagctgttcatatctctctgtgccaccaaagatctttatgtagtcttgcgaccatttgccaagttctttaatcaattcgttacgcatcacgacccaacactcttctcccatacctaacaaagcggaaactgaccgatatccacaattaccatccgctttcacatcaacaacatcctcaatgaaaccatgcataaatggcgcaaattgatccaacatggggatcatccttgctgcctttggtggttcaaaagatgatgcactgcgtctgactgaggtgttgatgttttgaaccgaatgataagcatcaacatactcccaataagatggatcatgctttgt

SEQ ID NO: 240094 - DNA, 174 bp, Glycine max
atgcgaacaacttctacacctcaaggaaaaaatctcatagtatacaaccgccgatggacattacggggagggccatttgggtgcatccaaggagtaataaatattctccttttgaacaaaaactgctgaatgtaggacagttggctgacacaagcttaagaatgttaaaccaat

SEQ ID NO: 240095 - DNA, 120 bp, Glycine max
agaaaacacgccaccaaaccgggagggaaaaccaaaccagcccaaccacggccgggaatggaaaaaggcgctacatgacccaaaacaagccccaacggccgggcatcaacgcccgagcga

SEQ ID NO: 240096 - DNA, 247 bp, Glycine max
ctgcaacgcccaaacaacgtgaggaatcgatcatgaaaagatcgcaattaattaaaaccgagctccgtccaccaaagaaacttccctaacaaaaaatgtccctcccacctacccaggaggaggcaggatgcacaaaacatacgatatggaccaagaggcaacactcaatataacaaccaacacaaacgtcacttaaatgagcggggcaggcaaaagacaaaagaactccaagctcgcaagaaacccc

SEQ ID NO: 240097 - DNA, 260 bp, Glycine max
ttctagctcttgaccttgatagattgaccacttttatgcgaacgctttgacttgatcccatgtatactaaactaaacaaaatctagcgcgaatcaaaactccgacatctatcatgggtggcatggatgaatgcacgatgaaatgcgtatgacacacatgcaatgtatgaatacgggagcgcgggaaattgtatgcttcttaaatacaacatattggggtagcaaagtgcccgacttatgtatctaagaaggtgacacgga

SEQ ID NO: 240098 - DNA, 433 bp, Glycine max
tctcaggaggtgagcttattatgagaggggggatttatcttatctctagcttctcaaggaagctttctcaaagaagcttctcaaggaagttttctcaagaaagcttcgcaaggaagctacctagtctataaatagaagcatgtgtaacacttgctataactttgatgaatgaaagtcttgtgagacatacttcaaagctccgcttctctccctcttttattccttcaatttcgtgctccccccctctctctttctctccctctttctcttcctccattgaagcatccttccaagcttcttatccaaggctcatcttgtgggtgaagctccttcttccatggcttattccctagtggatggcacctcctctcacctcctctcctttgcttccgttgatctccatggggaaaataccattaaggacctattgagc

SEQ ID NO: 240099 - DNA, 276 bp, Glycine max
gcggcagcaacctgcggcaaaaaaaccttggtctattgtctttcgaaagggcctagccagtggcggccaaacaaaccctaagcgaccctggcaaaaaaacctagccaacatccgcagaaaaataaactcaacccaagccaggcgaaaaaaacctcgaccgatgccagctaaaaagtttctcgacataccttaacaaaataaaccctatctgaggccaaccgaaaaatagccttggttgatgtcagttgaaaaacacccacaggtggccaaacaacc

SEQ ID NO: 240100 - DNA, 419 bp, Glycine max
  unsure (1)..(419): unsure at all n locations
tttagggagttaggggctcgggaaagggtggntaggtatccttttnatgtatctaaaaacatatcagatggcctcaatttgtggttcaagctttaagtttcttaaattagcacaaacaatagttaaaacaaaattatcactgcaccaaaacagatttgacatgtcccgccaaagtattcaccaaatattctagttgaccctaaaaattatgggaccaattaaattgaacaaaggacatctgaaactaaattactgtaaaagatagatcctaattcgttataggttgctctcacgaaagtaattaaaacagaacagaaccacattaaaattcttaataatagtcctttcaacatgtttggcatatatatatatatatattaccgaaatatcctgtgtattcttaaacaatactgggggga

SEQ ID NO: 240101 - DNA, 413 bp, Glycine max
agcttcatgggaaaccagaggttgtattgtttgttggatggtgaacttaatgtgtgaaagtcacaatcatgaattggccaagtcattagttggacattcatatgctggtcgattgactaaggatgagaagacaactattgttgatatgacaaagtcaatggtgaaaccaagaaacaatctcctaacgttgaaggagcacgatgccaatagttgtacaacaatcaaacaaatatacaatacaagaagtgcatatcgttcttccataagagacaatgatactgaaatacaacatctaatgaagcttcttgaacgagatcagtatattcattggcatatattaaaggatgaagatgttgtatgtgatatcttctagtgtcatcctgatgcaatgaagttatgcaatgcatgtaatt

SEQ ID NO: 240102 - DNA, 391 bp, Glycine max
  unsure (1)..(391): unsure at all n locations
gcattcacatagtgactattcagatgacttgtttgatctatgaccaggacttctagatatattnttatgcttagttttggtgtaaaatcaacttgttattttatttatagtttgtagttgtctcttgtgcatcataagaagtttgaatgtgaatagttcttgaaaaacttggtcatgctcaatgtggaagcattactatgtactatgataacatctcaacgataaagctttcaaagaaagtcaaagcaaacaaattgatgttccattctatttccttcgtgatcttactagagaagaaacattggagttatttcattgcaactctcataatcaaatagcatatgtcacgacaaagctatttaagtttggaataactctttgcaaccctctt

SEQ ID NO: 240103 - DNA, 359 bp, Glycine max
  unsure (1)..(359): unsure at all n locations
ttttgacatccgattaaaaatatattgtcgtctggatttgcccaaagcttcaacattcaatttcgagcgcgttgaaatattacgggacctcatcagacatcccgattacaaagctttgccgctcgaatttgctcaaagcttcaacattcaacttcgagcgtctcgttatatcataggactcaattagacatcccagtaaaaaggtattgttgtntgaacttgcttagagcttcaacattcaatttcctagcgtcctcatatattacaggactcaattcgacatccgagtaaaacgttattgccgctcgaatttgctcaagcttcaacattaatttcgagcgcgccgaatattacgggac

SEQ ID NO: 240104 - DNA, 323 bp, Glycine max
  unsure (1)..(323): unsure at all n locations
ccaaagagtntaaatgaggacaatcaacatcacactcttattctttatttattgtaaccgcactcccacacctttattgaaaatataccaaaacatcagtgaagcttgcccaacctcatttgtaggaagacatacaaaactgaccaaaaatatttctctataaccgataagtaatatactaactaatttctttcaaacatatattgcagggatagccacgagaaaacctgataaaaaatagatcccttgcaagcatcccattataaaaaaccattagatttctaaggatataaactggaaccaacgacaatctttaacttaat

SEQ ID NO: 240105 - DNA, 417 bp, Glycine max
  unsure (1)..(417): unsure at all n locations
cgcatgcaatggagaatntccaatttccattctttcccttaatcattcttgtctagcacaagggaagagagaaaatggtgacttctctttgtgtgcgtgttacgtttgtctaagagaatgaatgagaaatggtgagatggggtgtggtggcggtgaaagagatgtgggtagggtagtggaaaacaattgtcaacttggtttaaggaaatgagacatgtgcctagctaggtgttaagcttaggagactttagggtttaggtgtcatgtagttagggtttaaggttctaggtacctcgagtttaatttacatagtgtaattttacattgtgattatagtacaatgcaattaattttataaacttgtataataaaatatatacttaattgatcaattaaaatttcatcttgcaagaatta

SEQ ID NO: 240106 - DNA, 431 bp, Glycine max
agcttcaaaccaaagcaactcaaaatctaggtatctaaaacccctcaatttcatggattttcaaggtttgagaagtgaaattgagaatggggtaaatttggaacaaactctcacctcccacaagtctataacatcaatctaaacttgctcaaactggttttgcacctaaaattccaccgaatccaaatttgacttctcaacatccaattttaccctaaaaatggctcttgccttcactttggtcatttgtttttctctctagcacagcccaagctttctcataagtcctaaatgacatttcaagctaggattaactcactttaacctccaaataccactaaatccagatttggccttccaactctcaaagactcactctttttccactcataacaccatattctcaccttctaaccctaggttaactctac

SEQ ID NO: 240107 - DNA, 355 bp, Glycine max
  unsure (1)..(355): unsure at all n locations
ctttcaagacgtgagcttagatatgagaggcgtgtgtgtatctaatctctatcttctcaaggcaagtttctcatagaagcttctcaaggaacttttctcaaaaaagcttctcaaggaagctacctaatctataaatagaaagatgtgtaacactcgtttgaacttcgatgaatgagaagtttgtgagacatacttcaaagtaccacttctatacctcttttattccttcaatttcgtgcctccccactctctctttctcgtcctctgtcttttcctacattgaagcatcctctccaagcttcttatccaaagctcatcttgtgggcaaagctnctcttccatggccttattccta

SEQ ID NO: 240108 - DNA, 419 bp, Glycine max
  unsure (1)..(419): unsure at all n locations
agcttntaaaatttaaattcacatttctattttatgttacttacaatttaaacttctagtaatcgattacatacctcgtgtaatcgcttacaggcttttaaattcaaattcaaaattttcaaattgtttcagaaactaatttagccactggtaatcaattacatccactggtaatcgattacatcctctggtaatcgattactagagaggaaatatcatatttttgaaaagataattgttctttaaaaaacttttgtaaaatatttcctttagccaaacctgtgcaacatcaattaaggaattctttctaagatcctaactaagtacatcgttcttcttgcatttctgaattcttgacttgaattgcgctcatctttggcatcatcaaaacttcatatcatatatgcttctacaaacta

SEQ ID NO: 240109 - DNA, 182 bp, Glycine max
ctcagcttaatagttgcatcaaaatgtgcggttggcattatttatttattgtcttgagaatgagaattgactctgaagtgcatgtggaatggagcattattgcatgtataaatatgtgttggatcctacatttggaaagttgcttgtagttggacaacgaaacgttaaaaagggtttggggg

SEQ ID NO: 240110 - DNA, 398 bp, Glycine max
  unsure (1)..(398): unsure at all n locations
cacgcaagctgatgccgcaaacacatacaagaggaccttctattcttatcagcacaanccaccacgacagaagaangacaacctacccaacccagacacaatcccggacgcaagaaaacaccccaatctaaggaaggacaagcaccgcaacaacaacaacagaagccggcgccatccatccaaaagggcgaaggccaagaagaccatacggtcctcttccaatgcgacaacaacaacaacaagagcagcaccaacagagacaacaacccactacggaggcccctcctcaacacttgattggaagaaatagtgagggaaatgacaacacacaacacgcagttcaacaggaaactagagccgtaatcgatagtcaacaaaccagaaagggcaaacggcca

SEQ ID NO: 240111 - DNA, 351 bp, Glycine max
  unsure (1)..(351): unsure at all n locations
tgccctcacctcctgcccctcaagagaatttatnttatcctcggcgttccaacagctccccctgatgtaagccaagctcaagaccaagctcaggcgctcaaaagtgaggctatcaaagacaacccctctagctctatataatgtcgtgagaagagcaaggaacccaagtctaaaagaattagactgggctatagaggtcatctggccagagatcaaagcccctatggtcatatccaagtgagagactaggccaaagatcaacctagctctatccactgacaagtcagaagagtatgacgtgggggcccaattggagtatgagaagacacctcacacctgagctagggtaga

SEQ ID NO: 240112 - DNA, 281 bp, Glycine max
acgaagcaccaacaagaaccaagccgaggcgtattgcgcacgcaaacaaaggggcacaacacaccaaaagagaatgacgacgtggcgcaacctccccatcggcgggagggcgaagcgcgacccgcgggacgcccgccccacaaaaggaacacgcacggagtcaccaccaacgtttatgcgacgaaaacagcggaaaaaccggaaaagacgcgatccacgaactctgaagtgaaaggagcgggagatgcgatcacgcatggggaaaggagtaacacccaaca

SEQ ID NO: 240113 - DNA, 432 bp, Glycine max
  unsure (1)..(432): unsure at all n locations
agactttatagaaggtttgttcctaatttctttacaattgcatcacctctcaatgagctggtgaagaagaatgtggcatttacctggggtaaaaaacaagagcaaacctttgctttgctcaaagaaaagcttactaaggcacctgttctagctcttcctgatttttctaaaacttttgagctagaatgtgatgcctttggagtaagagttggagttgtattattacaaggtgggcaccctattgcttattttagtgaaaaacttcatagtgccaccctcaactacctcacctatgataaagagctttatgccttaataagagccctccaaacttgngaacattaccttgtttccaaggaatttgtcattcatagtgatcatcaatcacttaagtacattagaggacaaagcaagttaaacaaaaggcatgca

SEQ ID NO: 240114 - DNA, 424 bp, Glycine max
  unsure (1)..(424): unsure at all n locations
gccgagtagtctactcgaacatggaattattcggatctaacngaggcaagacggaaaactttatcttctactataaagatagagatatttccaaatatcgaaagttattgaatagcagaggaaagacaagataaaatcatatctttccttatttatattatcttacaagggagattaagatcttataatccaatttcacctccataaaaagggtcatcaaggttccggtaagccaacttttgatccatcctatattatgataaatgttataactccacaccgctaacttaagcattggagtgtcttcacaggtatgtcaacttttaatccaacctatattctgctagtcaaacatagaatagaaatacatattaaaggacacatatgtattacataaatttagagacacanaatgcacaaatca

SEQ ID NO: 240115 - DNA, 142 bp, Glycine max
actttgagataatatgttcttatttagtcatacaaaagaagagtttctttaaagggtaaattactcatttgatctctataggttcaagattcttacctttttagtctctatagatcgaaaggggtttttttaggccctatag

SEQ ID NO: 240116 - DNA, 276 bp, Glycine max
gacatagccactcgtataccatttgctacatctggtattctagcttcaaatgaatcttttggggagattcctgtgagtcttgcaaactataaatttcttaatacccttaaactccgtcagaatcgactcactggtcaaattcctccataatttggtgttctctcacgaatcaagacattttatgtatccgacaatcttttgatgaggccagttgcaatctttagcgcttgagattcacaaaattatgccaataaccaacgcctatgtggaggaaaa

SEQ ID NO: 240117 - DNA, 249 bp, Glycine max
tccatgaaaacctttctagaaagctgcatagaagccatagaaagctatgaaaataatcccaataccatttcctaagcactgaatcatttgttcgtgctgacttatattagaacatgaactctttccttccctggtcccaaacagttaaagtctttcatggaaagtggtattcaaaccatttattaacttaatgaaatacaaacttactatattttaatgacacccgtataaagccaaatctattgcccc

SEQ ID NO: 240118 - DNA, 421 bp, Glycine max
agctttaggagaaaccattaaaacttatgtttttctaaacaaaaatcaattgagggagccccgccaagtgtccccatcgaaattgaaaaacctttattcaaaccttccaagggtagtgagaaggctaaacggaaaattagggaacttataaaaactaaatccttaactgaaggcgtaggtgacaatcatagtgaattactaaacaagattggtagtttacttaaggtcattccagatactccccaagcctcggaaaatacttctaaaatactaacaaaaagtacctccaaattaattaatgttattaatgaagatagggaccacaactcacataacacaactgagataggatcacgctcaaaaaagagtataaatccacataattccaaagactggaaaacacccttcaaattatattatc

SEQ ID NO: 240119 - DNA, 388 bp, Glycine max
  unsure (1)..(388): unsure at all n locations
agcacagcaacacagaatccatgtgtccaacaccctttcattcaatggctnttctaaggttgaaaggcgaaatttagaatgaggtgaacatgaggcaaactctcacctcacaccagaccataacggcaatctaaacctgcccaaactggagttatacccaaaattccaccaaaacaaaatttgactcttcaacacccaaatttgccctacaaaaggctcctggctcaccttggacaatagtttttatctctaactcagactaacctttctcaccaagcctaaatgacatttcaagctaataataactcactttaacctccatttaccccacaaatcaaacatagccctcccactctcaaagactcaactcttttccacacataacaac

SEQ ID NO: 240120 - DNA, 348 bp, Glycine max
  unsure (1)..(348): unsure at all n locations
catggatcaatccttggaaagaacgcaattgacaaagtggtatggacttgcttcagtgcaaacatgaaaaatcaagccaatttacccctaacattatgtgatcgtccaaattnaaaatcaagataaatcatatgcgatctgatgagcatcctctttattatggtactagcggagggaaacatgattgaaaattaaccttaaacaaacaccgcctcataaaccttcgggttcttaataacgcggataaactacctatatgacaatcactatgtaaaacacaccccatataaaaactctaatatataaaatttataccccactatgaaaacgaagttttttatgggctct

SEQ ID NO: 240121 - DNA, 438 bp, Glycine max
tgctaacccacggaagctcctaatatctctcacactctttgttgtgggccattcttggatggctttgattgtctctgggaccacttggaccccatttctaccaactacaaaatctaaaaaaactatattatctacacaaaaggtacacttctctatatttgcattgagggtgtggttcctaaggactgaaagaacttgcctgagatgtcctaagtgatcatataggctcctactatacactaaaatatcatgaaaataaacaactacaaatctacctatgaaatcccttaagacatgatgcataagcctcataaaggtgcttggtgcatttgcgagcccaaaaggcatcactaaccattcatacaaaccacacttggacttgaaagcggttttgcactcatcacccttatgtatcctgatttggtgaaaccactttta

SEQ ID NO: 240122 - DNA, 413 bp, Glycine max
agcttcttatccaaggctcatcttggtggttattctccttcttccatggcttattccttaatggatggcgcctcctctcacctcttttcctttggcttccgctgcatctccatggtgtaaaattaccattgaaggacctcattgaagctcaaagatccagcctccatagaagctccacaagcaagcttccatcaccacccttatgagaaagcatgagattgactcatcgagagggccggtcatcccaaattcaaaagattagacattagatgtaggaaatctatgcaggtaacatgatttttatggatccagatgcatgcaacctttgtcatgcaatttggtaaatgcgaacttcatacgaaacaatgcaatgtaatggaaagttgtacactgctcatgacattccttcccta

SEQ ID NO: 240123 - DNA, 431 bp, Glycine max
  unsure (1)..(431): unsure at all n locations
tgtcattgaacacatcaatagccttgcatcattttccatcttttctcaccattttctctacaaaaaccaaaacttggaccttcattcttctccatttgcacgagacactcaaggagggagaggcctccattttcatattcttccaagctccatctttgtgttttgagacttctctcaaaaccttggtaagaagaccttaaacctctcttttgntcttatttctttctcatttctgtgcaaaattcttacttgaggttccaaaatttgtttttcatcctttgaagcttgagacttcaagatctgagcttttctttcaggaagcttcactcaaggaaaggggagtttttctacttcttaaaccctaaccttgctgtctttgtaagctaggcttcattacatgttgtgatgttaaaaattctatttgctgcatg

SEQ ID NO: 240124 - DNA, 407 bp, Glycine max
agcttagactaagttcagcctaccatccttttattgttgttatactgaacggaccattcaatccctggaggaccttttgaggtcatgtgtcttaaaacagaaggggagagctttctttcattgatagaggtcactctacaacaactgttttcactctaccattggcatggctccctatgaagctttgtatggtacaaggcgtaagacacctttatgtcggctaaagccctgagaagacctcaccttacgacttgaagtggcacaacaaaccaccgaaatggtgcaagtgacccaagaaaggatgaggaccgttcacagtacgtacaaaagttatcatgatcagaggaggaaaaactcggaattctaggttggtgatcatgtattttgagagaactttgggactaggg

SEQ ID NO: 240125 - DNA, 299 bp, Glycine max
gacacgatacaacaccttgttaagcaacggcgctcgatcccatcccatggtttgctagaatgaaaaattctatttgatcaatacctcgacaccctatcacggaggaaatatgacgaatgcatcaacgaatgggtatgctatgcccgacacaaatgcattttacaaacacgagagcccaaacgaacacctctctttatttgcaacgcgttaagtatcaagggtcattaccacggtgccccacgcacgcatctaataaggggatgcacacacctcgaattccccggcaaaacgacaaaaca

SEQ ID NO: 240126 - DNA, 383 bp, Glycine max
  unsure (1)..(383): unsure at all n locations
tctttccagaccaaaacccaattattaacatttatgccatnaannagnngaccattacctgaccagaggatattatctaaaccatccctattctttctaggccttagcttaaaaattaagagcttaaacatacttaggtatcctatgggaacatctcattttctaaaatctcaatagtctaaaaacactatccaatcacacaataaagcaacaatattgtctattgcgcacacatgaaaaattaggatgttatagatgtgggggataaccagcgtgttacattcgttccctctattgtcatgtctttcgaaacaccagatgtagttaagtcattttattggcaatatgccacaaaaaaagggctccgcataaagacatgacac

SEQ ID NO: 240127 - DNA, 419 bp, Glycine max
agcttgaaccaaaaccgatgagagtgtgacctcactctgtgagtgaacgactagctgggagtaataatttttgcatgaatctctgaattttagaatgatatgtgtaaatgagaacatgatgaaggccatgatttgtgtatacacaagccttttgaccaaacagcttaccttgcaagaaaactgtatcctttgctccttttataagctaaatgattttgtcataaattgaaccctgaacttaaataattatttcttgataccttgcttagattctaggagagcatatggttcaaggcataatttaccccaaatttgggggagtaaagtcagttataatgaaaagaaaaagggtaagcatcaccatacacaacaaatagagtgtgtgtcaaaaaaagagaaaagataagaaaaaaattgtg

SEQ ID NO: 240128 - DNA, 423 bp, Glycine max
  unsure (1)..(423): unsure at all n locations
tcccgtatccgtacttggaaggatctgattaccgcctttctttgcagtatcagnacaattctgatatggctcctgaccgtactcaactgcagaatatgttcaagaaagagggtgaaacctttaaagaatatgcgcagcgatggagggatttggcggcacaagtagctcctcccatggttgagagagagatgatcaccatgatggtagacactctgccagtgttctactatgagaagctagtaggttacatgccgtccagctttgcggatctagtgtttgccggggaaagaatcgaggtaggattgaaaagaggaaagtttgattacgtttcctccacaaatgcgaatgccaaaagaatcggtgaacaggggcaaaaaagaatganggagatgccatgccgtctcttaacacccgcgtgggtaa

SEQ ID NO: 240129 - DNA, 423 bp, Glycine max
  unsure (1)..(423): unsure at all n locations
agctngaatccttatataagctaaagtgtttatttttggggagagaaaaatattttttccctcatcccttgagctaggttttggggttgagttaggtctctcacattatacgttagagccttagcgcctttctttggctttcgcacataggccctagcgccattcagcccctttctttttcttctccatcatcatgtctcactcaaactctatctttcacactgcttttgttgtctccaacatcaataatcatatcccaatcattcttgagatgaaaaatatccaatacgtgacatggactgaacttttcaaaccctgatgagcctttatgttcactgtctctctcaaatctcttctcttaccttatctctctcagatcactttccttaccttaccttccctcaatctcttatttcttcttct

SEQ ID NO: 240130 - DNA, 186 bp, Glycine max
taatacgcgcccaaactaccagatagtggaagtcacagcctccgcgacggttcaacaaacggcctttactatggacctaacgaaaacggggaatgcccaaacttccaaacactgctcacaacccccctgaaagctaaggagagcaaggcacgcgggcaaccttgcgagcccacacgcccatcaaaa

SEQ ID NO: 240131 - DNA, 416 bp, Glycine max
  unsure (1)..(416): unsure at all n locations
agcttaaaccatatgctaacgactatttatttctgtaaatcnagccacacacaaacgactattgggataaatatgaacatgaaacctggctttacaatcacacctaatttcctttcttggttcatggttttgtgtttaagttgctagccccctctcttctctatgaccttttctagaacaaacaaaagttagttgcattctttcaccgctaccacttttaagcactttgctttgcgtacaacaaaaccattgtgtaactgtaagtctactctagatcaacaattgtaactataagtcaactctagatcaacaaatccataccttccaaccttattgctgcttatatttntcatatcaaaggtgactatatccagcagccatttattataattgtgtcacctttaggagctgcaaca

SEQ ID NO: 240132 - DNA, 327 bp, Glycine max
caagagatcctggcttaacgcgcggccaatcaataaaaaattttactaagttacctgggcttagcgaatcagcctcgcttagccacaggtactgtaccaggcggaagagtgttcatcctcaagatataaactcgcttaacgtggtaggcgcgcttagcgagttcttcagtaaaactcctatatttaacgaatattgatgaactcgcttagcgcggtaagcgcgcttagcaaattcatttcattttccagaaaaaacacaaaaacaggggcacattttcttcccatatttgggcatttacctagtggattaaacatgcacaaccctga

SEQ ID NO: 240133 - DNA, 398 bp, Glycine max
  unsure (1)..(398): unsure at all n locations
cagctttcgatcattgggacagagctctattcttttcccancgngcacacaatcttcgacttcggcttctgttccgccaccaccctcgtcgccatctcttttctcctgtgtgtctcgcaaacgatgaacaaaagtgaaaaccaaaccacacaacatcaacacacactctttgtttttcaacctaccaatacgattccatacacagaaagaagaagaaaagtggagaaagacaaaagcttgagatgcgactcttgtgttgttatgctctgcctctgcgatgccattcactgacctattcaccctttttttaaataataataaaaaaaaattggtccaaaaaacttttaatctttctgcaatcatcctattattttttggaaaatttaaactatttatac

SEQ ID NO: 240134 - DNA, 357 bp, Glycine max
ggtatgagaaagagctaactccattatttggtgctgcataacataatgaactcaaaaatcactacgggccaatggatcacaagaattcttaggggaccagataaagaaatgatgaataaaacccaactgcgtgccgggcttataattgtttgaggatattaaaagtgaggttcgcactgtttctcctttagtgacaaaaacatgataatcttgttggccatgctttcgttgttctatgaagagtaaagcaatataatggtcattgggacccccatcttagataatctaatgaggatgtcactccatattactttgtgaaccccccacaattttgtccttctaaatcaaatgggttta

SEQ ID NO: 240135 - DNA, 395 bp, Glycine max
  unsure (1)..(395): unsure at all n locations
agctctttggagtagaaacacgggtttatcttattttatttcaaaaaaagaaatcatatctagtcaagggctgagagaccatacaagtttcctaacgatttctaattatgtgggccattaagtctatcatatgctgacaatagccgagaagcccatgaatctcttcgggggcggagtaggtgtctgccatcgccttggccttggctaataatcggggaagttcttgactcccgttcaaggtaagagcaaaccgatccatccacatggttgcctcttggtgtaaagagtcgatcacccttcctctagcctttttntccgcatatacttgggcatactcatccgcgattctatgctcgggggccgtggctagacccaactcttcttggtacttggcg

SEQ ID NO: 240136 - DNA, 432 bp, Glycine max
tgtctcacttaatttagtagcataaacattgagattccactctcttgtattttcagtacaccacactatttggtgaagggtgattataatattcatattagtacttcaattttcattcgacaaaaataatactaacaagtagaagtctaatgagtagcattattttattgcagtctaatgagtaacattaatgtcatgttaatatatgaaattcatatagttttttgtgtagtgaaacttacatatgaagccagttcacacagatatatattataaatgcacgagaggtgtaaaaaaagaaaaaaatgtgataaattgaataatatgataaaaaatacatacataaattattagataatcttattaattatataatgtaatataaaattttgaacatatgcatactttcgttcaggttcatgtctcccatag

SEQ ID NO: 240137 - DNA, 255 bp, Glycine max
caaactgcttgaattgtgtgccataattagtatcgccaacatcttaatctaccaaaatgtgaccaacaaccctcaatatacatctctataccaacttggagtatagcttggcatcttaatatctattaaagcgcttgaaacttaacctgggcctgtagcaaatgcataaaactcgcatttcttcccatcttagatgaatgcggggcctttaattcatcatataaggcatcttatcagtcctggaagcttactctt

SEQ ID NO: 240138 - DNA, 311 bp, Glycine max
ttgctgcatattttgtaatgtttgtggtaaaatgtaaatagctatacatgcggacatagataacaccttccctttgattgtggtggctcagtaatatgctatccgctttctgctaatggtaagagtgattttaactgtcatcatggaaaatataaatcaagattccttaccttgtggacttacgcttctgcagctgtcttcacgcagaaaaaaattatgagctcatgttcacaagacaaaaaatgtcattattctcaagagatgtataagactaatagacaccaccacaacattgaaatttttaagatttc

SEQ ID NO: 240139 - DNA, 414 bp, Glycine max
agcttacaggttggggtttttttttttctattgaaatgataatataatcaaatacattgactatataatcgattacatgcagttctaactattttttctataaataaccatcttgtgttctcacttttaaaatagaagaaaaatttcttagaataagtttgtgaatcaaactttctagacttagtttttataagctgtcatggtagaagtgagttgttaactctttgtgaattcaagaagagattcatccattcaagcaaaggttcttgcaagtgaatgatcaggttgtgtctctccttaactttgtttttcgtgtgtgttacatgttgttagcatatgcatgagttctcaaggcatgctagaattggattttctagttcgggctaagtgtagatgtctcttacgctctaattc

SEQ ID NO: 240140 - DNA, 431 bp, Glycine max
  unsure (1)..(431): unsure at all n locations
agctttacaccaagcttgagacaacccaatattctttgttcttaccaagtcattgctagctntaatcaaataaattttttttgagatttgtttgttgagtgactaactcttaatcatcttacaaacgaatatgaaatctaagttcatagtcttttctctcaagatatgcaaggtgttttgagagtgtttcaaactttataagaatatataaaagaatttgaatgataacgaacaaagaatcatgtcccagttcttcaaagcttatggtatttataagctttctttaacaatgttcgttgtctctaaatggacatatatttattcacatgcgtatgaattttatagccattggacgtttaatatttgcattcaatgcagatacttcttcatgttagaaaattactcttgttaactttcatgtagaacacttc

SEQ ID NO: 240141 - DNA, 428 bp, Glycine max
  unsure (1)..(428): unsure at all n locations
gctagctaanngagatctgcacagactatttatgttttcttggaaagaacacccatcttcatctctctttctctctattcatgcctaaaaatcctaacactttctcctccaccacccatgaccaccgatggccaccacaaaccattgctgcttgccatcggaccaccacaagagaggaacagtttaatcacagcaaaatctcaaaacccacgtcaaggattctatagagaagcaaagctcttagccctcttttcgcggattctttgagctaaccataattcctctgtcttttcctaggtgggttgagcttctctttgtatctcttgcgatataggtgtcctaataagatgttttcacacttccttctgaaaacccttgacaatgagacattgtaaaagttacctttatataaaattgatgttgcttcc

SEQ ID NO: 240142 - DNA, 357 bp, Glycine max
tgccattccttggattatagggttgaaccaagctcatgcttttacaaaaaggctcatcaagtcaagttgaaatatggaagtaaccgtcttgcaaaattggggcaaaagatgaatcgagtcacatcattgcttcgtctactgtcaaacacatttaggattattgatgtccttgttacttccagtttcaccttgacaaagatgtcatggaccatgttgaaaatctaaattgatctaaccccatatcttgcgtaaaaattgtcaatactttaactgtacatcattcgcatgcattcatgcttttcattagttgcattgctcggtgcattctttccttgaaaaactaaataaaatgagctt

SEQ ID NO: 240143 - DNA, 439 bp, Glycine max
  unsure (1)..(439): unsure at all n locations
ttaagcaccgcagctgcgcttctactgatattggggggtctccttcagatatgacattctctactgcttttgcctatttggagggagaatgtctgaataatgttgtttgggctctacaacggtttcaaggtcttttcctcagatgtgatgcactccctggagttattgttaccaacagagatctaacattgatgaatgcagtgaaaactatattccctgaggctaccaatttgttgtgtcagtttcacattgataagaatgtgaagacaaagtgaaaaaccctagttggtcaaaaaaatgcacgggattattgcatgaggagtttggtggattgtccttttgagcaacagttcgatgagtgccttaagaagtttgaaattgcttgctcaccatgaccaatgtttngtgactatgtcaaccaaacatggctgattcctca

SEQ ID NO: 240144 - DNA, 447 bp, Glycine max
  unsure (1)..(447): unsure at all n locations
cgcttctacaacagaggataaatgaattacacaccatctattatttcttcagtaccctctnttatttccatatgatgaggatggatataagcacggtgtgctccaccgaatcacatcaatgaatcaatctcaaaaaagggtgtgacttactattagagaatggttttgctttagactctaatttagacccatggaagcgcaaacgattttacattcaaggagactattccaacaatttattgttgatggctataccacggttgaatcagagagactttcattcatcagaagaaaccaatcaaaattaagggtcgaaaaatattgtgatttgcgtgaaacatctaatcatggtgctactcaatggtcaaacagaggcaagcaagtcattttaccttctacattatttggtagtcataggtacatggatcggttggacattgatggtat

SEQ ID NO: 240145 - DNA, 224 bp, Glycine max
aaaaaccttaaccaacaagggcggcaccatccacccaccaaaacttcggaaaagaaggagcatctccccatggcctcgcaaaacaagacacccccgacacccagaggcacaggcgcatctgacaaccacaggagccacgactaagccctattacaaggaagcaggacggacaaagggcacaacaaaagggagaaaagcgcaaggaaagggcgacagagcgcaaa

SEQ ID NO: 240146 - DNA, 190 bp, Glycine max
aacggcgagagaaatacagaatttttaatcaacttctaacgcccacatgataacgaaggaaggaacgatccctgaataatacgctagtcatttctctcctgatcaaacacatagtaagaattaatatgcatacatcattatgcatatgggaggtatcctaaaacttgttagtatgaaacacaatgtactc

SEQ ID NO: 240147 - DNA, 390 bp, Glycine max
tgagaggcatccacataaagttctccacagaaaatgctctatcttgggaggtataccaagattccatatagtggaccagcttccttgaactttgagagcttctttgttcaccatagtctccattaaaatatgataatctgatcaaaccgagtatggccccacggttctaacttttaaaatcaaaatatcacactcatgaagattgaagagtggcgtcctctttatttcttgggaaccttctttattgaaaaattgatcagtaacctcaatgtgtcaactattgctttcaacatcaataagccaatgtactggcaattgtcaagaccataaagaggtaaggacgacacacaatccttatctctattcttgaagcctggttgtgacccaacg

SEQ ID NO: 240148 - DNA, 259 bp, Glycine max
ttaccgtttattgcattggcgcctcctcattcttctccatgaatctcctcacatgtcttgttctataagttgtttacatgattcttcaaagttttctccaattaaacttgctatacaaactaaatggattttctatggctcaaaattattgatcttgttcttgaaccataaattgtgtacagcctacgcacctatgagctcttccttgttacttcattgcgggtgaaacctaaacccttagaatttttccgacatatta

SEQ ID NO: 240149 - DNA, 395 bp, Glycine max
gcctgaaaattgaaacaccaacttttctttttctttccagactacgcactctgtggaaggcccatatcattttcgggcccatactggaaacccggcttcgtcttccaggtaacacatccaaccctaagagagaaagtaccaggaataccccgagagagaaagagagaactttccaggatggtactgactcgatactaagtaacatgagattccacaagtgtgtccataagccaaatgtgattcggcatctgaaaataacggctacttttttgccattcatgcaaagacagaacacatgtctgtcgttttcgcatgaatcattcgtcattgagatgaaaactcaatagaacaattaatatttgccacaaaagcattatctttcatatgcataaaat

SEQ ID NO: 240150 - DNA, 339 bp, Glycine max
  unsure (1)..(339): unsure at all n locations
gcggaaactttctcgctcaatattntctcatattccgacgatgttattcaaccatttactacttacacatgtgtaaagtgattttaggaagatgggataacaaatttttgtatttattgtcgggcgagaaaccacatctgaggtttactttttccatactatattaggaaaatattaatcgttagtttgttaatttgtcctataatatcggattgtattcacccatgttatttttctatctttctccttctgcacaaatcaaacgtgtggaagcaccaaaggaagatgaaactaaccttgctttgtggaagtaactcttggtctcacaggttgaacaaa

SEQ ID NO: 240151 - DNA, 401 bp, Glycine max
  unsure (1)..(401): unsure at all n locations
agcntttaagatgtgctcagtngttaaacttttttaatattgggagaagttcaggctcacgtaaccacaagctgcaataatatgtgaacatggatagtgaagcgcaaaataccttccgcattgacaataatgaccggtcaagttaactgcccacttttgtccgccacgctgtgtaataggattgaaggtctcctttacttcaaaccttgtggagtggatgtcatacacgcgaacgatgtgcgaacaagcttgttcttgattttttctaagttctttaacaagctttgaacaatatacttggccttcatttaactgtctttgggcttggcggccacgctcaacaaagtactttcgacacctactgtacgttgatttgaccaaagctgttatgggaatgttgc

SEQ ID NO: 240152 - DNA, 370 bp, Glycine max
  unsure (1)..(370): unsure at all n locations
atataaaaccaattggccggaaatgggtttattttatttgattggagcacattggaaggtggaaacctacaaagcttatcttggtgcctacggatattgtcaaaaggaaggcataaattatgacaaaaattttctcccatggcaatgatcaaatcaattcagattctttttgttgtaccaccatactatgatcatgaaatatgaaatgaatgtggaaaatgacttcccttaacgaagagctaaaagaagatgtgtatatgacacaacctgaaggactcacattcttgtctgatcataataaagtctacaaggtccaatgattcatttatggattgaaacaagtgtgtataagtngaaacactcactttaa

SEQ ID NO: 240153 - DNA, 423 bp, Glycine max
agcttgtaagataatgggttacccatcactttttgtactaggcggcggtcgggcgatggtgcacaacaagtttttccacatccacaaatcacgcataaacccaccatcccctgttgcccaccttcaactgagctcacgtactcccacgtagcccatatcctcgtttctctcaacaccgggtccccatcaatcctcccaagcttccccaacatccaggtaatacaacattcaaacagcacaaactatcacagccaagaaaacagtgcaaaggcataaaactctgcccaaaacaccaaccaaaatcacagctttttctcacttaaagaccccagtaacatttccttcgttccaatatgttaaccgttggatcgactcgaaaattttactggacgtctctagtacataaatatacattttgaccgt

SEQ ID NO: 240154 - DNA, 438 bp, Glycine max
  unsure (1)..(438): unsure at all n locations
tgctcgctaagcctgtgctgttcagtagagtagtttctcttagcgcaaatncttatctgtttgaaaatttgtggaatcgggcttatcaagtctgctcactaagccaattctgtagaaaaaaattggatacgtgttcaatggctaagcgcgtagctatcatgcttagctcttgagtagttttctaagacgcgctaagtgagtcacttgcgctaagcgctcggtctgatttttagttttattttctactttttattttgaataaattcctgtctaatcttgtgtttttattcttttgtatagcagatggcttcccataagagaaaagccataactttagtgtcgcagggcgggtatgatagatcaagatttatatcatagaaagcctgagaccgctactcagataatgtgcttgccaggaacattctgtcagaaagaaat

SEQ ID NO: 240155 - DNA, 338 bp, Glycine max
  unsure (1)..(338): unsure at all n locations
gcacaaagaagaagaagaagcgcaaagatatttatttatattnaagccccgctttcattgacccttcatgtctggtcaagaacgccattcacaaaacgtataactcttagaaaaacttaaaacccatttgaaaaagtcaaaacctttttgaagagttacatccttagatttctcagaaacaaacactcggaatcgattaccaacaaagtgcaatcgactacacaaagcttttgagcgaaaggatgcgactcttcacatttaaatttgaatttcaacgttcaaggacactgcgaatcgattaccaaaacattgtaatccactacagccttttgaaaata

SEQ ID NO: 240156 - DNA, 416 bp, Glycine max
  unsure (1)..(416): unsure at all n locations
agcttctcaaggaagttttctcaaagaagtttcttaaggaagntttctcaagaaagcttctcaaggaagctacctagtctataaatagaagcatgtgtaacacttgttgtaactttgatagccaccgtgtctggagcgccgagcaccagcagcgcttcgaggccatcaaaggatggttgttccacagagagaggcacgtccagctcagggaggatgagtatacagattttcaggaggagatagctcgcagacattggacgtcgctggtgactcccatggctaagtttgaccctgaggtagtcctggagttttatgctaatgcttggcccatagaggagggagtgcgagacatgcattcattggtgaggggtcagtggattcttttgacgcagatgccctcatccagttcttgggtg

SEQ ID NO: 240157 - DNA, 430 bp, Glycine max
  unsure (1)..(430): unsure at all n locations
acactatacacaactcaagcttctcccccaattttctatatatagggggagtttgtgtttttatttagggttcagccccttaggcacttctctctctttcgaatttgcttagaaaaattgtttccgtgaagaaaatccaagtcgaggcgcttccgtaacgttttcgtaacgtttccgtgagtgatttcgtgaaggttttcgaccgttcttcgacgttcttcattcgttcttcatcgctcttcagtcttcaacgggtaagtacctcaaaccaagctttttaattcattctatgtacccgtggtggtccacatttggtttcatgtatttctattcttcgtttcatttactttntatacccccttttgacgtgcttaagccatttatttaagtcatttcttgcttaacctaaaaatataataaatatccaccg

SEQ ID NO: 240158 - DNA, 430 bp, Glycine max
  unsure (1)..(430): unsure at all n locations
agcttcttcttctccatcgcgctcgagactctttatttcttttctccttacctagggacggnncgtgactctttcttctctttaacatgttctatcgaatacataggtctgtttggggagctcgtgctcactgcatgggctctttgtttgtttctactgcaaggaccttacctaggtacgtttcactttgcagtccatttaaggtgctcagtcgtgctcatagggtctgattttgattgaggtaagtcatgctcactttgccaagtgataatgcatttgaggctttgacgccgcaagctgctttatataaaaatgtgcaaataagggttctatcccgaaagcaataattgaatttgtttgaagaagagcaggtaattgcattaaaacccttgctcagtgtatattgcctaaatcttttcctttgcagcat

SEQ ID NO: 240159 - DNA, 445 bp, Glycine max
  unsure (1)..(445): unsure at all n locations
ggaccttaagtcacgcagctgcgctggaggggctaacaaaaggattttttatatttttggatcacttcgttttaggcatatcccagatcagttaagaaggaagctagatgataaaggtgaacaaatgatcttactcggatatcattcaactagaggctataagctgttcgattcaaagagtaagcagataataatcagtagggatgtggtatttgatgaatctataagctgggactgggagcagaatactgaagtgaagggaccttcaataatgataaggtcagaagaggaagaaacaagtgaagggaatggtaaaaccactcaaagagaagtgagaccccagagaaatgcacccaaaccgactagattncaaggttttgagatgttgtctgatgcttatttccggagtaatgactggagtgaatggcaacgcaacggtcaactc

SEQ ID NO: 240160 - DNA, 291 bp, Glycine max
aagacacgcttaatctgtaaagaatggtcgcgggtgggaactacaaccaaagcacggaggcggtcaccggtgtcggtggaccagttttgaaccatgggaaaagcataagccacagctctgcccctttcgatgggtcattttatgcaaaggtgtctgttaaagtcacccggtccaaccgtttcttaccagagtgtgacctgaaccgggaacaactatgagattaccatgttcttctctagtaccgactggtacctatatgtgaagtggaattactcgatttgagatgagata

SEQ ID NO: 240161 - DNA, 290 bp, Glycine max
  unsure (1)..(290): unsure at all n locations
cgcagcagcagcngaccaaagacgaggagatatcttctttggccgagacacgaacccaacccaaagcccgggcgcaaaagagagcaaccggaaggcacactgaaagcggaaggattcgcgcccacaacagacacaagagcgagccgggtacacgacagaacacaccaaaaagagggctatacaacgaccaacgaaaagctaacccgacaagcggccctggaagaacggaatcctccccgagaccaggcacgaacagaccacaaaacgggaaagaggcaaacacaggaaaa

SEQ ID NO: 240162 - DNA, 437 bp, Glycine max
  unsure (1)..(437): unsure at all n locations
tgccattatgaacgggtcttcattgtaaccacctgaatgatgttttctaacgctaagcccatttgggcttcgcataccccagtatctgcattaacccaactacaattgaacacaagaactctaaattgaccgtaatcaagcacccaatatcttcaatgactccatagtagggcattgaggcgtgaatcggattgctatcagaaacactactaaaatgatttgactgagcgtcaacactaacccctactattagaaaatacacttccaacattggttatttacgacattctacatcagtgttaaaactgatgttgaaagtattattgttaacatcggttttgaaaaaaatcgacgctatatataaataactacagcaaaataagcgtatgcatgatgaacatttacatcacntctattgaaaaaccgatgtaatatat

SEQ ID NO: 240163 - DNA, 434 bp, Glycine max
agcttggacttgatcatggattagtaggctgtttccttattctaaaattcactaatcataattagtgaaattttggctccataatttggctccacaaattcaatttcaaattcaagtgaaatttgaatagaaattcaaatttccctccaattttgtgtgacacttaggctataaataaaggctatgtgtctgcatttttttcaactttgatcatttgagaattacactttaaagttcagacctcatttgaggcacaaaatttcgtgccccttctctccctctccctccactcatcttctcctaccttcaagctattatccatgtaatggcatctccaatcatctctcttccttcttcattccgctgccattaaacttcaagaagcaagggactccattgatgaagaagatccaagggctacaagctccccatgg

SEQ ID NO: 240164 - DNA, 392 bp, Glycine max
tgtgctagagagaaaaacacatgaccaaagtgaaccttgatctatttctagggcaaaattgggtgttgaggagtctaattttgattcggtggaaatttacgtgtaaatctagtttgagcaagcttagattgatgttatagacttgtgtgaggtgagagtttgctccaaatttacctcattctcaatttcccttttcaaaccttgaaaatccattaaaatgaggggttttggacacctagattttgtgttgctgtggtttgaagcttgactttggtttacacatgattgatacatgatttgggacttgtaggatttgatttgggcaatattggatgaggggaagtgtggtttccaaatatgctctttgtgcagatattgctgtataattgtgc

SEQ ID NO: 240165 - DNA, 422 bp, Glycine max
agcttaagctccttcaactgtacaagtgttcttaatatttgaagagtatccttgtggaacattcacccgacgaagacactgacataaacttatcttctccttcttggacaaagtatggcaggctgggggcaagtaaattttcttcccatcagaccttggatgcaactgtgatcgtatacccatatcagctagatcttgacgggtattcaagccatccttcgtcttgccttgaatgttaaggagcgtcccaatcacactgtcacaaacatttttctccacatgcataacatcaatacaatgtctaacatcaagatgacaccagttcagaagatcaaagaaaatggacctcttcttccatatgcaactctgacttttatccttcttttgggtcttcccaaatacattattcaggtgttgaaccc

SEQ ID NO: 240166 - DNA, 407 bp, Glycine max
  unsure (1)..(407): unsure at all n locations
actcaacctctacagatttacagntactagcattaagaaggatgtttattttttttatatnatggccgaatctgttgaaatcgtgcatgcaatagctgcttatgtggatgttttagccaatttttaaaatttaaaattgtctgttgcttaggatctattttgtaggagttctgattttgttttttatcagactagaaactgttttagtcatgcctagggattttttgttttgtatatttaactctaaccaagagcaaatgaataacaactatgtatccttcataaatatatgtgctcttctctgcttttgatctaatattcaacaaaatggtatcagagtcatcatcttgagggatctgtgagttgagagaaaccataatggaagcagacacaacacacatattacc

SEQ ID NO: 240167 - DNA, 425 bp, Glycine max
  unsure (1)..(425): unsure at all n locations
agctntgtagcaggcactttgagcttctgttgntcctccttcctcgnctatcttctacaactagcttcaagtttgcaacgaactcatataagacgatggttcccatgtttcaaattggggggtttttttattttattaaatttttgtaaatgtatgaatacatgattttgatgatgccaaagaagaatcaaacaaggtcacttcaaaggataagcattgcttcaagattaatacaaggttgcttcaacaaacaaagccttgcttcaaaattaactaaagatcaagccttgcctcaaaacaaagtgtttccaatacatccaaggctctggtaatcgattaccaggcagtgtaatcgattactataagacaattttgaaaaatagctgttaaaaaaggttttgaatctaaatcttgaacctgtaatc

SEQ ID NO: 240168 - DNA, 448 bp, Glycine max
  unsure (1)..(448): unsure at all n locations
tagcgatattccacaaataggaaaaacagagacgaaattgtgcttatactagcagccaggtttagcgctgaacaaaattttgaaaaatttataagtgtatgaaatagtagtctcgctcagcgtacatatgtgcttagcgagttcaccattgatgttcaatagaagggatgaacgcacttagcgcgatgttagtcgcttcatacgactaacttttgtatagaaatcattttccaaagcttgtatagttttcatatttatggttattttgtagtgatttttgtaaataaatcttattttatggttaacgttatctatagaacatttccattggatttaatgatgaaatttgtgcatttttaggtgaaaaagaggctatgttntgaattgcaaaatgtagcagttgggctaaacgcatatccaccggtaagcgcaatttcagcgtgcttag

SEQ ID NO: 240169 - DNA, 416 bp, Glycine max
agcttgatgaataatgcttggaagtcttttatattttgtaagctaagcttgcatctaccccaataatggttgcacctaactggagcaaggagttcaaactgatgtgtgatgctagtgactatgctataggtgcagttctgggacaacaacgagacaagatattccatgccatatactatgccagcaaggtcctgaatgacgaacagttaaattatgtgaccactgaaaaggaaatgatggccattgtctatgccttaaagaagtttcgatcttatctggtgggttcaaaggtagtcatcttcacgaattatgcagcaatcaaataccttctcaccaaagtagattcaaagccaaggttgataagataagtcctgttgattcaagagttcgacatcacatcaaaggcaagaagggat

SEQ ID NO: 240170 - DNA, 397 bp, Glycine max
tatataatacggttttaaaaaacagattgaactggctaattttaattgctaactacccaagcaggattttagatcttgttaaaaaatcgtactgaagaaatgttacaattgttttaaggtacatactctcattgcaagtgtataatttttaaatatttaaaattaagcaaaagtatggacataattattttttttaaaattatcataaattttgaaataaatatctaaacataaaaggattttattataaaaatagatacttaaaattgaaataagagtgtgtttggaagaatttatttataacttattttggcttatttcatggaataacatgtacttagacacttctcacatgcattaaaccacaagccaaatatatttcaaaaatatgaatagc

SEQ ID NO: 240171 - DNA, 427 bp, Glycine max
agcttggaactctagaacttaaatagtccctaatatttatattcttcaatacttgccctgaagacaattgatgttgaacaaaaattaatggagtgcaatttcatgaataaagtagtagttcaaaaaaagaaggatcatattaaaagagttaaagaagaagagaaaaacacagaaaatggacatacttccaaaccaatatttacaaagaaccaacctccattcttacaacaccaagaaatatattgcaaacaatatatgcctttctcgttttcggtaaccaaaccaaattcttatagcaataagctcaattttaaaaatgatatattttcaagagagtaagcaaaaaaaagaaagattcatggcaagttcatatctatcaaggcataacaatctcaacatatgcagtgagcttaaacacatttagaat

SEQ ID NO: 240172 - DNA, 421 bp, Glycine max
ctatttcatactcagactccttattcatcatgtgtatcctaattttgttccaagattttataatctatagtctatatactgtatataactttgataattttgtatgaaatcacattttttctattgtaggattgtagggttgtaggattggaagtagaactgagttttaagtttccgattggagttcctttcttatgaaaaagcttctcggctataaaggaaaatgtacgaataggtagctatgagacactcccactcttaactgatggagaattttggtagatgtagatgtagattttttttaataagtaagcaacaacttgttttttgggtatgattctgatacagaggcctaaatgaaatcatgcattagtagagtggagggacatgaaagaataacgtgtaattgcttctctgcagc

SEQ ID NO: 240173 - DNA, 417 bp, Glycine max
  unsure (1)..(417): unsure at all n locations
agcttgacaaactcattggtggactttgcatactttagncccaancgnnccattgggatgtcccacatcggaaatataatattccttttctttattcccaaatntcctaactgattctaaacagttttgattgttattcttttaacaaacatttcctttttaatgctcttgattagctataaaccaaatagcataacctccactttattagcaattctctaacggtcaatttgttgaatgtgtagctaataattatgatttgtggacaggaaaagaaaaagacgtttttcattgctttgctattaaaaagaggactgtcatagtcttgaaaagtcttgcacacgcagaaaaataattctcaattcttttcttattatctactctcaaaattatgggcaattggtctgtgatttccat

SEQ ID NO: 240174 - DNA, 417 bp, Glycine max
agcttaaagtccatatttgaaggcgatgcttctgtttatgaatccaggattgaggtttaaccagaacagatttagctaaaacttgaaatctgtcaatttccacctaagtcaataaaactccacataactcaaaatccacatcaaggaaatcacacatggctaaatcacacaatacctcaacttattcaaatcaattaagtaatcaaataacacaagaaaaacatcaaatatctattttcagttatcgaaatttcagggtgttacatggttcgtactggatgttgaactctgagagttctattgaccaagccaccatccttcctgcaagttcagacttctcaaaacctacttgatggggtagttcgtcttgactaccacttgatgactctggaagtagggcctgagtcattggtttga

SEQ ID NO: 240175 - DNA, 434 bp, Glycine max
  unsure (1)..(434): unsure at all n locations
ttaagagaaaaaagtatgagaaaaaaattttttgttcttatctcaagtctttgttttgaaaatcaactatggcaacaatgggaaatcaaccaaatcaatcttggtctccataggaaaagactttcatgatgtttgaacattcatgtaaaaatcaattaatgcaaaatcatcatgtagtanggagtgttgggacggagctaaaggtcatgaacaactcttttcgaggcatgtgagaacacaagccaaaagtatttatctgtggtatcccaggcaaatcccccaggatacaacatgaacttctcaaatgtgctgaggctacaaaattggcaaggtggaaactcaaacctagaaacaaagaanacacacgaagagacgagagataattcatggtgcgtccaaaacataatttgaaaggtgatattngtatgggagaa

SEQ ID NO: 240176 - DNA, 418 bp, Glycine max
  unsure (1)..(418): unsure at all n locations
agcttgcgcttggcctggntgtggttcttattttcctcattcccccatcgacccgtcgagtcgctatgcaacatgatatgaagtagtagggtggctctaaagatttgctagcttagccctcagggaacagaggaagagtttaggcttggcttgagaagtagggtcattctctgaaatgttattaataaatttcaatatggagctgtacccaaggtgagttagatcaatttaatttaatttgcaattttattggctccagttttggttatttcgttattgtatgttacaatgtattatcttttaaggtggtggagtcccgttgattctgcactgaaccatgatggagcaccattaacgacatatcagtattttgaaaatatgaggaatttcctggtgcatctgtccaagaaattggact

SEQ ID NO: 240177 - DNA, 442 bp, Glycine max
  unsure (1)..(442): unsure at all n locations
tagaggtctnttcttttgggtagtttctctaaatttaactttttatttaatgtaggattgcattntgttcttacaattgttgcaaaattaattaaaagaagataaccatgcaatttggcagattgtaatcgaagtaaacttcttgactgacctaattgtttctgcattataaatgaattgcgcgggactattttatcttcacaagactcaagactaaggatcatacgtagagatcttaaagcaagtaatgttttattagataatgaaatgaatccaaaaattttagattttggcttggcttgaatatgtggaggtgatgatcaaatttaaggggaaatgagcagagtaattggtacatagtaagtatcttattttcacactagaattntatttangtcctaaatctttctaggttgttcttaacaatattcttatacttttc

SEQ ID NO: 240178 - DNA, 423 bp, Glycine max
  unsure (1)..(423): unsure at all n locations
agctttagtctctacagatcttcatatatctttaatctctcaaaactctgtggaacttggacctttctctctctagaatctctagacatgcaaagctttgaatcccagcccaaactcccttcacaaaatctgatttcaggcttaaataggtggccttgttcgtgctcgtgcgcttagcgcaattctggactgcttagcgcacattagtgaattttggcttagcacgtgtcattctcgcttagcggatggactgaagcggtgcgcttagtgagatgaagcggtgcgcttagcgaaactgtacagctgatcttcttccagatttttcctcgcgcttagccaatgagtgttgcgcttagcggacactccctaagccagcggattggcttagcgagaaggtgaanaatagcacttaataaaaacttg

SEQ ID NO: 240179 - DNA, 444 bp, Glycine max
tatgcgcatatttccttacgaatgttcgcttgcacaagattattttttaactaagaaaaaatgcacccatatacaatcaaggcagcttcattacctagattatttacatgtacttccaaggtgtatttgttacttacatcacacacatctccttggctaaatttacatacatgcatactcaaagcattttggggtaccaaaaattgcacatgtgcacatcttggtatttctaatacctatacatacacaaacttcatgatgaatattgactatctacacaataaagtgctacatttcatgctcttttcaagtttttgctacctaaagccgcatgcaaattcaagtatattttcctttgctgacctaaaatgtattaaaaggtatatattctttttgtaatgtattttctttacatatcatgcaacatatttatatatatttttt

SEQ ID NO: 240180 - DNA, 361 bp, Glycine max
  unsure (1)..(361): unsure at all n locations
gttctggaaattatgtcagctgacaaacttcagagatcttcgtcgagtttaatctttggaaatgctccctcactttcaagcctagcctcccaagaccttagtgttatatttattgagtcaactatcagattaaccattggcttcaacatgatttgcagcaaaagcaaattatgaaattgctattctaatgtagaataactgaaattatttagctctattgtagattacttttagattagttttcaaggtcaaaatacttcaacattcttattgagttaatataaaatttgatccctanatttgataatttgcgttgcctgtgtccatcaattggataaactcggtagcaaggtgacacttt

SEQ ID NO: 240181 - DNA, 484 bp, Glycine max
  unsure (1)..(484): unsure at all n locations
ctcagcnncntctcaacagatgntgcaacctacccattggcggttggttgaggcaagatcgaagngagcattttccaaaaaggagaacacgcgggagtcgccaccaacaattattcgagggataatgttagaaaaaccaaaagaaggtttgcgaatttcaaaaatgagggttcgagagttgtttacgcatgggaaaggtattagcaccccatgtgctcgtcacaagggacgacagccatcaatcgagtgtgcaaaaaatgtgacttcaatattatttatttttcccttttcatatttattttttattcttttgggggtgacaaaggggtcggcctgtctcctacgtatcctcaggtgcgatgaaaaattcagacctacngtagtctttaagtttgaatggtgttgtaaattgatttatgttttgagagattatttaattgcaacaacaagcattaatgtgtggacctgaaatgatgttaaattt

SEQ ID NO: 240182 - DNA, 376 bp, Glycine max
  unsure (1)..(376): unsure at all n locations
gaccattatgcccttaagtaacaaaatattaacaactatggatgtaatcaaacacatgaagagggaaagggcatatccatctattcctctgcattattttaactcctccatggccctaccatcaatagctaagcaactcttttacacatttggcttcttcttattttacacttgaagatgtaacttgctcaaagagatcattcacgcttttgtgcttgaaaacagtctatattttacaactcccacaatttatccatgcgtcttcacttatcttctctctttaccagacctaaacacagtggcagatctaagaccctgagtcaatggggacaatctattntttcaaataatataaactaataataattatcattat

SEQ ID NO: 240183 - DNA, 453 bp, Glycine max
tgtcaagccaattgctatatcctcgaaaattaccaacctgtatgcaaattcttttattcgtaagataacttacattgcaccatgtatgtgttaagtttagtgttatgattggctgcttattctgtataagtgtcattctagaataatagtagtaaactctctctaatcctccatataacaaccaaattaaaaatcttgtttggtcttttttagactaaccaatgtaaaatgtttcatgcattaataatttttaccaaaacacccttatatcagagtcatttctcttatcttatatttattctttctctaaccttgttgatgtagctccatgtggaagttgtacgccttggatcttcttcaacaatggagtcttttgtttcttgaagatcaatgacagcggaatggagaacgaggaaaggtgattggagacgccacttcatggaaaagatgaat

SEQ ID NO: 240184 - DNA, 294 bp, Glycine max
  unsure (1)..(294): unsure at all n locations
atctgttccctaaattcctgaacaatgtaaagatccaggtacattcagcataccttgtattatagggaataataagttcgagaatgccatgctagatttaggagcttctgttagtgatatgcctctatctattgttaatcctctatctctaggtcccttgcagtcaactgatgtggtaattcatttagctaatagaagtgttgcctatcctgttgggttcatagaagatgtcttacttagagttggtgaactgattntccctcgtgattttatattttgaatatggaagatgga

SEQ ID NO: 240185 - DNA, 457 bp, Glycine max
  unsure (1)..(457): unsure at all n locations
ttaagcaccgcggctgcaacttggcattggaccattctccctttatctntgagaagaaagattccaaagaaaggcacttttgcttggagtggcttgataaacaagatccaaattcagtcctatacgtgtcttttgggaccacaacaacttttaaagaggaacaaataaaaaagattgcaactgggttggaacaaagcaagcagaagttcatctgggtgctgagagatgctgataaaggagacatatttgatggaagtgaagcaaaatggaatgagttttcnaatgagtttgaggagagagttgaaggcatggggctagttgtgagagattgggcaccccaattggaaattctgagtcacacttcaacaggggggtttatgagtcattgtggatggaactcttgcttagagagcatatccatggnggtgccaatagcagcatggcctatgcactctga

SEQ ID NO: 240186 - DNA, 391 bp, Glycine max
  unsure (1)..(391): unsure at all n locations
ccctctactattctctttgccttccgctgcatcctcctggtgaaaaatcaccattgaaggacctcattgaagctcaaatatccatccctcatagaagctccacaagcaagcttccatcaagtggttatcagagcacaagagctccaagtaggtgctccttaaacctccattaattattagctttaccttctcttccattgntgnttcttcattttnttctccatgtatctcctcacatgtctngtgataaatgttgtaacatgattctttagagtttcaccaactaaactgctatagaacgtaaattgatttctatgggtcaattcttgtcttgtcttgaccatgaatngggtgagttacgtccttgagtttgcttgtatttttgtgctga

SEQ ID NO: 240187 - DNA, 350 bp, Glycine max
  unsure (1)..(350): unsure at all n locations
agctngcacataaggtggagcacgttggcatttaataagngcagcacccacaatagtgcaataaaagatgtcatatgttagctacgcacactcaatagacacagacaacacgaactgatgtcgaatatcctcaaaatgtgaatatatctttctttctctcaacccttccctggtttgcttttaaattaaggcttatatccattatctacaaaggaaaatagcaggttcactgcatgcctaattgaagggagagaaaatcttcaccatacaaaaacagcttaacaggtaccagctaacttaggtgttgccatgtgtgaatgtgcacaagaggcattcaattggacgtgccc

SEQ ID NO: 240188 - DNA, 428 bp, Glycine max
  unsure (1)..(428): unsure at all n locations
gacctatgaaactcagctgaaagaacaccactgcttgagttttggacncttttgtataaaaaaaacccaagggggagttcacaactgtctgactgcttgtctctcccaagaatgccatagttattttctaagagttgggttaccactgaaacttgtggtattttacagtgttaggctgtgtcatatatatagatgagttttaatatcagtgctgcattgtttaaagattaaaaatacgcatgcacatgctttctgtatgtgctgtcaactacaccaatgacgtgacatgctatagctcgcatcagatctgcatgtgtagtcatgttgtgcaaggtcctttcacacgctttatgttaatgcagacaacaatttatcatacacgttttgttacaatgtgtagtcaactcataccaacgaatatcatacat

SEQ ID NO: 240189 - DNA, 442 bp, Glycine max
  unsure (1)..(442): unsure at all n locations
agcttatccttatggcctgcctttttacttaccccccgngccaccccggaagagtgaagccaagcacctacttttgaggggcaactcccaccttatgaagactatcccgggcaagacgatggggaaggagatacccatcttggccccctgctccacctcaaagatccgtccccgcatgaactatcccaaccgaacatagtccgtcataccccggcctcacccacacccgtaaaaaaatctgttccttttgcggaagataagggaaagattgaggcgcttgaagagaggttaagagcagtcgagggccttggcaattacccattctcggattnggtggatttatgtctcgtgcccaacatcgtcatccctcccaagttcaaagtaccgaactttgataagtacaaagggacgacatgtccgaaggggcatcttcggatgtatt

SEQ ID NO: 240190 - DNA, 433 bp, Glycine max
  unsure (1)..(433): unsure at all n locations
tgcatgatttacatctcccnctttctcattcaaattcntttttgatatcnatcaaaatcttcatgaatcccgactcgttggtggaggatgcatgaatgacaatcaattcatggggctccgaataaaagtggagaatggaggataggcgaagagcgctaggcaatcaattcgcggttctcccgactcgttggtggaggatgaatgaatgacaatcaactcatggngctccnaataaaagtggagaatggaggataggagaatagcgctaggcaatcaattcgcggggctgcagactcgatggtggaggatgcatgaatgacaatcaactaatagggctacgaataaaagtggagaatggagaataggcgaagagcgctaggcaatcaattcgcggcgctccacactctgtggtggacgatgcatgaatgacaat

SEQ ID NO: 240191 - DNA, 414 bp, Glycine max
  unsure (1)..(414): unsure at all n locations
agcttgtacaagctatcattcaattaaatactataaactgaaanntaaaagctgaaacataaacataaatctaaattatcaaatgtactaaagacgagataataataaaactgttcaaaaagcagggaaataaaaatcatgatcctgtaaatgatcttgtgcatgctcattcaggtccagtgctggtgcagatgatggatcctgagaaagaggcaagtttggcactggtgcagatggctcaggctgaggagatataactagatcagcgtaaaaaataaagggctctgatggagagggctcagatgctgtaacatcctcctgaacctatacaacaactggatcagactctaaagtgaatggctcaagacgtgtaggctctgtggcctctggaatgtcctcctgctgatcctgttg

SEQ ID NO: 240192 - DNA, 244 bp, Glycine max
  unsure (1)..(244): unsure at all n locations
ctgggctgggctttttgaaagagttcttttttcctgcaaccaccatgncttctttctttctatttcaataatccaccgcggcagaatttgattggacgtaaccccaccgctaagatactgtcatcgttgagtaaaattgaagagctgactcagactcattattgggctagtaaaaaatctaacactattcgacccctacatgtaagtttagagggcctttcattttcaacacaagtccattata

SEQ ID NO: 240193 - DNA, 300 bp, Glycine max
  unsure (1)..(300): unsure at all n locations
gacacattgaacatatatcagnaccacttgtacttttccctttatattaatatatattagttttgcttataacaaaatgctaaatttctaacacaaatgtaaatgtatgatgtgttgctttctaactttgtacaatgaatttttattctccttggatttttaattacattaatggttagttttaaatcttccgatttaatttattntgaaaaacatttttctggagttcccttaaaattccaggcactgttgaaataataacgcttcaataatttctctttttggtgatctaattggatt

SEQ ID NO: 240194 - DNA, 228 bp, Glycine max
  unsure (1)..(228): unsure at all n locations
gtgagaaactagtaatgccaatctccaattcttaattgttantggnnncgcgngcacacnggaaaagacaaacgaaaaactctggaatgaggtagatactactccaaacatctcaatctctctcactatgaaattcctccatgaatgaagtcatgcttagaagacctctcaccaccaagagcaattcagacaattggtgcctacccacgatagacaaaaccacacatg

SEQ ID NO: 240195 - DNA, 480 bp, Glycine max
  unsure (1)..(480): unsure at all n locations
agctnggaacatatagactaaatgttaggtatttgttccatatattccaaaaattngaattgcaggttctatgccttttgtgttattcattgccatattattttttcccctttttattgacatgaatttcctaccctttttaacaaacaaaattgagtagggcaacaaaacacaaactcgagtgtcaagatgggtgagggtaatctcattagtaagaccattgtaaatgatcttcctatcaaattgccatggccttcctaaaagaatatgccttgcctcgatggaaactatatcacaattaacttcatccttatatgtcccaatggagaaaggaccttcacttgttgttaactatcatttccccttgctcattgagccattgaagtttctaagggtttgggtggngaatgatagtgaggttcaacttggaaactaatcttgtgctacaacaatngcaacaagatccactatacacaatgg

SEQ ID NO: 240196 - DNA, 261 bp, Glycine max
  unsure (1)..(261): unsure at all n locations
ggaagacaaaggagaagaggtgagaggaggcgccattcactatggaataagccatggaagaaggagcttcaccaccaagatgagccctggataagaagcttagagaggatgcttcaatggaggaaaagaaagagggagagaaagagaggggggagcacgaaattgaaggaagaaaaagggagagaagttgaactttgagttgtgtcttacaagactctcattcatcaaagttacaacangtgttacacatgcttctattta

SEQ ID NO: 240197 - DNA, 387 bp, Glycine max
  unsure (1)..(387): unsure at all n locations
atgtttattgccttcacttctatgctgngtggagccatttaaaatgtagcacaaaaaattctacgcttcctcatgtggtaaggaacaatatccggcgaaataactttaagagctcgtgaaagggtaagctaggtttgtatgatattgtttttgttgccatcaattgatgcaaatttcaattataagacttgtttatactaattctaatctattaagacaaacacaagtatatattacttggctacctgattaccaatttgattattgatttgcatgggttacaagtaatattgatgagtaagtgaatgtatacattatatgatgatattttctttagaacacatctgattatatatattatgtgaaagccactatgtctataattga

SEQ ID NO: 240198 - DNA, 472 bp, Glycine max
  unsure (1)..(472): unsure at all n locations
agctngcttctacactaatcacaaaatcgttgcctatcttatagngangccatattccaactgcatacactttagcaaacaactctttttcataaacttacaaggattgatgctttggagagagatctttgttgataaaggctagaggatgacccttctgcatcaatactgtaacgacccgccttgtcgctatggtatccacactctaatattcgataatttcaatttttataaaaagaactcccttaattttttattatgaaaatagaagtgattttgtcacaacataaatccatccaacaacacgccattacttaagtgaatatgcataattacatagaaacaataattcggtacatgtcatacacataacgaanattaaatatgttcatatatatatatatataattaaaattcccagtttacatctttaactcaacaaaataaaacttaanaaccaactacggaggag

SEQ ID NO: 240199 - DNA, 403 bp, Glycine max
  unsure (1)..(403): unsure at all n locations
ctaagctggantcctttagtagggaatctatccttcctaagatggagtcagatctattcacttctcattaagaactagctcttttcttcctctattgcctttagttgaatacacctttgtttggttttctatttggttcttaaccctctcatgcaacttctttacaaactctgacctagattaccattctttatgtataaaagaagtgtccagtgggagaggaatgaggtctaacggtgttaggggattgaacccatagacaacctcaaaaagggactgcttgatggttctatgaacccccctgttgtaggtaaattcttcatgaggaagatactcatcccaagacttatggttgcctttcagaagagcccttataagggtggataaagacctattcactacc

SEQ ID NO: 240200 - DNA, 493 bp, Glycine max
  unsure (1)..(493): unsure at all n locations
ctcaagcttaacaatcagtgtcatactattgatcaaaacaaagcagtgtataaatatttattactagactcaaaatatgcaacaaacactagacctaaatcagtgtcacagaaattggaagaaaatattttatccaagcacaaacttcaagccttattccatgtattggggggaagttatggctggccatatgggtagaggtgtcatagaggagcaggtatggaggaagggaccttggactgctgaagaggacaagttgcttgttgagtatgtcaggttgcatggtgaaggcagatggaactctgttgctaggcttgcaagtaagaaacaccaaacttttttcactggtttggttcttaatatatatgagtggattntcacatttataagtgacaatatagcaaaaaaacaactgaaattgttttcaacttctactgttcatggtggctacattcatgttcaccggnagctcttcatttttgaaaatatacta

SEQ ID NO: 240201 - DNA, 437 bp, Glycine max
  unsure (1)..(437): unsure at all n locations
agcttaagaggtatggcggagctaagggatgtnttccttgataggagaaggtagaaagatngtttaagaaggagtgctattttaatatcacatnttgttgcaaaatgattntccttgttaacaatcttcttggaggaatccttttcctccttttccttccccttggcctttgaacacaaggccttactatccttctttttcttttgtttttctagtttttcttcctcatccctcttatctttcatagttagttgatctttggccacctgtgaaggtgtttgaggatgcaacacaaatttagtgccaagatgggtgagggtaatttcattagttaggccattgtaaatgatcttcctatcaaattgccatggccttcctaaaagaatatgtcctgcctccatgggaactatatcacaattaacttcatccttatatgt

SEQ ID NO: 240202 - DNA, 354 bp, Glycine max
tactacgctataataagtgatacgctcgaaattaaacatcggaaactctcgagaaattcaaatgtgtcataacttttcacacggatgtccgattcgggcgcataatatgtcgagaggctcgaaattgaacaacggaagctcttgagaaattcaaatggtcataactgaaattctgataccaatgccagatgtcgtaccggatgtcacgacatcacgcttcagaacatgcagattatatttgacagtatgaacagatttaacaagttaataacacaagagaattgttaacccagttcggtgcaacgtcacctacatctgggggctaccaaaccagggaggaaatccactaaaata

SEQ ID NO: 240203 - DNA, 475 bp, Glycine max
  unsure (1)..(475): unsure at all n locations
acctgcggcatgcaagcttcaaccaagctgcgcgttaccctagtttcttctccnncngancngccgngaactgggacctgaaccgcttcttgcctccatactcctcatgctccgccaccgggtacttcactttccggtggaagttgcggtggcagccgcacgccgcgcattgtagtccccccgcgccgtccaccgtgaactcgccgcacccgtccgtggcgtagcttccgaggctggctgcatggtttctcaagcactctctgtatacacttacactgttccacttctctctctcgccaccacccgatcctccttccattctttctctttccaaagaaccaagctacatatatacatatatataaccaaaccctttaatttgattttgcaatgactancttagtcatacttggaataccatattacaatcataattacgcatttctatcttatctcaacatctacctacctacta

SEQ ID NO: 240204 - DNA, 405 bp, Glycine max
  unsure (1)..(405): unsure at all n locations
ctgagaatnttacatcaatgtgtcaaaaattgatttaatttgcaacgnnnnatatcaaggggattaacaaaccaatattaacatatatgataaaaagagtataattattttattttaaataatttaggatcaaattaaacctcaaaatataattaatgaactaattgtataattaaatctaagtttaatagttaatttaaaatggaatgagaggaaagttaatgtcaaataagtaagagtgtacctgagtcaaatatggctaagttttcacccaaactaatcaaaatattttgtacatttttcttatataacttgaaccaattcgattaataatagggtgaatcggattgctttaaaaaattagaatatgccttaataaatattgatatctatttttaatattta

SEQ ID NO: 240205 - DNA, 297 bp, Glycine max
  unsure (1)..(297): unsure at all n locations
aatgtctgtcagacnaaatatcagtctgtggctatatacacgaccgatgtcaggtatttttgtttcaattcaatccctgaataatctttggatattgtccaataagaaatgttcgatcggcgtcatcaggtgatgctagctctttattttagacctgctggatcggtcatctttcctggccgacatcgactatcattgtttttatcagtgtcggtgaataatgttttttggccgacgtgggctgatgtttttctagccgagtaaatgagaacacgccagtgtcggccgatacacagc

SEQ ID NO: 240206 - DNA, 483 bp, Glycine max
  unsure (1)..(483): unsure at all n locations
acactataaaactaagctntgcaagctggaatcatttatcctatcttcgacagccattgtgtgagtcctatccaggtagtcccgaataaaattggcctcactgtcataaaaaatgagaaggaggagttgattcctactcgggtgcagaacagttggagagtctgcatcgactataggaggctgaaccaagttaccaaaaaggaccattttccactgccattcattgaccagatgcttgaacgcatggcaggtaaatctcactactgtttccttgatggtttttatggttatatgcaaatcactattgctcttgaggatcaggaaaagaccacattcacttgccccttcggcactttttcctataggaggatgcctttcggcctgtcaatgcccctagtaccttccagtggtgcatgaattagtattttagtgattntttagaaaaatgcatagaggtgtttatggatgatttcactgtatatg

SEQ ID NO: 240207 - DNA, 446 bp, Glycine max
  unsure (1)..(446): unsure at all n locations
cttagagncacctgccgcatcaagcttaaaacaagagttcaatataatatttttctcaaaccttatgatagttgactctttgacaaagggattactgccaagacatttattgaacatgttgaaagtatggtgttagtcggtgaaaacaactaacttttgcgtataaaaattttataaattgtatcaaactttcccaatttttggttattttgtaatgttataagtattttctgttaagtataggtaataaatacttagtatcctcattttgtgtgattaataatcattttctctcaatttcaggttaattaggaaagctttggaaaaggttgttttcaccttctcgctaagccaatcagacttagcgagcatccgctaagcacaacactcctgngctaagcgcgaggaagaactcagaagaagatgagttgtcaagttcactaagt

SEQ ID NO: 240208 - DNA, 363 bp, Glycine max
  unsure (1)..(363): unsure at all n locations
ttagctcttgatacagggtctatcctatctcaatttnttttttgtaattngnctcagggtcgtgttttgtccttgttctgttatttgtgttcttgtttttgtcttgttgagatcttgtttttgttcttgttcttgtttgtgttcttgatttcgntcttgttcttgtccttgttacgttcttgttcttgttcttgttcttgtttctttcagattctgtgtcaaaaaaaatgtttgaattctgtttggggacaatttggctttctagaagaatttaggggtttagggtttagtaggctcttgaatctattttcctatttgcctattgaacaaattgcctaaattatcctagacaaatttgaaaag

SEQ ID NO: 240209 - DNA, 460 bp, Glycine max
  unsure (1)..(460): unsure at all n locations
agcttcgatcaagagagagtgatttttaattgggatcgntngatctgagattggataacgaagatatattggagattgagaaattggaggaaatgaagattatgaggggagaatttcacgttaatgaaaccacaagtccctacagaacaatcgaagaactttgggatgatgaaatttgaagccgaagacaacgttgatttatttactccacaggggaagcagagaagtgaagagaaatttgttagaatgatcataacaaaaaaagaagaagaagaaaagaacatgttttgtacaactaaacttgcttttgggagtaaattaaatgtactatattctacttctgttgcttacgattgatatttctctttctttctctgcaatagtcattctatctaaaatgngaataactgatcaatttgatctcttaatgagtaaatcaatgacattntaatattttaaa

SEQ ID NO: 240210 - DNA, 341 bp, Glycine max
  unsure (1)..(341): unsure at all n locations
tctgggagcangagtgtatgcagtggtgctcatatagtttagggaattaaaaagagatagaaaattgtatgtgtttttctaaaaattgttcaactaccttatcacgacttcttccactaattattgccgttggaaaatattctgccaccttcttaacagcagcacgcatctgcagagttaacagaattgtaattagccaaagaaaaatgagaatagaataaaacccaattgatgttattatggatagtaaacccaaggagagtaccacatacattgtcggacatgaaagcacagtcaggattatccacaatccgtgaaagagttccattctaatccataaa

SEQ ID NO: 240211 - DNA, 401 bp, Glycine max
  unsure (1)..(401): unsure at all n locations
agcttcttgcgtagccgctcttggttcatanatttatcccaaaaacaaatccctcttattactagctattttgaattctttagttcctgaatgtacaaccttcaaattgttgctcgttcccctctttcttttctacaaaaaagaaaatcaaatgctgtgaaaacatgtggtggggttttgtttaataatgttatacttttgccttccaaaaaaaacttatcactaatcctcttttcattaatccaattttgtatgttattgtataaaagatcatgggttctccacctgcctccactactcctcctcctcctccttcttgtcctccttctcctcctcgtcctcctcctacttcggacgcatcggcttcgacgtctgccatgaagcggacactcaaagcctca

SEQ ID NO: 240212 - DNA, 380 bp, Glycine max
  unsure (1)..(380): unsure at all n locations
ctataatggactntctcttcattgctacttgtttcagnattattagcaggcttctcttccaatataacaagatcaagatccaaaacatcgagatgaaattggacttgctcattccagtcagagaagttaaacccattaaaattgacacagatgatacatgagagttcaataagttggaaataggtactgcataataaaacttcacantaagtatttgggacataaagcacaagtcatacatataatttattcagataacaaccaatgtatattgatgttctcctttgggtgatacaccaacacacaacatatgaacatgatgatgctaataaaaatcttaacatttatttggcattaaatatgcactaattagtagtatc

SEQ ID NO: 240213 - DNA, 329 bp, Glycine max
agaaacaaacgctggaaatatgatcttcaatatagctttatcaaatacgccttttattattgacttattttatcgagactcatgaaatgtaggcaacagttatttcggatcatttatatttcatggttcttaacaagttctagttatcggatagtctgttttggaatagcttggaatatgttatttttaaaaacaaattaatgtagatagaaaataagcaactattcgtcaaaataaattgaaatattattcatgactgaatatagaagatcgatcaagttcccttctactttgacccttatgggttaggcaaaaataatagatgatgc

SEQ ID NO: 240214 - DNA, 353 bp, Glycine max
  unsure (1)..(353): unsure at all n locations
atctacatgtgagaaagcatttggattttgaacacaacgagcaatcaatggaggaaataattaaaaaataatttatgtggagtcattgacacagactgtcctgtgtatgcagtaaaaaacacatcatatttaatcagaagcatttctccaaattgtggaaatcagaactaggtcgaaagctacaaaaaaaagcagctcaattgtaatagctaaaacaacttanaataccaaaaaaaagtatttaaatcacgttaactaatccaacacacaattgaaaggtgctacacataccacataaaaggcagaattattactttctactagagacggttaaagtttacaggtcactgact

SEQ ID NO: 240215 - DNA, 462 bp, Glycine max
  unsure (1)..(462): unsure at all n locations
agctttctcttttggcagctatctcatcctctttttatttgtagaatgaagcttgacaggttcaggtgtaggtgctgctactggtggaggcacttgaatttggttgccaaacctcaaggtgatggcactcacatttttcggattctgcacagtttgtgaaggcaatttgtcagaattttgggactgagcttgattcatctgagtaacgatctgccccatctgatttgtcagactctgaatgaaggctcttgtctcttgctgaaattgcatattctggatggtcatttgtctcactaactcttctaaggaaggttgaggaggggcctcaattgcttgttgtctttgttgttgntggtgttgttgttgttgctgcactggaggaggaacatatggcttgcttggaccaacaacattctgaanaagagggacaggctgttgttgttgtggaggacttgtccatct

SEQ ID NO: 240216 - DNA, 278 bp, Glycine max
ataaaaggtgaaaaaagtgcctaaagggtgtaccctaattctacataagacaggctataaataggctctgaaatcacaacactgcgcttagcgctcccctcgcacttagcgcgggtaagtggattcgggcttagtgccagtcttgagcttagcctagctgaaggcacttgctacgcttagcgtactgatctcgcacttagcgcgcggctttgatgctaatgctctgccagattctcctttgcgctaagcgcgctgaagctgtgcttagtgatggatat

SEQ ID NO: 240217 - DNA, 436 bp, Glycine max
  unsure (1)..(436): unsure at all n locations
ccttcttncactcaagagtcttctagttctcattctactgtatatgaagagacactgnttgtcctaccagatcttttccctgatggaaactctggacttttctcctattcttcttgttggcatttatgtgcagttgatagtggattcaggctagaagagcagtttttgtgggagaatttctagtagtagagattgtttcattcttaaaataaaaaatatatataataagagaaaacagactataaaattgatgaggttttatcttcatgtttacggcaatagtgtaatctaatggcagcataccacttcaagaaaagtttaccctttgaatctgtaaattgatgttctccagtgctattttttttggttctgcagtgaacggattaaaatataaaggaaaaataataattatgccaaatgtgacanatgcttatgt

SEQ ID NO: 240218 - DNA, 438 bp, Glycine max
  unsure (1)..(438): unsure at all n locations
agcttctacatgtctagggtttcctagagtaagatttgttcaagntccagagagtttgagagattntgctgtgtgaagatccacagagactgaagcttgaagaggaagctgtcctgagagcttgagataagtttgtgaggaatcgtgaggtcctagaggtggaggagacatccccaccacttgtatttcttcaatccttcatctttctcttctctttgttggaaaggaagcttcccagttatggagagctaaatcctctgttggtacttgtcgcaacatacccttttgcgggcgagcgaaggcgaggctcacgggtgcgctttccaaaggaggaaagatgcgcggagtcgccaccaacttttatttgtgggaaacgtcggaaaaaccaaaggaaaccggtcgaaatgaaaattctaagttcgggagttgtatttacgt

SEQ ID NO: 240219 - DNA, 367 bp, Glycine max
  unsure (1)..(367): unsure at all n locations
atcaagtgggatcagagcacaagagctncaagaatgttctctntttctctccattaatnnnnnngcgncaccttctcttccataggtgtttcttcatctttcttcatgtatctcctcacatgtcttgtgctaaatgttgctaacatgattctttagagtttccaccgattaaacttgctatagaagctagatttgattttctatgggtcacatttcttgttcttgttcttgaaccatgaattgtgttgagtttacgatcctttgagatctgtcttgctattttttgtggctgaaacctaaaccataaaattctacaaaaatataaagtataacaataccacaaaatctaagtgacttgtcacctatt

SEQ ID NO: 240220 - DNA, 456 bp, Glycine max
  unsure (1)..(456): unsure at all n locations
acctgcggctgcaagcttgatgctttttccctttccattatgatcaaacctaaatgccatttccatgtntaaaacacccacaaatagtttaaacacaacacaataagcatggtttgtgagggaaattgaaaaactccccatacttatgcttgaagatgaaggtttgaagagaaattaacccaaaaatgcacaaaacccatttgagaccacctccaaagtttcagctaagcaaggggttgtgggggcaaagttaccttttatattggtcttccaaccctaaggaccaagtatcgatttttctaaacttgtgtcattnttctaccaacttttaattaattgcaaaatgaccctcttcctaanttttgaaccaaatttcaaatattgtttctctcaagtgctacattattctaatctgattaaataacctttaaacaaatatttcattaataaatcact

SEQ ID NO: 240221 - DNA, 369 bp, Glycine max
  unsure (1)..(369): unsure at all n locations
nntctagctttcattggtgtgtattttatctccttttgttgctctaaattgtgggagngngctcaaatatatggggcaattctggtttgttttcttgctcgattaggtngaattacgggtttgtatgggatggccctangcctataatgcattttgaaacaatgggacatgccacattgtccccgttctcttgctattgacgcctaaacgcgcgcccaccaagtgttcggtgaaatgcctcaatggcattaacgcgtgactcttgtaaggaaacaacccatggggcgattttggttgtacatattttctatttttggaatatgtattcattcccgaaaaaggctagagtaattgccccacatatattct

SEQ ID NO: 240222 - DNA, 416 bp, Glycine max
  unsure (1)..(416): unsure at all n locations
agctntgacagatgaccaggtggttggttttatttcatagatatcaaagcctacactaatccttgccctgagacaaaatggtgagggatataaacgggtgtcacttgatgagactaagaacattcactacacgtagttgactaatcgcactatcttatgtatgcaattaagtcttattgattttagctttacacaagcattttatgaatgtaagaattctctcaatgcatcgccacatcatgttgaagactaagcatcatcattaatttttaaagagcacgattattgagacatttgaacatgactttcttgagatagtacccttggcttgcttataactagattgcttgatctatgaacaacttcaatatacttgctatttactatatatgcagacgtgcactgaacctagcata

SEQ ID NO: 240223 - DNA, 293 bp, Glycine max
tggagaagtgctatcttttacatgcctaacttccttgtgtgacagctgtattgactgccatttagcacatcgcatcttagctcatcatatcgattgcgcttcatgcatcatcatggagcagggacactaaacatctctaatctatgaaagcctattccacagacgaactctctgtttcaatacgaaacagccttatcataatggattacactagctgtatgaagctagcatcgtatggctcgctctgtttaactgattacagacttatcgcgagcgattacacatgtattttt

SEQ ID NO: 240224 - DNA, 319 bp, Glycine max
tgcagctaatcctactcgccttcgtatggggactaccacgccgaatcaacctataagccgcttgacgaataggacacctattacacgatttacagagaaatggctaaatctgagcataccatagtgctattaggaaagacttggggcgtagagacacttgcaaaacctagtttgatctatatgtagggttttgaatcgtggtacacctgtgggattttagaacacgagatacttatattatgtggttttggtcatgtcttaggtaactgagcctggcgaaccatgggctgagggattactcgaagttgtgctaactgtg

SEQ ID NO: 240225 - DNA, 392 bp, Glycine max
tcttagcacaaattatcatgcagggggtctttcttctatttattatgactgacagcagcctcatatccctcttccatttccacttagagcagttccaaacaaaaaaatggagaaagcggaaaaggagatcttggagaccttcaagaaagtagaggtgaacatacctctgctagatgccatcaagcaaattccaagatatgccaagattctaaaggagttgtgcacccataaaaggaagctcacatgcaatgaaaggattagcatgggcagaaatgtgtcaacattgataggtaaatttgttcctcacattcctgagaaatgtaaggacccacatactctgtgtataccttgcattatggggaacagtaaatttagaatgccatgctagatct

SEQ ID NO: 240226 - DNA, 469 bp, Glycine max
  unsure (1)..(469): unsure at all n locations
agcttctttggaccttgaacaagcaacttacttctctttcagaaccatgctatgtgctcgcgactggtccctctcttcccttcgcaacttgagttcactattgctaccccatagagctccgcgaaatttattccgaccatactcttccttgcgagccctcttggtctcttgttcaagggctcttgcggtaattgcattctcttcctgtaacccggcacactccttccgaatgtgtgtagcgaccaacttgaacttctccttggcaagtttcgcctttcctaactcgcttttgagagcttggacttcttcgtcctcttccggtgcttcaaaactctcttcgctgacgactnttaacttggcgagccaatctaaacctcgtatatgaactttcagccattcgtggtacccaccaatgatgccattacgaatgcccctaagctcttgatttttacttaacggngttcccatg

SEQ ID NO: 240227 - DNA, 413 bp, Glycine max
  unsure (1)..(413): unsure at all n locations
tgannatgttcattaacaactnntaacaaacaattgagtctcactccttcttcttcactcatgattaaaattactacaagaattgtgttaaaagtgatcatagatgaacaaataaatatcctcacacaaacactctctcacatgtttacactcaataatttttttcaatcgtgttttactcttttggcttttccctccaatagtctcatcactcttgcattntaccacttaacttctccttatgagatcttaaataagaacctttgggttgattatacacaacaagagataacaagggatggatgagaacctaatgaataagaacaaacagaggacaagcaacaaaggattaagaaaagtgtttggntnttttctctcaattttcttggttctttttattggtttctctaatg

SEQ ID NO: 240228 - DNA, 432 bp, Glycine max
  unsure (1)..(432): unsure at all n locations
gtcacctgcggcatcaagctttatgatgggccgagatgtttnataattgcaaacgtcctcgcaggcaacaccgtgggtgatggggttaatgtcgctccatccaaccctgatgagggggttgatgtctttgaacgttttaggcaagaggatgaagctgctaagagggaaaaaatgagtgtagctaggaaaatagaaaaggaaaagaaaggtagggaagaaagggttagaataataggtctcaaacaaacgagaaagaggaaagagtatccttcggtcgacctcgctagagatacttgggtttctggagaggtcaatactcatgccttcattttcctaaccattagattgattattgacctacagcaaaggattaaccttacctaccacaacaacttcgactaggttgttgtgatcattgtcttcccagtgaga

SEQ ID NO: 240229 - DNA, 463 bp, Glycine max
  unsure (1)..(463): unsure at all n locations
tatattgattntntatggagaacatatatattgataatttatattcattacaattatattcacacatatatatatatatatatatatatatatatatatatatatatatatatatatatgttatgaaagagataagataattgagtataggggtggaccgacgttagcatgaggcccctgattnttttccaatttaaaaacttaatatatcaatattatttatttattttatagaaatttatttattttattaaataaagaaattcttattgaaactgattatatttcttaaaaaatttaaattattatataattaaattttatctcttaactttattttttaattataaaatatattttttaagaaatcttatatcgatatgatattttattanaaatcaaatattatatcatcaacttttatctcctatctttttaaaataataaaataataagattttta

SEQ ID NO: 240230 - DNA, 450 bp, Glycine max
  unsure (1)..(450): unsure at all n locations
agcttgtattgatcccacatggttttatctttctcgcaaaacaacatgtccctaactggtctccctataattttacctagtgaaagtgacttgacttaccactgtgtggtttgtcttgtcatgtactcctaggcgctcaactaaattttttactaatatggtaccacattgtatataagattgaatcttantgtacctgttgcataatatttgtgtaatgatcattgtgagttattacatgatggtgggtaataaattgtgtgagtgttagatgctatgttgtacttgagatgtgttgttttaaacatgtgattaatgtgaaggtgtggaatgtgaatttgtgattaataccttgagacacgtgatgttacaaaatgagtagtaaaatgatgcgaatngtgatactaagctgagcttgtatacttatatatgngcttntattcatctcta

SEQ ID NO: 240231 - DNA, 345 bp, Glycine max
  unsure (1)..(345): unsure at all n locations
ngtattggagaaggaatcattcagagattcaatgaagtatgagaaacatcttttgtctgaaaaggtgaaaaatgaaaaggcacaaatgcttcaagattttgaatcgaagacgaggaatcttgagaatgaaatccacaaaagacaggaggaaatggagaaagacttgcaggaaagggagagaaattttcatgaggagatgctaagagagcttgacaacattaataacttgaaggatgttattgagaaggaatgggaagaagtgaaggctgaggggattaggttggaaaatgagaggaaggaacttgagtcgaacaagcagcaactgaagtctgccaacatgagatg

SEQ ID NO: 240232 - DNA, 463 bp, Glycine max
  unsure (1)..(463): unsure at all n locations
agcttctacagtatacagtcattcttcataatattccaaagatcaaatgtcagcaccgcggtaagtatgccttggccttcaggctacacatcaacgtcaatccagctgaaggatccttaaaaattataaactaaggatgcattaaaataaaaaatttcattaagcacttatttaataaactcttaccaaataaaaatctgttcataaaattaacagaattactgagaagttaaaaaaaaaacttattttaacaagtttatctgtaaatcttattaaaataaattgaaaacaaaaacttataaaagttgtgaactactttctcacaagtctattttttntttcaagcaccccacagataacattataattctgaagattgctttgctatatatagtatgcttgtaagtgcttgcttcaacaaaagtatttgaaacttgctaaagatacaactatttcattactg

SEQ ID NO: 240233 - DNA, 352 bp, Glycine max
  unsure (1)..(352): unsure at all n locations
taattgtaaatagttntctcgtattccaatcacactgtgttcctgcaactgattaaatgtttattgattcaccagatcaaacacctggaagcataagaatcgaaagcaacaaaccaccaccaagaaatgttcaagtgaggatattggacaaactagacaagcaaaccaacaacaacaataatgaaagaacaaattattgataggagtgaatgtgttttcttaacaaaggagtgaattacctgttcattgaaaatagcttcatgcacttcacgaaggagtgaatgtgttttcttaacacactcttcatcacttaaggactcttcacttgtttctcccaaattatgctcacctg

SEQ ID NO: 240234 - DNA, 403 bp, Glycine max
  unsure (1)..(403): unsure at all n locations
agctngnngatnaaagcacagataatccattaatttcttctganggnaaagcagcatttcagcgtgtaagcaaattgacaagacaagtgaacctttttgaaaaggattatatcttcatccccataaactatagtcttcactggagtttgattgtcatttgtcaccctgctgaagtcatgacatgctacagagatgaagaaactaagggatctcccaaagaagcttgcatcttgcacatggattcccganaaggaattcatcaagatctccacaatgttttccaaagttatctatgtgaagaatggaaagagaggcacaacaatgtgagggatgatgatgtttcttctatatttttacatcttccattcgtgccacttgagctggctcagcaacaaaatgcata

SEQ ID NO: 240235 - DNA, 473 bp, Glycine max
  unsure (1)..(473): unsure at all n locations
acggagatgagatgactagagcacaatttgacgctgatttggagtaaagagaattaacactgcttattttggatgatgtttgggattatattgatctgcaaaaggtggggattcctcttaattgcattaaattgattatcacaactcgtttgaaacatgtgtgtctacagatggattgcctaccaaataatataataacaatattcccctttgaagaagaagaagcttgggagttatttttgctaaaacttggacaccgtggaacacctgcaagacttccccctcatgtactatagattgctagatctgttgtaatgaaatgttatggtttaccactcggaatcagtgtgatggctccaaccatgaaagggtaagaaatatccatntgtgagacatgcatcgaataacttgacagatggaatggagagaagcttaacgtctaaacgtgctttacattatttaaaggacttcaa

SEQ ID NO: 240236 - DNA, 319 bp, Glycine max
  unsure (1)..(319): unsure at all n locations
attcccaacaaggaagtacgtgattctttgcgcctctagctttccattgatgtattttgatgcttcaaatcgtatgtatttgcttgaatctgaaaccaattcatccttgaatttgtgcttgtttcataggattgaggggttgtaagggatggccctaggcctatggtgcattntgaagtgattgggcgtgacactttgcccccattccccaaattttcatgcctaaacatgcgcccaccaagtgctcaatgaaatgcctcaatggcatttgcgcatgggtttgtgaatttttgcttaggatttgacttgtgcatatgtg

SEQ ID NO: 240237 - DNA, 322 bp, Glycine max
  unsure (1)..(322): unsure at all n locations
tctatataagctgcaccatnttatcaatgaccacaagtttgttgttatttctgaacatagagatgatctcttttatcttagtgagagngattctcctaaattcttgagtgattcaagaacaccctggctgtattaaaagactttcacaacctttgtgtgttgccctcgctggaaagagtggaagaaataagtcaagatgaacgagagactctttagaggaagaacgatgatgagtcatgaaagaaatgaagagagaataacatgcctcctatagtagtcataactgttgctagagcctaagtgaagaacttctggactatta

SEQ ID NO: 240238 - DNA, 449 bp, Glycine max
  unsure (1)..(449): unsure at all n locations
tctaagtcacctgcggcatgcaagcttgaccaatcccgacccaacccgggcttagttttgttgtgagaacctgngatgtacctaagcaggcgagctcctggcagtcaacagataaaaggaaaacaagaccacaaagcaaggaggcttgtggtggctggccagctgtgaattttgtgtaatatgtggattgtggcctctggtaatcgattaccaaaggtgagtaatcgattacaaggcttaaaattgaggacaggaggctaagatggtctctggtaatcgattaccaaggggtgtaatcgattaccaggcttgaaaacgaagtcaggaaacttatggagcctctggtaatcgattaccagcctgcgtaatcgattacacagaggaatgggtcactggtaatcgataccaggcatgtgtaatcgatacacagtgtattattgcatatttat

SEQ ID NO: 240239 - DNA, 445 bp, Glycine max
  unsure (1)..(445): unsure at all n locations
ttgagccaaaatcctgactcaccataaaccttgacccattgtgagaatgtcaattcttaccctcggaagcaaaaaaaaaggggagagggaaaatttccaatcaaagaggaagcaaaaaaggagagaaggaaaatttccaatcaaaggaaaaaaagagaggaaagggaattcccaatcaaagagtgggagaaagcaaaaagaaaagaaagaaaattcccaatcaaagaatgggagaaagaaaaaagagaagaagaaagggaagaaagttcccgatcaaaaaaaaataatatgcagaaaggtctttggaccggacaatatctgaacaatacagaattgtcaccaaatgaataaaaagaaggaaagggaaccatgacctanaatggtcttccccctttagttgccaggcaaaatcttgtgcgctagcaaccttttttcgccccgcact

SEQ ID NO: 240240 - DNA, 460 bp, Glycine max
  unsure (1)..(460): unsure at all n locations
agtcacctgcggcatgcaagctntataagtgcgggtctgggagacgatggtcttgtgttcgcgatatgtgaagatgatgttccaagtactttggatttggtccgaccatgccctcctgatttccagctgggaaattggcgagtggaggaacgccccggcatttacgcaacaagcataatgtaaacctttacggttttaaaagctctatagttgggcctaggctttagagttttctttntgttaaggctttgtgtcttttgttttgaatttataatacaaggatctttcttcatctgttcctagtctctacccattctcattcatttgcatgtttacttctttttctaaaacggcagattcgatgacgagtcccccgaaggtactaatacctgngacccgtctatcaacttcgagcaagaaatgaatcatacggaagatgaaggagatgaggatgtgggac

SEQ ID NO: 240241 - DNA, 446 bp, Glycine max
  unsure (1)..(446): unsure at all n locations
ntggaaaatgatttctatacaaaagttagtcgtataattctactaacttactcccccaaatntacagttntgtttgtcctcaagcaaagaaagaacatttcacttgtccttaagtgacaaagacagtggccaatcaaaagaaaatggtgtttgattcatcaaggacatcaaccatatgaactgaataccatggaatgcttaaatcaattacttctcacaagcatgcagttttttcaaagataagagcacaagtattagagtcacaactgaaataatctagtaagcatgacagaaatcgaggaaggatcatcaaccaaaacctcacagtcattgtttcactcaaactcaagtgtttaggcttattccatcataaacaaccaacacaagttccaacctttgcatttcatctnctatcatacagtaatgaacacacaaaaatgaatctg

SEQ ID NO: 240242 - DNA, 484 bp, Glycine max
  unsure (1)..(484): unsure at all n locations
agctntgagccaaaatcctgactcaccataaaccttgacccagggtgagaatgccaatccttaccctcgaaagcaaaaaaaaagaagagaaggaaaatttccaatcaaaggaaaaaggagaaggagaatttccaatcaaagaggaagcaaaaaaaggagagaaggaaaatttccaatcaaaggaaaaaagagaggaaaggaaattcccaatcaaagagtgggagaaagcaaaaagaaaagaaagaaaattcccaatcaaagaatgggagaaagaaaaaaagagaagcaaaaaagaagaaagctcctggtcaaagaaaccagaagaaatgtgccgagaggtccttggaccggacaatatctgaacaatacaaaattgtcaccaaatgaacaaaaagaaggaaaggaaaccacgacctataatggtcttccccctttaattgcaaccaaaatcttgtccgctagcgaactttttcacccccactaa

SEQ ID NO: 240243 - DNA, 356 bp, Glycine max
  unsure (1)..(356): unsure at all n locations
tactcaagcttgactttggtttagacatgatagatacatgattcgagacttgtgggatttgatttgggcaagattggatgacgggaagtgtggttttcgaaatatgctctttgggcagattntgttgtaaaattgtgcagcatgattttgcacaagtgcagaaaaatgctatgtatttgctggttgtggaaagagtaatgtcaaatgagttttggatgtttgctagtagatcccaacggtcacaatgtaggcttatgtactatagacttacagtaaaattttggagtcgatccaacggtttacgaattggatcgaaggaattggtactggngtctttaagtgagaaaagctgtgat

SEQ ID NO: 240244 - DNA, 456 bp, Glycine max
  unsure (1)..(456): unsure at all n locations
ggatctaagcacctgggctgcaacttttacgaatccacaattcttttttttctttcgccaatttnttgctcaaatatgctatttcttctacatttgcttttgtttcctcaagtaatgaagcaactttctgctttagctcttcattctcctcaatgtacctgaccaaatcacttccctctgcagaaacattgttcctatcatcagaaaggatcttctcaacagagtttggaatccacttagaaaatcggcgagacttcgtatcctgcaacacaaaacaaaataaagtacaacccaacaagatttaacccaaaaaaattgatagagaagacatttgcttacgttccaatataggcatcttccaaaactattcctcgggttctgtcaatgtgcgatgtgtacagaatggctagtcttttacattttcattccacccaatccgataccgaagacgtggat

SEQ ID NO: 240245 - DNA, 413 bp, Glycine max
  unsure (1)..(413): unsure at all n locations
gacctataaaactcagcttngaaagatntaagatctgctggaatgtattattcctttgaancgnatcgcctctcaaactgagaaaatccttgtaggactatttctgggaatatctctgggattggtccaaagaagtcccaccattgcataaaccaattgggaaaattgtaaattgtattggtcttgaaatatatcagccatgaatgcttgaaacgggtattttggtgccaaaacaccttagtccaagcatcaacataatcccaataggtataacctaccggatcaaatggaactgaaaatctctttcctttgttcaagtccgaaccaaagtgtcttggctgaagaactattagtatttggattgtcgagtgggtgtttaatggttggtcttttgggtcttntgaaatgttgat

SEQ ID NO: 240246 - DNA, 484 bp, Glycine max
  unsure (1)..(484): unsure at all n locations
gcgacctctaagtcacctgaggctgcagctcaagaaaaggggtcattaacttntttttcctgaagggaattcaataaataggtctcttattttcaatggagtgggttaccattactggaaaactcatatgcaaatttttatagaggtaatagatttaaatatctaggacgcaatagaagtagggccctacattcctactttggtggctggaaatacaaccatagaaaaacctatggaagaatggagtgaagaagaaaagagattagtacaatacaacttacaggccaaaaatataattacatctgccttaggaatagatgaatattttagggtatcaaattgtaaaagttcaaaggatatgtgggatacccctacaagtaacacatgaaggtacaacaaatgtaataagatctaggataaatacttcgactcatgaatattaattatttacaatgaataaaaaatgaaagcatacaagacatgc

SEQ ID NO: 240247 - DNA, 370 bp, Glycine max
  unsure (1)..(370): unsure at all n locations
tcagccaccaccttgttgtaaactcatatttatatgtttaaagngctcaaattnggacaatctatcaactattgtaaaaatagttgtaaatccttgtgaaggaggcaattgaaaaataaagttcattgctatgtcttcccatatttgnggaggaatgagaagaggctattacaacccaactggaaagacattatcaactttatcttgttgacatatggaatattccctcacaaatttactaatatcacttctcataccattccaataaaacggagcaccaattctaggtgttgttttattaactccagaatgtccaccaatcttagaactatgaaaattctccatgatctgataagccaaccaacatcat

SEQ ID NO: 240248 - DNA, 450 bp, Glycine max
  unsure (1)..(450): unsure at all n locations
agctntacaacagagtttagtaatgaccctcnttcctagaattaaaataacttaatgccattaacctagggaattaaaaaaaaaaaacttaatggctgagtgtaactgaaattgtggcaaccaaaagtcacccccaacagccaaagtcagccaccatttggtctcccaaaaggctgatgcctaggttgccaattgggcccttattacaacttgaactaaacctaactaaagcccttttagttgattaacccaaaacatatttttggtcagccaactttacaaggactgggccattatttagacaaactaaacactctaaaattgagacaaagnggtgtcatttagtcctcctccatttgggccatgatacaactcacaaccttggactttctccttgaaacttgggcttgtatccaaatagtatggacaacacttattgaagagcttcct

SEQ ID NO: 240249 - DNA, 409 bp, Glycine max
  unsure (1)..(409): unsure at all n locations
tccagatccgagtgatccgaatcaccactttcggcacctgcaccaccactaccagattntatatttgcagccggcagggatgtgaaggacagcatcccatcgtcaatgctgctccgagaaacgggagacctcttcttgttgttctcctcaattgcaacaacaccgggaaagaaactcccgttgtaagagctcttcttgctctctccaaagctcagaatttcaccagattcaggcttcaatgaattcgaaaagttcaattccctcgagaagaaaccctggccattagatttaggtacatgaacagcagcagcactaggggtatcggttaaggtactggaaccaggggtttcgaactgcagagtcttgttaaccgttgaattcggcggcgcaacggtagaggagtctctga

SEQ ID NO: 240250 - DNA, 362 bp, Glycine max
  unsure (1)..(362): unsure at all n locations
gacactaaaaactcagcttaacgaacacgcgagctggatatatgtaccatatcgatttatcancacacnacatatatcactaacagacttatagcacgtaagttgcttatctatcacatgggttatttagtaataaaatattattctagttgcgatatttgattctacgttgcctaaaataggagatcaaattcttatataaacaattattcatttttttgacgtccttaacatttgtattaaatataagaaagtggatattgaatatcgaataaacaatctgaatacttataacttaaacaatgtgttaatagataacttcattaaaaaaatacccatgtgtctcactcatacaattgacc

SEQ ID NO: 240251 - DNA, 349 bp, Glycine max
  unsure (1)..(349): unsure at all n locations
agctntgnctcattggaggagacatanntttttgtctccaggccacaataaaccattgctggctctcctaggatgtatgtgtggaagacctttgaggagtgcttttgaaccctctcttgaaggaaatgtgcaatctttgtgaacaaaaattggtatgtttcacccactaggggccaaccaaagctacctgggggcaagcttttagtgccaccaagcactagtttttttttttttcctgcaaaacaaagatagatgcatccatggtgagcaaagtaatgaacatagattgcatggaaaaatccattctaggctacatagttctaaaagattgctagatggtattatacaa

SEQ ID NO: 240252 - DNA, 382 bp, Glycine max
  unsure (1)..(382): unsure at all n locations
cactacacaaactcacgctngaagcacagcactcctggaaggggaaggtttagaanttgggtcagcttgtttaagagaagcgcccaagncgncattctgaacaaacttatcatctaagagatctccagctgcctctgntacatctcttctggatttcttcaatgacttcttggcaaaagaacatatgctatatctactccctatgaaaaaaaaaaaaaaaactcttgtgaaccaaccatcccaaaagtttaagctattatgcgaaggctcgtgaatgttgataaaagagtacaaaaacagatgaattaggtgacctactttcctttctcttatccatccattaacccaaactcccaccctgattggtaatatccatttcatg

SEQ ID NO: 240253 - DNA, 410 bp, Glycine max
  unsure (1)..(410): unsure at all n locations
agcttgactatgtcttcccttgatggttattactgntattnnctatgcaactgcttcctaaattataattgtcactcatagatggatttttaattctcctttttttctaattagcctttcatgattctgcatatcaaagttggttgtaactttttcctataaaaggttgctacttgctttattatttactcaatctttctgctggctctttttattcactagctatacaaaacatcttgatcttcattataaacttttctttgttctaaatggttgagggtgttttgatagctgatgaggccttttgagtctctttgaaaaggtgatgcttttaatcttttcccacacttgttgtcaagatatcttgcatagctgaaagtgtaggttttgttccttatggttcccttgag

SEQ ID NO: 240254 - DNA, 405 bp, Glycine max
agcttcgggagttgtatttacgcacggtttatgtattagcaccccacgcgtccatcacaagagacgacagcctttaatcaaatgtgcaaatatgactttaatttatgttatcttccctttctgcgttcttatgtttttttatgcttttttatatttttatctttttgaggtcgacaagggggtttccctttgctcctacgtattcctcaattgtgataaggaaatcagacctacgtagttctttgtgaataaagtgtttggttaagtttgtttttatcctttctgcgagatatgtttttattgaatgaaaggtcattttaagggcgttggaccattaaacaaactttcgattcttttgaaaagggagaagacattaaggcattggacctattaatgatctcttta

SEQ ID NO: 240255 - DNA, 397 bp, Glycine max
  unsure (1)..(397): unsure at all n locations
tataagaaacaaaatgccttaatcatttccaaatatgcatgtgaattaggacgcatcaacaagaatcaagccaaggctattgtgcaagcaatcaatggggcaaaacacaccaaatgattataatgatggatggctcaaattctcacaaaggtaaaatcatcactttcaaattgagctttcaaaactatcatgacatgtagagaagaatcaaggatttcaagtcacaaaatgtcatgaacttttattttcaaaacaattacccatttcttgaacatatcctataattcanagaanaacatgcaaagtcgtacgtgcacacgaaattgacccanaatattaaactgaaaatccaacgaaactaacaacattaacaaattaacacaactaacanattaac

SEQ ID NO: 240256 - DNA, 411 bp, Glycine max
  unsure (1)..(411): unsure at all n locations
agnncttgcggattggtcttttccagtgttttgatcgatttgggnctgaaaaaaggcaaatntagtcatcctgcttggacgaatgagaanaatggggcaaatgaagagggtgaggatgaagtagaagcccatgctgtgactgccattccaatacagccaagtttcccaccaacccaacaatgtcattactcagccaataacaaaccttctccttacccaccgcccaattatccacaaaggccatccctaaaatcaaccacaaagcctacctaccgcacttccaatgacaaacaccacctttagcgtaaaccaaaacaccaaccaagaaatgaattttgcagcgagaaagcccgtagaattcaccccaattccagtgtcctatgctgacttgctcctatatctactngataa

SEQ ID NO: 240257 - DNA, 409 bp, Glycine max
  unsure (1)..(409): unsure at all n locations
tanacacaattatgcaacanataatagaagtttccattgttataataaatntaaaatgtgctttctaagttgatacctaacatcataataacataagctgattgcaatttcaaagttctttatactcttagaaaaaaggtccatacactctcaatttctccttttctttcaaatcttatgattaagagaacacattctcaaatcaagaaaacaaaatcatatgattgaattgaatacttatcttctaatgatgtttctctgttcacaaataaaaccaaatggttgaacttagttaagtaataatcataacatgaaatagcagaaaaaggtcagccatcataaatngaattaatcatttttacaccctaagtagtaatcataacaatcatgtctaatagagctgctaaat

SEQ ID NO: 240258 - DNA, 470 bp, Glycine max
  unsure (1)..(470): unsure at all n locations
agctngctngtggagcttctatggaggcatgatctttgagcttcaatgaggtcctttaatggtgattttccaccatggaaatgcagcggaagacaaaggagaagaggtgagaggaggcgccatccactagggaataagccatggaagaaggagcttcaccaccaagatgagccttggataagaagcttggaaggatgcttcaatggaggaaaagaaagagggagagaaagagagaggggggagcacgaaattgaaggaataaaagagggagagaagtggaactttgaagtatgtctcacaagactctcattcatcaaagttacaacaagtgttacacatgcttctatttatagactaggtagcttccttgagaagctntcttgagaaaactttcttgagaagcttctttgagaaaacttccttgagaagctagagcttagctacacacacncctctcataactaagctca

SEQ ID NO: 240259 - DNA, 447 bp, Glycine max
  unsure (1)..(447): unsure at all n locations
tggacaaagcanatgagaaaaatgagtgacaaaggtgatttgctgagcttatttctagggtaaattgggtgttgaggggtcaatatttgaatcggtggagttttcgccgtaaaaccagtttgaggaagtttaaattaatgttatagactcttttgagatgagagtttactccaaaattacccattctcattttcacttctcaaaccttgaaaatccactaaattgaggggttttagatacctagattctgaattgccttggtctgaagcttggttttggtttagatatgatttatacatgatttaggacttgtaggatccaattcgagcaaaattggaggtggataagatggatttcgaaatctgccaaattgtgcagcatatagctgtcaaattttgtgcagccgaattttgtcatgtgtagaaatgcttggcattgtggtatgga

SEQ ID NO: 240260 - DNA, 201 bp, Glycine max
aaaccaaattgttcttcagccaagccacacttcaaccttgatcaagtccttgtgaccttcatctgtctgctctcatttgattgcagatgagaaggaaaagaacgctgaactatgggctcaacggggtgaaacaatggtgaccttagctattttcgggtctcgtgtctggagtaaaatacattgcactcgtcccctttttcg

SEQ ID NO: 240261 - DNA, 299 bp, Glycine max
actaagtaaaatgggtcatttctaaggtccaacgccttataatgatcacttcttaaagtaaaaaagaatcacttgataagaaagaactatgtaggtctgattttctcatcccaaattgaggaatacctaggagcaaagggaaacacccttgtcgaccacatagaaggaaaaaatataaaaaggatataaggacatacaaggggacgtataaatcaaagtcacgtttgcacattctattaaaggctgccgtcccttgggacggacgtgtggggcgctaataccttccccgtgcgtaaata

SEQ ID NO: 240262 - DNA, 453 bp, Glycine max
  unsure (1)..(453): unsure at all n locations
tagccctagaggggatggaccttnntcaggtttggagtgtatcaatattcttgcctataggttggacctcccagaagagtatggagtcagcaccacttttaacatttctgatttaactccttttgcaggtggagctgatattgaggaggaggaactaacagatttgaggtcaaatcctcttcaaggggaaggggatgatgcaatcctccctatgaagggaccaatcactagaaccatgagcaagaggctccaagaagattgggctagagctgctgaagaaggccctacggttctcatgaaccttanggtagatttctgaacccatgggccaaggttgggtccaattatctttgtacatattagactangatgtcattatattnggtcctttgatatanggctccatattgangtagggtaccctagaatatatgattttcaccccttgtattt

SEQ ID NO: 240263 - DNA, 408 bp, Glycine max
  unsure (1)..(408): unsure at all n locations
aagaatcaaagaggcgctcaatcaagaatcaagattcaagtgaagattcaagagaagactcaagatatgcaagaacttcaagaaaagcatcaagataagtataaaaagattttttcaaaagataagattgaatagcacaatttgtccaaaataatttctcacagaaaaatcttttaccagagtttttactctctggtaatcgattaccagaagacaataatcgattaccagaagcccaaacagttttataactggtttacaaagtagtaatcaattaccatgggcatgtaatcgattaccaatgttnttaaacgttagaattcaaatctcatgagtcataacttgtgataaacattttcaaacttgggaatccattcacaacatttgaatcgataccagttttctaac

SEQ ID NO: 240264 - DNA, 360 bp, Glycine max
  unsure (1)..(360): unsure at all n locations
ttacacgcctagaggaaggcagcgggtggattcctttctctgaaacacgcaccccancctgtctgcaggacacttaatctagatacatttcaatagcctgccttgctgtagggtaccactcctcatcatggttcacaatttatcatagttgattctaccatcctgagaaatcaccaatagtgagtgtccactctggatggaactagaatacataatctgtgtccagccctattagagataatatgcactatctttatcttgtggcacacttcagagataacttccctgattgtggactatatgcccataccatactccttcatggctgtattagttcatctctcgtgatatacctgtgat

SEQ ID NO: 240265 - DNA, 490 bp, Glycine max
ggaccttaagcacctgcagctgcagctatgaaacaaaatgccttttctttttcaaaatgcatgtgaattaggaagcatcaacaagaatcaagccaaggctattgtgcaagcaatcaatggggcataacacaccaaatgattatgatgatggatggctcaaattctcacaaaggtaaactcatcactctcaaattgagctttcaaaactatcatgacatgtagaggagaatcatggatttcaagtcacaaaatgtcaagaacttttattttcaaaacaattacccatttcttgaacatatcctataattcaaagaaaaaacatgcaaagtcgtacatgcacacaaaattgacccaaaatattaaactagaaatccgacgacactaacaacattaacaaattaacacaactaacaaattaacaataccaacataactagcaaaaccaaataaaacaaagaactactcctcccatacataaacaacacactgt

SEQ ID NO: 240266 - DNA, 388 bp, Glycine max
  unsure (1)..(388): unsure at all n locations
tgtggactataccttcgaccgaaaacggttgtgcttctgtctaggcctctatncaggcgggctgcagcacccgctccgcttacctaactgtactggaggcggatgcacgggctttatcctctatggctgtctagagatttaacatgacctccgagatggaagccatttgatcttttaatgccgatagatcggccttcatctgtgcatgcacgccctcttcattatccatatttctggatcgagtgttatacgggtgacctggcgttttcttagttatgatgaaattcctaacgaaataaacaacggtgagtatgccaccaaaacatgagtatgcatatggatgatctgagcacttgtattccacccaaagattntagattacatgatg

SEQ ID NO: 240267 - DNA, 466 bp, Glycine max
  unsure (1)..(466): unsure at all n locations
agcttataggagccacccttggcttcagttccaagcttcaattgtgcacttttgctttcattttttcgcgattctttcatctcacacaagtaagtaccatctgaaagagaaagagaaagaatccatcaatcaagatagaagaaaagcaaaggaaaataaaaatgaaagaacaagttctttggaccagacaatatccgaacaatgtgcaagattgttggaaagaaaaaatataagaaaaaaaagcaatattaacttggttaagacacggtgaatgtgtaaagtgatcgcctgctttatttactaaccaaatctttatgtctgctctcctgttccacaccaaacacaagagaaagggaaaaaggaaggggaagggccaaaacaactaaagccaagattngctaccaatatccacacctataaagtcctattgatccatgattatgcatatctatctttgaatgacttg

SEQ ID NO: 240268 - DNA, 403 bp, Glycine max
  unsure (1)..(403): unsure at all n locations
actcaagcttttatccaagctcactggggaattctcttctcttggctnanccctagggatggcgcctcctctcacctctttcctttgctttcgctgcatctccatggggaaaatcaccattaaaggacctcattgaagctcaaagatctagcctccatagaagccccacaaccaagtttctatcacatacacttccagaaagaagaaaaaacaaaaaaatattgtgatttcccatacgctacgagctagctagcatgcaagattccaaaagaccatgacaatttttggaaaaaaaaaacattgtggaacataatcaattacgacggttctcttanaatcgatgttgtctgttttattttaactacaatattgtcattgnattttcttcaacgatgagttttca

SEQ ID NO: 240269 - DNA, 409 bp, Glycine max
  unsure (1)..(409): unsure at all n locations
aaaagccttcttctaagttctgtggtcttaaccatacttccatgcctgtgatgaggtcatgtaaactctcccctctgctatagtcacatgtacaagtgcctgagatggcatgataagtggcttaacaaagattgtaaattgtaatatttggccaactcttacctttgacatgtatagcacacaatctacatgtatatttttgctcatctctttttatgtaatcagacaaaaaatgtaaattcaatctcccatgtatagaatagaggactatgcatggtgatgagtcgtaccactnctcaattatctacttttcatcttgttactagcactttngtatatgataattcagcctgtggtgaaatatgtatttcatttagaaggaattctatttctatactcgttggcatct

SEQ ID NO: 240270 - DNA, 438 bp, Glycine max
  unsure (1)..(438): unsure at all n locations
taaggaatcttanggaaccgctagagatgtcgctacacttgctggattacacacatgagctcgcttagaggtaagggatgaatttatcgcaattggggttagaatgaacatgtgtaaggatccttaaaggatcaaattggggtttattttgggatgtttattgcattgtaattcttccattacaattataattacaagattgttgtgtttgacggaccaattgatgccttgatacgaattagttgataaaattgagtgtttttgtgtttttgacctatgattttgatttctttgattttgatatgattatgtgaaattntttaaggggttttactccccatattgtgaaaantaatttttgataatttgcttgtgtttggaaagattatagatagcggataaatgtatatgggacatgaaatggattgaatgtgtgta

SEQ ID NO: 240271 - DNA, 287 bp, Glycine max
agcttggcaatgttagaagcgattttcttttatttcacgaagccttcggggaggatccgcggattttatcatatcttccatggctgggaggtggctatgttaactcttccctgtgttgtattgacatcttcaaatgcgtgaaaagggatgatgcgtgcgcctccgcagatgggaagatgaacattatgatcagctgctacctttgacaagtgtgcgtctcaagatacatgaaagacattgctcatgtgattgcatgtaacccgatcaagaagagcacatattatttc

SEQ ID NO: 240272 - DNA, 419 bp, Glycine max
  unsure (1)..(419): unsure at all n locations
agctgtatacaagaatcctactctgtatctccttgnagacatgtggcctcataaatcttaagaaggcgtgaattaatttcccactaacaaacttttagcccccttctaaaagaagagataggctcagaatgcacaagaagcagcaatcaatttcttaatgttctttaaacatgcaagacaaaattgattgcaataaaatgaaatagataagggaagagagaatgaaaacacaatttttgtactggttcggcaaagtccgtgcatacgtccagtactcaagtaacccacttgagattttccaattcctttgtaaaaatccgtttacaaagtctgaaccacacaaggacaacccatcccttgtgttcaggaatcccttaaacttaagagaccctcagtcccttaatcaatctcttttgatg

SEQ ID NO: 240273 - DNA, 374 bp, Glycine max
  unsure (1)..(374): unsure at all n locations
tcacatgtccaagggttggactgttagctccaaatgggttcgccaatgggtgatctcttgtctctccaataggtattgacagcctccaaaatctgtttgaaggaagagataaaccctatcaacgcatatagaacagttctaatgctatatataaagaacaatgataaatgttcattccacattntggagtgaattaaagtgaaaaagagagatgagaagaaagaagaacaggtagacagaaagtgatagatagatgtgaggatacaaggaagaatgattgagatgaacaatgaaatagaagaatatgtgaatgtatgttaagtatattccataaacggagttataacaatataggttcttacacatnctttttt

SEQ ID NO: 240274 - DNA, 382 bp, Glycine max
  unsure (1)..(382): unsure at all n locations
agcgagagaggcagggacatctaacttctttggagcncccacaaccccaagggaatctgatgattgacaagggcttatcggagcgccagcagctaaagggaattaggcattttcatttgatttttagagaatacaagttgaagcttaaaggatgaaccttgagaaaaacactgtttgtacagatagaagagtttatcaacaaaaagataaagcgataaaataaaacatacttggaacgctcgtataatcttattggaagaatggaaatgggatattattctctttgtctttgtacacagtgtgcactacgtgaagtacaatgggattcttttgcgaaagggaaatgaactaagcctttcgcactctttatgctccttctaac

SEQ ID NO: 240275 - DNA, 373 bp, Glycine max
  unsure (1)..(373): unsure at all n locations
cgcatatgctgcanatattcactatagacctcttcttcctcatcatcttaaccaaccatagcagagcaactatgacctctccagccacagatacaaccctggatggaggaatcaccctaacctcagatggtccagccctcagcgacaacaacagcagactgcttgttccttccaaaatgctgctggcccaagcagaccatacattcctccaccaatccgacgacagctacaaccccaaaaacagccaacagttgatgcccctacacaaccttccctcgaagaacttgtgagagaaatgactatgcataacatgcaanttcaacaagagaccagagcctccattcagagcttagccactcaaatgggacaattg

SEQ ID NO: 240276 - DNA, 473 bp, Glycine max
  unsure (1)..(473): unsure at all n locations
agctngtangattatggtggacccgtcatatgtgttactatgnggagatcgggcgatggtgcaaatcaactctcccacatccacaaatcacacacgaacccaccatccccagttgcccaccttcaactgagctcacgtactcccatgtagcctttatcctcgtccctctcagcatcgggtccccatcaacccctccaagcttcctcaatatccaagcaattcaatatccaaacatcatgaactaccctaaaccaagaaaacagggcagaggcagaaaactctgcccaaaaacacattccaataccacaactttccttactcaaataccccagtaacattctctttgttccgattcgtttaccggtggatcgactcgaannatttactggaggtccctagtacataagtctacantttgaccgttgagatctgctagaaaacgtccagaacccaatatgtactacctttcccat

SEQ ID NO: 240277 - DNA, 423 bp, Glycine max
  unsure (1)..(423): unsure at all n locations
actcaagcttncaccggtttctgctgtagacaaagaccttatacgagtgatgaatatgttaccacatcaggcaagaaaccctcctcaaccatctccttcttcatttgaaacgctttccccagctcacgctcccgacaaaacccagctatagcagtgctataagcacatgatgtagctccatgtggagcttgtaggccttagatcttcttcatcaatggattcctttgcttcttgaggtatgattgtagcggaatggagaaggagaaagatgaatggagacgccacttcaagtagaagatgagtctagaagaagctcaccaccataggaagccatggataagagcttgaaggtagaagaagatgaatgaagggagaggaagagaagagcacgaaatttagtgcctctaaagaagtctgaacttt

SEQ ID NO: 240278 - DNA, 402 bp, Glycine max
  unsure (1)..(402): unsure at all n locations
agcntgcatgcaccctatacacgaggatgtacnctttttttcangnacaatangagataaaagcccaatattaatttaagaattgcaccaacagtaccacaggtactgtgtttgaacacattttaagaaacatgctaatgaatttaattgtttcaaggcggtcaattatcacggcgaagttctaactttattttcaatgcatatttatgggatccaaccgagaatgtccatttcaattggttgtacaagaagcttgagtgaatgtaaacctcctaatatccgtcttccattcctacggataaaaaaaataaatccaagaaagtttgagaaacatatttattctataaactttntatgtgcctccattgactatgtctntatatgtattggcagcaaaatata

SEQ ID NO: 240279 - DNA, 402 bp, Glycine max
  unsure (1)..(402): unsure at all n locations
gctgtcatcaataagaacnctggnctgacatcatatatgttactgtgacctgcactggcataaattcataatcagagcagttccttatttgtgtcttcttcaattcctgtcaacatataaattagggttaattaaatcttaaaactatgaagttttgaatcttcgtctttaaattatttatttaaaaaatttaatccccaaagaatgcgtcattgtttatgttttctattaagcaagaaaatatcatgaaacaagacagattaaatgcatgtacatgtcacatacatatcacataagtgttattatcattagataaattattaggatattatgttattaaaatataaaccaatacaaaatcattgttgaacctaacgctcttagcattcatgaacatacata

SEQ ID NO: 240280 - DNA, 405 bp, Glycine max
  unsure (1)..(405): unsure at all n locations
agctnttagccaattcagacaacaataactttnttttctgatgtcntattgagncccgtaatatatcgagacgctcgaaattgaatgttgaacctctgagcaaactcaaacgacaataactttttactcggatgtctgattgagtcccgtaatatatcgagactctcgaaattgaatgttgaatctctgagccaattcaaacgacaataaatttttaatcggatgtttgattgagtcccgtaatatatcgagacgctcgaaattgaatgtggaatctctgagccaattcaacgaccatatccttntactcggatgtttgagtgagtcccgcaatatatcgagacgcttgaaattgaatggtgaagccttaagctaattcaaacgacaataacctttttctcggat

SEQ ID NO: 240281 - DNA, 392 bp, Glycine max
  unsure (1)..(392): unsure at all n locations
aacgttcattttcgagcgtctcgataagttacgggactcaatcagtctttcgagttttatgttatgggcgncngaattagctcagaagttcaacattcaatttcgagcgtctcgatatgttacgggactcaatcagacatccgagtaaaaagtcattgtcgtttgtattggctcagagcttcaacattcaatttcgagcgtctcgatatattacgagcctcaatcaaacatccgagtaaaaatttatggtcgcttgtattggctccgagcttcaacgttcattttcgagcgtctcgatatgttacgggactcaatcagacatccgagaaaaaagttattgtcgtctgaattagctcagaagttcaacattcaatttcgagcgtctcgatatg

SEQ ID NO: 240282 - DNA, 462 bp, Glycine max
  unsure (1)..(462): unsure at all n locations
actaagcttatgggaatanaggtgattanagatgtttgatgatacaatgttgattcaaaagatgatgacaaaggtgatgacaaatagctcaaagatcaatcaaagaacaactcaagtgaatcaaagatcaatcaaagaacaactcaagtgaatcaagaacaattcaagagttcaagataagaatcaagaagaattcaagactcaagaagaaagtttagagtcaagaatcaagattcaaggttcaagaatcaagagaaggcttaatcaagataagtatgaaaattttttctcacaaattgagtagcacatgatgtttctcataaactggttaccaaagagtntntactctctggtaatcgattaccagattggtgaatcgatactagtagcaaattggttgaaaagtttcaattgattacacgttcaatattcaaagctgaatcatacatgtttggtatcata

SEQ ID NO: 240283 - DNA, 411 bp, Glycine max
  unsure (1)..(411): unsure at all n locations
agtcacctgccgcatgcaagcttcaacatcagaccacttggagggtactggaattatcttacatggacttgatggggcctatgcaagttgaaagccttggaggaaagaggtatgcctatgttgctgtggatgatttctccacatttacctgggtcaactttatcagagaaaaatcacacacctttgaagtattcaaagagttgagtctaagacttcaaagagaaaaagactgtgtcatcaagagaattaggagtgatcatggcagagagtttgaaaacagcaagtttactgaattctgcacatctgaaggcatcactcatgagttctctgcagccattacaccacaacataatggcatatgtgaaaggaanaacaggactttgcaagaggctgttagggtcatgcttcatg

SEQ ID NO: 240284 - DNA, 353 bp, Glycine max
  unsure (1)..(353): unsure at all n locations
ctttaaacgggtaanaggctcacattcactntcttctacttatatttttacttgnccaaataaataataaagtcatctcgactcanagaaagtcatataagtctcatacaattaatatagaacctatatgctaatgtcacatcctatcagagcgtggtgttcccgtgtcctctagcatgaggttcttcatagtcatccacctattcatctgctcccccgaacacaagttcaagatcatcacaggatccaaacacaacaacacacagggagtgagttatcacattcctagctaatagagaaacaagacaattaaatatatatattatattaatgagataccacctgcttaaaca

SEQ ID NO: 240285 - DNA, 456 bp, Glycine max
  unsure (1)..(456): unsure at all n locations
gcaagctaaagagagagaggctgtatagttgtttcgcgancccgcgaacaaagtgatgggagaaggaggcgacaagggaggcacgctaaaggaggaactcgggggcaaggtggtgggcatggtggggggaggggtgaagtaatgactgttgcgcgttaggaaagaaaagagggtaggaactagaccgtctcataacttttaaaataaaataaagatagtaatgatttttaattaaccaccactatttaaaanttatttgtttaaaatctaaaacatcgacaaaatgaaatgttgtagaaaaaaaccaaaaaaaatacaaaaacgatccgcttcgcgaaaacatatcaaaacgaaactagaatatacttaatagaacaaaagtgacattaagctcaattgttatacagaaacgcacattcaattatccattaatcatccataatcttacatgcccct

SEQ ID NO: 240286 - DNA, 392 bp, Glycine max
  unsure (1)..(392): unsure at all n locations
agaaattaggaatagaggaatggcnggagatggggccttctcttggcatattatcctactattgcattaaatggtcttttatccatattttttttatttttatatttcaaattattggttgattactcatttgtataactattatttatggttggtacaatatataacattttacctttcaagatgtaattgttcttcaatattaattagtaactatttattntctattttatntagcccttaaggattacttgagtaactttgcaatgtcccatcttctattcaatggataacctttgcatgctttttttgatctcattctcccgcataacttttcttatggtttttctgtttacatacaattattatttatattcttcaatatttattta

SEQ ID NO: 240287 - DNA, 383 bp, Glycine max
  unsure (1)..(383): unsure at all n locations
ttagtcccacatcgcttggattgttagaattttgtagtcttagtcccacatcgcttggtttgtaaaaacttgtgtctcattagtgttatatatagagacaccttgtaagcttttatatgttcaagtaataaaagttctcctagtgtagccgtggacgtagaaacatacattgtgtgctgaaccatattaaactttgngtcttttctcttttccctttatttctttctcttcttttattgctctatactaacagttcgatactcttctccttctatggattcattcacttttgttatggcatcagagcacttcatatgaaaagctctactgtgcactcaacctttcttcttcatcttccattctttcttatcaaccatgagtga

SEQ ID NO: 240288 - DNA, 436 bp, Glycine max
  unsure (1)..(436): unsure at all n locations
ccttaagtcacctgccgctgcagcttnattgtcgtatattactatgtatttggccttgntgnggaagctgtttgattatagcaactccaggtaaagcacgttgttactactgcttatatatacatgtatatgtgtaaaggagaatgaaatcagatctgcataatctgatgttgatatcaactaattgaagcttctagaataaaggagaatacaatctaatttgatttggattttagctacgcatatcttctaggatccttatttgtaactcttctagaatccttttaagctataaaatttagcaaactccctggcagctttataggactgagaggaagttaaagtaaaagaagggcagataagcccaagtaaactttaaaatgatgagaaatgtgattctaggttgaatatatttaaaatgctgagaaatgtgatt

SEQ ID NO: 240289 - DNA, 361 bp, Glycine max
  unsure (1)..(361): unsure at all n locations
actcaagcttcttatccaaggcaattcttggtggagaaactccttctttcttggcttttttcctagnggatgatgcctcccttctcctcttctcctttgccttctgctgcatctccatggngtaaaatcaccattgaaggacctcattgaagctcaaagatccagcctccatagaagctccacaagcaagcttccatcaattggtaatcagagcacaagagcttcaagtaggtgctccttaaatctccattaatttttttgctttaccttctcttccattgttgtttcttcatttttctccatgtatctcctcacatgtcttgtgctaaatgtntgtaacatgattctttagattttccac

SEQ ID NO: 240290 - DNA, 412 bp, Glycine max
  unsure (1)..(412): unsure at all n locations
agcttatgcatgagagaaaataaacaatttattaattaaacacaataagaaaagaatcaatgggagaaaaacaaactttgtatataaaaataaagaacacaaatccattaaaaatgtgaaaaggctatgctcaatcctaaacaagattactactcaagcatgaccatggagaaaatcaaataataatagaagaaacttgagtaatcttgagcttaaagccatcactccctaaggttttgtgtccttttcaaaatccttaaaatgactatttatacttagggtgaaaaaaggttcaacccccaactcaaaaataaaacatacaattagtagaaaatgagggtttgcatcgatcgtcaccttcatgaccattntcctggccaagacatgggattcttggcttagtgtattcatc

SEQ ID NO: 240291 - DNA, 460 bp, Glycine max
  unsure (1)..(460): unsure at all n locations
tctcattngatctaacagagaaggagcatgcaacctatttatctaagtcacacccacggaactctggcacaagagacttggtcattgccatcttgaaagaatgctaaacatgaaaaaaaggacatgtcaaaaggtctaccaatactttctgatagtttgccaaactataatgcttgtcaatttggtaaacaaaatagaaaatcattccccaaattagcttggagaacctctcaaaagttgcagctaattcacactgatgtggcaggacctcaaagaacaccatcactacaaggtagtctctactttattcttttcatagatgactttacaagaatgtgctggattttttttcttgaaattcaagcatgaaatggctgaagtatttgtgaagttaagaaaatggtgaaactccagtgactgcagaatcattgaaatggaagagttaatcacaaaattaatc

SEQ ID NO: 240292 - DNA, 434 bp, Glycine max
  unsure (1)..(434): unsure at all n locations
agctggatgcgcttagttgttggttttgtttnngaaatnnctcaatgcctaacatgtttaatagatgaggcatttgtattgaatgttttagactatgcatgtgtgtgatatagtcttagtttttttcatgcttagtgattgatcaaatatgaagtggatgaagtattcttattctttaagtttcttaacaacttacttctacttggaatttggctagcagcatcgaattaatcaattgcctcatttggtaatcgaatgcccaaggtagtttcaaaagaaagaaagacctatagcttagtgtaatcaattacccaactcctagaaacaaagaaaagctctttatgtgattctatcattgattaccgcacatgataatcgattatctagtcagcacccgnagaacacacattcttagaccgaaatgaggtaattga

SEQ ID NO: 240293 - DNA, 410 bp, Glycine max
  unsure (1)..(410): unsure at all n locations
tctccgtcttttccctattttatgggttcganggaattataaaaatgntcaatcctcctggtatctgagaatcacttaatattagtgagaaaaattgtctctgtgaagaanatccaagccaagacgcttccgtaacgcttccgagacgtttccgtaggtgatttcgtgaagattntccaccgttcttcatcgttcttcgttcatttttcgtcgttcttcggtcttcaactggtatagttccgaaatcgaacttttcaattcattctatgtaccctcagtggtcctcatttgtttcgcgtgcttttattattatttcattcgctttccgtacccccttatgacgtgctttagtcatttatttatgtcattttcccgcctaatacaaaaaataattccaccgatcattcgta

SEQ ID NO: 240294 - DNA, 402 bp, Glycine max
  unsure (1)..(402): unsure at all n locations
agctggcctaattaacctgttattgagattaaatgattattaaacacacaaaatggaagtactaagtatttattacctatacttaacaaaaaatacttataacactacaaaataaccataaattggaagagtttgatacaatttacataagctttatacacaaaagaccccgagggcatacgcctcatactcggccatgttgttggtgcactcgaaacccaatctggccataaagggtacgcactgatgtcaggagagaccaaggttgcccccaccctatgatttaaagcgtttgatgccccgtcgaactatacggcctatttgtccttgtcttcgtcttccagcttttccatgaatagggccatgatgtcctcatctggaaacttangatgcatgggctga

SEQ ID NO: 240295 - DNA, 387 bp, Glycine max
  unsure (1)..(387): unsure at all n locations
gaggaatctcaagagactattagagttgccgctgtccttgtcagaatacacacgtgagcacgcttagacgtaagagatgagtttatcgcaattggggtcagaatgaacatgtgtaggggttcttaaaggatcaaattgagctttcttttgggatgtttattgtattaaaattcttgtataattatgtgaaattgtttgaggggttttactcctcgtggattgagaaataattntgtataatttgtttgtgttttgaataagattagcgtaataaatagttatattgggattatgaaattatgattgagattgcatataagtgataaatngaatatnatgatgaatggagaataatatattactttgagaatattatattggtatgga

SEQ ID NO: 240296 - DNA, 439 bp, Glycine max
  unsure (1)..(439): unsure at all n locations
aagcaccgcggctgcagctncctgatctgaaagccgttttttttcttgaancncgagncnngaagcgcgatatcttgaatcttgaatcttgaatcttgaatcttgaatcttgattctcgattcttgattcttgaattcaactttcttcttgaatcttgaagtgttcttgattctatcttgaacatcttgaactcattctttgattgacctttgagctttttgtcatcacctttgtcatcatcttttgttatcatctttattatcatcaaaacatctttgaatcactcttgattcaccatgcagctttgcttctacacttaagacttaggtttatgggtcttatcctcaattatatggtgcttaaccttcccattcttatccgatgtaggaattcacctcacacttgtactctaacacacttagaagcgccaaaatctcc

SEQ ID NO: 240297 - DNA, 381 bp, Glycine max
ataagtatacactcaattgtttgaagtccagtgcaaattgaattgctcaatggtgtttatgaatttgaacttcttcacatttatctttatgattggaccctacaaagactaagagaatcatacttgtggttttccataccctttatcttgaacctgtaatagcatggccagcgctccaattttctgtaatagttctatcatggaaggcttatttttcatcttgcattacatacataacacagcagagccattcaattttcactggtttaccataatcatttagttaatatacattataatcaatagaatgcttttgatgtacagcatcacttgttaacttattcacggatctgtactgaaagcttgcttgtgtgacgttga

SEQ ID NO: 240298 - DNA, 474 bp, Glycine max
  unsure (1)..(474): unsure at all n locations
ttaagcacgcggctgcagcttttgtcagaaatagcgagcgtatcgtttattatangaagcaccaaatcaataggatgacaaaatatttgctgcacaacagtattcaagatttgacttattattaatttggccacggcaatcatgtcagagaatgaccacctgattcccttcctcccctcaggtgatttaaccctttctccatgatagacaaacatatcagtaataaactttttgatacttccttttaacatttttattcattgtaaaaaattattatgttaacctacactaataccgagcacatacatttagtttactcagtggatntgcagttagaaagaatccttgtattaaccaaagaatattaattatataatttatataagtattaaaaatgtatgcaaagcaatatgaattttatttatcaacgcggttgagttaacaacttattttcttgtaagtaatttttataat

SEQ ID NO: 240299 - DNA, 470 bp, Glycine max
  unsure (1)..(470): unsure at all n locations
nntagtcaaacagaataatccgaaatgtcaaagaattgttcgttgaatatagcataacaaaactntctgtgattggtttaaagatacaatctttgcagatgagaatgcttcagaaacattaagaaaactagcagatgggcctaaaagaaatgttataacctggcaaggatacgacataaacaggtattcattttacacaaaagcacaagatgacaaaggtacaatgcagaacagcggggtcaccctaagggctgaatctcaacactttgcaagtgtcaatgacgccaatccctatgtagcttccatcccttactttgggttcattggtgaaatttgggagcttaattatgtgaagattacagtatgtgtttcaaatgtaaatgggttgacagcaacaccggtgtgcgcaccgatgatatatgatntaccctggtagatctaaagaaaacttgttaccacaatgacccttt

SEQ ID NO: 240300 - DNA, 403 bp, Glycine max
  unsure (1)..(403): unsure at all n locations
gctcaaatgttgcgtggagggattatcaatttttgaatcncggatgagcgngatatgccgctctttgagaataatgacgagaattatgatcagataaacaatgttgatgatgaacacaatgcagtaactatggtggagtttgagcgagggatgaattattcaaggagacatgatgtgccaagaggaagatcaaaatcgcaatcgcgtccacaacgagatacgagtaacattcaatgttactattgaggtgcaaacaaatgaaggaggacttcaagatattaagagatatgaacaaaaatggcgcccactcccaagctaatgtagtaaaaagtgttgaagataaagatgatgtgtttttcgcacaaaatgatgaggttgctaaacaaaatgggtgatggattct

SEQ ID NO: 240301 - DNA, 460 bp, Glycine max
  unsure (1)..(460): unsure at all n locations
agacccccttataaaaagggtctgacattatttgaattcactctccctacgaaatactaacttctgagagttataatgctaaacttacctcttcatgtaacatagtcatttcgtgagcaataacatattgcctgcaatatcatcaaattaaagagtcaacttatcttgattatatattacanaaaaaaaaaaggattctacaactggcaattttgagaggggagacaaaagctataatgataagtgattacaagaaaaggccgacaacctgatagtacttttatcgtggaagtaagcattattatatatcattaattgaggtgtattctgaacagctgagataatgatcctttttcttctcgatcctgaatgtttaggaagaaaaccaactnacaaatcatacatcacaacaaccatcttataccccaaaatccataaatgacaatttcaattaacaact

SEQ ID NO: 240302 - DNA, 454 bp, Glycine max
  unsure (1)..(454): unsure at all n locations
agctntaaataggctctgaatttttccttcgtgcttagcttgagtaagtgggatttggcttattgccaatgctgcgctgagcctggcaagagatgaacgactctcttagcgagctgacctggcgcttagtgcactacatcgattcagatgctctaccagattccttcttcatgctaagcgcgctgaagtcgcacttagtgatggatgcgcgctcagcccaatgggtccgcttagcgaaacagtcactttagcacttcaagaattgagctccttttggcctgaaattgcacagatttcaagatttattccagtaaagagatcctaatgaacataaatcacaacatagcaaaatttatttacaattcctacaaaagaactataaattggggaaaactatacanaattttcaaaagttttctatacaaaagttagtcgtataagacgactaacaaac

SEQ ID NO: 240303 - DNA, 418 bp, Glycine max
  unsure (1)..(418): unsure at all n locations
ccttgggctgaggacctacaaatcagcaccaggggtntattttaangagactgntgacaaaggagaaaaattntagggttttgcattttcagtttcgtgttactgttcacgtagcaatcaaatttctttttctgcttcaaattgcaatttcattttatgcttctgcccttgaattcgttttcgtttctgctgattaatgaaaggctgagtctctagtattgttttctcttgaggatcaagcacaactctctttgagggtttgttagtactattgaattctgatcagtttttccccttcaccaattgctctaattttgttgctattaatccatgcatgcttaatgctngattaattaatcttgtgcttaaattacgttcatgcctaatgatncaattcgttcatgcttaatggacatgt

SEQ ID NO: 240304 - DNA, 277 bp, Glycine max
  unsure (1)..(277): unsure at all n locations
gaagcnaattacatattnttctaactgtagttcatcgcgctattgaatgaaaggtattataaataagaatgaattatactaaccttgactgtacacaaacttacattgcttccttaaggtgtaaccactacagaaacgtgatattgcaacggagccagcgcaatgcttttaaacaataagggcagtgctgttaaaaaaagtgaataggactggtgtttaactcaactgatctcgcattcagttattaaagttgaactgctccacaactgaatttatg

SEQ ID NO: 240305 - DNA, 291 bp, Glycine max
cccgtttcattaccagaaagcgcgaagaaagccatggttgcatatttaattttgcttgtatcttctggctctattgcattatcttctgtgtgtaactgcagaggtcttcgaagaagctttggagattgtatcatatatgacttttttctctccaacaatttcattggatatgtggagtctttggccattgatgattgaagcactggctgattgcgcaattgatttctttccacgatggcgctcaactactcttaactcttgtatcctctctgataattaatctcctagtgc

SEQ ID NO: 240306 - DNA, 385 bp, Glycine max
agcttctgctatcaaaagtatgtgtttgttcttcaatggctctgctcctgatatatttccactcagatttgatcctttaacaactactccacatctatgctccgttgcatacctaataaaaggaatagccaaaacatataaaaactgctaattcgtttggtagataagaattgctaaaccttgataagcttgcttcggaagttctgaagggtcaaccacaactattttttatcttataattaagtaaatatgattggtagttatacctatgaaagagcattcgaccctgctgctttcactctttaacaacaatttggttgggttcaagctcataaatcattataaatatatatgcacttactttctttgtcattatattgatact

SEQ ID NO: 240307 - DNA, 350 bp, Glycine max
  unsure (1)..(350): unsure at all n locations
tcattattntctttcaaatatgacatacttttcatcatacttttctttataacaacttcaaagcttgagtcttgatgtgaacaaaccttcgatgccacaaacatgaatcatcaacttggactttcatgacaatgttggtagcatatttgaagattattagcgaaactctatttcttttctccattttaactttggcaatctcttgccttctgttatttttatcatacattgtgcatgtatctcctttgaagtgaagaggataacctttcttcatcatttgttcaatgctcaagagattttctttaagattggaaactagtaagacatctttgatgaatctcgtacctttc

SEQ ID NO: 240308 - DNA, 416 bp, Glycine max
  unsure (1)..(416): unsure at all n locations
agcttctcaaggaggtgagcttagttattataggggtatgtgtagctaagctctagcttctcaaggaagttttctcaaagaagcttctcaaggaagtgttctcaagaaagcttctcaaggaagctacctagtctataaatagaagcatgtgtaacacttgttgtaactttgatgaatgaaagtcttatgagacacacttcaaagttccacttctctccctcttttattccttcaatttcgtgctccccccttctcactttcttttcctccattgaagcatcctctccaagcttcttatccaaggctcatcttggtggagaagctccttccatggcttattccttaatggatggcgcctcctctcacctcttctcctttgtctccgctgcattncatggtggaaatcccaataagga

SEQ ID NO: 240309 - DNA, 355 bp, Glycine max
  unsure (1)..(355): unsure at all n locations
tgcttctacagttctaagaatcagaccaatttccattgttgaatgatcctaanaacacatgcatctacatgatcaaggcagaaagcatggtagaatgaagttctgatagcacagtgaacacacaaaacatcattaaatagataaaaagatatttacatcaagaacttacaaggaagatccaacagaggttttagctttccataactgggaagcttcctttacaacaaagagaagagaatngaaagattatagaaatacaagtagtggggatgtctcctccacctctaggacctcacaatcactcacaaactcatctcaagctctcaagacagcttnctcttctagctctggtctc

SEQ ID NO: 240310 - DNA, 342 bp, Glycine max
  unsure (1)..(342): unsure at all n locations
agcttcacaggacgagcgcggagcgaacagttccttttcttacancacgcanatnntgcgcacggattgaattgaagactcaattgccgatatccgtcatgagatagccccaactgatatttttcagccgacattgcgcaattttttaataaaaacgctcgctggcagataatgttcttttttacggacgaggaagctctcttgttctggtgttgcataaagaatctacaaccgacgtcggctaggcttttctgtgcgagctcagccgacgtttcgttccggccaaaactggcatgttcccatttattcgggcaggacaacattaacccacctcggcaaaaa

SEQ ID NO: 240311 - DNA, 300 bp, Glycine max
gtataatgttagttccaccttcaatgtctctgatttatctctttttgatgcagatggagaattcgatttgaggacaaatccttctcaagagggagagaatgatgaggacatgaccaagagcaagggcaaggatccacttgaaggacttggaggacctattgatgaggacatgaccaagagcaagggcaaggatccacttgaaggacttggaggacctatgacaagggctagagcaaggaatgccaatgaagctcttcaacaagtgctgtccatactatttgaatacaagcccaatgttca

SEQ ID NO: 240312 - DNA, 437 bp, Glycine max
gtcacctgcggcatgcaagcttcgcactggagaatggagacacacgataagttgcttgcaacgacattcatggggctccgaacaaaggaggagtatggaggatcgccttaagggaccgcacttaggcgatcatgaaactcatctacacactcgaaagtggaggacacatgaacaaccctaagcaataacattcatgtggctcccgaacacgatgagctggaggattgccttgaggagcctctcttacgcgatcatggaacacagctactgactccaaaatggaggacacatgaacagcgctaagcaataacattcatgtggctacggaaaaagaccagaatggaggattgccttgacggtcctttcttaggcgataatggaacacacctccaaactccaaaatggactacacatgaatgacgatgcaattcattcat

SEQ ID NO: 240313 - DNA, 322 bp, Glycine max
  unsure (1)..(322): unsure at all n locations
tgaacatcagaccacttccagggagccggaactacttatatggactttatggggccgatgcacggngaaagccgtggaggaaagaggtatgcctatgctgttgtggaagatttctccagatttacctgagtcaactttatcagagaaacatcagacacctctgaagtattcaatgagttgagtctgagacttcatagagaagaagactgtgtcatcaagagaatcacgagtgaccatggcagacagtatgactacagcacgtttactgaattctgcacatctgaacgcatgactcatgagttctctgcagacattacaccac

SEQ ID NO: 240314 - DNA, 409 bp, Glycine max
agcttgtttgagaagagtgaggcctaactcatcgatatgcttgtgttttctttccacaataccattttgatgaagtgagagggcaaattagcctgtgaatgatcccatgggtctgaagaaatgaggtaagaggtctaaattcacctcctcaatctgtttgaacactcttaattctggtatcaaattagagttcagtcatggatttaaattgctgaaaaacagaaaatgtttctgatttatttttaagaaaatagatccaagtgaacttacaataggcatcaactaagctgatataataacagaaaccatttgaggatgaaatatgagatggtccccacaaatcactgtatataagttcaagaggagcaaaatatacagcttgagatagagaagatggtagtctatgtga

SEQ ID NO: 240315 - DNA, 359 bp, Glycine max
  unsure (1)..(359): unsure at all n locations
acaaagataactttcaccgattactttctcccctcaaatntatcaattntatgattatagcattgttttatttatcgtgatccattagtcagtttaacgtccagtactaccataaaaatgttggtaaagtttttttttaaaaaaatgatattaatgttgaacagcaggaaggttcaatactttaatagctaatctcaaatctctacatgtgtaggagttgactccacatattngaccatgtatactaaatcaggtgaattggcaaaggcggtcgtgctgtcctttactgtagccaataaaaacgatggcttgtgcaagttcacgggtagcgtccctcaattattatagaagtttgaaca

SEQ ID NO: 240316 - DNA, 443 bp, Glycine max
agcttcaagctaaggccagactcttggtttgcagaggcttctcaagaaaaaatgtcaaactcctgcaaaaaatctaatttcaagcttaaataggtgggttggtctgtgcttataatattacaaaacaactgtaaattggagaagtttgatataatatagacaagttttatacacaaaagttagtcgtattcattgactaacaactccctcaaatttacagtttttcttgtcctcaagcaaaagagaacagctcacttgtcctcaagttgtaaaacatgcaatgattatgtacaatggtgtatgcatcacaatttattgattgcatgatgagaaagatgaagcaatgtgtacctatcacttgttttcacaaaatatgcaggtagacaaagaggagaacaaaatgtgaactatacagttagatgaaattaatcataagacagata

SEQ ID NO: 240317 - DNA, 273 bp, Glycine max
  unsure (1)..(273): unsure at all n locations
gaaagaggcgttgaatttctgtctgtgatgagaagaaaagttttggcttaataaaaggtctcttttcatatttattatcaaagcacatgttcattgatgacagaaggcccttccttgctggacccctacccaaaggaaaattaccttgaatgtaatctgctatttgcggcgntttggtcaatctgcgtttctggtcgtggcgttttaacagcattatttaacctcgataacccacggtcaagtgttgtaattatcccgcacgaattaacatat

SEQ ID NO: 240318 - DNA, 427 bp, Glycine max
  unsure (1)..(427): unsure at all n locations
agctntcaacattgtctagaacgttatnatcnatatatgaatttntagcatggcttcaanaaaagtttcggtatcataagggcatcaacatcgctgaaactaaaacgggtgcttcctattaagcaccttatcctcgtaagatccaactgttggagcgagacaaagtgggngtttattaagaacatgatacttatataagttgccttgtgatcatttatgggaccagaaagtaccaaaaagagttttgtagtagtataataaaaatttagaaatgtgaggttaactacggaaccatttaatttttgaagttgttgaattggagaaagatatacttaagatatcagtaaatataaaaaataaatgatgtctaataataataaaactcatttataatgtgtgaaaaacaaagaggtgctaaattagagat

SEQ ID NO: 240319 - DNA, 455 bp, Glycine max
  unsure (1)..(455): unsure at all n locations
acactatgaatactcagcttacaaggttggtccttaggagctncattatctgcatccttcatgccctccattggcgggcccaaattttgtgtaagatttttggtagagctaggcagatccaagggtttgctttctgaatcaagagcaaatatgttcttctgatagttacaagcttctgcaagactcatatgcagcattctgtttcctctgggaatcccatgaagagttgggggtctacagacaaaagtacagataagttgtagtaaatttttcttttttcanaatgcatacaaaaacttaagtgtaactataaacacacccagaacaaagtggcattgtttagcatcacctaagctcatcaacaggaccttatattttacagaaatagcagcaaagtgaaaaacggttacccactatataatattaagacatgcttatgatgagaaaaatgtttc

SEQ ID NO: 240320 - DNA, 318 bp, Glycine max
  unsure (1)..(318): unsure at all n locations
agcttggaggtaaagtagaggatgttgattgtgtatgccattagggctaccgagagggggaagcccaaggtgattttctttgaagcagcaaggaggatgtggagggggtagaggatggtgcagttgaagtagtggattaggaaggggggttataagggattagactttggggttgtgggagtggatgcctaggggaagaggaggagggtgaaccaaagggttgggctttccatgaggagccaagctaagagggggggggggagtntgggtcccagctaggctagtggtgcttaccgtatggggcttatcaaaaggtga

SEQ ID NO: 240321 - DNA, 463 bp, Glycine max
  unsure (1)..(463): unsure at all n locations
ntgatggtgttgagaagaaatcacatgtttgtcatcatcttaaagggggagaatgtgaatgtatgtatacatgattttgatgatgtcaaaagaagaattaaacaaggctcattttgcttcaagattaatacaagattttttccacaaacaaagctttgattcaagatttcttcaagatcaagccttgcctcacaatgaaaggtttcaagtcattcaaggcacatgtaatcgattaccaatacatgtaatcgattaccaatggtttgaaagtgtgtaatcgattacacatcatatgtaatcgattaccagagactctgaacgttgggaattcaaaatttaaatgaagggtcacaactgttcaagaagaacaactgtgtaatcaattacactaattctgtaatcgataccagagaggattntaaggaatatcaccaacagcacatctatcatttggatttgatgg

SEQ ID NO: 240322 - DNA, 460 bp, Glycine max
  unsure (1)..(460): unsure at all n locations
caagcttaagaaatgaatggcctcagcaatcttcttatttccaaaaggaaattcaatcaataggcctccaatctttaatggagagggttaccactactggaaaacccaaatgcaaatttttattgaggcaatagacttaaatatttgggaagccatagaaatagggccttatatacccaccacagtagaaagaattacaatagatggaagcacatcaagtgaaagcataacaatacaaaaacctactgatagatggtctgaagaggataaaagatgagtacaatacaatttataagccaaaagtataattacatctgccctgcgaatggatgaatatttcagggtttcaaattgtaagagtgctaangaaatgtgggacactctactaataacacatgaaggaacaatagatgttaaaagatctatgataaacacactaactcatgaatatgaactattt

SEQ ID NO: 240323 - DNA, 449 bp, Glycine max
  unsure (1)..(449): unsure at all n locations
ntntctntgctacaacgcttttctcacctcttggcaactatcaaaagccaaagaactcggaaatcaacatagttacaacaatggagtagcaagatataagcatcagagtattaaatacaataagccaaactcacaaacaagaaataatcaaactagaatccaaataactgaaaatgtcaacaaccacaaaacatccaagactgaaatttaaaatccacaagataaataagcaaagtacttagcataataatgtaaattctaagaaactaaaagccaaaatacacggcttataaaagataaataatcagaatctaatagctaagaagacggaggaggtggtggaagatcgaaactctgacgaatgtatccgacatcctcttcaagctgtgtaagacgaatgccataccggcaaagcgtgaatctaacgagtcaaagcggtcaccaacata

SEQ ID NO: 240324 - DNA, 472 bp, Glycine max
  unsure (1)..(472): unsure at all n locations
agcttctatataagctgaaccattntatttatttacacangttgagttttattcagaaaattagagtttatctcttttatcttagtgagagtgattctcctaaattcttgagtgattcaagaacaccctggctgtatcaaaggactttcacaacctttgtgtgttgccctcgctggaaagagtgattctttccttcctttcatcttcacccttgttctttcaaaccacaattccagaaaatccacctctgcccagaattatctcgtggccataactcccgttttacgcactcaaattaagtgattcttgagcctaaattgaatttcaaaacgagacctttcacctcgttntggaatcacctcatttggagccctgtagcttcagttattgccatttctatatttctgtccangccaccacttaacctacgtttaccatcccattcatccattttatgccangaaccacctga

SEQ ID NO: 240325 - DNA, 426 bp, Glycine max
actataactcgctctttagctgacctttataataaccaagttgtgtttattcagaaaattagagtttatctcttttatcttagtgagagtgattctcctaaattcttgagtgattcaagaacaccttggctgtatcaaaggactttcacaacctttgtgtgttgccctcgctggaaagagtgattctttccttcctttcatcatcacccttgttctttcaaaccacaattccagaaaatccacctctgcccagaattatctcgtggccataacttccattttacgcactcaaattaagtgattcttgagcctaaattgaatttcaaaacgagacctttcacctcgttttggaatcacctcatttggagccctgtagcttcagttattgccatttctatatttcttgtcagccaccacttaacctac

SEQ ID NO: 240326 - DNA, 429 bp, Glycine max
  unsure (1)..(429): unsure at all n locations
agctntatgcaagtcaattntcaggaggcttcttggagaggatcttttccgtgcatatttgcgcaaaatctcttgaactagaaagatgttgtccatcatctttctgttcttaatgaaggcagtttgagtttccccaataatagtctcaaacattggggctatgcggttggccagaattttagacacaatcttgtataacaaattacagcaagatatgggtctaaaatggttaacctgngaggcctgatcatacttaggaataagcgcaataatagcatggttgatttgctttaaaaattttcaagttgtaaagaattcattaaccgcctcaaagatatcatcaccaatgatattccaagccttcttgaagaataaagcattgaaaccatctggccctggagcnnttattgtatccatcacagaaataat

SEQ ID NO: 240327 - DNA, 368 bp, Glycine max
tagcggtaaatgcgatggatgaatggaagtctcaagagttgaaacagataagggatgtgtcgactccaaaatgatttatattggagacattgtgcaaggccagtgtgattaaatgtgacgacaataagggagatccatgcttgatgcatctacgggtgttacatgatgtggaaagatgcccaatagctgaagagttgctgcaaggactgataaatatgggtcaaattgaaatccacagtgccaaaaaggaggaaggagaggtattcatgcagtcgagtgatataagcccaagtaagcctaaacctttggtgatgcatttcaccagggatattactactcatatacctcgaggttttcagccctttata

SEQ ID NO: 240328 - DNA, 402 bp, Glycine max
  unsure (1)..(402): unsure at all n locations
cccggatccttaagtcaccgcggctgcaactaatcctacgctcttatattttttcctntcattttccaccattccctaacttgaaataggcgaattctccatcagttttcaaagagtcaaacatctcttgatctctacaaatatgttctgaggtagccgaatcgattacccattttgttntagcaacctcatcgtttgttgccaaaaacaagtcatcttcatcttcaaccctttttactgcattagctttggagttgacaccatctttgttcatatctcttaatttctttgagttctccttcatttgtttgcacctctcttgtgtaacaccctctatcctgatgtacatatttatataataaaatacatgaaaatacggaattacataaaatgagaatttac

SEQ ID NO: 240329 - DNA, 415 bp, Glycine max
  unsure (1)..(415): unsure at all n locations
tggtaattaggtaaacaattaattaaactttgacattgttggttgtctccttgaggaatctgccagcacttgtttattgtattgtatatgaaatangactggatgattacttaattgttacttgtagtcatattaagatatgtgacctcgtcttgattttctttatttgtaagaaaaattgcttgttaatatttaattaatagttgtgttgcaattaaattttatctgagctaaacttgttaaaataaatcatattaattagtttgtgtatagattaaaataaaattagcaagctattagaaatgttgctatatgtgtgagaaaatgaataactggagttaaattagatagttagaggagtgtaagattaaattaattaattangtgaagggtagattatgttaattaaagtaat

SEQ ID NO: 240330 - DNA, 212 bp, Glycine max
agaatgaaataaaagaagaggtcccatcatgcttcttaagcaacaatttaaaaaaaactcactttagattatactgatcaaacaaatacatttgtgctcattgcaaaattgccagatgataaaagagtaaggggatactggaatgacctactagcgtcttcttcgacgataactgagtaatattcatgcgtcacagtatcaaaatgcttgat

SEQ ID NO: 240331 - DNA, 210 bp, Glycine max
agaaagaaaagggattagagccttcattgtactatctgcatgcaatgaaaatctctcccttcacaaacattattttcaaattcctatggtgaggacatatgacaatgggttgcaagcctggcgttaaaattcacaatgatccactggcaacgagtcttcgatcataattccactgagatacgttagagtgtatattgggaaatagaaagg

SEQ ID NO: 240332 - DNA, 276 bp, Glycine max
  unsure (1)..(276): unsure at all n locations
catgcgacactnccatatcgataaattgctaaatctttttttaggatccataggtataggtcgaacataaaacaagttataataaggcacattgcattaactattgtgccaagcaaaccaaaacanaataaaatgacttacctggcacagatgaatcgggaggcattggatgaacctgtttcccgtgatgcatgaataggggaataatcttgttatcagcagaatcccaacttcttatagacataatcatattagacatccaaacccaaaatgcat

SEQ ID NO: 240333 - DNA, 382 bp, Glycine max
ttactaccatgggattctacggaagacaaaggataagaggttaaaggctgcgccatccactagggaataagccatggaagaaggagcttcaccaccaagatgagccttggatagaaagcttggagaggatgcttcaatggaggaaaagaaagatggagagaaagagagaggggggagcacgaaatttaatgaagaaaaagggagagaagttgaactttgagttgtgcctcacaagactctcattcatcaaagtggcacaagtgttacacatgcttctatttatagactaagtagcttccttgacaagcattcttgaaaaactttcttgaaagcatatttataatacttcttgagaacttgagctagctaccacactctctat

SEQ ID NO: 240334 - DNA, 306 bp, Glycine max
tatattatctccccgaatcggacatcctcgttagaagatatgaccattttaatttctcgaatgctcccggtgttcatctccagcatctcattatattatgtcctaaaatcgaacatcactgtgaaaagttatgaccattctaatttctcgagagctttcgctgttcaatttcgagcgtcttgatatattgtggtcccgaatcggacatctgtgtgaaagttataaccatccatttctcgagagtctcgctgtcaactttagcgctggtatattatatctcgatcggacattggtggaagtatgaca

SEQ ID NO: 240335 - DNA, 205 bp, Glycine max
  unsure (1)..(205): unsure at all n locations
gatttcaaatgttaaaaaccagaatacacaatacccttaagctaaccgacaagcatattttggatgaaatttactaccggcagcctttcacgtatgcaggttatacaattcggtttcaatgtatgcaacggaaagatgatgctgatgttaacacaattgttaatgtgttatccatgaattttcgtntgttgggcctgattgagtt

SEQ ID NO: 240336 - DNA, 372 bp, Glycine max
cgtgccaccccggaagattaagccaagcccctactttcgaggggcaactcccaccttatgaagactatcccgggcaagacgatggggaaggagatacccatcttggccccctgctccacctcaaagatccgtccccacatgaactaccccaaccgaacatagtccgtcatatcccggcctacccacacccgttaaagaatctgttccctttgcggaagataaggggaagattgacgcgcttgaagagaggtcaagagcagtcgagggccttggcaattacccaatctcagaattggcggattcatgtctgtgccaacatcgtatccctccagttcaagtaccgactttgttagtcaaagggacacatgtcaa

SEQ ID NO: 240337 - DNA, 448 bp, Glycine max
  unsure (1)..(448): unsure at all n locations
cagcagcccatgaagatatatgcgtatctcctgtttggngaatgcngngaaacatttcccgaacgcccaanatggactcggatgaatgcatgaattgatgaaagaacatgttttggaaacattgggttgacttaaataggaaaaataaattatgaggcctagtgtcacatgaccatataaacttgatgctagagtgttcacatgggtgcatgcatgaccagttttgcataaaatttccaaatcatcattgttgtatgagtgtcatggaaataaatgtgggacatcccctttattcttgaaccgctggccaaaccaacaccctgacatacatcatgttcggccgttctgcaagccttttgacccgagattctaaaccaccatacaccttgacccagtatgagaaactcattcactattgaacttctaacactctgacatacattatgtc

SEQ ID NO: 240338 - DNA, 335 bp, Glycine max
tattcgtacaacattacttaaacaaaaactgaatccgcagatccgtctggcaagactaagcttcaattctgcttcattcaaggtctaaggaaacaatacatttcccaatggtgaaatcacctaactaggcccacaaatgggtgatcagaccaagagcatacaaaacttaagcactgaataagcattgcacacaggaaacaaaatcaattagatgtgaaaattacttcatcaggtgttcattaaaatccccacaaaggtgttagccagccattacaaatgaaatctctacaatattaagcttacaaaacctatggttctctgcaaaagcttactct

SEQ ID NO: 240339 - DNA, 107 bp, Glycine max
ccaaacaacaaaacccgaaacaacaaaaaaacaaacacgaaacaaaagaaaacagaaaaacaaaaaaacagaaagggaaagagaaacaaaaaacaacaaaaaaaaaa

SEQ ID NO: 240340 - DNA, 419 bp, Glycine max
  unsure (1)..(419): unsure at all n locations
ctcaagacacctgcggcatgcaagctngcaaggaagtttctctttaaacntttatggaagctacctagtctataaatagaagcatgtgtaatacttgttgtaactctgatgaatgagagtcttatgagacacaactcaaagttcaacttctatccctttattccttccttcaatttcgtgctcccccctctctctatctctccctctttcttttcctccattgaagcatcctttccaagcttcttatccaaggctcatcttggtggtgaagctccttcttccatggcttattccctagtggatggcgcctcctctcacctcttctcctttgtcttccgctgcatctccatggtggaaaatcaccattaaaggatctcattgaagctcatagatccatccttcatagaatcctcacaagc

SEQ ID NO: 240341 - DNA, 404 bp, Glycine max
  unsure (1)..(404): unsure at all n locations
gacatncaccacagattctgccttcttctattttcagattgggaatgcctctaacagcacctttgtcaatgattttcttcatgcctcttaagtgcagatgtccaaatctttgatgccatatnttgacttcatcttctttggagaatagacatgtggaggagtaactggtttcttgaggtgtccataggtaacagttgtcctttgatctgctgcccttcattagaacttcactcttctcatttgtcaccaagcattctgactttgtgaagtttacattgaatccttcatcacacaactgactgatgctgatcaagtctccagtcagtcccttcaccagcagtactttgttcaaactaggaagtccatcatggactagctttcccattccagtgatctttccttta

SEQ ID NO: 240342 - DNA, 341 bp, Glycine max
ccttgtgctgctccgggctctattggcccttgatccggtccatgtactttcgggccacggctatcatgataatactattattatgcgatggttgatgaaattgatggttgtgttgatgaaattgaagaagggaatgatggagggatgaaggaatggaagggtctgtgtttgtgtctgcggatgttggtgagttattttgcggtggagcattgggtcgttcgagcgtgcttgcgtttccttatatctgccagggatagggggtaagggaaccggttaacgaggtttcacttttgcagtttcagcgcggttggatgatgatggtctcggtgttctgggaagcg

SEQ ID NO: 240343 - DNA, 447 bp, Glycine max
  unsure (1)..(447): unsure at all n locations
actaagctctttggagtagaaacatgggaccaactcattntataanaaaagacatcatatctagtcaaggtctgagagaccatacaagtttctttaacgattcctaattatgtgggccattaagtctatcatatgctgacaatagccgagaagcccatgaatctcttcgggggcggagtaggtgtctgccatcgccttggccttggctaacaatcggggaagttcttgactcccgttcaaggtaagagcaaactgatccatccacatggttgcctcttggtgtaaagagtcgatcacccttcctctagcctctttttccgcatatacttgggcatactcatccgcgattctatgctcgtgggccgtggctagacccaactcttcttggtacttggcgatgatagctaacatgttggtttctgtctcgcatagacgctgagacaagct

SEQ ID NO: 240344 - DNA, 445 bp, Glycine max
  unsure (1)..(445): unsure at all n locations
gctcaactgttcacacttaacacatactcatgagttctacaaacaaaataaagtaaaaacaagacaaaatgggacaaaaattacgtccaaatacaatcaaatagcagtttatcaagtgtgtttaaacattttaaggaaatctttgctactaatttaatatgccaatgttaatgatttggcaagcgtaccanatgtccaagtagtaaagactcagaagtccgagtgtcaagttttacagggactttgttttgtacttgtgttagataattcccaatttataaaaatagaagatgaattgaggtataaaagatgaatttaaaagaacaggataataaatactaatagagaacataaggaaataatagagaaatagatgagatgaggatgttatgacctaacatgccttatttgcctaaggtgattaattgagattcttcttatcaat

SEQ ID NO: 240345 - DNA, 420 bp, Glycine max
tgtcaagcccttgagcctggtcaagtgttgtctaggctgcttctgtcaagttgtttgggctgaacatgctcttgtaggctagttttgacgcgttatgtgagggaagcctctatatttgacaactctgccctttttttttaccgttggagagtgcattgaagacaaacgttacacaatggagtgggcacataccagagacttggtgcgtgggtgagtggggttgcgttgtggtgcaaaaaattagggcactacttcagctcccgccaattaccgaaaagtctgtctcctctttaaattgagtggatgtttgatttctaatcatcgccacttcaaatttctttctttctctcaaagtctctctgctttcgcgcttgcttcttgcgattacttttcttcttattcatcctcttaatcttaagg

SEQ ID NO: 240346 - DNA, 316 bp, Glycine max
gaattggtgattcaatgccaagaaacttcaagcatttagaaaacatctcatattggataattaacaccacaaacattattggacccacttaccccaagccatatcatcgacacaagatacctgttggatgggagaaaattaagatctgaacatcacgaggtctaatcctgcatatctttggtattcccacccaccttcatcttcagattcacgagaacctaagttgttgcagcttcaaactaaaacaacatatgcatagaataagttaagatagagaacatgtgcaattgagtagagagagagaaagagatattac

SEQ ID NO: 240347 - DNA, 408 bp, Glycine max
tcattagggcttagagctgtgacctgtgcgataaattctgaggcactttcctgctcattgacaaaaaggttacttctccatgagaattcccactgccaaccttcttctacaaaggaccccatgcttgccactaacacaagtttgtgagaggatatttgatacaattcaggatatttttctctaagagttattccatcacccacccaagagtcttcccaaaataatatttggtcgccactgtccaatttccactggaactgttttaagacctcacccatgctgctgtgatgcattacagacttcaaatcagaccaccaaaaggaatgggtatcggctaaatatgttctatacatgattgtcatactcacaaaacttgagcaagtttgcgagtccactgcaaaaaatatg

SEQ ID NO: 240348 - DNA, 434 bp, Glycine max
catgcaagcgtaatgaaacattctgcctgtagaactatatgttgttatataaactattcctcataaaacaactgttttttttcattacatcttggccaaacagagcattacattgtgagatgttgctaaaatggcacgagaattaaacttgtaccacgcagtcaagcacgcacttgaggttgtactcagtggatgttatctaaatgtcgatggagttacgatgaaatacaggaaataagcgacactactgttgtatgtcgcagcgaaacacaatatgtatgagtgtgtatatagtttatatgatctatgaagaatctgtatataaaggggctcagatatgtttgcacctttagagttgacttgatcggttgaattacaatgttaacggctcatacttatatttaggattgggagctatttgctaaagatgacct

SEQ ID NO: 240349 - DNA, 310 bp, Glycine max
tgattattaaacactacaaacgggagtactaagcacttagtaactatctttaacaaaaagtgaatacaacattacaaaaataaccatcaattggaggaatttgatacaatttacacaaggtttatacacaaaagttagtcgtattccataactaacaacttccccatatttatagttttgcttgttctcaaacaaataaagaacagcttactggtccccaagcgacaaaaacatgcaatgactatgtacaaaggtgtatgcaacaaaagttattgatcgcatgataaaagaatgaagcaaaatggcctca

SEQ ID NO: 240350 - DNA, 434 bp, Glycine max
  unsure (1)..(434): unsure at all n locations
agcttctgatagcatcaggagcctctctatattagaactccatttgaccaatgtgtgtgaaaacctctgcagctcctataaggaagtactgaggcacttgccaaaagattgacaagggaacggtttcaagatcatagtagttgttttttctgataatatcaaggcgaacaacctctaaaatgccagcaacaatcatggagatgatggagatgacaaggccgatgcctatgcgttgaagctgtgtgaatccttgttcatggccaatgaactttcttgcaaatgggacaatcatgcgatcatacactgnggcccaaaagatgacacttagggtgtcaaaaagggagagggatgctganggaattgtgaagtgtngaccaatgtgttggtccattttgttgccttgaacacacacatggtgctcatttgactgtaca

SEQ ID NO: 240351 - DNA, 434 bp, Glycine max
  unsure (1)..(434): unsure at all n locations
tcaatttacataataagtatcttaacattntaattttcataataagtatctttagcggattagactcgggtcaattgattccgtttctcattgttaaaaattttacacacacaaaattaaatatttccaaggtttactattacagtgtaaatgtttgctagttaaatttcttcaatgtatttatagtagttttttttttagaaattaaactcaagtattaaagtatttacaacatttcacatataaccgaattagatatttttagcatatttatactaaaactgttatataaacataataaaaattaatttaaatatgtgacaaatgtaaaaataaaaaataaatcataatttaattataaattatcatatatgataaatttattaattntatattaattattttaaaattattcttaatatcttgattaatga

SEQ ID NO: 240352 - DNA, 472 bp, Glycine max
agcttctacttatgtggcagggtgggctttcttcactttcttgcctcaactgcgagctttgaccaccgcttttccttcccgcgatgcttctcttcatatccgcctgagtgggtttatagcctaaaccatacttcccacgatttcctttggcatttatcaggctagttatgtcgccgttgtctttgcccaaacccattccgggttcgtaaccgtttcccaacataactcgagccatcattactgctgcatcggacaggcaagcttgcccagagaatgagtccacggaggaaatgcttaccacctcaaaagattggaaagcggtttctaatgactcctctgcggcttccacatcaggcatagaggacgggcagctcaccaagatgtcttcctcgtctgacacgatgaccaaatgcccctccactacgaatttcaacttttggtggagtgtagagggaacaactcccactgagtg

SEQ ID NO: 240353 - DNA, 434 bp, Glycine max
  unsure (1)..(434): unsure at all n locations
ntntattttcagtagatgaacatgaatttgtggccacctcatggactcctctaaggacaatagcatcatttcttgcacttaattgttgggagttggaaatcatcttctctatcaagttcctagcctcagcaggggtcatatcaccaagagctccaccactggcagcatcaatcatactcctttccatgttgctaagtccctcatagaaatattgaagaaggagttgctcagaaatctaatctagtggtgaggacagcttgcacttaatttcttgaatctttcccagtactcatacaaactctctccactaagtttcatgatgcctgaaatgtcttttttgatggtgatggtcctagatgcagggaataatttctccaagaacaccctcttaaggtcatcccagctgaaaatggacctgngagcaaggtagtata

SEQ ID NO: 240354 - DNA, 439 bp, Glycine max
  unsure (1)..(439): unsure at all n locations
agctnntccagctttcattggtgtatnttgatctccttttggtgctctaaaatgtgggaatatgctcaaatatgtggggcaattttggtttgttttcttgcgtgattgggttgaattgggggtttgtatgggatggccctaggcctataatgcattttgaagcaatgggacatgccacattgtccccgttctcttgctattgatgcctaaacgcgcgcccaccaagtgttcggtgaaatgcctcaatggcattagcgcgtgatttttgtaaggaaacaacccatggggcattttggtttgcccatattttccattttttttgggacatgcattcatttccgaaagggctagagtaattgccccacatatatcctaggcctaggaaccaaagtttttatgcaaaagaacacaagagtgggtgcatatttgggtaaagtac

SEQ ID NO: 240355 - DNA, 424 bp, Glycine max
  unsure (1)..(424): unsure at all n locations
ntgatgcaacattnggagaggttaatgaaacaacgagatgatgcgctccatgagaggttggatcaaatggagaatagagatcataatgaagaagaaaggaggagaagagggaatgatggtgttcctagacaaaaccgaattgatggtattaaactcaacattcctccatttaaaggaaagaatgatccggaggcctacttggagtgggcgatgaaaatagagcatgttttctcatgcaacaactatgaggaggaccagaaggtgaagcttgccgccacggagttttccgactatgctcttgtgtggtggaacaagctacaaaaagagagagcaagaattgtggtttgaaagaacaagggtgatgatgaaaggaaggaaagaatcactctttccagcgagggcaacacacaaaggttgagaaagt

SEQ ID NO: 240356 - DNA, 396 bp, Glycine max
ggatcctctaagtcaccgcagctgcaactttttttgtgggggggaaatacatgacacttatgcaagataaaaacccgtaaaatcgttttcagcttttcttcatcataaatgtgaaagaaattaattgcttgttcttctaattccttttttatttaaccaaatgtgttgagagaatattctatttttctttgcttaattttctttatattctcaacccttttaaagaatatataaaatgttactaacttttcatattttttatttcctttcttataagttatgttttatttaatcctcaagtacaggcttagctgcgtgtttcttgtctctaccacatgaccacatggcaatgaacttattatatatattaaacttgtgcacaacattcttctctta

SEQ ID NO: 240357 - DNA, 419 bp, Glycine max
  unsure (1)..(419): unsure at all n locations
ctntgaaaacaacttttgctactggtaatcgattacaataaactggtaatcaattaccagagagtaaaaactctttggtaaaaggttttgtgaaaaattcatgtgctacacaatgttttgaaaaacttttcagtacttatcatgattgagtcttttcttgattcttgaatcttgagtcgtgaatcttgttcttgattattcttgattcttgaaaacttgaaacttgaaacttctcttgaatctttctcttgattcttgaattgttcttaactcaatcttgaaattattctcttgggctttttgtcatcatctttgttatcatcaaaaaaccttgaatcaatcttgattcatcatcatgaagcaatgaagtttgcttctacaagcaacacatataaaaaaggatctcttgattggaacat

SEQ ID NO: 240358 - DNA, 414 bp, Glycine max
  unsure (1)..(414): unsure at all n locations
agcttattggaaatctcaagaaccgtgggttgcttgtggactgtatgtangcataggttgtgaccgaactantataaatcttgtgtttgctttcttcttccttacaatctttatttttacgctgtacatttttttatttctgctttacttttggttaagttattggttctgttctttactttcttataacttagtagtaaagcctaattgaatctagtaacattaagaaggataaaattttaattagtcaagacacgttcataattaattcaacccccctcttcttaattattctgaggccactcgatccaacatgatctttattttggagaaaatttatgtgtttgtatttgcaacttgcaaggtactgctttgtaaatcagttcgaaagaatattggctactggtaattgat

SEQ ID NO: 240359 - DNA, 417 bp, Glycine max
tctctgaagctgtggatgaggaataacttagaaaatttttcagtcatccactcgctcagtgcgccccgtgcgctaagcgaatcattcttcttgcactgagcgagtagtcactcgcgctaagcgtgccaaccccaaaccattggctgaaggggcctcgctaagcgagaccactgcgctgagcccaaaaacctctttggaattgcatttattggaattgagctgagcgagtcatctcgctaaaggcgcaacatcatctcgctaagcacaattctttctctacttggaccctcatgccaattgggctaagtgatcgaggccgtacccgaatcaaataaacattaaaatgctgtaactaggaagtgatcctaggtcatttcccaacgagcaatgatataccaaatgttcataacagatagt

SEQ ID NO: 240360 - DNA, 457 bp, Glycine max
agctttgtcacccatgaacgttatgataactactaccattgggcaaccagagtaccctggtcgtgtgcgtgctgctggagctgatgtcaccatcaaacaatactgtggaccgacttcaaggagcacccacatgtctatgtccatggctcttgaagaccttgagcagctaatacaaaaaatcagggaccagttggaggagttgatcacagaaaaaatgattcgacaactaatgatgttctttagctagatgcagttgcaaatgcaatcgtagatgcaatcacagggactgggactacctcctcagcctgaggttggtccttttgctgctcgtgtcagcacaaaggaaagttatgtatatcccttggagcaagacccagacactggtgactcagagaaatgtgggtagcatgctgatgagaatcatctccgactgattgccttgaaagagttataatgg

SEQ ID NO: 240361 - DNA, 428 bp, Glycine max
  unsure (1)..(428): unsure at all n locations
tgtgcaaatcaaatcactcctacattttatctatagcatgcattgtatgttggtctcgtcctttgtcacgggaagccggaaggtccatatcaccttcttaattgtacacatggggcactgcgcccccaaatgcgcgagtaagaagagataattttccgggctctcgtgtccgtaaaatgcattcatatcatgcatcgcataagcatctcttcataacatcataatggacatatcctgcatttgtccgttatcatattccagcctcacattttgcatgagtcatggcatcatcatgcatatgcgttcaacaaactttntgatctgcaaaattgcataccatttgttttcatgtttgctcatccttgcgttttcctctacaaaacaaaaacaaagaagggggaagcgtgaaacttcacactacattctta

SEQ ID NO: 240362 - DNA, 461 bp, Glycine max
tgcaagcttccttgctcaactgttcacacttaacacatacccatgagttctacaaacaaaataaagtaaaaacaagacaaaatgggacaaaaattatgtccaaatacaatcaaatagcagtttatcaagtgtgtttaaacattttaaggaaatttttgctactaatttaatatgccaatgttaatgatttggcaagcgtaccaaatgtccaagtagtaaagactcaaaagtccgagtgtcaatttttacagggactttgttttgtacttgtgttagataatttccaatttataaaaatagaagatgaaatgaggtataaaagatgatatttaaagaacaggataataaatactaatagagaacaaaaggaaataatagagaaataaatgagatgaggatgttaggacctaacatgccttatttgcctaaggtgtattaattgagaattttccttatcaatt

SEQ ID NO: 240363 - DNA, 435 bp, Glycine max
  unsure (1)..(435): unsure at all n locations
tgtcaagcccttgagcctggtcaagtgttgtctaagctgcttctgtctagttgtttgggctgaacatgcttttgtaggctagttttgacgcgttaggtgagggaagcctctatatttgacaactctgccctntttttttaccgttggagagtgcattgaagacaaacgttacacaatggagtgggcacatacaagagacgtggtgcgtgggtgagtggggttgcgttgtggtgcaaaaaattagggcactacttcagctcccgccaattaccgaanagtctgtctcctctttaaattgagtggatgtttgatttctaatcatcgtcacttcaaatttctttctttctctcaaagtctctttgctttcgtgcttgcttcttgcgattccttntcttcttcattcatcctcttcaatcttcaaggtattccttctct

SEQ ID NO: 240364 - DNA, 427 bp, Glycine max
tgacaatccctagatgctctacacatgcactacacgctgcttctgactcgatggtggaggacacacaactataacagctacatggggctccttaagaagggggaagacatctgtataatgacacttatcaatttctattcttacgtccgaaatcgcatgtggaagacacatgacccattgcacagttcatcgtgctcagaaatgattgagaatggagaattgctctacgcaatcactacacatatctggcaccactatagttgccgacacatgaatgaaaacgcatctcctggttctccgaagaggatgatagatgacaaatgctctacactatcactacgcatatttctctactagaatgtgtgtgacacatcaatgataatgcgattcctggtgctccgaatagattctgaacggacaactgcgc

SEQ ID NO: 240365 - DNA, 392 bp, Glycine max
agcatttataaaacatctcaaattgaataataaacacgaaaaacataatccaacccacttaccccaagcaatattatcgacacaagatcctgtttggatgtgagaaaattaaaatctgaacatcacgaggtctaatcctccatatctttggtattcccacccaccttcgtcttcaaattcacgagaacctaagttgttgcagcttcaaactaaaacaccaaaaacaaaatagaagttaaaatagaaaacatgtgcaattgagtagagagagagaaagagatagtaccaagggcaagacatcggtggtgttagagtggaagttatcaagaaggtcgaaatcgaagtcgaaggtatttagatctcctatatcgttgaaacctcgacaacattcg

SEQ ID NO: 240366 - DNA, 430 bp, Glycine max
tcattagggcttagagctgtgacctgttcgataaattctgaggcacttccctgctcattgtcaaaaaggtttcttctccatgagaattcccactgccaaccttcttctccaaaggaccccatgcttcccactaacagaagtttgtgagaggatatttgatacaattcaggatatttttctctaagagttattccatcacccacccaagagtcttcccaaaataatatttggtcgccactgtccaatttccactggaactgttttaagacctcagccatgctgctgtgatgcattacagacttcaaatcagaccaccaaaaggaatgggtatcggctaaatatgttctatacatgattgtcatactcacaaaacttgggcaagtttgcgagtccagggtaaaaaatatgtgctgtcccactaggaaaattg

SEQ ID NO: 240367 - DNA, 451 bp, Glycine max
gcttgctatttgacagaaggagaattttctatatagttaaaggcatcaaaaacaaactataaaaaatatgtgtgacaactactataaacaaaacatttattacaatgcacattctaagatggtatacagaactgttttaccatgtcacgcgatgaaaactctgaaaatatgagatatgttaatgaatacagtgttacaaaaatcaaatcgaaaactactgttttacgacgattctgtgaaaactgtcttagaaggataattatttaacgatggcttcatgactccataaaaccgtcttagaggttaatgatctaattctcatgtctccatctcctctttagtttctcacactccatctctttacaagtttccactcttcctcttgcaactccctactccattcctataactcttcgatacagcacccaaatgctcgcaacaacaacaatga

SEQ ID NO: 240368 - DNA, 432 bp, Glycine max
  unsure (1)..(432): unsure at all n locations
agctngactaggcgagttgattntagccttactttctctttagttattagtcaattcaattaagaatgagaaatcccaaagagaaaatgtccgattgatttttcgctttattttactaaaaggcatttttttattattatattattattttacctctttttttatttccaacgtggttacggcacgaccgaatggtcggaattcattttaatcgaaattaacgaatgatacaattcaaacgatcggtggaaatttattttatttttagattaggcgagaaacgacttaaataaatggcttaagcacgtcaaaagggggtataaaaagcgaatgaaaacgagaataaaaatacatgaaacataatgtggaccaccacgggtacatagaatgaattgaaaagctcggtttgaagtacttacccattgaagactg

SEQ ID NO: 240369 - DNA, 432 bp, Glycine max
  unsure (1)..(432): unsure at all n locations
ntgcaatatagatatatacatttagggtgaaggaacggatatcaaacacactataaataattgtcttcgtgaacaaaacccataagttaagttggatttgtattcaaaatgtggatgttaaaagtttacattccaatcgaaaattaattgcaaagtagaaataaaaatccgtatcgaagtgcaccttgaataattgagatcaccctaactaaaaaattgaataatttagatattttgaagtcgcatttgaaatttatcatgaatacttttaagctgttgagagttgagacaaatttttttttgaacggtaagagttgaaacaattcagtcatcggcttgtcaagttaaagttgttgagacttaattcgattatgtgagagattgtcttaatccatgactattctcacgttgcctttnttctcacttgtgttg

SEQ ID NO: 240370 - DNA, 473 bp, Glycine max
  unsure (1)..(473): unsure at all n locations
ctcgaccgggatccttaagtcacctgcggcatgcaagcttgtcctttctcgcgtgctaggctcaaatcactcctatcaggtatgggacaagattcacgagcatttcagccttcacaccaagtctagagcacgacaattacggaccgcgatgtgtgctgtctcattcgaaggcaaaacaatggatgagtaccttcacaaaatcaaaggctacatcgacgagcttgctggcattggagttctagtacgacatgtcgacgctattcttgaaggtctaccttcgaactatgcgccagtagttttcgtgattgaaagaaagaaacgtacaccatccattgcagagattgcggctctgctntatggccacgaaactcgccttgttcgatacaatcgagacactcagatgctngtgtctccatccctgaattacactcaaggttatttgtatggaagctcatataaaggtaatgattctg

SEQ ID NO: 240371 - DNA, 424 bp, Glycine max
  unsure (1)..(424): unsure at all n locations
tgtgactcttggcaatttctttaanactagtcacttaaaaaagttgtgacttttgaaaaaatcttcagaaacaagtcacttgaagaattgtgacttttggaaatgtatttttcaaaattagttactggtaatcgattaccattaaggtgtaatcgattacacgtcaatagatgtgactcttcattttgaattttgaaaattaaaacgtttagaagctctggtaatcgattacaagtattgtgtaatcgattacacaagttcaaaatgatttaaaactgtttaaacataagttttaactcttgaaatttgaaatcttaatgttttaaaacactggtaatcgattacatgattctggtaatcgattaccagagagtaaaactctttggtaatgattntgtgaaaacttcttgtgctacccaatgtt

SEQ ID NO: 240372 - DNA, 288 bp, Glycine max
agcttcggcatgagaggtgcactagagataatcttttgactgataaacgaacgagggtctagagagcaagacacattctcgtgtacagatgaaaatgcaaaggcgagggtggagtccaaagaaattcaacaactctacctatatttggggaaacacaaattcttattttacaaaagaatgaaatgctgaataatcctcaaattctagtcgcaaagacctaaatagaacacttcatccggcggtaaataaaatacctctaaaaattcatcactcccttaaaaatgtcac

SEQ ID NO: 240373 - DNA, 421 bp, Glycine max
tgccaaatgccaacatatccaactttcctttgttattgttctttttgttttaggtttttttttctcatcctaatgcattgtatcccttctctaaaagaattatttttaccccccaaaaaggacttataacattctcaacactgaatggattaaacaaatgactgcaatacaaacacttccaatgttgataatcatagatcagtaaagcaaggactcacatgatcagaaagatgcattggacagaaataattaacacacggaggtggagacattcttttccaacatgagctaagaggcggcagcatccttctatcatataagcgtgcgaaggcatcactgcaagacatggacaggctaacatcagtttgaaataaaaaagatgaattaattaacataattaatcaccacacatatttacctc

SEQ ID NO: 240374 - DNA, 469 bp, Glycine max
agcttgaaggtttgtacatgaccaaatctttacttaatcgcctttacctaaagcaatctttgtattcgcttaaaatgcatgatgatagatcagtaggataacaattggatttgtttaataaactgattctagaccttgaaaatattgatgtcactattgatgatgaggatcaagctttgttattgttgtgctctttgcctaagagttactctcatttcaaagagactttattgtttggaagagattctatttctcttgatgaagtgcaggttgctctgaattcaaaggaatcgaatgaaagaaaggaaaagaagtcctctgcaagtggtgaagggttgacagcaagaggcaagaccttctagagagatattgtattagataagaagaagcaaaagccagagcatcagaagaatggtgaaggaaacatcttcaaaatcagatgttatcacttgaaaaaggagggtcatac

SEQ ID NO: 240375 - DNA, 424 bp, Glycine max
ctgtagctatgatggctaagtgctactgtcccctacacattcgtaaatcatgggttacatggacccattggggttagcaacccttgctttgtgcggtgtatcatgtcacaaacaatggcttggtgaatgagttttttgagaggttgcaccaggaggcatcttccttaccattgtccggtggacaaatgatcatcactctacatgattagtgttgtctactgcacttgcctatgacacgtaaggcccttgatcatatgccatcattctttgtcagagaggccaggaagaccttgctaatgactcatctgggcattgcaacacacacagacgcttttatggtggcaaacgcaagtgccatggtgaggttggcatggctacaagacctttatcaccgctacattgagtcaggctcttaggctacaat

SEQ ID NO: 240376 - DNA, 440 bp, Glycine max
  unsure (1)..(440): unsure at all n locations
agcttgcatatggaattgcgaaagccccactttatcattaggattagtacctgacatctcaaacaaacaaatcaaacgtaacaagacaattatagttgttgtttgaatacctcacccactcaagtttatcacacaatgatggcttttctctaatgaaacactcttgccttttaccactctaattccccttgagttcttaggcaattcaagagattatggccacaacaaagaacaattcaccaatatgtgtaaggtaaggctagagagacaaggaaaaggttaacaaggaaaaaggctaacaatgtttttaggcacaaatgaaggaaataaaattcagaatttaggaattcaggtaacattccttcatgcaaccaatatattaccttaaagagatttttttttanaagttcttcaagcatgaaccattcagcccaatttta

SEQ ID NO: 240377 - DNA, 416 bp, Glycine max
cttgccttgcccttgatatatttgagggactcattgatatgaaccctcatggcacaagggctgacttaggatcgtctaggattaaaccttgatggaaaatgcggaaattgattaaggaaaggatggaaaataaggtggttaatttcgtgggtcttaataaggtggtttctggcataaaatagatgaatgggatggtaaaacgtaggttaagtggtggctggacagaaatatagaaatggcaataacggaagctacagggctccaaatgaggtgattccaaaacgaggtgaaaggtctcgttttgaaattcaatttacgctcaagaatcacttaatttgattgtgtaaaatgggagttatggtcacgagataattctgggcagaggtggattttctggaattgtggtttgaaagaac

SEQ ID NO: 240378 - DNA, 382 bp, Glycine max
agcttgtaatcgattaaatcgataccagacattactttgcaagcttaaacaactcgtgtaatcaattactgtgaggttgtaataaattaaaacagagagtttttacttctaaagaatttttctaattttagaaactttcttctaattcacacatgatggtgcgtgatgcacaaatgatatgatatagactaagatgcaacatacaatataacaatcaatacaaatgccactcaatagagttgggcatataaaagacaaaacttcttcaagctcttcttcaagcttcaaggctaagtctttatgttgctcatgttactccacctatctctaacaattaattcgatgttgctagccaaatttcaagtagaagtaagttctgaag

SEQ ID NO: 240379 - DNA, 419 bp, Glycine max
cggatggctatcttgcaagagtcctcattgcttgccaaccacaattggcattgcagagtagcaatgctcgccgcataagtgatttagaaccgatactttaaaacatcttatctcacccattcatagccagcaacagtaaaaggacgatggtgacccagcactgtggttacgccgcacatagggggatgccctatcgtccctaccaccactcttccttgccccgaagaacataagggagacaaattatggtgatcaaacaagttccccgaccggagaagcagcggaaggctacaccctcccatgaaagtaagaagtgcctccaccagcatggtgtgaaaccctcaacctctccaaggaagaggagtcgctatcagaagccccacgacgagctctctctgaggagaaaccgctaatggaga

SEQ ID NO: 240380 - DNA, 436 bp, Glycine max
  unsure (1)..(436): unsure at all n locations
tgatgatatctatacagatggatcttatatatctatatatctatagatagatatatagatatagatatatagatatagatcatacaatgaagtaccgcacgagtgggtatataggaatccaaatctgccgaatcactcatgttatgatcttctacatcctaggtcttcccgttccttcatctggcttatgttcttcatgtagcattcagactgaatgactctatgaaattacgtcgctacttccacatggtacgggtaacgtaggagacatctctatttttcccggngggaatccttagaattaccacagcttagctttcaattcgcctctgaccatcaaatgaaatgtgaataacccgtcctcccctctttgaaactttgaaacaaagggtgcttccggttctgtcggtgcttgaaacaattttgtcttctccat

SEQ ID NO: 240381 - DNA, 497 bp, Glycine max
tccttaagtcacctgcggcatgcaagcttctatagaaggttcgttcctaatttctctactattgcatcacctctcaatgagctggtgaagaagaatgtggcatttacctagggtgaaaaacaagagcaagcctttgctttgctcaaagaaaagcttactaaggcacctgttctagctcttcctgacttttctaaaacttttgagctataatgtgatgcctctggagtgggagttggagctgtattgttacaaggtgggcaccctattgcttattttagtgaaaaacttcatagtgccaccctcaactaccccacctatgataaagagctttatgccttaataagagccctccaaacttgggaacattaccttgtttccaaggagtttgtcattcatagtgatcatcaatcacttaagtacattagagggcaaagcaagttaaacaagaggcatgcaaaattgggtagagtacctagagcaatttccatatgttatca

SEQ ID NO: 240382 - DNA, 440 bp, Glycine max
  unsure (1)..(440): unsure at all n locations
tcgttgtggctacaagactaaagggtgtgagtgttggttacatggactacatcattgcatgagtaatggggtgatatagttntcttaatagagaaaaaaaaagaaantttttaacatgcaaaacgacatcattttttactttntgtataaaaaaaacttttttccacatgtaatctcggtcagaaaaagattacacgtggcatcacacatagcatgtctgtgtggccagttaacgaccacgtaggtagttaacagatctcgactaatgatagagatctaagacaaaaaatttcaaatattaaggacctgatccgaaggaaaaaattattagggaccaaacaaaaaaaatggatatttattagaaaccaaaaatatatttaagccttgataaaattagataaaaagaaatagagaaatttaatctcaattggttagttaca

SEQ ID NO: 240383 - DNA, 422 bp, Glycine max
  unsure (1)..(422): unsure at all n locations
ttcttattnttttcatccttttcatcttttccattttctttttctttttctacttctttttatttttcttgaccattatttgtttttctttttcctgattgctttcacttctcacattatctttcttatcatcagtacctttcttttcaacaacttttttttggagcacgacactattctcatcctctgcctccacaaacctcttactccttgtcatcacaactttacattcctccttaggattcatttctgtattcgccataaaactataggatgacttgtttgctatctgcttggccagttgacccacctggacctcaaggttttttagtgctgactcaatgctcttatgatttgacattgttacttgcataaactgagccaaaggctcctcagcttagtattgtcgcacctaccctttg

SEQ ID NO: 240384 - DNA, 426 bp, Glycine max
  unsure (1)..(426): unsure at all n locations
taacaaggctttctatggcttanaacaagccccaaggccgtgttttgatatgttgaagtctactcttcttcagtttggtcttgcgggtagcaaatgtgattcttctctggtttatgtggatgatatcataatcacaggtagttctactctctcattcaacaactaatctctaaactacacactgccttttctattaagcaacttggtcatttggattactttttggccctagagatcaagtacctgcctaataattctgttgtgatgactcaaagcaaatatatttgtgatttaattcacaaaactcacatgggcgaagcccattctatttcctctcccatggtgtctaattgcaaattatctaagcatggtgttgatccatttcaagatcccactctttaaaggtcaatggtgggtgccctaatt

SEQ ID NO: 240385 - DNA, 494 bp, Glycine max
  unsure (1)..(494): unsure at all n locations
ggatcttaagtcacctgcggcatgcaagctngtgtgttaaatagattatatgtttttgaaagattgattttaattgcgaacaaatagtcgtttaaggcgttggactttgaaacgatgttttaaattttcaaaagcataaataattgttaaggcattggaccttgaaacgatctttcaaattttgaaaagcggagagaattgttaaggcgttggaccttgaaacgatctcaagtgatatttgataaaaaagaagttagttatgagtcggttttatcttggctttgtttattaactctcaatctcttttaagacaactttacaatactagtgattggttaagattgaactttacaaagaanaacgagatcgcagatgatagatggaggaaatgaatatgcacaaatatgctttcatttatttcaaacggatgttattttctttttcctttcattatntgccaacttcatgcatgtgttgtttgcattactcttctc

SEQ ID NO: 240386 - DNA, 422 bp, Glycine max
  unsure (1)..(422): unsure at all n locations
nggaggggttgatggngacccagtgctgagaggaacgaggataatggctacgtangagtgcgtgagctcaatttaaaggttggcaactgaggatggtgtgtttatgtttgacttatggaagtgggagagttgatttgcaccatcgctcgatcgccacctagtaccacatatgacgggtgccccataatccaataagcttgatgtgagaaagcgtggaagagtcagtcttcctacttttgtttgttgaccacagagtggtacctggagatatgtcgcggggatcaagagaccttggggacgtcaggtggggtgctattacccaaaaccaagcttgactaatcccgacccaacccgggcatagtcagttagtgagaacctacgacgtacctaagcaggcgagctcctggcagtcaaccaataaa

SEQ ID NO: 240387 - DNA, 415 bp, Glycine max
agcttataaatccatcactgttaatattctctgctcaaaaacttaaatgatgttaatttaacaattatttgatcaaaaaggaaaaattagaagagaaaaattacaaattcctctataatctaaccctaaaatatactcataattagcagttatcattaccatgcccctctctcgatggtatcattctccttctttctgtttagaatttagagataataagcatataaaatttaattactcgtgctgggggatattgataatttggatgattttgagcttcgaaggctattctgtttttcaatctagtaaattgaaaattaaagatgaattatgccatggaatagctctttttaaaggataatttgtgaacatagcagtgtccactttgtgcacaaattggcatacattggaactc

SEQ ID NO: 240388 - DNA, 430 bp, Glycine max
ttagtcaaacagaataattcataaatgtcaaagaactgtgtcttgattaagcatagcaagactttctcttattggtttaaagatacaatctttgctgatgaaaatgttgcagaaacattaagaaagctagcagatgagcctaaaagaaatgttataacttggctaggatacgtgatggaagcttgcttgtggggcttctatggaggctggatctttgagctctaatgagggcctttaatggtgattttccaccatggagatgtagcggaagacaaaggagaatatgtgagaggaggcgccatccactatagaataagccatggaagaaggagcttcaccaccaggataagccttggataataaactcggagaggatgcttcactggaggaaaataaagagggagagaaagagagacgggggagcacaaaa

SEQ ID NO: 240389 - DNA, 480 bp, Glycine max
  unsure (1)..(480): unsure at all n locations
ggatccttaagtcacctgcggcatgcagctttcaaagttttctggttntctaaaccttgaaaacttgtgctattcattcttttcatctctctccctttgccaaaaagaattcgccaaggactaaccgcctgaattctttntgtgtctctcttctcccttttccaaaagaacgaaggacttaaccgcctaaattattttatgtctcccttctcccttgtcaaagaattcaaaatgacatagtctaagaattcttttgattcttccctttcccttatacaaaagttttcaaaggactaaccgcctgagaattctttggtatccccattcacaaagtttcaaaggtttaaccgcctgagatctttgtcttagcacattggagggtacatcctttgtggtacaagtagagggtacatctacttgggtttgactgagaacaagagagggtacatctcttgtggatcagttcaagtggagggtaca

SEQ ID NO: 240390 - DNA, 430 bp, Glycine max
tggctaactctataggagacatcctataaggggctatggatatatgtctagcacaaggtaccaggtctatggaaaactctatctctctctcaggtggtagaccgaatatatcctcagggaaaacttcaagaaactctctgacaacagggaggtcacacatggaaacctttgtctctatttccaggttagaaaagatcatgtacacttgatcatatttgtcataccctaatttcgtccgaggattattacttgatgatatgcaacctttgattggccgcttcaagataattggcaccctttgctgcacgatatgtaagccccgagacacgccgggaatcaaagggaagcagggttacacgatccatgaaattccgtaatgtggcggaaaccaaaaggaggtgttgttgcgcagtctgtgagtttccgtaac

SEQ ID NO: 240391 - DNA, 440 bp, Glycine max
  unsure (1)..(440): unsure at all n locations
agcttcananactcagagaacctatcattctttctgtcatacccagacacattanaacaggggctacatatgccaatcccaagattggtgaaaatgaatggatagtctccttcattagaaataaggaggattctgcttcatcctcctcagatattgagtctactgatgaaactcatatctttcatctcaataaacgtcaagctacctcaacacaaccgtgtccaccttcatcatttatcaatctcgagaagttcaaaagagttgttcaacaaaataacccttgatatatgctcagaggttctctttagcattcattaatggccattcactatctgaatcttctatttccaaatccatctccattgaacctcttcataaggaaaccatcattgtccaagccttatcatggacgatgtatgactatgagcccacaccatctg

SEQ ID NO: 240392 - DNA, 426 bp, Glycine max
tgtagaagcaaaaggccagctatggctttcaaggtggatttttattatgcctatgactcagtctcatgggtttttttggattatatgctgcaaagaatgggtttttgtcccaaatggagacactagatttctgcctgtcttaattcagcaagcatttctaaaagatgtccaggtttaattctctgatttgatgctagtcaacaaattgtttctgacaagtcatcaagctaacaagcttgtaaggattctaccgaaatcattgtgattgaaaggaaaagataatacaaagtaaatatgatgctacgacaacaacatggtgtcattttgacatgattaatacactggcttagtacttcaatctattctttagaaccaataaggagactgagtattttaaagtaaaaatacagaggacttccatatttt

SEQ ID NO: 240393 - DNA, 422 bp, Glycine max
  unsure (1)..(422): unsure at all n locations
gcttggtnaacgatacactaatttggttatcgataaccagtgatagtctctgaacaaaaactaaagatgtaacttttccaatagatttcaagcttttttaaaagtcataactttttcaaatggtttttaagtctttctaaaggttataaactctttaatggtttcttgactagacttgaagagtctataaaagcaaggctttgaantgcattctagacattcattcattatacaacaaacttttgccaatttaattttgaatcgtcttgaacttcttcttcttcttcctttgccaaaagctttctaaagtttctggttttccaaacctcgaaacaacacttggttatcatctttttcatcccttctcccttgccaaaagaattcgcaaggaatactgcctgaattcttttgtgctctcttct

SEQ ID NO: 240394 - DNA, 395 bp, Glycine max
cgacactatagagatctgaagcttggatgtgagcaagacctcccgacatgacgtcctctagtctcctgagccgcgctacatacctgcaggtaccactgtgtgatcaacaagttaaagcaacatttttcagcctgatacacttcctcatgataagcttgcaggattatggggtaccaatcacatgtggtactatgagacggtctggcgaaggagcacatcacgctatccacattgacaaatcacgcgtaaagacaccattgcctgttgcccacctacaaccgagcccacgtactcgcacgtagcacatatcctcgtttatctgagcaacgggtccacatcaatcctcccaagcgtatcctgcatccaagcaatgtaagattcgaacacaactacct

SEQ ID NO: 240395 - DNA, 423 bp, Glycine max
  unsure (1)..(423): unsure at all n locations
acgtgccttgcaacgttagtacagagcaaatgaaagtgttaagtgacaatgagaaactgatggaccatctgggggcaaatgtcacgccggctatctattacatgaagtaggaaaatacgctacaacaggccgtggggttgtccgatcagaaaacgcttaatatcattatggggaataaataaaaggtaattcatggatggttgaactatatccctgcttttcaaccatcctaaaaaagcatgaatngctcgctctgccctaagtggctgtgctattttagaaaaacttaatcctgagttaagcaaaagaacataatcaataaaaatatatacgccaaaaacatcgattaagtgaatatatcatggaagaaaaatataaccggagtagtgatggccaatctctacgacttgaaaagtcgactta

SEQ ID NO: 240396 - DNA, 425 bp, Glycine max
agcttctatcgcaacacttaagcaatgtattatggccaagaggtgaatctacatagaattttgaaattatgttttccttgattcaaattctcatattttcttttttgcttgttgaccatatctctatctgtccaagtaatctatttttgattttgtaattcttggttggatttgataaagggttttcaagagcatcaatctgaaaatgagtgagaatgagaatacccaaaacttggacattgtaggtgagttagtccttagcctctaatatataattatgatgtttaactagcatattttaaatatggttcttagatataatatgttgatttacttaattattttatgtcatctttcctctcttgatatgattcttatgcataatggaaatcatgaatatgtatatgttcaagaaaaagtgtcca

SEQ ID NO: 240397 - DNA, 426 bp, Glycine max
tggagaggatgattccatggaggaaaagagagatgtgggatcctcaaattgaagaacaaaaaggggaagagaagttgaaccttcacctgtgtctcacaagactctcattcatcaaagttacaacaagtgttacacatgcttctatttatagactaggtagcgatccttgagaagctttcttgagaaaactcccttgagaagcttgtatgatagagcttccttgagaagctagagctgagctacacacacccgtctaataactaagctcacctccttgagaagcttccttgagacacttccttgagaagcttgcttgagaagattcctagagaagctagagcttagctacacacacctctctaatagctaagcgcacctccttaagatgagaagctagagcttagctacacaccccctataatagat

SEQ ID NO: 240398 - DNA, 233 bp, Glycine max
agcttgtaagaagaccaaacaatcttttacttttttctaagatgtccgattgaatcgggtaatatatcgtgacgctcaaaatttggacttgaagcttctagaaaattgaaacgacaataactttcttcaccggttttcggctggagtccggattttttcgaaccccttcaaatgtgaaacggtacttctttgaaatttctaccaacaatattattctccccggctgtttgaca

SEQ ID NO: 240399 - DNA, 427 bp, Glycine max
  unsure (1)..(427): unsure at all n locations
ntataagcgcgggtctgggagacgaaggtcaagtggtcgttatatacgaagatgatgttccaagtacattggatttggtacgaccttgccctcctgatttccagctggggaattggcgagtggaggagtgccccgacatttacgcagcgagcataatgtaaacctttacggttttaaaatctctatagttgggcctaggctttagagtttttcttttggttaaggctttgtgtattttgtttttttttttataatacaaggatctttcttcatctgttcctacgtctctacccattctcatccatttgcatgtttacttctttactttttaaaacggtagatccgatgacgagtccctcgaaggtactaatacctgggacccacctatcaacttcgagcaagaaacgaatcacacggaagatgaacg

SEQ ID NO: 240400 - DNA, 450 bp, Glycine max
  unsure (1)..(450): unsure at all n locations
agctttaagccaaaattccaacttttcatataccttgaccagggtgagaatgctcatccttgccctcagaagaaaagaaaacacataaggagagaaagttcccgatcaaagatcggaggaaagaaagaagaaagttcccaatcaaaggtcgggagaaaacaaagaataaacaaaattcctaatctaaagatcagaagaaaacaaaagaaatatgctaaaagatctttggaccagacaatatctaaacaatacagagaaggaaggaaaccacgacctagagtggtcctctccctttgattgccaaccaaaatcctatgtgctagcgactttctcgccccgcactaaacaaaaacaaaaaagganaaggccagaacactcagagccaaattccccttctaaaacactattncncaagaaaaagtcctattgatccatgatcacacgtgtaat

SEQ ID NO: 240401 - DNA, 418 bp, Glycine max
tgcttgtggggcttctatggaggcaggatctttgagcttcaatgaggtcctttaatggtgattttccaccatggagatgcagcggaagacaaagaagaagaagtgagagaaggcaccatgcactagggaataagccatggaagaagtaacttcaccaccaagataagccttggataagaagctaggagaggatgcttcaatggagggaaagaaagagggagagaaagagagagggggagcatgaaattgaaggaagaaaaagggagagaatttgaactttgagttgtgtctcacaagactctcattcatcaaagttacaacaagtgttacatatgcttctatttatagactaggtagcttccttcagaatctttcttgggaaaacttccttgagaagttagagcttagctacacacac

SEQ ID NO: 240402 - DNA, 438 bp, Glycine max
  unsure (1)..(438): unsure at all n locations
nggaaagcaaattcgccctagcgttntcttcccttggtatgtgatgcatttcttaacaattgaagtcgtcaataagagtcttaacgacaagatagtacctaaggagagctgcttccttggtctgatatttgttcacaacttatccctagactagttataagtcgctataacacttgagctttcttgctcccacttcctttgctagttttaggcctactatgagtgcttcatattcaacctggttatttgatgctttaaaatcaaatttaagggcctattccaaggtaacattattgggtcctttaaaaaatgatgcctgccncgcttcctttcacattagatgcgccatctacatataagctccaccaatcaggggtggcttggacattactagcgaactttgatagaaagtctgccataaatcgagatctcatgggg

SEQ ID NO: 240403 - DNA, 454 bp, Glycine max
  unsure (1)..(454): unsure at all n locations
agcttacaacaaatgtcttcacagataatcttctttcagcagaaaactaacaaaactacccctcatatctgccaaaaccccatacccacgaaatttaagagagaaagaagtccacccgaacctggattttcgaagtcccactcgtagccacgcacttcacgagcccgaaaatgccctcctttcgcgatttggagcagaaatgagcaccaaaggttggagctttgttggggtttcaatggagaatggaggagaaggaaaaagcaacgtgaggaagagggagagcttctgaattttctgttttggctgagtgaggagagagaaaagctttatggtcttaaatacaagggtttcctctttttctattattttattcaagctctaccacatgtccctatntgattggagcatatagggcccactttctctttttgactgtgacccatactcaggcaca

SEQ ID NO: 240404 - DNA, 436 bp, Glycine max
  unsure (1)..(436): unsure at all n locations
tgagaatggagaatngcactaagcaatcactacgcatagttttctactcgaaggtggaggacacatgaacgaaaacacaattcatggggctccgaaaaaggggttgagaatggagaattacactaagcaatcactacgcatagctccaaactcgaatgtggaggacacatgaacgataacgcaattcatggggctccgaaaagattgagaatggagaattgcactacgcaatcactacgcatagctccaaacgcgaaggtggaggacacatgaatgaaaacgcaattcatggggctccgaaaagattgagaatggagaattgcactaagcaatcactacgcatagctccaaactcgaaggtggaggacacatgaatgagaatgcaattcatggggctccgaaaagattcggaatggagatatgcactaagcaatca

SEQ ID NO: 240405 - DNA, 405 bp, Glycine max
taaataaataccttagacacatgttatccgggatggacccaggtatagaagttaaggggacaaatataagtatataaccttcatgaatttataataaaaaaattatattaactgtatttttaattagaatgaagacttaaaaaaaagaaaaataatatatttgtctagaagaagaaaaaatatcattattttcacgatgaatatatactataaaaggaaacaaaatattctataaaaaaatagatcaataatacttaaatattattatgtctataatcaaatctttggcaacgtgactttgggcaggtccatcatcctgagataatcttagtcagtgcaattatcccaattcatcagatttcaactccagaggtggctacctcattgcttgactcaaccaaacat

SEQ ID NO: 240406 - DNA, 424 bp, Glycine max
  unsure (1)..(424): unsure at all n locations
tccttcaacttgtcaacatctctataactatatgactgtcctttatagcatctccaataatgaacattatttagttttttttaactcatttaatggcttataccattccacatcggttttaagaactatagcaacttttcactctaatgatgcatctttgtaagaacttaaacaagtctcaagtttttttacgtcttaatttttctttaatgggtctcagaagttacctctcaattattttttaatggttaagagtaagttcttttataagaacaattcttactcgtaatgtccatatcatcttcctccagtggtgaacctagttaaaaatggttcttaactctaagaacctacacaagaactatgttagagatgctcttctagtgaaagtatangttgttctaagatggtcacatcaatcaca

SEQ ID NO: 240407 - DNA, 450 bp, Glycine max
agcttaggacagctgactcgtgatagcaatatcttagcgtgcatagtgtccaatatatacacgtatgtgtgtatataactcaaagataaaaaagtctcaagtttaacggttttaacttattacatgtgcatgacgtattgtggagtgataatcatttactagataaaagagattttttctatccataaaaaaatatcataaatttataataattcacatattttaattaattaattaagtcgaacctccttaacagataataaaaaatttgaagaaaaagattaggatcaacagttaactataaatttgttgcagctagccgctgcttcagtcatcctctggggtttaatataaataagtattcaataaaaaaaatgcgtggacgaacctcaatttgaagtgctagttccctctatccataacttatggctatatcaaaaataataacat

SEQ ID NO: 240408 - DNA, 428 bp, Glycine max
tcatgccaagtgccaacttatgagtgaacaagtgattaaaattatgcttggaaatcaggttctttggccaaaatatttcaattaggatacatgctatccatcccattcttacacactgttttcatcttagcagcaatcaaagagctcccaaggccaaaacctgattgcatgcctgaagcgaaaaataatcattttttacatattatactgacacaaccaaagtttgcatgtttgggtagcttattttgaagaaataattgttttgcattccaacctcctaagagaactttggacaaaaaaaactatttccctgaaaacaatctctaggaagaaaaacaattgtccttcacatcctcataggaagaaacctccacttgcagagaagagaaataaatgcaaaacaatctaatcccagataataattaatc

SEQ ID NO: 240409 - DNA, 443 bp, Glycine max
  unsure (1)..(443): unsure at all n locations
acctgcggcatgcaagctngtgactcttggcaatttctttttatatactagtcacttaaaaagtcgtgactttngaaataatcttcagaaacaagtcacttgaagaattgcgactcttggaaatgttatttttgaaatcagtcactgttaatcgattaccattaaggtgtcatcgattacacatcaacagatgtgactcttcattttgaattttgaaaatcttaacgttttaaaacactggtaatcggttactaccttctggtaatcaattaccagagagtaaaactctttggtaatgattttgtgaaaacttcttatgctactcaatggtttgaaaaacttttttaatacttatcttgattgagtcttctcttgactcttgaatcttgagtcttgaatcttgatcttgattattcttgaatcttgattcttcaatcttgaat

SEQ ID NO: 240410 - DNA, 427 bp, Glycine max
  unsure (1)..(427): unsure at all n locations
tctacagnaaactacatgtagctgcctcggtatttacgcttttcagccttcgttaaccgttggatcttctcgaaatttggtttgcaacttcacaagacaatttaccatgatttaaccgttgggatctttgagaaagtatctggagtgtgctagaagcttccattcccgagagcatctcttatttaagcatttcagcctttgctttcttgtagcttaggaaaaatgccatttcttcttctttctttcttccaaatccatttctaaagttccaagtactttctccatcacccacatccaccattaaccaccgcanaccatcattgttcttcattgaaaacccacaccgagaggaacccttcaaccgaagcagaatttacaacttggcttgcggtttcggtagagaacgacnaccctaatctgatctttc

SEQ ID NO: 240411 - DNA, 415 bp, Glycine max
gcatgcagctgacctacactaaaccatgcttttaggtttattgatagaagaataagagctgagctatgttgacaacttcattcccacaagttactattttcttcgcaaattacatgtaacgtgcataaataattaaaagaaatgaccaagttgttgtgtgttgcggtaacttccctcaggttagaatagaagtccacctaatcatcactcgactattatgggatagaaccagtcacacagtatatgaagtgagtacatgctgcgatatatttttttaaccaaattaatatgtaatttcctattcgtagcacgtatgtaattacttattgaaataataagcattgttaaacttctaattgaacaaatctcccgaatatattgagaaacactctaaggcatatacactaatacacct

SEQ ID NO: 240412 - DNA, 431 bp, Glycine max
  unsure (1)..(431): unsure at all n locations
ntacatcagattctagtaatgacccactaacctatattttatagaacttaacgccattaacctagggaattaaagaacttaattgctgagtgtaactgaaattgtggcaaccaaaagtcaccctcaacagccatcaagtcagcccccatttggtctcccaaaaggctgatgcctaggttaccaattgggcccttattacaacttgaactaaacctaactaaagcccttttagttgattaaccaaaaacatatttttggtcagccaactttacaaggattgggccattatttaaacaaactaaacactctaaaattaagacaaagtggtgccatttagtcctcgtccatttgggccatgatacaactcacaaccttggacttttctccttgaaactttggcttgtattcaaatagtatggacagcacttgtc

SEQ ID NO: 240413 - DNA, 401 bp, Glycine max
  unsure (1)..(401): unsure at all n locations
nagcttattgctttcctgcgaccaaattgttatttaatctaaaacgaataaggacggaggggaaaaaaacaaaagtacttcaactctcaacttatgtgttcaaaaggtgaaagaggaagtgaaggtaccaaaccaaaccaccaaaccaatggaagatggcagagtacnttaccacacccaactctaccaataattaatgttacaaattccggaatttgaacatataacgattcgtcacctgtaggaaactatagccccatttcccatactcacagcatatatatatatatgccacaagatcatggtattttgtactttcagagcaccatagatgggtggcattggcaagttgagagaaatatatatataaatagacatttaacatctattcattctgataa

SEQ ID NO: 240414 - DNA, 417 bp, Glycine max
  unsure (1)..(417): unsure at all n locations
tgacaaaacgggtggatggatcgatagattggtcatattatttgtggtagttgatagctgcccagccctacctctcatattattgacaaattctatttctataatatataaaattgtatactttttatgtaagaaagaaaatatataaaaagaataatttatcattaaaagtgggttgtatattaattattataatttaattatgtttatatgagaaactgttaaaatgatatgttaaagtaaaagactagggatatcatttttttactctaacacaactaatggttttagcacatgtttgtgtgtagtcatttgttgtgttcaggatcgacccgtcagaaagtaaaatctaaaataaaaattgagagaaattnttttattttaaagaaaataatgatatttgaagtcttttattta

SEQ ID NO: 240415 - DNA, 392 bp, Glycine max
  unsure (1)..(392): unsure at all n locations
tgactgacttctactcatagatccattccagggctcatggtgatcctnctcatcattacccttcgaagagaaagaagtgatcatcaagtcttaaaagtggattgaaagagtatcaaagatatctttgaggatataacagtgacaaggcgtagtctaaaagaacctatcatatagaagaatcttcagctaatcatgtaaagacattgtgagtgcattaatagaacaataaatggatgaccatttcacttgcagtgtatcatcaaatactataggggatctatattaggctaactcacaccaaggtttaaaatactttgtagtatctacaaactattttcatgccggatgaaaactttccatttgaaacagcagaatttggtgcctcatcatat

SEQ ID NO: 240416 - DNA, 418 bp, Glycine max
  unsure (1)..(418): unsure at all n locations
taacacaccggttnttgcaaaacaatctttggtttaaagctaagcacaacggttttatcaaaaaccatcgttgagtttacaacaataccaataagaggaaacatcatatatgtggagtattaaggtttaatctaaaaaattcacatgatttattaaaaaaataacatgaatttttaagtggttaattggtcacatgacattaaatcttgatcattcatgtttgattagacagtccaaatttaatcttctaaccctcatataagatacattcctcatatatctatctatatatggggaatgttaacatagacccacttaaaaattagaaggtctatattagcatctagtatcctttcatttgaacaaaaaaatcactcttaatttagattaacataaactaaaggacaattatatatgt

SEQ ID NO: 240417 - DNA, 425 bp, Glycine max
  unsure (1)..(425): unsure at all n locations
agcttgccacccagctcgcccaggcgagcatggttgctttttccagaagcaacagccttctggaggaatcttctgaagggcccaagtgggcttggttgctatttgcacccccatttttactaagtacacccccctgctttttttttgtgattctttnttcgtaaagttacggaaacttatgaatttcgtaacgatacttgttttctttccgtaatgttacggaaccttgtggattacataatcatcccctttttgacttacggaatgtcacagaacctcactaattgtgcaacgatgcttccatttgatttccggtgtgtcacggaaccttacggattgtgcatcaatattttcttttcgtttccggcacgtcccggaatttcacaaatagcctaatgatgggtgccaagcaccttacaaggacc

SEQ ID NO: 240418 - DNA, 430 bp, Glycine max
  unsure (1)..(430): unsure at all n locations
ttgagccaaaatcctgactcaccataaaccttgacccagggtgagaatgtcaatccttaccctcggaagcaaaaaaagaatagaggggaaatttccaatcaaagaaaaagagaaggaaaatttccaatgaaagcaaaaaaggaaaagaaggaaaattccccaatcaaagagtgggagaaagcaaaaaaagaaaagaaggaaaattccccaatcaaagagtgggagaaagcaaaaagaaaagaaaggaaaattcccaatcaaagaatgggagaaagtaaaaaggaagaagaagaaggaaagaaagctcctgatcaaggatcgaaagaaaacagaagaaaagtgcagagaggtctttggaccggacaatatctgaacaatacagaattgccaccaaatgaacgaanaaagaaggaaagggaaccacgaccta

SEQ ID NO: 240419 - DNA, 429 bp, Glycine max
agctttgtaccgggcattactttccatgaatcttgataattataggtgatctctgttgccacttatattttaggtttaagtatctcgattgattagtcattttcaagtgctttttttttttcgctggtgttattttttatttggcacctttcttggttctcaataaattgttctattcataaaagtttcattttaattattcattgtgtttcaaatggtaagattgggatgagcgcatgtattctatggtatattttcataaaaaaattacggaatagtttttgttgatgttttaaaaattggacctgtcattaaacttcctattctgctgtttatataaacttattaaccttatatgactgccatgtttttgatatgttatgccttcaaggcagcatgcatgttcatgtataagttgtcttggatgtt

SEQ ID NO: 240420 - DNA, 429 bp, Glycine max
  unsure (1)..(429): unsure at all n locations
ntgaacaaacaaactgtaactcacaaaaacaagggaaaaccaccttgtacattgataacaaagtcttggcttatataagccttacaacaacacttaacaaagaaaagccttacaacagcagttaacaaacacaaaagaaaaataaactgcccactttgtacacaacctggaacgtggtatcatgactaggaaatggacaaatgtgtaactacctaatcccaaataatagggattgttattaactgaataaacattaaaataaattctaaataacccaacaagaaaacataaaataaaaataacagttaaaattgtgaagaaattgcgaagcgaagaatgaaatcaacaaggtacctaagaagcaggagggtaggtggaatgtcaagaagaagaagaagagagagaaaacagttagctccatggatggat

SEQ ID NO: 240421 - DNA, 411 bp, Glycine max
agcttaacacaaaatctcattatatttaaaatctaaacagaatataacaaatattttacaaaattaatatacgtaatatatttaataaattttaaattaaaaaaaatatttactaacatgttgctcacaactcaatacatacaatatgttaatactcatgtatctcacaaatcattacatattcaatttatcagttactcacaattttaatcacaatttaatgatcctaatataacaatttatcatgctaatctagtaaatcttgtccaaaatccaaacaatttataaaaaaatgtgtctcacaacatgtgtaataaaacttctcaaacaaatttcacataatctcatcataatcataggaatcaaaatcataggtcaaaatcacgacaacactaagagcactcagtttta

SEQ ID NO: 240422 - DNA, 419 bp, Glycine max
taatttattaaaaaaataaaaatgcatagtcaagtatgaaatttaaaaaggatattaaaattgtagatttttaagaaataaggacaaaatgtctcaattaaaaaaataaaaaaactaaaatcacaaattttttaaaagtaaaagataaaatgtcttaattaaaaaaaaaataactaaaattgatgatttagaaaaataaaatgacaaaaaattacattttaaaaaaattgatttgaaaaagaggcctaagtaataataagtttactttacaccattaacataacatggttacctaaaaaataaagatatataataataattccattaagtatgtttgtttcaccagtgagtttttagtccaaaatatttactcccataggacaaaaatctctcttatgagtaaaaatacacatatagtc

SEQ ID NO: 240423 - DNA, 436 bp, Glycine max
tgagaatggagaattgcactaagcaatcactacgcatagctccaaactcgaatgtggaggacacatgaacgaaaacacaattcatggtgctccgaaaaaggggttgagaatggagaattacactaagcaatcactacgcatagctccaaactcgaaggtggaggacacatgaacgataacgcaattcatggggctccgaaaagattgagaatggagaattgcactacgcaatcactacgcatagctccaaacgcgaaggtggaggacacatgaatgaaaacgcaattcatggggctccgaacagattgacaatggagaattgcactaagcaatcactacgcatagctccaaactcgaaggtggaggacacatgaatgaaaatgcaattcatggggctccgaaaagattcggaatggagaattgcactaagcaatca

SEQ ID NO: 240424 - DNA, 444 bp, Glycine max
  unsure (1)..(444): unsure at all n locations
tgtcttcacaaataatcatctctttgcagaaaactaacaaaactacccctcatatctcccaaaaccccatacccacgaaatttaagagagaaagaagtccacccaaacctggattttcgaagtcccactcgtagccacgcacttcacgaccccgaaaatgccctcctttcgcgatttggagcagaaatgagcaccaaaggttggagctttgttggggtttcaatggagaatggaggagaaggaaaaagcaacgtgaggaagagggagagcttctgaatcttctgttttggctgagtgaggagagagaaaagcttnttggtcttaaataaaaggttttcctctttttctattattntattcaagctctaccacatgtccctatttgattggagcaaaaagggcccactttctctttttgactgtgacccatactcagtcacaaaa

SEQ ID NO: 240425 - DNA, 438 bp, Glycine max
  unsure (1)..(438): unsure at all n locations
tgagaatggagaattgcactaagcaatcactacgcatagctccaaactctaaggtggaggacacatgaacgaaaacacaattcatggggctccgaanaaggggttgagaatggagaattacactaagcaatcactacgcatagctccaaactcgaaggtggaggacacatgaacgataacgcaattcatggggctccgaaaagattgagaatggagaattgcactacgcaatcactacgcatagctccaaacgcgaaggtggaggacacatgaatgaaaacgcaattcatggggctccgaaaagattgagaatggagaattgcactaagcaatcactacgcatagctccaaactcgaaggtggaggacacatgaatgaaaatgcaattcatggngctccgaanagattcggaatggagaattgcactaagcaatcact

SEQ ID NO: 240426 - DNA, 424 bp, Glycine max
  unsure (1)..(424): unsure at all n locations
tgtagaatggctagacatgatacatgtcagggcttggtttggttcaaggataaaagggatgccccacattatttccatgacacanatgcaaaaaatgacgatttggaaattttatgcaaaactggtcatgcgtgcgcctatggggacgctcaagtgtcaaatttttatggtcatgtgatgctagggctcaagattcatttgctacattttaaatcaacccaatgtttccaaaatatgtccttttatcaatttgtgcattcctccaagtccatttcgggcgtccggggaaatttcatagcattcacccttcaggtgtacacattnttttttcaaaaactagctatgatcagcgaatttttcttttaaagaaaagttggaaaccatctcttttcaaaagcatgtcaattgttagctacacaactta

SEQ ID NO: 240427 - DNA, 444 bp, Glycine max
  unsure (1)..(444): unsure at all n locations
tgatgtgaaccttactttttgtacgtntgatacaggctatggaaatttggatgacgccacttccagtgaaggaaaataagtcagaattaacgccacaaggattaccttgataagtttgagattggttcaacaaggaacctaaagagaagctctcaccaaattttatcanaatgccgaaagtgccctttattgaaaacaaaaaccaatacttatagtgcatctgaacaaaaagataaaaatagacatgggctttcanaacagtttgggccataaaaaattattaataataaaaagaaatagaacatatttattatgggcccttcaaataatctgcctctgggccttcatccttctccacttgngccttcatccttctccactacggggctttgtccttctccacttgggcctttagcctgtatttggtcagttttaggattctca

SEQ ID NO: 240428 - DNA, 412 bp, Glycine max
tcagaccaaagcaacacaaaatctaggtatccaaaacccctcaatttaatggattttcaaggcttgagaagtgaaattgagaatggggtgaatttggagcaaactctcacctcacacaagtctataacatcaatttaaacttgttcaaactggatttacacctaaaatttcaccgaaccaaaatttgactcctcaacccccaattttaccctataaatggctctttattcactttggtcatttgtttttctctctagcacagcccacactttctcctatgtcctaaatgacatttcaagctaggattaactcactttaacctccaaataccactaaatccaaatttgggcttccaactcccaaaatctcactcttttttctctcataacaccatattctcactttcaaaccc

SEQ ID NO: 240429 - DNA, 430 bp, Glycine max
  unsure (1)..(430): unsure at all n locations
ntatacaagggagcaaaagatacaagtatcattcaaggtatgctatttggtcaaaagagcttgtgtctataccactcatgggcttcataatgttctgaggcatacaaaccaattctagaattccgaagattatgccaagatcattattcacagttagtcgttcactcacagagtaaggtcacactctcactggtttttggttcaagcttttctttcacaatcagtatgtctagtgactaaccattctattataaggtcacactcttgttctttctttgtttaacatggacatttgctcaaattcatgaaaggaaacacacatttcatcataagcatgcgtccaatttaaaacaaggtataccaccattttcaccaaataaataaaccacttcactgccatacccatcaaagttaagttaaactggtcatg

SEQ ID NO: 240430 - DNA, 313 bp, Glycine max
actacacaactatggacataggcactaaacttaaaacgtcaaaaataataatgaaagctaccgccacttacaacaccgggaacaaccatcacttaaatgctacacctactacaagagcaccctgcaacacgcgaaaacctatcttctcctgagaattctattgcactttctttacataaaaatacaagttcatgccatcaccaaaatgaccaccgcatcttcaacaacattaagtcaagtaagtcattcctgatcttctctttgacacaaaactacatttcctccttttcttcaacctcaacacttcaaacac

SEQ ID NO: 240431 - DNA, 427 bp, Glycine max
  unsure (1)..(427): unsure at all n locations
tatgacctttaccttntcacaccctctgattattatcatttatataagttaaatagaaccatattacatgtagataaaatttccaaggataaaacttatataagccttaagtgctattctctaatttaaattaaaactctatttcaataattaattttattgtgcatattagtgatatgaaactttcaatccaattttattaatgatatatatttaatatttgtcattcttgtattttaataccatattagaaactaaattaaagagatgtattgtgacacccggttatattgtctatagactaaataatattcccatataatattattatttattggattgtatttaattagtaattacagttaacttactaaattattattaatgttttatactcaattataattaaaacattacaaccttaaag

SEQ ID NO: 240432 - DNA, 425 bp, Glycine max
gctgcagctaataaacagaagcgacatttatatataatgccaggctccatcacggcttgtggaacagtactggaggtgaacatatttgacagataatatcatagcgacgctattaggttcactaaaacaacacatttttcaatggcctgttcgaaattttttggtacttgaattcaatacttatcaactaaaaaaaatacttcacaaattatatggttattttgttctacactctataagacgaaacaattcttgacataagaagaagtagttaggaccaaacttcttggttcgtggaaacatcttactacacacatggcttaaaccattaacgcatgtaaaatatctattattcaatgatcacttattctgcatcattacacatagaacatgatgtacatacttctttaataaaatgagaaaaa

SEQ ID NO: 240433 - DNA, 431 bp, Glycine max
tattgattctatgggaagagaatcatgatgaacctatcttatctaaatactcaaaacttcagcagatagaaagcagacaactaaatctcaaaatatataacaacacataagaagatggagatacccccagtttttctcatatgctttgattgaatttaaaccacagcattccaatcttgtcatattatattcaaaacaggagaaactgagaaaatagcaataacaaaatctggttatctacataaaggaaaggctaaaaatacaagttatccaatttttgagccattcttccccacaagaatcttgcattgacttaatttgctagtgatgaagtgttgttcaatcataagagaatcatctcgtaactctttccggtcaatcaatcgatgctgaacatcatatggaatcttctaaattgataaatatgctcg

SEQ ID NO: 240434 - DNA, 390 bp, Glycine max
tgtggaactaccctaaggaaagaggatacgaggttctacttttgtattccaaaacaactaggacaaagcccgaaatgttgtgagataccaagcaatgttacctgctcaacgctactcacaattggaaggcataaactataaagaagcttatgctcctgttgcttgactacacgcaatacgcattttattatgacgtttttgctcataacaaaatgaggctatatcaaatggacataaaaagtgcattccttcacaggccaatacaagagacagtttctgcacaacaactcctagggtttgagaatgacacatttccttgacatgcgtcaaactatacaaagctttgtaaataagctcatcgagctcgtatcaacgtctagttcatttttt

SEQ ID NO: 240435 - DNA, 357 bp, Glycine max
  unsure (1)..(357): unsure at all n locations
gcttttatatagaaatattacatgcccaggcaagccagcagcagtaggaagagggccatcagctacccgccacagatgcaccaccaccttatttacaggagacaccatccctagggtccatctccgctcacctgcgaaggttaaaagctccagatgcacaggtacatgcagcatgtgaccagccaacaagcagctaatcacaggggacaggtgtagctgaccaagagcttctatcagtacatccagcaccagcagagccaggacaccaatcctgatggaagcttgcttgtggagcttctgtggaggctggatcnttgagcttcaatgaggtcctttaatggtgattatccaccatgg

SEQ ID NO: 240436 - DNA, 414 bp, Glycine max
  unsure (1)..(414): unsure at all n locations
tgccgcccagctcgcccaggtgagttcagctcgcccaggctatcaaggttgcttcctcctgaagcaacagccttctggaggaatnttctggagggcccaagtggcctggttgctatatacacccacctgtttactacatgcacccccctttctattttttcgtagttcctataccgtaacgttacgaaactttacgaatttcgtaacgatacctatattccttccgccaggttacgaatccttacggattatgtatttcctcttttttagctttcgaagaagttacggaaactcacggattgcacaaaaacaccacttttcgatttccgccacattacggaatttcacgaatcacgcaagcctgcttcctttcgacttctgagacgtctcgggacttcatttattgcacgtaat

SEQ ID NO: 240437 - DNA, 335 bp, Glycine max
agctttcttaagagactgttgtgataagatatatccttatccatccacaccactctattaactaaattaacctccttaaaaataattacggatgaaaatatcgcaaccaagaatcaaacatcaaacataattgctaataatatatatatatatatatatatatatacatataagggtgttacaccatgtatagcttgtagaccttggatcttcttcattaatggagtcctttacgtcttgaagatcaatataagcggaatggagaatgaagaaaggtgattggagatgcctcttctaggagaagatgagtcaagaacaagctcaccaccatacga

SEQ ID NO: 240438 - DNA, 420 bp, Glycine max
tcagcccttcatttgagggagagtgttgagatattctatgtaatattatcgagatattcggtataattagggaaaactgtccattcatgtaattaaggaaattctggaaatgattatagcgtttgagttgatatcctatcaaaaccttagaaattatgattaaaagaaactgactatcaaaaagcgatagtagaaaaaggcttaccttagctctcattgagtgatcaagtaatatattcgcggatttcaaatcacgatgtacgacgggtgggactgcctgttccgtgcatattcatgttaaccagggacacttttatatagaataagagaaaatataacattaaacataccccttcatgaaggtattctattccgtgtgaaatatcaccagcaatttgcagcctttcatcccaactcaat

SEQ ID NO: 240439 - DNA, 433 bp, Glycine max
  unsure (1)..(433): unsure at all n locations
agctttgagccanaatcctcaccctatatggatcctattgggtgagaacttctaatatgccgctaggttcacttgaggtttatgcatggtgcctttcattgccccagtgtagggctttgaggtaccaatcattgtctttcatcatgaccttgtagtagggaacctattgggtgagaacttctaatctgcccctaggttcacttgaggtttatgcatggtgcctttcattgccccagtgtagggctctgaggtaaccatcgttattttgttttcacaaccttgntaaaaggaagaatgaaagaaggggttgattcttgcaaaatgaattttccaaggacaaataactcctattcttgataactaacttctctctaaaaaggacaaactttccggaatgataaaatgaggtcacatgaacgtctatttttacttg

SEQ ID NO: 240440 - DNA, 415 bp, Glycine max
tgcacaagtgcaagtataccctatgcaatagtaacacaggtctcaaaagtcaggatattgaacccaaaggaatagttgtattcccaattattaaacttattaaacaaacagtagaatggattacaaacaggatttaaatatttttgtggttttggtttttataagaaagcaaataaacaaatataaagaggagttttagttatgataaaaatggcatgaggttatgactcactagtaccaattttcctccaaccctagtctaatgaaatttcttccctagttaattattggtttccaaaatcaactaaaacttatgatcaaggtcagaagatgctctttgccttaaatcaataccccaatgaccatggatctatcattttaagtcaaaggataagattaattctacggatgatta

SEQ ID NO: 240441 - DNA, 378 bp, Glycine max
  unsure (1)..(378): unsure at all n locations
gagactacttttccttttctgtgggagtgaaatgaagcaggggtgaagacctctatgaggaagtctacctcaatgaaaaaagtgacgtcctaatggttagaaagctccttggaggccaaacttgtgatctatcccaatcccaaaagagaacatcttttatacaagatgcaaaattgtagataanaattgctctgtcattgtggatagtggatcttgttgcaatntttgtatcacaagattattttccaagttgaacctcactatcattttccacccaaaaccttataaccttcaatgcctcaatgagcaagtggagatgatagttaaccaataagcaccccattcctaggcttgatgatatgctcgatgagttgcatg

SEQ ID NO: 240442 - DNA, 430 bp, Glycine max
  unsure (1)..(430): unsure at all n locations
tctatatttggtcattctatgggtgggcatggcgctctaacaatcttcctgattaatcangataaatataaggcgttgattacacaactgaaaatctggttttaatatagtcaaagaatcactttggaaactttggcaatttcctaagcattatggatggttttactgttgaaatagcatgtggattgttattagttgttttccctaactgagatactgctcattaatatatttctccactataagctgactgtatattgcataagggttagtggcttctgatatttgttaggatatctggtaacgttcgattagtttaagcttatattttacatggaactattaatgtttaatagttgcgagacctatgttggtacaaggaggatgatcattagagttcattttttccctattggcattttggtactag

SEQ ID NO: 240443 - DNA, 490 bp, Glycine max
  unsure (1)..(490): unsure at all n locations
cttaagtcacctgccgcatgcaagctntgagccaaaatcctgactcaccataatctcttgacccagggtgagaatgtcaatccttaccctcggaagcaaaaaagaatagaagggaaatttccaatcaaaaaaaagagaaggaaaattcccaatgaaagagaaaaaagaaaagaaaggaaattcccaatcaaagagtgggagaaagaaaaaagataagaaagaaaattcccaaccaaagaatgggagaaagtaaaaaaggaaggaaaggaaaccacgacctaaaatggtctcctccctttaattaccaaccaaaattccgtgcgctagcgaccctttttttctcgccccgcactaaacaaaaaaaacagaaaaagaaaaagccaggataatcaaaagccaaatacacacaaaaaccgaaagaagaaaccaccaaaagaacccgttcccaagggaagccctattgatccatgatcacgcatnngtattttga

SEQ ID NO: 240444 - DNA, 422 bp, Glycine max
  unsure (1)..(422): unsure at all n locations
ttccgcaagacttacggaaagatcttagagttgaccatagcagaagtgtccatagaagccattgcatcactcacccaatactacgaccagcctttgagatgcttcacattcggagacttccaattagtaccaaccattgaagaatttgaagaaattctaggatgtcctctcgggggaagaacaccatatctttcctccggatgtctcccctccttgagcagaattgcaactgtggtcaaggattccgcaagaggtttggaccgcataaaacagactcggaacggcatagcgggcctaccacagaagtacctagaagacaaagcgaggggtatggccaatcaaggagaatgggtcccgtttatggatgtgttagctntgctaatttttggggtcgtcctctctccaaacgtggatggtttggt

SEQ ID NO: 240445 - DNA, 421 bp, Glycine max
cttccttgagaagcttctttgtgaaaactctcttgagaagctagagcttagcccacacacccctctcatactaagctcacctccttgagaagcttcctttagaagattccagaagaagctagagcttagctacacctacctatctaatagctaagctcacctgcttgagatgaaaagctagaacttagctacacacgccctataatagcagagctcacccccatgacaaaatgcatgagaatacaacaaaaaagtccctactacaaagactactcaaaatgcctcgaaatacaaggctgaaatcctattctactagaatggccaaatacaatgcctaacagaaggagagaaaaacctatttaatattacaaagataagcgggctatacttacccatggctcaaattaccctatgctcatga

SEQ ID NO: 240446 - DNA, 424 bp, Glycine max
tttccatctcaccttgtttagcttccagttcaaactatgcctagatagattctatgataactccctcaggtaatggcacaccatcaacatcgaacagtgtagcctttcagctgatttccttgcacatgctcaacagaaaagtctttagagattcaagaataatattttctaaaaacattcttgccaagcccttcaaagttgcatcttcagctagctttttttgtgacacgctgaaataataccatttataaatcgatgtttaattatatttattgtgttatttgactatatggttgacttgaatgagtggatgtatggcttgaattactaatgtgtgaatttcttgatgtggatgttgagttatgaggagtttctgtgagctaagttgaaattatgagaatttaaattttacctaaacctattc

SEQ ID NO: 240447 - DNA, 476 bp, Glycine max
  unsure (1)..(476): unsure at all n locations
agcttgctaacccatggaagctcctaatatcttccacacttnttggggtgggccattcatggatggccttgattttctcagggtccacttggaccccatttctaccaactacaaaacctaagaaaactatattatctacacaaaaggtacacctctatatctgcatagagggtgtttttcctaaagattgaaaaaacttgcctgagatgtccgaagtgatcatctatgctcctactgtacactaaaatatcatcaaaataaacaactacaaatctacctatgaaatcccttaagacatgatgcataagtgagcccaaaaggcatcactcaccattcgtacaaaccacactaggtcttgaaagcggttgtccactcatcaccctcttatatcctgattaggagataaccacttttaagaccaatctntgaaaagatattagcaccatgcaactcatcaagcaaatcatcaagtctaa

SEQ ID NO: 240448 - DNA, 437 bp, Glycine max
tcaagcttcatgatgatgaaccaagcaatgttgatgatgccagaagcccaagtgattgattcaagacttcaagatcaagaatcaagaatccagtccaagattcaagagtcaagagaagaaatcaagaagcgacaaatcaagacttcataaaggataagtattaaaagaatttttcaaaaaccaaatagcacagttttgttttacaaaagaattttctcaaattttctaagttaccagagtgattactctctggtaatcgattaccagttatcaataatcaattaccagtgatcagtttggttttcaaaatgttgtcaaatggtttgcaacgttccaaaatgattgccaaacagtgaaatcgattaaactatattagtaatcaattacaagtgaatctgaacgttggaattcacatccaattgtgaagagtcacaact

SEQ ID NO: 240449 - DNA, 344 bp, Glycine max
ctcttaatgtctctataggcttcttcctcgttgacatcttatgtcttgaatggaattgccatgacaggactgttgttactgtcttagatattcggaagttgatattgcgttgcgggacgtagatccgattaaattaactcaccatcctttacttgccaatatgttatgacatttgtagttggatcacctatgatgtcttgttcccaaaggtaatctatatcctttttgatggcataagcatgacaccaatcaatgaaaaggacattaattttgactctttcgacaaaatcccagaactcgtcttgagattgattgctcgtcgaccacttgaatgttggaaaaac

SEQ ID NO: 240450 - DNA, 430 bp, Glycine max
  unsure (1)..(430): unsure at all n locations
tncttgagaagctagagcttagctacacacacgcatctaataactaagctcacctccttgagaagcttccttgagaagctagagcttanctacacacccctataatagctaagctcacctccatgacaaaaaaacatgaaaatacaaaaaaaaatcctactacaaagactactcaaaatgccctgaaatacaaggctaaaaccctatactactagaatggccaaaatacaaggcccaaaagaagaaaacaacctattctactatttacaaagaagagtggacccaaccttggcccatgggctcaaaaatctaccctaaggttcatgagaaccctaaggccttctttatcaactctagcccaatcctcttggagcctcttgctcatagctctggtaactggtcctttcctagggaggattgcatcaccata

SEQ ID NO: 240451 - DNA, 447 bp, Glycine max
agcttcgaagggctgggaaagaccagtctatattcgaaaacatgatattggaagataagttgaaggcttatcaaaggtccaaaatgagtttgtccgagcaattgagcaagaccgaagaaaacatgtgggccatcatttaccaatacaaagagaagctaaatttagctttaacccatgaacaaaggctagaggactagtacgcaaaggtatcagtcctataagcagaaagggaagcgagggaaagagtgatcaattcattgcatagagaagcaatgatgtggatggataggttcgctttcaccttgaatgggagtcaagagcttccaagactgttagccaaagcataagcaatggtggacgtatactcgacccccaaggaagttcatgggctcctcgattattgtcagcatatgatcgaattgatggcccacataattaagaatcact

SEQ ID NO: 240452 - DNA, 425 bp, Glycine max
tatcgtaattgattacacaattatttgtgagacaatgactgatttcttcaagagtcttttctttatttgattaccatatgatataatctattacttctctttgaataaatttttcaaaagtgaaaaagaagactttaatcgattactttgaggatctaattgattacattgttatcgagcagtttccagtttctgggaataacacattaatcaaataaaagataatctaatcgattacttcattgaattaattgattaaattgtagatttaatcgattacatgcggctataattgttttctatataaatagccaccttgggttctcatttctatgaacaagaacaacttctgaatgagctagaatcacgtgccgatattaattatagaaagaagagaagaaaagttattagaaatagcgactcac

SEQ ID NO: 240453 - DNA, 395 bp, Glycine max
  unsure (1)..(395): unsure at all n locations
ngcaagcttgcctctgccaaccaatgtttctactatattttcttggtcnggntcacaaccaaccgtgataattctaatgattcaaaggcattcagctcttcccttggtaaaagtgttccaaaatactgcaacagaggaggaggttgcccagcttgcacaagaacactctgccacgtaaagcagataatggcattttaaacattataactaattgaccaaacaaaaggacaccacctaaaggctaacagttaacaaccagaaaatgaatctctgtgaataaagtggctaaaaaagcaagagacaattctcagatagcaacatcttatcaagacacctgaaatttggcaactgtgtcaagagttcgaaagattccctgtggagattcagctgcaagt

SEQ ID NO: 240454 - DNA, 416 bp, Glycine max
  unsure (1)..(416): unsure at all n locations
tggaatccaaacatgtggtaaatataaatgaggaagttntcgaaacacatcaccgtatattacaatttacaagcaaactaaggaatcagtacagcagacagcaatataacaacaaatcataaatccctccatcataaaaatccaaaacacaaggggctttaagctgaactgcatatgttgcaacaagagtgactcaactctctaaggcaagcaacagaaatcagtacacaaccaaacccagaggacaagcttctacagtctcattccaaatgtccccaaacatgagaaagacatttctaatgttttgtcttctgccttagatgcttccaaaaaccctttgagttcatgaaagccaaccattttccactttgagcaagtcaacaagaccatcccaataaactctataaatatgcatg

SEQ ID NO: 240455 - DNA, 442 bp, Glycine max
gctttacagcagattttagtagtgacccatcttctctagaattaaaataacttaatgccttaacctaggaattaaacaaacttaatggctgagtgtaactgaaattgtggcaaccaaaagtcacccccaacagccaacaagtcagccaccatttggtctcccaaaggctgatgcctaggttgccaattgggcccttattacaacttgaactatagcccttttagttgattaacccaaaacatatttttggccagccaactttacaaggattgggccattatttatacaaactaaacactctaaaattgacataaagtggtgtcatttactcctcctccatttgggccatgatacaactcacaaccttggacttttctacctgaaacgtgggcttgtattcacatagtatggacaacacttgttgaagagcttcttggctttc

SEQ ID NO: 240456 - DNA, 419 bp, Glycine max
  unsure (1)..(419): unsure at all n locations
ctacagcagantttagtaatgacccactaacctataattataataacttaatgccattaacctagggaattaaaacaaactaaatggctgagtgtaactgaaattgttggcaaccaaaagtcacccccaacagccaacaagtcagccaccatttggtctcccaaaaggctgatgcctaggttgccaattgggcccttattacaacttgaactaaagcccttttagttgattaacccaaaacatatttttggtcagccaactttacaaggattgggccattatttagacaaactaaacactctaaaattgaaataaagtggtgtcatttagtcctccatttgggccatgatacaaatcacaaccttggacagcacttgttgaagagcttccttggctttccttgctctagcccttgtcat

SEQ ID NO: 240457 - DNA, 430 bp, Glycine max
  unsure (1)..(430): unsure at all n locations
gagctnntttgaaacctccacctgacatgtactttttctcatgtcatacaaccaaatacgaagatttgacagtcgataaggttgattcatcttccaaccacaaccaatcatcctccccagtcaaattgatgctagccaactctaataaagagtgaagttcatcaatcaaattcctctctcactcagaccacttagaatctcacacccacttgttatctacccaacaacccatattacttatcacttcccctttttcttcgaattcaaaaacaatctaaaanaaatgttttgatatgagtcttctcctacccacctattcacccaaaatctagtaataacatcattctcaatctttcactgaatggccgtatcgaatattccacgacgaaattctaattttgcacattttagataatgaanaatgtattta

SEQ ID NO: 240458 - DNA, 422 bp, Glycine max
  unsure (1)..(422): unsure at all n locations
ttgtggatattnttagtcagtgtttaatcgtctgcccatttatatgttgttcactgcctatctctacctatattaaagtttactatgtgagattttggaagaggtgatactgatgcaatcatttcttattttagttgaaagtctacgtgtgaaaattggcaaggaaggaaagggaataaattgttaacatgagattttacttggcaggtcttattctatggaatcagacacggcatggttggatatgaaataaactgtctaagaaccaaactgaacagctgcgagaacccaaattgaggtaaactgcattgtttgattggttttacccgcaatttttgcttcatcaattnttaattattttttatttgttgggttttattggagaggagggctaatgatacctatagcacccatttgctttt

SEQ ID NO: 240459 - DNA, 441 bp, Glycine max
  unsure (1)..(441): unsure at all n locations
agcttagcccatcattaatattgattttaagatacaaaaaaacaagtatatatatcagtgaactgagccagaccaaggaaaaaaacatcaaaagaaaataaataatctaatatagctaattttataatcagataaagcatctgagacctgctgccatgtggtatcaacaggaggctgccgccgagcatcgccagcatcaaaatccagtacaccataatccctcaaccgaatctaaacagcaataactaaaatcagaagtcttttgagaattaaatgcatggcattatctataatacacatttttcataatgagacaaacccgaaggaaggcacggattctntgccaatgccaacacgcagagcagcctaccattagataaaaaagccagcataaattaagtattgatgacccaaaacaatcatgcttgcttcttatatgaa

SEQ ID NO: 240460 - DNA, 418 bp, Glycine max
  unsure (1)..(418): unsure at all n locations
ntgtggttctccaccagaggagttctgganaaagaataatcttcctctggccacaatgtttaagcctcggactaattacaaaacttctcttaaggagcggtgtaggggttttcctgcaactgctgtaaacctactagagaccttactttccattgatccctctaaacgtgggactgcctcctctgccctcatgtctgaggtgaattctttatgcattttattcttcttcctttttttaataagatttatctttatcataaagaatgagtttcatgggttaactttgaggatggtgtttcatgtgtaattttcataattgttattctgaaaatgctatgctattaagatgtttgctcactgttgcctattgcacagaattaagttcgatttctgattctatgcttcatgttgtaccttc

SEQ ID NO: 240461 - DNA, 456 bp, Glycine max
  unsure (1)..(456): unsure at all n locations
ctcgacccggatcttaagcgacgcggctgcagcttgtatggaaggatccacctgctgtcttgtgttatgaaatcagtcccacagatctggtgtcagttcaagaacagctacgtgaacgtgatgcgattntgcaacaattgaaattgaatttgctgaaggcacaacaatatatgaaaacacaagctgacaaaagaagaagggacatacagtttgaagttggagaattggtgttggtcaaactacaaccttatagaaaacactcaattgctttaaggaaaacacagaagctgagcatgcgctattttggaccctttgaggttntggaaaaaattggaaacgtggcttataaattgaaactaccggatactgctaggattcatccggttttccacatttccttacttanaaatttgtaggtagccttacaacaattataccttgccttgacaatactga

SEQ ID NO: 240462 - DNA, 404 bp, Glycine max
tgtagaacacgtggtcatgatatatgtcatggtttggccagcggttcgaggataaaggggatgtcctacattatttccatgatacacatgcaacaatgatgattaggaaattttatgcaaaactggtcatgcatgcacccatgtggacactcaagcatcaagtttttatggtcatgtgacactagggctcaggatttattttccctattttaagtcaacccagtatttccaaaatatgttcttctatcaatttgtgcattcatccgagtctatcttgggtgttcgaaaaacttttcacagcatttacccttcaaatgtgtacacacatttttttcaaaaaaactggttaagatcagtaaaatctttcaaagaaaagttggaaattatctcttttcacaagcatg

SEQ ID NO: 240463 - DNA, 367 bp, Glycine max
tatctttcaacttttatgaataatatatttcttctctaaggatgtggtcccagaggtcgctggtatctggcagacagagggtctgtgcctggagatcttttacttataatatgaaaggcacttacccatgctactgttggcctatgtcctgctgcatcatatagagcttctcctgattattttttgagtcctaatggtggaggaagggaccaaataatttttttaacaaaagtcttgtatttgtgatgactgataagatttccaaccaacttatttaggtactttcttgagctttgtgactgtaggacttctcttgcatatatactcatgccacagggcaatgctatattagattgttccctaattg

SEQ ID NO: 240464 - DNA, 433 bp, Glycine max
tcctaagaacattttccacagtctggccgttgggaatttgagaataataacttttggtctcttgctaagcaagaatggagcgctaagtgcaattccaaccaaagagggaatcgcgttgagcgcccagaggtgcgctaagccagactccaacagagagggaattgcgcttatcgactagaggtgcgctaagcgagccctattgcagagggggctgcactaagcctaaattcttatgctaagcgcaagaagtggacttcggcttatcgcgacaggctcgctaagcgaaatctgcaacttataaatgcgttctcagtgtgaaaaacatgattgttcactctcttattctccaaaacaccacccaaaccctaaaacctcattattccaccacccaagaccatatgtggccgctgtaagccaccgttgcttgccattg

SEQ ID NO: 240465 - DNA, 392 bp, Glycine max
caactttgaaaaatggaactcgaaatataatattcattgttttaattgtaagtactaattgtttcagtcatcattaaagcattggcttaaacatacaacaaaataggtataagataaaataacgctaacagcttaacatcccataaataaaaaataggaattctacttagctgtatgcctttatccaatgcacacactataaggatataactcttgcgatttcatgacagtatctgaatttgaaagtcgcaatcccattaagataaaataacgtgtttcacacgcacataaaagttatcaggaaagaaaagttgcatgcacaataggagcttgtacaaaaccatagtttggtccttctcatatcaacacattgtttgttacgtgggagatta

SEQ ID NO: 240466 - DNA, 345 bp, Glycine max
  unsure (1)..(345): unsure at all n locations
tgtcgntctcttgcctcagccacgtgttctcgtgccgcgtcaactgtgtctggctgnagnacaaaatcgtacgaacaaaaccacacacaaaaataacaagagaaaagtttttacatcagaaacctcaaaaagtaagaaaatgactcgatgagttcggagcgcgtcattaccttcatttgggtttcacgattttggaaccaagactttagctgacgagttttcaaacacaggcttatactcagttcaagcctttgctttcatctggatgaggggctccttgaaaacctacaattataaataaagaaacttactaattacatcaccaccattaaataaatgaagagt

SEQ ID NO: 240467 - DNA, 407 bp, Glycine max
gcttgagggtagtgttgaaaatcataatttatattctgattctattaataattgtaatatatagggacattatatttgatttacaggaaacaaaatatcctctatttatgtaccactaatgtaattatcctatataaacaaacatttggtgcgtactctgatacacggatttcactctactatccctctttattttctctcattttacagatatgatttgatcacgataaatagggaaatttctcagctgataattaaggattatacacattattagtggctatgattccttatatctgactcttgaatcattataaatcagaataacatgtgcaacacaactacataattacagtaaataacattgttatattgagtaatattctgagtgctgaccacaactacat

SEQ ID NO: 240468 - DNA, 419 bp, Glycine max
  unsure (1)..(419): unsure at all n locations
ntataagcgagggttcgggagacaaaggtcaagcgttcgctatatgcgaagatgatattccgagtactttggatttggtacgaccatgccctcctgatttccagctgggaaattggcgagtggaggaacgccccggcatttacgcaacaagcataatgtaaacctttacggttttaaaagctctatagttgggcctaggctttagagtttttccttttgttaaggctttgcgtcttttgtttttgaatttataatacaaggatctttcttcatctgatcctggtctttacccattctcattcatttgcatgtttacttctttttttgaaacggcagatccgatgacgagtcctccgaaggtactaatacctgggacccgtctatcgacttcgagcaagaaatgaatcacacggaagatg

SEQ ID NO: 240469 - DNA, 455 bp, Glycine max
  unsure (1)..(455): unsure at all n locations
ttaagtcacctgcggcatgcaagcttcttaataggtacctgaaagctgcttggttattaaagacagtaatatgggagcaaagcatataaaatatgattnttttctaatgcaaaatcaatagctaaaaactccttttcggtggtggtgtagttaacttgagctgcatccaaagtgtgtgaggtgtaagtaatgacatgtgataatctttcaactctctacaacaaaacaaccccaagtgcatagttggaggcatcacacatgagctcaaagggaagctcccaatcctgtggctacatgatgggagaggtggtaagcttcctcctcaattcctcaaatgactctttgcaaagctggtcaagcacaaaatctacgtctttttgaagaagcttggacaatggcagggcaatcttggatgaatctcctatagaaaccaacatgtccaagaaaaagcatac

SEQ ID NO: 240470 - DNA, 425 bp, Glycine max
  unsure (1)..(425): unsure at all n locations
tttcacaaaggatatgattntctaaagctagtatgtcaaaaacagagtttcgaaaatatcatccaatcaatagaaaaacaactttgttaaaacaagttcaaactatcgtccaactttataaaaagatattttcaaaaaggttttctaaatgcaaacttgtgtgactaagtgtgtcaagacatgcacaagtaaacacaaattaaatagcttaagtgtgaagtagaaacacttaaatcttatactggttcactcaacctgacttatgtccagttctccttcataattaattgaaggcttctactaatcaaaacttgattacaaacaagtagtttgttctgccgcttgtggctacaataatattctcaatgtcacttatggcacacccttanactccccttgaatctaagaaaacttaattattgttt

SEQ ID NO: 240471 - DNA, 423 bp, Glycine max
  unsure (1)..(423): unsure at all n locations
ttcatctctgccccattaattagcgagtagtgaaaatatttgtattcgtaactatgtattcttgtcatccttacatgaattaaaaaatgaaggattaaaagtcgatgttntataacaactaaaagctgcaatttaaactttgactaagaaaacgagcaaccactaaaaattgctacaccagcttttactcaaaaaatgattaatcctcaccatatgaatgatttcaatttcgtttccaagttaattagggtagagattcaacttaataagtcacaaataaaacactatatggaaaaagactcctaatgtccaaaactttagtccaactttccaagtgactcaaattcattctaaaattgtttgatccctagattgaatnttcactacataatgctacccgcacgaaacgcaccattgaatatt

SEQ ID NO: 240472 - DNA, 430 bp, Glycine max
ctaaaacatcccctcccggatcacatcgtactagtgttctagtatactacatgagtatacaatggttcttctaattaatagtattaatacttaatacaatctgttaaaactttgaagatgaggaaaccaattatatcaacttgaagcttcttctcaaacggctttcttcaggcagcaagaaatataagaaattggaaggaggatttttctttctttgggtgagggggacaaattaacagaactaggtggaaggaaccaactattaacaacctgaaacagactacatacacttctacaggcagagtagataatatttacacgaggctacactatgacgcaaacaaggcacactgctttcttgcatgagatggaatcagtttcaccagcatgcctggaggcacttctttaagctctgtgtcagaacaccggc

SEQ ID NO: 240473 - DNA, 461 bp, Glycine max
  unsure (1)..(461): unsure at all n locations
agctnattctagtagtgcgtggttgagtggtgttccgaacttcacacgtcggcgttgagggtgtctttgacagaagggaggacctgcaaaataaaagactctggcgctcaagtaagaatgtgtattatgtaaataaagcaagtaatggtgtaatgtagctcgtgtgacagagaaagtgtggcataggcttgttgtcatgtgctaagtgtgtgagcaggtcaagtaaagtggcttgatggaacctgtatttatagtagatgagtgaggctattgatccttgtttttcagggttgttgttagtctcgtaaataattcatggcttatagataatagccgggagtttagaaataatgctagagataaatatctgaattgttgataaggtagaagaaattttaccttatagatactggggtgtatagataatttatatctacccatagatagatattcaatacatt

SEQ ID NO: 240474 - DNA, 425 bp, Glycine max
tcttcctaaccaaggagaattattttcttaccccagtagatattggagtttggcagacagctaaactaatccaattgtaacaagaccaaccatcttttgttgtaagtgtggtcattagaatgtagatgtcaaaattctgatatttcttagaggatcacgagtaaaaggattgattagtgttttagaacagagggcataaggagattattacctatacttaataggaaatctacctatggatattgtgttctatttggagtgaatctctttcatggaaaacctcaacaagcaaaatgtggttgcaaggtctagagctgaagcaacccatcaagctatgactctcactacttatgaactaatatgtctaaaacaaataaatgactcattaaagaggtaaaattttgtgaggttggaactgagacaca

SEQ ID NO: 240475 - DNA, 387 bp, Glycine max
  unsure (1)..(387): unsure at all n locations
agcttctggtgggacatcttgacttgctttccaatctgacattcaccacagattctgccttcttctattttcagagtgggaatgcctctaacagcacctttgtcaatgattttcttcatgccttttaagtgcagatgtccaaatctttgatgccatattctgacttcatcttctttggaggatagacatgtggaggagtagctggtttcttgaggtgtccataggtaacagttggcctttgatctgcttcccttcattagaacttcattcttctcatttgtcaccaagcattctgactctgtgaagattacattgaatccttcatcacacagctgactgatgctgatcaagttngcagtcagtcccttcaccagcagcactttgttc

SEQ ID NO: 240476 - DNA, 428 bp, Glycine max
  unsure (1)..(428): unsure at all n locations
tgtaggattatggggtacccatcacatgtggtactaggtggcggtcgggcgatggtgcacaacaagttttccacatccacaatgcgcgcataaacccaccatcccctgttgcccacctccaactaagctcacgtactcccacgtagcccatatcctcgtttctctcaacaccgggtccccatcaatcctcccaagcttccacaacatccaagcaaaacaacattcaaacagcacaagctatcacagccaagcaaaacagagcaaaggcagaaaactctgctcaacacactaaccaaaatcacaacttttctcacttaaagaccccagtaacaattccttctatccaattcgttaaccgttggatcgactccaaaattttattggaagtctatagtgcataagcctacattntgaccgttgggatctac

SEQ ID NO: 240477 - DNA, 416 bp, Glycine max
  unsure (1)..(416): unsure at all n locations
agctntgaccagatgagtgttggcaatgattttttgntagcagcatacactcctagatcccaatcccattggttgcatctttcttttatgtggtcttggatgctttgagtgaccacagaaactacatcttcacaagttacataatcagaaacaaagattggggattgatacacacatgataaatactccaaaataaaattagtaaggtcagccgcctcttctttcagtgtcttgatttgagatctataagacttctttngcaaataatgtttcttttttaaatacttgaacaatttaatctgcttattcaagtaaacaagccttcgaagagccatagactgaaatatatagatcaaaggggaagagtcatctgagccaagtttaagatatatgtcagagataaatcgcataacaac

SEQ ID NO: 240478 - DNA, 400 bp, Glycine max
tgtattagtgcataattatgaccctaatgattttataccgtaataatggtaacactttttcccttgtcatccaaaaaaagtcttgcttttttttttttgtgtatcaactatataaaagttaaacacaaagcaacttttttttagtgtgggccgcatttttttttttacagtaaattactctgatttttcttaaattcgctctcgcttgatatttttttcatttataaactctatacaaatcctctaattatgtgcttttgttatgctgacttccatttttaggtgtaaaaaatgttgcactaacccttttaaggacactcaaagtaatgtatcatagaaaacaagaacaattgtcaggattaaacagaagtgtttgaaaaactcaatcataaaagaagtg

SEQ ID NO: 240479 - DNA, 242 bp, Glycine max
  unsure (1)..(242): unsure at all n locations
gcctttgaatatcaataaacgttnttgcttctaacaacatccttatatacttttccatattgtttcatccattgctcatgtcttacggacatgcatggatgcctcatggaggttgcgggacattacttgggaaatgccgattgggagaaggagcacaagagctaanatgtgctgctttttgccaatggaagccatgtcttttcttcacaatgtgtaactctttattaattgtttgtatattg

SEQ ID NO: 240480 - DNA, 409 bp, Glycine max
tcttcttgattctgagcgtgatctctcacctcttcaatcatatctagttctaaggctagattttcatcgttaatttcttcttcaaattgggttcttcttgcggagggttcaccaaccttaactggaatcacgacatcagtatcataagtcaatatgaaaggagtttcctttgtgttgactgtgaagtgcaatggtatgcccatagtacactaggcaactgtacatcctaaagaccttttgctttgcctacttttttcttcatctttgttagaatgactttgtttgttgcttttgcttgcccatttatttatggatgttccataaaagacaccaagtgcttgatgccgagcagccttaggaactgttcatatcctttctccatgaattgtatgccattatatgtgactat

SEQ ID NO: 240481 - DNA, 429 bp, Glycine max
  unsure (1)..(429): unsure at all n locations
agcttctgcgtcgggaaggtgagcgttggtgcataaatggaagaagaagccatgagagagagaatgaaagaatggatatactgtgtgtgttgtgaatgtgacgtgaaggggatggaacatgaggctgggaaaatttgagggatggatcttcttagtgcctcaatagattctttattttttctagccacgaggggataaggatgaaatgaatttttttttttttgacttttacctacactatgacaaacaattgtaggtataagtatttttttgacttttacctacactaatttatgtgtgtaggcaaaagtctccgtaagtatatgtcattttttttgtagtgattgtcttatcctcttaaaaattccttggccaatacacttgtaattcaataaggaattatttgagtgcttcattgntcaatctatc

SEQ ID NO: 240482 - DNA, 421 bp, Glycine max
tgtaatcgattaaaccaatatgaaaatttccctgcaagctacaaacacatgtgtaatcgattatgatcagcttgtaatcaattaaaatagagttttaagcacaaaagaaattttctaactttagaacctttctttttactcctacatgatgatgcatgatgcacatatggaaagatagagactaagatgcaacacataatacaacaattaatacaaatgccactcaagagagttaggcatgtaaaagacaaaacttcttcaatcttcttcaagcttcaaggctaagtcttcatgttgctcctcctatctctaataggtagttggctgccgatccaaatctcgagtattagagatttagtatgatataagagagttcaaaatgggaggactatgagaaagtagcggatcaaatctcctctaa

SEQ ID NO: 240483 - DNA, 415 bp, Glycine max
agcttgagcttctacatccatcgtcgtgcctcacatctcatctcatagatctctcgaacccatgacaggcatacatatgccccgcgcgctcgtactgtctcggctctagcctcctcaccagagcctcgaagccgtggaaggcgccactgataggaagatacaggagtgatgacacattatccagcatgatcgtcaactctcctatcgcaaatgaagtcagcactgatgggtcacgtggcccaccagggaatccctcatcagcatgtgacccctcagcaccatcacgacctaagtcctctgcaacagttgcatctatgtccgcagtcatctgaggtgcatcttcagtcatatgaggaacatcctcagccatatgagggacattctcactcatctgaggaacatcatccgtcatatg

SEQ ID NO: 240484 - DNA, 415 bp, Glycine max
tcatgcttatgtatgtatggcaaaacttcattactgttgttcaagacatacaagcgagcttgaaacaaatcttctacacttggagcttgtaacaaatcttttacagttaatataatatttttttaattgaagttatatttgatatctttaaggccctgctcaagagctgtttgaaaaacactaagtgtattcaaagttgatcttccaagttcactacaagctggccttagtggccagttgtcacaacctacccttcgacgggagggcgatgcgtgactcgcgggtgcgtgttccaagaaaggaatacgcgcggagtcgccaccaacgtttatttgatgaaaacgtcaaaaaaaccggaaaagatgtgatctacgaaatctttaagtgaaaggttcgggagttgtatttacacacg

SEQ ID NO: 240485 - DNA, 410 bp, Glycine max
  unsure (1)..(410): unsure at all n locations
ctcccagagccaccaccattacacactgtgttgtctctctgttnagctccataggaaatgtatgatctcttctgctccaaaaaccttttgcttatttcacactccatcaacagctcatcttcttgattgcattcagctatggaaccattgcatgtgctcgcatgactttncaatgagagcaccgtgcagctggtgaaatgcatacagctgaagagcatgaagtaccacaacccaacaagtctaatggtggatgatcttgaggccattcttctgttctgtgtcttggattggatgtacccttccttccactctccactaagaagcactatatagagaatattataatatatgacaccacctttttgaacccgtgcaccttggattagcgaccagctgattgaacgcacttt

SEQ ID NO: 240486 - DNA, 433 bp, Glycine max
  unsure (1)..(433): unsure at all n locations
ttntagtgtatttctattgaggaatgaatatacctttgttatcctatttgatctgaagccttagaaagaacttaagttctcccatcatgctcatttcaaactcactcttcatcatattagagaaatccttgcatagagattcattagtagctccaaagataatatcatcaacatatatttgaactataatgaaatccttgctgacttctgttctaaagaaagttgtgtctaccttgtctctcataaaatcattttctaaaagaaaagagcttaatctatcatatcaagcatgttgcgcctattctagaccatacaaagcctttctaagtttgaaaacatggtttggaagactttgatcctaaaaactaggagattgtttgacatatacttccttttcaataaaatcatttaaaaaggcacttttaacatccat

SEQ ID NO: 240487 - DNA, 476 bp, Glycine max
ctgcagctttttacatctctgtaggatgattgtgtgttataaaacggcgatgcctactgtagactgggttttcttccatgttttagttgtatgtagcttgtggtttcttcacagatggggcatgcatgatgacccttaacactgtaaccgctgagatttccatatggtggaaagtcattaatggtacaaaaaagcattgcacgcatttcaaacgtttccttgcaaaacgcatcaaacactacaaccccctggtccaacaactttcccaggtcttcaaccaacggacttagataaacatcaatgtcatttcctggctgtcttaggcctgatatcatcatagacaacatcatgtattttcgcttcatgcacaaccaaggaggcaaattgtaaattactagcagaactagccatgaactgtgttgagtgcttaatgtgccatatggattcattccatcactggctagtccaagtctaag

SEQ ID NO: 240488 - DNA, 430 bp, Glycine max
  unsure (1)..(430): unsure at all n locations
tatgcatggaaaatgtaattatgaaattgagatgcccgaagaaacaccatttcctagttaaccatgcattaggtaccatgttcaattattttgtttttaagtgaaatgggtttatgatcccaacatggttggctcgtggtgcctaacacatgaaactaagaatgtagtgtgaagtttcacgcttcccccttttttgtttttgttttgtagaggaaaacacaaggatgagcaaacatgaaaacaaatggtatgcaattttgcagatcaaaaagtttgttgaacgcatatgcatgatgatgccatgactcatgcaaaatgtgaggccggaatatgataacggacaaatgcaggatatgtccattatgatgttatgaagagatgcttatgcgatgcatgatatgaatgcattntacggacacgagagcccgga

SEQ ID NO: 240489 - DNA, 323 bp, Glycine max
gtcagcgtacttgtgaatgcacgcctggccacatcactaataccgcgttaataatatcttgaatcactgtgttttctttcgaataggattatctgcggctttgcccatcgccccccgttgatacttgtattcgtcggctgcaatataatttgaatctatgtggggctaagttgctgtaaaacttccatactacttgacgggaaaatgaatttaatgttgtgtagaagatgatcgccttggataaagctatggcatgaatatctacttgttatagttcttataccatgccagctggttctggaaaaaatgatgaaaactgattt

SEQ ID NO: 240490 - DNA, 427 bp, Glycine max
  unsure (1)..(427): unsure at all n locations
tgtttcattctgagtgcacatacagaaagccaatgaagatctttatatataacgctaaatcattgactgcaatagaaacacgtgtgaagccacttgcaagagtaagtttcaaggaccctcaatttttctatactagttttcaatacataaaaccataaatagttcatgcactgagagtttaatgtaatatggtcacaaacaaattatatatatgngaactttgttaacttttaccaatacttgctttaaaaggtatacctactattgcttatgattttttatgagagaagaaagttttaacttaaatgtatcgatacaaaaaagtgtttctacactctctaaattaaaagtattgatggtgtaaagtgttntaaattcaattggactggaaccacttgctgtcatgtttgacacacacactcttgtc

SEQ ID NO: 240491 - DNA, 445 bp, Glycine max
gagctttaaaaatcaacattcctattctactttttccccctttgtcattatcaaaagatgcgggtccaaaaagataaaggaaatgatttggccatcactgtcaaccttcattggatggaggttgagtgatatgaggtggtgactttggtggcgaaggcagaggcacaagcacatgatcaataggtatagcaacctctgatgcaggaatcatttgtgcaagaacctcaggatgaggttgcacaacaatggtcggtgttggtggaggcggttgaggtatgggtgtagactggtgttggacaaatggaggcaacctttgttgcattagcagattcatgttatacggaacaaaatctgtgaaggatttgagcgaagactccagagtgttcttgattaacatgttggtctcaatgcgttcaacaatgaatcttctctacatagtctcttc

SEQ ID NO: 240492 - DNA, 414 bp, Glycine max
tgcttctacataaaggatgaagacatggttcatgatatcttttggtgtcaccctgatgcagtgaagttagtcaacacatgtaatttggtgtttttgatagacaacacctacaaaacaaaccggtacagactcctattgctcaattttgttggggtgacaccgactgggatgacattctctgccgattttgcatatgtggagggtgaacgcgttaataatttggtctgggctttacaatgctttcaaggccttttcttaaattgtgatgccctccctcgagttattgtgtcactgacagagaccaagcattgatgaatgcagtgaaggctgtattccctgactgtacaaatttgttgtgcagctttcacataaacaagaatgtgaaggccaaatgtaaagcactaattacgcaaa

SEQ ID NO: 240493 - DNA, 424 bp, Glycine max
  unsure (1)..(424): unsure at all n locations
agcttataataagacatacaagcattttattgaaccagtccaaggaccacaatattgggcccagacacagtatacacaccctgttccaccacataaaaaggtccaaagaggaaggccaaagaaaaatagaaggagatctgtagatgaggacaatgtcacaggacataagctaaagaggaaattggctgagtttacatgtggaaggtgtggccaaaccaatcataacattagaagctgtaaaaatattggagttcctgttaggccaaagaaatatgttgcaccatcaacttcaaatgaggatgaccacctattatctcaagatgaacaagctttgaatgaggctgaagaagctgctgctcatgttcaacaagatccggtggagatntaattatctcagcctcatttgtcacaagatagtgacatg

SEQ ID NO: 240494 - DNA, 429 bp, Glycine max
tattaaatataacaaactaatttaattgttataaaaaatacttcaagataaatctttattccaacctaacaaaataacttacaaaaaatgtgtgatactacagaaattttgaaaaccacctaacaaaatagcttacaaaaactatgtgatcttccaaaaccacctaacaaaataacttacaaaaaaaattgatatcccagaaattatcaaacccacgaatgcaaaaatgaaagcaactgcaacagccaaaacagctgaaaaaaatggtgaaggagggctgtatttaaagaccctaaaacgtcaaccccatttgcgccatattctaccctaaaatgccaacatcatttgcgcttcctccctgctcctgctgcaaaagctgctcctggtctgccaaagctgttgtgcttgctgcaaacctaaaatgccatt

SEQ ID NO: 240495 - DNA, 467 bp, Glycine max
  unsure (1)..(467): unsure at all n locations
agcttccttatcaaaattataaggacaaatatctataaattattgatatagttagaacgtgatctatgatgtagggattaaatttatatgatcaaattcatatcaaaaggaaaactgaaacgtgagtgtgagtgtatttccatcctcttatttttaaagttatatatatttccacttgtctgtaatataaaaaaaaaatccacttgtccaatttcatgcattttgtttcgtcaaattgttaatgtatttgtaacagtttttatgcacaaaacaacaagcaaaatatggataaaaatgaaaaataattgaaaaaggaacaagagaggagttatttagttgcattttaaagtgttcttagtgtctcttgctctgtaaccataataacaacggtaaaaaaaaatatanagaatatagttgaaaaggctcaatgaatcccctaactctggcctnnttcttctacacccaac

SEQ ID NO: 240496 - DNA, 412 bp, Glycine max
  unsure (1)..(412): unsure at all n locations
tcagcagtttctgaaaagtggtccatagctgcttacgtttccttggcgtttgactaggaatntggcacatggggtctgatatgattaatcagatagagaacaaatgagcattggactaaagtctaaagaccggcgaagaaacgttatccctatgcttaaagagataatatagattcaattatttagtgccttttatactttaagcattaacaaatgttactacttggttagctctaattagtgatacccttttggccttttgcttggtcagcattttgtcttgacaatcacgtttcctttggcggtaaatgaatgtgtgaagcgtgaattcaattgtgatcttcttggagatggcaacagtgatggctaatcgcattaatatgttccaattccatgcactactaatggcatc

SEQ ID NO: 240497 - DNA, 420 bp, Glycine max
agcttgtacattcatttgattatcatttacaatcccaaccatcagtcatctaaatatcatagatatagtaattaattgctaactttgatagccaatttggataggctgggtgaaatttgatataatgtcaatagtagagtggaaactgcaattgggccaataatcttggggtggccaaggaaagtattcgtagacattaatttcatgcatatgacatgacagaaataaagagaatgatgaatagaatgcattgtttaaaattgatttacatatgatcacacttatatatgctgttgctatcaatgcaaggggctgattaataaaagattgaaatgtattatatggcttataataacaagtcccagtagatgttgcataataaactctacatattaggaacaagtcaaattagtatttctg

SEQ ID NO: 240498 - DNA, 421 bp, Glycine max
tattttagcaatctgaatggactcaaacccaacttctaataatttcctgaagcaaataggttttaggataagggagatttgatgaattgactcttgtacatcatcagtgaaatttcaatacctcaagatactaaacaatacaaactatcattcttatttgattcaagatttaggctatgcttgtttgattaggcaaagaattaaaaagtataaatttgacatcaataaaatctagatgaaaaaaatgttaaaaatgacaatgtatctggacgtttctgaatccaaaaatacattgttttccacccactaaaaccggtagttttaaaatttcatttatcaccaacggggtcatagagacctgccacaatgttcccctcccagtagcttatagagaatttattatctttgaccaaaaattgca

SEQ ID NO: 240499 - DNA, 436 bp, Glycine max
agcttgagcttctacaatccatcgtcgtgcctcacatctcatctcatagatctctcgaacccatgacaggcatacatatgccccgcgcgctcgtactgtctcggctctagcctcctcaccagagcctcgaagccgtggaaggcgccactgataggaagatacaggagtgatgacacatcatccagcatgatcgtcaactctcctatcgcaaatgaagtcagcactgatgggtcacgtggcccaccagggaatccctcatcagcatgtgacccctcagcaccatcacgacctaagtcctctgcaacagttgcatctatgtccgcagtcatctgaggtgcatcttcagtcatatgaggaacatcctcagccatatgagggacatcctcactcatctgaggaacatcatccgtcatatgaggaacatcctcagtcacct

SEQ ID NO: 240500 - DNA, 415 bp, Glycine max
tcatgcttatgtatgtatggcaaaacttcattactgttgttcaagacatacaagtgagcttgaaacaaatcttctacacttggagcttgtaacaaatcttttacagttaatataatatttttttaatcgaagctatatttgatatctttaaggccctgctcaagagctgtttgaaaaacactaagtgtattcaaagttgatcttccaagttcactacaagctggccttagtggccagttgtcacaacctacccttcgacgggagggcgatgcgtgactcgcgggtgcgtgttccaagaaaggaatacgcgcggagtcgccaccaacgtttatttgaggaaaacgtcaaaaaaaccggaaaagatgtgatctacgaaatttttaagtgaaaggttcgggagttgtatttacacacg

SEQ ID NO: 240501 - DNA, 429 bp, Glycine max
gctttcttctggataaactccacggttgtttataatactgatcaaattatcatattaaaatacttataaatatcacaaatttttcagccacatgcataattgcaatgcaaaaaaataaggcccaaaataaattttaaaaaaaattaaaaaatgcatgatacaaggatcaaacatgttggcagcatatcgtgatttgaaaaaatcacaaaaaaaaacaaaaattaggcaaatgttcacaaaaaatacacatgtatgaaaaaaaatcaaagaaataagaggaaagcgagaaaacagaataaggatgtgaataccaaaaaactcgctaacgattgttgcaaaactgcaaagagtgattatgtctttggcaactcgtcttgtggccatatattttcttctgtaatcagtgtctaatttcaaacaacgaagcgt

SEQ ID NO: 240502 - DNA, 358 bp, Glycine max
  unsure (1)..(358): unsure at all n locations
ctattaaacgaaaaaatgcacccatataccaatcagggagctttggtacctaaaatatttacacgtacttccaaggggtatttggtacttacatcacacacatcttcttggcctaaatcacatacatgcatactcnaagcattttggggtacccaaaattgcacatgtgcacatcttggtatttttaatacctatacatacacaaacttcatgatgaatcttgactatctacacaataaagggctacatttcatgccctttttcaagttttgctacctaaagccgcatgcaaaatcacgcatattttcctttgctgactacaattcgattcaaattatatatatattgtttggaatat

SEQ ID NO: 240503 - DNA, 82 bp, Glycine max
  unsure (1)..(82): unsure at all n locations
ccgcactctagggggtatctatctgcacangngggagaacatttgcggaataaagctttttttttccgagagacaaagggga

SEQ ID NO: 240504 - DNA, 136 bp, Glycine max
gggaaagctataagaaaaagctgcaagaaagggggacacgatatgaagtgcgaaagttgactaacgtaaaaaaggctaggagatctggagcaacgggaaagatgggatgcaggaaaacaatatagagaagtcaaaa

SEQ ID NO: 240505 - DNA, 150 bp, Glycine max
  unsure (1)..(150): unsure at all n locations
gttaaaagtgtgcgggagataatggggtcaataatggatggaatttatctgatcacngnaaaatcgtaggtaaaataaggggggaatatttgggaaagaatagaaaatgagaggaattataagaaaaggagaaaaaatgtggaaaggggg

SEQ ID NO: 240506 - DNA, 123 bp, Glycine max
tggaaatacagaggattgtcacgtaatcatgcggcgaataagccggttatcggggagaaacggagcggactctgtaaaaataggtgatatatattgtgaaaaacttgataatatgggggtaac

SEQ ID NO: 240507 - DNA, 78 bp, Glycine max
tctcctttctcccccctcctcccccccccccccctttttcccctcttttccccctgtttttttcttttttcccccccc

SEQ ID NO: 240508 - DNA, 75 bp, Glycine max
ccctcttactctcttcccctctcctctcctcccctcctctccctcctccccccattccccaccccaacgaggatt

SEQ ID NO: 240509 - DNA, 81 bp, Glycine max
ggcgaagaggaggcggacgagtgagggaagaaaagaagagggaaaaaatatgagggtaatatagaagggaagaaaggaggg

SEQ ID NO: 240510 - DNA, 194 bp, Glycine max
ttacattacaaagcgagcgtgtcattatattacgggactcaatcggacatccgagacaatagtacttgtcatttgaattggcacaaaagcacaactctatcaactcgaacatttcgatctattacggcactcaaactgacttcccaataaaaaatctcggcatctcagtaagcacataagatcaaacctttcaa

SEQ ID NO: 240511 - DNA, 385 bp, Glycine max
agcttgaatgtttctgtgttatcgtcaatttctccattcatatcaagatggagacatctcctacaacaaaactttaatgaacaatatgatcacaaaatgtcacttcaaacacaacagctataacatacctttttcattcaacatgttacttcaaacacaacaacactaacatacctttttcattcaacatgtcatatggaccatgaaagaccaataaattaatttaacaatcatgtcacgctaaacattatagaacaacaaaagccaacctaaaatctataaagcaaacctaaaacccaatctctaaattaactaaccaaattcgcaaaaattacacctcaatatagagaatacaaaattaatctgaatcacgagacaccgtcag

SEQ ID NO: 240512 - DNA, 342 bp, Glycine max
  unsure (1)..(342): unsure at all n locations
agcctctatatttataacgaaccccaccttcttgttacacgtatattaattaatgggggcaaggagacatatgcacctccacagccatggataataagtatctgcgtgcaagcatttataaatggactatataacgctataacctcgctcttataaaagcttcaaccgaatcngctgaactaatactacaataagtttatcataaggtctgttcaacacatatttatatacttataataaagggaactgatgcattatccattaaattaaaatgcgctaatatggaactaccccccacttaatatacaattgagcttatatagaaatggcctaatatgtaac

SEQ ID NO: 240513 - DNA, 375 bp, Glycine max
ggacctaagcaccgagctcaactccaaattcggtttcaatctgaaactggaatcatctatcatccctctcctctgccaaaaaacatcgccaaagactactaatcgcctgaattattttagtgtctcccttctcccttctccaaaaaaacaaaagacaaacccgctgaaatactttgtggctcccttcccctggcaaaaaattcaaaacgatacagcctgagaaatctatgaatcttccctttccctttacaaaagattctaaaagacaaccctctaaaaattctttcatacccattcacaaagcaacaaaagttcaccccctaacactttggcttaacaacatgggagggacatccctctcgggacaagacgggg

SEQ ID NO: 240514 - DNA, 343 bp, Glycine max
  unsure (1)..(343): unsure at all n locations
agctncatcagatgtggcatgtctgtatcttttcctcttatagaagaacgacatgcacttcctcgcattgcaaattcgcttaatcgagcggcaacagtcggcatcgtgttccttcaacgaaacaaggagttttttggacacaccatcgacttcggcatatcaaaaaaaaatcttctctacatccctagtcaaccgccccacgtttgaatgtccaactcaggacttggccgattcatgattgtgcaatccacatatcaacctcaccaaccaaccttccctccatgcactcggtttccataaacctgaagggacaatcacaacattactcccaggtctatataac

SEQ ID NO: 240515 - DNA, 422 bp, Glycine max
agcttctcggcattgcaaacaaaatacgtcttcttggcactgaaattcttgactctcaaattgttcaaaaaatacttgtaacaattccagaaaaatatgaagccacattgacttccttggagaactcaaaagatctttctactatcaccttggcagagcttttgaccgcacttcaggctctgaaacaaagaagactcatgagacaagaaggcactattgaaggggctttggtagctaaatcactggacaaaaaaaagaagggcaagtcaggaagtttcaaccacaaaaatggtagcaaatcctctcatgattttccatcatgtcctttttggaaaaaaatcaatcatccataggcaaagtggtggtggaggccaaatgtgaaatgccataaatgtggacaattatggcatgtggagaaaatc

SEQ ID NO: 240516 - DNA, 416 bp, Glycine max
cactcaacttatggatatctgctcggcatcgcttctatcaacttgggaacactcctggacaatcatctacttcattcactcgtgctgaccaacgttatgatgctgcaaaagattccttatctgcagattcgttacaacagcttctttacctattaagggaaggtaaccaacctaggccaatctacaggcgagtctctagctttttcttctgccctctgtatgcttaccgaatgggttattgatactggcgcaacacatcacgtttctttcacccattcctcttttcaacagccacctattccttcttctcttcataaatctatttgtgtcctaatggtcatcccgctcctatacatggcattggaaatgcaccaatacactcaatatcatcttgactgatgtctatttgtccccca

SEQ ID NO: 240517 - DNA, 418 bp, Glycine max
  unsure (1)..(418): unsure at all n locations
agactgnaagacaccctaagctatgttctatttatatgggacggggaaaggaataacagttataattagataatgaaatctctcaaatgcattaactaaatatatgattagctatcttggcatgaatttcaagaatgactgactcttgatgacttacagaattagccgactcatgagtttcaggaacggaagactcttaatgagtggtaggattaactagctcctttgaaagctactagaatggctgaatctttgtgagttaccggaacaactcacccatttgagaactacaataatgcttaatccttcctgagttatacgaattaattggctcacctttaagggttataagatagaccttcaaatgaaaacacattcatgaaataccactggttgaagctattaccatcctaatgcc

SEQ ID NO: 240518 - DNA, 370 bp, Glycine max
  unsure (1)..(370): unsure at all n locations
agctttctaaattgaagcaactaataatttttattgagtctgttnagagaacaagattccaaacaatggtaaatggaattcacttcggatagtaaaaatactggttatggattgatagaaattattcaaaagcttagtagacattgatgagttgcataacacaaaatctactcaattgaaagcctatacataagtaatttgttgggagcaagattcatgatgtacatacaattatggtgtttctcaacttctatcatcaagaattgttaataattgcaagaaccgcatccatatgaagattacacattattatgttaaaaagggtcatttttaaaagtatgaagaatcttatcattaaatccccaagaat

SEQ ID NO: 240519 - DNA, 352 bp, Glycine max
ctatggtggaaattctgagtgctgatgcacagactttttattatgatggggtaattggtgtaatgactggccgcctaaccggaactgacaatctgaaaaggaaatttactcactcctttttcctaacttcccaagacaaaagccactttgttttgaatgatgttttcagatatggtgatgaatataagtcaattgatattgagtctgtgcccgcaaacgatgctgctgatgaaagtgctccaacagatgcttttgctcccgagcctcggaaatctttacatccgctggttatatatgaacgcattcctgatggttttcattttcttcctccaacattttgcttttcttgctg

SEQ ID NO: 240520 - DNA, 205 bp, Glycine max
gggaaaatgagggagaagcccatgccgcgactgtcattcctacacagcctagactcccaccacccgaacaacgccattacctatccaaaaccaaccctctccttcctcccggcccagaggtcaacaagggccaacctaaacaacccaaagccgctcccgacttccatgacaaacaccccctcttatccaatccacaaacaccccc

SEQ ID NO: 240521 - DNA, 393 bp, Glycine max
ttaagtcacctgagctgcaactttatcttgggcacaaacctttatatgacaaattggatccattggacatgcactcatgtttgtggtctcatcaccctcatcacatacacacacatcacacacacacaaaccctaatctgacacacacacacacacaaaccctaatcacacacacacacaccctaattacacacacacaaatcctaatctgacacacacacaccctaatcacacacacacacacaccctcatcaccctaagtacacacacacacacacattgtctatggtttttgctttgatgcataatgcacgccttataaggaaagttggaagtctaagagtttggcaccatgttgctatctaaaacaattttatagggtgtacgccatga

SEQ ID NO: 240522 - DNA, 404 bp, Glycine max
ctaagcttcattattttcgcgcctatctctaggctccatatgttttgatggtcccctactaacgtacgactctctcacgccttgtattctaccggcacctacactactttctgcattaccagcagttctgcaatttcacatgcattaaatgcactatttgatgtgtgcgttgggagataaatttaattgaattgggagaagcccaatctaattaaattctggaccatcttaagggggaggtgagcatttgtttgctccaccccattgccacatataatcacactttttgcatgtccttcatgctttacatgccttatgacacctaagcacacttagtggagaatcttggacttgatcttggattagtgcgttgaaccctacctaaaactcactcatcataacta

SEQ ID NO: 240523 - DNA, 420 bp, Glycine max
agcttcggtattcaatttcgagcgtctcgtcttatttctggactcaatcagacattcgagtaaaaagttattgttgtttgaatttgctcagagcttcggtattcaatttcgagcctctcgatataatacaggactccatgagacacccgagtaaaaaagttattgtcgtttgaatttgcttagagcttcaacattcaatttcgagcgttccgatattttacaggactcaatcggatagccgagcaaaaagttattgtcgttttaatttgcttaaagcttcagtgttcaatttcgagcgtctcgacatatttcgggactcactcagacatccaagtaaaaagttattggtgtttgaatttgctcagagcttcggtgttcaatttcgagcatttggcactattacgggactcaatcatacat

SEQ ID NO: 240524 - DNA, 425 bp, Glycine max
  unsure (1)..(425): unsure at all n locations
ntgagcaaattgaaacgacaataactttgtactcgcatgtctgattgagtcccgcaatatatcgagacgctcgaaattgaataccgaagctctgagcaaattcaaacgacaataactttttactccgatgtgcgattgggtctcgtaatatatcggaacgctcgaaattgaatatagaagctctgagccaattccaacgacaataacttttttctcggatgtctgattgagtcccataatatatcggaacgctcgaaattgaatgttgaagctttgagcaaattcaaacgacaataactctttactcgcatgtctgattgagtcccgtaatatatcgagacgctcgaaattgaataccgaagctctgagcaaattcaaacgacaataaccatttattccgatgtctgatagagtctcgtaatata

SEQ ID NO: 240525 - DNA, 379 bp, Glycine max
catgccagctcgcgcacactacagaggatggagagttttatacgtcgtgtatgaacaccacgtgcttaccatatcttcgaaatggccaatcactgcacacccatttgctatgcacataacctgcggggcatcgcaaaatgttcaaacaaaaccaaccacaccctctggcgtgaaaatcttgggataacacgagggatacctgccaatgcaactcatccaagttacattacccccccaatcaacactctaacattttcccctcgtctgaaggtccacaaaattgctacatcattaacaaagtgccagagggtcactacttcattaggatcttcatagcacctgtcggtcggctaaatataccatcgaacccctattgaca

SEQ ID NO: 240526 - DNA, 427 bp, Glycine max
  unsure (1)..(427): unsure at all n locations
agctngaaagtcctagctccacattgtgtgccgtgtatgtttctagtgattggaagttcgaacttggaaaattggagttattatgaatggcattatcacaatcatatctgtcttgtaaataacatatttatacccttgaagtacagctattttcttagaatctaaggaatttatgcttgttgtattatgacgaatccaactcatgcattcttaaaagttaattcctagtgtttactcttatcatgatcttgccacaactgtctgagcatgtgaatgatcttagcatgccccgaatgttaggaagaaccttttctcgtgacagaatattctatagggaaaagagagagagagagagagaatctcagcccagaaggagaatattattcatatattcctctcaccggtttgaacttggcttttatacatg

SEQ ID NO: 240527 - DNA, 443 bp, Glycine max
tatgcacatacttctttacgaacgttcacttgcacaagacattcttataactaagaaaaatgcacccatatacaatcaaggcaccttcgttacctaaattatttgtatgtacttccaaggtgtatttgttacctacatcacacgcatttcctttgctaaatttacatacatgcatactcaaagcactttggctatcaaaaattgcatacgtgcacattctggtatttctaatacctgtacatacacaaacttcatgatgaatcttgactatctacacaataaggtgctacatttcatgctttattcaagtgtttttgctacctaaagccgcatgcaaattcaagtatattttcttttgccgattaaaattgtattcaaattaaaaggtatttttgtaacgtattttctttacatcacatgcaacatatatatactttttgtga

SEQ ID NO: 240528 - DNA, 305 bp, Glycine max
cttgcggaaccttcaccgagaagacactgcacaaacctatctcccttttggacaaagatggcggctggggcaacaaatccttccatcagaccctggagcactgaatctttaccccatcaccagacttgacgggattaaaccatgctcgacttgcccgaatgtaaagagcgtcccatacacactgtcacaaacatttatctccccatgcataacaacaataccatggctaacgtcaagatccacccaataccaaagatcaaagaaacaggaccccttcatccacaagcacaatgactttatccttc

SEQ ID NO: 240529 - DNA, 377 bp, Glycine max
  unsure (1)..(377): unsure at all n locations
ttgcttgaggaagcatgatgcattctggcctctggcttcttttnactcgcagaggccactggtgacaaatntgccagtattggttttccacctcccgcgattaattcctcaccctccacctctaatggtagaggaacaatctgatattgggatgcaaacccagctatcattccttttggttttgtcgcatcaaccaaaggactagcatgattatcacttgaacttgatatagttacaccggacaatttatcagaatgtgcagatatctctggcacaagagaaaattcaaccaagctcccttttccctcatctaccactgccgagtacaaccttttgatggtgcccgcctctgatactctagatgaactgcatggctt

SEQ ID NO: 240530 - DNA, 266 bp, Glycine max
  unsure (1)..(266): unsure at all n locations
agcctgtgactcacacaatccgaggaagcaccaaaggcaacaaaccataaatgccacttttccaacgtcaaaaccgcctcatcccgcttcctcataaaaattacttttgtattacggccccaaatcgacacaccggcccatagccaatacaccacgagtgctgggatagtgggaggtgggactgccacgcccataacatggcgtcatccaaactatngggagtaacacccctccacctctaagctgattgaacacccagcgacgaa

SEQ ID NO: 240531 - DNA, 343 bp, Glycine max
agctttggtctttaattgttgatgtgaggattctataccaatgttgcaagttccaggttagtgtccaaactgaatttggatactaagccccatcctaggccatacaaacttcaatggcttattgaagatgaagaggtaaaagtgacttaccaggttgaggtgtgtctcaccattggaagatacaatgatatggtgctgcgtgatgtggtttcaatggaggcgactcatatactgtttggaagaccatggcttcatgacaccaaaataatgcatgatggcttcaccaacaagatttcttttcagcaccatgaccagaaaattattcttaaacctttattcccct

SEQ ID NO: 240532 - DNA, 429 bp, Glycine max
gacactatagaataaccacactcgtgcatcttcaccgctggcatatgactgcagcatttttattcaaagacccttaagtgctctgctgacggcttacttccgcttcaagccttaaatggagtcctgtcttttacagacttagttggacatctgttgactatgtaaacaccagtgtagactgcttcaccccataatcgtgttagcgtacgtccccttctcccttgagcactcgatctagccactcccataactgtgcgatctcttctcttggaccactcactctgctgacgagaatatccgactgcaagtcgtctcttaacgccttcatcctaaccaaatccttcaaactcgtgaaaggtgcactctttgccgccatcactctatagaacttctactccgcttccactctgattttcaccaacggccttg

SEQ ID NO: 240533 - DNA, 414 bp, Glycine max
agcttctagacgaactatgtatggtagatattcattactggtattcagtatatacaaatgagcttgttgcaattcttttatacttaatggggcaacatgtagccctcttgaaccttacctttcactatttcgtcatgccgagactcgagaagcccaacaggttttgtcttttcaatgtactctgaacaaaactcaataagttcttttgtaatgtacctttcaacaatagatgctttaggacggcgaagattctttgtatactcttttaagaacttcatgtatccctcaaccgggtacatccaccgcaaatcacgggaccattacatttagtttccctcaccagatgaacaattatgggaaccctgatggtcaaaaatgaagatgaaaatccttctcccactgacaccaaataat

SEQ ID NO: 240534 - DNA, 434 bp, Glycine max
cgtgacggtgacaatagccatcccgattagactctttattgcacccattattattgagcccaaaaccaattacaccttgattccaggctgggccgaaaacacgcagcagattggcactgctttgcttgcatttcttggggaatgatgggtgatcttgatcgataagccacctacattttcaattgccttgattttcactcccctcacttaagaaattattaaatagtttctgatcagcatatgttcataattccgacaaatctctattcaaatttttaatttataaaaaaaaactaataacactataatgacttataggaaaatgaataattttctcaataaggtaaaattaacttgcaaaaattctctcatatattataacttctttagaagatgaacaacaatttacacatcaaatgttgcatgacgtaatt

SEQ ID NO: 240535 - DNA, 432 bp, Glycine max
ctgagggtgcgtagcccaccatctttccatagtagagtatctataatgtgtctaccatcacgatcatcgtctccctcttcatcattgggggtaccacctgggccgccacatcccttcaccttctgggcgtgttctttgaaagatccctctccctttttgcaaatgttctgtagttgcatcctatccggaaccatatcaaaattgcactgatactgcctaacaaaagcaaccattaggtcctctcaagaatggactcgggaagattccaagttagtgtaccaggtaatagctaccccagtaagacattcttggaaggaatgtattagcaattcctcatcttttgcgtattccccgatctcttgacaatacatctttagatggctcttgggacaagtagtccccttgtacttgtcaaggtccaccaccctgaac

SEQ ID NO: 240536 - DNA, 390 bp, Glycine max
  unsure (1)..(390): unsure at all n locations
caagcttgaggctgagaacctatataatagcaccaatgttntagttttagggagtcttttttcgtttttgggagaaagaantaatttaggttttgcaattccagtttttactattcacgtagcaataaaatttcattttctgcttcaatctgcaatttcgttttctactgattaatggaaggctaagtctccagcgttgttttctcttgaggatcaagcacaactctctttgaggttttattattactatcgaattctgatcagtttttcctcttcaccaattactctgtatttgttgctattaatccatgcatgcttagtgcttgattaattgtctctgcgcttaatttacattcatgcttaatgatcagnttcgttcatcattaattg

SEQ ID NO: 240537 - DNA, 442 bp, Glycine max
  unsure (1)..(442): unsure at all n locations
tgtaagacatggatttagaanacaagccaaacttgagtggaatcatattgaaatgcaaaccacatagtcatatatcacaacctataaatattcagtcatactaaccaaatattaagggaaatactaagtgttctaatgtcataataatatagtcaaatacatggctagaaatcaaaatactaataataataatgtctaaactgatggtggtggaggtaaatcaaagcagttgtaattaactaagtactaaatacttaaaacataaccaatgtccagagaataaataaatcacataatgtcaaattattcacaaaacataataaaagcatgtgtattaaacaagttataagtcatcataacataaaacaaatcatttgtctaagtcactggcatctagaagtcctaattctcctctaatggtgtagaaagaatctttgggtag

SEQ ID NO: 240538 - DNA, 420 bp, Glycine max
  unsure (1)..(420): unsure at all n locations
ttaagtcacctgcggcatgcaagcttccattggtgtctagaaacctaaggctgatgattgacatctattaatcaaatatgatgttgtgtttgcagcttctccccaaaaggcctttggcagtcctgcacttagaagcatgcacctcactctttccaaaatggtcttattcattctttctgccaaaccattctgctgtggagtgtgagggactgtnttgtgccttttgatgcctattttcctgcaaaactcattgaactgctctgaaacaaactccaggccattgtcagttcttaaaacttttaatcttgtaccaagttgatttccaacaagagtatgccattctctgaatttttgaaaagcttccgacttatttttcaaaacatacaaccatactcttcttgagaaatcatctatgatggt

SEQ ID NO: 240539 - DNA, 300 bp, Glycine max
cacttgtttaactcaacgtcggtccctggcgagctactttgcataaatcttaggtgcactaaagccacccctgtaagcttccctattactaaatctccatctatgcacaggaatacaagtctgtccgcacatcctaaacctaaggcccatcctcggtaagattactctgtacggactacaatagacacactcaaacgtccaggttccacaatgcataatcaatgaccaccacattgatcagcacgatctttaactccgccgaaagcatactaactactcatcaacctcacgtggaaagcc

SEQ ID NO: 240540 - DNA, 404 bp, Glycine max
gatccctaagtcacctgaggcatgcaagcttaatcacaagaaagataactctacttaatacctcaaaatgaagcaaaggttgtaagaatattagcttattatctatttctcataccctaacaattaaaacatggatatgcccctatatttgttcctccaatatttatatgatccctacttgcatcgatgggcaatgtggtcgtggaacatatgataggtgtgtgtgtgtgttgtttgtgagatagagagagagagagagagagaaaatgctgggttgtgtggtagataaatctgttcttggagtttttatgtttggtggcgaaagaagaatcatttattatgtggatggcacgattattgttaccaacttagactaactattggaggtgcctttggatacgtgg

SEQ ID NO: 240541 - DNA, 414 bp, Glycine max
cgcctgataatcgtcaaatatgagtcgttctcgacgatgaaaatatagtgcccatctctctaacaataattattcagtagttattcatgcttaattgttacgaactgacatttttcctatttatggcttgccgatatgaaaaggacggattaacagcctaaaagctgaacaaaatagcacaaaaaaaaagtccaaaaaggccagtccaatacgcgctcaacacccaatgcgcgctcagtgcgaaaacaagcactaacgctaagggaggaagaggcgcgttaagcacgaatacatgcatccgtgctaagcgtgagcacacaggcccaagtccactctatcacctatatcaagagagtcaagtcacacaacagacacacccagtctcatagcactctatacacacctaaagcctaa

SEQ ID NO: 240542 - DNA, 415 bp, Glycine max
agcttccattccgatcatggatggagggattataatttcaggacatctgaaacgctcagcaccaatggtgatgacctgtccatccggcaactcatagctcttctcaacagcagagctaagtttagatgtttcaagctcttgctcgtaatcaagggcaatataagccagcttttcctttacatcccttacaatttcacgctcagctgtggtagtgaaggaataaccaccttctgtaaggattttcatcaaggcatcactgagatcacgtcctgctaagtcaagacggaggatggcatgatggagagcatacccctcttaaatggggaccagttggctgacaccatctcctagtctagaacgataccttgcacaaattaatttaccacccttgaagaaacaataaagttatatacct

SEQ ID NO: 240543 - DNA, 371 bp, Glycine max
ctatcgtgtgcctacgcttagtgcccagaaaagtctacaatgaatatttcaggtgcgcttaacaccaacgcctgcactaagcatcaaacccccgtgaaaactaagtcacttgtgcctatataaggacgaggaacctaaatataaaaacacaccgagtctaaaagctattcacaacagtctctattgccccttttctactcttcatctctattatgtgggttggccattcatgcatctatttttacggattatacattgggaaatggccatgcctaaataattgggaaatgacatctcaacattgccttactacggatacaacgactttgccgacctttgcacacctacttaacttaatgcccctatgaaca

SEQ ID NO: 240544 - DNA, 301 bp, Glycine max
cccctacacgagatttggtcaagaggcaaacgctgcaatgtgcacctgccactcgccaatttgccgttcgcggggggaaaaaaggcacccgacgcgttaaactctaaactttccatgacgactcagccctagagccgctagagcacaggcacgttagagtttgtagagaaaccccactcgtgggggaggggcaagcatggctaacaaaatgaccgaccacggaacccttcaacactaaagagcacacagaagtctttcctcaagacgaacgaagggcacagaaatctacccaccagccatc

SEQ ID NO: 240545 - DNA, 351 bp, Glycine max
agcttctatgtcagtgtatgtctatgaagtgttgtgggatactctgttctagcttcgggtttatttcttttgtccgaagaaggaaatttgggtgggttagtagggtatacatactctaagatcttagttatgctcttatatttgtttgctctatctccatattcttctgtgttgtctggactggtgaaataaataaatagtgtaggttttttttttcaaggtatatgatattatgattatattcccaagaagtggcattcctagaatgccatgatcagtaaagttattcttgacttgagtaaaacaaaaacatgttttgtttgcatttaataatttctaaatgtttttcaa

SEQ ID NO: 240546 - DNA, 431 bp, Glycine max
tgttcaattcatcaagccacctcacagctcttagtttgaatatttacacgtcgaacggtccatttccaccttcaatccttagtgtcaccactttaactgaaattgacatgtcacgcaatcaaatatcaggtagcttggaagatttgagtgtcttgagtagcttggaggaactagatttaagggaaaacaggttacagtctaaactacctgcaatgccaaaagggttgataagtctttacctcagcagaaactccttctcaggtgaaattcccaagcactatggtcaactaaataggcttgagaagcttgatgtttccttcaattcactcacaggcactgctccttctgaacttttttctttgccaaatattagctacttgaatttggcatccaacatgttgaatggaccactccacaaccacctaagatgt

SEQ ID NO: 240547 - DNA, 381 bp, Glycine max
agcttccataatatcccagcaatttatttttaactatcatgaactaccctaaaccaagataacaaggcagaggcagaaaactctgcccaaaacacattcacatattacatctctccttactcaaataccccagtaacattctcttcgttccgattcgtttaccattggatcaacttgaaaattttactggaggttcctagttcataaatctacattttgaccgttgggatctgctaggaaatgtctataacccaatatgtactacctgtcccataaccaacaatgcacatacattttctgcacatgaacaaaaattctgttgcacaattcaacaacaattttcttgctaatagggaagatttcaaaatcaatttgcccaca

SEQ ID NO: 240548 - DNA, 412 bp, Glycine max
tataatctcacagcactctggagagtcattataatctcacagcactttgcctaagcagagacaaatgaattaattagattataaacttggaaggcggaaaaacaaaatgagggaaaaagaacgttattgtatattgtaacaccaactagtctttaaaaatcaaaagctgccaatacaacacgtcttaagcaaaggctacattcaatgttggcacaatgagcaacttcaacctgttgcagcaacaatagaacaaagttgaaaaggacctgtttcccaacaggttaaagctaattatgatgcctcagtacacaagaatataggtatggtttaggagttgcttatatagctctcaacaacaatgtttataggaagaactgtccaaccaacggcagccagaaattaaacttaccac

SEQ ID NO: 240549 - DNA, 425 bp, Glycine max
cttaaagcgactgcagctgcaactttgcagaagaaagattttcctttcttgaggaagagactcatttctctgactcactatcacctgattcaccatcattcaaggaatgaccaaaggattacccttgaggattactcacgcagctcattaccacaatttttcaccagcattgcacatcctgaagtgcaagctaacaacactaactacccacattccttaatttagctaatacagggggaacttatttcaaggattacctaatgaagacccctatgcacactcggaaatgttcattgaaatatgtaacttgttaaaattgtccgtgccccaacaaacctaataggctcaacctcttctcattttacatgccaggacaaacctaaaagtggctccactcttcaggggaacaccttgaaacctggaaa

SEQ ID NO: 240550 - DNA, 392 bp, Glycine max
tcatcactaactacatgcagctgttctatttgtgaaatcctgtgatcagagatatacaccatagcccaagcatgccgacttattacagaacatgagtacaattactccttgctctgttataactacagtcagctatgccagctaaccttaactaaccttaggttggctgaccattactactggcagatacaataggcgcttagctctattataaatattacagctgtcaccgatttccgttgagtcttagttaatatcaaaaactccatttctgaacctcgacgctttctctcccttttcattccagaaacccttctatggtatcatacagctttgtgcaatccttgcgcttgcaacaatggctctcgcagaacaaattcaatctcctgctc

SEQ ID NO: 240551 - DNA, 378 bp, Glycine max
  unsure (1)..(378): unsure at all n locations
agctntagtcaaacagaataatctataattgtcaaagaatngggtggtgaaaaagcataacaagactttctgtgattggtttaaagatacaatctttgcagatgaaaatgctttataaacattaagaaagctagcagatgggcctaaaagaaatgttataacttggcaaggatacgacataaacaagtattcattttacacaaaagcacaagatgacaaaagttcaatacagaacagcggggtcaccctaagggctgaatctcaccacttcacaagtgtgaatgacgccaatccctgtgttgctaccatcccttactttgggtcattgatgaaatttgggagctaactatgtgaaattattggatgtgtttttaaatg

SEQ ID NO: 240552 - DNA, 413 bp, Glycine max
ttgatagctcagcccttggtcaccggatcatgccattattagcctgacaagttgtaaagtccataatgaaatccccatgcctctaagtgttcacaatagcctaattacaagactgaccccatataggctcaatttacaaaggctcttgctatatttgacattcaattaacctaatatttacaaaataagtgactatgtacacctcaagacaattaagaaatccgttaattttctacttaagtgacatacgcacctaggttaaataaaacgatactctaaatttatgtgatcacaaaatgtcaataatgacccacgccttagataattggtctcaacactaaagtcataagcacttcaaacgtgccaaattgtacttgataacagtactattggaatacctgaaacacactaca

SEQ ID NO: 240553 - DNA, 228 bp, Glycine max
ggacccaagcaccgaggtgcagcagcaaactttttattttcaaccccacccccatggcaacaataacacacgtctttcaaaaaaacgcgaagaatcaaccatatgggcacagctgggacagcaacaatactaggcaaagggaacaaaggcactaaggcaactaatggaagacaaggccaaatgaaaaaaaccaccaaaagagccgaccccgggcgattcataacagac

SEQ ID NO: 240554 - DNA, 387 bp, Glycine max
gcctaacgcaccaatccaccataaaaatatgagtttttctttattgtcccaacagacaattcaagattcaatgcactgattaaaccctactatccccaacaatcattgtattcaatctcccaccggaatctaacgtccactcacgacgaacatagcatatatcatttctgattaatggccgcgaacgaataataaaaagattggtaactaacatactaaactctgaaaaaaacactcgcacctgtgatgaccactagcatgtccaaaaacacagcaaccatccaataaacaactgaatgaccactacatcaatcatcattcccaccaacatacgatataaaatccccgcactacactaatcatcaaccagagtggtttaacatgcga

SEQ ID NO: 240555 - DNA, 318 bp, Glycine max
  unsure (1)..(318): unsure at all n locations
agcatgatgagagaaactatgcctatncacagtngactgggaatggcactcacacagagccgaactggcgaggacaaaagcctggaacacggaatagattaataagctctccgcttccctactctcaatctgaccccttaaaaactagcggaaacgaccgaacaatatcgcaaagccactcatctgatcgctcatcgaaataacaacatacaattatagagcatagccggatcacgcaccacccttgggcgtattggacagacccgtatctcctataagctactgtaacattatgatggaagatgtgatatggacctg

SEQ ID NO: 240556 - DNA, 428 bp, Glycine max
  unsure (1)..(428): unsure at all n locations
agctngaggttntcttcaactcatgcattctatttattntggcatagcaataaccaatttatttgaaatttgatattcatgaacattgtatttctcacaagtcaatggttagattgatgaagatcacataaaatatgttactcaattgtcaaagtgtataaattatttataatgtcgttcatgttttactaacatgggcattagtttggaattaattagttgctatgaaataaaaaattgggacttcatggccataagtttcacctagtagtgttcagtaataatgtaatgttttaatttaacttctatcaatggataatctacagtttaggttgtcctcaattaataaatttattgcttccttctctgtcgattttcgtaaaaaaataagaatataattttttgggttattcttaaaattatttttg

SEQ ID NO: 240557 - DNA, 433 bp, Glycine max
tatgattatcagagagaaagtcgcacggtatgtatatattaaatttggagaaagttcttacttctaatggtgaaagaaaggaagcatgccattgacgtaaagattcaattccaattttgaaaagctgcgcagatacgtttgttgtagggaagaatatggaattttggaaattgttatttgcaaccttatgtttgttatttccaatctcacttgatttttttttccgtaaaattattgttaaatgtgattaaaggattgaaagtttatgttctgtaattaaattaatatgaatgttttgcaattattggtaacagtaaatatatgtatatgctacatatttgcttgaacgtgtttgaatgcaaaaatacaaataaatgccaatattattttatggcttggaatgaaattaataaaattgctatgaattgctaat

SEQ ID NO: 240558 - DNA, 426 bp, Glycine max
  unsure (1)..(426): unsure at all n locations
agctngctcagtttactgatataaggagttttctgtttgttgggggtctatcaacaaaggtttgatcactgtttcaatttcatgatgacttgtaattataagatatgctgatggttcagaatagagttatttgcttcttgtgatgctttcagtatgcagtcagctgtttgggttttgtttgtccattggaaatatcctcttccaccttccgtcttttatacatttccatctacaattccaataaattttgggtcccgttacaatacatttcctgtctgtttgacacaataatcaatccttcagtttcaagagatgctttttcttttctactagtattaacttaaatttgacatatttgagcactgtatgttatctgatctctttttgtagatgatatgtattgctgtaactgttgcgagtctcaca

SEQ ID NO: 240559 - DNA, 403 bp, Glycine max
tcatggtgaatcaaaggtgtcttgatgataacaatgatgatcacaaaagatgacgaccaaggagatgaccaaaagctcacagatcaatcaaagaacaacttccgtgaaccaaagaacaactcaagtgaatcaagaacaattcaagagtttaagaaaagaatcaagaagaattcaagactcaagaagaaagtttagagtcaagaatcaagattcaaggttcaagatctcaagaatcaagatcaagattcaagactcgagattcaagaatcaagagaaggcttaatcaagataagtatgaaaagtttttctcaaaaattgagtagcacatgacttttctacaacatgttaccaaagagttttactctctggcaatcattaccagattattgtaatcattaccagt

SEQ ID NO: 240560 - DNA, 429 bp, Glycine max
  unsure (1)..(429): unsure at all n locations
agctntccctctttgaacaaatacccctctttctaatagtatccatcttgggcctttttcccacaactcttgtaaatgggagagaaattttcatctaaagcatacaagtccctaatgttatcaaatcctaaaatttgagctccttgggagcaaaacaatgtgtgtctcctagagagagcatcaactaccacatttgtttttccctttttgtatttgataacatatggaaattgctctaggtactctacccattttgcatgccttttgtttaactcgctttgccctctaatgaacttaagtgattgatgatcactatgaatgacaaattccttggaaacaaggtaatgttcccaagttcggagtgctcttattaaggcataaagctctttatcataagtggggtagataagggtggcaccatgaaatttt

SEQ ID NO: 240561 - DNA, 437 bp, Glycine max
ctgagcacaattatacgacaatcaccttttactccgatgtctaactgtgtcccgcaatatatcgagacgcctcaaactcataatacaagcccttagcaaaatcaaatgacaataactttttactcagatgtccgaatgaatcccgcgatatattgagatcctcgtcactgataaccgaatctctgagcaaaatcaaacgacaataaatttttactccgatgtccgaatgaatcccataatatatcgagtaactcgtcattgataaccaaagctctgacaaatttctaacgaccataactttttactccgatgtccgactgagtctcgtaatatatcgagaagctcgaaattgaaacaaaagctttaagcacattcaaccgaaataacttcttactccgatatttgattgccgcctgacaatatccacaccctcgaat

SEQ ID NO: 240562 - DNA, 429 bp, Glycine max
agcttctcaaaatcaacaccatctacagattcttggtctctcacattattagaaatacgtgtttgatcctccatctttttgctgtctatctgcttcactgtggaaccaacacctgaaaggtagaaccatcataggacttggtattatagcagaataataacaggttaagaacagatagcttgacaacaaaatatgaacctgcttccttttcttcaaaaggtccattgagaaggccctttgcaatgaaatcagtcatagtccacagaagtccaactgctgtcaagcttatgttcaactcagtcttctgagcactgtatgctccagtcacatcaacacatctgtaatatgtaataatacatattagacaacagaaggagcccatataggagcaaatatatgtgtgtatttatgtgcacaggtctacacaca

SEQ ID NO: 240563 - DNA, 401 bp, Glycine max
  unsure (1)..(401): unsure at all n locations
tattaaatcaagccataaacacaatcatgtggggcaacttggttggtccactacctaataaaccacctcccggattctcattctcattcttattgccagcgagtgagtcaaaagagacactaacaaaacaaaccccgtgaaagcaaagcaccccaccgcgctctttgtctaaccgactcactcccatggaatccgatctaaacgacgccgtttttcccgaagaagatctcgacgacgactacgaaactccagaggatgaagaggaggaggaggaccacgacgtcttacatgacgatgaaaccgaaccccctccctccgtcatacgcgtcgcgcccgccgcttnccaacgcttgacaccgcgttaattccgatctcctccgtcgcggattcctcgccgaaac

SEQ ID NO: 240564 - DNA, 429 bp, Glycine max
  unsure (1)..(429): unsure at all n locations
agcttgtccttggtttagacatgattgatatatgatttatgacttgtaggatttaatttgggcaaaattgtatgaaggcaagagtggttttcgaaatctgcactttatgcagaattttgctgtggaaatgtgcagcagaattttgcataagtgcacaaaaatgcttgtgtatggttagctgtggaaagggtactgcacatggggttctggacatttgatagtagatcccaacggtcaaaatgtaggcttatgtgctagagacttccagtaaaatttttgagtcgatccaacggttaacgacttggaacgaagaaaaggttactatgatatttgtatgtgaaaagctgtgattttgggttgtgtnttgggcacaattttctgcctttgccctgtattgcttgggtttgctcacccatgatgattggatgt

SEQ ID NO: 240565 - DNA, 338 bp, Glycine max
atctctcatccctccatcaatttccagacgaattcttgattgatgctttggaacaatcttcaggcttactaagaaagacaccacactatggattttctgaaccaatttaactcaatatttttattgacgggttaaggccacaatcccacccacttttatatgcttctaccggggggaaaatcaaattgaaaactccggaaaaagctatggcattaatagagaatatggctgctagtgaacaaccaaattctacttgatagagcatacattcctacccaaagaagcctggtagaagcttcattacaagatgcgttgctggcacaaaacaagcctgtgct

SEQ ID NO: 240566 - DNA, 312 bp, Glycine max
atacttacacttcgctctctacaccagagacgatcagcgcatatactatgatagccattgcgcttaccttgtggtagcgctgtgcccttgtcttgcccgcttcgttcttctcttaactgccctcttccatcattctccctgtcaaaattcatttcttttgcccaacccctctccactccttactttacaaaaaaaactgctgatttcccatatctccactttttccgcctctacctctttcccttttcatgaaaagcttccgcttcttgaatattcctaggacattcgctagcaatgccgattctggggttg

SEQ ID NO: 240567 - DNA, 379 bp, Glycine max
ctgcagcttgatgcacatttgggatgttaattgttctcgagatgatgcgctctatgagaggttggatcaaatggagaatatagatcttaatgaagaaaaaaggaggagaagagggaatgatggtgttcctatacaaaaccgaattgatggtattaaactcaacattcctccatttaaaggaaagaatgatccggaggcctacttggagtgggagatgaaaatagagcatgttttctcatgcaacaactatgaggaggaccaaaaggcgaagcttgccgccatggagttttccgactatgctcttgtgtggtggaacaagcctcaaaaggagagagcaagaaatgaagagccattggttgatacatggacggagatgaaa

SEQ ID NO: 240568 - DNA, 352 bp, Glycine max
aaacatttaaatggatcacactacacttatcacatctgcttgcattttctcaaaacgatttataatccttatcccctatcgtatcacgcgcgcaaagattcatggatgaataaaactttatttaacttggccgcttttaagtggccctgggttatctgtaaattactacaaacttttgtgagttaatgcaacatcattttgttcggctgcctttgtgtcatttattgagaattgagcataccacgactttaaagctcatcaaagcaactgtcatgctctcaaattgaatgttaacatatattaactttcaaaatattaccgtccaagatgccaaataaattcggcactaatg

SEQ ID NO: 240569 - DNA, 405 bp, Glycine max
  unsure (1)..(405): unsure at all n locations
agcttccatgggtgagcaagcttttaagtttgttcgttcctaatttctctacaattgcatcacctctcatatgagctggtgaagaagaatgtggcatttacctgcggtgaaaaaaaggagcaagcctttgctttgctcaaagaaaagcttactaaggctccagttctagctcttcctgacttttctaaaacttttgagctataatgtgatgcctctggagtgggagttagagctgtattgttacaaggtgggcactctattgctcattttagtgaaaaacttcatattgccaccctctcctaccccacctatgataaagagctctatgccttacttagagcccaccaaacttgggaaaattaccttgtgtccaaggaatntgtcattcatagcgatcattatcac

SEQ ID NO: 240570 - DNA, 410 bp, Glycine max
  unsure (1)..(410): unsure at all n locations
agctntcattgatttctgtaaagctaatgttattgctagacacaagattgtagttggcacacctcaacaaaatggtcttgctgaaagattcaacagaaccagtttggaaagggtgagatgcatgttgttgagtgcatatctgcctaagacattttgggcagaaactgctacgactacaacctatctaattaatagatgtctttccacaactcttgacatggaaacaccagaagagatttggtcaaaccaccctccaaagttggatcagcttaaagtgtttggttgtgttgcctatgctcatattaggcaggataagttggatcctattgtagtaaagcgtatgttcttgggttatccaaaaggtgtgaaaggctacaaactgtggtgtttataacttggacataaaaaat

SEQ ID NO: 240571 - DNA, 417 bp, Glycine max
ctcacatttaaagtaccaaagtacacaccataaactagttcatactgaatataaattactcatatccaactacacatcctaataacaaaatacaacaagaaatgggtcttcacttttcttcatttttatactggatctttatcagcagccttcctttcagtgaaccttggcgttggcatgtaaaataaaggtgttgttggtgggccatccacaacaggtgcgtctactgtcgaagtgtgtgaaatggtcttttgcttgggtcttgttatgtttagcttataccttgctactggtggaacatcaacaatagatgcagggacctacatgcaaatgcccaacatgaataacacttgttatatataaaaacaaattggttactcttaggagatcaaaatatttaccatgaactccatgtca

SEQ ID NO: 240572 - DNA, 388 bp, Glycine max
  unsure (1)..(388): unsure at all n locations
agctcgcttgtggagcttctattgttgctgtgtcntcgagcttcaatggggtcctttaatggtgattttccaccatggacatgcagcgaaagacaaaggaaaggaggtgagaggaggcgccatccattatagaataagccatggaagaaagagtttcaccaccaagatgagccttggataagaagcttggagaggatgcttcattggaggacaagaaagagggagagaaagagagaggggggagcacaaaattgaaggaataaaagagggagagaagtggaactttgaaatatgtttcataagactctcattcttaaagttacacaagggttaccatgctttatttatagacaaggagcttccttgaaagattcttgagaaacctcct

SEQ ID NO: 240573 - DNA, 435 bp, Glycine max
  unsure (1)..(435): unsure at all n locations
cttgtcactccacccatatctggccttggcattaactaaacttaacagcaccgacaacagcgtcaaggaattcttgcaccccagatacaaaggcttctttgaattagttcgcaatgtatcatacatagaggcatgtgcatgctaaaaagactcttgtccaaggtcatgaatcatatcctccaagcgatctcccatttctacatcaaacggttcagattangacccactctgcacgtctgtcaattcaccatgccatatccatgttgtataattcttcttaatcccatcacacaacagatggtcccgtatgtcctccaatatttgtcgtctctcattcaaacaattgatgcaaggacaaaaatattttttgccctcattccgtcgagtttttccagaggcaaattgcaagaactcttccacgcctttcttatatgc

SEQ ID NO: 240574 - DNA, 396 bp, Glycine max
  unsure (1)..(396): unsure at all n locations
agctttgaataaatcacttaaggatttacttgatggaatacaagtatgcataacaatgctctttatcactatgaatccgctngtgtgcttctgatatttgtgagaagaagggatctggatcttctcaatcataagcatagtagcgagagactagataagaattaggcttattggtttttgtgattgaaaaagaaatttatttaaggaagaaatggagagaacaaaagtagagaataaggcatcctaacaagaaacttacagaagaaaaaatttacaaactaatagattgagtcatgttagcaggcatgccaatctccctgcatataaaatccatgagaataactatgttcccagggttgatggagaaattcctttaaaaattaacattcctttctt

SEQ ID NO: 240575 - DNA, 435 bp, Glycine max
  unsure (1)..(435): unsure at all n locations
nnttctaatctactntctctgtttgtttaaaataatatttatattaataatgatgcgcttcgcacaatcgcactatgcttgataaatttgtttcagtttccaactttctaatttattccatccataatctgattcagaaatccaagtgtgtcacccataaacacaaagttggaaggcaagggtcaaacactaagtggcacgtgacaagtcgtgcttggcatgccacagatgctgctcataatattctcacctttcgttaagcaaagcaaaacccagatgcatttctcgtgattcatggaatcatgggtccactgaattcttcttctcaaattttcaactccatacgatgagtggttggtctcactcgacaaaaagaataaatcaacaaacaactctgtgtgggagaaaaggaaagagaatttaatattaaagatc

SEQ ID NO: 240576 - DNA, 381 bp, Glycine max
  unsure (1)..(381): unsure at all n locations
agctnggagaggatgctccaatggaggatattaattatggagagaaagagagaggggggagcacacatattatggaagataaagggagagaagttgaactttgagttgtgtctcacaagactcttattacaacaagtgttacacatgcttctatttatagactaggtagcttccttgagaatcttttcttgagaaaacttccttgagaagctatagcttatctacacacaccactctaataactaagctcacctccttgagaagagaagctagagcttagctacccacccctataatagctaagctcaccccatgacaaaatacatgaaaatattaaaaaaagtccttactacaaagactacttaaaatgcccttaaattc

SEQ ID NO: 240577 - DNA, 269 bp, Glycine max
gaacgcgcgtataacacccactccacaacgtccgaagtacaggagaccttcaacctcattacgcaacgcggcggacaatatcgggcagctaacatgaatggtcattattgacaatgtcgaaggaatcctgcgcttcactactcatgctcacataatattgcagcttgtgggtacgcgagcccgaactactaccaatatatagatgatgtttacacaaatgaacacatcttacaacgctcacaccgcacaatggtggccctctgcgaatg

SEQ ID NO: 240578 - DNA, 269 bp, Glycine max
caggtaagtgcacttcccgttaattatatcggctctccattgatgtcgttcactgcctcacgtgctcactcctgccaatcttatgatacaatgcctgcctggatttacccccgctagccgaaacggacggccgacgggatggcctcatgcctacgttgcgttctgatatgattggctacgccacatcgcccccattcctcttctgcttatcaccccaaagtgccacaccaagtgctcggtgaaatgcctacatggcactcaccataaat

SEQ ID NO: 240579 - DNA, 55 bp, Glycine max
aaaacgcggcggccccgaacaaaaccccgaaaagcgccccacccacagacgccaa

SEQ ID NO: 240580 - DNA, 428 bp, Glycine max
agcttcatgatgatgaatcaagattgattctcgttgttttgatgataacaaagatgatgacaaaaagcccaagaaaatgatttctagattgagtcatgaacaattcaagaatcaagagaaatttgatttcaagattcaagaaaagatgaattcaagtttcaagagaagaaatcaagatgacttctcaagggaagtattaaaaagatttttcaaaaaacaaacatagcacaattttgtttttcaaaagagttttctcaaaattttctaagttaccaaagtttttactctttggtaatcgattaccagattcctgtaatcgattaccacgggcaaagtttgtttttcaaaagctttcaactaaatatacaacgttccaattaatttcaaaatggtgtaatcgacttcaagatattggtaatcgattacta

SEQ ID NO: 240581 - DNA, 400 bp, Glycine max
tactcggatcgctgaaatcggccgcctagaacgaagcactgattttatcccactgcacagaagaagcaccaaccaaatgcccaaatgcaatttataagcacaaatgaaaatgtaactgcccaaggccgttattccttatttttggcggtttctaatgccttgcttaacgcatgaattcgctaagcgagcctacatggcgtttaagttttcaaacacatgcccttagcaagcaaacttatttagtccaatgcaaaaattcaaattttttcaaagaagattttgggcttaacgcaaagagttgcgcttatcgagttctgcagctctgattggcctgcaactcatgcttacccggaagtggctgcacttagcgaataacatgctcctttaatgaagtactggt

SEQ ID NO: 240582 - DNA, 429 bp, Glycine max
  unsure (1)..(429): unsure at all n locations
agcttgcanatntggtcttcgccgaggaaatggtcntatcggatctgaaaagaggcaaatttaatcatcttgcttggacgaatgagaaaactgaggcaaatgaacagggtgaggatgagggaaaaacccatgttgtgactgccattcctataaggccaaggttcccaccaacccaacaatgtcattacttaaccaatagcaacccttctccttacctaccacccagttatccacaaagatcataccttaatcaaccacaaaacccacctaccacacaaccaacacgaacaccacctttatcccaaaccaaaacaccaaccagaaatgaattttgcagcgaaaaagccttgtaaattcaccccaattctagtggcctatgctgacttgctcccatatctacttgataattcaatggtagccataaccccc

SEQ ID NO: 240583 - DNA, 393 bp, Glycine max
ctcaagaattaagatcaagcatccagatccaagactcgagaatctttatacgacttaatcaacacaagtatgcaaaggattttttcaacactgagtagcacatgaatttttcacaaaacatttttacccacgggtcttcactctctggtcattgcgtaccagacttctgcaattgattaccaccaccaaaatcgttctgaaaaacgtttcaaacttgaatttacaacgctcccatttatctcaaaaccctgttactgattaccatgttttggtaattgactaccagcacctttgaacattgaaattccaaatccaacgtgaagagtcacatccctctacatataagcttctgtgtcatcgactacactgctccagtcatcgactaccactgac

SEQ ID NO: 240584 - DNA, 365 bp, Glycine max
  unsure (1)..(365): unsure at all n locations
gacctctaagactcctgcagcatgcagcancnaaatggagaggagtttcatgttatctngncnnagccgaggccaagatattctgaatatacacatacattcttctatgacaagagttcttttggcattgagacataatcaatctattcctgatcacacatgggcctcttttatagttgctctgctgcagtcattgccttctattaatcaccgcaacttaacatttgaacctggcattgtgaaaggaggcccactatggcggcatcataagccgcaatggcatgctcatactccatacgtggaatttttgctatccaccacctgccatttataaccttggcgtcacttcctactgctaatgatct

SEQ ID NO: 240585 - DNA, 444 bp, Glycine max
gacccgggatccttaagtcacctgcggcatgcaagcttcacactattatgtgatattatatatgatacaatagatcaaatatacgcttttctagctaaaatccagttacctagttagctcttagattacaagttcctatatcggatacttttgtcaatttgcatataaataacctaattaaagctggagttttataataattggtatccgtgtatgcaacgcagtaattaaatttaattcagcaataaaatttatcggtacatatatatatacaatactataaaaagttgatttttgggattttagccttggaaaaagagaggctaaaatgcatttgcattcttttagttctcatatttgcaattttagatcttaatttttttataaaaacacaatcacaattttaatctttaggggcaatttcaaagaacgttaatctatgtt

SEQ ID NO: 240586 - DNA, 362 bp, Glycine max
gcatgcaagctaaagcaccagaagggcttattttctggtcaagcagacaaaagagcaacctagcttagcaagagttataaagcgaatgttcatgctcaacctctacggagacaagagcgcgaagatctaaatatctattcgtcacactatgtgaactaatcacatgaatcaaaacgaaatataacttcttctaacaacatctaacaacaattaacgatacatttcttaaaaatacacgatattctatatatgaaaaagttattaaaccaaatataaaaaggaagagctttcacgtatgttggcaaaacaggcctactaactttccacaggagcacacggatactaactgtcatataaacacc

SEQ ID NO: 240587 - DNA, 315 bp, Glycine max
cactaactgaccgacgcaacccatcatcttgttattccgaacccacaccacgacagtcagacaatatagtgcgatgaaaagccaccctccctggataacaacttgcgtcctctaagaaaacttttgctttaccccctaattcccttgagtcttacgcaccataagaaatggcaccacaaacaacaattcaccaatacgcgtcacgtaaggctacacacggaacacgttaaccaacaaaaacgctaacaatgcttctaggcacaaatgaacgacaaaaacatcacaatctaagaatccagttacaactctctctgc

SEQ ID NO: 240588 - DNA, 400 bp, Glycine max
  unsure (1)..(400): unsure at all n locations
agcttgcaaaccagatgttgaccactgctatanaatatacctccaggatatttcatataaacatcctcctctaaatctccattaagaaaggatgtttcacatcgatttgttacaactcaaggttacaatgagcaactaatgcgaagataatacaaaaagaatctttcttagatacaagagaaacactgtttgtgtaaacgattccttttttttagtaaatcccttatcaacgagccttgccttgtatctctcaattttgcctaatgaatcctttcaggtcttaaagatccaattacaaccaatggtctttgccctattatgaaactctacaaggttccaaaaaccattactctgcatggaattcatctcatccttcatggcatcataccataaatttgac

SEQ ID NO: 240589 - DNA, 343 bp, Glycine max
  unsure (1)..(343): unsure at all n locations
ccccccccctctcctgctctttgcgattnccccctccncctccccccccgcgcggccttttgtcctcgtttagcgacacatgaaactcaactcgttcgcaacacacgttcgtggctacaaacattgtccttggtgttggaactacctggtcagccatcatgagcgatatttcccctgcctactataaatgcataccacactgcttccacttgataactttatggtgcttatacagcgctggtcggcttgcaaatattacctgcttcgtaaataccattatcttaatgatagatgattcatctccactggatcccagcacccggagctatttctaaatttgacc

SEQ ID NO: 240590 - DNA, 340 bp, Glycine max
tgaaaaaaacgcctcctaaagacaacacattgccgaaaaatcactacgaggcaaaaaatattttatgtccagcgggaatggagtaccaaaaaatccatgcatgccctactgattgcatttggttcaaaaaacaactcgcaaaaatgcgtcgaggccccacatgtggggtatcaccatacaaagtgaaggatgatgaaatcagtgatgatgaaaccacaaaaaacaagccgccatcaaaagtgtgtcggtatcttacaataatacaaaaactaagtgaatggttgctaagcccaagacgcaaaaacctacatggatgtaatggaaaaaaagagaggatgct

SEQ ID NO: 240591 - DNA, 430 bp, Glycine max
  unsure (1)..(430): unsure at all n locations
tctcgaacgtgatcaatacattcattggcatagatngattgatgaagttgtggtgcgtgatctgttttggtgtcacccagatgcagtaaagttatacaatgcatgtcatctggtgttttttatagacagtacctacaaaacaaacaggtacagactcccactacttgactttgttggaatgacaccaacagcgatgacattctctgctgggtttgcatatctggaggctgagcgtgttaataatattgtatgggctttggaacgatttcgaggcctatttttaagacacgatcgcctccctcttgttattgtcactgacagagacctagcactgatgaatgcagtgaaaactgtgtttcccgagtctactaatctgttgtgcacgtttcatatcgataacaatgtgaacgcgaagtgcaaatctttaatc

SEQ ID NO: 240592 - DNA, 273 bp, Glycine max
tccacaacgaaattcacatgcatataaggttcaccatagcctacgtcacacgattgaccccatatatgctaaacggacaaatgctcttgctatattcgacattgacactaatctaacactcgcaaaataagggactatgtacaccccaacacacattaagaaatcgcgtcagtttctacttaggagacatacgcacctacgggaaataaaacgatactctagaatcatgcgagcagcaaatgcccatcatgagcacgcaattacatacttggc

SEQ ID NO: 240593 - DNA, 430 bp, Glycine max
tgaaggcaaactggatgcgtcggtcaactcggtaacccaactggccttgaatcagaaatatgtacctgtcgcaagggtttgtggcttgtgctcctctgctgaccaccatacagacctttgcccttccatgcagtaacctggagcaattgagcaacctgaagcttatgctgcaaatatttacaatagacctcctcaacctcagcagcaaaatcaaccacagcagagcaattatgacctctccagcaacagatacaatcctggatggaggaatcaccctaacctcagatggtccagccctcagcaacaacaacagcagcctgctcattccttccaaaatgctgctggcccaagcagaccatacattcctccaccaatccaacaacagcaacaaccccagaaaatagccaacagtgaggcccctccacaacct

SEQ ID NO: 240594 - DNA, 433 bp, Glycine max
  unsure (1)..(433): unsure at all n locations
agcttctcacaattgtttaactttgcagattgtgaatctttataaaaatccttaacaattgacctagttgtatttataacacactccagaagcatcagtcctctgcacctctaattaggtatctcccattagtttttataatgacaattagacgagaggatccaattgaaaaaataaaaagctttgggacctaattaaaagagaaaaattctggaacctaattaaaaatttaataaaaatatgaaaatccgcagaataactaaattaaccataaaaatgttgaaatttaaccaaacacaattttagatttacacaaataaaattctttgttaaaaacatttctaagaatgtcatttggtagaatgctctacattctcacttttcttcgtatcatatacattattattttacagggctcatcanactttgacac

SEQ ID NO: 240595 - DNA, 432 bp, Glycine max
  unsure (1)..(432): unsure at all n locations
tgtgcaatgcgacgtgccaactaaattggtcctttttaatgaatgttgtcagnggggaaataatggctgcatacgcccgaatgagtttctggtaaaaaccggtcaagtgaaggaatccgcgtaactctgagggagaagaaggaacaagccaatcaagcatagcttgaattttggatgggtctggagcaatgccacttacgaacacaatgtggccaagataatgcagttggttctttgtgaagacgcatttggaatgtcagagtaaaaattggccttggactaaggaagataggacagctttcaagtgctccacatctaaagggagggatgggctatacaccagaatgttgtctaacaacacaatgacgaacattcagagaaagggtcacagaatgtcattcatggtggcttgaanagtggacagtgtgttcc

SEQ ID NO: 240596 - DNA, 398 bp, Glycine max
agcttcttgcgtatagctcagaatgtctcattcctgtctactagcacttcttcaactgcatcaattgtggaagaccccgtgtcgcaacccatccttcgacgggagggcgacgcagggctcgcatgtgcgtcttccaagaaaggataatgtgcggagtcgccaccaacgtttattctatgaaaacgtcggaaaaaccagaaaagttatgttctatgaactttaagtgcaaaaagttcgggagttgtatttacccacggggaaggtattagcacctccacgcgttcgtcacaagggacggcagcctttaatctagtgtgcaaatatgacttcaatttgggttattttcccttttaccgttatatggcttataagccctttgtattatttcttatcttttt

SEQ ID NO: 240597 - DNA, 282 bp, Glycine max
ctctgtaacaatgctctctattcttcgaaatccttggaccttctacaaatttggtctgcacctccataatacacatggccataatttgaccgctgggatccttcgaacatcctcgggcggctctaacttccgtcctcacacctttctatttaaccatttcctctttgctttcatgtagctcacgaaaaacgccattccttctcctttccttattccacagccctctctaacgttccaagcactttttcccataccaccattactattacccaccacaaacca

SEQ ID NO: 240598 - DNA, 401 bp, Glycine max
  unsure (1)..(401): unsure at all n locations
agctntaatgggaacacttgaggtgtgttgtcacttcttctcgtcaaccttcatcacccccaacattattatgactatgaaaatgacaaagatagtgatcttggataggatagtatttcatttttttggaaaaggagtgttattttaacatattttatttggttgcgaattctttatgatctacatatggaatttgacttaaaataggctcttcatttttttattatgatgcaaggaatgatttgtttggagccattgtgaaaaatcacaggttnttatgagcctgtaattgtttcaaattgttttttctctagtaaaaatcattacttgctatgactgcttgatgggcttgttgtgttcttaaacttgtgttctgtaacattactttgatacaactacat

SEQ ID NO: 240599 - DNA, 361 bp, Glycine max
agcttcaagctgatcaattgcttcaggttgctgcatggaaaggcaaaggtctgtatggtggtcattataggagcacaaaccacaaacccttgcgacaggtacagatttttgattcaaggccagctgggttaccaatttgaccaatgtatccagtttgcctttaagcttcttactttcagatgatgcagatggggttgtagctacctcatgcactcctctaatgactatggcatcatttctggcactaaactgttgggagttggaggccatcttctcaattaaatttctggcttcagtaggaatcatgttttcaaaggctccaccactggcaacatctataatacttctcttcatattactg

SEQ ID NO: 240600 - DNA, 395 bp, Glycine max
ttgaatagcgaatggcacttcaatatctgcctgcatgtatattatattgctatatggactcatttgtatgaacatacactcattaacgcctaattaagaattttacctgcgctgtagcgactccttttacttcgctataacctcccttatcaagccttagattgattatgttaacctctttcgctctgagactggttaactcttcaacaggccattgtaccaattgtctcccagttaaatcgatccacacaggtcgcggaattgcctaattattttaccaaacacatacatgcatattacaattccttttatttgtataaggatacaaaaataaaacacttatagctgaatgccccacaaacaacacgaaagggagttagagattcagaatccac

SEQ ID NO: 240601 - DNA, 257 bp, Glycine max
  unsure (1)..(257): unsure at all n locations
agctgggagagaaaggagctctattgtntgtcttcctctcggcnatgtgaanacatantcagaaacatatcacaagtcacacatcacaaggtgttctacgaacatgataaatatctaagagagagctcgcttccttggtttgatatctgttagcaacttgtccttgaacaagttgtgaattgctataacacctgagcttccttgctcctgttaaacaagtgacctcaagagggggggggggggggggacatctaaaa

SEQ ID NO: 240602 - DNA, 401 bp, Glycine max
  unsure (1)..(401): unsure at all n locations
tagctnggcaactttgtattatactaatggttcctgagtagccctttttccatgtactcataaaccaggatcatctctactccttgccatacaatacccacttatggaaactatgtgcctgtgaccaatcttagacaaagccaagagctacatctctttcttagatactggaaggcctcgacctgatcctgactggcttcttttcacggcgaatatgatgccatttctgagaactcccttatagacgttgccaaaatcaccctcgccaattaaccgacttgcatggaagctcctggctgccttgaagatcaatcaagggacttttctacctgaggcttattgttggaataagagagccgtggctgggtccatcagtcaatctgccgtgagaactccctcaa

SEQ ID NO: 240603 - DNA, 312 bp, Glycine max
actaaccccgactttagtttctataacccctcacatctcacagttttctacccacaacattgccattctcagcttcaaccctaagataacttgtccctccatgtctaccagctttgcctcaataatttgagcacacaaatatccccaagcctcatcctaaaaccctacaacagaatgggtaattttcgctcacatcaaacatgagcagcctagcatgctttcacaaattcctttataaataacaaccatcacgcataaaccttacacaactacccatcatatcccgcacaaacccaataccacgaaaattat

SEQ ID NO: 240604 - DNA, 163 bp, Glycine max
  unsure (1)..(163): unsure at all n locations
nagcatataatatatcgatacgtctcaaaattaacatcgaaaactctcgggaaattcaaatagtcataactactacacacggatgtccgattcgggcgcataatactgtcacaggactcgaatcgaacacgcggagctcttgagaaatgcaacaggaataacc

SEQ ID NO: 240605 - DNA, 426 bp, Glycine max
ttactagcctctcgacatattatgcgcccgaatgggacatgcgagtgaaaagttatgaccatttgaatctgtcgagagattccggtgcttaatttcgagcgtctctatatattatacgcctgaatcggacatccgtgtgaaaagctatgaccatttgaatttcacgagagcttccgctgctcaatatcgagcgtctctatatatgatgcgcccgaatcggacatccgagtgaaaaggtatgaccatttgaatttgtcgagagcttccgttgttcaatttcgagcgcgtctatatattgatcgcccgaatcggacatccgtgtgaaaggttatgaccatttgaatttctcaagagcttccgtggttcaattccgagcctcttcatatatgatgcgccggaattggacatccgtgtgaaaagtatgac

SEQ ID NO: 240606 - DNA, 414 bp, Glycine max
  unsure (1)..(414): unsure at all n locations
agcttccattggtgtctngaaatctaaggctgatgaaggacatctattaatcaaatatgctggtgtatttgcagcttctccccaaaaggtctttggcagtcctgcacttataagcatgcacctcactctttccaaaatggtcttattcattctttttgccaaaccattctgctgtggagtgtgagggactattttatgccttttgatgcctattttcctgcaaaactcattgaactgctctgaaacaaactccaggccattgtcagttcttaaaacttttaattttgtaccaagttgatttccaacaagagtatgccattctctgaatttttgaaaggcttctgacttatttttcaaaacatacaaccatactcttcttgagaaatcatntatgatggtgagaaagtatgagtt

SEQ ID NO: 240607 - DNA, 398 bp, Glycine max
gcctagcccacgcttattcaccccacaaggctcgctaagccaccaacttatactgaaaagactctaagagtcttaactaagcaaacttactcgctaagcaccacatgccgactcagcgagctcatacaaactcacaataaaaaccgctaatttaaatactcgctaagccccaatgcaatggctaagcgagttcatgcaaacatgtagaaattcaatacgaatgatgaactctcttaccgggataaggctggcttagcgagttcatcttgaaatctagatattcaaccaaaaactgatgaacctccttagtgcaacggtgcgcttatcgagatcatcgagatttccacaaaaattggggcttttcacccccctcacatagaccttattacgccttagat

SEQ ID NO: 240608 - DNA, 393 bp, Glycine max
  unsure (1)..(393): unsure at all n locations
agctngccctgctaaaggattgcttgtaactttcattctctggtgcatgtgcgcatcatatgctttggtttggtctgtgaaatgaaattttggatgagccatgttggttctctggtttacgaagtgtcaaatgaaatttgctagtagttttctgctcaggtgttggagcttttatgcaagctttggagcaatttctgctagcaatttcctttgcatctatacaattttcatgacagttaggaactattgatatggactaggaccactgttaaatcttatatcagttttgttagcttgaaaaataatcacatgatttaatgtcctgtttcttctctttctcttataaatttattaataatttacacattgttgtggagctggagtttcatgtat

SEQ ID NO: 240609 - DNA, 417 bp, Glycine max
agcttgcaggacaatctcaaatatcatagtatggactatagctcgaatacaggtaaggaaaggttaacctatctcataatctatccttcttaggtgtcatatgcaagggagtttcaattttgagctttcatttataatttgagtcctaaaacaactcttttttccattctttattttaattagttgcataatattgattagttatcattggtttgaagtgatttattaaagaaaaggtcatattttttgcaatatgcatgcccatggtagtgtttaatttattctcaaggtgcttgagaatgtattgtttggccatttaaattaccggaataggtgtgaaatatatatgcgactgaagagggaggaagcttatctgcttctcctttgagtttaaggaggctgaatgtgatagacatt

SEQ ID NO: 240610 - DNA, 416 bp, Glycine max
  unsure (1)..(416): unsure at all n locations
ccttgtgttcgccaactaatcacaaccgtatctattactattactgaaaatntgccacaacaggaagagccgcttattttatatggcatgtcacaagctcaacaaaacgtggagatctacgccgcgcaaaagacaatcgtcggtgaaagacgtggtcaaaaatgtgcatcatttaaagggagagcgatctcggcgaacgcatgcacagattccaaacatggcctaaacacgaacgaaagacacatgcgtgtcgggcgcaacattctttcttctggaacgaaagagggaggaattcacttggataagcctgggcattcctccacgccccaccataaacacttccccaggcgccctctttcttttacctcactcttacaattatctacccctatccactctattaattcatcgcgctc

SEQ ID NO: 240611 - DNA, 426 bp, Glycine max
  unsure (1)..(426): unsure at all n locations
agcttctaaatcaattttatccgagttcactcacttcatggtaatttcgatctctttggagtcatggctcctgtatctaagacctagccacttcttttgtggccttctctttctgtaacttatggcaatggcaaggtcattggggaataggtttttgaagacaaaggcatgcaatatagttgatacaagcagtgctattactatgagtgtggatatgagactcagtatgacacacagggtcttggtaactggatttgtgacctgatttgagtatcttacggttgcaattgctgcaccagtcattggaaaagtataggcccaccatgcaagagagaatctgcggaataacatccaaaaaaaattgtcagaagagttctatagtattaagcanacattattagagaaagagtagatgtagcatacatg

SEQ ID NO: 240612 - DNA, 360 bp, Glycine max
gctgggctcttcggtcacagataaacgaacgtcccacattattcccatgacacgcgtgccacaataacgatctacaaattcgatgccaaactggtcatgcatgcacccacgtcggaactcaaacatcaagtcctgtggtcatgtcacactatcggatcaggattcgtttttcctatttaagcccacccaccgcttccaaaaacatgctcttttatcaatttatgtctttactccgaatccatattcggtgctccggaaaatttgtacacgattcaccctctacgtgtatacacatttttgcaccacaacccttatctcgtctgatccgtgaacctttttccaacaaagagctggagctta

SEQ ID NO: 240613 - DNA, 401 bp, Glycine max
  unsure (1)..(401): unsure at all n locations
agcttgttaaaagcggaagataaggaaacctaaagtgaagagatgaagatgaaagcaagcacaacaagaaatgaattgaaagcctcgggttcgagcacttacccattgaagaccaaagagcggatgaagaacgacgaataatcttcatggaatcacccacgaaaatgtcttataagcgttatggaggcacctcggcttgtattttcttcacagaaacacgttttttcatccaaaacaattcaaatgcataacataggggtcaggacccttttactacacctctttgcccttatttatagccaaaacaaggaggagcttgccggccagctcgcccaggcgtgcctaggctttcttaggaaagttcctgatgcaccctcaanattactaagtacacccccctt

SEQ ID NO: 240614 - DNA, 308 bp, Glycine max
agctagcatttgagatttctatattccctttccatcactaggaacagcacctgacctctcatacaaacaaatgaatcgtaacatgaaattatatttgctgagtgaatacctcaccgacttaagtgtatgacacaattatggcttttctctaatgaaacactattgccttttaccactctaagtccccttgagttcttaagcaatttcaagagattttgggcactagaaagtaacaatctaccaatatgtgtaaagtaaggcgtgacaatgaaaaagttaaccaagaaaaaggcttactatgtttttag

SEQ ID NO: 240615 - DNA, 415 bp, Glycine max
cggaacataaatatcagcttgagccatcaaacgagacaactggctctccgatgttctatagaggcccgccatatatccagatgcctgtcatcgaaaacagaagctctgaccgaattctaacgacgataactttcgactcaaatgtgcgcttgcgtcccgtagtatatcgagatgcctggaatagaaaagggaagctctcacaaaatcacacgacaatcacctataaccaggacctccgctagagccccgtctaatatcgagacagctcaaattggaacaagacacttttacgaaatatccacgacaataactttcgactccgatgtcccattgcgtcgccggatatatccagactcttgtacatgaatacagaagctcttgcggaattctaacgacaattacttttgagtctgat

SEQ ID NO: 240616 - DNA, 405 bp, Glycine max
  unsure (1)..(405): unsure at all n locations
agctntgtgcaatcgattacatgagtttgtttttctattaccaatgtcaagttatgaataaaaagtcaagagatgtaactcttccaatggttttcaagtttttctcaaggttataactcttccaatggttttcttgaccagacaagtatagtctataaaagcaagaccttgacttgcattttaataactctcccaatatacttttgaatattttcttcttcttcttcttcttcttcctttgccaaaagctttcaaagttttctggtttccaaaccttgttctttcacagaaaacaaaagggtgttattcatctttgtcattctcttctccctttgccaaaaagaattcgccaaggactaaacgcctgaattcttttgtgtctctcttctcctttaccaaaaaatt

SEQ ID NO: 240617 - DNA, 356 bp, Glycine max
accagatcccgagatcagatacacgcggggaggactatggcacatccaccgaggatggacaagcaccccgctcatttgcaaaactctctccagaacatgggattgtcgccccaaacaccacgcccggctctcccgattcaaatggtgcagcaaaaccacaaaatcgaaccttattaaacatggcgacaactatgaggagctatgcaacccttcctcaattcttgcggattgacgctcttaacaccgctgcgtatatatcaaaccgagtctcaacccaagctggctcaaagaccaccttcgagttatccaacggctgcacaccacgtctgcgacctacccctgttcgggacgcccgt

SEQ ID NO: 240618 - DNA, 365 bp, Glycine max
agcttatagtatcttcagaagctcagttcctagtttctataggaaactattgcggaatctgaggctgctgtggaatctaagacactattattgcctgacttgcctccacaaatttcctcgggaacaggcacagggtacgaaattgtatgccaagggtttaattgggaatctcataaatctggaagatggtatatggagcttaaagagaaagctgcagaactggcatcatttggctttactgtgatatggttaccaccacctacagagtctgtttcacctgaaggatatatgccaaaggatttatataatttaaattctaggtactcgattcaaattcttttaaaggtctctattgtttcatagtt

SEQ ID NO: 240619 - DNA, 446 bp, Glycine max
tgaacttagctacacaccccctataatagcttagctcacccccatgacaaaatacatgaaaataaaaaaaaaaaaaaaaagtccctactacaaagactactcataatgcctcaaaatacaaggctaaaaccctatactagtagaatggccaaaatacaaggcctaaacgaaggaaaaaacctattctaatatttacaaagataagcgggctcaaaatctaccctaaggctcatgaaaaccctagggccttcccttggatctctggcccaatctacttggagtcttctatccaatgcccttgcaggataagattgcatcaaaatcaccctaacagatataccttgacagctaggaaagaaaatgacagatgtgttcatgatttcatggaacagttcttgctaaatattgatattatctcatagctttttgcttattgatcattctat

SEQ ID NO: 240620 - DNA, 425 bp, Glycine max
agcttaaagtatgcccgagtcattcatccttatgagatgttgttgaagcattggcgatcagaattgccattccttggattatagggttgaaccaagctcatgcttttacaaaaaggttcatcaagtcaagttgaaatatggaagtaaccgtcttgcaaaattggggcaaaagatgaatcgagtcacatcactgcttcgtctactgccaaacatatttaggattattgatgtccttgttacttccagtttcaccttgacaaagatgtcatggaccatgttgaaaatctaaattgattcaaccccatatcttgcgtaaaaattcgcaatacttcaactgtacatcattcgcatgcatcccatgctttcattggttgcattgctcgttgcattctttccttgaaaataaaataaaatgaacttaatca

SEQ ID NO: 240621 - DNA, 435 bp, Glycine max
tttgttgatgcatatatatggctcatgccttcgtgtgaattatcgatcaatccttcggaaagccttgccaattgaatgaaatttggctctggaacttgctatcattgtagtacataaaatatcaagtcaatttacctttaatattttcgtattgctccaaatttaaaatcaagaccaatcatactttatttgatgagttttctctttattttgccactagcgagcgaacacatgattgcaaattaatcttaaacaaatagtcatcataacttttggctttctaatagccggataaactacgtatatcaaattcactatataaaacacaactccatataaaaattttaatatataaaatttatccacaactctgaaacataattcttttatgcgctatatcaaaacacaaatgtactcaaacatatatttatttat

SEQ ID NO: 240622 - DNA, 434 bp, Glycine max
agcttttcctttgattgctctgatagggttttcaagcgttagagagaaggagaatggattaaagcctccattccactatctacgcgcgatgagtatttctccctccaaagacattaatttgcaaatctcaacggtgaaaacatgtgaaagtggcattcaaatcctgtgtcccaatttcatgaagatccaacggttaacagaacctggattgtagttttactaagatagttttgggtttctgcgggaagagaaaaagttacaatgcgaagggtatttctctcagcttcgacattggttcgcaattttcaacggtgagaattcttggaaataagtttcaaacctgtggctgaaatatcatgacgatccaacggttaaagtgtccgagatcattgttttactacaatagatttgagtgtatgctggaaaaataaacg

SEQ ID NO: 240623 - DNA, 393 bp, Glycine max
ctgagctcaaagaggagaccctggatcacttctgtgtcatggactatagaatataatatggttcatgcgctatggagttattattggaatttcaacgaataatgtctctatactacaatctcaaggaaaaattcttcttaaacgtcgcccatagatatatctaaattattgtattattatggcgtcgggctcaaatgggtgtaactagaaacacatgaagttctgcctcctttaaatgaatttcagtcattaaaaaaaaaatctttaactttcgttcgaagaatatctccatttaaaaaatgacctacattaagtgtcttggactatgttgtataccttaactggatactatcagaaatatatcccatttacaacattatcattatgaacata

SEQ ID NO: 240624 - DNA, 413 bp, Glycine max
agcttgttcgcaaatcgtccgcgtctatgatatccactcgaccaggtttgaagtagaggagaccttcaatcctataacgcaacgtgacagacaaaagtggacagttaacttgaatgaccattattgtcaatgcagaaagtattctgcttttcactatccatgttcacacattattgctacttgtggttacgtgagcatgaattacttccaatatgtagatattgtttacacaaatgagcacatcctaaaaacttattctctgcgatggtggtctcttgggaataaagcggctccttctaatgagccatggatacttatccctgatccaagtacaattcgtgcgataggtcggccaaaagccacaaggatgacgaatgagatgggatgatttgaaccatctgacaccgacaaaa

SEQ ID NO: 240625 - DNA, 427 bp, Glycine max
tcgactatgtataccgccaaatccacttatttggctttgtataacttgagacgcggtatacatgatattgatatctttaaatgtttgtggaaacttaaaattccgagaaatgtatcatttatgttgtgcaagtttttcatgatagattaccctccaaggctaatcttcaacgtaagagtattgaactacaagatgggtgatctttcttgcgtcttttgtaatgagttggaataacatatgtcacatgttttcttttcgtgtaaaattgctcaaggcatgtgttggaaaatggtataacttatttggtttcaacatggttctccctatttaagccagagagcccttttggagcaactctcatggggctataggaaacaaagctaaaaattgatggcctattggttggcgctccataatttggcacaaa

SEQ ID NO: 240626 - DNA, 352 bp, Glycine max
agcttctgcgagcaggcatgaacttgtcgtctcttaacttctcccatgggtcccacgagtaccaccaggaaaccctcgacaacctccgcgccgccatggagaacaccggtattctctgcgccgtcatgctcgacaccaaggcacgatacgaccaccagattcgattttcatattccatattctcccctttttgttcgatttggatttattttatttatttatattctcatcgccgattttgttttgatttacttttaaatcttgtgttttaattgctaatgtttatgattggattaggttatgtataaacgggtgttatcattactattatctaattctagccccactatgt

SEQ ID NO: 240627 - DNA, 390 bp, Glycine max
  unsure (1)..(390): unsure at all n locations
ccattcttncaaaatatcttatccatcctgcaccaagttcctgaaggacatgtaggggtatattggagacgatgtgcccttctgaaaacaattacagagccaggcgctaaatactcccttggtttcttcaatgtatactaccaaaaaggtttgctccacgttctgggtatcaattttccaggtttccatctaaagatgccttttctaactcagtatgaacctgttcaagttacacttcaccaccgatatggtaagttgattagagcaagctcaggatggaaatttcagcttcttctggctctgcactccatatttctgaattatggtgactattgcacgtgacaaatataccctcgggtactaaaggtggcgctatgatcacgtttggga

SEQ ID NO: 240628 - DNA, 273 bp, Glycine max
aaatgcctagatttatgagacaattacgagcgccacgaaagagcacgggacacaaccagacatccaaggacaaaggtactcccatctgaatccaccgagacctgcagcacgcaacaacgagtgtctcgaaatattacaggacgaaatccaacacccgagaaaaaagttactcgcggctaaaaaaacaacaagcataccggcacaattgggagcgtctagatatacgaagggacacatacggccatccgataaaaaagtaaatgtcggccgaag

SEQ ID NO: 240629 - DNA, 379 bp, Glycine max
agcttctagcgcaaaggacttacttatgtattaattcctttgatagcccttttgagccttgtttccctttccttgttatgaagctcactacaagccttaagtgaaaaaccatgatattaccatatccttaaggaattttggagctttggaattgttttgggaataagagtggggggtttttgttacattggacaactcgttttgtcggctatgcttcatgatgtattctgggccatacttgatgtacattgtatattggttaaaggttggacatgctgaatgaaatgttgtttctcaaaggctaaagagtaaaaaaaaaaaaaaatttcagaaaaaaatttcaaaaaaacaaaaaaaaaagcataaagttggtgaatat

SEQ ID NO: 240630 - DNA, 329 bp, Glycine max
ctctggtctagcgcgcttcaaaacaataacggtcttcattatatccatattcatgcgtctcactctataattcacagattcgaacaaaaatcaccgctctacgctattacatctctcaacaattaagttcacactcccagcgggctatggttcaagcttttccttcttaatcaacttggccatagactacaccttctaatggtgaacctactttctcgtactttctcatctacatacacgctcattcaaaacccatgatttcaacacatgcctcacccctttatgcacatcaacttacaacaccaattccattaaccaaataattatgt

SEQ ID NO: 240631 - DNA, 317 bp, Glycine max
ctccgcccggacccaagcacgcgctgcacagaccagatttgattgtttgaaacaaatccctgaacctgaaggtctttgagacatcatctttggatcatgaagatctgccttgactttttcaataccttgtatcatcaaacttcttgaatcatctgattctcatgaactgttcacagggaacatttgctacttcatagctattccttacctccatgcaaccgctaaagctgctttaccaatagtttacctacttccccctttaggtatttactattcaccaattcttacctttgttcaccccccaaaaaccccctaaa

SEQ ID NO: 240632 - DNA, 408 bp, Glycine max
  unsure (1)..(408): unsure at all n locations
agctttgagtttcttcattttcctttgcatatgcctctttgctagcataataaatatatacagttatgttcatccttttctcttagtagcttaaaatttatttggcataattttatcatctgctttaagtcatttttcacaattgaacagaagacctattgtaaattaattaagattcaggattttcttaattagtttagtatattagaacgaatgttagcatttagtaaattttaggtttggtttcattctaaaaattattntttattctatcaactattaaataaagggtctcacatcgacaaggagattcaaacacacgtccatgtgggatataagtccaatccttaccaaatggactaacactttggtggctcaactactaccacctctataaatttcattatc

SEQ ID NO: 240633 - DNA, 434 bp, Glycine max
tcacccttcgtcccaaacttagtccaaacttatcttcttttaacttctcatcctctagccttcaccacttctctcgcacctctatttcccatctccttccttcctttttcgattccagttgctagtcattataggatctccattggagctcatgcttccaagaagatataacatatgtcaacctatatctaaacatgcaatccaacttcatataaattttttcataaaattagtaaatactcaacaaaatatcatggtggattattcgtacttccattatgatggttcgcttatcctctacgaccaccaaaatgggtagtgagtcatataccacctacatcttcctcactacctcctctctttgatgatcagtaacttatggcgtatgtggtatgtttaagggtgtcatcattggtagggtacatcatgcaaat

SEQ ID NO: 240634 - DNA, 322 bp, Glycine max
acaccaacacattggcgcggttataattgatatatcaatgcgtatatacaacttattattcttgagagtatacagcacaagatcccagaaaaaataatactctggagcagtgacagcagaaagaaaaggactaccgcagaatatttatgatgacctagaagatgttctcgagcgtctgggaattggtatcatcactataacccgcaattcgtttgaattaccagtaaattgaaaaatgacttgtattacatttcacatttgtagtgtgtcctataaagataagacattaaattgccaaggcagacacataagaaaaaagact

SEQ ID NO: 240635 - DNA, 391 bp, Glycine max
  unsure (1)..(391): unsure at all n locations
tgtgagactcactaagggcagaccttaggttatgcgagcctctttagaatctactaggannatttctgtcttgcgttttagagagactcaccaacggcggaccttgagtttgatgagcctatgagactcagcaagggtggacctttggttttatgagcctttggagattcgaccagcgacgtgtccgacctggattntggtgagattcaccaagggcagatgttagtcgtcttatacgactaacgttttgtataaaannactttacaaaatgtatataaatccccaattatagttctttggtggattgtaataaatttgcttgtttgactatgtcattaaagcctcctatatggataatgtaaatttcttaattcagcaaaatgacaattg

SEQ ID NO: 240636 - DNA, 126 bp, Glycine max
tacagttggagagcaagttcaacactcttatgttttccttgccatcagatacataagaaaacgcttctattctattctcgaggctttctgctcacatcaccaagcacagatctgaagcaaacaaga

SEQ ID NO: 240637 - DNA, 460 bp, Glycine max
agcgttagataaatgaaactattaaagatataatttatgatgttctcaacggataaaaaaaatgatataatgaaggtgatgttttgctttatcaaacctgagtgatcctgagcttgagtaagtataccacccaaaaacacaacgaagaaagtcatcggcattctgtaagatgacagatatactagcaccatgtgctgactctgacctgaaacggaaacgtattggctgacaaatcggatcattgaaattatatatgattacttggaccatccgaatcaatatcacactcagtaaattaatcactgtcaaaacagtgcaatgatatcaggtcgacttgtcattatatgttaataggagaaatatactttttacaaacataaaggacaaaacattatcttttgtcaattctggatccaaatatcacgatgtacaaatttaatgactaaatttggtatatatc

SEQ ID NO: 240638 - DNA, 505 bp, Glycine max
atgaatctggatttcattgtgccaaagactcaacaatatgataagcatgctctaaacaatctggatccttttctgcatctatggcttcacaaattccataaataaggtcctccccctgcaagagagtcaaaaaaatgagttattatagagataaaagtcagatcttggccatcatattttagtttattatattagttggatatcttattctctgctcttgtacttcatcattttataccgccaataatatttattggtataaaaaacaattgagtaaattgcagtatgtacacctcaatttatgcaaaagaagaaagatacactgctattttcaaatactgcagccacatttgagagctaaatgcttctgtaaatattctctgcagttctctcaagatattaaaagagacaattgtttttccagaataagctaatccaaacacgctcataagatgtaattaacattagaagaattcacattcttcagacatatgactgtatattc

SEQ ID NO: 240639 - DNA, 436 bp, Glycine max
  unsure (1)..(436): unsure at all n locations
agctntctacaaagggttttgaagctaacctttgattccatgtgatcattatatgtaagcacatatgttgtctttatgtcaatatagacatcgtacgtcagtgtgcatgcatgctacctagccctagccttctcgaacctaaaatacaagaagcacgttaacgaagaatccatttaacagttactatataaatttctccaagtaaaaagtacatttgtataaaatttataaaattctactattaacttatctgttagtcagtgtttatgctaccatttttccaaccacacacttgacacaagccaaattattttccttcatttccgacaatttttattttattttgttaaactcttcaccttaatgagaatatactggattgacatttgaaataaaattgaatgcaaatcaattatcttattatagccacaccaat

SEQ ID NO: 240640 - DNA, 482 bp, Glycine max
  unsure (1)..(482): unsure at all n locations
ngagcttaaatctaaactcagttattcaaatgagataagctcatgctgtatatgtttgataaaagctcacaaacaacttgtgtttgtgtatgtgtatattctatacaaaagattgtcattttaaatgagaaaatgtatgtatactaataataataatttatttattgttattacttagtaaattgttatcttattgatttattactgtctactatttacgtaacgctacttttcaaagagtttctttactctcttcaacttctagcataaagatatgtactcaactaaatgctaaattaataaacatagaaagaatacattggagaaaatttgaggtacgaaaagaaaattattgttagaatttagaatatgttgaatagtaactgtcatgttgaatgttntatgactgaaagttagcagttacatattattaaatatgcgtaatacgggaatagagggatatgtgtgtatcggtttctagt

SEQ ID NO: 240641 - DNA, 424 bp, Glycine max
agcttatgacaattgaaattctcgagagcttccgaatacgtgtgaaaagttatgaccatttgaaatttttgagagattccgttgttcaattttgagcgtctcgatatattatgcgcctgaatttgacttgcctgtgaaaggttatgaccatttgaatttctcaagagcttccgttattcaatttcgagcttctctatatgtgatgtgcctaaatcagacatacgggttaaaagttatgaccatttgaatttctcaaaagcttcggtagttcaatttcgagcatctcgatgtattatgcgcctgtatctgacatccgtgtaaaaagttatgaccattttagtttatcgggagcttccgcttttcaatattgagcgtctctatatgtgatgcgcctgaatcggacatccgagttaaatgttattac

SEQ ID NO: 240642 - DNA, 450 bp, Glycine max
  unsure (1)..(450): unsure at all n locations
gtgagacagtgtggaagagtcagtcttcctactnttatttgttgaccatatagtggtacctggagatatgtcgcgggagtcaggagaccttgtggacgtcacgtggggtgctattgcccaaaaccaagcttgatcaatcctgacccaacccgggcatagtcagtcagtgagaacctgtgacgtacctaaacaggcgagctcctggtagtcaaccaataaaagaacaaagaccacaaagcaaggaggcttgtgtggtggctggccagctatggatcttgagtgatatctagaatatggcctctggtaatcgattaccaaaggtgtgtaatcgattacaaggcttataaatgaagacagaaagttaatatggcctctggtaatcgattaccaagggtgtgtaatcgattacaaggcttanaaatggatacaggaagttgagatggcctctag

SEQ ID NO: 240643 - DNA, 321 bp, Glycine max
tatatcaatggggcatttcaccgagcacttgatgggcgcatgtttggacataaattgcaagagaatgggggcaatgtggcatgccccattgcttcaaaatacaacatacgcctaacgccttctcattcaaatcctcaactcaaaaaaatcaagcataaaaacaacccaaaactgccccacaaatataatcacattctcataatttggagcaccaaaagatgaagaaaatataccaatgggaagctaaaaacatcaaggattgaatacttacttgttggagtgaatagaaacacccaaaacgaaagcaaacacgatcaaagt

SEQ ID NO: 240644 - DNA, 400 bp, Glycine max
ttcattctttgtgttatgagcctacatcagacaattggattattgatgtttctgtcacaatcaagtgattgttgacatctccatatgtgtgtacaatgtgattatgttttcgtttctaggattcatttggaatatttgttgttgattatgaataagtgaccaattcttttgatttaaaattttcgtctcctaatcaatcgaatattcatcttgtacaatgtgattatgggttgattaaaattttcatctcctaagtagcttgaatcactcactgagacactcagtaagttgctagcatagttacaagcggctcaaccctctcattcagctgttatgcaagttggaggctatagtatatgtcgagggagctcatgaatctggctgtggataccccaagatg

SEQ ID NO: 240645 - DNA, 403 bp, Glycine max
  unsure (1)..(403): unsure at all n locations
tcanaccacagcatcacanaatctaggtatccaaaaccgctcaatttagtggattntcaaggtttgaaaagtgaaattgagaataggggtaaattgaagcanactctcacctcacacaagtctataacatcaatttaaacttgttcaaactggatttacacctaanatttcaccgaatcaaaatttgactcctcaacacccaattntaccctagaaatggctcttgccttcactttggtcatttgtttttctctcttgcacagcccaagctntctcnataagtctaaatgacatttcgaactaggagtaactcattttaacctctatttaccactgaatccagaattagccttgcaactctcanagcctcactctttttttcactcatacaccacattctcac

SEQ ID NO: 240646 - DNA, 433 bp, Glycine max
agcttgagctcactggtgctaccccttaaagctccacgaaatttgtcatggccatgctctttcttgcgagccctcttggtttcttgttcaagggctctagcagtagctgcattttcttctcgtaacccggcacactctttccggacgtttgtagcgaccaacttgaatttttctttggcaagtcttgcttttcctagatctgtttttagagctcggacttcttcatcctcttccggagcttcaaagttctcttcgttgataatctttaacttggaaagccaatctaaccctcgtgtacgaactttcagccattcatgataaccaccgatgatgccattacgaatgcacctaagttctttatctttccttaacgggctttcccacgccttatggactctttgtataaccttgaaactttgtacgccgaaatctc

SEQ ID NO: 240647 - DNA, 435 bp, Glycine max
  unsure (1)..(435): unsure at all n locations
tcactcctacatctcatctctagcatgcattttctttctttacccactcctcacgtttggttntttagggaaaaacaccataactaaacgcgccgcaagggatccctatcgcaccagatccaaatctagaacgatgggtgatcaagaggagacgcaggaacagatgaaagctgacatgtcggctctgaaagaacaaatggcctccatgatggaggccatgttatgtatgaagcagctcatggagaagaacgcggccactgccgccgctgtcagttcggctgccgaagcagacccaactctcttggcaactacgcaccatcctccttcaaacatagtaggacggngaagggacacactgnggcacgatggcagccctcacctgtgatacaaccgagcggctacccttatggnattgcgccaactattaccacccat

SEQ ID NO: 240648 - DNA, 442 bp, Glycine max
  unsure (1)..(442): unsure at all n locations
agcttcccagatccgatcatggaaggacttagttactgccttcattaggcagnaccagtacaatacagatatggctcctgatcggaatcagcttcagagtatgactaagcgagagcatgagtccattaaggaatatgcccaaagatggagagatctcgcagcccaagtcgtaccgcccatgacggagagggagatgatcacaattatggtagatacgttacccacgttctactatgaaaagctgataggctacatgccatctaactttgcggatctcgtcttcgccggagaaaggattgaatccggactacgaaaaggcaagttcgaatatgcttccaatgtggcccccaacaacaacagaagagccccagtagtgggcacgaggaaaaaggaaggagacgcccacgcagtcaccaccgccccgacgtggatgaaagcaccc

SEQ ID NO: 240649 - DNA, 468 bp, Glycine max
  unsure (1)..(468): unsure at all n locations
tgtttcgaaaccacccattggttctgataggcttgtgagaggcatgtttagggactaaatcccacacttcattccttttaaaatgaattaattcatcgtgcatagccaacaaccaatgctcatcatgaaatgcttcatatatggttctaggttcaatctgagaaacaaaagttgtgttcaagatccttaaccttggtttcatcttcaagtgcagcttgcgtatcctaaaaacctgcttcttcattttccaaagcattttcttgaacaaaagagccagtttcctcacgaataatatttttaggttcttccacacacaaagttctcctattaagcactctataagccttgcgttgtaatgaataaccaagaaagattgctcatcagttttgcatcanattanaaagagatccttttcattattaaatcaacatttacatcaaaccctaaatggatatattggttcttcat

SEQ ID NO: 240650 - DNA, 443 bp, Glycine max
  unsure (1)..(443): unsure at all n locations
agcttcattcctttttcactcatgtgtccaagtctttgatgccacatggttgaattattgacagcctcagtaactcctaccatatcctcatctgcaatcatgtaaagagatcctcgcttctttccacgagccacaatgagattgccttttgttaccttccaagctccatctccataagtggtgtgatgcccttcattatccaactgccctatggatattaagtttctctttaaggtaggaatatgtctgacattgtgcaatgtccatagggatccaccagaggtctttatgtcaatatcacctcttccgataatgtccagagattntccatctgcaaggtaaactttcccaaatcttccaaaatatagttagacaataaatctttagaaggagttgtgtggaacgacgcacctgagtccatgatccatgaatcaacaggacta

SEQ ID NO: 240651 - DNA, 473 bp, Glycine max
  unsure (1)..(473): unsure at all n locations
tctatagaaggttcgttcctaatatctctacaattgcatcacctctcaatgagctggtgaagaagaatgtggcatttacctgcggtgaaaaacaagagcaagcctttgctctgctcaaagacaagcttactaatgcacctgttctagctcttcctgactgttctaaaacttttgagctagaatgtgatgcctctggagtgggagttggagctgtattgttacaaggtgggcaccttattgcttattttagtgaaaaacttcatagtgccaccctcaactaccccacctatcataaagagctgtatgccttaataagagccctgcaaacttgggaacattaccttgtttccaaggaattngtcattcatagtgatcatcaatcacttaagtacattagagggcaaagcaagttaaacaagaggcatgcaaaatgggtagagtacctagagcaatttccatatgttatcaaatac

SEQ ID NO: 240652 - DNA, 191 bp, Glycine max
agatgaggaagtgttgaacggtgaaactttctgcttttattgttgaccacacactggtacctggagatatgtgacgggggttacgacaccttatggacgcccagtggtgtgctattgcccaaaaccaaacttgaccaattcccacccaacccgggcatattcggacaacgagaacctgtgatgtacctaag

SEQ ID NO: 240653 - DNA, 206 bp, Glycine max
  unsure (1)..(206): unsure at all n locations
gctgaaccatnttatcaataaacacaagttgagttttattcagaaaagtagagtatatctcntttatcttagtgagagtgattctcctaaattctcgagtgattcaagaacaccctggctgtatcaaaggactttcacaacctttgtgtgttgccctcgctggaaagagtgattcttttcttcctatcatcttcaaccttggtctt

SEQ ID NO: 240654 - DNA, 446 bp, Glycine max
  unsure (1)..(446): unsure at all n locations
agcttgtacaaatagattcgtgcataatattcttcatcctgtatggtccatatatatcctctcatcgctgtatctagcattatattagccgccactccttcttgggtgagcccgaaagcaatttttcatctgagagtgaatcctgatgcatgggcctggtcttgggatcattgatcagttaattaattctacgaccgagaaaacattntctaatttcttcaaggtcaatatgacgtagattccttgcacgatcctctataacattattttctctgctcttctccaaagatttcttctttaggcgttgatcttgctggtacttccttagaggttcacctccaattatatatgtactgcccatcattntagcatgagcagatgcctcatgaggggccatctgctcttccatgtactatctttgagtttcacctccaatcacagctttt

SEQ ID NO: 240655 - DNA, 487 bp, Glycine max
  unsure (1)..(487): unsure at all n locations
tcatctgcactcatggatcccaaccaggtaactcaacatttctgcataattcttagatctggtttaatctagtttgtttcgttcaatttggtgcgtcgatttgatttttgttccttggggaaaaatctaatcacacgcttaatttcctctggtgattcagtaatgccatttattttctgctcgatttttcaatttttgcgctggataggatttaattaaatgattgatcgtgctattgaatgttgattcctttcagatttaggtgattaattagattctcttgtgtgtgtggtgcagcccgtgggtgaaaactacgccaatcccaggacttgcttctttcatgtcctcttcaaggtttcttttacccaattaattgtgctctttatcatgtctatttatgcaagccattttcactttattaaggcatanctctttctttgtatcctctctcaagctgcagccttggcatttacattctctcggcctc

SEQ ID NO: 240656 - DNA, 398 bp, Glycine max
  unsure (1)..(398): unsure at all n locations
agcttgtgcttgttntatntaaattcctaggatcatgagcaactaggtgtgtcctactattacttgagaaacaaaggtgatcaaataacaagaagagattttaaaaggtactaggttgcctcctagtagcgcttctttaacgtcttgagctggacgcttgatggcttgtcggtcactgacccagtactttgcttacctttggctctggacttggtcgcctattgctcggccatgggtcgtaagcaacgctctaacctttttgtggatgagctgaggtgaactctaaaggtgatagcggtgcgtctgttgcccgctgctggccatccccaggctactagggtgtttcgccctgcgcctgcctggagacgcagtacttcttgatgaaagctcgattagta

SEQ ID NO: 240657 - DNA, 314 bp, Glycine max
atactcagcttatgatgatgaatcaagtggattctagaccatttaataatgactaagatgttgactaaaagcccaaagaatgatttcaagattaaatcatgaacaaattcaagaatctagagaagtctgatttctagattcacgaaaagatgaattcaagttccgaaagaacaaatcgagaagacttcacaagggaaggatggtaaaataatatcactataatgaacatagctcagttttgtctttcagaagagatttcacaaaagtttctaaattaccagagtgtttactctctggtaatcgattacgagtgg

SEQ ID NO: 240658 - DNA, 459 bp, Glycine max
  unsure (1)..(459): unsure at all n locations
gcttatgcgcatatttccttacgaacgttctcttgcacattacattctattaactaagaaaaatgcacccatatacaatcaagacagcttcgttacctagattatttacacgtacttccaaggtgtatttgttacttacatcacacacatctccttggctaaatttacatacatgcatactcaaagcattttggggtaccaaaaattgcacatgtgcacatcttggtatttctaatacctatacatacacaaacttcatgatgaatcttgactatctacacaataaggtgctacatttcatgctcttttcaagtttttgctacctaaagccgcatgcaaattcaagcatattttcctttgctgactaaaattgtattcaaattaaagggtatacattnttttgtaatgtattttctttacataacatgcaacatatttatgtatattttttgtgagaca

SEQ ID NO: 240659 - DNA, 399 bp, Glycine max
  unsure (1)..(399): unsure at all n locations
ctctctatttctctcaatcgctcttcattcttctgtatctttccacttctattctaccattgtattgcacaaatataatggattctccattgacgatgatcatgtagggctaaaaaattaatcgatctaaggatccactccaagcaaagctgaatttgagtccttgctgggttttctactctctgtgaatgttattctttctcttcaatcctatatctgttttacatgagtgcgattatgtctaggattgaaaatggattaagctatggattcgatttctaatgtcaaaagttaatcacatattgnttggatgatngcccactctcatntgcgatttccaacaatttagagattagattcgattgaactgtctctaatgcatatgagtgaactttcaca

SEQ ID NO: 240660 - DNA, 458 bp, Glycine max
  unsure (1)..(458): unsure at all n locations
agctntgtacattgtattatttgaaactaatagtcaagtatgtgccatttaaacatcacattatcatgtttgttctcttttcgagatatttcaatcattgactgtgttgactatagattaatatgggtgtggttgtgactgttatttatagttgctaggtcctgttgtggtctttcttcttcaagagtctatgaataatttgccaacttcagtggcggaaattactcctgcattgcttcttaaagatgctgcttatggtgctactgcttatgtttattacgaactctcaaactacttgagttttaaagactggtaagttcatagctactatgctttattgacgtaagttatccatatttcgatcttgccattcctaaaaattgaagatcagttaattttgttgtgtctggactctggtaaccctaataaatcacagccacccactggtaatggaactc

SEQ ID NO: 240661 - DNA, 483 bp, Glycine max
  unsure (1)..(483): unsure at all n locations
tgctctcgttgtagcggtggcggcaacggactaagcctttaacggcccactatatagctgggtatgtgcatttgtccatgcttcaagcccaaatgggtcttggacaagggagaatgttagaaggcagttgcgatttacacttttcccatttactaatacactccattntctgattttataattttttaacacaaaataatcccattccagaaaataatcaaaagacaaataaggttccttcaatcacaaagactcactctcttactcaactntnttcaatcattgtgcttctagaacaagatcttgattntgattattatgagaatagtagtcaaaatgagagcacgacaatcaaggtaggcattatttctttatttgagactctnttgtttatgtaagagataagaatatttgttgtttgnngttttgaattgtaagctagtgagtgattgngtgagcttgaacttaaatataagtgtactg

SEQ ID NO: 240662 - DNA, 238 bp, Glycine max
tgtaatcgattaccccttcggaactttccgagatggctcccaagagtccctactgtatatattgtattatgtatggcctccctggtctttcaatatattaccagacatgcaagttccaagttcaagtctgatgagtcacaactttttatatactagttgtgtgatccgattcaaccattatgtaatcgattaccatttgcgaatgttcgataatagctcccgagagtccacctattca

SEQ ID NO: 240663 - DNA, 285 bp, Glycine max
  unsure (1)..(285): unsure at all n locations
actcaagcttanacacattccaatttatgtttaccccagtgaactacctgtcttttaatttaacctcgctcctctttcatgacaccatcgtcaatgaatctatctaaagatatcaactgtacacgaatacgcataagctaaaattttaagttcagtcgctcaaacccagcgtgtcagcccaatctataaaaccttcatgcttttcagcccacacattctagttgtctaacattacacatccccaagaagaaacatgaattacgactagctntcatatcatatcaa

SEQ ID NO: 240664 - DNA, 464 bp, Glycine max
  unsure (1)..(464): unsure at all n locations
agcttcaagccaaggccagactctcgtgcatgcataggcttctcaagaaaaaaaatgcctaactcacccaaaaaatctgatttcaagcttaaattggtgggttggtctgtgttcgtgcgcttagcgcaaatcataatcgcttagtgtgcataagtggattttggcttagtgcacttctgtcgcttagtggatgagttgaagtggtgcgcttgatgacctggagcgatgcactcaacgaacctgataactcatcttcttctggattcttcttcgggcttaaccactgagtgtcgcgcttagcgaatgctcactaagccagaagattggcttagcgagaaggtgaaaacaacacatttgccaatttgcctaattaacctgaaattgagagaaattgattattaaacacacaaaacaaaagtataaattatctattacctatatttaacananagtacttataatat

SEQ ID NO: 240665 - DNA, 361 bp, Glycine max
  unsure (1)..(361): unsure at all n locations
cattggtgtatattgatctcctcttggcgctctaaattgtgggaatgtgctcaaatatgtggggcaattctggatagttttcttgcttgattaagttgaattgcgggtttgtatgagatggccctaggcctataatgcattttgaagtaatggggcatgccacattgtccccgttctcttgctattgatgcctaaacgcgcgcccaccaagtgttcggtgaaatgcctcaacggcattagcgcgtgactgttgtanggaaacaacccatggtgcaatgtggtttgacatatttttggacatgcattattttcaaagactagagtatagcccccatatgcctacgctacaactatatttatg

SEQ ID NO: 240666 - DNA, 383 bp, Glycine max
  unsure (1)..(383): unsure at all n locations
agctnggctgtcttcctattcatccatcaacatgtagaatgcttattctttccatattgatgatatgtcttgatccagctttaactcttgcttgtgcattcgagtttaatgatccatttgtgcatcccattttacctgatgaaaagaagagagcttcagctgctagatctgagcttggttctttgtatgggggttgtggtgaccagtttgctatagtagcagcatttgaatgctggcataattcanaggaaatgggtctagaatcacggttttgttctcagtactttgtttctcaaagcattatgaacaagttatctggaatgcgtaagaatttagcagcagaactatatcagaatgggcttattcatgggcagtttacaagc

SEQ ID NO: 240667 - DNA, 496 bp, Glycine max
  unsure (1)..(496): unsure at all n locations
ggaaccttgatngaatttccatccaatgttggagaaaggttcttgtgtaaagtatagatgtcaaagagggttaaagaaatgttaatcttataaaatatgatcttgtaaacaataaaagattattacttactttttgctaacattttcggtagtagttatcgctatgttcaaagtaagcattgtttttttatattgattactagtgagagtttccatgattntcttattattgttggaagtaatcattgataanaatgtttaagaaggaaaaaaattatataaaaagtatgcaaaatactagaaaggaataatttcatgtgaaaaagtgattttgatatttataatggttttgaagtaattaactaacaaaaatagacactccagtaataataacataacgttcatgtatctttntctctagctaacttaatttggatataacataacgttctttaataacannatatngacatcattgactttgagaaaaaacaca

SEQ ID NO: 240668 - DNA, 370 bp, Glycine max
  unsure (1)..(370): unsure at all n locations
agcttcatgatgaatcaagattgattcatagaatttttgattataacaaaggtgatgacaaaaagctcacaggtcaagaacacttcatgataacaaagatgatgatctcaagaatcaaagaatgagttcaatatggttcaagtggaaattagatttcaagaatcaagattcaaggttcaagcttccaagaatcaagatcaagattcatgactccagattcaagaatcaagagaagacttaatcaagataagtatgaaaaagttttttcaaaanatgagtagcacatagatttttctgaaaacctttttaccaaagagttgttactctctggtaatcgattaccagattattgtaatcgattaccagtagc

SEQ ID NO: 240669 - DNA, 254 bp, Glycine max
ttggacaactgctgtttaagcttcttctggcaagttgtctgtggtggacaagcttttgatcttgcaagccaaattagacctgtcaagtggatgaagtccttatatatgatgattcaacccttttctgatcattggaggatgcattgaagacaaatgtttcgttttgtcttttgctacacgcgagagcaacacacacgtattactcttgcatatgtatcactcatggagggggtgtgtactgaagatgcaataca

SEQ ID NO: 240670 - DNA, 409 bp, Glycine max
tcgattactagaagtttttacgtttttaacaacctttagaaatttgaatttaaattttaaagcctgtaattgattacaacttgtgtgtaattgattaccaacatgagaattcaaatttcaagtctgaagagtcacaactcttcagaaattaactgtgtaatccattacaacagttatgtaatcgattaccaataaggaattttcgaaaataactcccaagagtcacaactgttcaaattttttttgaatggtcatcaatggcctataaatcaattaccagacatgaaaattcaaatttcaagtctgaagagtcacaactctttagaaactaattgtgtaatcgattacaacaattatgtaatcgattaccagtaaggaattttcgaaaataactcccaagagtcacaac

SEQ ID NO: 240671 - DNA, 498 bp, Glycine max
  unsure (1)..(498): unsure at all n locations
tgaggaagtgtggaagggtgagacttcctacttttattcattgaccacagagtggtacctggagatatgtcgcggnggtcaggagaccttgnggacgtcaggtggggtgctattgcccaaaaccaagcttgaccaatcccgacccaacccgggcgtagtcagtcagtgagaacctgtgatgtacctaaacaggcaagctcctggcagtcaaccgataaaagaacaaagaccacaaagcaaggaggcttgtgtggtggctggccagctgtgaatcttgagtgatatataggatatggcctctggtaatcgattaccaagggtgggtaatcgattacaaggcttaaaaacgagatcaggaagctaagagggcttctggtaaacgattacaaaggggcgtaatcaattaccaggcttagaaatgggactgtgaatgtgaaggggcctctggtaatcgattacacagaggaacaggccatttggtatcaattaccagttata

SEQ ID NO: 240672 - DNA, 436 bp, Glycine max
  unsure (1)..(436): unsure at all n locations
agcttcggttntaaatttcgagcgtctcgatattttactggactcaatcggacttccgagtgaaatgttattgtcgttagaattagctacgagcttcggttttaaatttcgagcgtctcgatatatttcgggactcaatcggacttccgagagaaaagttattgtcgttagaattagctgcgagcttgggttttaaattttgagcgtctcgatatattacgggactcaatcagacttcctagtgaaaagttattgttgatcgaatttgctacgagcttcgatttggaatttcgagcgtctcgatatattacgggactcaataggacttccgagtgaaatgttattgtcgttcgaatttgctacgagcttcgggtttaaaatttgagcgtcaccatatattacgggactcaatcggacttccgagtgaaatgttatt

SEQ ID NO: 240673 - DNA, 403 bp, Glycine max
  unsure (1)..(403): unsure at all n locations
tgtagcagantagaactacaataactnttcactcggaagtccgattgagtcccgtaatatatcgagacgctcgaaatttaaaaccgaagccagtagcaaattcgaacgacaataacaattcactcggaagtccgattgagtcccgtaatatatcgagacgctcgaaatttaaaaccgaagctcgtagcaaattcgaacgacaataacaattcactcggaagtccgattgagtcccgtaatatattgagacgctcgaaattttaaagcgaagctcgtagcaaattcgaacgacaataacatttcactcggaagtgcgaatgagtcccgtaatatatcgagacgctcgaaatttataaccgaagcctctagcaaattcgaacgacaataacatttcactcggaag

SEQ ID NO: 240674 - DNA, 441 bp, Glycine max
  unsure (1)..(441): unsure at all n locations
agctaggttgcatctaacctcaataatggaagatttagttatccattttcatgggtagcctcaaaatacatggaaggtggaagaagatgaagaatggaggcaaagggaagctttctccctcgcggagattgtagagacgtgccaaatgaaggaccccctcttctaaatgatagtcaaatcctatttatacaagagccaaaaattctattttaagtgacttttagctgagttcaaaattttagcttcagctaaagtgcaaaacaacttaagggcgaaagagaatctagctccaacttccaaatttagctcacgcttccagatgtgtttttgcttgctgtcagaatttagctccatcttcattccttagctcaactaaattgaagtccccctcctcaaaatagctctagagattntctactatccactccatttctacaaaaa

SEQ ID NO: 240675 - DNA, 336 bp, Glycine max
aaatcatccctcgcaattattgtaccgcgtggttggtacctgtgatgatcacgaatctttgttcgtgggagcagaatgacagcagtagagtacgagaagtgagattcttttgtggagccgtcgagctgactcgatgacgttgagattatattgggagagtcgagtgttgttaatcaactccttcatagttggttccataactcttgttgttgaattgaggatgtgcatcacaaatgtaattatatgtatgaacaaatttactttttattatgcgaatgatatgtgctgagttactatatatatgtgtgcgtgcgtgagtgtatgagagtattcact

SEQ ID NO: 240676 - DNA, 444 bp, Glycine max
  unsure (1)..(444): unsure at all n locations
agcttgacagtattacaaatctcaatatacgtcttcaagtgtgagtatggatcttcatttggtaaaccatgaaacaaattgctctgtattagctgtatcaatgaaggtgggtaagataagttttgtgcttgaacctctggccgcacaacacttgagaaatattgcggcaccaaagtacttgagtaatcttccaaggtcactcatcgtggttgctcttcaaccatgactttggcttcaaattctgttgtttgagattccttggattntggtgaattagaagatgatgactcagaaaagtgagccctttcaaggattgatgctactgttctatcatggaaaagctttctttttctctcagagttctttcttctaaagggtgcttcaatttctaaatccaatggaaccaattcacctgcagaagatctacacatccaaacacttaca

SEQ ID NO: 240677 - DNA, 388 bp, Glycine max
  unsure (1)..(388): unsure at all n locations
ntataagtgcgggtttaagacacgaaggccaagtcgccgcgatatgcgaggatgactccccgacgagatcgganttggtacgaccatgtcctcctggtttctgactaggaaattggcgagtggaggagtgcccagacgtttacgcgacaagcataatgtaaccctatgtagctctaaaactctacggttgggcttaggctatagagtttccttttgttaaggcattatgtcttttgctcttgaatgtataatataaagagctttcttcatttgttcctgcgcctctacccattctcattcattntcatgtctacttctttacgctcaagacgctagatccaacgacgagtccctcgaaagactaatacccgagactcggccgtcaatt

SEQ ID NO: 240678 - DNA, 445 bp, Glycine max
agcttgagaggattgatggtgacccggtgttgttagaaacgaggatatgggctacgtgggagtacatgagctcagttggaggtgggcaacaggggatggtgggtttatgcgcgcattgtggatgtggaaaacttgttgtgcaccatcgcccgaccgccacctagtaccacatgtgatgggtaccccataatcctacaagcttgagatgaggaagtgttgaagggtgaaacttcctgcttttattgttgaccacagagtggtacctggagatatgtcgcgggggtcaggagaccttggggacgtcaggtggggtgctattgcccaaaaccaagcttgaccaatcccgacccaacccgggcatagtcggtcagtgagaacctgtgatgtacctaagcaggcgagctcctggcagtcaacagataaaaggaaaacaagaccacaaagc

SEQ ID NO: 240679 - DNA, 473 bp, Glycine max
  unsure (1)..(473): unsure at all n locations
acaatggttttaaaatgtggctcataaacttggaatccctatccgacacaatgctcctaggaaatccatgaagagtcactacctctttgaataaaagatacaccacatgacaagaatcatccnctttgtgacatggaatgaagtgtgccatcctagaaaacctatcaacaaccacaaaaatcgaatctttctcctcttggaccttggaagaccaagtacaaaatccatggaaatgtcggtccaaggggaggtaggaattggaaatagagtatacaaaccatgatgcatgactntagactttgcgttatgaacaaaanttgataatatcatgtttcattntaggccaaaagaaatgttcatgcaaaatgttcaaagtcttttaaactccanaatgtcctggttaaccccctttatgagcttcacanatcatgagttcatganaggaactttgaggcaacacaatcttttatttt

SEQ ID NO: 240680 - DNA, 444 bp, Glycine max
  unsure (1)..(444): unsure at all n locations
agctntgcatgtctagtgattctagagagagaaaggtccgagttcaagagagttttgagatattttgttgtgtgacgatctacagagactagagcttgaagaggaagctgttctgagagcttgagatgagtttgtgagtggttgtgagatcctagaggtgaaggagacatcctcaccactttgtattttgcaatctttcatttttttcttctctttggtgaaaggaggcttcctcgttatggaaagccaaaatcctccgttggatcttccctgttggtacttgatgtaaatatctttttatctatttaatgatgttttgtgtgttctctatgctatcagtttttcattctactatgcctttaccatgatcacgtagatgcatgctttgttagggtcattcaacagtggaaactagtctaattctgatgaccttgataggacaag

SEQ ID NO: 240681 - DNA, 535 bp, Glycine max
  unsure (1)..(535): unsure at all n locations
ctaagcttctnactnttnttttggctgagtgagtgaggagagagagaacgcggctttgtgttntaagaaaagggctttctctntnttttttaaaagatgtgccacatgtcttcttttgagtggagcaaaaagggcccattntttctcttgatgtgactcacactcagccacaagaagagaaaaatctgaccttttgaaatgctaaaatcctgcctcagtttgcgtgtcgtttctctggttccagtccctcgcgtttctctgcacccgtcggggccagttnttgaaagtaagcaatatatatatatcaaaacgcttagaatgaaaccccgagcgtggttcagaggttggttntgttaaaatttaagttgcacgcaaagacaataattttagactaattaattgagaattaacctataactatccagttatggatntctcttccgtaattagcctaacccgcgtatctttccnccaatatacctacttctaccaggagtatatatatatatatatatatatatacactgaataatac

SEQ ID NO: 240682 - DNA, 399 bp, Glycine max
  unsure (1)..(399): unsure at all n locations
agcnttatgagagagtcaaagatcaaatggagaggaaaaattataactatgctaaacaagccaacaaagggagaaagaaggttgtcttcgaacccggagattgggtttgggtgcacatgagaaaagaaaggtttccggaacaaaggaaatcaaagcttcaaccaaggggagatggaccatttcaagtgcttgaaagaatcaatgacaatgcttacaaagttgagctgcccggtgagtataatgttagttccaccttcaatgtctctgatttacctctttttgatgcagatggagaattcgatttgaggacaaatccttctcatgagggagagaatgatgaggacatgaccaagagcaagggcaaggatccacttgaaggacttggaggacctattgaca

SEQ ID NO: 240683 - DNA, 444 bp, Glycine max
  unsure (1)..(444): unsure at all n locations
acattgagatgctataaattgagatatggaagttcttgagagattcaattggtcataacttttcactcggatgtcagattcaagagcaaaatatacagagacgctcgaaattgaacaacggatgctctctagaaatntaaatggtaaaattttttcacatggatgttatattcagacacataatatatcgagacgttcgaaattcaagaattcaaaaattaaagttctcaagaaatatagagatgaaaaattatgaccatgggtgtacgattgagacccatgatatatcgatatgctcaaaattcaaaaattggtccaattcanaaattcaaagagccctaactntngacatgggtgtacgatngaggcccatgaaatatcgagaacgctcgtaatgaaaaattgaagttcttgagaaattcanatagtcataacatttaactt

SEQ ID NO: 240684 - DNA, 424 bp, Glycine max
  unsure (1)..(424): unsure at all n locations
gctttacagcagattntattaatgacccactattctattatttaataacttaatgccattaacctacggaattaaaacaaactaaatggctgagtgtaactgaaattgttggcaaccaaaagttacccccaacagccaacaagtcagccaccatttggtctcccaaaaggctgatgcctaggttgccaattgggcccttattacaacttgaactaaagcccttttagttgattaacccaaaacatatttttggtcagccaactttacaaggattgtgccattatttagacaaactaaacactctaaaattgaaataaagtggtgtcatttagtcctccatttgggccatgatacaactcacaaccttggacttttctccttgaaacttgggcttgtattcaaatagtatggacagcacttgttg

SEQ ID NO: 240685 - DNA, 503 bp, Glycine max
  unsure (1)..(503): unsure at all n locations
ggtagtattatggggtacccatcacatgagggactaggtggtgtgtcgggcgatggtgcaaaacgattctccacatccacaaatgacgtataacccaccatcccctgttgcccacctccaactgagctcacgtactcccacgtagcccttatcctcgttcctctcaacgccgggtccccatcaatcctcccaagcttccacaacatccaggtaattccacatccaatcatcatggactcacaaaaccaagcaaaacagggcaaaggcagaaaactctgcccaaaacacaaaccaatatcacagcttttcacatacaaataccccagtaacattttcttcgttccaattcgttaaccgttggatcgactcgaanatattactggaagtctctagtacataagtctacattgttaccgctgggatctgctagcaaatgttcataaccccatatgtactacccttgtcacaaccagccatacactagcgattttctgcacttatac

SEQ ID NO: 240686 - DNA, 350 bp, Glycine max
  unsure (1)..(350): unsure at all n locations
agctngcctcanagaggtccaggaaggacaaggtggccgaattaactagttccgctcctgagtatgacaatcaccgctttaggagcgttgtacaacagcaatgcttcgaggccatcaagggatggtcgtttctccgggagcgacgcgtccagctcagggacgacgagtatactgatttccaggaggaaataaggcgccggcggtggacatcactgtgtactcccatggccaagttcgatccagaaatagtccttgagttttatgccaatgcctggccaacagaggagggtgtgcgtgacatgagatcctgtgtaaggggtcagtggatcccgtttgatgccgacgctatc

SEQ ID NO: 240687 - DNA, 503 bp, Glycine max
  unsure (1)..(503): unsure at all n locations
acatctcccctntctcaagcaaattcttcttgatatcatcaaaatcttcatgatttacattctccccccttttgatgatgacaaccacctgcaggtgaggagcaacaacaaagaaaatatctatttgcatatagtttactcccccttggttttgcaatgattgcttatatgagacagttgaagatttcatatttttcatatgtaaacaaattgtctcataaacaatagataattnttcttactattttatcttttatctttctctccccctttgtcaacatcaaaaacaaatcatgaatagagaggagaaagatgttaccacttgttgcaatgtatgataatcaagtgataccaaaaggcattaaaataatcattcaatattaatcaagcaaaaacaagtacaacgacacatcaatcaaacacaatcaaatacaatcaatcatcaaatatttcanatcanattaattaaattaacaatcaactaactatacacaataatttct

SEQ ID NO: 240688 - DNA, 511 bp, Glycine max
  unsure (1)..(511): unsure at all n locations
ngatgaacctgatgcntcgagatccgtagagtcacctgcggcatgcaagcttgcggaagctcttacaagctggcctgcaatctgtcattatatgctaggctgcagccatcatcatgaactatgatgtgcactatctgcccatgctcatatatatagatatatatatatatagatatatatatatatatatatatatatatatatatatatatcagcaaactaaggctgaggatcctttgtgtgagcatagttacatactcacacatttcaagtggacagacagcgtaataagttntacacactcactaaaacaccacacaccatgtgtgatacgtctattgactcttaaaataattatcttagagtaaatcaaacggtgatttatgagcggatgacagtataaaactgttntacattatcaacgcacaggcattattttgcagtcatatggcatattattaagaagctcaccattgaaaaccataagttccttgcgctcaaagacacgaan

SEQ ID NO: 240689 - DNA, 349 bp, Glycine max
  unsure (1)..(349): unsure at all n locations
atgcctacaaatgaggaaatccatcanactatcaagtttatggtgagtctcacagcaccaacactggatgggtttcatgtnttgttcttcgaacatcattggagtgtaatggggagagatgtctacaatttcactagagctttcttttaggatccaacaaaaattgctgaagtgaaccaaacttttttaactctgattctgaagaaatgtgaggtcaattctattaaagatatcagacctcttagactttgtaatgtgatttatgaagctatgactcgtcttatctctcaacgcttgagaccaatgatggtgaaattagtgggtcatttccaatctagccttaccccaa

SEQ ID NO: 240690 - DNA, 434 bp, Glycine max
  unsure (1)..(434): unsure at all n locations
agctngaagaggatgctttaatggaggaaaagatttagagaaggagggatcacgaaattgaatgaataanagagggagagaagtggaactttgaagtgtgtctcataagactttcattcatcaaagttacaacaagtgttacacatgcttctatttatagactaggtagcttccttgagaagctgtcttgagaaaacttccttgaaaagcttctttgagaaaacttccttgagaagctagagcttagctacacacacccctctaataactaagctcacctncttgaaaagcttccttaagaagattctaaagatgctagagcttagctacacaaacctctctaatagctaaggtcacctccttgagatgagaagctagagcttagctacacaccccctataatagctaagctcacccccatgacaaaatacatg

SEQ ID NO: 240691 - DNA, 442 bp, Glycine max
  unsure (1)..(442): unsure at all n locations
ggtagaatggctagacatgatacatgtcagggtttggttnggttcaaggataaaagggatgccccacattatttccatgacacaaatgcaaaaatgatgatttggaaattttatgcaaaactggtcatgcatgcacctatgtggacgctcaagtgtcaaatttttatggtcatctgatgctagggctcaagattcatttcctctattttaaatcaacccaatgtttccaaaatatgttcttttatcanattgtgcattcatccgagtccatttcgggcgtccgggaaaatattcacagcattcacccttcaggtgtacacacacattntccaaaaattagtgaattntttcaaagaaaagttggaaatcatctcttttcanaagcgtgttggttnttcagctagaaaacttaattttcttcttttttttctttnttttatca

SEQ ID NO: 240692 - DNA, 424 bp, Glycine max
  unsure (1)..(424): unsure at all n locations
agcttccatgggattcatgtcttttattattttattgcctacttgaaattgaacaaatctgtttaaacgtaacatgaattcattattagcccctcgcttaacatttctagttaataacatcctgcatatctttaacatcctacattagatatgggacaaaatatatttgccctcatgaatatattttatgtttgctctttgataattattttctttaaattcctcataaaatataattttatttgtaattcttataaatcagtagtgaattttgggtttatttcttgatattttttatatttattattaattttttttcaaaggaactaataacaaatgaattttttatcagagtaaataaatttttttctaattaataggaattaaaaaaaggttntaagaataaaaaattgttatttttatc

SEQ ID NO: 240693 - DNA, 408 bp, Glycine max
tctgtccctgagaaactggttcccagaagacaacatggagtgtagattgctgtaaaccctagccttgcaacaagttctagggaagtagacacggagatggacaagaaaatccgcagtatggtgagtagcattttgaaagaagcctctgtgcctgaagctgatgaagatgttccaacatcttccaccccgaatgtttctatgcctgatgttgagaaagatgttccaacatcttccggcccaaatgatgaagtactctcttcctccagcaaagagagatcaacagaggaagatgatcaagccgcagaggagacccctgcaccaagggcaccagaacctgctccaggtgacctcattgacttagaagaagtcgaatctgatgaagaacccattgccaacaggttggcacct

SEQ ID NO: 240694 - DNA, 433 bp, Glycine max
  unsure (1)..(433): unsure at all n locations
agctattnccatgggtcgagcggtcttataatatattatggaatgcaggcacaggcaccactccatttgagataaccttcgggcggaagtcctttaattttccagaatacattgcggggattgcaaaggtggaagctatggaagatattctatcagaaagggaggccaccttctaggcaattcgaaagaagctcttgaaagctcaagaacgcatgaagacatatactgatatgaagcgccgggaggtcaattatggctccgatgactgggtcttggtcaagctccgaccatatcaataaacatctgctaaaggaacacaggccattacaggcaaattggtgaagaggtattactggccattccaaattaaagagaggataagcccagtggcataccgcctacaattgccgaacggagcgcgaaatcaccctgt

SEQ ID NO: 240695 - DNA, 409 bp, Glycine max
  unsure (1)..(409): unsure at all n locations
atgttctgttatcaccgtaacattaaattcaatgttaattataaccctatcaaccatttaaagctagtatatctcatcatcaggaatatctggngttaggaatttcctgggatctttacttatttcttcatagtttagggttgatttcaccctttctggcactggcatgagaggaataatgctatctctatcgattacaccatcaataattccgtattccactgcttcaattggagacatatatttatccctatcaatatctctttgcacttgttcaaatgagcgtccagtgaaacttgatataattcttgtgatattattcttgttgtgcataacttctttagcctgaatttctacatctatagcttgtccactagcacctcctagagggtgatgaatcataattcgt

SEQ ID NO: 240696 - DNA, 433 bp, Glycine max
  unsure (1)..(433): unsure at all n locations
agcttgtctcagcgtttatgcgagacagagacttacatgttagctatcatcgccaagtacgaagaagagttaggtctagccacggcccacgagcatagaatcgcggatgagtatgctcaagtatatgcggaaaaagaggctagaggaagggtgatcgactctttacaccaagaggcaaccatgtggatggatcggtttgctcttaccttgaacgggagtcaagaacttccccgattgttagccaaggccaaggcgatggcagacacctactccacccccgaagagattcatgggcttctcggctattgtcagcatatgatagacttaatggcccacataattagaaatcgttaggaaacttgtatggtctcttagaccttgactagatatgacttcctttttgaaatanaatgagttggtcccatgttcctac

SEQ ID NO: 240697 - DNA, 500 bp, Glycine max
  unsure (1)..(500): unsure at all n locations
tacctcgacaccaacagtgacaatggcagcgagagtggcagtgagaaagaagagtcgcanaaggaaccaataatattaaggtgtggaattgcgagactggcagtgacaatggcagcgagatgcggaggcacggagttgcgatgaagacgatgacgcgggcgacactagagttgcggcagagacttgaatgaattagggcgtggagccaataatatttttaaaaattgagtcgttaacatcggtttttccatcaaaaccgatgttaacaaagtgatgtttacgttaacatcggttntttttataaaaaaaaaattgatgttaacttataatttaccaacatcggttntttcaaaataccgatgttaaggaagtgatgttaaccttaacatcgattntntaagaaaatcgatgttaacttatcattntccaacatcgganttttgaaaacggacgttgcgtntcatgtaacatcggttctcaaaaccgatgtaacctactat

SEQ ID NO: 240698 - DNA, 446 bp, Glycine max
  unsure (1)..(446): unsure at all n locations
agctctcaccccataattcccccatatttgggcttatntgctttgaaccaaaatttccttttatgaatgatgctctcctacaacctaagataaggtagaaggagataaactatacaggctcaaggttcaatcaaacaattatactttcagctcaaaatggtgcaagggataaatcaatcatgcacgaggtaagctttttagctaagtggctatcttcaatccaaacatggccttcatcatctttaatttcacgcattcattccatactcaaagattcatgcaaaaatcattactcaatgttagtcgttctctcacaattaaagatcacactctcaccgggttacggctaatgcgttccttcacaatcaacctgacaaaccaactaacattttcattcatgatcctcattccatgttctttctcttctaatgattgcatgctcattc

SEQ ID NO: 240699 - DNA, 343 bp, Glycine max
  unsure (1)..(343): unsure at all n locations
ttacatgcccaactcctttgagtgacattgtattggttgttaacttgactgttgcattntattacatttgatatctgttctgcattgtgcatcatcatagtgcgagtaaagaaaattttttaagttagaaaaatttcttcagatgcaaaaactctcagttttaatctattatagagttcgtcgaatcgattacaagctgtctgaagcttanaaagttaagtctcatatcggtttaatcaattacaatagtattttaatcgattacactgctgtttgagacaatgactgattnttcaagagtctctgctgtaatcgattaccaggtggattaactcgatacttc

SEQ ID NO: 240700 - DNA, 170 bp, Glycine max
  unsure (1)..(170): unsure at all n locations
atggaatacttactcgttggtgatgatcanaagcgcttaacggaatcataaaatgcgagaaaggatgaccctatggctgccaatttgtcaatcccgtgggtatggctgttgaaaggtggggaaaagaagtatctgaatgtataaacgcccaccctttcgtcattattata

SEQ ID NO: 240701 - DNA, 445 bp, Glycine max
  unsure (1)..(445): unsure at all n locations
agcttaaccttgaactactatgttgcttaacattgttagagataggggaagcaacatgatcaacatggtgaacaacctanaggctatagcttgaagctcaaggaaaagcttgaagaatttttggcttttacatgcccgactcccttgagtgacatttgtattggttgttatcttggttgttgcatattantacatttgatatctatattgcatcatgcatcatcatggttagtgagaagaaaagtttctaagttagaaaagttacttcaaaggaaaaaattatttgttttaatcaattacagagttgtcgtaatcgaatacaagaagctatctaaagcttaaagagttgagtctcgtatcgatttaatcgattacagtagtctcataatcgattacactattgtttgagtcaatgactgatttattcaagagtctttggtttaat

SEQ ID NO: 240702 - DNA, 413 bp, Glycine max
  unsure (1)..(413): unsure at all n locations
tgagatgaggaagtgtagaagggtgagactctctgctcttattcgttgaccacagagtggtacctggagatatgtcgcggnggtcaggagaccttgaggacgtcaggtggggtgctattgcccacaaccaagcttgaccaattccgacccaacccgggcataatcagtcagtgagaacctgtgatgtacctaagcaggtgagctcctggcagtcaacagataaaaggaacatagaccacaaaacaaggaggctcgtgtggtggctggccatctgtgaattttgattgatatatgggatatggcctctggtgatcgattaccaagggtgggtaatcgagtacaaggcttaagaatgaagacaggaagctaagatggtctctggtaatcgattaccaaggggtgaatcgattacc

SEQ ID NO: 240703 - DNA, 459 bp, Glycine max
  unsure (1)..(459): unsure at all n locations
agctntacactntntcctctntagggnngatcattatcttattcatattatcgnattatcactattggttntgtacattcaattcttttactatgggtattcgctttttaatatgtggttgaataactttatttttttcctctaataggtttatttaaaggatgatgctccactacctcttgttgcactgcaatgacattgctcattcatgagatattccatacttatattgaatacaatgtttcaactctttatttctaactaaagaacatgaatattcagtaaagtggaaatatgtattttcattgtgtattgtgaaggcataaccctacaacaaaatggaaatacatttctacttgtattctgaagaatgaaaatgtatttctgtcaaagataattttgtaaaacaatccataaaaagcatgagtgtgaacttagaanaaaatgggatggaaataa

SEQ ID NO: 240704 - DNA, 450 bp, Glycine max
  unsure (1)..(450): unsure at all n locations
agctgctatggaggctggatcttngagcttcaatgaggtccttcaatggtgattntccaccatatagatgcagcanaacgcaaacgagaagaggataatggaggcaccatccactacggaataagccatggaagaaggagcttcaccactgagaatgtgccttggataagaagctcgaagaggatactctaataggggaaaagatagagagaaggtgggagcacgactctgaaggaatactagagggagagaagtggaactttgaagtgtgtctcataagactttcattcatcatagttacaacaagtgttacacatgcttctatntatagactaggtagcttccttgagaagctctcttgagacaacttgcttgagaagcttctatgagagaacttccttgagaagctagagctgagctacacacacncntctaataactaagctcaca

SEQ ID NO: 240705 - DNA, 310 bp, Glycine max
  unsure (1)..(310): unsure at all n locations
tttaaatttatgatttaattnnttttgaggtggagttgatattgagaaggaggaantaanagatttgagggtaaatnntttttaaggggaagaaaatgatgnaatnttttntaggaagggannagtnattagaagtatgagnaagagggtttaagagaattgggttagagntgntgaaaaagggggtagggtttttatgaanntnaagatagatttttgagnnnatggannaatgttgggttnaattatttttgtanatattaaantaggatggtattatatttggtnnttgtatttagggttnnataat

SEQ ID NO: 240706 - DNA, 421 bp, Glycine max
  unsure (1)..(421): unsure at all n locations
gacactatgaaactaagcctatctagttataatggattcactggaggaatagtggacactacactattcanaaagggctagaaaggaaanttgttgattgttcaaatctatgtagatgacataatctttggtgcaaccttagaaaagatgtgcaaagagttttctgggctaatgaaaggtgaatttgaaatgagtatgatgggtgagttaaagttcttgctagggcttgaaatcattcagaaagatatgatggatatttatccttcaagaaaaatacacaaaggacatacttaagatgttcaaaagggatgaagccaaacctatggctattcctatgtatccttctctagtcattgataaggatgaaagaggtaatgatactcgtaaaaagataactgctagtagaccagatattgtattt

SEQ ID NO: 240707 - DNA, 446 bp, Glycine max
  unsure (1)..(446): unsure at all n locations
agcttcttccttagccattgtagtttactatggtttgtctcattctacacctattggattttggattatggtgtttgtaatcatttaactagtaatccttccttttctcaaaattattattccccaaaacactagatcataccattctcgctaacaaccaatggctntaaggtattatcttgttgagaaatctgaggggataaacaccgaggatatttacaccaaagggttactaatataagtgagtctaacatcacaccttaatccaaaatcttaaggataaagtttatgggtcctatccttacttttcaaccttcctattcctacccgatgtgggacctcattttacacttatacttcaacaatctccccctcaaatgtaagtctcttccacatggtagcttccccctcgagtggaagtcattntcaatccatgagtacctagt

SEQ ID NO: 240708 - DNA, 340 bp, Glycine max
  unsure (1)..(340): unsure at all n locations
acactccagctcttataagacacccctaccttgcaagtattntgttcaataatgtgattgaagcaaattttttattagatctaattaaataaatgtttagtattntgttctttcctattagtctgttgatagctaactggaataaaagaaaagctaaggtcggaccagttgatagctaattggaataaaagaaaagctaaattgcagggaataactatgatatctttgtatttcatcattacccccttttatagccatctcatacaagatattntgctaagtngttataacagaattatgaaattgcataaccacacaggtatcaagtaaaacgtggaaa

SEQ ID NO: 240709 - DNA, 358 bp, Glycine max
  unsure (1)..(358): unsure at all n locations
ccgagactcgcgctccctgttaatgtttcggtagtttccttttatcagnttctgggccacccccctgatattggaagagggccaactgtgcgagcacgacagagagggaggctgtcagatggctattatgcataccggggcaagatttcacccgtaccgctgcaaagagacaagtgcggaccatgcgcaccaacatgaccactcttacacagatatagatgacattgctacttagcaacattcttgccagcgaccgcaatgccaatctccccctacaaaagtatcagttggtctgtgtcgtcccgacatgggtaagtatgcatatggttcaactgatttctgataccatctattggtt

SEQ ID NO: 240710 - DNA, 441 bp, Glycine max
  unsure (1)..(441): unsure at all n locations
gggagaggatgcttcaatggagganaagaaagagggagagaattagagaggggggagcacgacattgaaggaagaaaaagggagagaagttgaactttgagttgtgtctcacaagactctcattcatcaaagttacaacaagtgttacacatgcttctatttatagactaggtagcttccttgagaagctttcttaagaaaacatccttgagaagcttctttgagaaaacttccttgagaagctagagcttagctacacacacccatctaaaaactaagctcaccttcttgagaagctggagcttagctacacacacccatctaaaaattaagctcacctccttgacaaaatacatganaatacaaaaaaaagaagtccctactacaaagactactcanaatgccctgaaatacaaggctaaaaccctatactaatagaat

SEQ ID NO: 240711 - DNA, 294 bp, Glycine max
  unsure (1)..(294): unsure at all n locations
agctngagatgaggaagtgttgaagggtgaaactttctgctttntattgtgaccacagagtggtgcctggagatatgtcgcggcggtcaagagaccttggggacgtcaggtggggtgctatttgccaaaaccaagcttgaccaatcccgacccaacccgggcataatcggtcagtgagaacctgtgatgtacctaagcaggcgagctcctggcagtccacagataaaaggaacaaagaccacaaagcatggaggcttgtggtggctggccagctgtgaactctgaatgatatgt

SEQ ID NO: 240712 - DNA, 377 bp, Glycine max
tgtcacatcagataatgtcaaaaatcgtatcattttattgagaatcgggcatggtattgtaagtgacatccttggccagagtggatttgattgggatggcactaagcacatgatcacagttgagaatgaaaatgcttggaatgaatattgcactgtaagtattctttctttaatatgttgctattcgctattcaaagtagattggatttgactttttctttgtttccaatcgcataaatcggctaaactgtttcgattcaggtgcttcacaattgggatgatataagggatttgtgtgctaaagatagagccaccggtcatggagctgaaactgctatggatgctgatgaagcgatgagtatagaaacaaatgaagt

SEQ ID NO: 240713 - DNA, 317 bp, Glycine max
gcttttgtttacaaagaatttttattctgtaccctcgggttttgcgccgcagcgtgactcaaaagtagtatgacagatttgtgagcacggaaagacgtaataccggtgtaacgggcatgtcggcgcattgacaatgggcacaaacgacgtagtctctacgtgctataggcttttcgtttacgacagaaaaagttatcggattgtagtgcttactctactgaggttaaaggtggctagattttgtaaacatagccttaacatgaagaactggagttgtgacatgatgtcacgtatgtaagaataaacggccgacatgc

SEQ ID NO: 240714 - DNA, 470 bp, Glycine max
  unsure (1)..(470): unsure at all n locations
gcttgtgacacgtggagattaggttatcttccacgctcacaagatctgtcatactgactcttgcttcacgctgacggccggaaatacccgagtggttatccgtataaacttcttgcattctgtaagacgaaaagcctgataacacgcagagactaacatcgtcttctgcgaccttcgtcaatcgcggccgacaagcccgttgacacgtggagatttacgtcatcttccgcgctcacaagatctgtcatactgactttcgagtcacgctgacgggcggaaatacccgagtggttatccgtataaactgtttgctgtctgtaagacgaanagcctgatagcacgcagagactaacgtcgtcttctgcgcccttcgtcaatcgcggacgacatgcccgttgacacatggagatttacgttatcttccgcgctcacaagatctgtcatactgactnttgagtcacgctgacggg

SEQ ID NO: 240715 - DNA, 432 bp, Glycine max
agcttgttgaaattgccatgtttggatgagttattcatacccattctgttttacggtttatgtgatgatgtttgtgatgtttatatactgaaattgctgatggaaaactgttagagatgaagggtagaactaacctatggttagaaagtgggaatgtgatgttatgagtggaaaaagagtgaggctttgagagttggaaggttaagtatgaattctgtgataaatggaggataaagtgagttaatactagcttgaaatgtcatttatgacttgggagaaagcttggactgtgctagagagaaaaacaaatgatcaaagtgaacaaagagccatttctagggcaaaattaggtgttgaagactcaaattttgagttggtggaattttgggtgtaaatccagtttgaacaagtctaaattgatggtatagactt

SEQ ID NO: 240716 - DNA, 420 bp, Glycine max
  unsure (1)..(420): unsure at all n locations
ttatgatgatgcttgtgaggtttgtgtgctgaagttgcttatggaaaactgttagagatgaagggtagagttaacctacggttagaaagtgagaatgtagtgctatgagtggaaaagagtgatgctttgagagtttgaaaggttaaatctggatttggtggtaattggaggttaaagggagttaatcctagtttgaaatttcatttacgactgtgggaaagcttgggctgtgcaaaggagaaaaatgaatgaccaaagtgaaggccagagccatttctagggtaaattgtgtgttgaggagtcaaatattgatccggtggaattttatgcgtagaaccagtttgagcaagtttagattaaggttatagacttgtgtgaggtgagaagttgctccatatntaccccattctcattttcact

SEQ ID NO: 240717 - DNA, 419 bp, Glycine max
agcttaggaacccaaacttgtagcttcaatgctttgaaacatgcttatggctaggaatccaaaatttggttttagaattagaaaaacatgaaaattaggacttgcttgtgagaatttttgctcaagtttgggctgccccatgtttgatactttacatagaggtagcgtggaaaaagccttgcaatagtatgtatacataggtaaatataaggagcatgaaattcctagcaaagtgtgaatgattgtcttcctaaatgaatgtatgatagcacggaattcccttttgaatgcaagtgtgtgcataatgtaaatagcttgtcaatatggataaatgtgaatgaaacaataaaaaaatttgtatgatatatatttcaaacactatgtaggtagttgtaaatagaaaatgttcacgatataaa

SEQ ID NO: 240718 - DNA, 385 bp, Glycine max
  unsure (1)..(385): unsure at all n locations
nttccanagtggtcttcggcattacatttaagctcgatccattgtcgataagtacctttgcgacaacgtggtccatacatctcactgacacatgtagagccttgttgtgtcctctcccctcaacgggaatctcttcttccgcaaacgcgatataattgttggtggttatatgattaacgataccttcaaaaccctccactgagatatcatgtgctacatgggcatcgttaaggaccttcatcaacagcgcacgatgaggctnggagtttatgagtagttcaagcaaagagatccttgctggagttntattcagttgctcgactaccttaaactcgctttgttggatgaggcggaggaactcatgggcctcttccaaagtcactat

SEQ ID NO: 240719 - DNA, 450 bp, Glycine max
agcttgtatctagccgccttttcaacctaaattctaaatacaaaatcatacttgtttgtttctcttctttcaccaaatctttcatattgtttatatttgcaatgctagcaaaaatataataatattccacattttttaaatcaattaatcattttatcatattaaattctctaatttaattaatcatcaaatattaaaataatttctttaatagagattagaacacttgtttgtgtataaccccgtaggttcaatactaatcggatgatatattaatcaaattaatatactaatcaaggtaggcgtctagcaacactccttaacgtccggatagcatgaagtaacattttactttcaagaaccattagaagagtagtgtaataatttcttccatctttacagctttgggttaactctagagtatgatattactgtcaaacccttttgagt

SEQ ID NO: 240720 - DNA, 356 bp, Glycine max
  unsure (1)..(356): unsure at all n locations
cgcttttntntttccgactctgaagtcatattttcttttatgtttaaagatctttgttataggatattntatttactcgtattttttgttttgttttcaattcttgaaaaaattgtcaataattttatttatttcattattaaataaatattcttcattttactagttattatttttatttaatatcttgtatatgttttttatatgattttatttaatacgttatatatttttttaatattttttaaaaatattttatataattatttagtcaagttctgtttaatatattttgtatatctaacacttagataacttggtaatcctgttatcggatctaatgtattcggaaatga

SEQ ID NO: 240721 - DNA, 455 bp, Glycine max
  unsure (1)..(455): unsure at all n locations
agctngccctgctaaaggattgcttgtaactagcatgcactggtgcatgtgcgcatcatatgctttggtttggtctgtgaaatgaaattttggatgagccatgttggttctctggtttaggaagtgtcaaatgaaatttgctagtagttttctgctcacgtgttggagcttttatgcaggctttggagcaatttctgctagcaatttcctttgcatctatacaattntcatgacagtaaggaactattgatatggactaggaccactgttaaatcttatagcagtttgtagagtttgaaaaataatcacatgatttaatgtcctgtttcttctctttctcttataaatttattataaatttacacattgttttggagctggagtttcatgtatttgagcttcgaattagagagagaacaaggaatgaccattactaanagcaaaaaaatatgtca

SEQ ID NO: 240722 - DNA, 344 bp, Glycine max
  unsure (1)..(344): unsure at all n locations
atcaaatcttatcttatccagattgtattccatccagactttattccgtctagattttatttcgtccagattntattttatccatcttatcttatcttgtccagattttattttatttcgtttatgggcttggacttaaaatagatttgtaagctntgtggctaagaacctcatccatacattttttaatagtatgctctctttattttcttttgatatactttgtgttttaacgacttgaattcaatatgaatttgtttatcaattatttgtggagttgtacattacttatatgaaattttataagtttattgttttagttagatttcactacgttctaaaat

SEQ ID NO: 240723 - DNA, 453 bp, Glycine max
  unsure (1)..(453): unsure at all n locations
agcttccattgttcaatttcgagtgtctcgatatattatgcgcctgaatcggacctccgaatgaaaagttatgaccatttgaatttctcgagagctacctttgttcaatttcgagcgtctcgatatattatgcgcctgaatcggacctccgagtgaaaagttatgaccatttgaatttctcgagagcttccgatgttcaatttcgagcgtcttgatatactatgcgactgaatctgacctccgtgcgaaaagttatgaccattttaatttctcaagagcttccgttgttcaatttcgagcgtctctatatgtgatgcgcctgaatcagacctccgagtgaaaagttatgaccatttgaatttctcgagagcttccgttgttcacatttgagcgtctcgatatattatgcgcctgaatctgacatccgagtgaaaagntatgaccatttgaatt

SEQ ID NO: 240724 - DNA, 409 bp, Glycine max
  unsure (1)..(409): unsure at all n locations
tatgcacggaanatgtaattatgaaattgagatgcccgaagattcaccatttcctagttaaccatgcattaggtaccatgttcaattattntgtttttaagtgaaacgggtttatgatcccaacatggttggctcgtggtgcctaacacatgaaactaagaatgtagtgtgaagtttcacgcttcccccttttttgtttttgttttgtagaggaaaacgcaaggatgagcaaacatganaacaaatggtatgcaatctggcagatcaaaaagtttgttgaacgcatatgcatgatgatgccatgactcatgcaaaatgtgaggctggaatatgataacggacaaatgcaggaacgatatgttcattatgatgttatgaagagatgcttatgcgatgcatgatatgaatg

SEQ ID NO: 240725 - DNA, 455 bp, Glycine max
agcttgtagaggatgcttcaatggaggaaaatatttaaggagagaaagagagaggggggagcacgaaattgaaggaagaaaaaagggagagaagttgaactttaagttgtgtctcacaagactcttattcatcaaagttacaacaagtgttacacatgcttctatttatagactaggtaacttccttgagaagctttcttgagaaaacttccttgagaagctagagcttagctacacacacccctctcataactaagctcaccttcttgagaagcttccttaagaaaattcctaaagaagctagagcttagctacacatacctctctaatagctaagctcacctccttgagatgagaagctagagcttagctacacaccccctataatagctaagctcacccccatgacaaaatacatgaaaataccaaaaaaatccctactacaaagactactc

SEQ ID NO: 240726 - DNA, 225 bp, Glycine max
  unsure (1)..(225): unsure at all n locations
ntagttgacagatatgttaaccaagggacttcccacggagtatcttcaagaaccttattgcaagctgtgaatgatagatatgcattcaccagcttgagggggagtgttgtgatacattccataattaacacagattntattatgtacagattctattccattgtatttctttccttaattaggttgcttgcagcatataaataaatcttgtattcacttctttgt

SEQ ID NO: 240727 - DNA, 451 bp, Glycine max
agcttgacttgatataatgctcatctatctcttgatttcatgatggacatagcagtagtctgctttgacaggttctttgtctttttttggcttctgctgctaaaccggtgactgaattggatatctctgtttcggcctttgagtgagcactcgcgattattgtgctccgcgctggatgcgcgctttcctaatgtattattgtcttgcggttgcacaatgaaaatgcatcgcgaactcattgattatttgatctcagaatccactttattttaaagaggaggcttgaagtatgcatttcctatgataaaagagtaatactgaatagctcggttttgagctttagagggggggaaaaacattaggtggtggagatccttgtttccaacttgctgagtattttgatgactaacacatcactaatacctgtgatccaagcaaccaaaaacctact

SEQ ID NO: 240728 - DNA, 449 bp, Glycine max
  unsure (1)..(449): unsure at all n locations
tgcgaggctgcaagtgtagcatatatgcacaacagcctcaccgtagaaatcccacgtgagagtgaaaactcaacagctatgagaatgttgtctctctacgacaacattgctagaagacatgttcccgccaaactgggacagttctctgcgatggtggttcttgatttgtcggagaacaagaatagtggaccgctgccaaccgatgccagcaagggacgtacactctaggacttggtcgctcttgataacatgttttctggcgagataccacacagttatgcgaactgcatggtgctgtcgaagtacaaagtgatctgcaaccgtatggaggggtccattcccgctggactcatcaggttgtgacacgatacaatcattgatttgagtagcaacaactntaccggtccggctcctgagattaacggacattctagaaaattatctgagct

SEQ ID NO: 240729 - DNA, 456 bp, Glycine max
agcttacatctaggaaaacactggcttagaatgatgtgcttcatgttccctctatcaaagttaaccttatttctgtagcattgtggggagaggttggggtaaagatatcctttgagtctaataagatagttatgactaataataatgtatttatggggaagagatattgtgatcagggtgtctttgtactcaatgtttctgaagtgattaatgagaatgcatcttcttatgcttacttgattgattcttatgatatatggcatgctagattaggacatgttaatccaacttatgttatgaaattgcaacaatcatgtttaattaatatgcatgagaaacacagtaagaaatgttaaatatttgttgaatcaaaattaactaagaaatcatgtccttctgtacaacatgaaattgaactgctaggcttaattcattatgatcttgcatatttaaaac

SEQ ID NO: 240730 - DNA, 389 bp, Glycine max
gagctctctaatctccaggttctaagtgccacacaccctagacactaagcaccaatctagtgctaagcctaatatgttctagcactaagccttaagcgagaagaagacaacttgttctttggcctcttaggaataagcatggagggcttatgcgttgagtatgggatcatggaccttgttcatgacagtgatgaatgaattagacttaggagtctaatttaacatgcgctctgaatttgtgttttaattgttataattataggccctttgttatttcttctctaaatttgtgttttaattggtgaatggtatgtgagtgtttatgaatgctaagattctttatgaatgttatgtttgtagtggttgagactattctcacccttttcctc

SEQ ID NO: 240731 - DNA, 402 bp, Glycine max
tgcctacaacaatctttaaatatttatgtaggaataataaatcaaagaagttactaatgacaaaaaaatcaaagaagttaaatataaatttaattttgatcaagaaatgacaaatgaaaattaatgtgtttttgaaattgccaagagctgattgaaaatgtaaatttatgcacttcgattcaaaggtcaaggtaaaaaagaaatagaacattacatgtaaatttaatgaaaagaataattgaattgttttggttaagatgacgagttagaaaggaggaagtgaaattttcaaataacttttttatataaaactattcaaggatgatataaaaactatttttaaaatagttttagctgagtgtcattaaaataattgttttattgaaaaatagtagtagatgt

SEQ ID NO: 240732 - DNA, 384 bp, Glycine max
  unsure (1)..(384): unsure at all n locations
tgcagacatgggacatcgtatagtatatatgattcacgatcttgggacagacggttttcaacaagcacatgcacccttgtatgacaaaatacaaagtcattcaaagaagtctgtgtattcgaggtgcacatctttcacatagttgtcagcggtgttaagtctggccaacttgaaggcatgatttgcatggagtgacaagagcttcatcaaattgtttgtgttattgaanagcatgctttctgaggataacacattgccgaggaatcactatgaggcatagaagattgtatgttccgtgggaatgcagtaccagataatctatgcatgccctaatgattgtagtttgtacataaatgattntgtagagatgcgtacatgtcccat

SEQ ID NO: 240733 - DNA, 450 bp, Glycine max
  unsure (1)..(450): unsure at all n locations
agctttgactngagtcatcaaaagattataaatatgtgatcatggcatggatnttttaaaaaataacaatcaagaaatctatctttcaatcttctctctcaacatcattcaactctttcaacagattttttctgattcatcttctcttcatctttctaaaagtttttgttcaaaactttttctttcaagaaaagttctttgataaaaaacttggtctattaatctttntcattctcttctccctttgccaaaagaacaaaggactaaccgcctgaattcttttgtgtctctcttctctctttccaagagaattcaaaggacctcgcctgagaattcttttgattcttcccttccccttaaacaaaagatctcaaaggactaaccgcctgagatatcttttgtttcccctttacaaagattcaaaagactaaccgcctgagaattctttgt

SEQ ID NO: 240734 - DNA, 433 bp, Glycine max
  unsure (1)..(433): unsure at all n locations
ctcagtagtagtataattggcttgggcatcatctaaagtcctagaagcataatatatcaccctgcgcaatttatcaattntttgagcaaggacagcccccaatgcataatttgatgcatcacacataagctcaaaaggggctgtccaatcgggtgcctggatgatgggggtggtagtcaacgctcttttgaggcaatcaaaagcctctttgcatctgtcattaaagtcaaactccacctccttttgcaacaagttggacagtggaagggctactatgctaaaatcccttacaaagcgcctgtagaatcctgcatgaccaagaaaagatcgcacctctcgcacacaagaggggtaaggcaattgtganataacagaaatttntgcaggatctacttcaatacccttattggaataatgtggctanaactatacc

SEQ ID NO: 240735 - DNA, 450 bp, Glycine max
agcttaaagtatgcccgagtcattcatccctatgagatgttgatgaagtattggcgatcaaaatttccattccttggattatagggttgaaccaagctcatgcttttacaaaaaggttcatcaagtcaagttgaaatatggaagtaaccatcctgcaaaattggggcaaaagatgaattgagtcacatcactgcttagtctactgccaaacatatttaggattgttgatgtccttgctacttccagtttcaccttgacaaagatgtcatggaccatgttgaaaatctaaattgattcaaccccatatcctgcgtaaaaattcgcaatcttcaactgtacatcattcgcatacatccatgcttttcattggctgcattgctcattgcattctttccttgaaaaataaaataaaataaaataaaatgaacttaataattgttatcaaaaaaa

SEQ ID NO: 240736 - DNA, 252 bp, Glycine max
  unsure (1)..(252): unsure at all n locations
ctataaaactcagcttgtggagtatgggatacccatcacatgtggtactatgtggcggtcgggcgatggtgcacaacaagttntccacgtgcacaaatcgcgcataaacccaccatcccctgttgcccaccttcaactgagctcacgtactcccacgtagctcatatactcgattctctcaacaccgggtgcncatcaatcctgccaagcttgcccaacatgcgagtaactcaacattcaaacagccaaaat

SEQ ID NO: 240737 - DNA, 450 bp, Glycine max
  unsure (1)..(450): unsure at all n locations
agctngttggagaatgttgaaaactgtgggaggtttggtttgggttacaagcctacaagtgcaaacaaatggaggattgctttggaaaggaaagagaaatgcatagctcgtttacaagggagagaattgcaggtggagagggtccctatttgtcacatcaatgagagctttgtgagtgcagggtggatgtacgaagatcaggttgctatgttggatgaacagaccgatcaagatcagccaaattgggtgcaaccatgtttgctagactttggattgaaaaattggtagatcatagagaaacccaagatttatgtttctgatttgatgtaattaagcatttccaggtcctattgctatgcctaaggctttaggattcacatattgtcaggcgtacttttcttttcaattccagtgatcattaataaaatgcattntaaagacatatcccct

SEQ ID NO: 240738 - DNA, 458 bp, Glycine max
  unsure (1)..(458): unsure at all n locations
tagccctagaggggatggaccttntcaggttttggagaggatcaataacaatgcctataggttggacctcccagaagagtatggagtcagcaccacttttaacatttctaatttaactccttttgcaggtggagctaatattgaggaggaggaactaacagatttgaggtcaaatcctcttcaaggggaaggggatgatgcaatcctccctaggaagggaccaatcactagaaccatgagcaagaggctccaagaagattgngctagagctgctgaagaaggccctanggttctcatgaaccttagagtagatttctgagcccatgggccaaggttgggtccaattatctntgtacatattagactaggatgtcanttatattggtccttgtatttanggctccatattgtangtagggtaccctagaaatatangaattttcagcccttgtattttt

SEQ ID NO: 240739 - DNA, 261 bp, Glycine max
agcttcttgcgtagccgctcttggtgctcacattattccataaacaaatccctcttattactagctattttgaattctttagttcctaaatgtacatccttcaaattgttgctcgttcccctctttgagaatgaggaggatcttcataggacttcatacagctgatgtttgtcggcaatttcatcatccaccacccttttcttctgtgccttctcacgttcattattgttaaacccatatttatgccttcttcccttcatg

SEQ ID NO: 240740 - DNA, 475 bp, Glycine max
  unsure (1)..(475): unsure at all n locations
tccttgagaagcgtagagttagctacacactccatctaatagctaagctcacctccttgagaagcatgcttgagaagctagagcttatctacacacacccctctaacagttaagctcaccccatgccaaaatacatgaaaatgcttagctacacacacccctttaatagctaagctcacccccatgcctaaatacatgaaaatacaaaaaagtcccaactacaaagactactcataatgccctgaaatacaaggctaanatcctatactactagaatgaccaanatacaaggccaaaaagaaggagaacctattctaatatttagaaagaagagtggacccaaccttggcccatgggctcagaaatctaccctgaggttcatgagaaaccttggtgatgttctcttggcttctctatctttgtattctgggaagtctctntaattccttggtcttcatacgaatctctatgtata

SEQ ID NO: 240741 - DNA, 407 bp, Glycine max
tgcaagctttgcatcctagaataaccaatatattttgtagcccaacctcattacaagccaataaaagttcttctgattcaatttgtgtatttctaactttatggtaagagatgaagtacaaatattggacctcttgttagttgttattgctaaatagcttaaacacatatgattgagttgtgttgcttactaacatgttctcttctctagttaagcatctttccatgaaatttgtctcctacctagcttcaattagttgtgttgcttactaacatgttttcttctctaaaaaactgcatgtcttgtgaaaagcaattgataaagacattatgtttcatttgttatcatgtgattaatattttgtgaaccatacacctttgtacagaatcattgcattgttttatcac

SEQ ID NO: 240742 - DNA, 368 bp, Glycine max
tgaatcacaaatctgaacctgtcgacagactctgtggtttatgctcctctgccgaccaccacacagacctttagccttctgtgcaacaatttgaagcaattgaacagcttgaagcttatgctgcaaacatctacaatagacctcctcaacctcagcagcagaatcagtcacaacagaacagaacaattatgacctctccagcaacaggtacaatctcgggtggaggaatcatcccaaccttagatggtcgaatgcttcaccacagcaacaacaacaacaacaaccttattttcagaatcctaatggcccaagcataccatacgttcctacaccaatccagcagcaacaacagcaacagccctagaaac

SEQ ID NO: 240743 - DNA, 448 bp, Glycine max
  unsure (1)..(448): unsure at all n locations
agcttgagcaaattagtcatgcaatatnggtggattagttntttttttttatttttctagttttttcttatctttttccatatttgagttagcttctgacataggcatttgtggcctaacatgctctttataaatgtgtgtgctataatgacatttaattaatagaggataattcaattaagtattactatgccttgttatttcttagctgtgtttagtttcaacaattgatactatccaatggctttcacgggcttcagattttttaaaaaaagtgtgtttgagctgcgatggaattgagttataatagtaataacttatatgatcttatctgaagtttaaacctagacttttcagagacataaggtcatgtcttttttttttcaaattgtttaaaagagtcactgcactcgttgatggaacaaacgcagtcttagttntacattct

SEQ ID NO: 240744 - DNA, 325 bp, Glycine max
  unsure (1)..(325): unsure at all n locations
actcttgggctaancactangaagaatccacactaagatcacttgtacatgttctctaatcacaccgtttcatctctctaagcgcaccgcttcagctcatccgctattcgagaaacgctcactaagccgaaaatcactaacgtgcgctaagcagttcgcacgtgcgctaagcgcacgatcatgaacacggccacctatctcagcctgtaatcaaaatttgtgacgggagtttggactgggattcacaggtttgcatagttgtggtttctagagagagacaagtccaacttccacacagttttgagagatttactgcgtgaagatc

SEQ ID NO: 240745 - DNA, 452 bp, Glycine max
  unsure (1)..(452): unsure at all n locations
agctnganacatgtgccttagtgtaaaagaaccgttgtgagtagcaatggatgtctacattcaaatttttaccattttggtaataaattttagactttgaataaaaagaaaaaaaagtgtgtttagcaattttggtgaaataatttaatttaatataaattaatgtgctaatgatcaaactagaatgttactaacatgtgattacttcacggtatttcagtaagctgtagaagccttatcaaaggcgtgcattcaacattaggtaaaattataacatttcaatcaacaatataaaatatagtaatccaacatcttaaggaagtttaactataattcttaatgaccagtcattattaatttcatcatatacttgactatctattcccaatcacaagctaatgttacattgtctatttcataacatagtctaagttttagttgaattaactact

SEQ ID NO: 240746 - DNA, 505 bp, Glycine max
  unsure (1)..(505): unsure at all n locations
tctagctgaagctgaactntatccttctccttgctaatatttgaatcaaagtgttagtttacaattggaatagaaatcagcatttgcaactagcacctactgggcagataataaacttcaaacaaattatacatttgacatactataaaacttgtactcacaaaaagattaaacagatgggattgtctttgtgtgtgtgtgtgcgcgcattgtgcatgtttttatggnggtggtggaacatgaaagatgtattgtacacatacattgtaagtttactgtcctagcattgtatctttttttaaaggaaatcttattaagtctcgtggaagaatctaacaatgtgagcctttcccaaaaaagtatatgaaaccacacacaaacacaggatgattccaggacaaacatgtaaacttcaccttccagaaaactggttagtaaaccaggcatcgtggtttcccaatataactgctntagcanattcaagaatcacaacactcttaatgac

SEQ ID NO: 240747 - DNA, 431 bp, Glycine max
  unsure (1)..(431): unsure at all n locations
agctggcttgtgaagcttctatggaggctggatctttgagcttcaatgaggtccttcaatggtgattttccaccatggagatgcagcggaagacaaaggagaagaggtaagaggcggcaccatccactagggaataagccttggaagaaggagcttcaccaccaagatgagccttggataagaagctcggagaggatgcttcaatggaggaaaagaaagagagaggggggagcacgaaattgaaggaagaaaaagggagagaagttgaactttgagttgtgtctcataagactctcattcatcaaagttacaacaagtgttacacatgcttctatttatagactaggtagcttccttgagaagcttctntgagaaaacttccttgagaagctagagcttagctacacacacccatctaaaaactaagctca

SEQ ID NO: 240748 - DNA, 438 bp, Glycine max
  unsure (1)..(438): unsure at all n locations
aagctataaaactaacnatgttntaacatcttgaaagagaagatgaggatctcaaganaattcatcaagctcatttagttgattntatcctggaaaccacttcactgggtgatgtacaagacacctttgtttgtaggaggtcaaggcattactagacgaaaaggtatccagtggacgataaattcttcttaaggattttcaagacttagaagaaaggttgaaatccttaaccatgactcttgaaaattcagaagtagaacacaaggaaccccacagacaaatctagtcatggtttcaaaggcaaaaaggttgtgcatggtgaagaagttactatttgttatttctatggaaaggtgggtcatgagactcataaatgcaaggacttctctaaaagggcaacccatcaaagggttcgttcaatgcttaccaacacccatg

SEQ ID NO: 240749 - DNA, 462 bp, Glycine max
  unsure (1)..(462): unsure at all n locations
agctngaaggtcaagtcttgtttattgcggaatcttaatgtcttcatatattaaacatgccagacaggtatataagtttcacaaacaacttacattttcatatattggaatttatgaaaagtctgttaattggataaatcttaacgctaggaaaaataaagatttatgataaggaataaaagtgtgctgaaaaaggcagggaaaataagcaacatggctcatatacttcatattctgtttatccaccgggcgcctttggcctcaagaagtgtggcaattcctttcttttcccttcatgcattgcggactactcacagtttaagccaacaatatcaaactaatatacacatctttctctagtaattcaatttatttatcattttatacccctcctccgatccttcccacattaagatgcagcatattataaacacaagatctttagatgaattgtgcatattt

SEQ ID NO: 240750 - DNA, 462 bp, Glycine max
  unsure (1)..(462): unsure at all n locations
aggctgttgtcaccttctcgctaagccaatctgttgtcttagcgagcatctgctaagcgcaacactcttgggctgagcacgaggaagaatccagaagaagatgagttgtacatgttcgctaagcacaccgcttcatctctctaagcgcaccgcttcagttcatccgctaagcgagaaaggcacgctaagccaaaaatcactaacgtgcgctaagcagtccgtacgtgcgctaagcgcacgagcatgaacaaggccacctatttaagcctgaaatcagattgtgtgaggggagtttggactgtgattcagaggtttgcatgattggagtttctagagagagaaaggtccaagttccagagagttctgagagattntactgtgtgaagatctgcagagaccagagcttgaagcacgagccggcttgagagtctgagatgagatagtgagtgattgtgagatcct

SEQ ID NO: 240751 - DNA, 485 bp, Glycine max
  unsure (1)..(485): unsure at all n locations
atcctctgagtcacctgcggcatcgcaagcttcgcgaaaacctctattntatgaagcaaatagggcataatttgacctcaaaacactcaaattctaaacgaatagcacaaaacatgtgatcacatcatggggaacaaaactcctcaatcaatttcaagaaaacatgcaagaataaaaaatccccaaatttctaggtttctaacattcaaagccaaacactcaattaaaccatccaattcacatcagggcattaattgaaatgtcaaacatgagaaattcgttgttatcattgtacagacataattaaaatgcatagaacaccccaaaattaaccccaatttgatcctctaaggatccctacacatgttcactctaaccccaattgcgataaactcatcccttacctctatgagggcacatgtgtgtagtccagcaactatagcggcatctctagtggttacctacgataaactcatccattaagt

SEQ ID NO: 240752 - DNA, 487 bp, Glycine max
  unsure (1)..(487): unsure at all n locations
actcagaaactaagcttttatccaggctcatcttggtggtgaagctctttcttctatggcttattccctagtggatggcgcctcctctcacctcttctcctttgtcttccgctgcatctccatggtggaaagtcaccattaaaggacctcattgaagctcaaagatccagcctccatagaagccccacaagcaagtttccatcaaccttacgaaaagaaaacaagtatcgctatgaaattcgtaaagttacgaaaaaagaatcaccaaaaaaagaaaaagggggtgtatttataaaaaaaagggtgtaaatagtaaccaggcccacttgggccttccagattcttcctccaaaaggttgttgcttctagaggaagcaacctggctcgcctgngcgagctgggtggcaagctcctccactattctgctctacatagggagaggagtgaagaacgaagggtttcagccttcttggcacttcgtattcac

SEQ ID NO: 240753 - DNA, 464 bp, Glycine max
  unsure (1)..(464): unsure at all n locations
agctntgagaaaacatgtgatccttggcatcatcaaaacattcagcttgatccttgttctacagatacctccattttatcatcaacaatgggcacccaattacccatacgaagttcggttcaaatacaatggagcaacctacccaatacgggtccaacaacaccgaggaagatatttttttgcagatggactctcagaagttaggacagatttaaaaatttacgagtctattatcatcaacttctatgcctgcgataataataccatctttgatctacattttacacctcccctgaaccaacaaacatgtggtagaccaaaacttcattgccgtatacatgcctggagaactgaaattacccaatgtatactgggtgctccccaaccactggtaatatacaatcacattaacttgcattattatgagaattccaataatattattaatctctgtaaatgatccc

SEQ ID NO: 240754 - DNA, 491 bp, Glycine max
  unsure (1)..(491): unsure at all n locations
tctanactntatacaagaatgaagctctgataccacttgttagacaagtggcctcagatatcttaagaagggggggttgaattaagatattccaaactacttccccaattaaaaatctatttcactctttactcaagttatgaattcccttaatgacaatcttcttaaatattgattcaaataaaacaatttgaatatgaatataaagcaataataaataaaggagattaagggaagagaaagtgcaaactcagatntatactggttcggccacacccttgtgcctacgtccagtccccaagcaacccgcttgagagttccactatcttgtaaattccttttacaagttctaaacacacaaggacaatccttcctttgtgtttagaattcctttacaacaagagactcacagtctcttaatccgttagagaatgaggagaagaagaagaataaatctctctagaaagagatggatttacagaatgagactc

SEQ ID NO: 240755 - DNA, 494 bp, Glycine max
  unsure (1)..(494): unsure at all n locations
ccccccccctacttctccttccgcctcgattaataattacaannncaaccccgggattgacttgactcggaccaagcacgcggtgcactgaacaggcctatgaaaaactttggattcatggagctactgggatttacccttgggaacaacttagactttgatcaaagaaaagagcggccacccattgggaacagtaataacatacccgtgtatgacaacaaacgtacaacgaggatacttacggaattcacgaagctgtagaagccctaacaaaggcgggcattcaacactaggctcaattatcacatttcgatcaacaatatcaaatatagccatcccacatcttacggaagcttaactataattcttaaagaccagccattactaagttcatcatatacttgactatctatngccaagcacaagctaatgttacatcgcctatgtcataacatacgctaagttctcagcgaactaactactaagtctccacg

SEQ ID NO: 240756 - DNA, 385 bp, Glycine max
attcatcaagctcatttagttgattttatcctggaaaccacttcactgggtgatgtacaagacacctttgtttgtatgaggtcaaggcattactagacgaaaaggtatccagtggacgataaattcttcttaaggattttcaagacttagaagacatgttgaaatccttaaccatgactcttgaaaattcagaagtagaacacaaggaacctcacagacaaatctagtcatggtttcaaaggcaaaaaggttgtgcatggtgaagaagttactattagttatttctatggaaaggtgggtcatgagactcataaatgcaaggacttctctacaagggcaacccatcaaagggttcgttcaatgcttaccaacacccatgagctaa

SEQ ID NO: 240757 - DNA, 452 bp, Glycine max
  unsure (1)..(452): unsure at all n locations
agcttgtaagataatcatacaatagtttttgctgtcttgtgaattgattatgcttcaaagtcctataattgactgaggaaacgctttgaaattctgcaaaactaaggaatgggaaatcaatgcaatgggaaagacaaaacgccaactttacagcttatcctcagtgtagttgccttcaagctcaagctgtatcacaaatatntatctcnaaatcattcaagattatgagcgcggacaaatcaaacacgtaaacacactttaacaaaccaaatgcttgctttgctaaaagatcaaaaagactcgatactagtatttaataatgtttgtctttactagcatatatacatagtaggagtaattgattaaagaagtacgcataaaataataatataccgtaagataaatccatcacaattcactgttctttccaaccggttagattattatgtctt

SEQ ID NO: 240758 - DNA, 395 bp, Glycine max
  unsure (1)..(395): unsure at all n locations
taaccccaaccctaaccctatccctatccatcaccctgatgctgaaattctccaccagttcaacgagaacgataccgagaaccttcggtgcgatggaggtggaggttccagttatcttccgatggataacgacgcgataaggtcgtttttccccacaacgacgtcgtcgttggttcacttccagagctacccaccggatttgctttccagaaccagtagccaggacctgcgtctctcgcttcagtctttgcaagacccggttntgcttcaccagaatcaccacaacaacgagcacgtgctttntgctggaaccgggtttgaaaacatggtagcgtggaatagtagtagtaataataataataatactgcttctaatcgatacttgtggcggggtg

SEQ ID NO: 240759 - DNA, 395 bp, Glycine max
  unsure (1)..(395): unsure at all n locations
agcttctatctttntatatgcctaacttatcctatggactccgagcaaacgagcacggacccataggtgaacgcctgattttcttgttttgagaaaaaaaaaaaaaggatgcacagggtttgcttgcctgggcaagcaccccttgcacgaaaagggttaaaaggagagggaaggggttagtttttcacccaaaacttcttcatctcatccaaaaaacgtaagctcactggatccctcggatttccagccttaggtcaccatttctctgcattttttgattccattctgtgctgttattcatccccaacaagagatggctctgaagaagctctccacaaagaggtccaggagggatgcccatggggaaagcttcaatgcctttgtggagttcgaca

SEQ ID NO: 240760 - DNA, 480 bp, Glycine max
  unsure (1)..(480): unsure at all n locations
ggactctgacttgtctgggggagttgtcttcatgatctaacaagttggtataaaattccttgaccagngccatatctatgcaatcatcaggttgcctagtcaaggctttatgccaccgcctcctctcgagctcattccggaactcatcatactatgtcatatacaaatccacattcctctcagggaggatattcctggaatgtacattctgctcgtacctatctgaagcgacctcggaaacaagtctagtcgtatcatagggttcttgaggtcgggatgtggatgatttcctctgtttggaggccatctgcatcaaaagaatcacagganagaaagttagacaggttntattcaagactganagcaganaaataaaacaggataaaggattgggcgcttagcgagacagactcgcttagcgcaccttaagaaaataacagcatatgcttagcgcgcanggcgcgcttaacgcgtcaacat

SEQ ID NO: 240761 - DNA, 608 bp, Glycine max
  unsure (1)..(608): unsure at all n locations
ccacacgctgccgtatctgtcgtaactntcnctctnctacatnangtttttanngctntcctattttctctttttcctagtcnatcgacgncacattgagacttggagtgtctncattcgagatcctagaaagngacctgcagcatgcaagcttgcatntacaacaatatatcttataaataatctatttaatgaatccaaaggtccagaacatataaccccaaagataactttatcacagaggcacaaattcctatgatatgtccgcctactcattaaaattacactactgcctagctttaccaagctccgctcttaaacttattttaagttttctaggcggcccataagccagtttttcatgaatcttatatgttaccctacattttacaccctaaaaactcacttttaaagtcaaatttttaatacaaacaatccacaaatccataacagttagttcaatatcctgacagatgtattccttagacttaattcattcataacgtttgctagaaaaaactataagttgtaacacccaaaaaaatcacttttaattgtacaatctcaagaagaacaacatatcaaacagttccaacccatgtagcacg

SEQ ID NO: 240762 - DNA, 297 bp, Glycine max
  unsure (1)..(297): unsure at all n locations
aactctttntatagcagatttgttggtgctacttcacaaccccttgaactacttcacattgatttatttggtccctctagaactatgagtttaagtggaaattactatgtctcggtaattgtggatgattactcaaggtttacttggaccttgtttataaaaactaaaaatcaagcttttgatgttgttcgcaaacttgccaaggtgatccaaaataaaaaaaaaggtctttacggtgtttcatctagaagtgatcatggagatgaatttaccaatgagtcttttgacaacttctat

SEQ ID NO: 240763 - DNA, 455 bp, Glycine max
  unsure (1)..(455): unsure at all n locations
agcttaaggcctgtttccatattcaaatcaaatcagtgtttcgaaagttgctttttttatcaagtccatgcaaaaacatatgaattcatttgggttttgggaaagtccttcattgtttttcattctcaatgttttcaaaacaattcttttgttgtgttctgattgaaaaataagtttcaaaaatactggttgttgattcttttcaaagcatgttatattcaagaaaaaaaaatttgcttaagtcccaaaaagagttataatctataactatactaatagaatatcaaagcacacgtaagttttttaaaaaattcaaaacaataaataacgtaataaagtactgaaatttaatgcaaagcgataaataaacataaagacaacttcacgaattttcaaagatcatnggtgaggagctcaatctccttgatgatcatggttgaggagctcagtctcct

SEQ ID NO: 240764 - DNA, 308 bp, Glycine max
  unsure (1)..(308): unsure at all n locations
agatgaggaagtgtggaagggtgaacttcctgctcttattcgttgaccacagagtggtacctggagatatgtcgcggaggtcaggagaccttggggatgtcangtggggtgctattgcccaaaaccaagcttgaccaatcccgacccaacccgggcatagttggtcagtgagaacctgtgatgtacctaaacaggcgagctcctggaagtcaacagataaaaggaacagagaccaccacagcagaaggcttgtggtggctggccagctatgaacttgatngatgtgtgagatatggcctctggtaatc

SEQ ID NO: 240765 - DNA, 368 bp, Glycine max
  unsure (1)..(368): unsure at all n locations
agcttgaaatgaggaagtgtataagggtgaaacttcctgctnttattcgttgaccacagagtggtacctggagatatgtcgcgggtatagtcagtcagtgagaacctgtgatgtacctaagcaggcgagctcctggcagtctacagataaatggaacaaagatcacaaagcaaggaggcttgtgtggttgctggccagttgtgaaacttgattgatatatgggatgtggcctctggtaatcgattaccaagggtgggtaatcgattacatggcttacaaagtgaagacaggaagctaagatggcctctggtaatcgattaccaaggggtgtaatcgattatcaggcttgaaaatgggattaagaagct

SEQ ID NO: 240766 - DNA, 481 bp, Glycine max
  unsure (1)..(481): unsure at all n locations
gacactataaaactcaagctgaaggatgcttcaatggaggaaaagaaagagggagataatgatagaggngggagcacgaaattgaaggaataaaagagggagagaagtggaactttgaagtatgtctcacaatattctcattcatcaaagttacaacaagtgttacacatgcttttatttatagactaggtagcttccttgagaagctttcttgagaaaacttccttgagaaacttctttgagaaagctttcttgagaagctagagcttagctgcacacacccctctaataactaagctcacctccttgagaagcttccttgagaagattcctaaagaagctagagcttagctacacacancccctataatagctaagctcacccncatgccaaaatacatganaatatataaaaaaaaagtccctaatacanagactactctaaatgccctgaaatacaaggctaataccctatactact

SEQ ID NO: 240767 - DNA, 449 bp, Glycine max
agcttctatagaggctggatctttgagcttcaatgaggtccttcaatggtgatttctcgccatggagatcagcggaagataaaggagaagaggtgaggggaggcgccatctactagggaataagccatggaagaaggagcttcgccaccaagagagtgccttggataaaaagcttggagtgggtgcttcaatggaggaaaagaaagagagagagagaaagagagaggggggagcacgaaattgaaggaagaaaagagggagagaagttgaactttgaagtttgtctcacaatacgctcattcatgaaagttacaacaagtgttacacatgcttctatttatagactaggtagcttccttgagaagctctcttgagaaaatttccttgagaaacttctttgagaaaaattccttgagaagatagagcttagctacacacacctctctaat

SEQ ID NO: 240768 - DNA, 507 bp, Glycine max
  unsure (1)..(507): unsure at all n locations
cctcgggtaatctactacgcttccagaactttggatgctacctcaagcaaattacactaccacagagaagggagctattagcgatagttttgctcttgagaaatttcgttcatatttacttggtacttgtgttattgtttatattgaccatgcagctctgaagtacctgttgaagaaggctgaatcaaagcctagattgatcagatggatgctttggctccaagagtttgatttggaaatctgtgatcgaagtggtgcacataacctcgtggctgaccacctgagtaggattgagcatgcgtttgaggactcacccattcgggatgtttttctgaatgaccatttgtacattntgtatattatttctaattccttccccactccttggtttgctaatattgtgaattaattggttgcttctattttgccttccttagtatctaaagctcacaatgatanaattaagagtgatgctaagcattataattgggatgaccccctattgtg

SEQ ID NO: 240769 - DNA, 461 bp, Glycine max
  unsure (1)..(461): unsure at all n locations
agctntacaaaagttacgaaaaaaaggtactcttacagtgttttctttataatttgttttttattttctttatctcatcattcattttaatgatttttctattttttgaatctctccttccaagttatattatttgttgtataaaagctttatatcagtatatatagttataaacctttggagatataaggtgagttcaattattaagggaggagggaacggagaaaaatctcatattggaccaattttaacaaaaactaataatactgataattaacatttgtcataaaaaaaacttttgggattcattcgagaaagtgaaaagaaatgaaataaaagtgaatttagataaaagttttgaattaaaatagagagtaaaagtgtgagtctcaccattgttaggtctagatgaccactcatcttatccaccttgacttttgatgtataacaataaatataaa

SEQ ID NO: 240770 - DNA, 438 bp, Glycine max
  unsure (1)..(438): unsure at all n locations
tatttgcctaacaagccaacttacaacagcaagctccaagagactcagcataaggatgcacaggccagagttgagtatgtgaaaatattntatgaccaagtgaaggtgcaaattgcaaagaagaatgaaagctataccaagcaagacaacaagaaaaggaaggaagtggtacttgaacccagtgatgatcctggacatttgagggcaaatgttttccaagaaggagggaatgatgagaatcctgaaactggcaaaatacaggctaaaggcccaagtggagaaggacgaaggcctaagtggagaaggacaaagcccncgagtggagaaggatgaatgcccagaggcagagacattatcaagactattaattgttgctgaaggcccatattaatttgaaggcccataataaatatgttctaattttaattaataatttta

SEQ ID NO: 240771 - DNA, 463 bp, Glycine max
caagcttcacctttggtcctcctcatagttggtgcatgagataacatgctctattttcatctcccactccaagtaggcctccggatcattctttcctttaaatggaggaatgttgagtttaataccatcaattcggttctgtctaggaacaccatcattccctcttctcctcctttcttcttcattatgatctctattctccatttgattcaacctctcatggagcgcatcatctcgttgtttcattaacctctccaaatgttgcatcaaagcttgcatttggaattgcgaaagccccactccatcattaggattagtacctgacatctcaaacaaacaaatcaaatgtaacaagacaattatagttgctgtttgaatacctcacccactcaagtgtatcacacaattatggcttttctctaatgaaacactcttgccttttaccactctaattccccttgag

SEQ ID NO: 240772 - DNA, 324 bp, Glycine max
  unsure (1)..(324): unsure at all n locations
catatgtatgatctaataatctgctattttcaactcagacattctcattctgtgacttggcaactgcaactagaaattnttgagctgaatgtcttttgggagagggaggctttggtagagtatatgccattaggatgcctggaagaccacttgcatggtatttgcatttcaactattcaagttgttttatcccttctttaatttatatcatcttgaagttattattggttatatatgtttgatttgcagatattcctcctggcaagaaacaacttgactggaacactcanatganaatagctgctgggtaantacacatgaagt

SEQ ID NO: 240773 - DNA, 456 bp, Glycine max
agcttcaagaaaaagatggcctcagcaaattccttatttccaaaaggtaattctatcaatagacctccaatctttaatggagagggttaccactactggaaaacccgaatgcaaatttttattgaggcaatagatctaaatatttgggaagccatagaaatagggccttatatacccaccacagtggaaagagtttcaatagatggtagttcatcaagtgaaagcataactatagaaaaacctagagatagatggtctgaagaggatagaaaacgagtacaatacaacttaaaagccaaaaatataataacatctgccctgggaatggatgaatatttcacggtttcaaatcgtaagagtgctaaggaaatgtgggacactcttcgattaacacatgaaggaactacggatgttaaaagatctatgataaatgcactaactcatgagtatgaatta

SEQ ID NO: 240774 - DNA, 497 bp, Glycine max
  unsure (1)..(497): unsure at all n locations
ngagatgaggaagtgtagaagggtgaaacttcctgcntttattcgttgaccacagagtggtacctggagatatgtcgcggnggtcaggagaccttggggacgtcaggtggggtgctattgcccaaaaccaagcttgaccaatcccgacccaacccgagcatagtcggtcagtgagaacctgtgatgtacctaaacaggcgagctcttggaagtcaacagataaaaggaacaaagaccacaaagcaaggaggcttgtggtggctggccagctgtgaaacttgattgatatgtgagatatggtctctggtaatcgattaccaagggtgggtaatcgattacaaggcttaaaaatgaagacaggaggctaagatggtctctggtaatcgattaccaaagggtgtaatcgattaccaggtttgaaaacgaggtcaggaagccatgaaggcttctggtaatcgattactgatcgaggccgtacccgaatcanataaacatta

SEQ ID NO: 240775 - DNA, 462 bp, Glycine max
  unsure (1)..(462): unsure at all n locations
agctngcatccncattnttctttattccttcaagctataaaaataaaagtattattaataccatcaaattaaaccaatatatagttaattaaaatgatcacattaattatatgtcacgccatgttcccaacaatactgcctgataattaaaactaaaataaatacaaaactcatgcttttaactattagtatgattatgactattaaattttttttttgaaagacattatgactattaaaatttaattaaaatgtcagcgtgatattgttatactcagacatgatgaatattcaaaagtagagggaatataattatgatggtgaatgatggcgatgggctttcaaatgtaggtgatgatgtatgggtggtgggtgttatacccatatgatgaggatgattgagttgtgaaagatgtgcatgctgataatgaaatgaacaataatttttttcttaacacaatg

SEQ ID NO: 240776 - DNA, 462 bp, Glycine max
  unsure (1)..(462): unsure at all n locations
cgatgctgaggggtgcttgtttgatcggtcaactcattnttctgagtagtgcgttacacttttattatttgttcatttcaggttcaacactgtagcatatttgcagcaaatatggtggtttgaggtggatggggagttcagcttcccttttcctgctgatatttatactctctcctttaggcttcaccttggacgattttccaagaggcttggtcgacgtgtctgcagttatgaacatacccatggttgggatataaaaccagtgagatttgagttgtcaaccatggatggtcagcaagcatcatctgagtgctacttggatgaaactgaacctgatgatttacacggcaatcacaagcgtggacattgngtagattacaaggtgggtgagtttatcgtcagtggatcagaacctacaactaaagtaagattcttcatgatacagattgattgacacactct

SEQ ID NO: 240777 - DNA, 397 bp, Glycine max
atgctgactcaccataaaccttgacctatggtgataatggcaatccttaccctcggaagcatgcaagaatatatgggatctttccggtcttagaaaagagatggaatatttccaatgaaagaggaaaaaagaaaagaaaggaaattcccaatcgaagagtgggagaaagaaaaagaaaagagggagaattcccttcccaagaatgggagaaagtaaaaagggaaggaagctcctggtcaaagaaaccagagaggtctttggaccagataatatctgaacagtacagaattgtcaccaaatgaacaaaaaggaaggaaaggaaaccacgacctagaatggtcttctccctttaattaccaaccaaaatcccgtgcgctagcgacccttttttctcgcc

SEQ ID NO: 240778 - DNA, 420 bp, Glycine max
atgcacggagaatgtaattatgaagatgagatgcccgaagatataccattttctagttcaccatgcattatgtaccatgttcaattattttgttttgctgttgtgagttcttgttagaaatgggtttatgatcccaacatggttggctcatggtgcctaacacatgcaactaagaatgtaatgtgaagattcacgcattcccttttttgttttgttgtgtagaggaaaacgcaacgatgagctcacatgagaacagatggtatgcaatgttgcagatcaacaagtttgatgaacgcatatgcatgatgatgccatgactcatgcagaatgtgaggctgttatatgataacagacaaatgcaggaacgatatgttcattatgatgccatgaatagatgtgtatgcgatgcatgatatgaat

SEQ ID NO: 240779 - DNA, 344 bp, Glycine max
taatccctaatctctcttccctcgtggcatcatcaaaaggccaaagtgcataagacatacatgactttcttcttaaaatatcagtcgcataacatccatcgataattaattataaaagattctaatctagacatcaaaagagacatgaataagccatggaagaagttaaaccacataatctataaatgttcactcatactacgcaaatattacaagaaatactaaatgttcaaatgtcataataacatatccaaatacactgcttgagatcagagtaaagtaataaaaatatatatcatttagagaagtcactagcatctagcagtcctaattctcttctaata

SEQ ID NO: 240780 - DNA, 253 bp, Glycine max
  unsure (1)..(253): unsure at all n locations
tctctgtaacaatcaagtnagatatcctctttcaaggaatgaggctcatgatgagtaaaaatggacaacttaatataagtatggccagcaagactcttgtaataatatataaatgattgctcacgatgaggacttgtgcattgaggagacaaataagaagaaatagtgccataatagctttcagacaaataaccacaaggttttttatattagtagagaatctgacaggatctgcaatgctctgcaatatgtc

SEQ ID NO: 240781 - DNA, 453 bp, Glycine max
agcttgtataccgctccacccagtgaaacttcagttgactggccccataaaatgacaacgctactagcgaagtcatcacagttattgtgctgtaaatgcaatgtgtgaagcttggttagtaatgaatatctaaacaatttttatttgcaaacttaattggcatctaaaccagagtagcatcaacccagattaagaaactcagggcctttaagattgtgaatcttttagtgcagaacagcattcaaaattcaaatacaagacagaaataaggattcctatatgttccatcaaccaacctgaatttcaaaaaagtagtcaagggatctagctgaattgttaaccatctttgtttagcttggatggcatctcaaaattcaagtagtttgtggtaccaaagagaggtttgtcagacagacatgatgtcttattagaagtcttagcataagttgtcat

SEQ ID NO: 240782 - DNA, 459 bp, Glycine max
  unsure (1)..(459): unsure at all n locations
ggtatatctganagataaatcanaagtaactaataatgcattctgacgtctcctacgtacataaaacgccgtttactttataaatatagcgtcttggtcttggatgtgatgtcatattgagtgctcattgcttcctaattttcttttgagctagttccttttcaaagttgaacctacacatgacgggagtacatagaataataataaaatgttagttaagctaataataaaattcttctttattagtttcttaattgaataaaaataaaataatagatataataaataatttgataaaaagagaaaaaaataaataaaggaacaaaaggcaaacaaactgttgaatcgatatggaaacccttagaagcagcttagcctataaatagaagttagtgaatngaattggttgcatncatantgcaaattgaagttaaaggatgaatatctataataacattc

SEQ ID NO: 240783 - DNA, 443 bp, Glycine max
  unsure (1)..(443): unsure at all n locations
agcttattatattgtgcacgccatggtgcattgttaattaaactacgcacganagctacctatataaaggtgtaatgaaagtccaccatatacttaaagttggcataaaatgtgcttattcagccacctgtatgtgtatttgtagcagaaatgaatcggttaagaaacagaacttaatcaaaattattttgatcagcacctgtttattagttatgcttttgagtgtagcattcatattgatatttgtttttcggaatgatgattgatgtaagtgttcattcagttatttctttgattcttgctttcattctggaccgtgttgctcatcatcacaggtccaaatgcttgataccaatgaatattgttattacgtgttcactgtcattaatgacaattgatatatgctatacaaattgggttcatgatgagtgaaccttatattc

SEQ ID NO: 240784 - DNA, 413 bp, Glycine max
gttgcgattcattctatgtacccgtagtggtccacattgtgtttcgtgcatatttattctcgttgtggttactttgtataccccctgttgacgtgcttaagccattttacttaagtcatttctcgcttaacttaaaaataaaataaatttccaccgaacgttcgaattgtattatgcattaacttcggctaaaataaattacgactgttcggtcgtgccgtaaccacgttggaaatcaaaaagaggtaaaaaataatataataataaaaaaaaacatctttttagtgaaataaagcggaaaatcaatcggacgttgtctctttgggatttctcattcttaatcgaattgattaataactaaagtgaaactaatgctaagatcaactcacctagtcaagctcgtccacaaaaat

SEQ ID NO: 240785 - DNA, 451 bp, Glycine max
  unsure (1)..(451): unsure at all n locations
agctaggctctagaccttgtcattggatcctataactcatgaagtgcttctaggcccttatactctttgaatatctcgagaatgaacaatggaacatctcgagtaattcaaatggtcataacatttcaatcgaatctccgattctagcacgtaatatattgagacacttgaaatcgaacatgaaagctctcggcaaattcaaatggccataacttttgactatatgattgaggcccatgatatttccagacgctcaaaattgaacaacggaagctcttgagaaattcaaatggtcataacttttcacttggatgtccgattcaagcgcataatatatcgagacgcttgaaattgaacacaaaagctctgaccaaattcaaacgaccataactnttcacatggataatcgattgatgcccatgatatatcgagacgctcgacaatgaacaac

SEQ ID NO: 240786 - DNA, 437 bp, Glycine max
  unsure (1)..(437): unsure at all n locations
tctgcataattggagagttctagagagagaaaggttcaagttctagagagtctgagagaanttgttgtgtgaagatccgcagagaccagagctggaagaggaagccatcctgagagcttgagatgagtttgtgagtgattgtgtggtcctagaggtggaagagacatccccactacttgtatgtctgcaatctttcattctcttctctttgttgtaaaggaagctttccagttatggaaagttaaatcctctgttggatcttccttgtaagtacttgatgtaaatatctttctatctatttaatgatgttctgtgtgtttactatgctatcagaacttcattctaccatgcttctgccttgatcacgtagatgcatgtgttgttaggatcattcaacagcggaaattggtttgaatcttataacttgataggacatg

SEQ ID NO: 240787 - DNA, 438 bp, Glycine max
  unsure (1)..(438): unsure at all n locations
agcttcaccaggaagattattgaaatatgctataaagaactaataggaatcataacctatttcataaacccaaacatataagttctcccaaatgtaccctcagtatcttcctccacaaccttctagagctaaataaaataacaattaccctaaacctaattatagaattagagggaaaatactccttaagatgctataaaaataggctgtaaactgaacacactgactggttttaaaatcaaagctacaaaagataattttccagcaagatgcaacacaaatatccttatgacattaaaatgatagctgtctgcaatcaccttaaagaagtctcttcattntgaagatcataagaatgattacattgtgattccttctctttagaatgtaaaggtcttggtgataggccagacaaatgacaatagctgttcatacctg

SEQ ID NO: 240788 - DNA, 436 bp, Glycine max
  unsure (1)..(436): unsure at all n locations
tattgtatntatctatctcccaatgccgttgtaaagattcatcatataaaatgcatgaagcttgaattctagatgagtgcttaaatgcatgggcataaagatatcattctatgtctagcaatgattatcttatattatcttttctttntgttctattagaagttaccctttgtcgagcgtgtaacccctaaaactaatgcatgcacaccttctttaaatcttatttagaagttaccctccgtcgagcacctaactcctaaaagaatgtaaagataaatgcatgggagataaatataaaagacaatcggatagaaaaacacatgttgttgcattgataaataatgaagagtacatcatacatcgctntggctttangcctgccagaccctaactaggngtttaacctctcatggccattganggctntacactggat

SEQ ID NO: 240789 - DNA, 421 bp, Glycine max
agcttcctagacgactactccggatacaaccagatcagaatggatcctctagacgaggagaaaatgacatttatcactgcggatgccaacttttgctatagggtcatgcctttcggcctaaaaaacataggcacaacataccaacgactgatggatcgagtcttcaaacaacagatcagactaaacattgaggtatatatggacgacatggttggcaagtctcacagcataccccaacatgtggtagacctagaagaagtcttcagggaactccgcaaatatgacatgcacctcaaccctaaaaaatgtactttcggggttggcggaggcaagttcctcaacttcatgatcacacaccgagggattgaagccaaacctgacaaatgcactgtcatactggagatgcgcaacccagccaaca

SEQ ID NO: 240790 - DNA, 379 bp, Glycine max
  unsure (1)..(379): unsure at all n locations
gggtcttcatcgtccganaaggttattntagtcatttatattttttaattgattcaaaataatgttttcatctatctaatgttgacgttgttaatagataagataccaatgtctaagaatctaaacaaaatgtaagtttctttctgcttcttcctcctcctactcctagttccttcatggactaatatgagtctcatcaataatgagataactctcattcaaccaatcttctttctctttctcctacatctatcacacaattctntaataaatatacaaactcccatgtgattttttagttctaaagaggtagaagaacaggatggngattgggagaaatgagatataaatattatgatggttgttacaagcttatatt

SEQ ID NO: 240791 - DNA, 443 bp, Glycine max
  unsure (1)..(443): unsure at all n locations
agcttatttgttattgtcaggcggaatttgaaatcccagaggcttctgacagtagcacgaanagaagtttcttcagactgttggcaagagatggaagcagtttaaatcagacctcaagaggaaatgggcccttgcagtcgatcgggatggtgtggacgacactatctgtgagaaatatggcataagcaaggaaaaatgggctcagttttgccagactcgcagagacccttcttgggaagtatgttccttgccatttaagttgtttttcaaaaaacattaacttgttatacttcattctagcaatttgaaagattattgttttatttttgcaggatgtgtgcaaaaaggcacaggccatccagaaacagaacactgcccctcacgttntgtcttgtggnggttatgaatatttggagcagaagttcctggttgagaagaccatg

SEQ ID NO: 240792 - DNA, 459 bp, Glycine max
  unsure (1)..(459): unsure at all n locations
tcactatnggcataagaattacacattaataagaccacttggaatgatggacccatctataaatgataaacaaaanaatgacatgactcaggatgtgggattacatcctttaatatacaaccatgcaaatttcctattggcctttggcagcagctagctgtttcattaggttaagcacttctaatacttttgaagccaactgatctttatacttcttattcgttaacactgattcatcaattgcttccttgtatctacaacggaaagaatccagctttgcttgtgttccacggagtctcattctgagcttagccatctctttgttgttttttaggccaccctgtcaaaattaaggtaaaaacagtttactatgatgactccaagttgagcacagaactcagcatgaggtggaccaataactggtaagccaaacacgtacaatctgaataacagacatgc

SEQ ID NO: 240793 - DNA, 432 bp, Glycine max
  unsure (1)..(432): unsure at all n locations
agcttatgataaacttgagaaggtttgaacctcatattagttgtggatgatcttcatattctattgtagaaagcaatttatttttggcctcatgtctgttcagtatctttgaaattttcctgttagcataattactttaattttctcattagtaaatgatagatttataagccaagattatcatttcaaatatagaatagataattnttctttattgttctcatggcaattcttacactattaaaaaatatactttcaacatcaattttaaaaccgatgttgaaagtaccaatgttaaatgtaatattgttaacatcggttttgaaaaaccgatgttaacataaaaattctaacatcggttttcaaaataaacgatgttatatacaaagaactacaacaaaataagtgtatgcataatgaatattgacatcg

SEQ ID NO: 240794 - DNA, 388 bp, Glycine max
  unsure (1)..(388): unsure at all n locations
tacctgcatttatttatataaatntatttatgttagattatgcatagtggttttagaaccttgccatttatttaatgtatgtacaacacaggacagagaccctgaataattntggtggttccttactccttagttttattagttagttntattgctaattgtctctctgctttggttntggctgtatcttcttttcttggttgataccttattcagatcccattaacacttcactttctctcgtggaaaaantatttggcaaacaaaaaaacatttataaaaaagtatgaactatgtagattagcatctttccaatttcacatctcatgttaaaaaattcagcttttttctcagtcttgactttcgaaagtgtacctttccaatatgt

SEQ ID NO: 240795 - DNA, 115 bp, Glycine max
agcgttggttattctcttgtgctacaaacatattttgccgttttggcggcaataactggccactgagcgaggatgtcatcacggtcctatcacaggcgacgtacgagctcggcgt

SEQ ID NO: 240796 - DNA, 216 bp, Glycine max
gagggagaggatacgcatctgtgcggatattacaccggataagtgcactctcagtcaatgtgcttgatgcccatctggagcgatctcgtccccgctgcaccgtgggcgacactagattctgctttggatctctgcagcaccgattgaggtactctctgtgtccatgtaattttctaacgccacaatttatatacgtatcgtcaccaaggtcggtgt

SEQ ID NO: 240797 - DNA, 431 bp, Glycine max
  unsure (1)..(431): unsure at all n locations
agcttattgtaatggattacacaatntagataatacaatgattgatatttaaagagtctctgctttaatcgattatcaagagatatatcgattacttctctcttaaataatgtttcagaagtgatcaagaacactttaatcgattacattgttcttgaaagttttccagtttttgggagaaacactttaatctattgaaatgataattaatcgattacttctttgaaataatcgattacattntatatttaataaattacaggagtttataaccgttttctctataaattgtccccttgcgttcttacttctaacaacttttgaatgagctagaattatgagctcatattagtaaaacaaagaacgaaagaaaaagtgctttgatacagtgtgcctcacaacttctaatctttgattataaagatcatatt

SEQ ID NO: 240798 - DNA, 498 bp, Glycine max
  unsure (1)..(498): unsure at all n locations
ggtgtagcactacccactgcagaagctgaatatattgcagctgcaagttgttgtgctcaaagtctctgatgaaatcctatcccccaagggcataggatagaagactccaagaagattgggccagagatgcaagagaaggccctaggattctcattagccttatggtagattntgggcccatgggctaagtatgagaccacttatctttgtacatattacattaatgtttcattatttttggcctttgtatttaggactccataatgtaggtagggtaccctagaaatgttggacttttcagcccttgtattttatggcacctagactagttntttgtattaagggtagttntgtaatttcattcgcattaagtgaatatttgatgtgtgtgttgngaaataaatttaatcgaattgggagaagcctaatccaattaaattntagagggggaggtgagcattngcttgctacacnccattgccacatcatatagtcaca

SEQ ID NO: 240799 - DNA, 462 bp, Glycine max
  unsure (1)..(462): unsure at all n locations
agcttcataccctgatattattcataaaaagcttatcaagataaagtatggaggggtcaaaccaattatatcaacaaaataacactcgacagaatctataagaaggtaaacctaatttattatgaagaaaatcctctgtaatgaaattaggtaaactatgccagcatttgaatccaacatttgtaactccaaaagatgccaaaaaacgcatacggctgataacatgaaaacaactaaatcaacattaattnttagataaatggttatttttgtccctaaatatgtacatagagagtgctcacaaattagtcttcctaaaaatttaaattttagttcctggaaggaaaaaaagtacaacaaatttatcccttcgttaattttcgtttgttaccattaacgaaaaagaacatacatgttagattcatggacgaatntgtcagtactttgaaatgaaaatgacta

SEQ ID NO: 240800 - DNA, 502 bp, Glycine max
  unsure (1)..(502): unsure at all n locations
tcatgatgatgaaccaagcaatgttgatgatgccaaaagccctagtgattgattcaagaatgattcaagacttcaagatcaagcatcaagaatccaatccaagattaaagattcaagagaagaaatcaagaagcaacaagtcaagacttcatataggataagtattaaaatattnttttcaaaaaccaaatggcacagttttgttttacaaaaagaattttctcatattttctaagttacgagagtgattactctctggtaatcgattactagttatcagtaatcgattaccagtgaccagtttggttttcaaaatgttttcaaatggtttgcaatgttcgaaaatgattntcaaatagtgtaatcgattacactatattagtaatcgattacaagtgaatctgaacgttggaattcagatccaatcgtgaagagtcacaactgttcataacatgcactggtgtaatcgatacacctttgtggaatcgataccaatgaatag

SEQ ID NO: 240801 - DNA, 380 bp, Glycine max
  unsure (1)..(380): unsure at all n locations
agcttgtggagtataagaagtcacagaattgtgttaggttggaaggtaaccgttttgtgttccctggaggtggcacttcgtttcccgaaggagtcgatgcttatgttaatgctctaaaacgtcttcttcccgtgcctttataatctggggatgtcaaaacaatgcttgatgttggatgtggggtgagtcancttctatatcttattatgctttctccttccttggattctctttctttattttctttcgtcctctcttaattgttcgccctgttatcatttcattcgccttcttttagcttgtacttttacatgttactacaagaggagtttcttgagcaacanagacagagaggcttttcaatcaaatgagagcttatg

SEQ ID NO: 240802 - DNA, 281 bp, Glycine max
tgtcaggtttagcaatcgatcttgtttgtgtgtctataaggataggatcaaatatatatatatattaagagagagagagagagacaggagggatcaagttactccaagagtaactcttgtactatatatttataaatgttcaatctatttaaaactttacatgcatcaagataatatcacataacaaattcgaattatataataagttattaaggggagtaagtttgcaagacttaactctatggtgagtgaatttcccatatgtgtatgtcatcctaaac

SEQ ID NO: 240803 - DNA, 448 bp, Glycine max
  unsure (1)..(448): unsure at all n locations
agcttgtagccattataagaggatgatcatgttattggaagtatgactgataatgttagtaagtttgtcatattgattgtgaaggaatggattgaccgtatcccggttagagtgtgatcgttaaattttaagagaaacgactattatttattactgatttttgcatgaatctctgaagtatgaattgaatgcatgaaattgaggatgatgaatgccatgtttgattgtgatagccacttanccaaaaagttgaccacatgcttgaatgatttatcctttgcacccagtttgagctgaatgaattattgattgattgaaccctgtgcctatacaatgttatctcctgctaccttgacgtangttgtaggagagcatcatcacaggaagcgtggttcagagcaaatctgtcccaaattcgcgggagtaattatcaaggtaaatttattcc

SEQ ID NO: 240804 - DNA, 339 bp, Glycine max
gagctcacgtactcccacgtagcccttatactcgtttctctaacaccgggtcccatcaatcctgccaagcttccacaacattcaagtaattcaacattctatcatcacaaactaacacagccaagaaaatagggcagaggcagaaaactcttgcccaaacacaaaccaatatcacagcttttcacattcaaaaaccccagtaacattctctctgttccaattctttaaccggtggatcgactcgaacatattactgggagtctctagtacataagtctacattatgaccgctgggatctgctagaaacgtctagagcataatctgtactactcttttca

SEQ ID NO: 240805 - DNA, 430 bp, Glycine max
  unsure (1)..(430): unsure at all n locations
agcttgtgaacaaggaagacatagatgatgtgataagagaggtgcaaatcatgaaccatctctcgggtcaatctaacatcgtggaacttaagggtgcctatgaggataaacaatcggtgcatttggtcatggaactttgtgcgggtggtgaactttttgatcgtatcattgctaagggacattacactgaacgcgccgcggcttcattgctgagaaccataatgcaaattattcacactttccattccatgggtgtcattcatagagatcttaagcctgagaatttcctcatgttgaataaggatgaaaattcacccgtcaaggtcacagattttggtctatccgtctttttcaaagaaggtttcccttaattctatttcatatattctctattattntttctctcttccacatctttttttttttcaat

SEQ ID NO: 240806 - DNA, 464 bp, Glycine max
  unsure (1)..(464): unsure at all n locations
tgctngagaagcttctatggaggttggatctttgagcttcaatgatgtccttcaacggngattntctaccatggagatgcagcggaagataaaggagaagaggtgagaggaggcaccacccactagggaataagccatggaagaaagagcttcaccaccaagagagtgtcttggataagaagcttagagaggaagcttcaattgagaaaaagagagagagagagggggaggggagcacgcaattgaaggaggaaaagagggagagacattgaactttgaagtgtgtctcataagactctcattcatcacagttacaacaagtgttacacatgcttctatttatagcctaggtagcttccttgagaaacttccttgagaagtttccttgagaagcttccttgagaagtttccttgagaagctagagcttagctacacacantcctcttataactaagttcacctc

SEQ ID NO: 240807 - DNA, 452 bp, Glycine max
  unsure (1)..(452): unsure at all n locations
agcttgttataaatataaccaattatcggtccccttagagacttagagaagatatctgccaacttatcattggagaaattgcggtacatttgtttcatattgaggttacgagaattttgattgacaatatcctttatgacttttgcataatgttctattctagtttggcctataaatccttgagcttgacttgattttattcattctttcttccatagactactttcaggttcttatctcttcattttttatttggagtttctctcattctctatcaatgatgtgagcgtgtattgatatctttttctatcttattgattgatattttattggacgtttatgcttatcattttctacatctacaacttcatatttcatcaataaaataagtgttttaatgcatgatgcanattccaaatcacagtgtgctgtattctaacattntaatatat

SEQ ID NO: 240808 - DNA, 389 bp, Glycine max
  unsure (1)..(389): unsure at all n locations
tgcgtagcccaccatctcttcatagtagagtatcgataatgtgtctaccatcacgatcatcgtctccctttccatcattgngggtaccacctgngccgccagatccctccaccttttgggcgtgttctttgaaagatccgtccccctttgtgcaaatgttctgtagttgcatcctatccggaaccatatcaaaattgtactgatactgcctaacaaaggcaaccattacgtccttccaagaatggactcgggaagattccaagttagtgtaccaggtaacagctaccccagtaagactttcttggaaggaatgtatcagcaattcctcatcttttgcgtatttccgcatcttctgacaatatatctttagatgggtcttgagacaagta

SEQ ID NO: 240809 - DNA, 452 bp, Glycine max
  unsure (1)..(452): unsure at all n locations
agcttgccaagaaatatcatgttcttctagcttctgaagcagtcatcaagcaaattcctcgtcttttggggcctggtttaaataaggcaggcaagatgattgccttgctatttgctcttgattggttctgcgtaaaatatgtgagttctcaaaccaaataatgtcaataagagaaataccgcagaagctataaactgtagcttctgttgtgacacacgcccgattgggtaaaacaatcaaatagaacagtttcagtgtttcctgtttgtgttcttagcttggttccagaactttccttcacttatcttgaagaaacggtgtttcttttggcttctttgagtgtcttttatgatatgcattgtgatttacggagaacttattgatcacattctctgtatttatatccctgcaactntgtcaagagtagacgaatattgcactgatgataatac

SEQ ID NO: 240810 - DNA, 348 bp, Glycine max
  unsure (1)..(348): unsure at all n locations
tcttaaattgtggttaatgtttcaacttacacatccaatttctagagcacatgtcatacgataactggtgcgttgaattctctcatgcataatcgtaaaaattggataaatcagtcgattatattgagaactaatgacttaatacacttcaataattggatcagttaaacaagtaacccatattaacttgatagattntaataagatttataacttggtcgattctgacaacccgagttacgttgaacacgttacctttctaaatacaaaaaataacggaatgaattcattntgagattgaggcagaacaatcaaactaagtaaaatgtgcgtatattaccctaccct

SEQ ID NO: 240811 - DNA, 407 bp, Glycine max
  unsure (1)..(407): unsure at all n locations
agctngctaacccatggaagctcctataatctcccacactntntagggtgggccattcttggatggccttgattttctcaaggtccacttggaccccatttctaccaactacaaatcctaagaaaactatattatctacacaagaggtacacttctctatatttgcatagagggtgtttttcctaaggactgaaagaacttgcctgagatgtcctaagtgatcatctaggctcctactgtacactaaaatatcatcaaaataaacaactacaaatctacctaggaaatcccttaagacatgatgcataagcctcataaaggtgcttggtgcattagtgagcccaaaaggcatcactagccattcatacaaaccaaacttggtcctgaaaagcggtntccactcatca

SEQ ID NO: 240812 - DNA, 364 bp, Glycine max
  unsure (1)..(364): unsure at all n locations
tcatggtgaatcaaaggtgtnttgatgataacaatgatgatatcttaagatgatgacaaaggtgatgacaaanagctcacagatcaatcaaagaacaactcacgagaatcaagaacaattcaagggttcaagataagaatcaagaagaattcaagactcaagaagaaagtttagagtcacgaatcaagattcaaggttcaagatctcaagaatcacgatcaagattaaagactcaagattcaagaatcaagagaaggcttaatcaagataagtatganaagtttttctcacaaattgagtagcacatgatttttctcataacatgtttaccagagagtttttactctctggtaatctgatacca

SEQ ID NO: 240813 - DNA, 343 bp, Glycine max
agcttctgttgttcaattttgagcgtctcgatatactataagcctgaattggacatccgtgtgaaaagttatgaccatttgaatttctgcagagcttccgttgatcaattttgagcatctcgatatattataagcctgaatcggaccttattgtgaaaagctatgaccatttgaatttctcaacaacttccgctgttgattttcgagcgtgtctatatgagaatcgcctgaatcagacatccgaggtaaaagttatgaccatataaatttctcaagagcttccgctgttcaattacaagcgtgtcgatatgcgatgcgtatgaattggagatccgtgctgaaa

SEQ ID NO: 240814 - DNA, 559 bp, Glycine max
  unsure (1)..(559): unsure at all n locations
ggaaccctaatttgagatctctgcgagctncngagactatataatactcncgctagcctgatagacgtgcagtaaagacaacgcggacgaatgatctcctttcgacccggagtacgacagtctccgctttatgagcgacgtcaccaacatcgcttccaatgcatcaacggatggtcgattatcctggagccacgcgtacatctcagggactaccagtgtactgatttccacgacgatatatggcgccagccgtggtcaccactgcgtactcccatggccgagcatgatccataaataggacctgagttttatgccaatgcttcggcaacagatgagggcgtgcgtgacatgacatcctgggttaagggtcagagcatcccgatctatgccgacgctattgggcagcttctgagatatccgttggtgttataagacggccacgagcgctagtatggacagatgaggaacctgtcttatggcgtcaactaagagggcatcatccagatggtatgtataccagngcacgattatgcccgactgctgcagaaacngatcattn

SEQ ID NO: 240815 - DNA, 121 bp, Glycine max
  unsure (1)..(121): unsure at all n locations
agctntgttctttcataaaatgagaagttctgaacttatcacgttatctaaaaaaccttggggtggatccaagagctccaatcattcatttgcatattcatgttttggtggcatactcacc

SEQ ID NO: 240816 - DNA, 427 bp, Glycine max
  unsure (1)..(427): unsure at all n locations
tgatggtgtcgagaagaaatcacatgtatgtcatcatcaatatagtggagaatgtgaatgtatgtatacatgatnttgatgatgtcaaagaagaatctaacaaggctgcttcaaatgataagcatttgcttcaagaataattcaagattgcttcaacaaacaaagccttgtttcaagattcactaaagaccaagccttgccttanaacaaagtgctttcaagacatgcaaggctctggtaatcgattaccaggaagtgtaatcgattactagaagacagggttgagaaatagctgttgaaaaatgttttgaatttgaattttcaacatgtaatcgattaccatatgtctgtaatcgattaccagcaacggaactttggaaattcanattcaagtcataacccttcagatataactgtgtaatcgata

SEQ ID NO: 240817 - DNA, 1256 bp, Glycine max
  unsure (1)..(1256): unsure at all n locations
gccactcaccaacacatataccttaaattactaataaaagaccttncactctaaacacaccttcatacatacaccttcatactatatattctatantcctcttctttcttagcccctcgcagcagagttnttatccattctcttattcccaccttataaaattaataacaacacaatcttatcatatnactaatcacactcaatcgcaccacacntatcgacgcatancanatatcnntctncattgttactaatacacatcacttcctacactattaaaaaaccgcacgcaaacagggaaggcaccaacaatataccatatatcatctcaccaaacttaacacactataaatataatattctcatcttcacctcacacacacaactacatcacaccactaataaactcattattcctacatcatcaacacacatatcatccacatcacatataacacacaaccataatcataaacccacactaacataatttactaatagcaactctatcactcatcacagataacaccactaaccgaatgatcataaaaccaacaaactccaaatcttacatacccagtctagtataacaantaatactactcaaacacactacgacgaacaccacaatctataaaaccaatactacaactccaaacacaataacaccacacactcaaacaacacacacaacatcacattaaacaatacttctcaacataaaangccaaaatactcatacatattacgataacatcaacactacaaaatacaccatctcgataacttcctccacatccccacaccaatacaacatacaacctctacacacacatatacataacaaaaaatacaacacccctcacccaatacaccacacaaatattaccacaatctacccacaacaaaaccatccacccaccattcacacttaatccaaaactataaaccaacaccacttacatatctccacacatattaacacaaacacatactaataaacacaacttcacaactctatcacaacacatcaacaatcaaacaaaagtatagtacccaccactatcacttaaactataattccataaccaaaactaacactttaaacaatcataggaatacaactcactaactccacaaccgcgaattatacatcgcacactactatccataacttatacaacaagtaaaccctactctaattaaatcactactgtaaactatattaccaacaaaatacattaacttcccaatcg

SEQ ID NO: 240818 - DNA, 654 bp, Glycine max
tcaaaattgataatggacaagaaagttctcagaaattttactctaccaactacatcagggttgtccaagaatgaagaattgaatttggaaaatgacaaatgacgagtcttggtgtcgatctttgtttctttcccaagttcttctgatctaaagtaaaaatctccaccgagtgacgtcgctagatcatgcatgaggtcatgcatcacaaaccatttccgatcatgcttgaggtcaggcatcaaaaaccatttccgatcagaccaactacttctatttgaacgttggaaaaatgatctcgaaaccaaatcatcaaaatactcatgaccaacctcttctaaagtcctaccatttcttggtttcttcaaaagatcttcggccatccacaacaagattaattcatttttttcaaactcgtaatcttgaggatacaaggaacaataaacaaagcacctttttaaatgtggagggaggtaatgataactaagtctcagtgctggaataactttacactcactttcagaaagttcccaaatgtcactattcagaatattattccaatccacgatgtcatgctttcttctcaacatgcctccaagcgactctgctgctaaaggcagtccatcgcactttttaacaatcttctttccatttttt

SEQ ID NO: 240819 - DNA, 687 bp, Glycine max
tctcaaataagaaactgggtacatctacaatcaaagttcctactcacttttttctggaacaggtagtcatgaggataaactgtcagtgatcgagaatcttcaaaatgaagcttgacaactggaaatccacgatcaacactgcacgaatacaatggtcaacaaactaagggctgaatatgctagacacttaaagtgaacttgctgtcttcatgaagtgatgaaatttaattatcaaaaagtaaaatgcattccaattaccaaaacatcatttgcacaattcattcccaattactattttaaaagaaaaccatttgtaacagatgattcttttgaaatataaattatttgtaatgtagcaacaaagaactttatatatctctattctacctaaaatgatcaaacatgagattctttgtagataaccatccagcctactcaacagctccctttagaaacaaagaaaaaggacaaagtaatacaaaagtccaaaactgaaaattcaaaggaccaagttaggtgattcacataactttttttgtttcacaaagtcctaatagcacccaatacatccacttcatcaagaagctaatcagtaattgtaaagtcaccaagtaaatatatgtcaaaactccatccttgctcaagtacacaaattttattacacaggctctgatcctacttactact

SEQ ID NO: 240820 - DNA, 548 bp, Glycine max
tgcttcaatcgttgccttctcctttgattgcttgtgcattaaggctcttttgttgttcactttgtcataaaattctgctttattttcctctataattttttcctgcacagatacgagagcgttattaaaaagttgaatgcaatatattcttaagtgcttgtatctttatgtgaacctacttaactcaatatagtgacacgagtgaagataagaagatttgttggataaaaaatctatgtttattttggtgtcaacagaagcatgtaatcatgtaaatatagttattcgatgtaacacgggacaacataaattcttactttgttttggcttatcttgattatattgtttagaattagatcttcaactaaaaaaaatagacctttaaaaatgatgtgcagtgccaaacatgcatcatgatatcatgaatatagacaaaacaatgtcattttgtcaaccaataactgaacaacaagttctttctatggacaaacattagttggtaattggtaggttttattagttttacctccaaatttaagtcttagctt

SEQ ID NO: 240821 - DNA, 455 bp, Glycine max
ttcaggctggagggcctatcttattgaggccacttcctattaatgagaggcattcccattcagaaggcatgaactgataaaccaacaagttacaatttcaagaatcaagggagataaacattcgagttttaagatgaaattatcggaggaaggcacttggaatctacaagttaatgctcaccttatttgtgatgagatgtcttacaacgattatgaacgtttctagagcagtctttggagctttgggctaagatataagaaatcttggtggctgaatgaaagtattaaggacacggtaagaaacaaaaaatgctaacaaatggccaatgcatgaaatgcgaaaaatgagatgagttatgaatgaagcatgatatcaacattttaaagagttttacttacatcttgaattccatgtgtaaccatgcccaaaataaagaatgactcatgggagattt

SEQ ID NO: 240822 - DNA, 685 bp, Glycine max
tcgcctttgaggcttgtacgtcatcactttcttccgaagctttaaccttattgtctctcacagtctttagatttgggagccaatccaatccttgtgtccggactctcagccacttatgatagccgccgatgatcccattactgcttcccctaagctctctgtcctctattgacgccgcatccacaagccttgcggactccttggagtaccctagcattgtggtcactgaaacctcgcgcgatgaaaggcgtgatgctttcgtctgatggtactcctgtcatgggacatccttcgcatgaagatagaatcctgattctctcttgattctagcgagggaaccatttaacagacgcccctccatgctagccaagagttggtcccaattcgtctttcttttttcgacgcacgagcggtgaccttgtagcggatagaccggcctaccttcttggagaaaaaggtgtgaaactaaccacacatagagagctggagtacagcgaacaaatcctgccttgctttctttacatcttcggtcgaaggtgtcatataagtcgggtagcatagcgacaaccggactttccttgtggttatgataagcgagaaaaacgtcaatcgcttccagtccaccaacccatacacatttggaaagatgactttttgtaatcaacagtgtgagaattctatgaat

SEQ ID NO: 240823 - DNA, 696 bp, Glycine max
  unsure (1)..(696): unsure at all n locations
ttcacaatatccaaaaaattcaattccatttgtcatgaaactaccctaaatcaatgaaacagagtggaggcagaaaactctacacaaaactcattcaaattccacagtttttcctactcacatgccccagtaacattctcttcgttctgattcattaaccattggatcgccttgagaattttactagaggttcctaatacagaaatctaaattttgaccattgggatctgctagaaaatatctagaacacgagatgtactacctttcccgtgactagtgctgcacaaccatttttttgcacatttggtcaagtttgctgcacaatttgacagcttttgctgcacaatttggtagatttcgaaatccaacttgcctacatccaattttactcaaattggatcctacaagtcctaaatcatgtataaatcatactcaagccaaaaacaaacttcaaatcaaggtaaatcaaattctaggtatccaaaacccatcaatttagtgaattttcaaggtttgaaaggtgaaaatgagaattgggtaatttgggggtaaactctcatcttcatcaagtctataacattgatttagacttgctcaaactggttttaatgtgaaaactccacctatttcaaatttgacctcttaacacccaatttatcctagaaatggctctnnttctttacatttgtcacttca

SEQ ID NO: 240824 - DNA, 655 bp, Glycine max
  unsure (1)..(655): unsure at all n locations
tcttatcctaggctcatcttggtggtgaagctccttcttccatggcttattccctagtggatagtgccttctctcacctcttctcctttgtcttctgctccatctccatggtggaaaatcaccattaaaggacctcactgaagcttgaagatccagcctccatagaagccccacaagcaagcttccatcaagtggtaatcaaagcacaagagcttcaagtaggtgctccttaaacctccattaattgttttcgctctaccttctcttccattgttgattcttcatttttctccatgtatctcctcacatgtcttgtgataaatattgttaacatgattctttagagtttccaccgattaaacttggtatagaagctagatttgattttctatggttcaaatttcttgttcttgttcttgaaccatgaattgtgtagagtttaggtccctttgatttaagtcttgctattttttgtggctgaaacctataccataaaattcttaccaaaatattaaagtagaaaaaaacctcaaaaatatagagtgacttgttcacctattgtatgtttatcatcgaagtcatgtntagtcatgaaacttgttacataacgattcttatgatgtgctgaattttattattctcgtttctttgtcta

SEQ ID NO: 240825 - DNA, 577 bp, Glycine max
taccttatcctccagcgtgattgtaagttttgaatctggccaatcatttattttgtaaccattttctggactatgccttgtgctgctgctcactcaattaattgtactcaggttactactgatctagcaaaatgtctgcaaagtttttcaagactgcaatcggttaaacttgatagttgtttgggtacaaagtcaggattaaaagccatcggtaatttgggtgcctcactcaaagaactgaacttaagtaaatgtgttggagtcactgatgagaatctcccgttccttgtgcaaccacacaaagatctagagaagttagacataacatgctgtcacacgataacacatgcatccatatccagcctaacaaattcatgtttaaagcttacttcccttataatggagtcttgtaccttggtcagcagagaaggtttcttgtttattggacggtgtcaacttgtggaagaattagatgtcacagatactgaaattgatgatcaacgttgcatttctaaccttacatttacattaaaaaaaagttacctacagtgcatgaattatgcttcttgacttgtgt

SEQ ID NO: 240826 - DNA, 593 bp, Glycine max
ttggagtttccaagtgccaattcgtcttcttctttagtccagtcttcttctggcttcaattcatcagtgggctttccttctgtgtccagcatcttgggatgttcccagcctttgatgacagctttccaggttctgctatccagtgatttgagaaaggccaccatccttgctttccagtattcatagttggtcccatccagaattggtggtctgttcactggtcctccttctttctccatgttcatcagaatttatctccctagatctcactcagtgatttcgagtgtctgctctgataccaattgaaattctgatactggggacagatgtcgtacaagatgtcacgacatcacacttcagaacatgcagattgtgtttgactgtatgaacagattaaacaagtaaataacacaagagaattgttgacccagttcggtgcaacctcacctacatctgggggctaccaagccagggaggaaatccactaaaatagtgttagttcaaggtctaacagccactgtttacaaccttctcacctaaccactacccgtgcgatctctacctaagagccactcttaaatatgagaaacccc

SEQ ID NO: 240827 - DNA, 555 bp, Glycine max
tgttgggttcaacttcaattaagcgctcggggcatcctatggactgagcgaaaaggctcaggtcatcaaatactacacatcttttaaagcacaaagcgaggatcggaacctcaaccctacgttcttttgaaagactacgatgagaaaattacagaggacatgaatccctgggggaaaccaagaagaacacacaaaaataaaaacaagcaacgacttccttaattgccccagatcttaagcgtagtatcgcttgacaacgtcggagttcacgggtgagggtagctcctcgacatccatgttggcgagcaccagggtccctccggagaaatccctttttacaacgaaaggcccttcgtagttcggggcccactttcctctattgtctttcagagcttgggagacttttttcaacaccaagtccccttcactgaacctgcgcgagcgtaccttcttgtcaaaagcattcttcactcgtttctgatataaacgcctgtggctcatggcggccaaatgcttgccttctatgagattaagctgatcgaaacgtgcctgagc

SEQ ID NO: 240828 - DNA, 647 bp, Glycine max
  unsure (1)..(647): unsure at all n locations
taacttaacataattcacatcattttaccaatcattgtgtaacatcacttgtcctaaggatttaatcacaaaatcatattctataccttcacattaatcacatgttcataacaaaacatctcaagtacaacacaacatctctcacacacaattcattacccacaatcacgtagcaagtcacaatgatcattacacagacgttatgcaacatatatactaagactcaatcctatattgaatgtggtatcttgtcagtgaaaaataacactagggcacctaggagtacataataaaatacaccacacaatgggtaagcaggtcactcttattaaaagaaatcataaggtgattaattagggttattctgtttagtgtgaatgctctaaccatatgagatcaacatagatttaaaggagcactcaaaccgagtgtatttaccctcaaggcctagactctgagaatccattanggtctcatttttcttattcaagtccaatccctaaaacttttacatgcagccactgcacatgaattatacaatacctatgacttcacacttattttcaaacgtanttaatacaatacgttacaatttaacacctcaggttcctaactttgaatcctacactttccttttaacaccttat

SEQ ID NO: 240829 - DNA, 564 bp, Glycine max
tctgcttatgtggcagggcgggctaccttcactttcttgtctccaacgttatctttgaccactgctcttccttcccgcgatgcttcttttcatgtcttcctgagtgggcttatagcctaaaccatacttcccacgatttccttgggcatttatcaggccagttatgccgtcgttgattttgcctaaacccattccgggttcataaccgttccccaacataactcgggccatcattactactgcatcggacagacaaggctgccaagagagggagtccacggaggaaatgctgaccacctcaaaagactggaaaacggtttctaacgattcttctgcggcttccacataaggcatagaggatgggtagctcaccaagatgtcttcctcgcctgacacgatgaccaagcgcccctccactacgaaattcaacttttggtggagtgtagaaagcacaacttccactgagtggatccacgggcgccccaacagacaactgttaggggggttaatatccattatttggaaggtgacttgacaggtgtgagggcctatttgtactgggag

SEQ ID NO: 240830 - DNA, 677 bp, Glycine max
tgtccagaaaaacttgaatttgaaagctttatcatttcagtctcttaccatgtaaatggatcatttttaaggtccaacgccttaaaatgatcacccctcaagtaaaaaagaatcgcttgattcacgcataagaaagaactacgtaggtctgatttcctctccaaaggagggtacgtaggagcaaaagcctcgcttttgtcgacctcaaaaaataaaaagaaataaagttaaggtaacacgatttccacaattctaaaaaataggctgttgtccttcgagacaaacgtgagaggtgctaataccttcctcaagcgtgaatacaactcccgaacttagaattttctttttgaccggtttccttctgttttcccgacgttttccacaaataaacgttggtggcgacttcgcgcatatttcctcctttgggaagcgcacctgtgagcctcgccctcgctcgcccgcgaagggcacgttgcgacaggtggcgactcccaaagagaatggatgacgggtgtgtgccccccaacaacatcagaagagccccactagtgggcgccggcaaaaagaatgagatgcccactccgtcaccaccgtccaacatggatgaacgcccccttaaatatccaaagcttataccagccaatcccccaattttttaattcgagccgggaacttcc

SEQ ID NO: 240831 - DNA, 539 bp, Glycine max
tgcccagagaaggagtccatggaggaaatgcttaccacctcaaaagacttttagcggtttctaatgactcctctgcggcttccacataatgcatagaggatgggaagctcaccaagatgtcttcctcgcctgatacgatgaccagatgcccttccactatgaatttcaacttttggtggagtgttgagggaacaactcctaatgagtggatccacgggcgccccaacagacagctgtagggagggttaatatccattatttggaaagtaacttgacaggtgtgagggcctatctgtactgggagatcgatctctcccctaacctctcggcgggtgccgtcgaaggcacgaaccaccgttgaactcggctttaagtgggaggcattgaatggtaatttctccaaagtgctcttaggcatcacgtttaaactggaaccattatcgatgagcactttggctacgatatggtgcatacacttgactgatacgtgcaaagctttattatgccctctcccctcggcggggatttcttcttccgcg

SEQ ID NO: 240832 - DNA, 473 bp, Glycine max
ctgaaattaatccttgatcttgaacctgttgactcaatcttgaaatcattctttgggatttttgtcatcatctttgacatcatcaaaactaattgaatcaacttgattcatcatcatgaagcttgcttctacaatgtacatcactggtcgcaactccacaggctcgtcaaacccaaggcccgcccttggtgaatctcacaagttggttttccaaatgcaaaacctaaggtacacccttggagagtcctatagggtcacatattacatctccagtatgtgccgctccacgagtgagacatatgcaagagcaccacattacgtctcttagacgtaccattccatgagtgacatgtatgtgagagctcaacatttagtctccaacatgtgccactccatgattgacacatatgtcagagcacaccattacgtctccactatgggccacttcacgagtgacacctttgcaataacac

SEQ ID NO: 240833 - DNA, 604 bp, Glycine max
tgggctcttgcctcactcatcgcctttttggtttcatttctagctatcttatacttatcccaagtttcagaatttctacacctagaccactccttgaaacactccttttttactctaactttgctctgaacattttcattccaccaccacgattctttacccctaggtccaaaacctctagattcacccaacgtctctttagccactttaataatctcttgggacatcttgttccacatatcatttgcacttccttgtgattgtccacaccaaccctcccatatcttttgttggaagattccttgtttctcacccttcaagtgccaccatttgatccttggtgctaccataggacttcttctctttgccctatctctaattcttacatccataaccaacactctatgttgggtagtcaagctctctcccgggataactttacagttcaagcaatacttcctatcagacttcctgataaggaagaaatctatctgagaacatgtccctccacttttgtcagtgataagatgttcctctcttttcttacaccatgtattggctatagaaagatccaaagccttcggaaacttcaagatggatttac

SEQ ID NO: 240834 - DNA, 482 bp, Glycine max
  unsure (1)..(482): unsure at all n locations
actatggaaggctcaagcttctcttagtgctcgntaaagcctaacattgatacaacttccacccaatttttatgtctcacactattttgtatatgacggactagtcaattactggacgatagtttgtattactagacaacagaaactcaaaactcttagtttatattgcttcatctttaattttgaaaagtaatctaagtttctatattacactatcctacgcccttttattgtgatctattgcttgatacgctcagagtcggttacatcctaccccttacaacattggaaattagtcactcacggagatgaacaagtcgaaattacacattgaaaggtttgaaatgtgtaccacccaaagctttgagtgttaggcatataccggaaggagaatccttaatcggaccatgttatgatatgcgagctcgaattgctatgattggattcctctcctgccatgtcatcgatttgtctcttgctcg

SEQ ID NO: 240835 - DNA, 675 bp, Glycine max
tgctcggagccatttcctgcgaaggcaaacatttggaaagttagttatttttatgaatgctactcttaaaacaaaaatggcgtacaacctcctccaataaatacaaacatcaatgtaaatttagagcaagcttatgcgcatacttctttacgaacgttcactagaacaagacattcttataactaagaaaaatgcacccatatacaatcaaggcaccttcgttacctaaattatttatatgtacttccaaggtgtatttgttacctacatctcatgaacttccttggctaaattttacatacatgcgtactcaaagcatttggggtaccaaaaattgcacatgtgcacattccggtatttctaatacttatgcatatacaaactctgtgatgaatcttggctatctacacaataaggtgatacatttcatgctctactcaagtgtttttgctacctaaagccgcatgcaaattcaagtacattttcttatggtgactaaaaatggtttcaaattaacaagcattttttgtaaagtatttcctttacaaaacatgccacatatttatatttttttgaaagacattttgactaccaaaaaatacattgtcctacattcaagtctttgctaccacccccaactgtaaattgcccaagatttaactacctattctaaac

SEQ ID NO: 240836 - DNA, 557 bp, Glycine max
tttgaatcctagaaaaaccatgatttgttggcagcctaacaccattacattcttagaaagtcctttggattcattttgtgtgttcattgttgtatgatacgagatgaaatacaaaggttgggacttgtgttagttgtttatgatggaatgagcctaaacacttgagcttgagtgaaacaatgactgtgaggttttggttgatgatccttccttgatttctgctatccttactagcttatttcagttgtggctctaatatgtatgttcctatccttgaaaagatgcatgtttgtgaaaaacaattgattgaagcattccatgacattcagttcatatggttgaatttctctgtgaagcaaacaccattttgagtgatcactgtagtttgtcacttgaggacaagtgaactgttccttctttgcttgaggacaagcaaaactgttaatttgggggagtgtgttagtcggcttatacgatacactttttgtttgtaaacatttttttaaacttgttttattaccccggattatggttttttctgtaattatattttttta

SEQ ID NO: 240837 - DNA, 982 bp, Glycine max
  unsure (1)..(982): unsure at all n locations
taaattggacttaatgtccaactcgttgacgaacgatctgaaatacacttctgtttgaacncaagtgacatatacttactcgatcacgctaatggtcttggagattaacaataactccttcctcatataagccatgcttacttcatatgtagtagacattggtcgaggagctcggacgagtcttaaaaagacgtctttgcacgcgacggcggttgaataatatacatgagaggcgtgtctcttaatggagggatgcgtgcagtggcatcgcgatgggctagtaatcaatgggcgcatgcaatcggccatgttcaatcgaatgtgccagatgccacttggtgttggacccatgtctcaactcaggcaccttataattggtagagaaggtctcaacaagcagacggctagtgctgattgacacacgccgcacataaaatctctaacatgttgctctcgcaggaggcgccacctttggatgggtctataccttcaattcctgcggtattgaggcacttgcctcgaaaggttctggtgttgcaagtaacaaaaacactaccagattagacgccctagtcacagcacggttgtccaacatacgaaaagcgcctttacataggcgtgctgttggactgatgcgattcacgccacggaaatccctcggttaaagactcgctattctaaatcggaggttaaactgactctgcatcgcgaagctcaacgcgtgacaggccgtcactctctaagtatagcccgactccctgatggcgatggctgtcctctctctgacgcatcacggtcattcttctaccgtcgccgacattaaatcttcggtgatcctcgtacatgagccagctagtcgtgtcacgcacatgattcgtggcggaatgagctaacgatcatctcaaattcaaccgtgtttatcattagacggcggagttcctagtcccagtgcatgagctagtaactcctcgcgaacgcttcc

SEQ ID NO: 240838 - DNA, 618 bp, Glycine max
tggaagaaacaagatacaaattatcttgcacaaaatattcttgcattctttcttgtaaagctttctgtaaatcactgtatagatactaagctctcaaaataccttgtaaaccttgagagaaaagactagagtgttgagtgatttatctatctataagatgatcacatattagtcattgcgcaatcttccaacaaattttgttgatttttttagagccagcagtggctaggtaggataaagaatattgggctaaagttaagtttgggtagagcttgcaagtgcaagagccagaagtggtagtgaaaaatacttgtaactttgtgataagtcagtagaaacttggtgggttggcaagaaatggacgtagtccatcattgatgaagcatctgtcacaatgccaccatgctttgctggagaagactacccttactggaaagacaaaatggagaagtcatcaagtccacctagtttagaatctggcttatcatgaccaatgggatatccctattcccagacctgaagctgaatagacaaatgacgatctatccattatggagcttaacacacaagccatatgtactttgacatgtgccctaccaaagaatgagtgcaacaaga

SEQ ID NO: 240839 - DNA, 636 bp, Glycine max
tgcatgtcatcaagtaataatccccggacgaaattagggtatgacagttttccctctttacttgcctctcatcggagataagaggaaagcaaagataggacactgatttcgtccgtcctgccgtttccgtgatgacgactctcgtctctattccttcttttttcttctgcataaaacaaaatacaaacaacaacaagaacaacgaatataatatacatatacacatatacacatatccggcgaaggaaccgatccagaaaacaacagaataacgtgtttcccagtcaccagaggcttcgcgcttgacaatggaggacacatgaatagcgctaggcaataacattcatgaggctccgaaaaggggtgagaatggaggattgccttgagggtcctcacttaggcaatcatgaaaccagctccaaactcgaaagtggaggacacatgaacaaccctaagcaataacattcatgtggctcccgaaaagggtgagaatggaggattgccttaagggtcctcacttaggcaatcatgaaacacagtttcaaactcgaaagtggaggacacatgaacagccctaagcaataacattcatgtggctccggaaaacggtgagaatggacgattgccttgagggcc

SEQ ID NO: 240840 - DNA, 533 bp, Glycine max
cctatgatactcagcttcccaagtttaagttcttcctcaaaactgtcctaagcaatgttctttttgttctattaacaacttctgtttgcccatcggcttatgggtgacaagtggttgaaaataacaatttagtgcccaacttgtcccacaaagttctccaaaaatggcttaggaacttagagtccctatcactaacaatgctctttggcaaaccatggagtctcacaatctccttgaaaaacaaatcaaccacatgggaagcatcatcaactttttttacatggaataaaatgagccattttacaaaacctatcaacaaccacaaaaatggaatctctaccactgcttgcttttggcagccccaaaacataatccatggataaatcaatccaatgatactccggaatttgcaatggagtatacaattcatgaggctttaccttagactttgccttttacatacaatgcaatgttcacaaaatttcggctcatcctttttcatatgaggccaataaatatgttcttgtatatgt

SEQ ID NO: 240841 - DNA, 337 bp, Glycine max
  unsure (1)..(337): unsure at all n locations
tgtgcctctccactatgttccctcncctcactcttttgcgtcctccctcacgccctttgctcttgtcgcgcgcctatttgcttcttcatcttcgcctcctgtggtctcttcacttgcttctttatttagttccttctttcttcacttgcttctttatttagttccttcttcatttttgtttccctcggttcttcactttctctttacttccttcctcaactcaaggtgtgattttgtggttgttcactttggtggacacgccgccttcctgttttgtgctcctttcccggatatcctccttttctcgactgctcggcgctcgatctacgtggttcat

SEQ ID NO: 240842 - DNA, 1149 bp, Glycine max
  unsure (1)..(1149): unsure at all n locations
cacactccacacacaattatacgatattaatgaataatgggtttnttgagagtaaagaatactattgcataatcatacattaattnattttcnttttaaggcgcgcgggctcgcggatgattncntggnaagacaacaanaaaatgaagaagctctaaccgaatatcctattaactgtgganaacatctgaacaactataagggttttattctctctcaagcaccaaattattctctagaatgtgctgaggaaaattactacagttaagaaaattcaactactggtgcgttacgtaaaactctccgaacgttatcgatagatataacacgaagattctctacccgtactatcaaaaatcataggatgatttataactctaaattagctcttcaaccgggtataagtgcctactaaccaatctatgtcgaatttattctagtacccagtggaggtcgcaccatattagtcgtaaagaaatatttaattatctagttactcagaataccgcatttataccaccatttctgcacgtgcgtaaagcaaatatacttcaaacgacaattacttgcgtgaaatcaaataattataaataaaatagtttaccacgatcaatttgaatcctatcatccaatatatcttagattaaatatgaactatacgacacgtatgaggacatggcctgtgtatctaagaacggaacattccatatatagtaggttaatcaatcgttgataacaatcgattaaaaagcatatccgctttgataacacctataatacgtcaatcatctaatgttcacacttatcatatgtgcggacgtaactcaattcacaaattgacatggaacatatagtaactgtacgacctaaatgtagaaaacatgtaccgctctatgttaaacattacactacaatacatatgtgtacattaagcatacacaattgaggctattcatgaaaaaagattatttaaagcatgatcaaagagaaaacactcctcaactccactaataaaaatcacgtacgacagagtagcattcacaaggtcggagacatggaagtataacactcgcttatctgcatgtcactgagttatagaaatatcacatacgtattaattacaagactatatcacacatatctatatcg

SEQ ID NO: 240843 - DNA, 391 bp, Glycine max
tgaggaagtgggttgtccaccaaatgcgagttcttacaacacaatgtttgtttcgctgtggagtagtggggacaaaattagagcattggggatgattttggagatgttgagcaacggtgttgatcctgataggatcacatataactcactgatatcaagtttgtgcagagatggaatggtggatgaggccattgggttgttggtggacatggaacggagcgagtggcaacctacggttattagttacaacattgttcttcttggattgtgcaaagcacacagaattgtagatgccattgaagtgctggctgtcatggttgacaatggatgtcagccaaatgaaactacttacacgttgttggtggaaggggttggatatcctggatggcta

SEQ ID NO: 240844 - DNA, 567 bp, Glycine max
tgcctgactaaggcacacaaagcgcagtcctttttgggttgtttcattattgtcgccttgacctttcctttttccattccggctgtgggcatgctgttgcacagttctcgccaccactattgagacctttgccgctattcttatttttctgcctcagtgcatgcttctcctttcgcctcaaggtgttcacgggtgaacaatacccgacaatactacgggccttagttggctgtcgccaagccatgtttattgggctcaacaacaattgaaatcatctttcgtttctatttgggttatcacaattgcgacaagcttggcccatatgtaactaatgaaaatcctatttgctgattataaaggaaacgataattgtggagtggtcattctagactcacaatttcactaaacatttttatttcttaaaatgtgactttgaatcttacccaacctctaaagttagctctcatgatgattggtctttacttatatactcactatatgccggtcggtatcttactacatgggcaactagagttttttccctccctttgtcccaacacattttgg

SEQ ID NO: 240845 - DNA, 393 bp, Glycine max
tccattgttcaatttcgagcgtctcgatatattatgtgcccgaatcggttctccgtgtgaaaagttatgactatttaaatctctcgtgagcatctgtcgttcaatttcgagcgtctcgatatattatgggcctgaatctgacatccgagttaaaagctatgaccatttgaatttctcgagagcttccgttgttcaatttcgagcttctctatatgtgatgcgcctaaatcggtcatccgagttaaaaagttatgaccatttgaatttctcaagagcttccgttgctcaatttcgagcgtctcgataaattatgcacttgaatctgacctccgagtgaaaagttttgacccttcgaattgctccagacgctccattgttcaatttcgagcgtct

SEQ ID NO: 240846 - DNA, 235 bp, Glycine max
atcatcaagtgatatcagagcattagagcttcaagtaggtgctccttaattttccattaattttcagctttaccttctgccctattcttgttacatcattcttctccatgtacctcctcacatgtcttttgctaaatgttgttcacatgattctctataatttccactgattaaacttgctatatgtcttaccctaattttgtctgggaaccattcgttggtgggatgcgaccct

SEQ ID NO: 240847 - DNA, 449 bp, Glycine max
tgaggaagtgggttgtccaccaaatgcgtattcttacaacacaatgtttgtttttctgtggagcagtggggacaaaattagagcattggggatgattttggagatgtcgagcaacggtgttgatcctgaattgatcacatataactcactgttatcaaaatatggcatagatggatatggtggatgacgccattgggttgttggcggacatggaacggagcgagtggccacctactgttattagttacaacattgttcttattggattgtgcaaagcacacagaatttgagatgccattgaagtgctggctgacatggttgacaatggatgtcagccaaatgaaactacttacacgttgttggtggaaggggctggatttgattcatgctcaatcaacaaattgtattcatttatcaacagcgtttttcctttcatttgaactaaattt

SEQ ID NO: 240848 - DNA, 471 bp, Glycine max
taaaggaagtgaacgaattaccatgggcagaaatgtctccgattgattttaaatctgttcctcaaattcctggaaaatgcaaagattcacgtacattcagcataccttgtattatagggaatagtaagtttgacaatgccatgctagattcaggagcttctgttagtgttatgcctctgactatgtttaattctttatctctacgtcccttgcagtcaactgatgtggtaattcatttagctaatagaagtgtcgcctatcctgttggcttcataaaagatgttttagttagagttggtaaactgattttccctgttgattttcatattacgaatatcgaggatggatttcctcataaatcagtttctattcattctatgctgaccctttatgataactgctacaactaatattgatgtatatgcatgcacactatccatggagtatggtgatataaccggtcctttttat

SEQ ID NO: 240849 - DNA, 482 bp, Glycine max
ttaacaaagaaaaaaagggagtcaaattgttaccaatctcagtgacaccatttttaagttttgtcaagtgagaaaattgttcattttgttttgaaataatcaattaaacaacagttattcatataaataattcacttaagtaacacaatatcaagttattagttctcatagaaaaatttggaaaacaatgttacttaattttaagcacttcatttaagtattcgcatcggagatactctatggtttttgactaccttgagaaaagtgcaagttagcatccctcccaaacaattggaaatacatgatgggattgaactcatagttaaagaatattagaatttagaataatgcaattttcatcccttcattttctaagagaatttttgattttgattccaacgtttatgcactgcacgttggctttttgattggtccaaattacataacgtgatcacgttttaattagtgatttttcaatacat

SEQ ID NO: 240850 - DNA, 568 bp, Glycine max
tggtggctagttcatggcattaatgctccaatacttcaaaaggttgcctttaagctacttgcgcaaccttgctcatcttcttgttgtgaaagaaattggagtacatattcatttattcattctttaaagagaaacaagatggcaccacttagagctgaagatttagtatttgttcatagcaacctacgacttctctcaaggaatactccacaatatcatcaagaggaaactaaaatgtgagatgtaactggagatgattttgggttacttaatgaatgtggcattcttgaaatttctaatttgtctttagatgaaccacagttagagggtgtctttttcaatgatgattgctagtttgtagaattcttgaagacttgaagttgctaattcatcatcttgctttataattattcttttcgaaagaaacaaagtgtacaaatcgtataatgaggtctcttagtatttcttgtgacttattatcataggaaaagtttttttgagatgatgatgaatatataaatcttaactttcaattaagatcctttatgcatatcgctcatatttaatc

SEQ ID NO: 240851 - DNA, 629 bp, Glycine max
tacataacaaattgcttaaagattttatgtgttaaattatattgattgttcattccaatgattgaaggtctctagatgtgaactaaaactcttttagatattgagaaaaggatgaagaagtacttggtgttgaagtactatgccttagagttattgaaacactaatgtatcttactatgcatatacaacttgatataccatttcacacttattcaatagaaaaatataattcttcaccaatacaaagatatttaagcatgtacttcattattttatgttatttgtcaaatcctctcactactagaaaatgcattttagcgacaaaaaatagcgactgaaacatattggtgacaaaaatgaccaaattagccactgattacaaaaattagcatttgcacaattcagtgatcacctttgcaaccgatgcacatagtggcaacacaagaagtcactaatttggtcgttgaaacgtttatttttttttttgaaaacttcagtgattgattttgcggtcgaagctttatatgactctgcgaccgatttaagttcaatccgtgcgacttagaaatagcgtctacatgtgtttcggtcaatggttgcccaccgttttattgcttaccacctgaata

SEQ ID NO: 240852 - DNA, 980 bp, Glycine max
  unsure (1)..(980): unsure at all n locations
ccccccgccccaatgaaatatttttctcacgcagtccaaaaacaattaatattattttacttntcttcaagccccccacccgtggtgaagcaattcgaaagcaccnanagaatcccaactttacacgagcctcacaggtgatctttcattgccccttctacccaccccttttgtgggaatcgaagactcagctgaacatacatactgccttatctattggaccaaaacacaattgtcctaccgcataactctatccagagcaaaaggattatcgactaatagacgcgcaaactgaaggatggcagctactagcgctatctggaaaaccacatacaaagatccgtcttcaaacccccaataagatgctaacacactgttcgatgaagctgtccttcggactcggacatggcttagacatactgagaagcattgctcaaccaactcaatcaatgggcaagcaatattatcgcaggtctcatcctgtaatgggagctacaattaaaacacaacacatgtaggctcaataactagaaaacctcatccttagcggattaaataaacggagcctatccgcatcttccagcaaccccggcacagctgatcaccgcaacacatccatcactaatctagttctgcagctataaaaaaaaaacaacagttacccacccatgcgaacaaaccgggcttatcacaaaaaacacttaaatgtcaagacttctactcgaagcggtacaaaccatccccagattctaagaataggttaatcacaaaactggccaggaataccaacggctaaaaaccggcaccaacaagagaatcaacagggacgaagacgcacactctcaaagaaaaacctctcacgtgaaaacaccaccacactcacatcatgtttacgggtaaactatgactgctcaacaacataaagccgaaacttacctcgtcgacattactaagcacaatagtgcaacggccaaccgcct

SEQ ID NO: 240853 - DNA, 579 bp, Glycine max
tttttcaatcttctgtaagggtgatgagcttttacaaaatgacgatgtctattgtacactgtttttctaccatgtttcagttgtatgtagcttgtgtcttcttcacagatggggcatgcaagatgacccttaacactgtaaccgctgaaattcttatatgctggaaagtcattaatggtacaaaatagcattgcacgcatttgaaaagtctccttgtgaaacccatcaaatactaaaacccccttatcccacaactttctcaggtcttcaatcaaccgacttaaataaacatcaatgtcatttcctggttgtcttgggcctgatatcatcatagacaacatcatgtattttcgcttcatgcacaaccaaggcggaaaattgtaaaatactaatagaactggccatgaactgtgttgagtgcttaaattgccatatggattcattccatcactggctagtccaagtctaagatttcttgcctctttgccgaaattcggatacaaactatcaatcctcctccactgggagcaatcagctggatgacggaccattccatcagaatttctcccatttgcatgc

SEQ ID NO: 240854 - DNA, 505 bp, Glycine max
tgtccgcaaaaatcactaaaaaggatattaaggttcaatacctcagtttttctcaccaagcaaaaaaatggatcattttaaggtccaacgccttaaaaggaccaccttccaagtaaaaagaatcgcttgattcgcccttttaaaagaactacgtaagtctgatttcctcttcgatggagggtatgtaagagcaagagcccctcttttgtcgacctcaaaaataaaaaagaaatagaagtttaggtacacaatttcacacaattctaatttaaggttgttgtccttttgggacaaacgtgagaggtgctaataccttcctcaaacgtaaatacaactcccaaatctggaatattcttcatgaccggtttccttcggtttttccgacgctttccacaaataaacattggtggcgactctgcgcattttcctcctttggaagacacacctgtgagcctcgccttgctcgcccgcaaaaaggtaggttgcgagagttggcgtcctttat

SEQ ID NO: 240855 - DNA, 614 bp, Glycine max
tattgtagaactgctcaccaaaatatcaattgaattttttatgtacaattttattcaaaagaaacttggacaatgacaaagtacaaggaaataagaatgtactgattattcacctctctccttctctcagctcgttcaccacacttaaaactgaatccataatttggaagtgttcccaccctttgaggtttggcatcttctgtgttggaacttctaggaggattaaggttaaaacacaatatacacagcaccacactcaataataaatttaaataatagagacccagtagttccagattttcactcataaatatacaaacccaaaaaaggatacaaggaagattctgcttctccttgaactttatcaatgggttcttttctcgatgattttggttttgtcttctccctgtatccaaaacatcacagtccaccagttaaataataacaacaatctatctttctagcaatggaacatagacaagaaatacaagcattacatacactgatacttcagaagatgttgcatcagacttcaaaggtgctgagaaaaacaaagtgcaaaaactatcagggaatgcccaaactataaacttgatttcccaaaagagataaaa

SEQ ID NO: 240856 - DNA, 590 bp, Glycine max
  unsure (1)..(590): unsure at all n locations
ttggtaatcgattacaaatattgtgtaatcgattacacaagttaaaaattatttaaaactttttaaacacaagttgtgactcttcaaatttgaaatcttacgttttaaaacactggtaatcaattactaccttttgataatcgattaccagagagtaaaactctttggtaatgattttgtgaaaacttcttatgctactcaatgttttggaaaacttttttagtacttatcttgattgagtcttctcttgattcttaaatcttgagtcttgagtcttgaatcttgatcttgattattcttaaatcttgattcttgaaactttagaatttgcttaactattgattctttggcatcatcaaaataaccttggaaggccttgcttccacagtaaaaattggagtcaagtcagcaacattaaatgaagaacttactccatactcactgatgtgccatcattttcttctattttctaaaccctttttacaccattntaattattgattggtcttaattgtcaattaattaggcatgtttattatttgggcccattcagctaatttgatgttttaatctaatttcaagaattaatg

SEQ ID NO: 240857 - DNA, 1085 bp, Glycine max
  unsure (1)..(1085): unsure at all n locations
cccgcccgaccgtaaagtgtgagttaataatatacgaaaaagccggcacgacaacaaactagaaaatgcccaattccccaacagaccccccccggcatgacccaatgaaangccccnnnnnaanctncanctntccaacacgatctttcactggtcatctattacaagaaaccggtaatttatgtccacagagctaatactctggtaacggagaaaattctgagagaaaccctcccgaaaaacaaaagcgaggtaagcccgtacactaaaaaaacttacaatacacccttggaaagcccctagagttcatcacttgaatctagaaatcatcaatatcttgaaatctggaaatccaaacctactcctagatatcccgaaaactcctcagatttccttcatcgttgaatactacgaaaaggcacgacataactatacgaatccatgcgaatccttacctggaatgtcctctgcggactgagaacctccgacaatataaaacacagatactgtgaaccttggctgacatcgaatctatgacaagcaggacaaatgggcctatttgcgcatacatacatgggccactcatcaagaagccaacgtggaatcaaactcgcgattacaggcattcatcgaagatacagcttgcgcacgataacaagcaacaataggacgtcctatgcctcacggacgtccagaatgagcaccgagattccaatatcntataaccatcccaaggaacgnttaacggaggagcagcaacaagggtggatatacagcaccactgaggagaaacaaatgaaatacaacgaacgcgaggtccgaagctaaccccggaaacaaacagtcaccagaatgaaactcttatgcacccgagcccaccgcacgggaccacaaacaaagggaagaaaagcaataaatggcgcacaaagaggcaccccaaccaagcctaacttcgaccaaccccaggaacccactggccacccaccctcgaccacgacaaagaaaaatagggcagacgctcaagaaaaaaaaaccaatgccccaatttattaggaaacgctccaaccaacaaaggcgcaatatct

SEQ ID NO: 240858 - DNA, 535 bp, Glycine max
tgcatcgacaggagcccagattccgtcgtttaccctgtagatagatagattttataacttagatggcatatttctcccaaatgcatcttgagtaaagtcccattgatatcgataaaattgctgtaatcaggctctacacatgcagggtgtcagagggttctcccagaggtcgtagttagggaaagtctcttctggcaatcccgtccgagtctggtgagtaacaacaacatcttctacaaaaggagcccaacccatatatggatccccaaaagacttggacattagccctttgtcaggcttaattgattttagacggtgacccatgtatctacgtgctccaatgatcaacttagcaaaattgcctccatgggtcatcacgaatacatttgacttcaagcacaccaagaaatcaagagctgccaggcttgtcacatgctttctgaaaccatctaactcctctttagttgccaactcctccttggaacctgttgcaaatgggggaaatattaattaccttgcaaaagaatcaaaaata

SEQ ID NO: 240859 - DNA, 640 bp, Glycine max
  unsure (1)..(640): unsure at all n locations
ggctnggctacaaaaaatcatggggttttctagaattcaaatgtttagattctaagagagcacaaatactagatttatccaaatattctttccaatacaattagcttactcactagcctttcactttaatttgtctttgaccttattacaacaacacacattttctttgattgctcttttttttttaacacacaacttattttttgtgtgtgctgatgctttaccttttactttacatcccaatcaactcccccaaatttggggtaatttgccttgaactatctgctctcctagaatctaaacaaggtatctggagatattcattcaagttcagggttcaattttgaaaatgtaatttagctcacaaagggtgcaaaggatacaattataattcaagggtagctttttggtcaattggtttgtctatacaatcatggccttcatcatgtcctcattcatacatttcattctaaaattcagagattgatgcacagactattagtcaaagctagtcggtcactcacagtttaagatcacactctcaccggtatggttcaagctttctttctaatcaactatctacaactaccaatttaaatgggaggtcacatcttgtctttctttgtttacatacatactt

SEQ ID NO: 240860 - DNA, 552 bp, Glycine max
tatgatatgtccataagttgttttcaactaatttcaacaagcattctattataaatgatgaaaacaacttatatctaatgtgaaaatagtttaaactgattttttcaattataaaaatagatgatatgatatctaagtgcttatacaataatagacagactcaagtttaaaagagaaagaaaaaaccagcatgtatgaggaagaagtttgctaaacatgtatggcgcatttggctaaaatgtagtgcttagtacaatctcaaatacattgtcattttttaaggtgttcacagtagatgcaccagagaaaatttaataatacaagtgataatgtaaaaagttactcccaggatatatcaattgacccgctttaattacttgtacaaatgacttgcaagttttaatgggtggtttataaagtacagaaaacaaattcctgatgcatggattacacgaagaaagcaagaaacacagaacaaagaaagaaaccaaggaagaaagtttccgaggcatggcatgaaccaaaatcgataagataaaagagagggaaaaa

SEQ ID NO: 240861 - DNA, 608 bp, Glycine max
tgaagccaaaaggaaaaaagaacttgtagctgttcaatgtactctccataataaagtgtgttcaatgcaaagttaccactccattccatccaaccttgaggattgataaagccatcaagacaagtcttcattaaaactgttcttgaatattgcttccatggtcttcgaagataagtcctaaccgggttttgaaccagtctcaaatctgaagtagctgtgactcaagaattgcgaattgaaattccagtgttttagtttggatcagttctgccttgtgcagtgatggtgttgactatgttgggagggtttcttgcaaggtgttgcagttttgtaacacaacaacaacatgctacaggagatttccatcaacttccctgccacaggcgtttgggtaaaaacaaaatgttaagtcaactaatagccaggaaattccattacactttcacatgcacacagtaaaaagaaacaagttatatattcagagggtgattagaatcaatgaattttatatcccttctaaattcgtaccaaacaatttaattgtaagaaaataaggaatccaaaatatgtacttgactagacttatgatatagtggaataaatgatat

SEQ ID NO: 240862 - DNA, 572 bp, Glycine max
tgtcttacatgcatgatatgcatctgaacctaacgctctaagggaaccttttatttgatgtgaacacggatagttacactgtgggtggagctcgtgtggatggatacctaacataaagcagtactacacctggtgggcactgtatggagcacttgctaccataaagccagagatgcaatacactgcccctggattgatataaacctctgggaatattctaggcccttggcctgagtatgatacctcttatatcagaatatattgtagacacggtacattattagtgggactcgtgtttagagctctgtaatggttgttgggatgcacatatatgtaagactcttcagcgctatgcaggttatggctcattcacataggccagtaatgggggtaaatgacaactgactccatcactggacatataatgggagtgttgatggggcgatgaagaaaagttgaaataaaattttgtcaagccccctcctcaatgtataagcaaacgctgttgtacatttaattggatgcccaaatgtgttactcttttttgtcccatctagtatttccttgatcag

SEQ ID NO: 240863 - DNA, 670 bp, Glycine max
  unsure (1)..(670): unsure at all n locations
tatgcttttatgaaaaggttcatcaagtcaagttgaagtatggaagtaactatcttgcaaaaattggggcaaaagatggatcaagttacatcgttgcttcgtctactgccaaacacatttaggattgttgatgtccttgttacttccagtttcatcctgacaaagatgtcatggaccatgttgaaaatctaaattgattcaaccccatgtcctacgtaaaaattcgcaacacttcaattgtgcatcattcgcatacatccatgcttttcattggttgcattgctcagcattctttccttgaaaaaaaaatgaacttaatcattgttataaaaaagaaaagagcacgctttacaatgcccttaccgaactcatgctagagctagagtaatgggtgaagtagaggaggtgcaagagcagatgaaggccgacatggaggccatgaaagggcaaatggccacaatgatggaggccatgatgagcatgaataagataatggaagccaatgcggttgcagttgccgctaccagcactattgctaaggtgaacccgatgcccccatctgatctcaaccaaatgaatcatccaacctcaaatatggtaggccaaagattgggaagtacggatggccccatgatgagcanattcaaaatgagcacgcctttccgccata

SEQ ID NO: 240864 - DNA, 517 bp, Glycine max
tgcaagtgtattgactgtatattgaggatccttttgaagacagctccttatttttctgtcaggggagtttcactatgccccatgtcaaccctctaacatggcaactaaaaaatatgagttacgtcaggataggtcattcaagtcttttttctaattgaatccagctagtatcactttcgtacagtatccttcttatcaccgtaatgcgaagtgatgaataaatattattattttaattttgttttgcgagttgtacttcatatatgcaacttaacttttatcatagaaaatagataaattgtatttattaaatacagtttatgtatttttttttacaaaataataatagggctaaataattaattttttctttcatttttagtgcctataaatatatatttttgcaattttaatctgtatatataatattctataatcatatatataagcgcgattctggtctattaaacgcaaatacgtaagtatgggtcgatccctgaaatgccgatgctcaaac

SEQ ID NO: 240865 - DNA, 151 bp, Glycine max
ttgttggagctttgtgtattcgggtgatcaatgggttggtgtccttagatctagatttttgcgaaaccattgtcagtatggtggatacaaaaagtattctcttttgtcatcgctgaagcaacatctccctactatttttcgtaataaagct

SEQ ID NO: 240866 - DNA, 901 bp, Glycine max
  unsure (1)..(901): unsure at all n locations
tagagtgcnccnacagtgtagatcccttttatagccctctcngttagtaaagctacacacgcgaatnnannagaganntggttttcaattcaaccgtattttttatcatgctccggaatatgatacggggtgctacgatatcattattcgaactccatggagagctctggctgataaaaaagtgcgggaaacttttattaaacgcaacgagcgaacatgatagattggtggggtcaaaatcaggattaacagccatccggagtgtgagggctcccactccttatatttactaaacgaaagaggtgggaattactgacgaaaatttccctctcctttgttaacctaacaaaacatttaaataagtttgaataatatggtgtatcaagaaaaagaatggctatcgaatttcggacttaaaaaccccggttgtaggctactttcccttcaatggagtcctgtaccttggtcagccaaagggacccctgatcatggaccgagtcaaaagcggtaaaaaaataatactcagaaatcgataagataatgcatggcaattacctaaccctcatttcaccactaaatacatagtcacatgtcagcaattatggatacggaatgtgatcggtatcacttaatcttagaagctaacaaccttctggctcgaagatggtcaatgccaacgattatccgtaatggacactacaattagcaagggtggataaatctcaaacaaccggtccatctagtccacaaaattacttcctgatcgttaccaatatcacacgatcagcgagaagatacgcatcctctcacatacctttaatcagactacggggttaacaaatcatcttcacaaaccggtgcataagcacaaagactgtcaaactaacttcgaacaaagccc

SEQ ID NO: 240867 - DNA, 628 bp, Glycine max
tccgttgttcaatttcgaacgtgtcgatatattatgcgccttgttcggttctccaagttaaaagttatgaccatttgaatttctcgagagcttccgttgttcaattacaagcgtctctatatattatgcgcctgaatcggacctccgagtgaaacgttatgaccatttgaattgctcaagagcttccattgttctatttcgagcgtctcgatatattatgcgcctgaatcggacatgcgagtgaaaagctatgaccatttgaatttctcgagagcttccgttgttcaatatcgagcgtctcgatatattatgcgactgaatctgacatctgaattaaaagttatgaccatttgaaattctcgagagcttccgttgttcaatttcgagcgtctcgatatattatgcgcctgaatcggacctccgagttaaaagttatgaccatttgaatttctcgagagctttcggtgttcaattcgagcgtctctatatattatgcgcctgattcggaacttcgagttaaaagtttgacccttctaatttttcggagcttccgttgttcaattacaaccgtcttatttttatgcgcctgaatcggactctccagtgaaaggttttacctttgaatttt

SEQ ID NO: 240868 - DNA, 416 bp, Glycine max
tccctcaagttgtagccttcatcaatataaggtgaaccattgacatcttatttacaccaaggcggtacaaatgtacatgaccaccctcatatggacgcagcgatgacaacgcgctagaatatgcactctgcaaacatcagcaatccataagcaccaaataccccccgaagcaccaaccgcttcttgcccaaaatcgaatgaaaaataaagcatcttctagaaatacctttagccctcaccccactcgagagcttctacaaaactaattaaggtagctcccaagttgagtcattaggcacaggccaagccaacgaagcctcagcttcatgtctccctataattccatatgatgaaattcatcgggacccccttagaatgtgcatggaattaaaaacccactaacctcaccaagcgga

SEQ ID NO: 240869 - DNA, 670 bp, Glycine max
  unsure (1)..(670): unsure at all n locations
tgatgtcattcaaaacacactatgtagacctaaatgaagactaaacattcattgtttatttatttgtattcattatgcgatataattcgttgtaacccgtcactaacgaattaatattatcaactactcgtttggttaagcaaggaaattgttggtccaacaaaaatcatttacgcgtgcagcatacatcattgtcataattgacaacacataatgacatgcatgcgtattacagtttgagcgtgacaacacattggttgacttcagtacacattttgaaactagcagtcgctcgacaacacatgggttgacttgactacacattagcgacaacacattggctgacttgactacacatttacgcgtgtctatttttttgtaaacaaagttaaacaaaggctcggtcacaaccatctatatatatggaagactaggctactaaatcacacattatcttgctttcaaataatctcgcaactgatacacaaactatggcatttctaggagaaactagcagtcagacgattgtcaactcaaggttggctntcatttatccaaatggatcgattattcacaatgatactggggtttacttccaaacttcaactccggtgcccattcgagtaccaaataggtgtgattttgcagcctaaaaaccagaatacacaat

SEQ ID NO: 240870 - DNA, 605 bp, Glycine max
tgccagaataatgggttggatacagatcattctgggagggttggtcatctttgtaagccttttgagtctcactagattctactcagcaggatttttcctccacaatgaagatatatgccaacacttctacaatctgagggatgtttctgatggttttgatgtcaaatcattctctgatagagttggagaagtgatagacatgttggaagctttgcaggccaagcttgagtcaaaagttcaagaaatggagaaaaacaaaggcaccatgttggacaagaagtttctagaggatcaaatagttagccctcttcatagtgctaatgttgctctaaggcagattcgggttcccaaggttgatgaagggacgaactccacagtgaaggaggatcatttgatcaattttttcatcattgaggaaattagaaagtacataacccccaaggagaatagggttggtaagatcaacctatatggtgcagacaaggtttacaacacaataggccatgcttgtgttttgtacaagaaagagttagagaagtacatggactatgacattggctcctattgggatgatgattggaatttgctcagaagcctatgctaat

SEQ ID NO: 240871 - DNA, 540 bp, Glycine max
ttacggagtagaaacatgggaccaactcattttatgtcagaaagtcgtttttttttaaaatctgagagaccatacaagtttgctagcggtttctaattatatgggccattaagtctatcatatgctgacaatagtcgagaagcccatgaatttcttcgggggcggagtatgtgtccgccattgccttggccttggctaacaaccggggaagttcttgactcccgttcaaggtaagagctaaccgatccatccacatggttgcctcttggtgtaaagagtcgatcaccctgtctttagcctatttttccgcgcatactggggcatattcgttcgagaccctatgctcgcgggccgtggctagacttaaatcttcttgggactcggggatgatagctagcatgatggtctacggcttgcataaacgctgagacaagcttctattggacgttgaacaagcaactaactcctctctcaagaccatgctatgcgctcgcgactggcccctctcttcccttcaaagcttggattcactgttgctac

SEQ ID NO: 240872 - DNA, 391 bp, Glycine max
tcttagtctcatctgatgaagatgaattcgtggctacttcatgcactcttctaatgacaataacatcatttcgggcactaaattgctgggagttggaagccatcttctcaattaaatttttggcttcagcaggggttatgtctccaagggctccaccactggcagcatctatcatacttatctccatgttactgagtccttcataaaaatattggagaagaagctgctcagaaatctggtggtgagggcaactcgcacatagttttttaaattctctcccagtattcatataagcttctctccactgagttgcctaacgcctgaaatattttttctgatggtcgtggtcctagaagccaggaaaatgctctcttacaatgctctcttgagt

SEQ ID NO: 240873 - DNA, 290 bp, Glycine max
tgtccgattatggggtacccatcacatcatgtactgaggggcggtcatttttttgtgcacatcaaagttttccacattcacagtgcgtgcattaacctaccaatccctgttgcataactcccacttagctaacgtactcccacctttcccatattctagatttttatcaacaccgggcccccctcaatcctcgcaatcgttcacaacatccaatctaaacaacattcacacgacacaagctatcacattcaaaccaaacagagcacatggcgaaaacctctgcctaatac

SEQ ID NO: 240874 - DNA, 630 bp, Glycine max
tttccaaagtggtcttcggcattacatttaaactcgatccattgtcgatatttacctttgcgacaacgtggtccatacatctcaccgacacatgtagagccttgttgtgtcctctcccctcaacgggaatctcttcttccgcaaacacgatgtagttgttggtgcttatatgattaacgatgccttcgaaaccctccaccgagatatcatgtgctacatgggcatcattaaggaccttcatcaacagcgcacgatgaggctcgatgtttatgagtagttcaagcaaagagatccttgctggagttttattcagttgctcgactaccttaaactcgctttgttggatgaggcggagaaactcatgggcctcttccaaagtcactatttttccttgaagtccttctttcttttcggcccctcttactactggaggatctacttctttcgagggggtggctatatctgtgggctcttggaccatgggcgctttccctttaaagggcaattccgccgggtgaggggaagcgaacacccgaccactgcgggttacgccactgaggccggcgatgttgggtaccctagctgatagggagtcaactccggttgcaactctttccgctgacccgggaa

SEQ ID NO: 240875 - DNA, 716 bp, Glycine max
  unsure (1)..(716): unsure at all n locations
tggtgcatacaacttatatgctctagcttgagggggagtgtaaaattagttgtatagctttataaaagctggtttttgtatgtatttttcataggttgcaacctagtttctcaatgcctcttattgtactttgttcagaacactaattcatatgtaatatacatcagttgggagaagacttaatgatattgttctaatattaatcacatttcaagtctcttaagtaaacctctagttaccttaccaagatactcttaatcacatttaatagttaaattcatcaaaaaggttatttatttctcaagaaataccattttaaaaggaggaaaatattatataaactttggaaaacattttgattttaagtacgacattgagccctgaagaccttttgctaagcaaaacatgtttcacttagtgaatcaactcactcaatttcgctcaacaaattctatggccactaaaaaaatgagaagcatccctacctcaatgtaatattttcagttagcaaaatcatgatttgcttagcgaaaataaggtagaaagaaaccttacttctaanggtgtttttgccgaataaaaatttcaactcactcagtgaaaataagtaaaaaggtaatctatgttcttgaggttgatttgcacaacaaagtattctcccccacaaattaatattcctagtgaactattagtgattgctagtatctttcatgaaa

SEQ ID NO: 240876 - DNA, 568 bp, Glycine max
tgtaggattatggggtacccatcacatgtggtactaggtggcggtcgggctatggtgcacaacaagtttttccacatccacaatgcgtgcataaacccaccatcccctgttgcccacctccaactgagctcacgtactcccacgtagcccatatcctcgtttctctcaacaccgggtccccatcaatcctcccaagcttccacaacatccaagcaaaacaacattcacacagcacaagctatcacagccaagcaaaacagagcaaaggcagaaaactctgccaaaacaccaaccaaaaatcacagcttttaccactcaaagaccccagtaacaattccttctttccaattcgttaaccgttggatcgactccaaatttttactggaagtctctaatacataagcctacattttgaccgttgggatctactagcaaacatcccgaactcattctgcactgctctttccacaaccagcaaatgcctagtatttttctgcacttgtgcaaaatcctgctgcacaattttacagcaaaaatctgcacaaaatgcagatttcgaaaaccacac

SEQ ID NO: 240877 - DNA, 373 bp, Glycine max
tcccagtttctaactcttcctaaaactgtcctaagcaaagttcccatttttttattaacaacttccatttgcccatcgggtcgtgggtgacaagtggctgaaaataacaatttattgcccaacttgctccactaagtcctacaaaataggcttatgaacttaaagtccctatcactaacaatgctccttggcaaactatggagtctcacaatctccctgaaaaacaaatcagccacatgggaagcatcatctatttatctacatggaataaaacgagccattttagaatacctttcagcaccacaaatatggaatctctaccattggttgtgttcggcagccccacaacaaaatccctggttaaatcaaatcc

SEQ ID NO: 240878 - DNA, 334 bp, Glycine max
ttaacattcaatttcgagcgtctcgatatattacgggactcaatcaagcattctagaaagaagttactttcgtttgaatttgctctgagcttcaacattcaatttctagcgtctcgatatattacgagactcaatcagacatccgagtaaaaagttatggccgcttgaatcggctcagaggtccaaaactcaatttcgagcgtctggtttattacgggactcaatcagacatccgagtataaagttactgtcgtttgaaattggctcatagggtcaacattcaatttcgagcgcttcgatttatttacggactcaatccgacatccgagtaaaa

SEQ ID NO: 240879 - DNA, 592 bp, Glycine max
tatagttattggagggagaataaaacaatccaaaatcaattgtacctttttgtaacgaagaattctttttgcggcttttagatgaggagaggtaggagcctccataaagcgacacacaactcccaccgcatatagaatatcgggccttgtattggttagataccttaaactccccacaagactcttgaagatcatggagtctaccttctctccttcatcaaactttgataacttcaagccaccttccataggtgtgttcacgggattgcaatcaagcatattaaatttcttcaacacttcttttgtgtacctttcttgtgagacaaagataccattctccgtttgcttcacttccattcccaagtaatatgacatgagtcccatatctgtcatatcaaattcacgagacatggactccttgaagtcttcaaacaaatttgggttattgccggtaaagataaggtcatccacataaagacaaataaataagacatcaccattattaaaagttttaacataaagagcataactcatttgacaacgaacaaacccattgtcttggaagtacttgtcaatgcgagtattccatgcc

SEQ ID NO: 240880 - DNA, 677 bp, Glycine max
  unsure (1)..(677): unsure at all n locations
tatatcagaaaattaaggccaaaaaggttattgaatgaagaacatgaactatttagacagcaaaacctagactacctaaactgggagcagcaggacaaacaattagtgtctttggcttctaccatcaatggcaccgagtcttcacacaaaaggatggttggaagatacttgaaacctaaccttttagaccaaagccaaaatcaaacaactaaaacagaaactaagtgtctaatagataggagcaatgaatgtatatttttgaaacataatcatagtaacacgaatgggtaagaaaaactaactggttttgaaacaaaattaactataatgacttagtatcgtcttagtctaatttaaatctccaaattcacagtaacacgaatgggtaacaaaacctattgttcagaaaaataatcatattgactagtctcatcttagtcaaatatcaatcatattagttagtctaactatggtttcgaaacatgagaatagagatagaccactgaacaatggattttcatcattaacagagaatagagacataccttcgatggcttccctggcagtcttaaagccaagcccaatggacttccaaaatcgattcccacccttttcgagactttntcctttcctagttctcttcgagctgcaaaagtgaccaaatgttaaaatgagga

SEQ ID NO: 240881 - DNA, 298 bp, Glycine max
tcgcaggatttaacgtactgctaacatgttatgctttgccttgcctctgttttttgcctcaatccataaatacggctgctctttgtccttatgtgcacttcttaaaatgctgtataccttccccggagcccatgaacttcaacacattccaattttaccaaagaggctacccgcgttcctctttctcatcaaacgtcctccataaaataccagccattagcatattcactgatttctaactttctctgactagttatatgctccatgagacacatacggtgtcaaaacacccacctga

SEQ ID NO: 240882 - DNA, 1812 bp, Glycine max
  unsure (1)..(1812): unsure at all n locations
tgtgtcccctccccccgccgcggtacggattgaatncnccattttcganananngnccanccncnagnagnagagagcgtgagagtctcnatcgcgcgcgtatanacaacgcanaangtactcacatcatcaatcttctcgttactactactcgatacgtgcngctntgcgtttggatanctctatcancactacacncgccaactaccatctgcgcataccgctanagagcaagggagagttctgtatcctatctcatacatgggtgtctcgacacgatcatctcaccactcncctgtcacacgatctgtctctaatcgcgtcctctccgtcaatctcaatgggcttgactnatctaacctatcaatcatgtcncacgcgctggatgacatcacacatctccatcacgtttcataagactgccataatcntgcgtgatcacacantatcaacngtactatatngtcatagacgagtcatcacgcctctcgtctaatactcgtatcacgaacatctcacttactctactactagcatantgagantaaacagngcgcgtcgtctgcaatctcttctgcatattatcaagtacatcagcacanacacgtgtgcgtacgatcgcgacgcattactcgggtagggctagtaaagcatagtcgtcacgacactacacccatacgataaccatgttgtatcaccactacatccgtacantgtgcaccacatacatgtttacgccagatattctcgtactacatctggccncgcggtgagcaggcgtatcgacttacgcatcgcacgagtacgacctcaatcactgcatcacttcttatgaacgctcaacataccatcatgcgtgactacacgtcactacacatctcacttcgagtagatacacgtcgctgacgatacacatacacgtggacgttctcactacaatcgcgagttgtcttgtgacacagataacgcaatcgacatacacacatatcgtctcacgcacaccctttacgcacaatgtgatcgtctgtactgagtctacgcacgccatcacgtaccacgttatctgtcgtctcgcgcgtacgtcacatactatantgtgtacgtngtatgtccactataaggctcagatcgacagccgtctacngnacacgtcaatcctcctcctacatacactngcgtacacgtgcctacctcactcacacgacattctctctggtacgtcgcctcntacagtgcggtcgctgcacgcacatatctaatgctacgctacacngctagttccgaccgcancngcatcgnctactacantgatgcacgcgaactgtcgtgcattcgacantcatcgatcgtgctctgcgtcatctactcgtcactactactatgcataatactacgtcgtcatcntcntcgtacatcgcgtatcgcgtcatcacgtagttcaatctcatatagtcactccctcatcatgatgacgcctacaccancactatctgtccgtcgactagtcgctcgctgcacctgtcccagtcgccgatcatctcgctcacatccatatgcatcgcagtantacatctatgtgcgtactacgcntcgacantgtatcnantctntncatcntgacatcatgcagcgactacttcacgaccatgactctgcacatcatcactgactatcgtcagtcctcgtctcgncgtctcgcacatacatacttagcgatctcgcgaatagtcgcgctacttcgatctcaactacgactcgatgtgtctctactctacactactcgttgctctctcacacgactctcactctcgn

SEQ ID NO: 240883 - DNA, 554 bp, Glycine max
tcattagatgttgcatttcagtatcaactcctctaatggaagaatgatatgctcttcttgcattgtaaaattgtttgattgtggtgcaactattgacattgtgctccttcaacgttagcaggatgttttttggtttcaccatagactttgtcatctcagcaataattttcttttcatccttggtcaatcgcccaacgtatggatgtccaactaaggacttggccaattcatgattgtgaatcccacatatcaacttcaccatccaaccttcccctccatgcactggtttcccatgaagcctgaagggacaaccacatttcctactcccaatgtctcttctaacaaattctttattcctacacttgtacagaccgctcctttcacacccaattaacacaaatgaacttctttgttgttgtgtaaagagagagagaggaaagagaactgccttgtttcgaggtcaaggcccctcctaaaaacgagtctgtacttcaatgggtttttgcattttgttcattcatggaacgtcccttttatacatcgtgtacatgcat

SEQ ID NO: 240884 - DNA, 690 bp, Glycine max
tagcgtaacatcaagcttcaacttacagagagtaggtcaggcttagcgcttttccaagaattcaaaagccgtaagagattggcgcttagcgcctcctggcctgctaagcccagcttaaaaactcaagttatagaatggatctgggacttagcgtaggatagtgcacttagtgctgctacaataaaatttttcttgagaaaaagtggcacttagcgcatcatccacgctaagctcactggttaaagttcaattaccgtgaagatgtggggcttagcgcagtgatgtgcgctttgctgaactattcagccaaccaatcaggggtctatgcgcttagcgctagcaagctcggcttagcgcgtgaagactgagtgcttagcgcaaggtctgcgcttagcagatagacaattgcaaaaattttctaagtctgtttctgtctatctcttcacacaagcttaaaaccccttgttcattactaaacaagctgaaattaatcataatcacaagcaagatatcctaattacatgcaagaaataagaatgaaaaataggaaagggaaagaaaagttgtgttgcctcccagtaagcgctcttttaacgtcactagcttgacgcatcgtcctgttatccacgatccaaaagagttcttacttcaagggaccttcttctcaggtctcttttcctccatcacatg

SEQ ID NO: 240885 - DNA, 618 bp, Glycine max
tatggcggcaaagggtaagctaccaagcctgaagcatgttggtgttggtgtttgtgaacactgtatccttggaaagtagaaaaaggtcagcttctcaagggcagggaagactcctaaagttgaaaggctagaattggtgcacacaaatgtttgggagccaaccctagtgaaatctattggaaactcacgctattatgtcacctttatcgacgactctaccagaaaggtatgggtttattttcttaaaaataaatctgatgtgttttctgtgtttaaaaggtgaaaaacagaagttgaaaatcagacaggtctaaaagtctaaaatatgacaatggcggggagtatgatagtcaggagtttaaagacttttgttcaaaacatgggatcagaataatcaagacaatacctggaacacctgagcaaaacggtgttgcagaaaagatgaatagaaccttgaacgagaaagtgaggtgtatgcagatccaatttggcttgcctaaagcattctgggcaaaagcaataaacacagccacatatctcatcaatagaggaccatcagttcccttgaaatatcacgtcgcccgaagaagtatggtctgaaaaagaggttaaactttc

SEQ ID NO: 240886 - DNA, 663 bp, Glycine max
tatcgttattggagggagaataaaataatccaaaatcaattgtacccttttttaacgaagaattctttttgcggcttttagatgaggagaggtacgagcctccgtaaagctacacacaactcccaccgcatatagaatatcgggccttgtattgattagataccttaaactccccacaagaatcttgaagatcgtggagtctaccttctctccttcatcaaactttgataacttcaagccaccttccataggtgtgttcacgggattgcaatcaagcatattaaatttcttcaacacttcttttgtgtagcttccttgtgagacaaagataccattctccgtttgcttcacttccattcccaagtaatatgacatgagtcccatatctgtcatatcaaattcatgagatatggactcctcgaagtcttcaaacaaatttgggttatggccggtaaagataaggtcatccacataaagacaaataaataagacatcaccattattaaaagttttaacatacagagcatactcattttgacaacgaacaaacccattgtcttggaagtacttgtcaatgcgagtattccatgccctcggtgcttgctttataccatacaacgcccttgtcaatttcaagacttttccttcttgacccttgatgac

SEQ ID NO: 240887 - DNA, 714 bp, Glycine max
  unsure (1)..(714): unsure at all n locations
ttttggagtagaaacatgggaccaactcattttatttcaaaaaggaagttttatctagtcaaggtctgagagaccatacaagtttcctaacgatttctaattatgtgggccattaagtctatcatatgctgacaatagccgagaagcccatgaatctcttcgggggcggagtaggtgtctgccatcgccttggccttggctaacaagcggggaagttcttgactcccgttcaaggtaagagcaaaccggtccatccacatggttgcctcttggtgtaaagagtcgatcacccttcctctagcctctttntccgcgtatacttgggcatattcgtccgcaatcctatgctcgtgggccggggctagacctaactcttcttggtacttggcgatgatagctagcatgttggtctccgtctcgcataaacgctgagacaagcttcttttggaccttgaacaggcaactaactcctctttcaaaaccattgcatgtgctcgcgactggtccctttcttcccttcgcaacttgagttcactattgctaccccatagagcttcccgaaatttgttccggccatactctttcttgcgagccctcttggtctcttgttcaaaggctcttgcggtaattgatttctctttccgtaacccggcacactcctttccgacgtgtgtagcggccaacttgaacttttccttggcaattttgcctttc

SEQ ID NO: 240888 - DNA, 507 bp, Glycine max
taacctacctaagtgagtgattaactcactaacctgctttcttcgaagtttttccaatgtctttgttgccgatattggatcgaaagccctgctggcaatccttgattcaaaacttccaggggtgctgcgatagccttgttgggaaggttgaagtcatcggaaggaatgaagaggctgtggaacataatcaagcatgggtgatgtgtgggcgcgacttcgtttgaagaaaaacctataggcactgaggttcaaaaagaagctagatgaaaggtttcaacgcgaaaaggcaagatctactttaaccaaaagctgcttacactaaggtttgaagctgcaaccaacgtctaagtgccaaacggaaagacgtgctaaatggttacaagcgagagtagggctctagagagttcatcccgcaacgggaaaaaagtgatgttcatggcgaaatgatcttctttaatccaaaccaatttaagacgtgtttttttttttaactcgctcgtcaattaa

SEQ ID NO: 240889 - DNA, 522 bp, Glycine max
tggtgaaatttattgaaaatatgtgcaaatatttaagatttgaatttgatttattagtttttagaaattaaattttattatatttcaaacttttagaatattatttagacaatgataagatattattcttatcattttaacttagtaggttagtaatttgattttaagatcaaaatataatgttaatatttgaatttttgttacatttttctttataaacaaaactaatgaataagagttctacgaactcctacacataatacatctcttctttcttttaaaatatattttctacataaaaaatcaacaattgatatcaaaggtatcttcttacggaccaaaaaaaaatgaaagccaaagtaattaagtttttacaagttgacttttctatctttgatggcaaaagctatgatctttgacaatgaaaatggatttatatccagagactctggatctttggggagttgaattagaggattaagatatttctgctcttcatgcaatccaccccagctgataaaa

SEQ ID NO: 240890 - DNA, 918 bp, Glycine max
  unsure (1)..(918): unsure at all n locations
atcaaaacaatcnnnnagagtgagccaagtccactcaagcatacaatctttttcttttaatcattatnaaacactcatttcgtgccaaactatccgtagcacttcattttcaatcaattcattgtgcaaacacgcttttcgtacaagcgaacaactcaaagtgcttaaattttaaatgcctcaaatatcaagctcacctaatactacattactaaaacgtttatgctttgcacaacttaaacttagaccatttttaaacatcctgcttatcttgtggctgttcctcattgtgatctatttttggagctgctcatgaatcctcgcattgcccgctcttgcttcctgccgtcgctgttggcgtggtgttccctcgaacttgcgccggtaattcctcttaccttacagccttcgatctccccgcctcctgttatttttcgtccgtcttcctcgatcatgatactcgtatacctggtcctgatgtattccctcccttccncatcattagctttaacaaatatatcaagcacttacccaggagttctatagtctcctactggatctttattacgactacgtatttctgtatatgcatctctatttgccnataaactccgcacgctgtgcatgcttgtgatgtctcccctaacctcnnnnnnnacataaactattcacctcagcccttagccatgtctctcccctccaaacatagcgccatctcatcttcactccctctttatctcgctcgattccctcctacgctaactctccatgctatccgactccctatcttcccctatcttctcttgctcttctccccgtgtccatgtcttcttatcctcttcgttctatatactctatgtttcgtcactccctccattcttttctccacaaacttttctctccctcctgattctctcc

SEQ ID NO: 240891 - DNA, 641 bp, Glycine max
tagccctagaggggatggaccttttcaggttttggagagggtcaataattttgcctataggttggacctcccagatgagtatggaatcaacaccacttttaacatttcttatttaattccttttgcacgtggagctgatattgacgaggaggaactaacagatttgaggtcaaatcctcttcaacgggaagggaatgatgcaatcctccctaggaagggaccagtcactagagccatgagcaagaggctccaacaggattgggttagaactgctgaagaaggccttaggattctcatgaacctcaaggtaaatttcttagcccatgagctaaggttgggtccaattatctttgtacatattagactaggatgtcattatatttggtccttgtatttagggctccataatgtaggtagggtaccctagaagtataagatttttcagcccttgtattttagggtgattttaggcagtcttcttgctaagttaacctgcacattaaaaggatttcaaaaaaatgttcaagtgattgacgttagaaaaggacatttgcttcctaaccatagagcccatgttacaccatagagcacttcttaagtcttaagcataaactaacttgacaacagtaaagggaatttga

SEQ ID NO: 240892 - DNA, 587 bp, Glycine max
tcttatgatgcaaacgagttacccgctacctcatgcactcctctaatgttttattcatcatttctggcgctaaactgctgggagttggaagccatcttctcaattaaatttctggcttcaacaagagtcatgtcttcaagggctccaccactagcatcatctatcatactcctctccatattactgagtccttcataaaaatattggagaagaagttgctcccaaatcggatggtgagggcaactggcccatagttttttaaatctctcccagtattcatataagctccctccactgagttgtataatacctgagatatccttcctgatggccgcggtcctggcaacatgaaaaaaaaaatgctaaaatactctcttatagtcatcccaactcgtgatggaccttggagcaaggtaatacagccactcctttgccactccctctcaaaaatgaggaaaagcccttacaaatatgtgaccctcttggacatctgggggtttcatggtggaaccgacaatattaaattctttcacatgtttgtgcgagccttcacctgcaatgccctgaaactttcggaaccacatgga

SEQ ID NO: 240893 - DNA, 184 bp, Glycine max
tgggcttctgtaatgaaggttagtcaataaccagatgttattttttagaccttgtctcggaacattaaaatctgtgttctcttgtggcaggagtctattttcattgattctgctactcaattaaaggtattctttcttttgcttctttttttaggaaagtgttttgtgtgtgtgtagggggggc

SEQ ID NO: 240894 - DNA, 637 bp, Glycine max
ttggttaaaagctcatctagaactcttcaaaacaactgatctagagacttttttattccttaaccagaagtcccaactcgctgcattcttagccgactcaaaatcaaaagaaagcctggctcaaaatcttaaagaagtacttcaacttctgcaacaagaagaaaaaggctctttctcgaagaaggaagaaacaaattcatcagaagaagatgacccattttaccaaaacgaggatgattgttttggtatctcattaaatgatgattaatttgtaattcacttgtacagtagaaatagttttggttgcataatcgggtctgtaacaaacagtctttctatcggtgataaaaggagtccttgatcatattgtgaggcaccctttgagatagttagatagccatttagagggagaagctctgcggagaaaacacatctttgtaagcttctcttttgaaatcaataaattgaaagtttttattcatctctcttctccctcctgaccgatcctgtgcggctctgccgctgcttctatttctttttggctttaatggtttaatttagtttacttaactctttcattctcgaatacttcattcttaatttcgtttcatacatactgcaatcttactttctttct

SEQ ID NO: 240895 - DNA, 506 bp, Glycine max
ttgacgccatacaaacgacaataacttttttctcggatgtctgattgatttttttaacatatcgagacgctcgaaattgaaagctgaagctctgagccaatacaaacgaccataactttttactcggatgtctgattgagtcccgtaacatatcgagacgctcgaaattgaatgttgaacctgtgagccaattcaaacgacaataacttttttctcggatgtctgattgagtcccgtaacatatcgagacgctcaaaattgaatgttgaacctctgagccaattcaaacgacaataactttttactcggatgtctgattgagtcccgtaacatatcgagacgctcgaaattgaatgttgaacctctgagccaatccaaacgacaatagactttttactcggattgagtgatagcgtcccggaacatatcgagacgcttgaaattgaatgttgaacctgtgggccaattaaaccgacaataactttcttctccgatgtctgattgag

SEQ ID NO: 240896 - DNA, 636 bp, Glycine max
tcttatgatgcaaatgagtttgtagctacctcatgcactcctctaatgactatagcatcatttctggcgctaaactgctgggagttggaagccatctcctcaattaaatttctggcttcagcaagagtcatgtctccaaaggctccaccactagcagcatctatcatactcctctccatattactgagtccttcataaaaatattggagaagaagttgctccgaaatcggatggtgaaggcaactggcacatagttttttaaatctctcccagtattcatataggctccctccactgagttgtataatacctgagatatccttcctgatggccgtggtcctggaagcaagaaaaaaaaattgtaagaatactctcttaaggtcatcccaactcgtgatggaccttggagcaaggtaatacagccagtcctttgccactccctctaaagaatgaggaaaagccttcagaaatatgtgatcctcttggacatctgggggtttcatggtggagcagacaatatgaaattctttcagatgtttgtgcgagtcttcacctgccaggccatgaaactttggaagcaaatggattagtccagttttaagaacatatgggacatcctcatcagggtattggatg

SEQ ID NO: 240897 - DNA, 628 bp, Glycine max
  unsure (1)..(628): unsure at all n locations
tattaagatatagttttaaaatggcaatctagatacattagcacatttatttgtgctggaatatcggtcaactacgcaagactntgactagaacttgtacttaaagcacttatagtataaataagttgggttgcatgcaaacatgacagaatttctcccaaatactctagctcagaaaaagaaccccaaatgagagatttgtgtttcatgaggtgctttactagaatatactacatcaaaataaaaccagagaaactttccaatcaatggtaaatggatgctacggggttataaaggaaaaatctctcataatgggtcaatgaaatcaccaatctggattttccattggttcaaccacctataaatgaatgatatgctatgaaattattctagttatgcatgttagtaaaaaaaagaaaaacaaaacacaagctcaccttggataatattctgctgccagcttttccaattttggttttaaatatatacattttctacaccaatttgccatcctacaaaccatgtaatagcacttcaaatcccatactggtaaaagagttattcactaaacagaaaaatgaaggaaacataagtttgtcttttacataatgcacaatgcaagacatac

SEQ ID NO: 240898 - DNA, 580 bp, Glycine max
tctatataagctgaaccattttatcaataaacacgcgctgagttttatttttataaattagagttcttctcttttatcttagtgagagtgattctcctaaattcttgagtgattcaagaacaccctggctgtatcaaaggactttcacaacctttgtgtgttgccctcgctggaaagagtgagtctttccttcctttcatcttcacccttgttctttcaaaccacaattccagagaatccacctctacccagaattatctcgtggccgtaactcccattttacgcactcaaattaagtgattcttgagcctaaattgactttcaaaacgagacctttcacctcgttttggaatcacctcatttggagccctgtagcttcaggtattgccatttctatatttctgtccagccaccacttaacctacattttaccatcccattcatccattttatgccaagaaccaccttattatgacccacgaaattaaccaccttatttttcatcctttccttaatcaatttccgcattttccatcaaagtttaatcctagacgattctaagtcatgccttgtgccatga

SEQ ID NO: 240899 - DNA, 607 bp, Glycine max
  unsure (1)..(607): unsure at all n locations
tgtatgagtactgggaaagattcaagaaattgtgtgcaagttgtcctcactaccagatttctgagcaactccttcttcagtatttctatgagagacttagcaacatggagaggagtatgattgatgctgacagtggtggagctcttggtgatatgacccttgcagaggctaggaatttgattgagaagatggcttccaactcccaacaatttagtgcaagaaatgatgctattgttcttagaggattccatgaggcagccacggattgatcatcatctattgaaaataaaaagcttgaaggaaaacttgatgccttggtcaacttggtaactcaacttgccatgaatcagaaatctacacctgttgcaagagtctatggtctatgttcttctgcaaatcaccatacagatctttgtccttctttgcagcaatctggagtcaatgagcaacctgaaacttatgatgtaaacatttataatagacctcctcagtagcaaaaccaacaacaacaaaataattatgacctttcaagcaatagatacaatccaggttggaggaatcatccaaatctgagatggacaagtcctncacaacaacaatagcatgt

SEQ ID NO: 240900 - DNA, 561 bp, Glycine max
taccaaatcacacaagtagtataaaatggacagttcaagtatcattttcttttggacttgtacaatatttgataattcacacacttttgacttattagacaaaatataagcggacttgactaacaattattaagaaccaaaataaagatgaaaacttaaaaataaaattaataaaaatagttttatgattctcaaggatctagacggtagaaaaagcattgcacgaaacaatgattatgaatcttcgggtttaactctactgaactacctgttcatgcatacacaagtgattaatcagtatttatcatttttttgtttacaccaactcataaaaatgctaaatccctaatttcttataagaagagataagttccttgactaaattaccaattccttatataacttaacaaaattacactctctaagaagaggagttagaggtgactaatggattttgctctatgcctactaataatacccattaggtgctcttatttaattcataattaacatacattttcgaatcacatttaaaatggtggagaatggaggatgggggag

SEQ ID NO: 240901 - DNA, 646 bp, Glycine max
  unsure (1)..(646): unsure at all n locations
ttaatttcatgcacaaatgaagggataagactccaaaagattttttttttttttggccaataagttattgtgtaggctctctttgacaaggctttgtgaaactttgaatgacccccttggaagccaatttgaaggtgccaagccataccacaaacggatagttttgttttttgcaaaactaccaaaaattggaagggataagatttgtccaaaatggatattttcgctttttaccaaaactagtaaatcttatctttcctaggttattgtgctaatattcctaggaatacgtgtagccagagtgatcctcacacatagaacactctcacatggagtaaagttacattgtcgctcaatgcactctgtaatttcgctactgatgggattttttatttagatagttttccaaattttttccaactaactaaataaattatttccactataaataaattaaactaactctaaacttatatagttaacatcatacagagcataaattaaatcacacaatcatattatttaattacacagtttaaatttccactgtctagtccttaatagtgaaaatttttacacatgttaaaaataaatgtagaaggaaattntatggtgttacaactctcccgccctttttgaaaattct

SEQ ID NO: 240902 - DNA, 1111 bp, Glycine max
  unsure (1)..(1111): unsure at all n locations
cctcagctatgattcaatatacaagtttctaacgatctgagccgtgcgatatttttatactcctgcctcatagaggaataaatacccccgaagccgtaggaagcacctacctaacacttgttctcacttcgctantaaaaccaggtcaacgcatatncgtctcagtatggttgttcgctgtntgaaccaccatactcatccttagcgtggctggaaagggatcgttcgtaaccaatacgaatgggctagtggctttgtacgcanaatacctgccacctctgtccagatcgtacgctcgcaaattgagaaaacaacgacaacatggtaagatgtgaagccaccgctcattttcaaaccaagaacataacctaattagcttcgcaagggctctctaggaattccccaggaagaggcgcgtaatccacagagtctctctcgacccatatggagaacacgctttctggaagggactcccaagcactcagacttcttagctgttattaggaggtccatccctcaattcaccatttggactgtcaacagcggcgaaatctctcttgatatgaaccactcatacatccacgaagctctttttatatttggggcgccactgggtaggaatgtccatatgggaaatacccttcccacccactattgaaacgccccatatatagacccttgtcaccctggtgtaaagaaacttcgtctggaaatttctcccacgcctcgaacaatcctacaggacctcatttcatcgcagtgacagcgcccctgtcatgttgggatggtacgcgtctcccagagacaccccgatctccccagcccaaaggctggttttcgggcacgctgctcaaaacaagatgaaacactcgccgcgctagctttgctcttttatattaagggtgcaacgaggatgttcttatacccgatctcgtggcatcaacaagaaactattataacttgtcanttctacaacattctccactgacacaacgggacaaatggaggacctccttcgggtgcgagtctctcgctgttaccatgcgcataccatactcgactacgtaatctcngctctctcttctagctgtgcgcggaaggtgactctccc

SEQ ID NO: 240903 - DNA, 459 bp, Glycine max
agcttgcagatatcgtctccaacatcgaaaagatcgaagagggagcgaaaagttgcaaaatagagcatcctactaggacgacagagaaaactgaggcaaatgaacacggcgagaaagagggagaaacccatgctgtgactgccattcctatacgagaagagtgtccaccaaacccaacaatgtcattactcaaacactaacaaacctactccttacccaccacccaaagatccacaaaggccataccgaaatcaaccacaaagcctgtcaaccgcacttccaatgacgaagaccacctttagcacaaaccaaaaaaaaacaccaacaaaaaggaaatctgcagcaaaaggcctgaaaggtacaccccaaatgccgcagtcatatgctaaacttgatcccaaaaccactcaacaaatcaatggcagccataaccctaaccaagggtccacaacctacatt

SEQ ID NO: 240904 - DNA, 488 bp, Glycine max
  unsure (1)..(488): unsure at all n locations
tgatccaactcaaccatggatagacaaaatatctaccagacaccgcatatactaaaagctctnacccttatcgcgattgaactactttaaggaagtaggggaatgaaagccccccataaccattaactgggaaccaagttcatgatcgcgtcaacgacattgttaccgtgtttgggaagtcccacaagaagacatcatcttccaacaacatgtggaagaaacgctcaatattctttgatctttcatactgggctgatctatatgtgcgtcactgtctacatgttatgcatgcggagaaaaatgtgcgggatagcttaatttgtactcttcttaaccttaaagggaagaaaaacgatgggttgaaatttcttcacgacttgcgtgacatgggaatacgagagcatttgctttccatatcacaaggtccgggaacatatttaccccctacatgccacacacttgtctacatcagagaacaaaaacttttg

SEQ ID NO: 240905 - DNA, 460 bp, Glycine max
taaccgagactcgcgctcccggttaaggggccagtagtttccttttaactgttcctgcgccaccccctgatattggaggagggccaactgtgcgagcacaaccagagagggaggctatcacacagctactatgcataccggggcaagatttcacccgggccgctgcaaagagacgagtgtggatcatgcgcaccaacatgaccactcttacacagatataaatgacgttgttacttagcaacattctgcccagtgatcgtaatgccaatctgcccctgcagatgtatcggatggtctgtgtcgtcatgacataggtaagtatgcacatggttcaattgatttctgatgtcatctattgtttgcaaggatcgcgcccacaagacgcccagtgggcccgaagaagtccaacaaggccctgcggtttacagctatggatacgggcctcttgagtcctataggg

SEQ ID NO: 240906 - DNA, 563 bp, Glycine max
tctcttggattttgaacaagcaattaactcctctttcagaaccatgctatgttctcgcgactggtccctttcttcccttcgcaacttgagttcactattgctaccccatagagctccgcgaaatttattccggccatactcttccttgcgagccctcttggtctcttgttcaagggctcttgcggtaatcgcattctcttcccgtaacccggcacactccttccgaacgtgtgtagcggccaacttgaacttctccttggcaagtttcgcctttcctaactcgcttttgagagcttggacttcttcgtcctcttccggtgcttcaaaactctctttgctgacgacttttaacttggggagccaatctaaacctcgtatatgaactttcagccattcgtggtacccaccaatgatgccattacgaatgcctctaagttcttgatctttccttaatgggggttcccatgccttatgcattctttgtatagacctggaattttgtgcgccgaaatccctcacaaggaaaggagacatgctttcttccgtcgtactcccctcatggg

SEQ ID NO: 240907 - DNA, 651 bp, Glycine max
  unsure (1)..(651): unsure at all n locations
ttacaaacatgtgcacattttatcaggcttttcatgagtatgaatattatttatgattgttgcatcataaggagatatttgtacaagcaaggactaattgtattatgcatcttggaaacacaacaactaataggtatttgcttatttcacattttgtttgttatggtcttttgttgacattacactaaattactttgcaaggttgaaagtcggacatgcaagactaaagagattgcttcatgatagcatgatagatttgtgttcttgttgggatacaatgaataacatgcttatactgcaacacactggacttaatgcgtgattttagaaaaacatcaatgtggttgagcacaggttcaatacaccattttacaaaagaccatggggctttgtttcaacacaggcataaagttctgcttgtggctgcacactcaaaactactcatggtctatcatatgcctatgaacttgctaggtatacccatattagtggcttaatacccttatcacccattcatacatatttggaagatgctggctatttagtggtatagaacgacgcangtgattcttggaccggggacttaactctcacaatgaaattgatgcatttgtaaagataattttatagcttgacctgggacggaaaatg

SEQ ID NO: 240908 - DNA, 623 bp, Glycine max
tcatccaactcaagcatggaaagaaaaaagtatataccagacaccgaagatttctaaaagcttttcacccttatcgacgattgaaaaaagcttttaatggaagtcaggggaatgaaggccccccagaaccattaactggaaaccaagttcatgatcgcgtaaaggacattgtaaccgtgtttgggaagtcccagaagaagacatcatctcccaacaacatgtggaagaaacgctcaatattctttgatcttccatactggtctgatctatatgtgcgtcactgtctaaatgttatgcatgtggagaaaaatgtgtgtgatagtttaatttgtactcttcttaacattaaagggaagaaaaaggatggtttgaaatttcgtcaagacttggttgacatgggaatacgagagcagttgcatcccatatcacaaggtcggcgaacatatttacccccagcatgccacacactgtcaacagcagagaagaaaagtttttgtcaatgtctgcggaatgtctaagttccacaaggatactgttcaaatatcaagagcctttgtgccctcaatgatcttaagttggttggcttgaagtctcatgattgccatgtctttatgcgacaatta

SEQ ID NO: 240909 - DNA, 536 bp, Glycine max
tgactgcgtggagatacgaaccatgtgcctctccaagatacgagcagtcatatttacctcataacctaacacagctcatactttgctgtacccttatttacgtgactatatatatggaggaacgatggtttcttgatttaaacatacacactttgataaattctcaccttcggactttgactccagaggatgtcaagataatttatcgggaacaccgtgcaccatatatcttcaacatttgaccgtcaattcgattcatacttggtcacctgcagcctatttattgcatatggtaccttctatgatgcccacataaatacgtgtatcagaaaccatacgtattattctaaaatatatatgatgcacatcagtgaaacctccaagagtaactgtattggatacgtatccactacggatgtgtgaaacaaattggactattggcgtgcttcatataccttaccgggagttgctgcactaacactcttatgtatccaggtggagatcgatggagtccctatgatactgttgtcaagaaa

SEQ ID NO: 240910 - DNA, 471 bp, Glycine max
  unsure (1)..(471): unsure at all n locations
accgggatccttaagtcacctgcggctgcagcttgcttcacaaatntcccttatttttgatccttggaaccctttaaaaaacctctaggattcctatttataggaaaagggtcactttggggcaattgtagttcacccaagcgagctagagctcgcctaggcgagctgaaacttagtgctgaagcaatgagctcacccaggcgagttggtttcttcaccatgaagttatttagtggcccaagcaagccagaggctagcctgggtgagctagggttcaggaaaatcaaggaaaagacccttttgcctccctttttttggtatttttcgcattcttgatcaaaacactaaatgatcatatgtttcgcactgtaactctgttcaacatcgtaagtcgactagcaaggatcaaaatatcaatgaacgatagtcctcggacgaaatagggtatgacagaaacaaatcttagatatt

SEQ ID NO: 240911 - DNA, 355 bp, Glycine max
  unsure (1)..(355): unsure at all n locations
cttcgattcattctatgtgcccgtagtggtccacattgtgcttcgtgcattctttctcgttttgtttactttttataccccctgttgacgtgcttaagccattttacttaagtcatttatcgcttaacttaaaaataaaataaatttccaccgaacgtttgaattgtattatccattaacttcggttaaaataaattccgaccgttcggtcgtgccgtaaccacgttggaaatcaaaaagaggtaaaaaataatataataatcaaaaagacatcttttagtanaataaagcgganaatcaatcggacgttttctctttgcgatttctcattcttaatcgaattgattaataacta

SEQ ID NO: 240912 - DNA, 429 bp, Glycine max
agcttaagatctgcggcaattgaggaagtcgctgcatgtttttatttttgtatgttcttcttggtttccccctgggattcctgtcctctgtaattttctcattgcagtctttaaaaaagaaaggaacgtaggattgaggttctggtcctcgctttgtgctttaaaagatgtgtagtatttgataaccggagccttttcgctcagtccatgggatgccccaagcgcttaattgaaactgaacccgacgagctttcgctaaaaagattattccatttgaaaacactcatgcatacgcatacacatgcatatttgttatcttatgacaggaactggatcgttttaggcaatagtcaaatactgagccaaatccaaagacagagacgaatcgaggtaagcggtaacgcgaccacgatttgctgtgcaatgtca

SEQ ID NO: 240913 - DNA, 419 bp, Glycine max
ccagaaaccatgggagttggctgagatttagaggacctacgtccttcaaagaagacttgttaagatgagcaataagagaggtgatttcaaaagaagaagagttggtgaagattatatcatcaacatacaccaacacataggttttagaggtaggtgtaaatcacatgaaaagagaagtatcactcttggctgaattaaatcccaaggacctcaaagtcaaactgagtttgtgaaaccaagacctggaggcctgtttcaagccataaagagctttgagcagtttgcatactttgtgtttgtcggatgaaacaaagcttggtggttgagtcatatatacagtttcttgaaggtctccatgcaaaaaggcattgttgatatccacttgatgaataggccattgttgagaaaccacaaaggac

SEQ ID NO: 240914 - DNA, 456 bp, Glycine max
  unsure (1)..(456): unsure at all n locations
cttgaagacaagggttatgaacctacacgctagcatccaaattcttttggaacaagctttttgtatattttttgtatagttagaaaaatctctcaaagcaccttaaataccttgagagaaaagactaagtacttagattgtacaatcgtttgtaagacgattaagatttagtcaatgtgcaaacaaactataaatatgttgacttatttatagctagcagtggcttgatagaacaaagaatatgtcaagcttggtgtagagcttgagttgtaaaagccaaaagtgataatgacttatacttataacttgttgaagttggtggaacttggtggttaaccaaaagctagtctcaatggtagagatgactagtattttaatctgacttggggtttgaatttgattctgtctganaaactcttttaattntgcaaaatctatttctatcgtctaaatctg

SEQ ID NO: 240915 - DNA, 364 bp, Glycine max
gatgaagacgacagggaccaccgagggggttccaatgagccgcatgagggcgcgttttaggtccttgcctcttggatcctcgtccagctcgtgcacggttgggttcacacccatgccgcagaagagcctcttgatggcgtggcacatgcagcacgtgctcacgctgaatatcaccaccgcgctctccgacgccagcctctctatgcgctccagcgggtcccccactaccgccgccgccgcgttccgaggggccgccacgtagctcccccaccacgccgccgccgctgcttggtaatgcattctcagaagaattttatgtgatgaaagaatgacacgcacaatgtatgaaaatgagagtgagaat

SEQ ID NO: 240916 - DNA, 408 bp, Glycine max
  unsure (1)..(408): unsure at all n locations
agctntgagcaaattcaaacgacaataactntttatctcggatgtgtgattgagtcccgtcatatatcgagacgctcgaaattgaatgctgaacctatgagccaattcaaacgacaataactttttactcggatgtctgattgagtcccgcaatatatcgagacgctcgaaattgaatgttcgacctgtgagccaattcaagcgacaataacttgttactcggatgtcggattgagtcctgtaatatatcgagacgctcgaaattgagtgtttagactgtgagctatttcatacgacaataactgtctactcggatgtctgatagagtcccgtaatatatagagacgctggaaattgaatgttgaaactctgagccaattcatacgacaataactttttactcggatg

SEQ ID NO: 240917 - DNA, 338 bp, Glycine max
  unsure (1)..(338): unsure at all n locations
ntaacattcaatttcgagcgtctcgatatattacgggactcaatcaagcatacgagatagaagtcactttcgtccgaattagctctgagcttcaacactcaatttctagcagtctcgatatattacgagactcaatcagacatacgagtaacacgttattgccgtgtgaattggctctgaggtttaccactcaatttcgagcgtctctttatattaccggactcaatcacacatccgagtcaaacgttattggcgtctgcattggctcataggttcgacattcaatttcgagcgcctcgatatattacggtactcagtcagacatccgagtaaaaagt

SEQ ID NO: 240918 - DNA, 418 bp, Glycine max
acttgaccttttcctcacacatgtgccatactccccaaaacttattttaaataatatttgaattttgtaaagagataggtaaaatatctattatttgagttatgttaattttattgctttgtgtgttatattttcacatgttttttttttagcaaggagctacatatatagaggtaactagtcaccaacgtgtagcaacaaaatacttgcagcaatatcattaagaaacagaaaatagaaatcgaacaaacttcctatcattaaatacttgtaacgttctgatcgaggccatacccgaatcaaataaacattaaaaatgcagtatctaggaattgatcttaggtcatctcccaacgagcattggtcaaccaaacgttcattacagatagtaataaacaataacgaattgggggggggg

SEQ ID NO: 240919 - DNA, 417 bp, Glycine max
acaatggctgaccggattagtaattcgcctgacgtagtgctctctcacattctctccttagtcccaaccaatgtagcagttgcaacgagtgttctctccaagaggtggaaacttctatggcgctccgtttcgactctcaacttcaaccacagccaccatgacgacaacaaccacgaaacctgttccctctttgctcagagggtgcacgcattcatcctcatgcacgacatggaccaacccttcacaagattctgcctcagttcttcttgccctctcgatcccattcatgtgaacgcatggatttccgctgcaacgcaacacagagtcgagcacctcgacctctctctgggtgtgcggaagaattgccctcttcttgctttcagctgcaaaacctcgtgggttgaaactgtgatgttg

SEQ ID NO: 240920 - DNA, 302 bp, Glycine max
agctatagctggagtcatctttatgattatcaatatgtgaccatggcatgaatttcactcacggattcctggtctctgtggggttcttatcgcttcctctatctaacaatagctcgtctaagctgagcttatacttatagctgcatcgactaaaagatggggctactctgattactcattcacttctccctcttgcctgaaaaatcgaaagactaaccgcctgagtgatcttatgtatcccttcttcctcttacaagacaattcgaaggaccttccgcctgagaatactcatgcttcttccc

SEQ ID NO: 240921 - DNA, 66 bp, Glycine max
atgagcaatatgagaggcgatttcattggattaggagttggcgaagattatgttatcagcatacac

SEQ ID NO: 240922 - DNA, 324 bp, Glycine max
  unsure (1)..(324): unsure at all n locations
agcttaanatctagggcaattgaggaagccgctgtatgttnatatttttgcatgtacttcttgttttccccctgcgattcctgtcctctgtaattttctcattgcagtctttaaaaaagaaaggaacgtaggattgaggttctggtcctcgctttgtgctttaaaagatgtgtagtatatgataaccggagccttttcgctcagtccatgggatgccccaagcgcttaattgaaactgaacccgactagctttcgctaaaaagattattccatttgaaaacactcatgcatacgcatacacatgcatatttgttatcttatgac

SEQ ID NO: 240923 - DNA, 337 bp, Glycine max
ccacaaaccatgggagtcggctgagatttacaggacctatgtccttcacttaaaacttgttaagatgagcaataagagaggtgatctcacaaacaccaagagttggtgaacattatatcatcaacatacaccaacacataggttttacaggtacgtgtaaatcacatgaaaagagaagtatcactcttggctgaattaaatcccaaggaccttaaagtcaaactgagtttgtgaaaccaagacctgcaggcctgtttcaagccataaagagctttgagcacgttgcatactttgtgtctgtccgatgaaacacagcttggtggttgagtcatatata

SEQ ID NO: 240924 - DNA, 395 bp, Glycine max
  unsure (1)..(395): unsure at all n locations
agcttatccttatggctcgcctccggacttcacccnccatgccaccccggaagattaagccaagccccgactttcgaggggcaactcccaccttatgatgactatcccaggcaagacgatgaggaaggagatacccatcttggccccctgctccacctcaaagatccgtccccctatgaactaccccaaccgaacatagtccgccatatcccggcttcacccacacctacaaaagaatctgttcccttcgcggaagataaggagaagatgaaggcgcttgaagagaggttaagagcagtggagggccttggcaattacccattctcggatttggcggatttatgtctcgtgcccaacatcgtcatcccttccaagttcaaagtaccagactttga

SEQ ID NO: 240925 - DNA, 457 bp, Glycine max
  unsure (1)..(457): unsure at all n locations
tgtagggttcaccccagattccgttgtcatatgctaaacttgatcccatatctacttgataattcaatggtagccataaccctagccaaggttcatcaacctccatttctccgagaatacaactcgaacacaacgtgtgcttgtcacggagaagcccccgngcgttccattgagcattgtagggctctgaagtgtagtgtcgcaacctacccttccgcgggagggcgacgcgagactcgcgggatgcgtgttccacgaaaggaatacgcgcggagtcgccaccaacgtttatttgaggaaaacgtccgataaactggaaaagacgcgatctacgaactgtttagtgaaaggttcgggagttgtatctacgcacggcgaacgtattagcaccccacacgcccgtcccaggggacggcagcctttaatcgaatgtgcaaacatgactttgattttatgt

SEQ ID NO: 240926 - DNA, 324 bp, Glycine max
  unsure (1)..(324): unsure at all n locations
agcttgtaatcgattacacatataatgtaatctattgccagagcagattttcagaaaatattctcaacagtcacatctttttatgtggttcttgaatggctatcaaaggcctatatatatgtgacttgagacacgaatttgctaagagtttttcagaacaaaaaagtcttatcctcttataaagaaaaattgttttatcctcttacaaattccttggccaaattacttgtgattcaataaggaatttttgagtgctcaaatngttcaatntatctctttcaagagagatttcttcttttcttcttcttcattctgaaaagggat

SEQ ID NO: 240927 - DNA, 454 bp, Glycine max
  unsure (1)..(454): unsure at all n locations
tgtcgaattatggcgtacccatcacatgtggtactaggtggcggtcgggcgatggtgcaaaacgattctccacatccacaaatcacgtataacccaccatcccctgttgcccacctccaactgagctcacgtactcccacgtagcccttatcctcgttcctctcaacgccgggtccccatcaatcctcccaagcttccacaacatccaggtaattccacatccaatcatcatggaccaacaaaaccaagcaaaatagggcaaaggcagaaactctgcccaaaacacaactcanaatcatagcttttcacatacaaataccccagtaacattttcttcgttccaattcgttaaccgttggatcgactcgaanattttactggaagtatctagtacataagtctacatnttgaccgttgggatctgctagaaaatgtccagaaacccatatgtact

SEQ ID NO: 240928 - DNA, 300 bp, Glycine max
agcttctggcctatctccctcactcactcactgtctgtcgaaggtatctcccacgccgtgccgccatcctgtacagccatcggcatataagtaagaaccctactttattttgttagtgttaatttcaacatcgggattcttttattttgttgctgttctgtagaattgaatatcagttggtgttgttgttctgtagaactgaatatcagttgtattttgttgttttcgtattttaaaagacaaaccatgtaagatatatcctatatggtcacccttatttttatgggcttagatttaaag

SEQ ID NO: 240929 - DNA, 438 bp, Glycine max
  unsure (1)..(438): unsure at all n locations
tctatcaccattaanacaacaacaacaacaacaacaacgccttatcccactacgtggggtcggctacatggatcaacttccgccataatgttctatcaagtaccatacttctatcttttgacactgtactcgagccatacagcgcgttgcttccgggcaacgacctagcattcacattattacgtaattgatccatgtcatagagattcgacaaagtttaacgttggctgtcgaaagcctaacacaaccctctccttttatccgggcttgggaccggttaagaatagcaaagctaccctacgcaggatttctatcaccattaaaacaagtaaaaaaaaataaaaataggtagaactatttggaatcaatagaaagttggggcaaaaggcttatgacatagaggtaaatgcatagaactattattatggaagtcaacac

SEQ ID NO: 240930 - DNA, 354 bp, Glycine max
ataccctcaatctaaccgacctgcaattgttggaggaaatttactacgggcagcgctccacgtatgcaagtaatcaattgacgcttcattgtaggcgactgaaagatgatgctaatgttaacacactgttcttgtcacatcatcgaatcccgtttgttgccctgattgacttattatataacatcgatagaaccccagatggtcaggtaaacttacttgcgactactatgacccctactcatgatgccctgctatattacaatgagatgtggaacatgtcgcgcctttttgtatttagtggctactcaatcacatgttttttctccaattatctttgacattcccggcggatgt

SEQ ID NO: 240931 - DNA, 221 bp, Glycine max
  unsure (1)..(221): unsure at all n locations
acactatacagtacgtaagcttgcatgggttgtacataacgtgctgaggggcagtcctagtgtttaagcatcattactacaacatcagatgcagngactatttttactacggcttccgtgactgatatagacagactgttgctgctgaacctagaacctcttagctcgaacattatgaggaagatatttgctgtacaggacgaatacgcatcgtattatgc

SEQ ID NO: 240932 - DNA, 257 bp, Glycine max
agcttggagaaaagaactagaacatgcaagatatgcgtacactacgactataactgaactagattcttccaagcaagaactcaccaaaataaggcaggattttgatgcagctttggaggcaaagctggcagcacttcaagcagcaggagaggctcagcgttcagtcaaattaaactcggaaagaatcagtgaactcttcaatgaaatcgcaaccatgaaagcatcaattgaacaagtgagacttgcctctgaacaat

SEQ ID NO: 240933 - DNA, 399 bp, Glycine max
  unsure (1)..(399): unsure at all n locations
tctccatctctacaganacaaacgtaacttcatcattcaactctgccattctgagctgatttagagtccttttggcatagacagtgaatgcaatagaggtaactattgccataatgaaagaaataatgttgtatacgatatccacaggagtcaagcggtgcttcccatactgtgcgtctgccaatgtctctattaaccgaccactgagagatggagaaaaagataaatctcaagatgagatgttagtttatttaacagaagtaaaaagataacacgttctaagctgatccacatctatatgactatatccatcagaagtcatatatgcttctcaacttctcaattctcattttcatacatgtggagctaacaaaaactcgggtacggtagggaactcat

SEQ ID NO: 240934 - DNA, 445 bp, Glycine max
catgcaagcttccactccagttcccattcgagtacctaatgggtgtgattgtcatacgttaaaaaccttaatacacaatacccttaagctaaccgacaagcaatttttggatgaaatttactaccggcagcctttcacgtatgcaggtaatcaatttcggtttcaatgtatgcaactgagagatgatgctgatgttaacacaatgttaatgtgtaatcatgaattttcgtttgttggtctgattgagttattatgtagcattgctagaaccccagatggtattttaaacttacttgcaactactatgacccctactcatgatgccctgctatattacaatgggaggtggaacatgtcacgccaaaatgagtttgtcggttactggtccacaggataaaatcccaataactttgacattcccaccggatgtaccatggatgaactg

SEQ ID NO: 240935 - DNA, 304 bp, Glycine max
  unsure (1)..(304): unsure at all n locations
caacaacttatgaaatactgtcctactgaattggatatatactctgngattcctaaaagaacaataaaaactccaacttcctctactgatatagaaaacactgatgcaaccaaatcttctaccactaagcatgatctttctgataaagatattctatgttatggacgaaaacacaatgtattatgctctattaaaactgttcntatcatattattacatttctttaaattttaaattagcgggagattgttggaaaatatattcttataattcaaaattaaaatatatctttttataaattatg

SEQ ID NO: 240936 - DNA, 466 bp, Glycine max
  unsure (1)..(466): unsure at all n locations
agctgtgatntaattntctttcgtaaattccttgaactattntagattaagccaaataaaatgaaaaaaaaaaattattcaacttaaatattcatcttatatttctcattttgttcttttcttgtcgcatcattataggattgcttgacatttttctctttccctatttccatacatcctggctttgaggaagagttttaaggttaaaatataatttgcgtccttataaatataaaaatatttaaaatttatttttgtaaaatttttaatatattttcttccttacaaaattataatatatatcattttttaatttgtacgtaggtttaatttagataaatccatatttacaatgatcactttttatattaattatatgtatataatgaatataacaaaactaaatacctaagtttggattgaaacgaaaaataatgcattgtatcttatgaaaatgaaaaatata

SEQ ID NO: 240937 - DNA, 366 bp, Glycine max
  unsure (1)..(366): unsure at all n locations
actanatgacccttcttgtaccaccaagtttccaactcaatcacttttaaagtcctcttgactgagtacaaagtgacttgcagcagtttggtgagtaattaagcactcctctacatgtcaaattttaaaatcatatacatatctaatatgaatttcatattaatttcaggatgtgtcgagtaccatgtactcatttatgaaagctataagattcatacatctgaaattggaaaggactacaaagtgtaagatagtttataattatcataggaagactgcaaaaattagaaatggatgaaataattttgcacaatcacagaattntcttcttgcaactcaaattatagctgagtttccatatgcaac

SEQ ID NO: 240938 - DNA, 489 bp, Glycine max
agtcgacctgctgcatgcaagccttgaacaatatacttgtccttcatttaactgtctttgggcttggcgaccatgctcaacaaagtactttcgacacctactgtacgttgatttcaccaatgttgttatgggaatgttgcgacaatcctttaaaaccttattgatacattctgagaggttggttgtcatgtggccatatcgacgtccttctctatcataagtcatcgtccatttttcctttgaaatgcgatcaatccatgttgctatggctggactcagttgacgaaatttttctaaattttgatcaaaaatgtgcttgcaatgagtgtaggctgcataaaactagttatgaataacaattttaagtatatatgaaagttaaataaacgtgaccatcaatttattatatcttacccaatttcttcaacatttctttttgtttgacattattgaattttcgattgaagttgcttgctatgtgtcgcacac

SEQ ID NO: 240939 - DNA, 404 bp, Glycine max
  unsure (1)..(404): unsure at all n locations
ccgcgtntgggagaaagaaaaggtaaggtttactgaataatttgatacccctcttgtctcgtaactaacgatggcagcgttccgatggaagagctttgaggagaacgaggatcaccctgaactgttctttcactttctttgaagttaatgctggaaaaagtctatttgtatcatttggaaagaagtaagcttaagctgcctacgatattatttttaatgttgtgaagattttcttgggtattgcatgagtgcctcatccacgaatgtaaaattatttgtctggctgaagtccttaacaattatttgttgtttgtagtaagttcatcacatacttacactaagacatttatcgcgattgatggagctggaaagcgattacctgatgaagtgagtcccgagacatg

SEQ ID NO: 240940 - DNA, 469 bp, Glycine max
  unsure (1)..(469): unsure at all n locations
agctnggttcgaatgactttntaatgaaaaattgttatcaaccgaactaatattttatggtttggtttggttcgatttttgtaatttttacaaaatattatttcactaaaatttataattttttttaatattttgaatcaaattacattaaaaaaattgttaataacaatctatgaaacttattaatatgttaaacattctaaaataaaaattttcaaaaatctcatctatttctaacatatcttaaaaaaatcatatgaaaaaaagtaatatgcattatataagtcttatatacatgacaataaaaaacattgtgaaactcaagtgatacatgcataaaatacataacactaaagtaatataagtattagtacaagtattatggtttgatttgcgttcaaaaacatataccgcaaatcgaactgaaccaatcattttgagaaaaacattcaaacaattcaaaaaaagt

SEQ ID NO: 240941 - DNA, 477 bp, Glycine max
gcttcggccgcccgcgttggtcaatttacaggcgcacatcactaatcttaacagactctgatcgaaatgccccgacatatataaaatgcaaaatcggatgtaacattgtttactctcaaccaattcaagttcgaaacttagtcacccttcaatatatgcatggagactcctcccagcaatctagatcacaaggcaattaatattttgtttacttgaatcgataccaattactattatttacagaattaatcatatgagtatgcatttttaatttttgaaacacgaaatggaattggtgagcaaccgttgcgtggatctgcatggtaggattgctgacaagcgaacaacaggaggatggaaagcgtcgcactttatcataggtactgttatgacattggatagacaatatattatgcgttcaatggtcaaattcttactgatgacaagagttatagcttagtaagtgtaacacatgat

SEQ ID NO: 240942 - DNA, 385 bp, Glycine max
agcttcaaggctaagtcttcatgtcgctccccctatctctaatagtaacctttggaaagaagccaacaactagaatgattgttgtcaggttcattgtagtaaagttctcattgtcctataaagccatattggcataccatctttgaacacattgaaggcattaatttcaatggtccacttgaccatgaagttcctcagtgatgatatacaggtcgaaactttgaaaggagactaaaagaaagctcaggaattttacaaagaatctatagagtagaagacatttgatagtttttttttcaaagcatagaaacaaaggacgtcgagtcctaagaagcacaaagacaaggacattgagtcctataaggacggggacactgagtcctat

SEQ ID NO: 240943 - DNA, 411 bp, Glycine max
  unsure (1)..(411): unsure at all n locations
ctcaagctctagcttctttaggaatcttcttaaggaagcttctcaaggaggtgagcttagttatgagaggggtgtgtgtagctaagctctagcttctcaaggaagttttctcacagaagcttctcaaggaagttttctcaagaaagcttctcaaggaagctacctagtctataaatagaagcatgtgtaacacttgttgtaactctgatgaatgaaagtcttatgagacacacttcaaagttctacttctccccctcttttattccttcaatttcgtgctcccccctctctctttctctccctctntcttttcctccattgaagcatccttccaagcttcttatccaacgctcatcttggtggtgaagctccttcttccatggcttattccctagtggatggcgcctccct

SEQ ID NO: 240944 - DNA, 420 bp, Glycine max
ctcgaccgggatccttaagtcacctgcggcatgcaagctttataagcgcgggtttgggagacgaaggtcaagtggtcgcgatatacgaagatgatgttccgagtacattggatttggtacgaccatgccctcctgatttccagctgggaaattggcgagtggaggaacgccccggcatttacgcaacgagcataatgtaaacctttacgggtttaaaagctctatagttgggcctaggctttagagcttttccttttgataaggctttgagtcttttgtttgtgaattcataatacaaggatctttcttcatctgttcctacgtctctacccattctcattcatttgcatgtttacttctttatttctgaaacggcagatccgatgacgagtcccccgaaggtactaatacctgggaccc

SEQ ID NO: 240945 - DNA, 289 bp, Glycine max
tgaaggtgtgtagaacactggtcacgtgtctactatcattgtgataatctctttctctattattggaggcgctacttgagctaccaagattctccatctttgggcgtattcattgaaagatccgtgcccccctttatgcacatgttctgtagttgcatcctatccgatgggcctcttcttcaatggccatgggcctttcctttagatgatccaccttatccatttccgccatagcatgagggtttttaatcgttgtggaatgcaaagggtgtggttgtgggtgatactg

SEQ ID NO: 240946 - DNA, 418 bp, Glycine max
  unsure (1)..(418): unsure at all n locations
agcttgcgcatcattggaagctatatgttgcttatgtcttcgttgggcctacagaatgtaacttttgaacttgatgcaaagttatagtggacaagataaagagcaatgtcacactcataacccacctcattcatagctcactattagaaaagtaggattctacatcggttctttaagagaaattaactacatcggtttacgaccgtcgggtagtctattctacaacagttgacaaggaccgtcttagaatggtcaacattctacatcgatcgttgaaggactgtcgtaaaatactcagcaagctgagcgtgaccatcttagaatgtcttgacattctacatcggtcttgtcaaaaccaatgtagaaatgctaattttgttttattttttgtaattggagctacttttnttttgtattt

SEQ ID NO: 240947 - DNA, 306 bp, Glycine max
  unsure (1)..(306): unsure at all n locations
ctntaaaatgtcatgtatggctctgctaaataaactctatattataagctactggaaaagtataaggcagcagcatctttggatacaacacaaggacgaagcatagctcctgcttctacagctgatactataagttaaacacaactttgttcaaagcagaggaggtatgtgctacgtgtgaaccatatcatggctgcataagaggcataacttctagcatgtccaactacacatgtcattctgatttattgatgcatagntcctcagaccactttttaccctcttttctcttttttggcactgtga

SEQ ID NO: 240948 - DNA, 401 bp, Glycine max
agcttccttctacacctgataaagaggatgagatagtcactgatcgaggccgtacccaaatcaaataaacattaaaatgcagtaactaggaagtgatcctaggtcatttcccaacgagcaatgactaaccaaatgttcataatatgcttcgttataacagtaatagtaacgattgggggggttgttttgtgaatttaagaacaagcagattggaatacgaaattaatagtattaaaaaaatgttgtttcctctgattcagaagccattctcgtgtcctaggttatgaagaatccgtctataacagttaaccacttaatccaaccctattttaatttactaaacgaaaatcaatttaaggttgtcaatatgtgattaagcaacacatacaccaatttaccct

SEQ ID NO: 240949 - DNA, 457 bp, Glycine max
  unsure (1)..(457): unsure at all n locations
cggttntgggaaatagcaccccacctgacgtccacaaggtcttctgacccccgcgacatatctccaggtaccactccgtggtcaacgaataaaagcaggaagtttcatccttctacacttcctcatctcaagcttgtaggattatggggtatccatcacatgtggtactaagtggcggtcgggcgatggtgcacaacaagttatgcacattcacaaatcgcgcataaacccaccatcccctgttgcccacctccaactgacctcacgtactcccacgtagcccatatcctcgtttctctcaacaccgggtccccatcaatccttccaagcttcctcaacatccaagtaactgaacatttcaacaacacagactatcacagccaagagaacagggcanaggcagaaaactctgcccaaagcaccaacacagcttttctcacttaaagaccccagtaac

SEQ ID NO: 240950 - DNA, 423 bp, Glycine max
agcttgtccaaaataaagatgcaggggcaactttcactccagtgctcataatcaagtattgtcatttgagagcaaaacttaatgccttggtctaatgagcttcctgacaggttgacacggcatcatcattcttgaagccaaaacttaggttgactaacattaaaaatgttacgaatgttgttcataatccaataacaaatgagaaagaatgcttactaattccatagaaacaagaaaaagaatacacattcgttcatatttcaaaatctcaataaaaaaacttgccttcccataatatccattttcagttgtattttagtatacaagattatacacaatgcaataatttcagaatatacaaagagaaccccattatgttttacagacctatacaatacccataaagagaacttacattctatt

SEQ ID NO: 240951 - DNA, 455 bp, Glycine max
  unsure (1)..(455): unsure at all n locations
tatgagtattattntcaaccaagccacttttgactctagaacaaataaaaagatttgtttaaggttgggtgcacataaacaaggctttcatcttatagacaaatttacaagataaacttattgtctttctctctcaagatttataatgtgttttgaaaggagtgaatacgcaatttagtccctgagattgtaatcattttacatattagtccctaacttaattttaaattcaaaatagtctctatctttacattcgttatgcaaataagtctctgccgttaaaatttaatttcctccgttagtcatgtctatttggcaaacctcaatccatgtaagcaacccaatgtggcangtttgagtccaagtcagcaatctcatgtggtaaggactgaattgaaaaatacgaaagttacgttacaaagaatcaaaaatgaataaacgcattttccccacaa

SEQ ID NO: 240952 - DNA, 385 bp, Glycine max
ggatccttaagtcacctgcggcatgcaagctagtctcgttcgttctgttgagaacaaagtctcaatctgaccttcatggttttcttcgaggtaaccatgattctatgttggttccttgttagtttcagcttgtctttgcatcttttctgactttggaaccaccattgtatattttgcacttcctttgaaaaaccctaaacaaagagactttgtaaacgttatcttttcataaaatgagtgttattttcgggaccttcaccaaaccccggtcacattggcgtgatcggaatatcacaatgatgttccttttctaaaatttgaaacgccttttaccctttaccttttgacaaggattttgactcaaaatattatcactagctttatt

SEQ ID NO: 240953 - DNA, 364 bp, Glycine max
cgaagctcggcagaaagctcgaagatgttttgtgttttacatgcttaactcccttgagtgacatttgtattggttgttatattgagtgtttcatcttagtatcttttgcgcatcatgcatcatcatgagtaagtgagacaaaaacttcctaagttacaaagtttcttcacaaggcgaaactctctatcttaattgattaaaaccttatcgtgattgattacacaagttgtctgaagcttgcggagttatgtctcatacccgcttaatcgattatagccttctcgtaatcgattacacaattgtgtatgagacaacgactgacttattcaagagtctctactttaatcgattaccatgtgatata

SEQ ID NO: 240954 - DNA, 391 bp, Glycine max
  unsure (1)..(391): unsure at all n locations
atcttgctggttggttctcaacattgtgaggaatcaggtaacatagtaccctttctttctcacctatcttttatctgtaagaactttgctactccttttaattgttaacaattcttaacttaaatagaatatataaaacactcggatcaataatggtgtgtaatagctaggctagtctaccgaattgcagcaagtaatatagaggtaagaatcaacagtgtggacaaattgcaactaaactagaaactttcatttgcaggtaaaaaattcgcacaaaataaggggaagttcagaaaacagggaaaaatccactatntaatggtggcagtgtcctatntattctaatcttcccttatgcatccaattgcattctcaatgcagaattcaattt

SEQ ID NO: 240955 - DNA, 263 bp, Glycine max
tgagttaagtttagccagcaacacatattcttctactgcaagctacatcagctggtctataaacatgatgtgcatgtccgaatgtgtatgtgtttaattaattcgaaacgcacgagaaatcttaacaccttgctatttcttcattacaccattcacagaatatgttaccactattcattcaatgttgcgatgatatgattaccaaatgggacgaaatgctgtcttcacatggatcaagtgaaattgacgtatggcctttcgta

SEQ ID NO: 240956 - DNA, 178 bp, Glycine max
agtcttgcataccccaatgatccattaggaaattacttgttaaagatagccatgagggtgggctcatgggccagcttgggatagacaagacgctcgtcttactcaaagaaaagttttattggccccatattgaaaaaaatgtacttaagcattgcactaagtgtgtagcttggttaca

SEQ ID NO: 240957 - DNA, 448 bp, Glycine max
  unsure (1)..(448): unsure at all n locations
tctatggagactgaatctttgagcttcaatgaggtccttcaatgatgatttttcaccatggagatgcagcagaagataaaggaaaagagatgagaggaggcgatatccattaagaaataagccatggaagaaggagtttcgtcaccaacaatgtgccttggataaaaagcttggagagaatgtttcaatggaggaaaataaagagagagagagagagagaaaaagagagaaggggagcacgaaattgaaggaggaaaagggggaaagaagttgaactttgagttgtgtctcacatgactctcattcatcanagttacaacaagtgttacacatgtctttatttatagcctatgtagtttccttgaaaaactctcttgagtaagttctttgaaagctagagttagttataaacacccttctaataactaagcttacctccttgagaagc

SEQ ID NO: 240958 - DNA, 232 bp, Glycine max
  unsure (1)..(232): unsure at all n locations
attaccgcgatcctctagatgaacccgtggcatgccagcttgttccctttaggctttggagtctgctttatcccantaatatcagtatgtctctatctgatatcatctataactattcttctcggcagttttttccattgttgataaagctggttgcttggaatggtgaaagtgctgtaccatattttcttccctttcacattgggtccagtttggtttttttattgggggg

SEQ ID NO: 240959 - DNA, 580 bp, Glycine max
  unsure (1)..(580): unsure at all n locations
cttcaccacccctcagaatgatagactntgccattancctcttncnnntccccgcagccgcggtgagcccntgtttacgcgctgtactcacctcnnagctctgangcacatcctctcgccgtatgactatcatccncacacgattttgccgccgcatgttagcctcaaccctacgacgcaacgtcgaggaccacagtgggcacaaaactcgaacggccgctacatgtaatcgcgaacgcatactgcggctcactatccatgccaacacacaactgcagcttgtgcgtacccgagcatgaatcactacacagatgttgctcatacaaacgagcatatcttactacctcactccgcacaacggaggccacttcccaacgaaccagctattacctcctctgatgacgcatggacatatattcctgacccaactacatttcgcccgaatggtcggccacaatgcaccaccgatcacacatgagacggattgggttcgcaccatctgaccaccgaacaaaaggacgaaatgtgagcccacggcatacatggcgtggcgtgcaaagcaacccgccaccggacatgc

SEQ ID NO: 240960 - DNA, 465 bp, Glycine max
  unsure (1)..(465): unsure at all n locations
agcttggtctctntntcatttctagtttagttatgaaacatgttcaagtttgtctctgttaagaggattataaaattcccacctatatatgatgtacatattataaaatgcagtgtttactaaaagatgcataacaactacacaatccctgtcactggcctaataataaaattttgaggggatgtctctttgattaatctggcataaattaaaaaaaattgaaagaaaagtataatacatttacagtgtaaatgttttggaagtatcataagcattttgattttagagatcgagaaataaaaaagatatatcagttataaaaatgtgtgtaaaagtaatatagtttactaatttgtcctgtacttttttgttctatgttttaaatagtgattctgtaaaacacaacataacactttttaaagaaagactaaaacaggacagagacatgtatgtctgatgtctata

SEQ ID NO: 240961 - DNA, 360 bp, Glycine max
caaacttggcttacatcttttaatctcataagatacaagtcagtttggttcatgcagtttggttttggagcacctcaattttttaaagctgagttagatttataaatgtcataccataattaattattgcttctattcatgattaagatatacagcagctggttcatcaatcttcaacatttacgctacggagtgcggattggagaggttaggctcaaacttttgcgagggacttaactgcccatgacattttctttttccattaaaatcctttttcatcaatcttcaacattcacgcactaaggattaaataggtttttagtccatataaatatgacttcatgtagttttggtatttca

SEQ ID NO: 240962 - DNA, 461 bp, Glycine max
gtaacaatctcaaaacttctcaacattgtcttaatgaccctcacattttgcattgatgcttcaccaaagaatatggtatgatctgcatatcacaggatactaatttccactgagcttcttcccaccaagaggcctttaaactgattttttttagagcttctctcattagacccgttaatccctcagccacaatattgaacaggagtggggctaacagatccccttatctaagtcctctttgagggaaaaattctgctaaaggactcttattgatcaatatggagacaaaagctgatctaaaacatcctgtgacccaagttatccactttagggtagaatcccatcctcctacgcatatataccagaatatcctcactaactgaatcatgtgccttctcatagtcgactttgaacaccaagcagctcatatcacctctcttcacttcctccacttcattggc

SEQ ID NO: 240963 - DNA, 465 bp, Glycine max
  unsure (1)..(465): unsure at all n locations
agcttggagatgagggaggattcagagggagattccatccgcagagggaaaagttcaatggatccaatccaagaacaagcagaaagaagcgcgccaacaatccactttcatttcaaacttttggaaatggagcggagcctagcatctataacggtctattttctttttttcaaataaaaattatatgagatttgttcgaggaaaaaatacaatactatatgcatatatactcattattcattgttggcagaaaaaaaaatagcatgcatttttaagtataatgattnttttcaccgtaataaaaataaaaatattacgggaaaaaaactataaatattctattttcgtctaattaaaaagtattctaagtgaggaaataatcaattgtcatgtacacagcctagaagatgaacatatataggtgtngctctaataaaaaaacactccaacataataaatctctcg

SEQ ID NO: 240964 - DNA, 585 bp, Glycine max
  unsure (1)..(585): unsure at all n locations
cttcccacctacatatcctanttctgtgtaatttttgattgaacttaccanccctcgccgcgcccgtgagcgtgatgacgccctcgtacnnacgcgccaccctctaagacatacccatcgagcacatactccactcacacgtcggactgctctgtacccagcttatttactgctccttaccatccagagactgcttataccgccttcaacatgccgaaccatattttatgattgacgtgaggcgattcaaacaattaccatatctcgctagtcccgctgctcggtggcgatatgatacataagaccaatccgtcttctaatacttctggaacacaaccgaatgcttaagcctataacacccaacaactacatttgactcgtcgcagctttaagcccataattttcaatctctgtcttgacacacaatctcttgctatgagacctccttgactcaacacgtcgtagaccctaacgcctctaatgcagacgccacccattcaaacccatgcacaaccgcgctcctagtcgagcatatcaaacaccgatcgctttagaccatggatctaaaacactcccgcgctcccc

SEQ ID NO: 240965 - DNA, 385 bp, Glycine max
  unsure (1)..(385): unsure at all n locations
gcttgccgccatggagtnttccgactatgctcttgtgtggtggaacaagctacaaaaagagagagcgagaaatgaagagccaatggttgatacatggacggagatgaaaaagatcatgaggaagcgatatgtgccagctagttactcaagggacttgaaattcaagctccaaaaactaacccaaggcaacaagggggttgaggagtatttcaaggaaatggatgtgctcatgattcaagcaaagattgaagaagatgaggaggtaactatggctcgatttcttaatggtttgactaatgatatccgtgatattgttgagctgcangagtttgttgaaatggatgaatttcttcacaaagcaatccaagtagagcaacaattaaaa

SEQ ID NO: 240966 - DNA, 358 bp, Glycine max
  unsure (1)..(358): unsure at all n locations
gtacttcaatattntccacatcatcaacgatcttattgaaattatccaattgctcagtgactgttcttgattctatcatcttgaaggtgtacagttgttgcttcaagcatagccgattttccagagacttgtgtcatttacaaggattccagtttcagccacattgaggctgttgtcctttctcttgcaacttctcttaaagctttatctctaaggcatagtatgattgcacttctggctctatcaatcatttctgatttctcctttgagcttagagattcagacatcctttcttcttctttaagagcttctgcacaaccatgttgaatcaagaatgcttccatcttgatcctcataa

SEQ ID NO: 240967 - DNA, 379 bp, Glycine max
aagctctactgagtctgattataatcatctacctccttaatgcaactatagaaccctacctgtaactatcttcacttgccaattcaatgaacacccgaaccccaatactcgcttgcttggcaagaggcctggacataccctctttcccttcttattccactcacccacaaattcacttccgcgcaagcttctaccctctttaaaaagcttttcaaagtttgaatctttatcacaaaacaacaagacccagaacatttttttagcaatgctgtgaccaatgattgagtagcgaagattctgtgatctgtcagcaatggcggtttgcactttgaagccgcagaagccgaacccttacgcgctttggaagccgaagccgaag

SEQ ID NO: 240968 - DNA, 517 bp, Glycine max
  unsure (1)..(517): unsure at all n locations
agccctccgcgcgtgacccctgatgaacgcgctgcatctacgcacactctagaacactctagcctgttatcatgaaatctcataagatacatttatcatatggnatatgcattacgatgtggcggcacatgcttaaattgcggctgtcttacacacatgaatcacattggatcattaaccattaggaggaattcacgattaagatatacagcatctgagaactcaaactatcatcttagcccgtataggatagccgataggagatgtttggctcaaacgcaaggcatgcacccactgtcaaaccatgatttagcccctctattcttaatagcgaccatcaaccccttggctcttaagaatatatacgtttatactctctattattcagacgacacagtccgccgcccactctctaaaataggcgcactggtcctcgtttcacgttcagactcgcctttcttcgtgtattcgtctatgactacactcgcaggtgttcagtattcttaaagacaacccc

SEQ ID NO: 240969 - DNA, 203 bp, Glycine max
agatgcgtaacgactacacaatccctggctctggcctaataataaagtgtataggggacggatcttccactgacctgtcacatatggtgtttactcgaaagacacggtatcaatcgggtgcaaagacaacgattcctaagcttgatatgcatttcgaacctagagagcaagcacggaccgagctatctcacttatcacaacgc

SEQ ID NO: 240970 - DNA, 392 bp, Glycine max
  unsure (1)..(392): unsure at all n locations
tgaatgtgttactntgacactctctgatgaggaatacaccatagtccatagctctagaagcgccacacaaatgtggaacaccttagccataacatacaaagggtgctcacaggtaaaaaggaacaatattaaactaagactcctaacacataagtatgagatgtttagaatggaggaaggcgcagacatacaatgtatggttgaatgcttccaaaccattttaaacgagcttacagcatagtgtagaactcttgacaattatgataatattgataaaatactaagaagtttatcaagaaagtggagatcgtacgttacaactttaatagctataaagaatcttgatactctgtctctagaagaatgtagtggaaccttaaaggtcatgaaca

SEQ ID NO: 240971 - DNA, 337 bp, Glycine max
  unsure (1)..(337): unsure at all n locations
gccacctgcngcatgcacgctacgatggcgtgatattatatacatgtctgtcatcatcaaaaagggggagaatgtgaatgtatgtatacatgattttgatgatgtcaaaagaagaatcaaacaaggctcatttcgcttcctgattaatacaagattgtttcaacaaacaatgctctgattcaagatttcttcaagatcaagccttgcctcacaatgaaaggtttcaggtcattctaggcacatgttatcgattaccaatacatgttatcgattaccaatggtttgaaagtgtgtaatcgattacacatcatatgtaatcgactaccagagaggattt

SEQ ID NO: 240972 - DNA, 459 bp, Glycine max
  unsure (1)..(459): unsure at all n locations
tgcacgatgttaacttacaagaaaacaagtttaatcaaagcattatataatatttattcaacttagaaaaaataaggacaaatgggaaaagttaacttatagtttattacaataaaacctaggtatccaacatcaatcatcatctaacacgaaattcaattactgatatgcatagaattggatgatcccacaccataatacatataatccaatacattctgatttcatgaattcagtccaaggaaaaccagataacaggacattaacatcaataaaatatcttttatttatctccaaggcctagactccaaggagtccatcaggacctctctctcctaattcaggtccaacccagagaatattntaatatacagactctatctatgaactatgcaatacacacaactactcaattgttttcaaaatctcaactattttccaaaattatattaacttatc

SEQ ID NO: 240973 - DNA, 354 bp, Glycine max
tgtgcctcttcaggtctggaatgtgaatgtagcatatagatctaaatacccttatgcgctttgctgatggcttctttccgttgcaagcttcaattggagtcttgtcgtttacagacttagttggacatctgttgagcatgtcaacagcatcagagactgctatagtctagaatgcgttacgtagattcgttctcttgagcagtcatctagccatctccataactatgccattctttatatcggacactccatattgttgacgagaatatgccactcgaagatggcgctcaatgccttaatcctcacaaaatgtgtcaaactcgcgagaggtgtactctttgtccaatcacttct

SEQ ID NO: 240974 - DNA, 315 bp, Glycine max
cttgcactattatatttattttggtaacagtatatattttgcctgaggtctggttattacgatgaagcaagaaatgttgcccaatcttcacgtgcttcacatcaatttgctcctttggtacatactgtggtcactacttatttactaatttatgatttaatctttcttaataatttacttatttctgacagctgacagagtggattaataaaggagggatggtaccagaagagattgcagctgctgcatctgatgaatgtgaaagaatgttgagaactggtgaccgggtaggtcgaactgcatatgacaagaaaa

SEQ ID NO: 240975 - DNA, 426 bp, Glycine max
tcttgtatattgcagatacaccaattccttacttgcacttatctctattggcttgcttcactctctgtcattccctgagacactctgactcacttttgttctgaactttgaatgattaataaataattaattgttaactaatgttattaaggcattaattacaaattaaaaagaagtgttttaattgtaatgatgtcttatatacatatatcatgttcacctatatacttatttgtagaatgcaactattcacatataaattattgtgcgttcaactctacttaattctgtaagatcaatgtcattcaactctacttatcatttcttttatcacctagatagagtatcatatcacaataaaaggtgccagcactatcagcagtcccacacagctcgagatacaatcaactaatattcgctactaac

SEQ ID NO: 240976 - DNA, 435 bp, Glycine max
tgtttttcaaacgggtaaaaggctcacattcactttcttctacatcatattcaaacttgttcaaataaataataaagtcatctcgactcaaagaaggtcatctaagtctcatacaattaatatataacctatatcctaatgtcacatcctatcagagcgtggtgttcccgtgtcctctagcatgaggttcttcatagccaaccacctattcatctgctcccccgaacacaaagtttaagatcatcatatgatccaaacacaaacagcaaaccgggagtgagttatcacatttctaactactagagagaaacaacacaacatatagtagccaaatacaatttacttagcatatctcacattatttcatcactgtgtcattcatcaatcacacttttcatccatcaatcacacgtttcaatcattgatcactataca

SEQ ID NO: 240977 - DNA, 561 bp, Glycine max
  unsure (1)..(561): unsure at all n locations
cgccccccagcgtattgatcgttcatgaacgccttgatancactcgcaatcacgagacactatagaatacctaagcttgtctctgatgtcgacgatatatcgactgatgatgatgacgatgtctaatgggcgaantatggcgatgatgattacgggtgggaataagcacgccgcctacggggcctacgacctgttctacataaagtttgcctggactgacctatttaatacaaaaggttgaggcgtacgggctttcttcaaacagtcttttaaacttanaatcagcatcagcgctctataggcttattaaacnaagtccttaatacgcnnctgattagacccacgcccactatatatcccatatatacctcatattatctctttctctcgactagcatatatgtgcccttgcattgaacacaacacaaggcataattaatatttttttgttgaaactaacaggccttgattacacagtactgctctatcactncattcctataatcaagtaagacattaattaccacttaactcgtactgagtcatgtgttgactcgcgct

SEQ ID NO: 240978 - DNA, 361 bp, Glycine max
  unsure (1)..(361): unsure at all n locations
tgcttctaaactttatacaagaatgaagctctgataccacttgttagacaagtggcctcagatatcttaagaaggggggcattgaattaagatatcacaatcttttctaaattaaaaattctattttgattttaacccacatcccaagatttctttcaaaaatgaactcctaaataattatgcaaattaatcttactgaatagaaacaataagcaatatacaatatacaataaaagagtttaagggaagaaagattgcanactcagaattatactggtttggcacacccttgtgcctacgtncagtccccaagcaacccgcttgagagttccactatcttgcaaaagtccttacaagttct

SEQ ID NO: 240979 - DNA, 406 bp, Glycine max
tctacttatgtggcagggcgggcttccttcactttcttgtctccaacgcgagctctgaccactgttcttccttcccgcgatgcttcttttcatgtccgcctgagtgggcttatagcctaaaccatacttcccacgatttccttgggtttttatcaggctagttatgccgccattgtctttgcctaaacccatcccgggttcataaccgttccccaacataactcgggccatcattaccgccgcatcggacagacaaggttgcccaaagagggagtccacggaggaaatgctgaccacctcaaaagactggaaagcgcgttctaacgattcttctgcggcttccacataaggcatggaggatgggcagcttaccaagatatcttcctcgcctgacacgatgaccaag

SEQ ID NO: 240980 - DNA, 215 bp, Glycine max
ggagcgattacgtttacacgatagtctgtataaaacaaacaggttatgcactgtagatgtttcttaccttacaaacaaccttcctacttctacatgatgatgcatgatgcacacataaatagattacgactacaaggcagcaatcaatacaaacgccactccataagaagctttcgcctctactttgcgcacacctttttaaaacttaatcttca

SEQ ID NO: 240981 - DNA, 234 bp, Glycine max
gcttcttatccaaggctcatcttggtggtgtggctccttcttccatggcttattccctatatggacggcgcctcctctcacctattctcctttgtcttccactgcatctccatggtggaaaatcatcattaaaggacctcatagaagctcaaagatccagcctccatagaagccccacaagcaagcttccatcacaaggctacgtgacacttatgcatgccagcccggacatgt

SEQ ID NO: 240982 - DNA, 130 bp, Glycine max
tgcaagctttctccatattttcctataaatagggggtgaagtgaagggaattaatgttcagccctcctggtaattcgagatcacttgaacttaccgaaacacattatttccgcgcacaaaatccaagctg

SEQ ID NO: 240983 - DNA, 160 bp, Glycine max
  unsure (1)..(160): unsure at all n locations
gcttcatgatcgaatcaagattgattcaaagaagttntgatgataacttaggtaatgacataaagctcaaaggtcaagaacacttcatgataacaaagatgatgatctcaagaatcaaagaatgagctcacgactttcatgattgaatccagaacacttc

SEQ ID NO: 240984 - DNA, 183 bp, Glycine max
aagatcacttcatgataacatagatgataacattcaagaatgagttcaagattgagtcaagaacacttcaaggatcaagagcacatttgatttcagaatcaagaattaagattcaagattcaagaatcatgattcacgaatattcaagatcaagactcacgactcctgactcatgattccaga

SEQ ID NO: 240985 - DNA, 151 bp, Glycine max
gattctatagtggaccacagcagtgcgtatcatgtaatatgctttgtcttccactgcatctccatggcggaaaatcatcattaaaggacctcatagaagctcaaagatccagcctccatacaagccccacaagcacgcttccatcaaacgg

SEQ ID NO: 240986 - DNA, 479 bp, Glycine max
  unsure (1)..(479): unsure at all n locations
cgtccatatacgcactgttttatcgcactgcagacgctgaccacacaggataaacacacatatcgtacactaacacatctttattatctaggncacatactcaaagcaatcatactatactacacataataggtccttcactacccatgctccacctcatcatcgaatgtctcagcaactcttacttgatactttactctcccacaaacttctcctaccacacttacctgtccttctcaattataatattcacctcacctcttcaccattctacctacccgctactctcacattctcactaatcatcccttgtccctatcactcactctctttcaactcttccactctattctctcatacccaacnactcacctctcctcttcgttncacctcctgctccctctctcggttttattccctcatctatcatcccttcccacctctccctatcatcccccacactttctacgctgctcatt

SEQ ID NO: 240987 - DNA, 200 bp, Glycine max
  unsure (1)..(200): unsure at all n locations
ataacatccacgctactggcacttatgtacanacttaatattgcaacgtgcagtcatctcactatataactctagggattccactgcatgtccatgccggaaaatcactcattaacggacctcatagaagctcacagatccagcctccatacaagccccacaagcaagcttccatcaaaaggccacgcgacacttattca

SEQ ID NO: 240988 - DNA, 423 bp, Glycine max
agctagaagattccatatggatatatcatcactgtagattccaaccctctgggtatgtctacatttctagttagctcatggctatgaatggctaatcttcctagtacggcgattatgatgtaacctaccatgaaccccttttctgattttaataagattctcgatgcattttagttaattgattctctttttaatcttaatttttatttggaaatggtcattctaatacataatcgattgcatagtagtgatcatctacatataattggtagaattaggaacaaagtgtttcataccaaactgcatagccaaactattcacgttatctttggtgggttgattacgaaattgattaatcaccctcatcattgttcttaatcccttcgtttaattcaacacctgcatgattaattgaggattgct

SEQ ID NO: 240989 - DNA, 255 bp, Glycine max
ccttcaatgaatgtgacttatctctttattatgcaaatggagaatccgattcgagaacaaatccttctcaagagggagagaatgatgaggacatgaccaagagcaagggcaaggattcacttgaacgacttggaggacctatgacaagggctagagcaaggaaagccatggaagctcttcaacaagcgttcgccatactatttgaatacaagcccaagttttaaggagaaaagtccaaggttgcgagtcgcatca

SEQ ID NO: 240990 - DNA, 182 bp, Glycine max
agcttgaggagacgctaatatagttcatgcaaatatccatgtccaactataggagcatggagtcttccatcaagaacctggagatacaagtgggacaattagccaaacaaatggctgaaagacccactagcagctttagagccaacatagagaagatcacgaaggaggaatgcaggtctgcg

SEQ ID NO: 240991 - DNA, 135 bp, Glycine max
cactatgaatactcagcttcatcagtgtaatcacagcaccaaagctcatagtaggcgctccttacacctccattaattctttgctttaccttctcttccattgctgtctcttcaatctatctccttgcatctcct

SEQ ID NO: 240992 - DNA, 250 bp, Glycine max
agcttctagtttctatttctagaccaaaatccattattaacatctaggtcattaataagttgaccattttttgaccagagaattttctatgaattatccttatcctttgtagactttaacttaaaaacttaagagattaaccatgcctaggtatcctatggtaacatctaatctttttaccatctttatagcgtaaaaacactatctaatcgcactacccaataataatactgttcaccccacacacatg

SEQ ID NO: 240993 - DNA, 221 bp, Glycine max
tccaagcttaatttgatgatgccaaagactcaagtcaagaattatagattcaagaatcaaagagtaattcaatcaagaatcaagattcaagtgaagattcaagaagaagactcaagatatgcaagaacttcaagaaaagcatcaagataagtataaaaagattttttcaaaagaaaagaggaataacacaacttgtcccaacgaattctttacagaaacac

SEQ ID NO: 240994 - DNA, 436 bp, Glycine max
cagcttgatagggaggtccatcgataacagttatcattatgcatagttgacgctcattgtgaggactaattagtatctaggagatctttatattaggtcagtacaccgcattcaatcataaataattatttatgataaactcatgaacttctataacaattaacttaaaaatgataggagtaataattctcatattgacgactatgtaaactgttgcgcagataatgcatgtctattaagctccttttgaaatcttaggggattattttaagatatttagtgactctaatttactgaaggcatatatttagatttaaatcttttatcactctcatacaaaataatttttcaaaagacaagaaactatgaatgatgtgttatataaaaaactaagaagaatcattcaaaggttaataattattcaaatctaatatca

SEQ ID NO: 240995 - DNA, 373 bp, Glycine max
agtcaaactaacgtattgattatatactaacaatttacatgtttggtaacacacacatgatctgtgacacatgggacagaggtggtgttatgggtcagcacgaataataaatgggggggtattcctgtgaactgtgtatgttgtgagcatggataaaaaatgagattatatataatagttatctagttgctaacatgactgatttttatacaaattttacacatgtatctttttgctctcaaagttacttcgttctaatacttttcatgtaagtgaatataatgagataagtctcacatcctaaatcaataaaaatattttcaaggtcgcgtctgaaaataaaaacaacaataagtttcttgaaatggttaat

SEQ ID NO: 240996 - DNA, 130 bp, Glycine max
agcttgcttctacaaattcttcatctttcttttgtttctttggctgagaagacccttccatagtgtcataccttaatttcgtctgaggactatcgatcgttgatcttttgatcctcgctagtcgacttat

SEQ ID NO: 240997 - DNA, 332 bp, Glycine max
ttgagccaatatcttgactcatcataaaccttgatccagcgtgtgaatgccgatccttaccctcgtatgcacgacacggaggagagtgaacattttccacaaaggggattgtgatcgcaacatggttcgctcatggtgcctaacacatgccactacgaatgtactgtgaagtttcacgctccccctcttcttgtttctgctttgcagacgaacactcaatgatgaccaaacatgaaaaccaatggtatgcaattttgcagatcaaaacgtcttgttgaccgcatatgcatgatgatgccatgactcatgcaaaatgtgagcctggaatatga

SEQ ID NO: 240998 - DNA, 472 bp, Glycine max
  unsure (1)..(472): unsure at all n locations
cgctgcatgcaagcttctacanaaatccttattaaagaaagacttcttgaaagggaggaccattatttactgtgaacaatttgctcaattgacaacaaggttagatcaaatttgttactaacaatctttatattatgtcattttcaatcaatcaattatattttttaattttctttaacacaggtccatcgtctacaaatttattctattgggtggggttctataacacataaactcaactttagaaaatgataaaaagagaatgattatctcaaatgatacaaaggtaatatagtgagattattttaaaatatttatgtactctaatttaataaatgcatatatttaattttaaattttctatcactttcatacaaaataatttttcaaagacaagacactatgaatgatgtgtataaaaaaaactaagaagactcattccaggttaataattattcaaatttatatcatt

SEQ ID NO: 240999 - DNA, 433 bp, Glycine max
caattttggacacacattttaacctttctgatttatttaagacatgaatcttgttccattatattcacttatatgaaaactatgaaaaccaactaatgtttgaaacaaaaagaataataaatatggtgaaaatcatgtgaaaagtgagtgtcatgagcaattagaaaaaataaaattagatattttagttatctagttgctaacatgactcatttttatacaaattttacacatgtatctttctgctctcaaagttagtttgttctaatagttttcatgtaagtgaatataatgagataagtttcacatcctatatcaataaaaatattctcaaggtcgtgtctgaaaataaaaaaaacaataagttttttgaaatgcgtaatgtgtcattagtaaaataaataggtgaccatctaacaactttaaaaattag

SEQ ID NO: 241000 - DNA, 425 bp, Glycine max
  unsure (1)..(425): unsure at all n locations
ttgaatttctcaagagcttccgttgttcaatttcgagcttgtcgtcatattatgcgcccgaatcggacatccgtgtgaaaagctatgaccatttgaatttctagagagtttccgatgtttaatttcgagtgtatcgatatattataaacctgaatcggacctcagtggtaaatgttatgaccatttgtatttctcaagaccttccgttgttcaattctgagcgtctcaatatgtgatttgctcgaatcggacatccgtgtgaaaagcaatgaccatttgaatttctcaagagctctccgtgttcaatttcgaccctctcgacatattatgcgcccgaatcggacatccgcgtgaaaaggtatggccatttgaatntctcgagagcttctgatgtttaatttcgagcgcattgatatattataagc

SEQ ID NO: 241001 - DNA, 386 bp, Glycine max
ctcagctataatatatcgaatatgaacaacggaagctctcgtgagatttatatggtcataacttttcacactgacgtccgatacaggtttataatgtatcgatacactcgaaattaaacatcggaaactctctagaaattcaaatggtcataacttttcacacggatgtccgattcgggcgcataatatgtcgagaggctcgaaattgaacaacggaagctctagagaaattcaaatggtcataacttttcacacggatgtccgattcgggcgaatcacatttcgagacgctcagaattgaacaacggacgctctagagaaattcaaacggtcgtaacttttcacacggatgggcgattcaggctcatcatatatcgatacgctcg

SEQ ID NO: 241002 - DNA, 455 bp, Glycine max
  unsure (1)..(455): unsure at all n locations
agcttgcacactcaaagggacatctcacctatatctntattaaaaactatcatgtacatctgtccattacacaaaaataacaccatctaagcaaacttaatacttctatagtcatgaccttttatctaagtaaattattatatttatttctcctaatgatatagagatttctccattcccatctccacaatcaatttccctccctccggtttcctaaacttgacaccctgtcttttatggctactacaaggttgtataatctagtatacttcctatatgtgaaaataaaccacttccacccaaaggtcttgacaaaataaaagtatcccctaaccccgcaacccccacccaccttctaacaaactcaaatgccagattctttcttccctctcatagntactctntgatataccgtatcacaattattggtgatttctcttccttctgaaccacca

SEQ ID NO: 241003 - DNA, 439 bp, Glycine max
  unsure (1)..(439): unsure at all n locations
gatgcacggaanatgtaattatgaaattgagatgcccgaagatacaccatttcctagttaaccatgcattaggtaccatgttcaattattttgttttgttgatgtgtgttttttttttagaaatgggtttatgatcccaacatggttggctcatggtgcctaacacatgcaactaagaatgtagtgtgaagtttcacgctttccctttttttgtttttgttntgtagaggaaaacgcaacgatgagcaaacatgaaaacaaatggtatgcaattttgcagatcaaaaagtttgttgaccgcatatgcatgatgatgccatgactcatgcaaaatgtgagcctggaatatgataacggacaaatgcacgaacgatatgttcattatgatgttatgaagagatgcttatgcgatgcatgatatgaatgcattttacggaca

SEQ ID NO: 241004 - DNA, 453 bp, Glycine max
  unsure (1)..(453): unsure at all n locations
agcttcttgatataaactaggcattaatcttcatctaataacttaagatcctttgatagtttttgtgtatattgaccgactgccctttcttttacttgtttaaaaatatatatttgatgtttgcatgcacatttatttaatgtaattcttttgatacgtgtagatagagaaaggtgcatgctacatattgtttaaaaattttgaaagcccagtaatactgcatgagaaggatgtaggtcttgaaattctaagcacaggtaatggttaattcttcatgattaacatcttgcacgcaatgtgatattnttctatctttcatgttctatgtctgcatttttacaatatttatgctggtctcanatgtagttgttcaggagttacaagagcaacatggtgctaattctaagtcacttaatgtagcgagatgtacatcttttaataaagatgggatca

SEQ ID NO: 241005 - DNA, 434 bp, Glycine max
  unsure (1)..(434): unsure at all n locations
tgaagaggcgaacaaaaaaagaacttaganaattgttcagttgttcactcgctaagtgcaacactcgcgctaagcgccaagtcttcacgcgctaagcgggccctttctcgcgctaagcgcttagacccctgattagtggctggatggtaacgctaaacacgccttgcttcgctaagcctaattatctctctggaatctgaatttatcgaattgggcttaacgaggtgaaaatctgtggatagcgctaagcccaaatgcctctatggattttaatttctcgcattgggcttagcgaggtgatgcgctaagcgcaattccctctctattttgaaattctttggaatagcgctaagcgccggtgaagcgctaagcgcaagccatcactgcatggaggagcatgtntatgcgctaagccccacctttggcagctaagt

SEQ ID NO: 241006 - DNA, 395 bp, Glycine max
  unsure (1)..(395): unsure at all n locations
ctgcggcatgcaagcttctatataagctgaaccattttatcaatatacacaagttgagttttattcagagaattagagtttatctcttttatcttagtgagagtgattctcctaaattcttgagtgattcaagaacaccctgactgtatcaaaggacattcacaacctttgtgtgttgccctcgctggaaagagtgattctttccttcctttcatcttcacccttgttctttcaaaccacaattccagaaaatccacctctgcccagaattatctcgtggccataactcccattntacgcactcaaattaagtgattcttgagcctaaattgaatttcaaaacgagacctttcacctcgttttggaatcacctcatttggagccctgtagcttca

SEQ ID NO: 241007 - DNA, 315 bp, Glycine max
tctgaataggacctccgtgagaaaggttatgaccatttgaatttctcgagagctttcgttgttcaatttcgtgcagctcgatatgtgatacaccagaatcggacatccgagtgaaaagttatgaccatatgaatttcttcatagcttccgttgttcaatttcgtgcatgtcgatatgtgaagcacctgaatcggacatccgagttaaaacttatgaccatattaatttcccgagagcctccgttgttcaatttcgagcgtctcgatatattaagcgcctgaatagcacctccgtgtgaaaagttatgaccatttg

SEQ ID NO: 241008 - DNA, 284 bp, Glycine max
ctacatacaacacaacgtattatgcgcctcaatcagacgatgcgagcctacaagctcgacaatttaaattcttaaaatacatcgcttgatatcattcttgtgcgtgccaaaataggcctatcataatctagcgtgggagagaatataacacataaactctgctttagatacctatctttattgaatgactgtctcaaacgatacaaaggctatatactgagactatatccaaaatttgatcgcctcttatttaataggtgcatatattcgaatttaaatttttt

SEQ ID NO: 241009 - DNA, 508 bp, Glycine max
  unsure (1)..(508): unsure at all n locations
gcccgcgcgcatgagacctgattagcgactcttgaagctccgcttaaatatatcgcttgtgaacaacggaagctctctagaagatttcatgctaacatcattgctgctgaagacggcacatgtgtgctacgcagccatacactcgaagagatccatcagaaccgctctcaaattgcatacggcaatatcttgacaagaggattaccgacaacgtcgcacattatgaatggaggctcgaaatagagaccggtgaggtgagacatttttatagggttgtgacacacgacactgttggatgaaagagtaaatgttcttcataattcacgttggtgaatatcctgacttcagattgacatcctctctcggtatgcatatgaacgtggcgcggatgagcataaaatagacaataagtcctttgatatggacaatgagacactccatanaacaaatgggaattctagtaacgtggacgcactcatcgctgaatataccataacgtcgtacgggg

SEQ ID NO: 241010 - DNA, 400 bp, Glycine max
  unsure (1)..(400): unsure at all n locations
agctntaacctcatcgtctctcacagtctttagatttgggagccaatccaatccttgtgttcggactctcagccacttatgatagccgccgatgatcccattactgcttcccctaagctctctgtcctttcttcatgccgcatcccatgccttgcgaactccttggagtaccctcgcgttgtggtcacttaaaccccgtgcgatgaaaggcgtgatgctttcgtctgatggcacttctctcatggggtagccaagctgtcttatggcaaggacgagattataattaatacaaacccttgttcccatctagagaacatttggacatccttcgcatgaagatagaatcctgattcttccttccttctagcgagggaaccaattaacagacgccccttcatgc

SEQ ID NO: 241011 - DNA, 343 bp, Glycine max
  unsure (1)..(343): unsure at all n locations
tctgccccaattntctataaatagggggagaagtgaagtgaataagggttcagccccttacgcacttatctctctttcgaatttgcttggaaaaattgtttctgtgaagaaaatccaagccgaggcgcttctgaaacgttttcgtaacgtttccgtgaggaatttctcgaaggtttcgaccgttcttcgacgctcttcattcgttcttcatcgttcttcgatcttcaacgggtaaatacctcgaaccaagcttttcgattcattctatgtacccgcggtggtccacattgtgtttcgtgtatttntattctcgtttcatttactttttatacccccctttgac

SEQ ID NO: 241012 - DNA, 363 bp, Glycine max
  unsure (1)..(363): unsure at all n locations
agcttaatattgaaattatattntttntattcctttaagataaaatatgtcaacttatcttcaataaaataaaattagcagtttttatagcattaatttttattaagttaaattaataatgctcaaaaatttcatttgttcagctagatatcaacatagatatgctgcaatttgcaaatttcttatagcaggtgtgcactagagtgtgaataataagaattattttgtttgagaataacattcaaagatgctctcttattttttttagctctgataaggtgtggtcaagctgtgttttcaattttctttcattcctgtcagctctggtttttttaggaaaggtggctcatttcattctttaat

SEQ ID NO: 241013 - DNA, 432 bp, Glycine max
tctagaagaattatcggctatctgcttagtcagctatcctacttgaatttccaaattatttatagtagactttgtgctcatgtgatttgacattgcaacttgcatgaactgaaccaaaatctccttcagcttgattgttctctcataaaggctacgcccttgattttaaggcctgttggatggtcctccttggtctttattgaattggtttccaggatgagacctccactgcccttgattatgattaaaattggaaacttgctagtaacctcgcaaatcacctgcattaaatcctggtctgtgctgattcctcatataattcacctcctttgcagcttcattaagagatatacaacaatcagattcatgagctcctccacatatgctacaacctccaacctgcagaactactgaatgtgaacggtgagttgc

SEQ ID NO: 241014 - DNA, 325 bp, Glycine max
agcttcccacaaccaaccccaagagtcgagctctcccttgaagcattgtgtcacggattgtagaccatttctcaacctcaacttgtggttcttctgcgaggacttggagtgcaaagaatgcacaagaaacaccaaaatacatgggatacatgctttcagtgtcactcttgttgtcacacccatctctatccaaaacagaaacttccttctcacccattcctgtgagatcggattccctggcacctctgcaactgaaaaccaaaagttaagaaacaaaaccagcaaagactgtaattcccacattaccttacaactcacatgattc

SEQ ID NO: 241015 - DNA, 448 bp, Glycine max
  unsure (1)..(448): unsure at all n locations
tatcaaaacaggtccttagttaaaggcctctttctccaccgctgtgccactattagactaaaacgttctgcagaagactaaattaacttagagccaaagccaaaaacgtttcaagacaaaagcaatagtaaaacattgctaaaatgaaaattgaagttagagaacacaaaaatgaataactaaattaaaactaaaattgacattagagaacgaaattattgatgttaccttgtcatttcatcatatatatgaacatagtaaaatcctttctttttctttccattattcaacaaacctatatacatatctggaaggttatttccgtctatacgggcgttaatacaatagataagagatgaactaccccaagaagcttggggcctggtntattcagcanatatctgctcaagcatacagagaatcaccacataagttctaatcacatatt

SEQ ID NO: 241016 - DNA, 307 bp, Glycine max
agcttagcgcgcctctgtgctaagcctaattacttctctgtttaagatttatgctgagcgcgtcatgtgcgctaggcctaaatacctctctgcctttatttgggtttagcgccactagtggcgctaggccccccgtctcctgattcatgattgcgctaagtaggaccctcacagcttagagccctaacgtttcatgtgcactagtgctaagtgcacccatcgtggcttaatgcactcatttggttttgttgcttcctttctttacttacttttccatctgtaattcttctcatgcttctgatggtct

SEQ ID NO: 241017 - DNA, 455 bp, Glycine max
  unsure (1)..(455): unsure at all n locations
cattgtatgtaatgtgtgttaaaataagttgtagatgttccctttgagtnttgtttacgtataaatataataatttctggtcctaccattttgaaaaattgaaacgctcgtcaattttggaagctaaattgaatggctgttaatgggtggtaatgaccactaatgaattataacagccaataatgagcggtaatggctactaaatgcattcttgatggtagaatgcctatatatagcacatgtatttggtccgtgagatcatctctttgaattcattctgatacaccatctacagagagaaagaaagagagcttgaaagaaccaaaacaagacaactcttcatggcaatggttggaggtatgatttaatatttattctccgcattttgttaatgacctgtgtntcttttgtagtttgcaacatcacacgttaaaacgtgtagtctaacatttggt

SEQ ID NO: 241018 - DNA, 406 bp, Glycine max
agctctgctttaggggcaatgatacgaccactgataagcaatggaagcatgagaaaacatgtgggcgtgccctaggcctaagatttgacaaagagagtggagatctatacatagcagacgcatactatggacttgttgtggttggacctaatgggggactcgctacatcgttggcaacccatgttgaaagaaagcccattctcttcgcaaatgagcttgacattcataagaacggatccatcttcttcacagacaccagcaaaagatacaacagagtgtaagcctttattactcatatactatacatcatttgagtatattcatgcactcattattgctttcaatggattattattgtttacaacgtacttattacttgtttgcagcgcgcattctattatattat

SEQ ID NO: 241019 - DNA, 157 bp, Glycine max
atgcgcttgattatgctacagagaattcgggtggcgctctagccatgatctacactgatggttcttccattaatggctcgctcaacaacgctcctttctcaacgatagtgtttccacggaagtttttgatgcttaatgggattgggtgagatctcga

SEQ ID NO: 241020 - DNA, 319 bp, Glycine max
  unsure (1)..(319): unsure at all n locations
agcttctcagattctccttcagattctcccaactcgctaagcgggctgagtgcctcgcttagtgcatgactctcgctaagcgcacaagcctcacttggcgagacaccagctgctagccttcacaaatttcatcctttttacctgaaattgaagttgaaacacattaaattcacaatgttgggcatttctattgaacaaaactaaactaaacctaaaaataagtacaaatctacaaaaagaaccataaattggggaaaaagacaacattntataacatttttctatacanaagttagtcgtaaatgacgactaacaaact

SEQ ID NO: 241021 - DNA, 449 bp, Glycine max
  unsure (1)..(449): unsure at all n locations
ntcaacccagtagaaataacatatggctcacataaattagctggtacataaccaatgctgccataatgtcataagacaatggatttgttctcaccataagcatccctttacaaatccctactttattttacttcttttaaatgactcagtcacatcccctttacaaattaaaataaaatcattgttcacactaaatgcaaatttatgcttgcaattattaaacttggagatcagagttgctcacaaaattatctacgactatgtctctcacaatttttatccaactattcaaattgatgcgacgtggtaacttgcattagcctaggaaaacatatatttagacatataacagtttanatgttcagccataaatctgttacaaagaactctattttgacctcgttgatactatctaaccccctaacgtactgcatatatttcacagaatg

SEQ ID NO: 241022 - DNA, 433 bp, Glycine max
  unsure (1)..(433): unsure at all n locations
acgcttgatgatatggtcttcaccgacgaaaggttcgatgtgggtctaaaaagaggaaaatttagtcatcctgcttggacgaatgaganaactggggcaaatgaagagggtgaggatgaaggaaaagcccgtgctgtgactgccattcctatacgaccaagtttcccaccaacccaacaatgtcattactcagccaataacgacccttctcattacctaccacccagacatccacaaaggccatccctaaaatcaaccacaaagcctacctaccgcacttccaatgacaaacaccacctttagcataaaccaaaacaccaaccaagaaatngaatttgcagtgaaaaagcctatagaattcaccccaattccagtgtcctatgctaacttgctcccatatctacttgataattcaatggtagccataacccca

SEQ ID NO: 241023 - DNA, 387 bp, Glycine max
  unsure (1)..(387): unsure at all n locations
cataccatctactatgccaacaaagttataaatgatgcacagatgaattatgctaccacagaaaaagaaatgttggcaattgtctatgcacttgaaaagtttaaatcttatttggtaggctcaagagttatcatctacactgatcatgcagctattaaatacttgctcaacaaggctaattccaaaccaagattgataagatggatttttttgttgcaagaatttgatttggtgattcgcgataaaaagggatcaaagaatgttgtagctgatcatctgtcaagattagtgaatgaggaagttacagcaaaagaagtcgaagtgagagatcaattccctgatgaatcanctattttaataagtgaaagaccctggtttgctgatata

SEQ ID NO: 241024 - DNA, 435 bp, Glycine max
  unsure (1)..(435): unsure at all n locations
acacttaggcattctntggattatagagactagatctttcaaatgttgttatagaaacggattgaaaagcatctgtggatagttttcaagctgacactaagggctcaactgatttccatgttatcttgaatagttgtagagatcttctttcatcaattccaaactctagagtgagttttgtaaagaggcaagttaatcatgttgctcacaaccttgcaagggcatcaagattttatgctaactctcgtatctttgattatattccctcatgtattgtttcacaaattgttaacgaaataatataactttcctgtaaaaaaaaaaaagcttaagctgtaaagtgaaagcacatgaataattgtatatctaaaatatcctctcacacacactctttaaaagcctaaccctacctttgctaaatttacttaaaaaata

SEQ ID NO: 241025 - DNA, 470 bp, Glycine max
  unsure (1)..(470): unsure at all n locations
cgtacatcttaactaaaattggaatcctcttcctacgtacctatctaggaagctatagcaagtaaaaaaaaaaattgacgatgagagacaagccatgccatcaatttgtcttctagaagagacagtatccaaaaggcgacgaaatgaacataggaaaacatggtcttgtactcttgttgcacaaaagtgaacgagacagaagaaaagtctggcatcatggaaatttgcatacattgaaggcttgcattcatattatagaagagaaaaaagaatagtataattgcaggcaaacttatatacattattatagggttcatgagtntttgttttactgtaccattccccaaagtaaatgtactnattttggattgaaaaaaaaattggtggacaccaaatactcgataacatctatagaggagcggantgagagagaagacactactattagtataatgagaaatgctctatgc

SEQ ID NO: 241026 - DNA, 478 bp, Glycine max
  unsure (1)..(478): unsure at all n locations
ttaagtcacctgcggcatgcaagctntaagagcaattcctttctttntcttatcattctcctcatgttgattcaatctcatcaattccatttcatgttcgtgtaactttccaaacaaagcagcaagagacatgttagatagatctcgtgattcagtaatggctgttaccttgggttgccattctctgcttaagcatctcaaaactttattgataagatcttcatttggaaatgtttttcctaaagatgcaagatgattaattatgtgtgtaaacctcttttgcatgtcttgtatggtttcatttggattcattctaaataattcatattcatgagtcaaaatatttatcctagatcttttcacatttgttgttccttcatgggttacctgtaaggtatcccatatatncttttgcattttacaatttgatacactaaagtattcattcatcgctaaagcagatgtaattatatttttg

SEQ ID NO: 241027 - DNA, 373 bp, Glycine max
  unsure (1)..(373): unsure at all n locations
gggccaatgactntcggtttccacacctgagttgacttccgtaccaccggctcactctccttagatattggccccccgggcatcttcttcgcttgatctctttgatatcgaggaagatttgcaaaaagcttatcccttccaatgaaaatattgtctagcttcatggcgaatcgttccggctcttgaatccggcaaaaacgagcaaaaccgaatcttttacccatcctatntctccttgtcggaatcaccacctcttgcaagtcaccatagctcctgagactgttgaacaagtgcttcgcattcatctcctccgcaaaattggtaatgtaaatcgttgttgattgtagttgctccttaactctttggtccctgg

SEQ ID NO: 241028 - DNA, 438 bp, Glycine max
cttaagtcacctgcggcatgcaagcttggttcccaacgctttgttcagactctcctaaaatctagaggtgaatctaggatctctatcagacactatgctagatggcacactatgtaatctgacaatctcactaatatacagggaggtcaacttctccaaggaaaatctgatcttaatgggaatatccttagggaacacttcaggaaactctctgacaatagggaggtcacccatggaaacctttgtctctacttctaggttagacatgatcatgtagacttaagcatcttcttttaaagatgtcacaacttggttggcaaagataaacatcctatccttactcactccagaatcatcaaacactgcatttttattaaaacaatttaacaagacatggttggaagataactagtccattcccagaataacatcaatttg

SEQ ID NO: 241029 - DNA, 382 bp, Glycine max
  unsure (1)..(382): unsure at all n locations
ntcatttattattctntgctaagcaaagttatcctatatttgagctctattgtttattcactcattgagtgttattgaatatttgtgttcattcaaacttctatttttgaaagccaagagtggtttagtgttaaacaatagttgagtttcttagatttacggggagtctaagaaagtgtcagaagttgtattaagaatacttgtatagctacgagtgcgggtcacgatactcgttntgtaatgaagttttgattagtgcaaccctttacttttgactaaaggagaattgggcgtagcttacgttgagtgaatcaatataaaccaagtgtttcaacttctctccttaatatcttattaagtattctatcggcactctctatca

SEQ ID NO: 241030 - DNA, 338 bp, Glycine max
  unsure (1)..(338): unsure at all n locations
agctcgcctcaaagaggtccaggaaggacaaggcggccgaaggaactatttccgccccggagtacgacagtcaccgctttatgagcattgtgcaccagcagcgcttcgaagccatcaagggatggttgtttctccgggagcgacgcgtccagctcagggacgacgagtatactgatttccaggaggaaatagggcgccggcggtgggcaccactggttactcccatggccaagtttgatccagaaatagtccttgagttttatgccaatgcttggccaacagaggagggcgtgcgtgacatgagatcctgngttaggggtcagtggatcccgttcgat

SEQ ID NO: 241031 - DNA, 391 bp, Glycine max
  unsure (1)..(391): unsure at all n locations
tgtgttttcccttgtagaactactaactgcagtaacagattctcctgaaatctgttgagtcccacatcgagtagaagtggaaaggttgagcaccatataagtgaggagaagacccataaatctgagccttaaggttttgggttagagtgtgatgtcagatctccttatgtggtggctcgtggtccacaggtgtacccctcgaatctccccaacaattggtatctgagctgatggttcaagttggtgaccggctcagacgagtatgcaagtactgcaggtggccaaaatggctagcggcacagcgtgccccgcaggtggagcggngtggccagaatggctagcgggcacggcaagtaccgcaggtggccatggctatacttgtggatgataa

SEQ ID NO: 241032 - DNA, 256 bp, Glycine max
  unsure (1)..(256): unsure at all n locations
agctngatgctgcaaacttatctgtatccaagattggagagcacatgtcaggaggttctagtggcggctcctcagctggtggttctcacggaggcgaccaggctcccgaggcagaatacgatgaggagaagaagtaaggcgaggaggggtttgtatccacttctactgagttattttggctagagttagagatgaatcatcttttttcattcagcatatgatataaggtattttgtactacaaggctggagttcat

SEQ ID NO: 241033 - DNA, 405 bp, Glycine max
gtaactacatatcttctaggtgtctgagtcatgttaaaagcatttctacggcagatggaattaagaggaatgatctaccggcaagatagttatagcttctgcccttgatacaagggggtaggcgaacttggacagcctgtgaacaattcatcccaaaactcaaatatatgccactaaatcacacaagtgatatataaatgacatgtgtgaaaaaattcattattttgacatttagaatataaaaagcttgtgatatttcacaggctataatgtcaagtgaaatataatggttacccaagtattcatctgcttaaagtagctaaatcgacagcagaaatcatagagcaactgaagagttccactcttcttgctctaatacaggaaactgaagagtctggtgaggag

SEQ ID NO: 241034 - DNA, 391 bp, Glycine max
agcttaaagtatgcccgtgtcattcatccctatgagatgttgttgaagtattggcgatcagaattgccattccttggattataggattgaaccaagctcatgcttttacaaaaaggttcatcaagtcaagttgaaatacggaagtaaccgtcttgcaaaattggggcaaaagatgaatcgagtcacatcactgcttcatctactgccaaacatatttaggattgttgaagtccttgctacttccagtttcaccttgacaaagttgtcatggaccatgttgaaaatctaaattgattcaaccccatatcctgcgtaaaaattcgcaatacttcaactttacatcattcgcatgcatccatgcttttcattggttgcattgctcattgcattc

SEQ ID NO: 241035 - DNA, 434 bp, Glycine max
  unsure (1)..(434): unsure at all n locations
tgtagaatggctagacatgatacatgtctnggtttggttcggttcaaggataaaagggatgccccacattatttccatgacacaaatgcaaaaatgatgattaggaaactttatgcaaaactggtcatgcatgcacctatgtggacactcaagtgtcaaatctttatggtcatgtgatgctaaggctcaagattcatttcctctattttagtcaacccaacgtttccaaaatatgttcttttatcaatttgtgcattcatccgagtccattctgggcgtctgggaaaatcttcacagcattcacccttcaggtgtatacacattttttcaaaaactagttatgatcagtgaatttttttaaagaaagttggaagtcatctctcttcaaaagcatgttggttgttcagcttgacaacttatactcctcttttctc

SEQ ID NO: 241036 - DNA, 306 bp, Glycine max
agcttgctcgataagccattgatgtccagtatagtagtcgcgctaagcgcaaatccttatctgttttgaaaatttgtggaattgggcatagcgagcctgctcgctaggccaattctgcagaaaaaaatggatttgtgttcactcgctaagtgtgtggtagccacacgcttagcgcataagtcatttttcctaaggcacgttaagcgagtcacttgcgctaagcgcctagactgaatttcaattttgtttatgattcttaatttgaataaattcttgtctaatcttatgtttcgattcttttgtatt

SEQ ID NO: 241037 - DNA, 429 bp, Glycine max
  unsure (1)..(429): unsure at all n locations
tggcttagcatangtctaaaatattcataacagaagagggtctatgcttatcgcagcatggcacgcttagctcagcctctccaaaatgacccttacgcttatcgcacagggcgtgcttagcctaactataaaaactaaaaaacagttagagagttgagcttatcacagcagggcacgcttagctcaacctcctcgaaacacaactatggcttaacgtggcaggctgcgcttagccttattcaaagagttaaaacacaaaacctagatggcgcttagtgcagcaagttgggcttagcacctaaactactctaagtgtctaaaacactaggcccgcttagcgcacagatgcacttagtgggttcatcatattattcatcagcaacgatgaacgcacttagcgtgatcatatggaataccaaanaaattaat

SEQ ID NO: 241038 - DNA, 170 bp, Glycine max
ggacgactcttgagacttgttgagagaatgggccatgtgcccgccattttcctctgtatccaattaaattccaatacgcatgagagggagcataggcactaggtagcatggcccgcaccttgtaaggatcatatcatacctcatgctacaccccatccctgacccaccac

SEQ ID NO: 241039 - DNA, 510 bp, Glycine max
  unsure (1)..(510): unsure at all n locations
cgacgcggcatgancccttnntgacgcattgatcagtgaccttgaatctcagctaaatatacgattctattatactcagcttggctcacttatcttctttatatagccaccttttgacagatacactatagctatcttcacacacttctactgatgctctacgcccatgataaatgccttatgtgaccataacaacgcgttcatacacctactacttatcatggctcggaggacgccgtgaatatactatactattgagaattacgaatataagggccgaagggaaactattgctattgtaacatgtactcataggagcgtatcccaacttggaccatggactcattanatctaccctacggttcatgagaatctctcggcaatggttatgagctatatctcaagcctctcgtagtgttgtagcgaatacactagtgcggtgcgagttgatgatcccctccaccttcggaaggattggaactgatatgccgaggttctatgtactttatn

SEQ ID NO: 241040 - DNA, 229 bp, Glycine max
gacaatcctttgtctctcactcaatccttaggcccagcacctagatattgagtgtgaactacgtataagaatggacgatttcccccttgactgtgactcctgaacacaaaagtatgaaagttgcacagacccattggcgggctattgaccaaaggggcaccggccggtcacaatgatactgtgagtacctagcggttgccgtggacgaccgttaccgtacgtctacact

SEQ ID NO: 241041 - DNA, 204 bp, Glycine max
agggacatattgacagaggggggttcactacattgacggatgacctaaggagatacattgagattctagatgtatgtcagattacgatcgttcatcgaaactacgcgaagtgtgacacatgcttatatttataggctaggcatctaacttgagaagataccatgacatatcattcctgagaacctggagcttagctacatacac

SEQ ID NO: 241042 - DNA, 125 bp, Glycine max
  unsure (1)..(125): unsure at all n locations
tgcttatgcacggaatatgtaattatgaaattgagatgcctgaagaaacaccatttcctagttaaccatgccttaggtaccatcttcaattattgtgttttgctgccgngtcatctcctcccccc

SEQ ID NO: 241043 - DNA, 401 bp, Glycine max
  unsure (1)..(401): unsure at all n locations
ntgatctaccaccatcgccaccaccatcatcttagttntctattatgttatattattagtactttgatttccagcgttgtattttggctatattattatgatatttgaacaatttactatttccttatttgcatggtatgtttgaacaaatattaagtatgttatttggctatgtggatgttatagttaatctattcatcattgctgcttcatgatttggttgatatttctccatacatgttgtatggatgcttagttatatgtgtatgcctcaaatttgttacacactttggctttttgttgatgtcaaagggggagagaaatatggactaaatcaagaactcacatgagtaatcaacttaatcttaagagaagcatanattcataaacaaagggggggg

SEQ ID NO: 241044 - DNA, 450 bp, Glycine max
  unsure (1)..(450): unsure at all n locations
agcttccatcacanaatagctactaaggtcttgttgtcgagattnttctggccaacactttttaaagatgcccatcaccatgtcttaaagtgtgatcaatgtcaaagaatggtggatttcccgaaggaatgagacgcctcttcaaaaaattatggaggttgaagtttttgattgttgggttattgacttcatgggtcctttcccctcatctgctagtaataagtacatcgtggtagctgtagattactgtgaatgtatgtatacatgattctgatgatgtcaaaagaagaatcaaataaggctcatttgcttcaagattaatacaagattgtntcaacaaataaagccttgattcaagatgtcttcaagatcaagtcttgcctcacaatgaaaggtttcaagtcatccaaggcatatgtaatcgattaccaatacatgttgtcataccct

SEQ ID NO: 241045 - DNA, 450 bp, Glycine max
  unsure (1)..(450): unsure at all n locations
gggagaggatgcttcaatggagganaagaaagagggagagatttagagaggggggagcacgaaattgaaggaagaaaaagggagagaagttgaactttgagttgtgtctcacaagactctcattcatcaaagttacaacaagtgttacacatgcttctatttatagactaggtagcttccttgagaagatttcttgagaaaacttccttgagaagctagagcttagctacatacacccctctcataactaagctcacctccttgagaagcttccttaagaagattcctaaagaagctagagcttagctacacatacctctctaatagctaagatcacctccatgagatgagaagctagagcttagctacacacccnctataatagctaagctcacccccatganaaaaaacatgaaaatacagaaaaagtccttactacaaagactactc

SEQ ID NO: 241046 - DNA, 440 bp, Glycine max
  unsure (1)..(440): unsure at all n locations
atatccaaaacctatattcaatttttggattatgcttaatgagttttgtatatttgacatgtgaatcaagattctaatatatactttagattattattattatatcataccttatataatatatggtgattgcaatgaaagtaaaaataatatatctcgatcatcgtgtgatattggatttggtgtacatgtgaggtattgatatatatatatatatatatatatatatatatatatatatatatatatatatatgtgtttattatatattggatatataaatagtagattatttctttcacatattaaaatgttatacaaatatagattaaatatgtgaatgataagatgttaagggaatatttattagatgtaacatactttgaatagcattgtagacgaaaactatcgtgtcaacatcgctatataaattgatgacn

SEQ ID NO: 241047 - DNA, 449 bp, Glycine max
  unsure (1)..(449): unsure at all n locations
ntctcaagaggattctntgagaagctagatccttatctatccacacccctctattaactaaattaacttccttaaaaataattacggatgaaaataacgcaacaaataatcaaacatcaaacataattactaataatatatagatatatatatcagggtgttacagttatcatctttgttatcattaaaacatctttgaatcactcttgattcaccatgaagctttgcttctacactaccaaatagaacattttttatcatcacaaagtttatagcttatatattagttgaattattaagttcatatgtttttcttcatttcttcaaattaatttgacatatgagggtgtacttatttaaaaatcgtataaggaatttggtccaaattcggttagttgaaataatttcccctcatatatgatatatacaggaaaactcagtagtaagaa

SEQ ID NO: 241048 - DNA, 407 bp, Glycine max
agcttaggttggaccgacaatgcaccaaattacccaatctccttcctatctaatctctaacccccaatccagtttgctgcactgatgtcacccttattccagttcctcaaatttatccacggtatcattcacttttcaataatgtctattatttactacaaatatgactgtctattagcatatccactgttctaagtattgcataccacttcttagaacatgcttaaactacctacgtatgtaaatactattttattatatgcaccgaggcaatagtcaataatgcatggaaaaacacaaactgaaagagtaaagaacaattctccaatataggagttgctcagcgtgtaaacactgatatccataacaattctctttgccaaatactacatccacgttaactagtc

SEQ ID NO: 241049 - DNA, 371 bp, Glycine max
  unsure (1)..(371): unsure at all n locations
ntgccatgtcccttctagaaagcacatgcataacgaagttcctcanatagtcatcatcanacctagacctcaatccgaaacacacgaccatctgcagaaacatgacgacttcggcagcaccactctctgattccccatccanatgctccttacacgtttccacaaccgcaacggctctctccacgatctttctagaatgttcccttgactctgacgaaaccatcagcgcctgtatcacaagcccgcacgcccacctcttatccgtcaccccggacttcgccaccttgctcttcataaactcctacactgcctctaccaccagccgcgccgggtccaccgcttactccatcgccgccgctatctccgcccgc

SEQ ID NO: 241050 - DNA, 393 bp, Glycine max
agcttaccttcaattattgtgattcatggtatattgtctaattacacttcttacttattcatacaatactatgtttcagatttatccatacacttgttattatggataaaaataaatgaaatacttttacactcaatcttattactataaaaatctctattgaatctcactattacatttgattaccacattattataattaaaggatatataagggaggaaatactttataatgatcagaggagggaataaggtgaaaggaaagaagatatagggtcataatgtcatgcacaaccagtgtatctctttataccatgtataataatacatcagtctctttataccatgtacaactagtacatcaactatcttatacatttgctcaggccttta

SEQ ID NO: 241051 - DNA, 424 bp, Glycine max
tttgtagataatgttaatgcttcacctgtaccgttgaatgtgttgtcagtgccatggttgttcttaatgtggggcatagatgtgattggggctatcgagcccatggcttcaaatgggcattgtttcatcctagtccccattgattacttcaccaaatgggtggaagctgcctcatatgctaatgtgattacgaatgtggtggttagattcatcaacaaggagataatttgtagatatgggttgcctagaaaaataatcaccgataatactactaacttgaaaaacaaaatgatgaaggagatgtgtggggatttcaagatccaacaccataattcgacaccttatcgacccaagatgaatggtgaagttgaggctgccaataaaaatatcaagaagctcattcacaatatgaggatgtcataca

SEQ ID NO: 241052 - DNA, 340 bp, Glycine max
  unsure (1)..(340): unsure at all n locations
gctgctacacagagaacacacaaaacatcattacatagatagaaatatatttacatcaggtacctacagggaagatccaatagaggatttagctttccatagtccggaaaccttctttacaacacaaagaagaacaagatgaaagattgcaaaaatacaagtggtgaggatgtctccttcacctctagggtctcacaatcactcacaaactcatctcaagctctcagaacggcttccgcttcgagctctcatctctgcagatcttcacacaacaaaatctctcaaaactttntggaacttggacctttctctctctagaacttcctaaacattcaaaagc

SEQ ID NO: 241053 - DNA, 428 bp, Glycine max
  unsure (1)..(428): unsure at all n locations
gtgatggtgtcgagaagaaatcacatgtttgtcatcatcaaaaagggggagaatgtgaatgtatgtatacatgattntgatgatgtcaaaaaagaatctaacaaggctgcttcaaatgataagcatttgcttcaagaataattcaagattgcttcaacaaacaaagccttgtttcaagattcactaaagaccaagccttgccttaaaacaaagtgatttcaagacatgcaaggctctggtaatcgattaccaggaagtgtaatcgattaccacaagacggcgttgagaaatagctgttgaaaaaggttttgaatttgaattttcaacatgtaatcgattaccatatgtctgtaatcgattaccagcaacgaaactttggaaactcanattcaaaagtcataaccctctcaaatataactgtgtaatcg

SEQ ID NO: 241054 - DNA, 349 bp, Glycine max
agcttgaggttataagggtattggttgacaatgctcgagaatataacattgtgcgataactattgtgtttcaatggcgccaacattgccaatcctcatatacatgcgtgagaatgagggaatgtgatacactataatcgtgaaccgtgggtgaggaatggttatttgaaattaaaagagactcatttatagaatgttatattaaataagcgttttaaagaaaattcaatggctactgtcaatctttccagtgggcaggatgataacgtaggaggacaaggcttgcccatcatcccttactcacagataccacactttcttccaagggtacctagaacatgttaactttt

SEQ ID NO: 241055 - DNA, 369 bp, Glycine max
  unsure (1)..(369): unsure at all n locations
ctaatagtagggaaagagcacacaagatgctattgtgaaaagagaaaaagttatagaagacttgaggagaagaaaagaanatgagatagttgtatgtttagacaactcgtacaattttcaaatgtttgaaaactccctccaacagccataaacaactaacttccaagcttatttaatgagatcaatttgaacgagcttgttgcaacgaaggagtgccacaaagagatggtttggtcataagagttgagtagctcagaaagatacctcatatatataaaaaaaacttcttagtcaaaacactctacgttagagctaaaccttgtcgatccananacaagtgtaaacacgttcatcagaggagtcacaatg

SEQ ID NO: 241056 - DNA, 385 bp, Glycine max
agctgtacagcagattttttaatgacccactatcctagaattaagataactcaatgccattaacctatggaattaaaacaaacttaatggctgagtgtaactgatatagtaggaaccaatatcaccccctacatcctacatgtcaaccaccattaggtctcccaaaaggctgatgcctacattgccaaatgggcccttattacaacttgaactgaagccctattagttgattaacccataacatatttttggtcagccaactttactaggattgggccattattttgacaaacttaacactctaaaattgaaataaagaggtgtcatttagtcctccatatgggccatgatacaactcacaaccttggacttttgtccttgaaac

SEQ ID NO: 241057 - DNA, 258 bp, Glycine max
  unsure (1)..(258): unsure at all n locations
ntntagcaattcagatggtcataacgtttcactcggatgtctgattcaagcgcataatatatcgagacgctcgagattgaataatggaagctattgagcaatcccaatggatataacttttaactctgaagatcgatagatgcacatgatatattgagacgctcggaaatgaacaacggatgctctcgagacactcgaatggtcataacttttaactcggacgcctgcttgagacgcattatatatcgtgacgctcta

SEQ ID NO: 241058 - DNA, 367 bp, Glycine max
  unsure (1)..(367): unsure at all n locations
agctngagcttggttcaatcccgtaatccaaggaatggaaattctgattgccaatacttcaacaacatctcatagggatgaatgactcgggcatactttaagctatgcatggaaaatgtaattatgaaattgagatgcccgaagaaacaccatttcctagttaaccatgcattaggtaccatgttcaattattttgttttgttgttgtgtgcatttttttttagaaatgggtttatgatcccaacatggttggctcatggtgcctaacacatgcaactaagaatgtagtgtgaagttttcacgcttcccctttttttgttttggtttgtagaggaaaattgcaggatgaaccaacattgaaaccaat

SEQ ID NO: 241059 - DNA, 434 bp, Glycine max
ttgaagggacaagtcgagagtggaaagtatgatattagaggacaagttgaaggcttgtcaaaggtcgaagaggagcttgaccgaatagttgagaaggatggaagagaacatgtgggctatcattgaccagtataaagagaagctaaatctagcagctagccataagtaaaggctagaggacgagcattcaaaagtatcgatcctacaagtagaaagggaagcaagggagagtgtgatatattcattacacagagaagctatgatgtggatggataggttcgctttcactttgaatggaagtcaagagcttccaagactgttagccaaagccaaggcaatggcggacgtgtactcgactcccgaggaagttcatgggctcttctgatattgtcagcatatgatcgagctgatgtcccacataattacgaactact

SEQ ID NO: 241060 - DNA, 385 bp, Glycine max
  unsure (1)..(385): unsure at all n locations
agctntaatggagcttacatcatgtggtatcattcacatcttcatctaggtgatgttcttttgcttcctctatctttttgttcggtgaattatctttaattccttgttcttcatcttattctccatgtacatcctccattgtcttgtggtttggtgttgtttagagtagattaaaaaaaataaaccgattaaatcttaaatctacacttgttcttgcatttctatggttcaaattttgtagatctactcttgaatcatatttttgtgttgattntagcttctatcatttttcattcataatattcttgtgctgaacctttagatctanattttcttcctaaatattgattagaaaaaaacacaaaaatctaagcggtaatcactt

SEQ ID NO: 241061 - DNA, 440 bp, Glycine max
  unsure (1)..(440): unsure at all n locations
tcaagctttgagtagaacatgggaccactcatttatttanattttnannttnaannnannnnnnnngaaatcatatctagtcaaggtctgagagaccatacaagtttcctaacgatttctaattatgtgggccattaagtctatcatatgctgacaatagccgagaagcccatgaatctcttcgggggcggagtaggtgtctgccatcgccttggccttggctaacaatcggggaagttcttgactcccgttcaaggtaagagcaaaccgatccatccacatggttgcctcttggtgtaaagagtcgatcacccttcctctagcctctttttccgcatatacttgggcatactcatccgcgattctatgctcgtgggccgtggctagacccaactcttcttggtacttggcgatgatagctaacatgttggtttctgtct

SEQ ID NO: 241062 - DNA, 334 bp, Glycine max
  unsure (1)..(334): unsure at all n locations
agctttcagaaaatgtctatgccgagtgtataccattnttcttccatgtttcagttgtacgtagcttgtgttttcttcatagatagggcaatcacgatgtcctttaacactatatccactcaaattcccatatgctcgaaagtcattaatggtacaaaatagcattgcacgcaacttgaatgtctcatttcgatacccatcaaatacaacaaccctctcgtcccacaactttgtcaagtcttcaatcaagggactgagataaacatcaatgtcatttcctggttgtcttaggcttgatatcatcatagaacacataatgtattttctctacatg

SEQ ID NO: 241063 - DNA, 437 bp, Glycine max
tccttaagaagattcctaaagaagctaaagcttatctacacacacctctctaatagctaagttcacctccttgagatgagaagctagagcttagctacacaccccctataatagctaagctcacccccatgagaaaaaacatgaaaatacaaaaaaaaaagtcgttactacaaagactactcaaaatgccccgaaatacaaggctaaaaccctatactactagaatttccaaaatacaaggcccaaacgaagagaaaacctattctaatatttacaaagaagagtggatccaaccttgaaccatggactcaaaaatctaccctaaggttcatgagaaccctagggccttctttagtagctctagcccaagcctcttggagtcttctatctaataccctcgcggggtaggaatgcatcatcccctccaccttggaaag

SEQ ID NO: 241064 - DNA, 248 bp, Glycine max
  unsure (1)..(248): unsure at all n locations
ttctttaaattagctgttgaagcagtattntgtacagttcacacacgcacacacacatggtagcaaggactccattgcacttgaagaagttaagtccaatctctattctagagagctttgactaaaggcatttgggaatggtgatgaagcctttatggttggattattggtgacaaattctgcttaaggatagaagaataataaaggaataggtggcaagaagaggaaaaatgatcctaagacatctg

SEQ ID NO: 241065 - DNA, 377 bp, Glycine max
  unsure (1)..(377): unsure at all n locations
tagctcttctttgcttatcttatgagtgagctatgacaaactctagcaccacttcttcaaggataggcttacgatctatgttcatcatggtggccttttcacattcctttagagattccagaacaaaatcttctacaatgtcttcaaattccttcgctgttaaggccacaaatcttacatcctcaactacgtttgttttatgtnttttagcagataaagccttccagaaactatgatgacttgttctatttttgaagcttactatctttccaaggtctgatcaagtttttccttctctcttgatttagccaagggattcttattagcctttcccaaggcaacaacttccttttacttattgggggtgaaactggttt

SEQ ID NO: 241066 - DNA, 108 bp, Glycine max
attcttatgattgcctatgcgtggaccctcaagtgcaatcctccattcttccctctattccgagccccatgaatgtcattgcctactgctggtcatgtgtcctccacc

SEQ ID NO: 241067 - DNA, 412 bp, Glycine max
tcggaagaaagtgatgaggtacaagccctaaaggcagagcttgaaagagcctgcgtagtcgaagagaagttcaagtccatagccatcaaagtctgaaaagagtatgatgaactaagggatgtcaatatggccaccgatgaagccttggaatgagaaaccaagaaggcccgaaaggaagaacacgaccaaagcaaagttttgaggggctttatagggcagcaatagtgagctcaagttccgaagaggtgaaaggaatcatcacgggtcaaaggcatgatcttgaaggacgagctaaaggcttgccttatgtcgaaaagaaatttgtcccaacagctaagcgagactgaagggaatatgtgggccatcatcgataagagcaaagagaagctaaatctagcggcgactcacgagc

SEQ ID NO: 241068 - DNA, 103 bp, Glycine max
ataagtttaagaatatacagcatatagttggcccatgatatattactttaatgtataagctgctctcttttcatgataggttagcacactgcacacatctttt

SEQ ID NO: 241069 - DNA, 475 bp, Glycine max
  unsure (1)..(475): unsure at all n locations
caagcttgttggagtagaaacatgggaccaactcattntatttcaaaattgatagtcgtatctagtcaaggtctgagagaccatacaagtttcctaatgatttctaattatgtgggccattaagtctatcatatgctgacaatagccgagaagcccatgaatctcttcgggggcggagtaggtgtctgtcatcgccttggccttggctaacaatcggggaagttcttgactctcgttcaaggtaagagcaaaccgatccatccacatggttgcctcttggtgtaaagagtcgatcacccttcctctagcctctttttccgcgtatacttgagcatactcatccgcgattctatgctcgtgggccatggctagacctaactcttcttggtacttggcgatgatagctagcatgttggtctccgtctcgcataaatgctgagacaagcttcttttggaccttgaaacaagcaataac

SEQ ID NO: 241070 - DNA, 454 bp, Glycine max
  unsure (1)..(454): unsure at all n locations
gtcctaaatgacatttcaagctaatattaactctctttaacctccatttaccacagaattcagacttaacctcattctaaatttcactttaacctccatttaccacagaattcctacaagtcccaaatcatgtatcaatcatgtctaacccaaaatcaagcttcaaaacacaccaacacagaatctaggtgtccaaaacccctcaattcaatgggttttctaggtttgaaaagtgaaatttataatgaggtaaatttgaagcaaactctcacctcacacaagtccataacatcaatctaaactcgctcaaactgaatttacacctaaaattcaaccgaatcaaaatttgactcctccacacccaattntgccctagaaatggctctntgttcactttgatcattcgttcttctctctagcacagtccaagctttctcccaagttctaaatgaca

SEQ ID NO: 241071 - DNA, 72 bp, Glycine max
  unsure (1)..(72): unsure at all n locations
ttcaaatggtcttaactnattcacggatgcccgtttctcgctcacaagggagcgatacgctcgaaattaaac

SEQ ID NO: 241072 - DNA, 345 bp, Glycine max
  unsure (1)..(345): unsure at all n locations
tattgaganaacttccctgagaagctaaagcttaactacacttatcccctctaattgctaagctcacctccttgagaagctntattgagaagctagagcttagctacacacacccctctaataactaagctcacctccttgagaaggcttctcgagaagctagagcttagctacacacacctctctaatagctaagctcacctccttgagatgagaagctagagcttagctacacaccccctataatagccactgaatgtcgcgcttagcgaatgctcgctaagccagcagattggcttagtgagaaggtgagaataacacttttgcaatttggctaattaacct

SEQ ID NO: 241073 - DNA, 189 bp, Glycine max
  unsure (1)..(189): unsure at all n locations
agctttcaacaagagtcttcacaaataactattatgaagcagaaaactaacaaagctacccatcatatctcccaaaaccccatacccacgaaaatcaagggagaaagaagtccacccaaacctgaaatttcgaagtcccactcgtagacacgcacttnacgaccccgaaaatgctctccttccacgatt

SEQ ID NO: 241074 - DNA, 69 bp, Glycine max
tgccgcccagctcgcccaggttagcaaggttgcttcctccagttttaacagccttccggaggaatcttc

SEQ ID NO: 241075 - DNA, 414 bp, Glycine max
actttgtccagacaatgttagagagactagtgcatatgcactgaaagtgtaccgcgatgttatacattaaatcaatcatatgctgacattatcgcgagaagcccatgaatctcttcgggggcggagtaggtgtctgtcatcgccttggccttggctaacaatcggggaagttcttgactctcgttcaaggtaagagcaaaccgatccatccacatggttgcctcttggtgaaagagtcgatcacccttcctctagcctctttttccgcgtatacttgagcatactcatccgcgattctatgctcgtgggccatggctagacctaactcttcttggacttggcgatgatagctagcatgttggtctccgtctcgcataaatgctgagacaagctctctttggaccttgaacaagc

SEQ ID NO: 241076 - DNA, 287 bp, Glycine max
  unsure (1)..(287): unsure at all n locations
tgatcttgattcttgctaagttctgtaactagcttagaacaatttacttggccttctcttaattgtctntgggcttggcgaccacgatcaacacagtactttcggcacctactatatgttgacttgaccaacgctgctattgtaacgctgcgacaatctttcaacaccttattgacacaatctgcgaggccggatgccctccattcatagggttttctacgtttgaaaagtgacattcacaatgactgttatttgaagctaactctcacctcacacacgtccataac

SEQ ID NO: 241077 - DNA, 450 bp, Glycine max
agcttctatataagctgatctcattctatcaatttatacaagttgagagttatggactgagagaccatacaagtttcctaatgatttctaattatgcgggccattaagtctatcatatgctgacaatagccgagaagcccatgaatctcttcgggggcggagtaggtgtctgtcatcgccttggccttggctaacaatcggggaagttcttgactctcgttcaaggtaagagcaaaccgatccatccacatggttgcctcttggtgtaaagagtcgatcacccttcctctagcctctttttccgcgtatacttgagcatactcatccgcgattctatgctcgcgggccatggctagacctaactcttcttggtacttggcgatgatagctagcatgttggtctccgtctcgcatatatgctgagacaagctcttgttgaccttgaacaag

SEQ ID NO: 241078 - DNA, 442 bp, Glycine max
  unsure (1)..(442): unsure at all n locations
ttaggcanattcaaacgacaataactttntactcggatgtcttattgagcgtagtacaaaatcaagacgctggtaaatgaaagtttaacctacatctaccacagaattcctacaagtcccaaatcatgtgtcaatcatgtctaacccaaaatcaagcttcaaaacacaccaacacagaatctaggcgcccaaaacccctcaactcaatgggttttctaggtttgaacagcgaaatttataatgaggtaaatttgaagcaaactctcacctcacacaagtccataacatcaatctaaactcgctcacactgaatttacacctaaaatacaaccgaatcacacattgactcctctacacccaactttgccctagaaatggctctttgttcacttggatcattcgtcttcttttagcacaagccacgctttctcccagtcctaat

SEQ ID NO: 241079 - DNA, 63 bp, Glycine max
agcttttctttctcaatcatacctatttactgactatacaactctaattgtaagttcacattc

SEQ ID NO: 241080 - DNA, 73 bp, Glycine max
gatctctctatgggttgatgcaatctctctcgtgcttgtttgtgtaaattagtcatcgtgctcaaatgcttgt

SEQ ID NO: 241081 - DNA, 434 bp, Glycine max
  unsure (1)..(434): unsure at all n locations
ncctgttctttttannnncgaggannagccnncaaagannccctcataaccacccttaattctccctgtnagaagcatcctatcacccgttagatctggtgacgtcgctgtggcatcaccaattaaatcttacccaacagtgcgacacacactcactgaatggcagacctctattttaacttagaccaggctctattaaaccataaaatcttcccgcctcggggtacacctgtattggcaaaccccccaagggaaatagtcattcccttattacttctacaatctggtggaactggggcgtaaccctaacgtcattcccagtgggagagatgactagcattttaatccgacgggggggatgaatttgaatccggcagaaaccctcttttaatttcgaaaatctacttcttcccctaaatctggttgcaaaacgt

SEQ ID NO: 241082 - DNA, 259 bp, Glycine max
tcgacactatgatacattgtgcctcctcattgttgaatggagtagcttcaaaactgataatagacaagaaagatctcatacattgtgctctatcacaactatgccagttgaacaacctcttgatggcgtggcacatgcagcacgtgctcacgctcaatatcaccaccgcgctgtccgacgccagcctctctatgcgctccagcgggtcccccactaccgccgccgccgcgttcccaggggccgtcacgtatcttcccat

SEQ ID NO: 241083 - DNA, 92 bp, Glycine max
  unsure (1)..(92): unsure at all n locations
agcttatatatcaaagattcgacaatttaaaagttgttggctactcagactcagattntgctggttgtgttgaccttcccacgctcccacct

SEQ ID NO: 241084 - DNA, 262 bp, Glycine max
  unsure (1)..(262): unsure at all n locations
tgtggccctcctactcatcaaggccactaccctctatacgatacaacctccctcgacactagacaacctctttcgctcgcaagacggctcagagcttggagggattatatactatatagggtccacaaaatacacgtggcaagttatgtggcactccaatagacatatcagccctctatgtcagctctagcacagaaacacgaatgctcaaaccttagtagccaggctattaactgacaggntatctctaaccactttatta

SEQ ID NO: 241085 - DNA, 199 bp, Glycine max
gtcgggccgggaccatttctatagttgaagctatatatcgactgtccgaatacatctgatttttcaatgattaggcgttacaactaagcgatattggcgcctgtagctccaaaaaaataacgcccgaatagctcaataaaacttttttgtcactaactggtcgaaacagaagcactaaaacgcctgtcatcctatcgcc

SEQ ID NO: 241086 - DNA, 402 bp, Glycine max
  unsure (1)..(402): unsure at all n locations
atccttaagtcacctgcggcatgcaagctntaagggaaattaatatgggattgtgctagaatttagattattaacttattgtaatttaatttatnttggtgtgaaatggcactatgacataaccatggaactcatcccacttccttcaaacttctatccctctttcttttctttttttgaaacttctcctttgtgggtgagtttgatctatgttttttctcatatctatcccaagtcacaggtaagttagtttttccactcactactaaaaaatatacatttaacatcggcaggttaacatcggtttccgaanaaaccgatgttaacaaaagcacggtggcatacttgtaataagattagtttattaaccatcggtttatacaaaaccgatgtaacacaaat

SEQ ID NO: 241087 - DNA, 295 bp, Glycine max
aaaagcttaagatcatcagaacattcagagtcagatagatcagagattcagctcagagaagtttgaacagaatagatcaggtcagatcgacagatcagactcagatcatatgagagagactcatcagatagtataaagttctcaaactttgatacacatgattttgcaaactttaccaagagtttactctctgtatcgtacctatgtgtatgataccgacaaatgagtcaaagtttaatgattacacgtcaatatttaaggtgatcatacatgttgtatcatacaggctgacgtg

SEQ ID NO: 241088 - DNA, 336 bp, Glycine max
agcttggagcgctatccgcagactcagcagaagtttttgggaaagaaatcagactatgtgcacgaatcttatacccaatgggttattgataggaccaagagctttggcctaccctaccgcttacctagatacctatcgtccaccatcccaccatcatccttgcctatccccttcgacaccaaggaagagtttcatgaacaattaaccaaagaaaggcaagaaaaagaaacttggaagaggagatgccaggagctcgagcaagagaatgagactttgaaagggaagatagcccaacagagccgtgagctttttatccagaaccagaggatgatcgag

SEQ ID NO: 241089 - DNA, 304 bp, Glycine max
  unsure (1)..(304): unsure at all n locations
tcatactatttcaagaaactgaatncttggtctccatgttatcaaaaacaactctagcatctcttaacatccctgactttgaaagcatactaattagagaaggtgccacaagtctttctggctcaaaaccgagccttacaacccaagcatggatttgcattcctataaccaccggacccttgatggccaaagctgcaattacagtagaaacagtataatagtcacgtctgtatcccctaacttggatcagacagaacaattcccacacctgatcattaaatctattccatgaataacccgtgag

SEQ ID NO: 241090 - DNA, 391 bp, Glycine max
  unsure (1)..(391): unsure at all n locations
agcttgaacctcacagacccaattccaattatcttttacaggacttgttgtttccatggaggactgaaccaccaacttgtttgtcaagatcctcaaaccaagacttgtttggagtcatatgaaatgaacacccagagtccaagatctatttgtctcagtgttcttatgagacaccattaaagcctcagctgaatcataaccatcttcaactagagtagcatttccaggttctttagatcgatcttgcttgtttcctttctgtctattaggacagaatcttcgagtatggccttctctnttacagtggtaacatctaatgtttagtacattagatccaaatcgagtttgtgacttggatcttttcccttctgtcttatcatccttcttggat

SEQ ID NO: 241091 - DNA, 321 bp, Glycine max
  unsure (1)..(321): unsure at all n locations
agaactatagctagttcagagatggtgaagaatgaactaaaccagttttgattaacacgggctggttttggtttaatagtattagagatatagattagttcaagtaattacaagctaattattaagttagttaattagttaccaattacgtatttttgtaacccattatggaacattactagcattagttatataacgatgaatgtattcatataaaaactgatttactcattcttagcattatcccaattaatattcagnctctcttttctcttttcatctttccatcttaactctatcacatagtgattggaacacatg

SEQ ID NO: 241092 - DNA, 463 bp, Glycine max
  unsure (1)..(463): unsure at all n locations
agcttcttcttcagactntgtgaacagtgtcttgttatttatcgaanaatcatccattgcatcaatgcttgaagaacctgctatgtgttggggaatattggggggtttcttccaaaggtgatttcatagggggaaagtctggtgcttgaatgaattgatatgttataggaccattcggtctatatcaaaaacttaccccaggacaacgggcgatggtgaacggaggctcgtaagtactgttcgacaactcgatttagcattttcgtctgtggatgataggcagagctcatacaaaagtttgtgtcgctgagttggaacaattcttgccaaaagtggctgatgaacaatgggtctcgatagtagaccaagctatgaggcattccatgaattttcccaacaatgtccatgaaaaggattgcaatagtgtgagtcgtgaagtgtgacttgagcttggccaggtgga

SEQ ID NO: 241093 - DNA, 392 bp, Glycine max
  unsure (1)..(392): unsure at all n locations
tcagtggaggaatcagacttccagcaagttagtggtgaggtggtataacatcaccatgtggaccctgtttatgatcttagtccacaagcttctgaaacactccaatcgattccttctgtatcttctcatgattctgctatggagttgtccgagagggcatatcctgcttcaatagaaatgactgctaatgtggcagatgaagagtctgaagtgcatgatcacagacaggaaggttatacttctggtcatgataaaaatcaagcaacctcttccgaactacatgtggaagccaaaaatgaactgaggtctgagaaatctgaagatgttaataatattactgcaaatgagttatctgcagttgccccacnattttgttgatcataatggatcta

SEQ ID NO: 241094 - DNA, 437 bp, Glycine max
  unsure (1)..(437): unsure at all n locations
agcttgtattccaatatttataatcattntgagagtttagcagctgtttcacccaacagataataaagattgatgattaacaatcttgacttttcctacnaaanaaaaagaaaaagaaagagaacaaaggagttgttgcattnttttaattttcaagaacttcttggccaacaatgaaactgaatttaattggtcagaattaagccaaatgttcttattcggtataagtagtagatgcaaaacaagtaagtgaaggaagcagagcgactggattcaattatgggcttctcagaacttgaatcatgtcattcgatgcattgaatattaagtttatgttaatgcatcttgtgggtgcttaaaagcacacaataatggtaaaaaaatggttcaattcacaacattaatccttactcagaagtgatatctcatgataaaca

SEQ ID NO: 241095 - DNA, 302 bp, Glycine max
atataattgattacttatcttttaaaaagcggtttagaagtgatcaagaacactctaatctattacatcacgaatctaattgaatacattggtcttgaaaagtttctaagttttgggaagaacactttaatcgattgacatggtaatataatcaattacttctttgaaataattgattctattggatatttaatcaattaccaatggctataactattttctctatacatagtcaccttgtgtctcacttctacaagtcttgacaacttctgaatatgctagaattatgagcctgatttact

SEQ ID NO: 241096 - DNA, 278 bp, Glycine max
agcttaactctattcgcattcttatctctcttgctgctacacatcattaacctttatttcgataggatgtacagaatgctatcttgcatggtgacttacatgaagaggtgtatatagagcaatcacctgtgtttgttgcttaaggggtgtttggcaaggtgtgccgcttaagggagttgttaaatggcttgatgcaatcacctagatcttggtttgggagatttagtggtgtggtccttgcatttggactgaagctgagtcaaagtgatcatactgta

SEQ ID NO: 241097 - DNA, 375 bp, Glycine max
  unsure (1)..(375): unsure at all n locations
taacgcacgtacataggcccacagtctcttcataactataaatagggagtcaagtctttgagaaaagacacaccgagtctcagagcactctaatacttaactaaagcctgagaactcttccttatggaattcttttttcgcttcctttattttctattccctttttccatcccttcttctgcatcnagttctataccctttttcaagtgtaagaccccttatggctatgagtggctaaacccttatttanggtctggtcggcctaanaagccaaatgatgtatcggatgattcatatctatcaatgcanacaggtgttttctttcctatttatccttcttattntaatttcatgtatcattcatacttgcatcat

SEQ ID NO: 241098 - DNA, 450 bp, Glycine max
  unsure (1)..(450): unsure at all n locations
agcttggaacaccaacttccaacattatgtggaatatattgggaggctcttcataaaaagtgaggttagactcatttccaaagtccttttaaccaaagcatcaactacaccattatgctccctaacaattaggactaagaatgaattgaatcaattcgaacataatttgagatttgatttgatatttgactcattgagcttggttcatgaaccaaatgagttaaatttaaatttaaagttgagctcattaaacaaataagataaacttaagtcatataacttgattcgattgattcatgaaccaacttgatatataaatctatctattattatatctagattagatatacctatctattaatctatacatatatntaaatatttatattattgaattcctataatgaattttagttaatttaatactatttttgcattaaatgaataaat

SEQ ID NO: 241099 - DNA, 460 bp, Glycine max
  unsure (1)..(460): unsure at all n locations
ctaagcttgtgatttacgtgatagttgcttgttttcttagttgtattgaatgagttagattgcattaccaaagcatttgtgtgatgtagaatgtattggcttctcttagaatttttatttggtattttggcaaatgttagttattagtttgtgagttctctcacttcatttctttctttaatcaccaaaccaaccttataacttctttggtttctcttagttattaacaagaaaatcaattattgatatttgaacatgttcatgatttgttatgcatatacacataacattatgagctctntgattntttaattaatgactgagataacttnaattaccctttagagtgaattgctcactacanaggagctagatcttgtacgaattgaagctttaggtctatacactggtttttaatttactttctgtattaacatcattggtggatatttggtacttt

SEQ ID NO: 241100 - DNA, 331 bp, Glycine max
  unsure (1)..(331): unsure at all n locations
agctttcacatttactgtataaataaacaactaactaanactaaaagttaaaaacatcaattgaaaataaaatgtatcaaaagcagaagaaataaatccaaatcctatcatggctcgtcctgtgtcgcttggggctcatccagaggtgaggagggagcatcctangctggctgaggaatatcctgagctgtaacaagccatgggtcccaggtgctctttgttgcggtcacatcagctgcataatccgcatcagcagcgccatccacctccaaaataggtgaagtaactggtgaagcctgtggagtagccactggagtggcctctagaacta

SEQ ID NO: 241101 - DNA, 474 bp, Glycine max
  unsure (1)..(474): unsure at all n locations
tcatgtgtgtagtaatctaacgatatattgagctatgagaatgtgttngagataatctctatggctgtccaaatgtagaatgaatatctacatatttcctgaagaagtcgtgatctaatatgacttcgatcatgggacaaaatgctcatgaagatcgagatattattttgtcgtctcaacataatacaacgaccatactctgaagattgcttatgttgtaggggtctgaataacattatactcgttcctatatgtcactgatcgaattatctacaactctcatgtagacatcataagcctgttcggccatccaaagggtcctataagttgaatacagtagtattcgtatattaagaacacttaccggctatgcatgtatatcatagaaagctctcgtatcatagcatcatatgcangactactttccataacatattcgatcataatgcatctcacatgtatactagagctaaa

SEQ ID NO: 241102 - DNA, 63 bp, Glycine max
agcttggagaggatgcttcttggaggacaagaatgaatgagagaaagagagaggggggggggg

SEQ ID NO: 241103 - DNA, 265 bp, Glycine max
  unsure (1)..(265): unsure at all n locations
tatagaatatataataagagaacaatgttcttcgaagaatcaatttatgtttccttcgatgagtctaacgttatttctcccagaaaggatattttagatgatattgcagaatctttacaacaaatgtatattcatggaaaagattctaaacgaaaaacagaaggaagccatgaagatcctccactataagtcaaagcaaataatgatcttcccagagagtggaaagcttcaagagatcatncccttgacaacattatcggtgata

SEQ ID NO: 241104 - DNA, 348 bp, Glycine max
  unsure (1)..(348): unsure at all n locations
agctnggagaggatgcttcaatggaggaaaagaatgagggagtgaaagagagaggggggagcacgaaattgaatgaagaataaggcacagaagttgaactgtgagttgtgtctcacaagactctcattcatcaaagttacaacaagtgttacacatacttctatttatagactaggtagcttccttgagaagctttcttgagataacttccttgagaagcttctttgagaaaactttcttgagaagctagagcttagctacacacacccctctcataactaagctcacctccttgagaagctttcttaagaagagtcctaaagaagctagagtttagcttcacatacc

SEQ ID NO: 241105 - DNA, 441 bp, Glycine max
  unsure (1)..(441): unsure at all n locations
tgcacaacaagtttctataattgtntttgtaaaaaatgaagtttctaactaacttcactaatatatacaatgactaatcaaaagaaaaggatgagccttgattacgcccatctaatctacctaattaaactaattacacaaagcaaagtgcaaattcgcagcccaattattcaagtgcaaaggttntgacttccaagcccaatttgacccttgaaatggcagaattagcccaaacttatttctgaaaaaattgaagttcattttcttacctttccaggaattatttacatgctctaatttgagttctgtagtgtcatatacgccctgaacaattatcaagtaagtaaaaaatccaaaaataagaaacaattatcaattaagcccaattatttgcctaagaccaaaactgagttaaggtgaacaaatangagtcatagagag

SEQ ID NO: 241106 - DNA, 324 bp, Glycine max
  unsure (1)..(324): unsure at all n locations
agcttcatttctgatcactaagcgacaacttgtccttggctaagcatgacctagtgtcaccaagcacaattccttacgaccataactggtgttcatgaagctaaacgccattcatggtagctaaaccgaattccttacggcaatgtgaacgctaagcgagtccttatcagctaagcgcatgctcctctgtacttaagatgcatcattntagctaagccagccattgccttgcttagcgagagttgncaacttttctgatctacaaacctcgctaggcagtcttatcctagcgctaagccaagcatgtgttgttaaaaaaactga

SEQ ID NO: 241107 - DNA, 145 bp, Glycine max
ccttacgaaagcctcgaaagctccggaaaccatttttccacaaaatgtggaggatctttataagttcaccccctccgctttgctaatgccactctttttattttcacaccgctgtctactaaataaacctcccttttgctttttt

SEQ ID NO: 241108 - DNA, 386 bp, Glycine max
  unsure (1)..(386): unsure at all n locations
agcttataaggtttgttgccagcagcattgaatgattcaatgaactccacattgtccttgaatatctggaaacgttnttccttctctgcagcatccttatatatttttccatattctgccatccaattttcatgtctttctcgcaaggctgtttgatgcagcttgcggngcatcacttgggaaatcccaactgcaaggaaaaggaatagggctaacatgtgttgctnttggccagtgaaagccatttcttaattatcagcaatgatcagttttgtaagaaaaggcttagttggtatatttgtgtaaagagagaaatgtgaattggtatgcattgaaatgaatgaatctggagggttatatagagatcatagtaccttatgctatgg

SEQ ID NO: 241109 - DNA, 400 bp, Glycine max
tcatcaaactacttggttcccgagggaaattctataaacagaccttctatctttaatggagtgggttaccactactggaaaacccgcatgccaatctttatagaggccatagatttaaatatttaagaagccctagaacaaggaccttatgttccctctataatagctgcaagtgcaacaatagaaaaacctagagcagattggactgacgaagaaagaagattagtaccatataatttaaaggccaaaaatattattacatctgccttatgaatagatgaatactttacggtttcaaatcggtaaagtgctaacgatatgtgggatacactacaagtaacacatgaaggcacaacatatgttaaaagatctagaataaacactttaactcgtgaatatg

SEQ ID NO: 241110 - DNA, 380 bp, Glycine max
agcttctagttgtgcctatattgcgctctttttctgagcagcaaatgctggtctttgcaccatctccatctgggtttcggaaggtaccctcgctatgcatttgatgtctctaattaatatatgttgtggatagaattcaatgtaaaatagggaaataagttttagttaattatttgtaaaactgtttttatttattttaagcatttggcgtgccttgtcttggtctctattcattcttttgaaaaaccttgttttatctgatcatgtctacaaatttgaataaatattggtcgtgttattttgagtgccagtagggttatgacatatggactcgattttatattgcttaattttaaatatgcaaacgtcatcgcttgaag

SEQ ID NO: 241111 - DNA, 303 bp, Glycine max
  unsure (1)..(303): unsure at all n locations
ggtattggacaaatacagactagaaaaacagcttgacaacatcttagatggactcaagatgtatgttaatgttccaaaatacgggagaggaaaggggagggtcaaggagggtacctctaaacctcgtatcctgaaggaaggccatagcanggaagtcgaggttgtgcgacacagagcangacagtatctgaatccgcagaagtcatatgccaacgtggtcttcactattcanaccgacgctcgtaagatgaagcacccacactccacaacagagatacgtgaatccactctcaatacactcag

SEQ ID NO: 241112 - DNA, 437 bp, Glycine max
  unsure (1)..(437): unsure at all n locations
agcttgttntgatattcattcaaactatnttgaattagatcctatataatggctggaaattaccaaacctttgcaaaagttgcttctataaaccaaccccctctttttactagagaaaattatcctttttagaaagtccgcacaagaattttccttgattcattgatagaggagtataggatgccattgtaaatgatttctatgttcctaagcaagttggtgatggaaaaaaggtagaaaaagattttattcatggacatcaaaagaaaatagtcaagctcaatataattntagagcctaaaatattctttccttcgctttaacactngatgagttntatgattattctcaatgtgtagatgccatagaaaattgggaaatcttagaagtgactcgtcaaggtactaagaaagtcaagagggcaagagagaacactc

SEQ ID NO: 241113 - DNA, 218 bp, Glycine max
cgcttctacattgtcatcacaacattacattcctctttaggattcttttcttgtgtcgccctaaagctattggatgaattttcagcttattggttggctagttggcccacctagatctcaagggacttcaatgctgacttaatgcttttgcgaattgacatggttacctgcatgaattaagtcagagtctcctctcgcttggttgtcctctgaaaaat

SEQ ID NO: 241114 - DNA, 279 bp, Glycine max
  unsure (1)..(279): unsure at all n locations
agcttcaccaccaagagtatcttggataagaagcttagagaggaagtttcaatagaggaagagaatgacagagagagaggggggcgtgggaattgaaggggttagggagaaaagntgaactttgaagtgtgtctcacaagtttctcatttatcaaagttatgacaagtgttacacatgtttctatatatagcctagcacatatgaagcttccttgagaagcaaggaaggtagctttcttgggaagctagaggaagatagctttcttgaaaagctagagg

SEQ ID NO: 241115 - DNA, 312 bp, Glycine max
  unsure (1)..(312): unsure at all n locations
acacatattttatccatagcaacataaaaaatctctgcacggtaatgatgaagaataatgatagtccttccttctgctcttgaacgancccgaactggtatttcgtcatccatatttggtactagaatacttttagcaacacaaanatcttggacatccgcaaaaaaattattccagccactctctctcattgtgcccaaccgagctttgacaacatcaactaattncatggcattcacaatattaagaatctttctttgcaatatattttgaaagctcgttgtgataccaaacaactttaacattaacctc

SEQ ID NO: 241116 - DNA, 375 bp, Glycine max
agtcacctgcggcatgcaagcttcatgatgatgaatcaagttgattcaagatgttttgatattgacaaagatgttgacaaaaaacccaaagaatgatttcaagattaaatcaagatcaaattcaagaatcaagagaagtttgatttcaagattcaagaaaagatgaattcaagttccaagagaagaaatcaagaagacttcacaatgggaagtattgaaaagattttttaaaaaacaaacatagcacaattttgtttttcacaagagttttcacaaaattttctatgttaccagagtttttactctctagtaatcgattaccagtttcctgtaatcgattactagtggcaaagtttgattccaaagctctaactg

SEQ ID NO: 241117 - DNA, 426 bp, Glycine max
  unsure (1)..(426): unsure at all n locations
tatgagaattccaagctttataagtaaagagtaaaaatntatcattatcaaaagctttcaaaaaagaaatttcagcctgtcataccctaattntgtccagggactatcgttcgttgatcttttgatccttgctagttgacttacggtcttgaatgccagttacagtgcaaagcaaggaaccattcagtgtttcgatcaggaatgcgaaaaataccaaaaaagaggggcaaaaaggtcttttcattgagtttcctggaccctagctcgcccaggctagcctctggctcacctgngccctcaaattacttcagggttaaggaaccagctcttctgagcgagccaagtacttcaggagtaagcatcggctctgctgggcaagctccagctcgcctggcgagctgccattgcccaatgccattttcctat

SEQ ID NO: 241118 - DNA, 435 bp, Glycine max
  unsure (1)..(435): unsure at all n locations
agcttagacgaccttgtttgagtcgagaatactttattatctattnggacaaattagaatatgatgtagaagaaaatgaatgtgagcctttctcccctttgaaagacttgtaaaaaaaatgtnttaaaaatactcttaattaatatttgaagttttttccttattagtatatatgtgaggggtagagggtgtcacagatcccctgactgtgtcggagtcataaacggatgtgaaatcatgtagaaccactccatgtaatctgatgaacattggccagccactacacaaattttccctacaggtgcaatatagtcaccgaactgcatccatctagcatccatttcttcaacataagctgaaggcgctgcaggatgtggcgaaatggtctggatgtnacccaactatcatataaccctcttcggtcagtgaatgacc

SEQ ID NO: 241119 - DNA, 456 bp, Glycine max
  unsure (1)..(456): unsure at all n locations
ctatgttncaccactctccatnctcttttctatgggaanacttatgtagtggatcgaacactctcacaactcctaagatgtttcatcaaaggtaatttgaaaacttgggaagagtggttacctcatgttgaatttntctataatacggtaaccaactctaccacttctttntctccttttgagggtcgttatggctgtaatcctttatctnctcttgatttaattcccatacctaatgattcttctgctttgagtaaggatgggctctctagagccactattgctacgatcttcatgaaagggtgagaaatcagattgaaacaaaatggccaatatgcatgtcaagacaaaaagggagaaagtcatggtattgatcttgaaattggttgggtcattaacgacgatngttccttacaacgaatcgaactctactacgtgatgactttacgtctgaag

SEQ ID NO: 241120 - DNA, 462 bp, Glycine max
  unsure (1)..(462): unsure at all n locations
agcttgaaagataagttgaagatctgatgaagagtatcgatcagtgcgtcatacgtgctcaacgcaacacagtcactcagcaggcaaccctcacttagtgcaaagaagtcacatgaagaacttgatatttgaaggcatgcttagcgtgagtcacgcactaagtgtgtgaccatcgactcactcgcttagcacagtagtcgcgcgtagcacaaggttgcataaaatttaagccgacttcacctataaaaagaggaggaaggaaaggaaaaggacacaatgaatatccatgatattaaagtttcccatagaaagcaaaagctaggattcatgcaggataagtgaaaccaacctttaggagtcgntccttcccttcatcttcattcttctctaaccttcttcacttccattatcctcttgcaattgtaagcctctcatgacaatgagagactaaaccttccattg

SEQ ID NO: 241121 - DNA, 358 bp, Glycine max
  unsure (1)..(358): unsure at all n locations
tcatgatgttgaatcaagaatgattaatgagtttgatgatcttttagatgatgacttatagccccagagaatgagttcaagattgaatccagaacacttcaagaatcaagaggaaatttgatttccagattcaagaatcaaagtttcagatttaagttttcagaatccagaatccagaatccagaataatccagttgaagattcaagaatccagttaagactcaatcaagataagtacaaaaacgttnttcaaaacattgagtagcacatgaatttttcacaaaaccttttgcccnagagtttttactctctggtaattgattaccagtttattgtaatcgattaccagtagcaaaga

SEQ ID NO: 241122 - DNA, 450 bp, Glycine max
agcttgaggagacgctttatcagttcatgcaaatatccatgtccaactataggagcatggagtcttccatcaagaacctggagatacaagtgggacaattagccaaacaaatggctgaaagacccactagcagctttagagccaacatagagaagaacacgaaggaggaatgcagggcagtgttgactaaaagccagaggaaagcgcaaggagaagaaaagaaagatgaaggatactagtctaaggaagaaagggtagacaaagaagaaaagaaggaggaagaagagaaagaaaaagaaaagaaggtcttaacctctaagaccaaaagctagctagcccgagaggctgggaaaaaagagccaccagcccctctaaaggattccccatatcctttagtgccgtcaaagaagaatatggagcgctacttcaagcgtttcttggagatattca

SEQ ID NO: 241123 - DNA, 411 bp, Glycine max
tccatcaagtggtaatcagagcaccaatgcttaagaggtgctcttaacctcattatttttgcttacctcttttcattgtgttcttcatttatctcctgatctctcacagtttggctaaatgtgtaacacgattctttaaagtttcactgataaacttgctatagaagctagaattgattttctatggttcaaatttcttggtctttgtcttgaaccacgaatcgtgttgagtttaagttcctttgagttttgtcttggtattttttgtggctgaaacctaaaccataaaattcttacaaaaatattaaagtagaagaaaacctcaaaaatctagagtgacttgttcacctatctgtagtttgtcatagacgtcatgtctagtcatgaaacttgtcacataagatttcttat

SEQ ID NO: 241124 - DNA, 426 bp, Glycine max
  unsure (1)..(426): unsure at all n locations
cttgcgtaagaaccagnttatncaatggaacgatgactgtcatttgtattcggaangatcaaatgatgccttatgaatcctcctgtgcttacgccactagtgcctggaaggcccattatcctatacatgaatatgttggatgaatcaatggggtgtatgctggggcaacatgacgagtctggaaagaaggaacatgccatctattacctaagccagaagctcacatcatgtgaaatgaactactctttgcttgaaacgacatgttgtgccttggtatgggcagcccaccgtctaaggcagtacatgttgagctacaccactcttgtggtgtccaaaatggacccagtcaagtacatatttgagaagcccgctctttacatacggatcgctcggtgtaggttctgctatataatttgacatcgttat

SEQ ID NO: 241125 - DNA, 185 bp, Glycine max
  unsure (1)..(185): unsure at all n locations
atttcttggatgatatctcgcggcgtcatattgattgtcggacatcatactgctgggtttggaaaccaaaacctaatggccatttgtctaccaggagcacatactgtatgcttctataaggagcagccgatcagactgtggatgaggctttagaggacctatggcagcttanaatccctttaaac

SEQ ID NO: 241126 - DNA, 452 bp, Glycine max
  unsure (1)..(452): unsure at all n locations
cgccccccgggatgaaacgtgatnttcgcactttatactcagctttaaaaataatgttctattattaatataaacacttaattttgtaaacntcccaaatctatgaagagaggggatggaaaaaaganaaagaaatcattacaagctaaataacctcctaaaaaaaaagctatataagcctaccaatattcattggcggccatagtgaaaggacaaaaggaaaatatttctctactaatagaaaagcgtcccttttctcgtgacgtgtttgaaaatgagttagacgtcaattgagcaaatctaatggatcttatctaatctaaaaatgaaaatacatagcctgatggtacgataccttctactttaaaaaaaatatactttccgcaagaagaggttctaaattgtaaaaacttcgatagatgaagaattatacttagcggacaaataactcg

SEQ ID NO: 241127 - DNA, 192 bp, Glycine max
  unsure (1)..(192): unsure at all n locations
agcttatggatggaacacttacttgttggtgatgatcaaaagcgcanaacggaatcaaaaaatgcgaataaggatgaccctacggctgcaaactcgtcaatcccgtgggtatggctttngaaaggagganaagaagtttttgaatgtaaaaacgcccccctttcgtcattcttataatttggtgcaggggtg

SEQ ID NO: 241128 - DNA, 383 bp, Glycine max
  unsure (1)..(383): unsure at all n locations
tatccttatggcttgcctctggacttcacctnctcgtgccaccctctgaagatttaagccaagcccctactttcgaggggcaacttccaccttatgacgactaatccgggcaagacgatgaggaaggagatacccatcttggccccctggctcacctcaaagatcccgtcccccatgaactaccccaaccgaacatagtttgccatatcccgacttcacccacacctgtaaaagaatctgttcccttcgcggaagataaggngaagatggaggcgctngaagagaggttaagagcagtcgagggccttggcaattacccattctcgganttggcggatttatgtctcgtgcccaacattgacatcccttccaagttcaaagta

SEQ ID NO: 241129 - DNA, 370 bp, Glycine max
  unsure (1)..(370): unsure at all n locations
ctataagcgcgggtctgggagacgaaggtcatgtggtcgcaatattctaagatgatgttccgagtacattggatatggtacgacccttgccttctgatttccagctggagaattggcgagtggaggaacgccccgacatttatgcagcgagcataatgtaaacctttacggttataaaagctctatagttgggcctacgctttagagtatttattctggttaaggctatgcgtatcttgttctttaaacttataatacaaggatctnttcttctctgttcctacgtgtctacccattctcatccatatgcatgtttacttcttttctgaaacgacagatccgatgacgagtgccccgagggactaatacc

SEQ ID NO: 241130 - DNA, 402 bp, Glycine max
  unsure (1)..(402): unsure at all n locations
ctgcaagcttgcttctacactaaagggtttccttttacatttaaatataaagactatcccataaaggtgtctattttatatatcactaatgtccataaattagggatgttacactgcggacaaaaaagtatattaataagaaaaaatgattgataaatagttatatgaaatggtaaaaaaattactatgaatatattcacattaaagtatcaaattccttgaaaggaaaattcaagttatataaatgatttcttttaatattatagttaaaactcccgtgcattgcacgggttttaattaagttcttgaacattttttaaaaaaaattttccctgaacataaaaattaattcataatttcttaaaaatatataacaaaatnttaagcaaaccacaaattaac

SEQ ID NO: 241131 - DNA, 492 bp, Glycine max
  unsure (1)..(492): unsure at all n locations
gcttgagtataattcattctgtggtgtgagcctacatcaaacaattttattattgatgtttctatcacaatcaagtgatagttgacatctgcatgtgtgtgtacaatgtgagtatgttctcatttctaggattcatttggaatatttggtggtgattatgaataagtgaccaatcttttttttatttaaaatatttgtctcctaatcaatcgactattaatcttttgatgtgctgattatctttcaatcatgccttgttaaactgcttgataacctatcatagttttacttctgttatgaatagagagagactnntgccttgccaatcacgttaaggtgtttcgagaggaaatacttgagtaggcattatccttgttacttgtanatgaaagtcaaacttagtaagtcatgtactcgtgttccttgacgatatgcttaattaccacctaagtgcgagataagaatctataagtgagtcccatagaaaatata

SEQ ID NO: 241132 - DNA, 405 bp, Glycine max
  unsure (1)..(405): unsure at all n locations
agctttgaccacaaccccgatcttatctctacctatttttactcaaccatttattgttgaaacagatgccttaggccaaggaattggtgttgttttgtctcagaatggccatccaattgcttttttctttaagaagctttcttctcgtatgcagaagcaatcagcttatgttcgtgagttgtatgcaattactgaagcagtggctaagttttgtcattacctttttggtcattattccattatctggacagaccaacgtagtctcaagcacattacggaccanatcattcaaacaccagagcaagagtccttgttacctaagcttcttgacttcaacttctcgattgagtataaacctggacccactaatncaagtgctgatgctntatcatggtctttctatat

SEQ ID NO: 241133 - DNA, 367 bp, Glycine max
  unsure (1)..(367): unsure at all n locations
aggtggacacttttaagtagcccactcgacatctaattgctggagcttacttcattctcaacaacatattggaaagagttgcaggttcgtaccaaaggttcaacgaatttttaactagcaagatgttaaagcgaagaaattcattaacttaacacatttgacagcaacgtccaaagcatgagaatntgacagcaacgtttaacaagcaagtgtttttcaagtgttttcctatcttatgggtggggcccatcttgcacattggtggataattccaccaattntcacatgaactacattcattccgcacgagttgggatatcgggttttnttttaccggataacggattagtaacatctacacatatta

SEQ ID NO: 241134 - DNA, 396 bp, Glycine max
  unsure (1)..(396): unsure at all n locations
agcttgaaggcaaactggatgcattggttaacttggtaacccagctggccttgtgtcataccctaatttcgtccggcgacctttgcttgatgacatgcgacctttctttggtccttgtgaggtgcttgacacccatcattaagcagtttgtgaaattccaggacatgccgaanaaaccaaaaaatattgatgcacaatccgtaagtntccgtgacacaccggaaatcaaatggaagcatcgttgcataattaagtgaggttccgtaagtaaaaaggggatgattatgtaatccgcaaggttccgtaacattacggaaagaaaacaagtatcgctacgaaaattcgtaagttccgtaactttacgaaaaaaagaatcaccaaataaaagcagagggg

SEQ ID NO: 241135 - DNA, 298 bp, Glycine max
  unsure (1)..(298): unsure at all n locations
tatgatgcatgcacctgacattaactctcatatgccatgtggtaccattcccaacggaataagctaagcgtgtccacacaacacttttacttaagaaaactaagcagtaagtgtcgagggcaccctgtcgtgcacatgcacactcccccgtcccccctcacggtgatcagcctgagtctcaagggagtttctaaccaagtgacatgccccctagtacaaagtattctcctcatgagaaactacaagtccttactgacaaagtttatactatttncatgtcatatgaagtatgaaacat

SEQ ID NO: 241136 - DNA, 443 bp, Glycine max
  unsure (1)..(443): unsure at all n locations
agctntaattcannaaaacaaaaagaagtttttatcataacctcacctaattttaatactacgcgtctanaaatcacaatttgttaactcaggaagaaccntttgctaattctcctcatttttcggtnaaattgcnacctccatacaatcattctgaaaacaaaaccctccaatcattctaacatccatctaaataaaaaatatttcgcccaaaccagaacccaaaccgccntcaatttcaagcttcaaccgaaaaacaaaacaacacaaacaatatacacatttgggatccacaagttccacactntctatntaccaatgtactaataattaaatattaatccactcagttacactactaaaagctggggatagaatacacctacactcgctatgttacaaaanaagttttcncaaaccagcacgctacactacacacggac

SEQ ID NO: 241137 - DNA, 281 bp, Glycine max
  unsure (1)..(281): unsure at all n locations
gagttagtcagcaagggcacgaaatagagcccaagtcactcactttggagctcttcttccattttggttggttcatctttggtttctagcctctcatgactatgagaggctaaattacccattgttgggggcttggatacccaacactctttgatgtaatgatctttactatacatttaatgttattttaatattattgctttctttctaagtttattgctttcgttatggtttgatcatccattcacatgtatgttataggattntaatgattgagaaat

SEQ ID NO: 241138 - DNA, 411 bp, Glycine max
  unsure (1)..(411): unsure at all n locations
agctnttgcctcanaacanagtgtttccaagagatcaagactttggtaattgtttaccagacagtgtaatcgattaccagaagacaattttgaaaaacagcttttaacaagggttttaaatttgaattttgaatcatgtaatcgattaccagatgtttgtaatcgattactagcaatgacacttcataaaatactttgaaaagtcatgacccttcaaaatataactgtgtaattgattaccagaaacctataatcgattaccagtgaaaaatttcagaaaaaagtttttgaaaagatacatctcttcaaatcattttgaaaagacacaatgggcctatatatanggtgtgttgactntataaagtaaagagagaattctagagaacttaattgtcaattctccaacaactc

SEQ ID NO: 241139 - DNA, 328 bp, Glycine max
  unsure (1)..(328): unsure at all n locations
tacatggcggggttggtttggttattgataaaagggatgctccacattatttncatgacacaaatgcaaaaatgatgaattggaaattttatgcaaaactggtcatgcatgcacctatgcggacactcaagtgtcaaacttttatggtcatgtgatgctagggctcacgattcatttcctctattttagatcaacccaatgtttccaaaatatgttcttttatcaatttgtgcattcatccgagtccattttgggtactcgggaaaattttcacagcattcacccttcaggtgtgcacacatttttttttccacaactagctatgatc

SEQ ID NO: 241140 - DNA, 354 bp, Glycine max
  unsure (1)..(354): unsure at all n locations
agcttgtagaatggctatacatgatacatgtcatggtttggtttggttcaaggataaaagggatgccccacattatttccatgacacaaatgcaaaaatgatgatttggaaattttatgcaaaactggtcatgcatgcacctatgtggacgctcaagtgtcaaatttttatggtcatctgatgctagggctcaagattcatttcctctattttaaatcaacccaatgtttccaaaatatgttcttttatcaaattgtgcattcatccgagtccatttcgggcgtccgggaaaattttcacagcattcacccttcaggtgtacacacacattntccaaaaattatgtgaattttt

SEQ ID NO: 241141 - DNA, 393 bp, Glycine max
  unsure (1)..(393): unsure at all n locations
gagagaagtggaactttgaagtgtgtctcataagactttcattcatcaaaggtaccacaagtggtacacatgcttctatttatagactaggtagcttccttgagaagctttcttgagaaaacttncttgaaaagcttctttgagaaaacttccttgagaagctagagcttagctacacacacccctctaataactaagctcacctccttgaaaagcttccttaagaagattctaaagatgctagagcttagctacacaaacctctctaatagctaaggtcacctccttgagatgagaagctagagcttagctacacacnccctataatagctaagctcacccccatgacanaatacatgaaaatacacaaaagtccctactacanagactact

SEQ ID NO: 241142 - DNA, 355 bp, Glycine max
agcttgagggtaaactttatcccttagtcaacctattaactcaacttgccatgaatcagaaatctacacctgttgcaagagtctgtggtctatgttcttctgcagatcaccatacagatctctgtccttctttgcagcaatctagagtcaatgagaaacctgaagcttatgctgcaaacatttataatagacctcctcagtagcaaaaccaacaacagtagaataattatgaccttccaagcaacagatacaatccaggttggaggaatcatccaaatctgagatggacaagtcctccacaacaacatcagtctgtccttttctttcagaatgttgctggtccaagcaagcctta

SEQ ID NO: 241143 - DNA, 448 bp, Glycine max
  unsure (1)..(448): unsure at all n locations
taggctaaattagtctanactttcatatgctatntaagctaagtttattccacatttggatatgaggatgaagcttattttaagttagtttaaacctacgagggttgtctaaattgagcctagtccaacaagagggatctgaggacgaagcttggattgattcagtctaactagtgatcaaggtttagtaatttacgctgcagcataaaacacaaaagcatgatatattagagaaacatccttatatgcatcaactggtctgttangaagacccaacacttctacctactgctgtcaatnttacttacttgcattcttactgtttttagcctacacttagtttaatcctattctaaatcatcaattatcaatgtttctttcaacaatgctttatttctaaatttaaccctgtcttatactagttccttgagttcgatactcggattca

SEQ ID NO: 241144 - DNA, 441 bp, Glycine max
  unsure (1)..(441): unsure at all n locations
agctntatgcaagggagctaaagatacaagtatctttcaaggtaagctatttggtcaaaagagcttgtgtctatacaattcatggccttcatcatgttctgagttatacaaatcattctagaattcagagatttatgcaaagatcattattcacagttagtcgttcactcacagagtaaggtcacactttcaccggtttttggttcaagcttttctttcacaatcaatctgtctagtgactaaccattctattataagttcacactcttgttctttctttgttcaacatgcacatttgctcaaattcatgaaaggaaacacacatttcatcataagcatctattcatttaaaacaaggcatacaaccattttcccaaataaataaactacttcactgccataccatcaaaagttaagttaaactgttcacgatgcttcaag

SEQ ID NO: 241145 - DNA, 298 bp, Glycine max
  unsure (1)..(298): unsure at all n locations
taattgactccttggagttgttcatcttttagatgtgttgccatattgacataactagaattnttctttgagtctcggttttaatttgtcaatctaatctagtgccattctaggacttncttttgtgttccaccttggcttggggtggtgtcttttgctttatttttttttcttgaatctcattgaattaatgtcacattaaaattactttttgtttagttctcatttcatattttggcttcttgtctttggttttgtggttaagtggtgcctacaataaggattggaagaggaaatt

SEQ ID NO: 241146 - DNA, 269 bp, Glycine max
tggagagcatcttttcctacgccattactactatactcttatggaaacttctcgtaggaagaatccaacttggaaaggggacataacgccacgcataagtagtcttatcctgttgccattattctactagaattttctaacttgtgttccacaaagagatgagatgacaatgggacaccaattcacgtttatcaatttttggcataaggcaaatattctgaccattaacactcccagcttctccaggatgtcttcataaatgcttgatg

SEQ ID NO: 241147 - DNA, 215 bp, Glycine max
gacactatgaaactaagctttgttcttttataaaacgagaagttctggactcattacgttatctataaaccttgggatggatccaagtgctccgatcatccatttgcatactcatgttttggtggcatactcaccgctgcttatttctttacgaatttcatcataactaagaaaacaccaaggcacccctataacactcgatccagaaaaatgga

SEQ ID NO: 241148 - DNA, 548 bp, Glycine max
  unsure (1)..(548): unsure at all n locations
cgggccccgcgggctgaaggctttgaanattgagancnttgatacaccagnccgnnnngcattggcaccaacgagacacgngctgaccgggcactataagttgtatcgccagtaatcttaacgagacaagngccgactgggcacaaatgcgtaagtgccgactgggcattccgccagtagcaccaccgagatcatcatgcacctctgcacgcgctacagacaccttcttcacgtcttgcataacttctggcttgacacaacaacttaagacactgttgtttgcaagtaaagtcacattcaagctaaggttctattcatttncaagttaagggtctgctcattgcaggctanggcatggcatggtgaaggttcacatgggtaccatttcataattacatgcgccctgtattattcgtgaagaacatgggtcgtaaatggctntaaatgagaacacttctacaaaaaaattctcattaccaagatatctgcagagagaaccnccagaaccacgctctctcgacggaaaacgaaagcccttccaaccttct

SEQ ID NO: 241149 - DNA, 422 bp, Glycine max
agcttatctttatactggtattcgagagaaaagccttgtaaccattaaaggtgcgtccttagtagaataggggtactcgggagggaaaccttgcaacgattcaaggtgtccttggtcgaataagggtactcgagagagaaaccttttagcgattcaaggtacacccttggacgaatatggatattcgggaggaaccttacaataattcaaggtgcatccttagccgaataagggtatttacgagggaaaccttgcaatgattcaagttgctccttagtcgaataggggtattcgggaaggaaaccttgcaatattctgaggtgcatccttactcgataggggtgggtattcgggagggaaccttgcacgagtcaggtgcatcattttcgaatagggtattcggagcgaaacttgcacaatta

SEQ ID NO: 241150 - DNA, 384 bp, Glycine max
  unsure (1)..(384): unsure at all n locations
ntgccttatttctttgaggacatggcagactaatgcaaccctttctagcgaaccttgtattntttaataaagaagatgacgatcacccagacttattcttcatgtatgacttcataatcccatatttgcatgtaagggatccacgtgatgactttactgtgaatgtatagatacatgattttgatgatgcccaagaagaatcanacaggctgcttcaaaggataaacatttgcttcaagattaatacaagaatgcttcaacaaacaaagccttgattcaagatttcttcaagaccaagccttgcctcanaacaaagggtttcaaagtcatgcaaggctctggtaatcgattaccaggaagtgtaatcgataccaaaagggaagt

SEQ ID NO: 241151 - DNA, 93 bp, Glycine max
cgcttttgtatgttctgagatatctatagagagattggttcaagttctacagaactttgagcttttgctatgccaacactgacagataactga

SEQ ID NO: 241152 - DNA, 352 bp, Glycine max
  unsure (1)..(352): unsure at all n locations
agcttgtgtgccttcttccaattcattggtggctttggatgactcanaaaattgcttatcaggaaggaagaatcaaaagtcatccaagcaatgttttccattgctaactcgccttgtggattgtagcaaacattgtggtagaggcaaaggtaatgacaatgggagtactttatcaccttcacctgtcccaaaaccacctaagtctaaccctccaaagctcgagacaccaaaagctcaaccacctccaaccccaaaggttgagccacctccaacaccaaaggttgtacattcaaccaccacccccgtgtnctcaccaccaccaccaatccactccccaccaccaccaatccac

SEQ ID NO: 241153 - DNA, 462 bp, Glycine max
agtgcgtcttaaggatgatccatcattgtagctctttgcataacaaccctttgacaattccatcatatcaatccccaaaatacatggcgagacaaacaatataaacaaggagtacagcacatgacggttggacaaatcggttgtgtcatcaagatccaacatagttccaaaaactatcactaatcttcacacattccaaagaaggttaaaaaacaaggaaaacataattttctcacacaaccttcttgttcttgcaaccattgcaccatcgatcacaacaacaaaacaatgaggctatggattaaggcctcgggtgcattgaaagatacgtatagcatttggattgcgaagctctcaccgagtggtccatgtaggaatcctgatctcgaaaccgtgatcatcaaggccacaagccacgatgaacaatgcatggattacaagaacgttcaaagggtttcaaat

SEQ ID NO: 241154 - DNA, 391 bp, Glycine max
  unsure (1)..(391): unsure at all n locations
agtcacctgcggcatgcaagctttggtccaattcatacgaccataagttntgtcatggttgtacgatttaggcccatggtatatggagacactcgaaattgaaaaatgaaaggtctcaacatattcaaatggtcataacttttcactcaaatgtcagatgcaggtatataatatatagagatgctcgaaattgaacacggaagctctgctccaattcaaactgatatgaaccctcatggaacaagggctgacttaggatcgtctaggattaaaccttgatggaaaatgcggaaattgattaacgtaaggatggaacataaggtggttaatttcgtgggtcttaatcacgtggctcttggcataaaatggatgaatgggatgggtaaatgta

SEQ ID NO: 241155 - DNA, 365 bp, Glycine max
agatggaccatatcaagtgcttgaaagaatttttgacatgcttacattgttagctgcccggtgagtataatgttagttccacctttcatgtctctgatttacctttttttgatgcagatggagaattcgatttgaagacaaatccttctcatgagggagagaatgatgaggacatgacccaaagcaaaggccaggatccacttgaaggacttggaggacctatgacaagggctatagcaaggaaagccaaggaagctcttcaacaagtgctgtccatactatttgaatacaagcccaagtttcaaggagaaaagtccaaggttgtgagttgtatcatggcccaaatggaggaggactaaatgaca

SEQ ID NO: 241156 - DNA, 327 bp, Glycine max
  unsure (1)..(327): unsure at all n locations
agctntgtcgccttcagctttgtcgtgttcgaagttctttggtgtccgaaggtaaggtgtgccctggcaattaacaaccttgaataagcattgtgaattccatcctgcgtatataagtgtggtgtttgttccccaacataagcatgctacatttcgatccttgcattttgtagttcttctcatcgaatgtttcttttccctcaatatattggcatgttttcttttaaatgtggtcatatccttctttctcttctttntgctgtagaaaacaagagtatgctttgaagggtcatcggcatttgtaattgtagatcctgaatggcagtg

SEQ ID NO: 241157 - DNA, 235 bp, Glycine max
tttcataatggttatgactatattttgagctgcaattatgaaacagtatgactttagattatgaactatgtaatgacattggtttttttttttgataagccatgaattttattaatagtgaacatgcttgctttgagtacaaggggttcccattacataatttcttatctgcataatgtataaccgcattatgaattctaatttcatatatgcattctagattcacgttgaatga

SEQ ID NO: 241158 - DNA, 297 bp, Glycine max
agcttatccggcctcccattaatagggccttcatataataatattgcatgccaaggaaggtacaacagcagggtcaggcatagcagcagcaagaggaggaccagcagcagccaaccgcagatgtgccgccaccacttctactgcagccaccatctctagagtccatctttgctcacctgcgaaggatggagctctaaatgcatgcatatatgtagcatgtgactaaccaacaagcggctaatcataggggtcaggtgcagctaaatgagagcttctaccagtacaccctacaccagc

SEQ ID NO: 241159 - DNA, 304 bp, Glycine max
accacaacaacgctggaggcggtaaaggacaatggtctttcaaataaacctgttgtacatgaacaaagattatatcatgcggtgaccgtgtcaaatgaaccagcgaagtcattgcataattggtatactaactatattcaatgtacctgaacaaaatgatttccaaacacgtgactgacacatatcatgcggtgcccagaagaatcaggtggtgattgacttctaagaggaaaaaatgtcatgctctggtgtcgggacaacgatacaaggaatacattataccgtgatacaatcacatatccca

SEQ ID NO: 241160 - DNA, 351 bp, Glycine max
agcttgcttgtggggcttctatggaggctggatctttgagcttcaatggggtcctttaatggtgattttccaccatggagatgcagcggaagacaaaggaaaataggtgagaggaggcgccatccattaaggaataagccatggaagaaggagcttcaccaccaagatgagccttggataagaagcttggagaggatgcttcaatggaggaaaagaaagagggagagaaagagagaggggggagcacgaaattgaaggaataaaagaggtatagaagtggaactttgaagtatgtctcacaagactctcattcatcaaagttacaacaagtgttacacatgcttctattta

SEQ ID NO: 241161 - DNA, 229 bp, Glycine max
  unsure (1)..(229): unsure at all n locations
cgacttacccaccggccacccttaagattaagcccagcccctactttcgaggggcaactcccaccttatgaagactattccgggccagacgatggggaaggagatacccatcttggcccgctgcttcacctcaaagatccgttccnacatgaactaccccaaccgaacatagttcgccatataccggtctcacccacacccgtaaaagaatctgtccccttcgcggaag

SEQ ID NO: 241162 - DNA, 408 bp, Glycine max
  unsure (1)..(408): unsure at all n locations
agcttaagagnggcacctcncgtactcttctctcttcggcaccggagggattcacaacaaccgcaggcctcgcgtcgacgagaaccctaaggactatgccaatcgctctgccattcagtggcatcgtgtctccgtttatcctcagaaattgtgagaccttgtcaccaaacacgttgttcccgggtcagcccactctctcattcactcgccgctttatcaattaaccaattgtcgtattgcaccttactgatgctgctggccttttgcagttcaatgctgtacgtggaggggaacctcgagaccaaatgcttcaccgatccgataaccggcattgcccgccgaattcgagaaattgctggtcgacgaaatggtaactcttcaatcaactcttgttgtataaatgacttt

SEQ ID NO: 241163 - DNA, 293 bp, Glycine max
atttttatgtttatttaagcttgctttcatgtatttgggactcagaagttaatgaaaatttccttttacttacataggtttggttaccctaattttagctagtaagtccttgttcacacactgtcaccacccatcactggatgggtcacacaaacaagcattctcctggatgcctggttcctcacaatatgcaggataaaaatacatatttagctggcatatacttttgtgttacgcattagtcttggcatattcagtttgatcaattatcttggtggattccaaactacata

SEQ ID NO: 241164 - DNA, 203 bp, Glycine max
agcttgtgagggaggtgttcttagatatgagatgtttgtgtgtatctaaactctatgctctcaaggaagttgtctcaaagatgcttctcaaggaggttgtcttaagaaagctgctcaaggagacctcctacactattaatagaagcatgtgtaacacttgttgtaactttgatgaatgagagccttgtgagacatacttcaaa

SEQ ID NO: 241165 - DNA, 208 bp, Glycine max
ttcttcacagatggggcatgctagatgacccttaacactgtaaccgctgagattctgatatgctggaaagtcattaatggtacaaaatatcagtgcacacatttgaaaagtctgcttgtgaaacccatcaaatactattaccccctcatcccacaactttctcacgtctgtcctcaacggacttagataaacatctatgtcatatgct

SEQ ID NO: 241166 - DNA, 412 bp, Glycine max
  unsure (1)..(412): unsure at all n locations
agcttgtangaatatggttgtcccatcacatgttgtactaggtggcagtcgggcgatggtgcacaacaagttttccacatccacaaagcgcgcataaacccaccattccctgttggccacctccaactgagctcacgtactcccacgtagcccataacctcgtttctctcaacaccgggtccccatcaatcctcccaagcttccccaacatcaaagtaaatcaacattcaaacagcacaaattaccacagccaagaaaacagggcaaaggcagaaaactctgcccaaaacaccaaccaaaatcacagcttttctcacttaaagaccccagtaacaatttcttcgatccaattcgttaaccggtggagtcgactccaaattttactggaagtctatagtacataagcctacat

SEQ ID NO: 241167 - DNA, 382 bp, Glycine max
  unsure (1)..(382): unsure at all n locations
tgaatccacttacccgcgctaagcgcaatggtggcgctaagcgctacgtcgcgaattcagaacctacttaaagcctggtttgtgccaaattatggtacactttgacacacacttttacagacttttagacaaattgtangcagaagaaagggcatagattctagagcacaccacaatgcctattatgggaaaaaagccctagaagcatcaagaggagcaacttgtgcattgaaacctaagttttgtaagattattatttgttgggtttctttgtaatggctagctaagcaccctagttggggatttctaatgaacatctgatgtaaatacctaatatctaattgattatgttttctgtgttcaatgcttccttcaattctta

SEQ ID NO: 241168 - DNA, 361 bp, Glycine max
  unsure (1)..(361): unsure at all n locations
agcttacaaaacctatgtatctctgcaaaagctgttcttcgtgctgcctncagagctatattcccgaaataggcactgtggtgtgctctggaatttgtgcaaatcatccgcttgccctaattctgcacaaaacaagctttaaatagcctctgaatttgcgacgttgcgcttagtgtgagtaagtgggtttgggcttaacgccagtcttgcgctgagcctggctgaagacacctgttgtgcttatcgcactgatctcacgcttagcatgtgaccttgatattgatgtcttgctagattcttctatcgcgctcagcgcgttgaagctgcgcttaacggtggatgcgtgcttagcctactgatg

SEQ ID NO: 241169 - DNA, 407 bp, Glycine max
tcgtctgcgatgggtgtagttttatgatgtggtggcttgcggttgttgcggcggacagttttgatgatgagggtgaagaagctgacgaggaaggcatagacaacgagagtgcccagtgtctagatgaagacctagcgactaacaatgatgcagcccagatatatgtaccttttcttcttctttttatggtctcctttgcccaagagccacctatgttgggtctcaccaaagcaccttggtccagctcatggagattcggtggcggagtctatggtgtgaatctcaagcaggcctccccacagatccctactgtgcatactatattttcgatcccttatgataaacaccagactcacatactgctagtaagtactacctagtaactcgtatttctctcgttctaaact

SEQ ID NO: 241170 - DNA, 425 bp, Glycine max
  unsure (1)..(425): unsure at all n locations
agcttcctccttctttttctacagaagccttgaatttatattgtaagaaacacatactttatcagaaaactgacattcacagctccattgagttaaaataaatgtcttacaatgcataaaagacaagttccaattaagacatggtggaaaggagcagcccctgtggggggctcaatttacctaaacaattacatagagaaagaaatctaagtaacacactctttttaagataatctctatcgttatataaatcttatgtgaatgcactaaaatattgggctctctatctaataaaaacacacatgaataatagtgtgtgtgtgtgtgtgtcacagagagtattattaacaatgattcaatgatagtgataaatcataatanatcaagtgtatgtcagagcatggccagttttatactgtgattat

SEQ ID NO: 241171 - DNA, 335 bp, Glycine max
ggcacctatgtggtgggtattaaagttgtttggagatgcattgtttgagttagttgaatacaatgatgctttagaaatgcccaactatgcttagttaacatatatgttgaatacacagcggctgaatcaaaagttgtggagtttgttagttgcttggctgatcacaagacattgaaccatatttctataaatgacaggggatataattaagatcatgagttcaaccaaggtaataaagcttattggttagggaagtcatcgtgagaaagcaattgggtgaagtttggaagttggtgtggttcgcgatgaacgcaaattatgagagggatatgatg

SEQ ID NO: 241172 - DNA, 329 bp, Glycine max
  unsure (1)..(329): unsure at all n locations
attngttgcatgttcaccctcctaccaactcccaatgtattacaagttgttctcggatttcttgtttatactctcttatataacgtctctttactcaactcgtgtatcgtttaccatcacaatcaccggatgttcttgtgaccttacttctcggctctcgtacgatatcctgtagtttcaatcaggacgggaggtccatcttggtctctcccctcccttgtattgcttgagtaactctggctgaaggtcccctctttcgctttgtcttatcttgatgttgacacagtgactatccatattttctcctcttctccctcctatcatacccg

SEQ ID NO: 241173 - DNA, 338 bp, Glycine max
  unsure (1)..(338): unsure at all n locations
agcttgagatgaggaagtgttgaagggtgaaactttctgcttttattggtgaccacagagtggtacctggagatatgtcgcgggggtcaggagaccttggggacgtcaggtggggtgctattgcccaaaaccaagcttgaccaatcccgacccaacccgggcatagtccgtcagtgagaacctgtgatgtacctaagcaggcgagctcctggcagtcaacagataaaaggaaaacaagaccacaaagcaaggaggcttgtggtggctggccagctgtgaattntgtgtaatatgtgagatatggcctctggtaatcgattaccaagggtgggtaatcg

SEQ ID NO: 241174 - DNA, 451 bp, Glycine max
  unsure (1)..(451): unsure at all n locations
attgaataattcttgtaaattnggcntcgttaaaatccaatggtttatctctcaattcaacttttttgtctttggatattgcttgtctcctttgttctttggttgcgagttgccatatacggaattgccaaggaggattggtgccattcctttaagaatttgagtcaagaagtaaggggtccaccaccttaagagctattggactaagaaacactccaaattgagtgaatcacccaagagagaataaccaccaaaattgaggaccgttttcataatttttaattgagaaattacttaccctcattgctttcacattttgtacaaaagggctttcattggaagaagttgggagcctccatangcaccctaacttcattgtgtgtataaatttaagcaattttccttaagaaatgagtgtttgttggaacctaatgaagcatcccacctctcn

SEQ ID NO: 241175 - DNA, 329 bp, Glycine max
  unsure (1)..(329): unsure at all n locations
agctggcattcgatcatcggagccatagagagcatgatagcgctgaatacaacggtcctgcattntgctcagagctttggccaaagggtagcttatggcgaaaccgcccccaccataggccatgccgtaggagaagaatatgttctgcaagtgactctccgacaagctcccaatgtagtacatgtagttgtggtcgtacttgtttaaaatcctcagcagattgtccgtcacgaaaacggtgtcgtcgtcgcccatcacgaaccaccgcacgttcttgtgccccatacgcagcgtttccgtcacgatgcgcgatattcgaatcgcggagc

SEQ ID NO: 241176 - DNA, 372 bp, Glycine max
  unsure (1)..(372): unsure at all n locations
ctcagcttgatcggaatttgcaccagaattcgtagctcgctctgttgatctttcacctttagtctacgtctacgactcagcgcgtcaaatagttncagagcgaactccttagagtccttcatcccttcaaaaaattaaacaaagcatacaaaactcttcaaacaaggagtgaaaatgacaaaccgattaaatgcacatgccaaacgcaagaatctgaactgaaatttgaaaaggaatcgtacctatgcattgcgcaaaatcagtgcgataaagataacccgtcttggcaagactatagaaatggctttgcacctcgttccaggcgtcagcgccattggatntactgctaataaatttcagtccacggagcgc

SEQ ID NO: 241177 - DNA, 408 bp, Glycine max
agcttgttcaacttaccataagtaatctgaaatctttcttgagcaaatgctatttgcaataacaatctcccaagtggacattgaacttggaaatttgaaatgtggttcaattcccacaacatttaatggccatgctgcaagaacattagtcgagaagtttgacaaagaaatgaggcaggaaattcttaactaaatactactaccaatttgcaataaccaagttatccaatattgaaattaattaatagggaaaaatcagtgttgtagaaatgcattacactgatgtggttgatgtatataacaattgaacaaaagagaaaaagagcaaggcagaagtaaaagaaagagaactaaacaagatcaaggtaacattattaatgaaattcctaatccctattgtgcaaacac

SEQ ID NO: 241178 - DNA, 448 bp, Glycine max
  unsure (1)..(448): unsure at all n locations
tcacgatctcacacgtcgaactacatgtatncttcattggaagatcttagaggggacatgcttaataaataactctgacactcaaataagtacatgaatgagttgagtatgaaattgaaaagggtgaaataagatctgatctttataacgtgagataggagtttcgagtccttgattgtaagagagttattacagtgatgtaacaactctagataattcctaacttggtaataatatatagtagaaaaatcatagcttggtaataatagttaatagataattcatcacttatagattatccaatggattatagataatccatttattatagataattcattactagtagataagtaagtacctgtaactttgataagaaataataacattatcactaagattcaaatatatagatatttgtaacaacatgttggccctatagctcgac

SEQ ID NO: 241179 - DNA, 293 bp, Glycine max
cacaaacacaaacccttgcaacaagtacatatttctgactcaaggccacctgggttacccagttaaccaatgcattcagtttgccttcaagcttcttaatatcagatgatgcagctgagtgtgaactacctcatgcactcctctaatgactatggaatcatttctggcgcttaactgctgagagttggaagccatcttctcaattatattactggcttcagcaggagtcatgtttacaaaggctccaccactggctgcaattatcatacttatctccatattactgagttctt

SEQ ID NO: 241180 - DNA, 475 bp, Glycine max
  unsure (1)..(475): unsure at all n locations
tcagcttctagttatgtggcagggcgggcttactttacttgtctgtctgcttcgtgaacgttgacccacactcttactttccgccatgcttctctttacatctgcccgagagggcctataagctcaaccatactatccacgaatatctttgggatttatcacgctagatatgccaccggcgtctttgtctaaacccattccgggttcgtaaccgttccccaacataagtcaggccatcattactagtgcatcagacacgcaatcttgcccagagaaggagtccacggatgaaatgcttaccacttcaaagactggagagcggcttctaatgactcctctgcngcttgcacataacagatataggatgggaagctcccacgatgtctcctccntgatacatgacagatgcccttcactcaatttaactttggggaggtgagggaacactccatgatggtcacagccccaaagacat

SEQ ID NO: 241181 - DNA, 341 bp, Glycine max
  unsure (1)..(341): unsure at all n locations
gtacgattgttgcccatggtatatggagacgctccgaaatgaaaaatgaaagttctcaagaaattcaaatggtcataacttttcactcaaatgtcagattcaggtatataatatatagagatgctcgaaattgaacacggaagctctgctccaattcaaactgatatgaaccctcatggaacaagggctgacttangatcgtctangattaaaccttgatggaaaatgcggaaattgattaacgtaaggatggaaaataaggtggttaatttcgtgggtcttaatcacgtggttcttggcataaaatggatgaatgggatggtaaaatgtacgttaagtgg

SEQ ID NO: 241182 - DNA, 274 bp, Glycine max
tgcttgaaagaatcaattaccatgcttaccatgttgagctggccggtgagtataatggtagttccaccttcaatgtctctgatttacctctttttgatgcagatggagaattcgatttgaggacaaatccttctcatgagggagagaatgatgaagacatgacccagagcaagggccaggatccacttgaaggacttggaggacctatgacaagggctagagcaaggaaagccaaggaagctcttcaacaagtgctgtccatactatttgaata

SEQ ID NO: 241183 - DNA, 166 bp, Glycine max
agcttcttgcgtaggcgctcttgctgctcagaatattccaaaaacaaatctctcttattactagctattttgaattctttagatcctgaatgtacaaccttcaaattgttgctcgttcccctctttgagaatgaggaggatcttcataggacttcatccagttgat

SEQ ID NO: 241184 - DNA, 391 bp, Glycine max
  unsure (1)..(391): unsure at all n locations
gaccttgaacaagcaactaactcctctnttagaactatgctatgtgctcgcgactggtccctctcttnccttcgcagcttgagttcactattgctaccccattgagctccgcggaatttattccggccatactcttccttgtgagccctcttggtctcttgttcaagggctcttgccgtaattgcattctcttcccgtaacccggcacacttctttcgaatgtgtgttgcggccaacttgaacttctccttggcaaatttcgcctttcctaactcgcttttgagagcttggacttcttcgtcctcttccggtgcttcaaaactctcttcgctgacgacttttaacttggcgagccaatctaaacctcgtatatgaactttcagccattcat

SEQ ID NO: 241185 - DNA, 174 bp, Glycine max
gctttgagacgcatgataacttgtggcatagtttttcattcagccagatcctctggcgacacgatggaagatgaactatcaccacttgtggcctctccatcatgggctatggctcttcagacgagaacattaatctagcatcttgtctgagaaatgacgtatgatatctactca

SEQ ID NO: 241186 - DNA, 500 bp, Glycine max
  unsure (1)..(500): unsure at all n locations
atataanaatttattatttttaagttcgggtntctggcccttattttcgtgcttagttcaacagtcaaacactggcgcctaattaaattatacattttatttnttagaattacatcaataanattattatatcttttctgcaatacactagtgacaaatacacnctctagatatgaatttaaattcttggataatgcactctataacaaacattcttcataatcttctaatcttctctaataagaagaattaactctacaatacacttgtctatttttaaatttgggaagcacttggcaccctaattaagaagggagaagttgccccgtcagacatgcaataacattaggaagtgaccctttaaaaacacattatgaagtggattttaaaaatgaagaacatttctataaaacaaggatgagaaacatttaatctgataaattctttaagattcatagttatagataaagttagattttcattatttcctatattgggtn

SEQ ID NO: 241187 - DNA, 438 bp, Glycine max
agcttatgcgcctattttcttacaaacgttctcttttacaagacatttaaccgaaaaaatgcacccatatacaatcaaggcagcttcgttacctagattatttacacgtaccttcaaggtgtatttgttacttacatcacacacatctccttggctaaattcacatacatgcatactcaaagcattttggggcaccaaaaattgcacatgtgcacatcttggcatttctaatacctatacatacgcaaacttcatgatgaatcttgactatctacacaataaggtgctacatttcatgctcttttttcaagtttttgctacctaaagccgcatgcaaattcaagcatattttcctttgctgactaaaattgtattcaaataaaaggtatattttttgtaatatgttttcttcacataacattgcaacatattatatat

SEQ ID NO: 241188 - DNA, 334 bp, Glycine max
  unsure (1)..(334): unsure at all n locations
tagtggatggcgcctnctctcacctcttctnctttgtcttncgcttcatctctatggtggaaaaccaccattaaaggacctcattgaagctcaaagatccagnctccatagaagcctcacaagcaagcttccatcaagtggtatcaaagcacaagagcttcaagtaggtgctccttaaaccttcattaattttttgctttaccttctctttcattgctgcttcttcacttttctccatgtatctcctcacatgtttagtgctaaatgttgntaacatgattctttagaaattccaccgattaaactagctatagaagctagaattgatttctat

SEQ ID NO: 241189 - DNA, 442 bp, Glycine max
  unsure (1)..(442): unsure at all n locations
agctttaattaatcgcgtacagaattccaggcatttctgtcgttcaatgtctcttgttcccaatcccaaacacctcagaagtttattagcaaaagccagtctagcaaatgacatgtacatgacataacctttcaatttcgtgttcgtgtattatatatgcaaactgtgatggcatgtattcaattcaccctataaaaaacattccagtttctattcatgaaaatgaattatcatttctatacatatttttaatttaatttaatcaaaatacatggacatttacatcattttttaatcctataggaagagcattatatgttatgcatgaccaaactatcgatatatgtattggaatgattttaaaagatacaattgagataattntaattagtttataatctaaaattctttgcaccaataatatatcaaaattattattttt

SEQ ID NO: 241190 - DNA, 434 bp, Glycine max
  unsure (1)..(434): unsure at all n locations
tgaattagtctttcatgacanaatttgactaaataacttatgttttgcccgctataatggaagttaacaagagaataaatttgacacgaaattgaaacttagaacaaattgatcttaaaaaaatactactcatatatattttacctcttagatccctagattcattaatgtcaaaggatgcaactatccacgatgtttcttgcatgagcaaatcggaggcaaggcaacgatcgtgtcaattttgaataaattatcataagattgctggagaattcattaattaagccgatcgaagcaagtaatggaaagtccataaatctagatggctgtagagttttcttccgaaaattctggtccatctaagaatattcagtacattctattatactttgtcgatcatttaaaaataattcttaacgaaacataataaatac

SEQ ID NO: 241191 - DNA, 454 bp, Glycine max
agcttgagggtttagtgcatatttcccatgccacttacatcatagatgagtcattaacatgccttcctagccttaaaccaagacctttcttctgatggaaatctttaatttttaatccttatataaggttttctttattctttatgcggaagcctagattcacaagtatacaacctataacaattaccaaaggtcctaagatctacaacatgtttgactattaaggattagatcgataaaatacttggatctatagttggtttctggtctaagtattctttgagagatgttataagatctttgcggctatccatcacaaatatagacaatgaaattatgattttttctcaatcgaagtctctttattcctcaacaaaattttcataactctctgtatggaaaaagagaactatgtgcacgatttgcatatatggaccataccttcttatatcgt

SEQ ID NO: 241192 - DNA, 253 bp, Glycine max
ctggttcaaccttcttaacaggtactttatagctgcatggtctgtatgaacaataacacgagtaccaagtgaatatgaacgaaatttctcacgagcacaaactatcgctaatcgctcattctctgtgggcgtgtaatttacttgaacaacatccaaagttctggaagtgtgatagatcactcgaggtagcttatcaatctttctgagcaaggacagcccctaatgcgtaattggatgcatcgcacattatctc

SEQ ID NO: 241193 - DNA, 353 bp, Glycine max
agcttatattaacaaaattgcctaaatcatttctctatatgcatgtgaattaggaagcatcaacaagaatcaagccaatgctattgtgcaagcaatcaatggggcaaaacacaccaaaagattatgatgatggatggctcaaaatctcacaaaggtaaacttatcactttcaaattgagctttcaaaattatcatgacatgtagaggaaaaacaaggatttcaaatcacaaaatgtcaacagacttttattttctgaacaattaccaatttcttgaacatatcctataattcaaagaaaaatatgcaaagttgtacatgcaaacagagttgaccttaaatattaaactagaaa

SEQ ID NO: 241194 - DNA, 371 bp, Glycine max
  unsure (1)..(371): unsure at all n locations
tgtaaatagtaacttattntagtcaaagtaaaatttcaagttttataataactaagaaaattaaatatgtcatatagtgtttataaaaatgttaaaataagtaacaagaattttgaattgaataaaataataaaataaaatttccaataaattaatgaaaataaaattgagaagataagaacggtagtagcttttaagctagttcatttctcatgagctatataaaataagcttgtgaaataataacttaatattgtcaaagtaacttataagttgatcaaatgagcttatagtggtggttttttggtccataatattaaattaattattctaacaattaaaacactaactatgctcaggttaaattgatg

SEQ ID NO: 241195 - DNA, 287 bp, Glycine max
  unsure (1)..(287): unsure at all n locations
agcttccacaagaaacaacttganggagaagatttcactggcattgatcatggcgaaggggtttcaaggcttatggagttggccatgcccatggcaatggcggtcttgctgactaagacaattgcacggttttccagaccttgtcgtcgagacggcatacagctctaaggaggagtccaggtcaaggtcgtggatgtcgaagtgcatgcccaagcactaatcatgactttcacagagttttagctccgccattgtagaaatgatgaagacaatgggagggagaaaga

SEQ ID NO: 241196 - DNA, 246 bp, Glycine max
tatacacacacacacacacacatatatatatatatatatatatatatatataatttgatcttaattaattattaccggtgggaagattaatgacataaaaataagaagtgtcatgatcatgtattcatgtggtacaagttttgatggaatagaactacatggagcaaatgggtacttgctggatcagttcctaaaggacaaagtgaacgacgaagatgatgagtacggaggtactatataaaatcg

SEQ ID NO: 241197 - DNA, 443 bp, Glycine max
  unsure (1)..(443): unsure at all n locations
agcttgcaattattagaagagaatgagcatgtgattggaagtatgacagattatgttagtcagttgtcagattgattgtgaaggaatgcattaacagtatcctggtgagagtgtgatccttaaatnttgtgagaaatgactatcatttagttctgatttttgcgtgaatctctgaagtatggactaaatgcatgaaattgaggatgatgaaggccatgtttgattgtgatagccacttagccaaaaagctgaccatgtgcttgaatgatttatcccttgcacctagtttgagctgtatgaattaattgattgattgaaccttgagcctaaacagttgtatcttctgctaccatatcttangttgtaggagagcatcatccatagaagcttgaaattaatagtatacacacattngttctgtatatataatgtccctgtatata

SEQ ID NO: 241198 - DNA, 491 bp, Glycine max
  unsure (1)..(491): unsure at all n locations
atattagcgccggtcttggagacgaacgtcaagtggtcgcaatatgctaagatgactgttcgagtacattggatatggtgccaccctgccctcctgatttccatctggggaaatggcgagtggatgaacgccccgacatttatgcagcgagcataatggtagaccttacgcgtataaaagctgtatagttgggcctaagctttagagttattattctggttaaggctttagagattttggtttttacacttattatacaaggaactttacttctctgttcctacgtgtctacccaatctcatacatttgcatgttcacttattttgtgaaacgacacatccgatgacgagtgcncgcaagggactaatacctgtgacacgccgtatcacttcgagcaggacacggaatgcaccgattatgaatggagcgacgatgtgcgacttccctcagagtanaaacgatagtcgtcatgatgacangaaatgggtccn

SEQ ID NO: 241199 - DNA, 317 bp, Glycine max
agcttgttgtgcaccatcgcccgaccgccacctattaccacatgtgatgggtaccccataatcctacaagcttgagatgaggaagtgttgaagggtgaaacttcctgcttttattgttgaccacagagtggtacctggagatatgtcgcgggggtcaggagaccttggggacgtcaggtggggtgctattgcccaaaaccaagcttgaccaatcccgacccaacccgggcatagtcggtcagtgagaacctgtgatgtacctaagcaggcgagctcctggcagtcaacagataaaaggaacaaagaccactaaagca

SEQ ID NO: 241200 - DNA, 409 bp, Glycine max
  unsure (1)..(409): unsure at all n locations
nggattgatttagtccaactagggatcgaggtttcttaatttatttacaacatagaacacttaagcatcattgattagagaaatatctttatatacatcaactggtctgttagaaagacccaacatatttacctactgctgtcaattttacttacatttttattgtttttatcctagacttagtttaattctggtttaaaccatcagttatcaatgtttctttcaacaatgccttatttatgaaattaacccggtcttagactagttccctgagttcgatactcggattcatccattntaattntaaatacttgatgatccagtacgctcttcggcaaactagatttcccttgaacatatttgtacaaagaanaaatggaccaaagagtaactgcaggggaaatccaac

SEQ ID NO: 241201 - DNA, 242 bp, Glycine max
tgacatgtttaaaatatgcatgattgagcgagggcgatctacagatgtgattctagtgaaccctcaaaaacgttgcacatcgcttatccacaccaagttatttaataaaatatttcacaaatacgatataatgtcttgttgcggaataaatgataagttcaataacaaagtctaaggagatcgaatacgtgagtattgtaactccttatatcatgttcaattcttatatataaaaaaaatat

SEQ ID NO: 241202 - DNA, 401 bp, Glycine max
gcttggaaaaaatcctcacacagagagtcattattagcatcgaatatgatatcgtccacgtatatctggatgattaagaattgactaccataatctttgtgaaacagagtagtatctacctttcctcttataaagccattttcaattaaaaatgaacttagcttttcatacaaagctcaaggagctatttttaaaatatacaaagccttgttaaatttgaaaacatgataagggtatatagaactctcaaaccccagggggctgttcacatcaacttcttccttgataagtccattgaggaacacactttttatgttcatttgatacaacatcataccgtgataagcaacacagttaaattggtttgtccagcttgtttctaaacactcactgagttctac

SEQ ID NO: 241203 - DNA, 256 bp, Glycine max
acaatgcctaccatattgacttgcctagtgagtataatgtaagtgccactttcaatgtgtctgatctatctctttttgatgcagatggaggagccttggatttgaggacaaatccttttccaaaaggagggagtgatgaagacataaccaaggaccatgaagcacttgaaggtccgatgaccaaaggcagacttaaacaagcccaacacgtcatagagacaaagctggtcatttgtatagctgccattgatgatga

SEQ ID NO: 241204 - DNA, 303 bp, Glycine max
  unsure (1)..(303): unsure at all n locations
agcttanggaagagaagatgaaagtaatcactaattaaacaaacaagctaatatttgtcgaccatgtaagggagattcaataccccacacggtggtccaagcaaacctttgattnttgcgtaggtagcaaaataaaggaaaggcctcatcggtcgacctggaaaggaatcttgaaaaggaatttatccgacccaacaattgtttaacctctttaacgttgcttggactccgcatgagcatcaatcaggattaaccttgattcatcgatatctgagcatgaacttgaggaacttgcctactcgt

SEQ ID NO: 241205 - DNA, 89 bp, Glycine max
aaatcttatgaaatgaacgggatggagaaaaagaaaaaagaaatccattagccagcttaaataaccttctttaaaaaaaaagcttaaat

SEQ ID NO: 241206 - DNA, 217 bp, Glycine max
  unsure (1)..(217): unsure at all n locations
attcatgtgggtgagtatgaccgcacccccataaaaggctcttttcaccatgaaaggtacttcatactttgtggcccactcgcctcgtttatcattaacagcgtgggacattttcttgaacacgaagtccgcctagatgaacttgcgcggccgtaccttcctgcgaatgcgtgtttattcttcttgagacacacgcccattgctattggcaccaacn

SEQ ID NO: 241207 - DNA, 377 bp, Glycine max
  unsure (1)..(377): unsure at all n locations
agcttgcaaccattatataaanaagaacatgagatttgaactttgactgaaaatgttagtcagtttgtcagattgattgtgaaggaatgcattgactatatcccgatgagagtgtgatccttaaattttgagagaaatgactatcatttagtactgatttttgcatgaacctctgaagtatggactgaatgcatgaaattgaggatgatgaaggccatgtttgattgtgacaaccacttanccaaaaagctgaccatgtgcttgaatgatttatcccttgcacccagtttgagctaaatgatttattgattgattgaaccttgagcctatacagtgttatctcctgctaccttgtatgagggtgtaggagagcatca

SEQ ID NO: 241208 - DNA, 307 bp, Glycine max
  unsure (1)..(307): unsure at all n locations
taaacataggtcttcacaaggtttgattcaggatgtgtatgggactaagtgaaacagcttcttctaaatttgacatttgaatggtgggccatgccataataattagagcaaaaaagtcttattactcgaagttcaaaagtttgttaatgacatatcattatttagttctttgcagntggtacttcttgcatacgtgagcaaaatacttatctattctctttttaaataatagttataaaagcattcttttttttttgatatagatccattcaagttcgatgttcatacccagatgatgtggttatac

SEQ ID NO: 241209 - DNA, 178 bp, Glycine max
  unsure (1)..(178): unsure at all n locations
agcttncttctacaccttataaagagatgagattttactgatcgaggccgtacccaaatcaaataaacattaaaatgcagtaactaagaagtgatcctaagtcatttcccaacgagcaatgactaacccaatgttcataatatgcttcgttataacagtaataataacgaatgggggg

SEQ ID NO: 241210 - DNA, 371 bp, Glycine max
  unsure (1)..(371): unsure at all n locations
ggaaatagcaccccacctgttgttctcaaggtcttcttacccccgcgacatatctccaggtaccactccgtggtcaacgaataaaagcaggaagtttcatccttctacacttcctcatctcaagcttgtaggattatggggtatccatcacatgtggtactaagtggcggtcgggcgatggtgcacaacaagttttccacattcacaaatcgcgcataaacccaccatcccctgttgcccacctccaactgacctcacgtactcccacgtagcccatattctcgtttctctcaacaccgggtccncatcaatccttccaagcttncccaacatccaagtaactgaacattccaacaacacaaactatcaca

SEQ ID NO: 241211 - DNA, 303 bp, Glycine max
agcttgcactattctatttatcttggtaacagatatatttcgcctgaggtccggttatcacgatgaagcaagaaatgttgcctcaacttcacgtgcttcacatcaatttgctcctttgggacatactgcggtcactacttatttacctattcatgaacaatctttcttataattacttaatctacccctgacaaatggaaaattaaggacggatggtaccaaatgagattgcagctgctgtatctgatgaatgtgatacaatgttgagaactggcgaccgggtaggtctaactgcatatgaca

SEQ ID NO: 241212 - DNA, 239 bp, Glycine max
tgtatattgcagatacacccaatgcctatcgggacttatctctatttgcttgcttcactttctgtcaatacctgagacactctgactcacttttgttttgaactttgaatgattaataaataaataattgttcactaatgttattaacgcattaattagaaactaacaagaagtgtgttaagtgggacgatgtcttatatacatatatcatgttcacttataaacttatttgtcgaatg

SEQ ID NO: 241213 - DNA, 322 bp, Glycine max
  unsure (1)..(322): unsure at all n locations
agcttgagatgaggaagtgttgaagggtgaaactttctgcttttattgttgaccacagagtggtacctggagatatgtcgcgggggtcatgagaccttgnggacgtcaggtggggtgctattgcccaaaaccaagcttgaccaatcccgacccaacccgggcatagtcggtcagtgagaacctgtgatgtacctaagcaggcgagctcctggctgtcaacagataaaaggaaaacaagaccacaaagcacggaggcttgtggtggctggccagctgtgaattttgtgtaatatgtggatggtggcctctggtaatcgattac

SEQ ID NO: 241214 - DNA, 315 bp, Glycine max
  unsure (1)..(315): unsure at all n locations
tgtnngaaatgccatgtttggatgagttattcatacccattctgttntatggttcttatgaggatgcttgtgatgttcatgtactgaaattgcttatggaaaactgttagagatgaaaggtagagttaacctanggttagaaagcgagaatgtggtgttatgagtggaaaaagagtgaggctttgagagttgaaaggctaaatctggattctgtagtaaatggaggttaaaatgagttaatcctagcttgaaatgccatttacgacttatgagaaaggttaggctatgctagagagaaaaacaaatgacccaagt

SEQ ID NO: 241215 - DNA, 371 bp, Glycine max
  unsure (1)..(371): unsure at all n locations
agctntacagcagatgcccctttactccatgttcttgaaggatatgttaacaaggaaacataagtatattcaccaggaaaaaattgtagtggaaggaaattgtagtgttgtgattcaaaagatccttccacccaagcataaagaccttgggagtgtaactattccttgttcaattagagaagtcactgtgggaaaagctctgattgactcgggagccaacattaatttaatgtcattctccatgtgcagaagggtgggagagatggagaccatgcccactaagatgactttacaactggttgaccgctccattaccagaccatatggagtaattaaagatgtgctggtcagagtgaaacattntatcttcc

SEQ ID NO: 241216 - DNA, 266 bp, Glycine max
  unsure (1)..(266): unsure at all n locations
ttgagagcttgagatgagtttgtgagtggttatgagatcctagaggtgaaggagacatccttaccacttgtatttttggaatctttcatcttggtcttctctttgttgaaaagaggcttcctggttatggaaagctaaaatcctctgttggatcttcctcgtaggtacttgatgtaaatatctttctatctatttaatgatgttntgngtgttctctgtgctatcagcttttcattctagtatgcctttaccttgatcatgtagat

SEQ ID NO: 241217 - DNA, 252 bp, Glycine max
  unsure (1)..(252): unsure at all n locations
ngaattaagtagatagtactctgtgtcggcttatatttcctctttagttcttccttggaactaagcattggttatgttgcgtttttattaatgaacatacacatcgtcaagcactaagcgtagctacttgaattttntttttaataaagcgcagctacttgatatatagcataattaaatagcacaagtcacgagcttgattctattctcaagaacaagatagctctcactttanaaatatttacgtacttc

SEQ ID NO: 241218 - DNA, 464 bp, Glycine max
  unsure (1)..(464): unsure at all n locations
agctnttcatatggatatgagaaggagaaacaacttaagagtgggtcggacttacagcaaatgatgacacgtgacggaaaaattggatagtgacatgtggattaataattggagacttgctcatgntaataattttttaagatgaagtaataatttttttccactacaatttaaattatttttttattcaattntaaattatttatatattcacattaattgcaatacaaatataaacagatgtaagcataatttttttttaccatgttttcgttttaaatatatatttatttttttaaaaaaatctaataattaactttaattatttattataaccattgcattaaanaatgaaagtttgggatgtgagtaacttcttaaagttatgagtaacttaatcttttctcatacacatannatgagttattcacaagttttatttgttaaatttgtaagaattaaac

SEQ ID NO: 241219 - DNA, 217 bp, Glycine max
agcgtgtcgatatattacggcactcaatcggacatacgagtcaatactgattggggtttgaatatgctaagagactctgttttccattatgagcctctcgatatattacgggactctctcgggcattcgagtaaaaagttattggccgtcaaatctgactcgagcttctattcacaatttccgcgcgtctcgatatattacgggactcaattggaca

SEQ ID NO: 241220 - DNA, 400 bp, Glycine max
  unsure (1)..(400): unsure at all n locations
agctnttctttctcaaccaacctatctactaactatcaattctaattgcaatctcacattcttgttctttctttgtctaacatacacactagctcaaacttatgaaaaaggacacaatcttcatcacaatcatgcactcaatccaaaatccgtttataacacgcacttcacaaaaagataaaagtgtttcagtgcatattcatcaagatcaagtcaaactattccatatgcttcanaacatgcatactaactatccacanaanacacaagtatatataaaaatcaaccaaaatcactaaaacaatgtacagaaatataatagtcataataatttccaaaagcaaaatcatcaggaatttaaaatttctgagacaaatcctangtaccctgagtctgagca

SEQ ID NO: 241221 - DNA, 348 bp, Glycine max
  unsure (1)..(348): unsure at all n locations
tcattctatgtacccatggtgggccacattggggtttgtgtatttttaatctcgttttaattactttttatacccccttttgacgtgattaagccattttatttaagtcatttctcgcttaacctaaaaataaaataaatttccaccgaatcgttgaattggattatccgctaacttcggttaaaatgaattccgaccgttcggtcgtgcccgaaccacgttggaaatcaaaaagagggtaaataataatataataataaaaaataccttttagtaaaataaagcgaaaaatcaattggacgttntctctttgggatttctcattcttaatcgaattgactaataact

SEQ ID NO: 241222 - DNA, 370 bp, Glycine max
  unsure (1)..(370): unsure at all n locations
agcttctatataagcagaaccatnttatcaatattgacaagttgagttttattcagaanattagagtttatctcttttatcttagtgagagtgattctcctaaattcttgagtgattcaagaacaccttggctgtatcaaaggactttcacaacctttgtgtgttgccctcgctggaaagagtgattctttccttcctttcatcttcacccttgttctttcaaaccacaattccagaaaatccacctctgcccagaattatctcgtggccataactccaattttacgcactcaaattaagtgattcttgagcctaaattgaattccaaaacgagagcttccacctcgttttggaatcacttcatttggag

SEQ ID NO: 241223 - DNA, 133 bp, Glycine max
caacatttaatttcgagattttcgatatattacgggactcaatccgacattcgagtgaaaagttattgtccgttgaattagctcagcgcttctgtattcaattgcgagcgtatcgatatattacgggactcaa

SEQ ID NO: 241224 - DNA, 376 bp, Glycine max
  unsure (1)..(376): unsure at all n locations
agctntctatactaatgtcaaaattcaagaaagctctttgatctctgaggtttatgggataaaaatggtcattgaccaatcccttttctatgacttgacccaattatctagtgaaggtgtaccatttgaaggtacactgaatgatgattggaaatttgatttctctgtgcatgatgcccgccggttggtttgaaccaaccaagaggatatgactggaaggcttcttgctggatcattggcttttgaaagccatatccttcactatctcattgtgtgtattttacttccaagatcttcaaacctttgctcaggttctgaagacgatcttatagtcatgtgggcttttcataccggccgacaaaatgatttggcacac

SEQ ID NO: 241225 - DNA, 384 bp, Glycine max
  unsure (1)..(384): unsure at all n locations
tgccgcccagctcgcccaggcgagcaaaggtgcnnttctcagatataacagccttctgaaggaatcttctagagggcccaagtgggcctggttgctatttgcacccctatttttactaaatacaccccctctattttttttgtgaatctttttccgtaatgttacgaaactttacgaatttcgtaacgatacttattttttcttccgcaaggttacgaacccttacgaattatgtatttactcttttttagctttcgaagaagccacggaaacttacggattgcgcaaaaacacctcttttcgacttctgacatattacgaaatttcacggatcgcgcaagcctggcttctttagatttctgagacgntctcggacttcattta

SEQ ID NO: 241226 - DNA, 389 bp, Glycine max
  unsure (1)..(389): unsure at all n locations
agcttccattttcctttctactttgaatgagtaattcttaagnttcatacattcatcangtccatccttatatttttgtttccttctaattattaaataaaaatattgttttcttgaagactcttccttccatgttataatgaaaccgtaagatgaccaaattaattttacttgctagttatttgaagaaccaacgtcgcacgccaaaagtcaaaacctacaacccatctgtcatcccgattcattactctcgggattacttcagggcatttcattggtatctcttcttccttttcacaccctcatttaaatgttgaaacacctagaatacccttctttctctttaaaatttaaaatcttctctcctactcatgtccatgctgatattt

SEQ ID NO: 241227 - DNA, 181 bp, Glycine max
ctgactgggcacttatgccgtatcgccagttacattaacgagacaagtgctgactgggcacaaaagcgtatgtgctgactgggcatttcgcccgtagcaccaacgagatcattatgcacctctgcacgcgctacagacaccttctttaccgtttgcatagcttctggcttgacacaacaac

SEQ ID NO: 241228 - DNA, 415 bp, Glycine max
  unsure (1)..(415): unsure at all n locations
agcttagtctnttggtaatattttaggaatntatattttgtcaatccaaccattcaatgatgtaatattatataaatgatcatgcattccaaattttaaataatccataaattcataagtatgtaatttaataattgacatattttaaatagctcgttatatgtaaactaccttcacaagcaaaatgtaattttcataatggcaattgatgtttattattgtttactgacctctatgcagatcttccccctgataaggaaccactagattggaatactagaatgaaaatagttgtcggtgctgcaaaaggattagaataccttcatgataaggcaaaatcatgaacaatttctttaattccaaccaataactaattttcataagaaatggagtactaatcaaagtcgaatgtatg

SEQ ID NO: 241229 - DNA, 143 bp, Glycine max
ataagtgactggcttatcagctttacacatatacatgtatatataacacgtagtaacaatgtgctttacctggactttatattatgaaacaactttcaccacaacacccatggaccaaccaaggtcaactaccaccaacttat

SEQ ID NO: 241230 - DNA, 379 bp, Glycine max
  unsure (1)..(379): unsure at all n locations
agctntgaatgcactattcaatggagttgacaatatcatcttcagactgatcaacacttgcacagtggccaaagatgcatgggagatcctgaanatcactcatgaaggaacctccaaagtgaagatgtccagattgcaactcttggctacaaaattcgaaaatctgaagatgaaggaggaagagtgtattcatgacttccacatgaacattcttgaaattgccaatgcttgcactgccttgggagagaggataacagatganaagctggtgagaaagatcctcacatccttgcctaagagatttgacatgaaagtcactggcatagaggaggcccaagacattngcaacatgagagttgatgaactcattgggtctctt

SEQ ID NO: 241231 - DNA, 349 bp, Glycine max
ttcaatttagaatgagaaatccccaagagaacatgtccgattgatttttgtgcttcattttactaaaagatatatttttttattattatattattattttacctctttttttttatttccaacgtggttatggcacgaccaaacggtgggaattcattttaacaaaaattaacgaatactacaattcaaatgatcggtggaaatttatttttttagattaggcgcgaaatgacttaaataaatgactgaagcacgtcaaaacgtggttcgaaaagaaaatgaaacgagaataaaagtacacaaaaaatatggggaccaccacgggtacagagaatgaattgaaaagctt

SEQ ID NO: 241232 - DNA, 400 bp, Glycine max
  unsure (1)..(400): unsure at all n locations
agcttgngaatgcattttggcatctatttgactttcctatgctgnctctacatatataaaacagccccactatcccaactctgcaaaatcatatatatatatcattggggcaatgtggcatgccccattgcttcaaaatacaacctatgcctaaggccttttcattctaatcctcaattcaagaaaacaagcagcaaagcaaaccaaaactaccttacaaatataagcatgttctcacaattcgaggcaccaaaagatgaagaaagcacatcaatggaaagcaaaaacatcaaggatggaatacttacttgttggagtgaattgaaataccaaanacgaaagcaaaacgcgatcaanaggcttatgggagcaagaaaccgcaagccttcctattctctat

SEQ ID NO: 241233 - DNA, 151 bp, Glycine max
atgtctttctatttttcatgaatttttcttttacagaaaaatcaaatgattatttctttaataaaaggactacgaagcccgatttgagctctttatgtgaccttcattcttttcttaaatgcgaaaactaattagtcttggctcatttttt

SEQ ID NO: 241234 - DNA, 206 bp, Glycine max
agcttgaatcggacatccgcgtgaatagttatgatcttttgaatctctcaagagcttccggtggtcaatctcgatcctcttgacatattatgcacccgcatcggacctctgtgtgaaaaggcatgatcattcgtatctttcgagagcttccgatgtttaagtcccagcgtatccatatattattaactctgaatcggacctcagtc

SEQ ID NO: 241235 - DNA, 219 bp, Glycine max
  unsure (1)..(219): unsure at all n locations
ctataagtgcgggtttgggagacgaaggtctattgttcgcgatatgtgaaaatgatgctccgagtacttccgagttggtccgaccatgcccttctgatttncagctgggaaattggcgagtggaggaacgccccggcgtttacgcaacaagcataatgtaaacctttacggctttaaaagctctatagttgggcctacgctttagaagtttctttttgt

SEQ ID NO: 241236 - DNA, 401 bp, Glycine max
  unsure (1)..(401): unsure at all n locations
agcttacacaaacattcactagtccaacacacaattaacaaatagtcatcattcgtccatagttccaatgctcggtatgatgcatgcacctgatctcaactctcaaatgcaatgtggtaccatccccaaggaaatagcctaagcgtgtccacacaacactctcacttaggaaaactaaacagtaagtgtcgaggtcaccatgtcatgcacaggcaactcctcccccccacggtgatcatcctaagtctcaagggagttccaaaccaagtgacatgcccncaagtacaagtattcctcctcatgagaaactacaagtacttactgaaaagggttgtactatttccatgcaatatgaagtatgaaacatgagcatcatccatgcactaaccatggataattaa

SEQ ID NO: 241237 - DNA, 343 bp, Glycine max
  unsure (1)..(343): unsure at all n locations
tcaagaaaaagatggcctcagcacattccttatttccggaagggtattctatcaatagacctncaatctttaatggagagggttaccactactggaaaacccgaatgcaaatttttatcgaggcaatagatctaaatatctgggaagccataaaaataaggccttatatacccaccacagtagaaagagtttcaatagatggtagttcatcaagtgaaagcataaccatagaaaaacctagagatagatggtctgaagaggatagaaaacgagtacaatacaacttaaaagccaaaaacataataacatctgccctangaatggatgaatatttcacggtttc

SEQ ID NO: 241238 - DNA, 430 bp, Glycine max
  unsure (1)..(430): unsure at all n locations
agcttgtatgaattaagagaaatcttttgtgcctttttctatttaattattatttcgatttctcgcatctttctcgcgtatgttattgactagtggtgtgcttatgtttaattaacttttatttgcaatcgatgagaattgaagttgtaatatagagctcttcaatttactcttaanaaaaaaattgaatgtgcctttcgatatggtgaatgcgatattattttagatgagcagtatanatgtcacctttgtgttgtgccttttcctcgtctcaccacaatacgatgcagttatgcaaatagtatttattcccctcctcaagaactaaaaagnagaaaaacatgcaaaaaaaaaanagttacctattatagaacttctagtcacctccaacattaaacaacatcttcgataacctatgaagcacagacac

SEQ ID NO: 241239 - DNA, 412 bp, Glycine max
taacaagtgaacccttaaatgttgaaatctttggtgtctatgatattatatcgagctcggttagtggtgttgatcaagcccctcacttgctcaccaagacaatcggattgttgtgtgctaccttaaacttttggtggccaattctacatctgaagctagaagaggtagagttgtctaatgttgatgattaagatggcaattaccaagggtctcaatggctgagaaatgcttattaatgttgaaacttgaaagtcaatttcacctttgatatatgaagtgatgagtcacaagtgaacatagatcttgtcaaatgcagcttctaagaactataggttggtctggtaaatattagtccaccacatcttataaagtaatagcagtatctatctgaagtgaaaaatatggattggac

SEQ ID NO: 241240 - DNA, 276 bp, Glycine max
  unsure (1)..(276): unsure at all n locations
agcttcactcgaagaatatctgtncatttttttgttcctgtgcaaaattcctctacaaattttcccactatctctctctctcttactcagcttcattgtgctcttcttcttgggatctccctcgccgtcctgtgcttccccttcccacagccgccactccctttgcaacaatgccgtcgattgtgagacctccgttcatgaatccaccacccttcattccaagtccaaatcaaaagccctttcgcgtcctggtgacttggccatgcccatggcgat

SEQ ID NO: 241241 - DNA, 298 bp, Glycine max
atagatgattgctcaaggtaggaaagataataataacattgaaagacgctgtaaagaaattccatttttattatctaacactatatataacggattcatgaatggaattttcacatcatgacactccataaactaaacattgtcacatgatgacactccagaaactaaacattttcttgtacatcattaaccctacaagatgttcactgttgctcaaactgtggggagagcaggatatttctcaacatcaaaaccgtgtacaaaggggtagaagatggaacccgcatatatatgattc

SEQ ID NO: 241242 - DNA, 318 bp, Glycine max
  unsure (1)..(318): unsure at all n locations
agctntatatagcctttagaacttcaatttgctgatagatctcaactagtctttatctaatagctntggcatttgacatgaggctactactatgcagagagagtggggaccacaaatactttttgcagcatgtcttcagagaagtacaatctaccaatgttgcctagtacttagagctgactttcaacatacaaatcanaagaaatggtaacaacgtaagacaaaaggagttaggaatgtcaagacaagacaatttaaatcttccattntgtgtgctatggcaccagattcttattgacatatggagatctacttctt

SEQ ID NO: 241243 - DNA, 530 bp, Glycine max
  unsure (1)..(530): unsure at all n locations
gggtattgaaccccatctattacgtgacactcataatactcaacgctttgcatgtttagagatttctagagagagaaaggtccacgttccttatagttttgagagcttttattgtgcanagactggcagagaacttagagtgaagaggaagccattctgagagcatgaaatgaatctgtgagtgattgtgaggttctagaggtggaggagaccatcccactacttgcatttcttcaatccttcatttttctcttctctttggtataaaggaagctttctaaatatggagaagctaatcctatgttggttcttgcctgtangtacttgacgtnaaaacccgcatatctattaaatgattgcttcccttggcactgaccgtatgggtgcgtcatttcttccgcgcgctttattccaactcccgaactttcctctcaaacttgataagagcgcctttcctgcgctttcgcaatattactcatcaacacgctggcggacctcaacccactatctctcgggaagcccttttcccg

SEQ ID NO: 241244 - DNA, 182 bp, Glycine max
agcttcggtcttcaattttgagcttctcgacatattacgggactcaatcagatattcgagtaaaacagtgatggtcgtttgaatttgctcatagctttcacattcaattttgagcgctttgatatattacgatactcaattggacattcgagttaaatgttaatttcgcctgaattgtttca

SEQ ID NO: 241245 - DNA, 334 bp, Glycine max
  unsure (1)..(334): unsure at all n locations
agcttccatcacanagtcctgtgatcaatgtgggataatcccaggccccgttggacttatccgggtccaaagggtgcctggtcggtgccatacctgcaaatagataaatggcatcagcaatcaactgagccacgtgaatgctcatccgtgtcaggacggcgtacaccagctgacacttcgacagggggaggtcggaattatgatcgctgggctggatgttgctgagcagcaacgtcatccatatctgggttagggtggtcatgttggtgcgcatgaatccgacccgcttcccagcaacaatccgagcaaaatcctgccccggtatacacagcaa

SEQ ID NO: 241246 - DNA, 264 bp, Glycine max
tactaagcttataagcgcgggtctgggagacgaaagtcaagtggtcgcgatatatcaagatgatggtccgagtacattggaattggtaccaacatgcccttctgaatttcagctgggaaattggcgagtggaggaacgcccccgcatttacgccacgagcattatggtaacctttacgggtttaaaagctctataattgggcctaagctttagaagttttcctatatgtaaggctttgtgtcttttggttttgaaattataata

SEQ ID NO: 241247 - DNA, 163 bp, Glycine max
tttcgagtgtctcaatatattatgcgcctgaatcggacctccgagtgaaaagttatgaacattcgaatatttcgagggctctcgttgattaaattccagcttctgtatatattatgcgcctgaatcggacctccgagtgataacgtatgaccattttaatatc

SEQ ID NO: 241248 - DNA, 382 bp, Glycine max
  unsure (1)..(382): unsure at all n locations
agcttcgaaatccaaagatctaatccaaggtagatgtttcataaatgggattcctttgcttgtgttgtttgattctggtgccacccattcctttatatcttggttgtgtgtagaaaaacttaagctttttgtgtcttctttaaataaagatctagtagtagagacccctactagtggttctgtgttaacttctgatgtgtgtttgaattgttctgtggagatttctggtaggatattcttgattgatttgatttgtttgcctttgagctagaatgatgttattcttagtatggactggttatcttccaaccatgtcttgttgaactgttttgaaaaagtgtggtgtntgatgattctggagtgagtaaggatatgatgttta

SEQ ID NO: 241249 - DNA, 413 bp, Glycine max
  unsure (1)..(413): unsure at all n locations
ataatggagacacatgaacatcgctaggcaatgactttcatggtgctccgaacaaaagtggagtatggaggattgccttgagggtccgcacttatgcaatcatgaaactcaactccaaactcgaaagtgaaggatataggaacagccctaagcaataacattcatgtggctccggaacgggatgagaatggaggattgccttgagggtcctctcttangcaatcatgaaactcaactccaaactcgaaagtggagaacacatgaacagccctaagcaataacattcatgtggctccggaacaggatgagaatggaggattgccttgagggtcctcttttangcaatcacgaaactcaactccaaacttgaaaatggagaacacatgaacagccctaagcaataacattcatgt

SEQ ID NO: 241250 - DNA, 413 bp, Glycine max
  unsure (1)..(413): unsure at all n locations
agctnggaaataagattatagtaggatgcaaaagttcaactatgtaacgtatgctccaaaatcaaagaaatcaatgtttaaatcatccaggcccttggattcaaaatctaatgaaccactggatcccataaagtaacaacctaatgattcctgccaagaggaagtaccagatatataataccgtcgtgatatctaacagctagtaaatattatagatcaagagtatggagtaagcaagacgcagtgacaaaagttagttaagagttagaaagaaaagagagttttcagttactataaacctaattgaaacagttaacaggaagagaaactaatataagatatacacataaactggtactaaatactctagaaaatgtaatctgacataagcccacttagaagtccaaagatca

SEQ ID NO: 241251 - DNA, 548 bp, Glycine max
  unsure (1)..(548): unsure at all n locations
cggtgctttgannncccttncncnccttgagcgccttctatgacgtgcctcttagaatcactcagcttgtccacaanaatcagggtttgaaggttgtcatttcaatttctcacttagtnaaattgatcattttcaaggtccaacgccttaaaatgatcacctctttaaggaaaaaaagaatcacttgattagaaagaacttcgtaggtctgatttcctcatcgcaattgaggaatacgtangagcaaagggaaacacccttgtcgaccacaacaagagaaaaatattaaaagggtattaaggatataaggacttaaaagggaacataaaaaatcaaggtcatgtttgcacattcgattaaaggctgccgtcccttgggacggacgtgtggggtgctaatacctttcccgtgcgtaaatacaacttccgaaactttcacttanaagttcgtagatcgcgtcttttccgggttttttcgacgtttcctcaaataaaccgtggtggcgactccgcgcgtattcctttcgttgaacacgcatcccgcgagtn

SEQ ID NO: 241252 - DNA, 379 bp, Glycine max
  unsure (1)..(379): unsure at all n locations
agcttatagctctagtttccaggttgtaaagatgatatctcttcctcatgcattaattgtcactcaagatgctagccagtggatccctcctgagattggtcaagttgatgtcagttgtgatgcttcagttccttaattggggagtctcacaacttatggtggggtgcttcatgattatacatganattttctgtgtggactcaaatccaatattggagattcatctgtgctgaatgtagaattgttgactattctaatgaatctcgcctatgaaattctatttccttttatgaatggatcatggaatagtgggaaaagaactattacattacttctattgaggggctaataatgggagctctatcatggtgatgtcaaa

SEQ ID NO: 241253 - DNA, 307 bp, Glycine max
actgtttctgaataaatcaaaagatgtaactcttccaaaggtttttgacattttcaaattggttataaatttttctaagagctataaatcttctaaatggttgtcttgaccacacatgaagaatctattaaagcaaggctttgttttgcatttcaaaatcttgaatacttttcaatcatttcattaccatcctttacaagccttgaatctcttttaacttcttcttcttctttgtaccaaaagctttctaaaagtttctgcgtttctaaaccttgaaaacttgtgctattcatcttttcattctctt

SEQ ID NO: 241254 - DNA, 376 bp, Glycine max
  unsure (1)..(376): unsure at all n locations
agctntgagggtgcgcattccaccatcttttcatagtggaggaccgataatgtgtctaccatcacgattatcgtctccctttccattattgggggtaccacctgggccgccagctccctccactttttgggcgtgttctttgaaagatccgtccccctttttgcaaatgttctgtagttgcatcctatccagaaccatatcaaaattgtactaatactgcctaacaaaggcaaccattaggtccttccaagaatggactcgggaaggttccaagttagtgtaccacgtaacagctaccccagtaagactttcatggaaggaatgtatcaacaattcctcatcttttgcgtantcccccatcttctgacaatacatc

SEQ ID NO: 241255 - DNA, 351 bp, Glycine max
cgtgatcagaccaagagcatgttatcatttagcattgaaagaagctttgaacacacaagacacaattaattagatatgaacaggtattacatcaactgttcattagaaatccccaactacggtttttaaccagccatacaagaaaccctaatacaagtgagacagaaaatacagagcaattgttgcttacacaggaaaggggatcccttctcctcttcttggcacctcacaatcactcagcactctttaatctttaagaatgatgaaccttagccctcctgcttggatgctcctctttgttgtctccaaagaactatcctctaattttgtgctctcacccttgtacataca

SEQ ID NO: 241256 - DNA, 291 bp, Glycine max
  unsure (1)..(291): unsure at all n locations
agcatgagctaattctggacagccataggtttttattcttaacaaactcagtattggagacgaggatcgacactccttatcttgaatgatgactgttcactacctttgatatatctatttacncttggttacctagggcttgaccatgatacacgaattcatattaacaacaagattttaattggttaatatcaagcacgtctaagactggaacttattaaatggaccactggttgacaagatggttggagaaccatcaaatgcaactattgtcaaaattatgagttatat

SEQ ID NO: 241257 - DNA, 320 bp, Glycine max
  unsure (1)..(320): unsure at all n locations
agcttacataacctaggtatctctgcataagctgttcgtcgtgctgcctccagagctatattcccgaaataggcactgtggtgtgctctggaattngtgcaaatcatccgcttgccctaattctgcacaaaacaggctttaaatagcctctgaatttgcgacgttgcgcttagtgtgagtaagtgggtttgggcttaacgccagtcttgcgctgagcctggctgaagacacctgttgtgcttagcgcactgatctcacgcttagcatgtgaccttgatattgatgtcttgctagattcttctatcgcgctaagcgcgttg

SEQ ID NO: 241258 - DNA, 187 bp, Glycine max
  unsure (1)..(187): unsure at all n locations
tcgtctgcgatggtgtangttttaagaagcggtggcttgcggttgttgccgtggacagttctgatgatgagggtgaagaagctgacgaggaaggcatagaccacgagagtgcccagtgtctaaatgaagacctagcgactaacaatgatgccngccagatatatgcaccttttcttcttctttttat

SEQ ID NO: 241259 - DNA, 383 bp, Glycine max
  unsure (1)..(383): unsure at all n locations
cagctggttaatagaactagaacatgcaagaatatcgtacactacgactataactgaactagattctttcaagcaagaactcaccaaaataaggcaggattttgatgcagttttggaggcaaagctggcagcactttaagcagcaggagaggcttcacgttcagcaaaattaaactcggaaagaatcagtgaactctcaaatgaaattgcaaccatgaaagcatcaattgaacaagtgagacttgcctctgaacaatcccaaaaagaaagtgaagcccaacttggtggttattacacaactgcaaggaagaagcacagatnacttggagtccttatagaatgaatacgacactgaactcatgcaaagtctagatgccaacttg

SEQ ID NO: 241260 - DNA, 438 bp, Glycine max
  unsure (1)..(438): unsure at all n locations
gttgttacaaatattattaactnttgtgttatcgattacatgcattgtataatcgattacactgttttaaattcaaattcaaaatttataaaactgtttcaaaaattattttagttattagtaatcaattacatcctctagtagtcgattaccaaagagaaaacatcttatttttgaaaacataattttacttacaagtttttgtaagatattttcctctgtcaaacttgtgcagcatcatctaagaaattcttttcaagatcctatgaactaagtacatcgctcttcttgacatattttattcttgacttagatcgcgctcatctttgacatcatcaaaacttcatatcatatatgcttctgcaatactttnttcactattgaattangaatgaatgaaggtcttggctttaaatactttnttattacaccaaatgt

SEQ ID NO: 241261 - DNA, 297 bp, Glycine max
  unsure (1)..(297): unsure at all n locations
ttcgattcattctatgtacccgtggtggtccacattgtgtttcgtgtacttttattctcgnttcatttactttttatacccgcttttgacgtgcttcaaccaatttatttaaatcattactcgcttaacctacaaataacatatatttccaccgatcgtttgacatgtcctatccgttaacttcggttaaaatgaatttctatcgctcggtcgtgccgtaaccccgttggaaataaataaagaggtaaaatatataatataataataccaaataccttttttagtaaaataaagtat

SEQ ID NO: 241262 - DNA, 483 bp, Glycine max
  unsure (1)..(483): unsure at all n locations
tgtggtgcatagatntatttntaattntcaattaaatcctctaatattaagtgatttaattgaatcttttaattatttaaaataatttaattgaattatttccattaattaaatataaacatgagatgtattaaaaaaacaacaaatcacttgtcatgtggttaacttggttatagcttataccctttattatcattcatatattattatctgtgccgataaaaaaaaaaaggcatgagtatgtttatacctaccctgcctcgtacgtagataggaaaataaatatctatttgcttcagacgctagtacccatgtaaaaattcgaatctaactcgtaaagcgttttatctgatgaatacatgcaactntaatagtatnaatttcaattctaattctctgtgtaatccaaatacggaagttgaaattgaaaccaattcgaattgcgcgtaccacattgactagaactgttaagaccgctcctat

SEQ ID NO: 241263 - DNA, 263 bp, Glycine max
  unsure (1)..(263): unsure at all n locations
atctcataccactcaaagctctttcatagttaatctattccaacacatccaatggattcctctaaaattattttttgaaccccaccaaaaggaactcatcattttttggagattatcttctaaggtagcaggtaaaagaaaaacactcatgcaatatgagggaatttgttgagcacaagatntaataagaatttatgtacccatcttagagagatgatttctactccaatggttgatcttcttccacattntgtcctttatga

SEQ ID NO: 241264 - DNA, 437 bp, Glycine max
tgtgactcttggcaatttctttatttttaccagtcacttttttagttgtgactcttgaaaaaatcttctgaaacaagtcacttgaagatttgtgactcttggaaatatattttttgaaatcagtcacgggtaatcgattaccattaaggtgtaatcgattacacatcaacacatgtgactcttcattttgaattttgaaaaccttaacattttaaaacactggtaatcgattactatcttctggtaatcgattaccagagagtaaaaatctttggtaatgattttgtgaaaacttcttgtgctactcaatgttttggaaaacttttttagtacttattttgattgagtcttctcttgattcttgaatcttgagtcttgaatcttaatcttgattattcttgaatcttgattcttgaaacttgattcttgagtcttga

SEQ ID NO: 241265 - DNA, 335 bp, Glycine max
ccaccacgattatcggctccttttccatcattgggggtaccacttgggctgccagattcctccacctttgggtgtattctttgaaggattcatgctcctttctgcacatgttctgtagttgcatcctatccgaagccattatactgacatcccctaacgaaggcaaccattatgtccttccacgaatggactccgcaaggtttaacgctagtgtaccaggtaacagctaccccagtatgacttttttggaaggaatgcatcagcaattcctcatcttttgcgtatgcactcatctttcgacaatacactcttatatggtccttggcgaagtattc

SEQ ID NO: 241266 - DNA, 417 bp, Glycine max
cggtattgaaaagtataaacaagctctatgtcaaattcatactttaacaagccttaatttgaatacaataagagtagtgtcaaattgccaatatcactctgttgctctctcaaacgtccagataattagaaattattattatagtacggctgattgagtgattctggcaccaaataatagttcaatattttgtgaaatgtgatttgtaaagaaaaatataaacatgaaagatgaaaacataattcacctagaaggaataatagtattatagctggtagagctgttccaaaatttcccgtcaacctatatgtagaatggtaactcctcataacttcaatctgaaaggaaagtgactaaatgtgtcctttatcattcttagtatgagaatatgtgtgatgctttgaatctatttctgtc

SEQ ID NO: 241267 - DNA, 460 bp, Glycine max
  unsure (1)..(460): unsure at all n locations
gtgaaatcaggtgcagccatctcncttagagttctctcacgaggtggagattgcattttagataacgaacttataaattgaagaacgaaattntattgctactggaattgcaaaacgaaaaaaaaatgtctcaaagaaaaacctaaaactaaaaaaacgaaaataggggagagagaagagagagcctaaactagaaccttggtgctgttatatagttttccagccccaaagcttacaaatttgttttaaatccaagcccataaataaaatcaaatctagataagataagatctagatgaaataatatatagatcagatcaaatctaaataatatctagataagataagataagataagatctaattttgtagaataaaatagtttgtcctcttcaaatccaagtccaatgcttcattaattcctcgaaatagaataanaacatcaaattagctgaatggg

SEQ ID NO: 241268 - DNA, 336 bp, Glycine max
  unsure (1)..(336): unsure at all n locations
ntacagcagaatttagtaatgacccactaacctagaattatttataacttaatgtcattaacctagggaattaaaaaaaacttaatggctgagtgtaactgaaattgtggcaaccaaaagtcacccccaacagccaacaagtcagccaccatttggtctcccaaaaggctgatgcctaggttgccaattgggcccttattacaacttgaactaaacctaactaaagcccttttagttgattaacccaaaacatatttttggtcagccaactttacaaggattgggccattatttagacaaactaaacactctaaaattgagacaaggtggtgtcat

SEQ ID NO: 241269 - DNA, 322 bp, Glycine max
  unsure (1)..(322): unsure at all n locations
tctcacagtctataaatgtgggagttttattaatccttgtttccggacttttaggcacttatgatagccgccgatgatcccattactgcttcccctaagctctctgtcctttcttcacgccgcatcccatgccttgcgaactccctggagtaccctcgcgatgtggtcactgacaccacgtgcaatgaaaggcatgaagctttcgtctgatggcactcctctcatgggacatccttcgcatgaagatagaacnctgattcttcctttcttctagcgagggaaccaattaacagacgccactccatgctacccaagagttggt

SEQ ID NO: 241270 - DNA, 472 bp, Glycine max
tgtaggccttagatcttcttcatctatgaagtcctttgtttcttgaagatcaatggcagcggaatggagaaggaggaaaggtgattacagatgtcacttcaaggacaaaatgagtcaaaatcaagttcaccaccatatgaagccatggataagagctataaagtagggaaagatgagtggagggagagggagaaagaagagggtaccttagtaatgtacgatttttcagcccttgtattttaggacacttatactagttcttgtattaagaataattttataatttcacatgcattaaatgtattatttgatgtgtgtatgttggtagataaatttaattgaattagaagaagcacaatgcacatgatgtagtaccatgtgagatgtgttgaaagtgaaaacaacaactaagacagaacgcgttgacatcatggattgaaagagctctaggtctaacatgtgttgacattaa

SEQ ID NO: 241271 - DNA, 399 bp, Glycine max
  unsure (1)..(399): unsure at all n locations
nttgtaagactcatgcaacactctattttgtctgggaatctcatgaacagttgggtgtttacagacaaaagtacatattaaagttgtagtgaaatagtcttttttaaaatacatacaaaaacatcagtgtaaatatataaccacacccaaaaccaactggtattggttagcatcacctaagctcatcaacaggacgttcaattttttacacaaatatatagcaacaaagtgaaaaacggtaactgactataaaatattaagacatgttgattgagaaaacattcaactttcaccaataattacaaaaatatcaaattacttttatttaacttcatgcttcctaagaagtgtatatcaaatgaacaaaacaacattggctcaccatctcatgtattaaat

SEQ ID NO: 241272 - DNA, 347 bp, Glycine max
tcttaaggaggtgagcttagttattagaggagagtgtgtatctaagctctagcttctcaacgaagttcctcaaggaagctacctaggctataaatagaagtatgtgtaacacttgtggtaactttgatgaatgagagtcttgtgagacacacttcacagttcaacttctctccctctcttcttccttcattttcatgctcccccctctctctttctctctctctttcttttcctccattgaagcatcctctccaagcttcttatccaaggcacattcttggtgccgaagttccttcttccatggcttattcccttgtggatgcgcctcctctcacctcttcttcttt

SEQ ID NO: 241273 - DNA, 465 bp, Glycine max
  unsure (1)..(465): unsure at all n locations
nggaacaagtaaatggaatttaatgttgacttcagattttatactgactccatttcttttgttctatttacatgtgtgatcctcacaaaatttccatgtgtggtattgccattcttctatgcataagtatttattgcttactcaatatatttatatctgatttcttttatatcagaatttctcacagctgccacaatccaaattgcatttagttgacaaggaaataccagtaagcaagaagttcttgaaaccaaaaatgaatttaaattgttttttttaacccatgaataaactttgtagggaataactgatcctatgctgtacatcgggattctgttcagcatgtttgcatggcatgtacaagatncaatattgtacaggtatttctcanaatctagccttctgctccatcgtccacatcattttctacattgttcgacaatntcttttcacttactgttaatt

SEQ ID NO: 241274 - DNA, 415 bp, Glycine max
  unsure (1)..(415): unsure at all n locations
taggaacccanacttgtagcttcaatgcgaggaaacatgtttatgactaggaatccaaaatttggttttaggattagaaaagcatgaaaattagaacttgcttgtgagagttttttgggctgccccatgtttgatactttgcatcgaggtagcatggaaaacaccttgcaagagtgtgcatatatatgtaaatataaggggcatgaaattcctagcaaagtgtgaatgattgtcttcctaaatgaatgtatgatagcacaggattcccttttgaatgcaagtgtgtgcataatgtaaatagcttgccaatatgaataaatatgagtgaaaccaataaaatttgtatgatatatatttcaaacatatgtaggtagtttgtaaatagcaaatgtttacgatataaattaagtgtgag

SEQ ID NO: 241275 - DNA, 437 bp, Glycine max
tggagaggatgctctcacggaggataataaagagggagtataagagagagggttatcactacattgacggaataaaacaacgaacgactgatgaactttgaagtatgtctcacaagactctcattcatcaaagttacaactagtgttacacatgcttctatttatagactaggtagcttccttgagaagctttcttaagaatacttacttgacaagctagagcttatctacacacacccatctaataactaagctcacctccttgacaaactacatgacaatacaacacaaaagtccctacttacaaagactacttaaaatgccctgtaatacaacgcttaaaccctatactatctataatggtcaaaatacacggcccaaaataatgaaatacctattctaatatttataaagaagagtggatcaaccttgaccct

SEQ ID NO: 241276 - DNA, 472 bp, Glycine max
  unsure (1)..(472): unsure at all n locations
gcttctagcgtacccgctattggtgctcagaaaatcccanaatcaaatccctcttattactagctattttgaattctttagttcctgaatgtacaaccttcaaattgttgctcgttcccgtatttgttttttgcaaaaaagaaaattaatctgaaacaattcacgctgaattgttatcgttattattactcgaaccataaggaataacagctaaacaagtaatttaaaatgtcacttttaaattatgtggtatttttttaattacaattttacttcaatatctaattttgttaatctacttaggtcgttttctaaatataaatatgaatttaaaggtgatctactgataatataaagtacttgcgtatcacacattatgatacgtatcattntaaattttaacttaatcgtataaatattaataaatttataatacgaccatttttacatgtgctgcaggattctttgactt

SEQ ID NO: 241277 - DNA, 388 bp, Glycine max
  unsure (1)..(388): unsure at all n locations
agacggagatatatagagaaaatcctgtctaagncttattgtacttgatatggatgcgcgcagcatacgagtatggtacaaatgttttgcgcactcctttgatcaatgtgtcagtntagccttgctgtgaaattttggcctttttgagaattgcttttttaaaatacgctgttacaaaaaaaaccatagaaagaaataattcttctgaattgatttttttactgctttgagttgcttactaattataacaaaatttcactcttttcacatttgtgcatttgctgtcacataaaggcatgtctgtttggtcttattgtgaaatattatggagtacactcgttgacagcaattntgtgtgtctgctactctgctgtcatataaaaacact

SEQ ID NO: 241278 - DNA, 370 bp, Glycine max
tgtaatctctctatacaaaggttttgtgaggaggattgttatatagtgactcttgacaggtggcctttgagaaggtttcaaatgatgataacgaggtactaattgcaaggtttggtgacgaggagattaaagaggctatttgggagtgtggtagctcaaaaagccagggtcccaatgggtataactttggatttatcaaagaattctggtctttggtgaatgaggatgttactaatctccttaatgacttctatgagtctgatagttttgttagaggttccaatgcatcattcatatatctcattcccaagataagtgaaccgcacgggttgggggattatagaactatcttcctggtgggttgcatgca

SEQ ID NO: 241279 - DNA, 395 bp, Glycine max
  unsure (1)..(395): unsure at all n locations
tcggaagaaagtgatgaggtacaagccctaaaggcagagtttgaaagagctctgggtagtcgaagagaagttcaagtccatagccatcaaagtctgaaaagagtatgatgaactaagggatgtcaatatggccaccgatgaagccttggaatgagaaaccaagaaggcccgaaaggaagaacacggccaaagcaaagttttgaggggctttatagggcagcaatagtgagctcaagctccgaagaggtgaaaggaatcatcacgggtcaaaggcatgatcttgaaggacgagctaaaggtctgccttacgtcgaaaagaaatttgtccaacagttaagcgagactgaagggaatatgtgggccatcatcngatagtgcanagagaagcttaatct

SEQ ID NO: 241280 - DNA, 470 bp, Glycine max
  unsure (1)..(470): unsure at all n locations
tgtgactcttggttatttcttttaaaatactagttacttattaagttttgacttttgaaaaaatcttcagaaacaagtcatttgaagaattgtgacttttggaaatgtatttttcaaaatcaatcactggtaatcgattaccattaaggtgtaatcgattacacatcaacaaatgtgactctttattttgaattttgaaaattaaaacatttagaagctctggtaatcgattgcaagtattgtgtaatcaattacataagtttaaaatactttaaaactgtttaaacataagttataactcttgaaatttgaaatcttaacgttctanaacactggtaatcaattactaccttctggtaatcgattaccagagagtacaactctttggtaatgattttgtgaaaacttcttgtgctactcaatattttgaacaacctntcttagtacctatcttgattaagtcttctctc

SEQ ID NO: 241281 - DNA, 319 bp, Glycine max
  unsure (1)..(319): unsure at all n locations
tatagaaactcaagcgttcactaaaactactattttcatagttaattcaaaagtttctgtttacaaaaataccttaagattctatctgagagtcaaaactttaaatataatcgttaaaaaaaaaaaaaaagcaagacaagagtgtgtttagatcaacgactttcctccactttaattcaaaagtaacatgtgttagagcatttttttttcatatccaaacatggaattctatgattggttatgtaacgtgacaataagacagttttagagacatgacaagtgtcacaaatgtgactgctatttcngtggtaagagaata

SEQ ID NO: 241282 - DNA, 403 bp, Glycine max
  unsure (1)..(403): unsure at all n locations
tggatattcatcctgacgagggatcgagggtttagtaatttatgctacagcattgaacacaagagcacgattgatttgagaaatatatttctatacatcagcttgtttgttagaaagacccaacatatctacctactgctgtcattttatttaccttgcatttgatagtttttagcatacaagtttagtttaaattttgtttgaatatatcacttatacatgttctctcaataatgcttcgattctgaacgtaattcaggctaacattagttccctgtgttcgatactcggattcattcattntaattttaaatactggacgacccggtgcacttttcaatgagaaaactacccattgaaaattntcttgagacataaatgcacaaaaagtgactgcagtggg

SEQ ID NO: 241283 - DNA, 407 bp, Glycine max
  unsure (1)..(407): unsure at all n locations
tatctcagcaagagtgcttctagcagtaataaacgcnatagtattggcgcccacttttatctanatgctaacaatgttttccttaatgaggactctgnttgacgacaatctatattgcactccgccttaacgatacaaaaccactacttatagtcttgcatgcaaactcaataagtccttgtatggcctttaagcaatggtattgcaagcttttttctaccctattacaatacgagttcattcaatccataaatgatcattcatttttcacttatgggctggatcttcattagacagaatcctcgtatctgctgataacatatacttgttgcccaacgtctcatgtgttgtaaagtccacaccaaataccatccatgttcaattataggtttgggtccttcaacatt

SEQ ID NO: 241284 - DNA, 417 bp, Glycine max
  unsure (1)..(417): unsure at all n locations
aaggtaacacaatgtttataacagtttattttaaatattatgtgattagaaactaataatttaagttattcggatgtcttttattgatttgtttggttgtattattataataagaatgatgcggcaattttttttgtggttgtatcataacaagttaatcactaagaattcatttgttgtttcagccacattgtgaactaccaagaacatttgttcaacatagttatgagaagcttaatactacttggatattgattganccagaacgaaaccaacaccgggttgtttttacaaatctatgaaaattcatcgatcactgtagtcgcctggtctcctgattctataactaacacgttccatcattgatcttcattattggagaccttcattaataaatattgtctttaaacttccttt

SEQ ID NO: 241285 - DNA, 447 bp, Glycine max
  unsure (1)..(447): unsure at all n locations
tagctttagcttggagaaattagaacgttagtaggagtaacatatttcctacatctacttgataaatatatatttttaagtaatcttattggttactacttcaaaacccactgtctaaagatacaaaatctgttattaaacaatttatgattttttttctttactcatagtaggtgtttgcttatgaataataaaacagtttataaagaacttttgatcaaagatcaagattaagtttttcaaagcaaggttttctttggatttatccttaattgtttgtttcatgaatttatgagactaatttagtcacttgatgacatgtgacaaactgtgaaagttgtcgcatcataagaatgtttattaagtttgtcacaattaacattgttatgtaaaaaactgagaatgatccatttagtctaatgaaatattntaacaaaactaaagtga

SEQ ID NO: 241286 - DNA, 274 bp, Glycine max
  unsure (1)..(274): unsure at all n locations
accttaaaactcagctgttccacatcgtccgtgtatatattcactccaatggtntgaagtacacgagaccttcaatcctattactcaacatggcagacacaagtgggcagctaacctcgatggtcattattgccaatgcggacagtattctgcgcttcactattcatgttcacacaatattgcagccttgggttatgtgagcatgaactactaccagtatatatatgttgcctacacaaatgagcacatcttatcagcttactccacacaatgg

SEQ ID NO: 241287 - DNA, 202 bp, Glycine max
aatacaaacttgtagctagctagaagtatgtactgtgcgtgtctacacctatcaatttctatcctccccggctcctctatgcctcaattacttctgtcaaaacaattccaaaaccaaaacgcctaatctcaacacgccataatcgaaacctgaatcgagctataatacgtcatgctcaaacatttcacgtatacacaaaata

SEQ ID NO: 241288 - DNA, 318 bp, Glycine max
  unsure (1)..(318): unsure at all n locations
ggaatcggaattcaatgtgaaaagttatgacntatttaatttcccgagagcttccgctgctcattttcgagcgtctctatatgtgatgcgccataatctaacatcctggcgaacagttatgaccgtttgaatttgtcaagagcttctgttgtacaattttgagcgtctagatatgtgagtcgcctgaatcgcacatccgtgtgaaaagttatgaccatttgaatatgtccagagcttctcgttgatcaatttcgagcctctcgtaatatcatgcgccctaatcggacatcctggtgacaagctactgaccatttgaat

SEQ ID NO: 241289 - DNA, 285 bp, Glycine max
  unsure (1)..(285): unsure at all n locations
tctagccaaatggacttaccttgatataactccttcgattgtccttctgagcctcgcttccctttcgttggtttgaagcctactacaagccttatgtgaaaaaccatgatatcaccatatccttaaggaattntggagctttggaattgtttcgggaataagtatggggggtttttgttttattggacaacttgttttgttggctatgcttcatgatgtatcttgggccatacttgatgtacattgtatattggttacatgctgaacatgctgaatgacatgttg

SEQ ID NO: 241290 - DNA, 367 bp, Glycine max
  unsure (1)..(367): unsure at all n locations
tgttggaatgtatgcaagtngtgttgttctganatcagtttaactcttgtttcagaaaactgaacacccatatgtttttgcattcaactggatggatttggggtcggcttacaatggccactttgatgatgcattgttgtactttcgttggatgcgcaaggctggccacactggcaacaatttcaccttgtccattgttctcaaagcatgtgttggcttgatggatgtgaacatggggagacaggttcatgccatggtttgtgagatgggttcacaaaatgatgtgtccgatgccaatgctcttatacatttgtatggcaaatgccggaccacttcctatgcctcccttttgtcagatgaacgcgtg

SEQ ID NO: 241291 - DNA, 459 bp, Glycine max
  unsure (1)..(459): unsure at all n locations
tgtgccaaaatatccaattntaatgtgacggatttagatatgatgaaattgcaaaaattaagggattttttgccttatcttttaccattatggtcaattaagacaatcacgattttctttaattattttatgaccatttttctttaaatgttttaattacaatttatttatttttatttcttttcctttaacgtgctccatcacatcactataaatattggcccttggcatcaattttagatacaccaaaacgaagaacatcttcatcttctcttctttctctgagttctcccttttttgttttccttgctacgttttgttccatgttcatacatgaaggatctgttaaatcttagttgatttgcgcactacgcatataagtcataaagcacagtgtgtctaacccacatctccggtctagctcttatatcatccgatttgcatcactcagccaccatg

SEQ ID NO: 241292 - DNA, 458 bp, Glycine max
  unsure (1)..(458): unsure at all n locations
tgtctatntaatcaatattntatcatgcctaaaaagtaactaattacattgaaattgtttaaattctttatatcctagagcaccctagccattntatttctcaactctcaaacctgtcatacttaaagttctcagggattggatctacagataaaaaaaattaaaaaataaaaataaaaggcatatattattaatgcagacaattaattttcataaaaattccccatgtcaactaattaacatgcaacaatgtaagtatagctgacaataattgtcaagttcggtattttatacaataatatcccggaggaaaagctataaattagttaaaggaacatacttccaatgcatttacanatatgccgctagattcagtagaaatggtccatttgatatataaattaaaaaacaatattcgttactcagtaagtagtagtctcaattttgaagtataaata

SEQ ID NO: 241293 - DNA, 345 bp, Glycine max
  unsure (1)..(345): unsure at all n locations
agcttcttattaacgctcatcttggtggtgaagctccttctatcatggtttattccttaatggatggcgcctcctctcacctcttctcctttgtcttccgttgcatctccatggnggaaaatcaccattaaaggacctcatggaagctcaaagatccagcctccacagaagccccacacgcaagctctcatcaagtggtattatagcacaagagcttcaagtatgtgctccttaaacctccatatattttttgctctaccttctcttctattgttgtttcttcattttcctacatgtatctcctcacatgttttgtgaaaaacggttctaacatgattatttaca

SEQ ID NO: 241294 - DNA, 181 bp, Glycine max
tgagtgctctatagtccacgcacaatcgccatgagtcatctcgtctcctgatgagcaccactagtgacgagaaatgacttgtactaggactaaaacacccctatgcaacattgattccacctgaagctaatttcctattctggtaatgggggtaatatacagacgcacgctcattgatgcg

SEQ ID NO: 241295 - DNA, 344 bp, Glycine max
  unsure (1)..(344): unsure at all n locations
actcagatcttgactagttataactttctgtataaaatgagncngtcctatgtttttactccaaaagtcactgcgaatcaaatcaccgcatcttatctctagcatgcattcattattctttacctactcctcacgtttggttttttaggaaaaacaccataactaaacgcgccgcaaggcatccctatcgcaccagatccaaatctagaacgataggtgatcaagaggagacacaggaacagatgaaagccgacatgtcggctttgaaagaacaaatggctcccataatggaggccatgttagaagtgagacaactcatggagaaatacgtggccaccactacc

SEQ ID NO: 241296 - DNA, 422 bp, Glycine max
ggctattgtatgaacaatcacacgccgactcgcatagcattatctgataaaacatcaaacacaacttttaacatttgtatttatttgcatctaatcaaaattattagaaatcttgattcatttaaagacataaatatctttttgacttaacaatctcccatttttttatgatgtcaaacaaatacaaatataaaagtttaaggcatatatagttaagcacagacatagtcttattagatgcaacaagtgatataacatataaagcaactagcatcatgatactatgaccaaattcagcatctgaagttctagcttctgcatctgtggatctagaatatgagaaccaatacccattttctccttccatgccttattgcatgtttggcactccataactctagaaccatgaaataatctgactt

SEQ ID NO: 241297 - DNA, 154 bp, Glycine max
agtcttacggggaatgctctctacgttaaacgcgtaatagcagctcttgatattgtaattgttgttctgttgaacaacttgtagcacgaagtagctttctgagtgtaataccagcttctgctgctactgtcaattcgagttttgttgaataatt

SEQ ID NO: 241298 - DNA, 302 bp, Glycine max
acgtataacaatgagatggtcccatggtctccacgggtgtttctaatgaaacataattagcttttaggcaacaaatagatcatagccatcacgacctggctaatactttgacaaatcacatggcctcaattttaaatcctttattgagaactacccatgaaagctatcaccatatgaatgagaccctaactccaataggagatgctatggccattcctaacaaccaccctgcggatagacatatcatttatgaaataccatttcacgacagaccaattcatgattatcatcatcatcatgaa

SEQ ID NO: 241299 - DNA, 308 bp, Glycine max
  unsure (1)..(308): unsure at all n locations
actcagcttaccttcaattggattgattgtgtgtcatcagctgttcataatcangaagaaacatgtgacaggaaagcaactcataaacatgagtcaaagttgaagagaaaagaattctcagagtgcgatctggtctggaaaatgagagacaaagctatcaaggatcatgctccacggaaacttgctccaaaatgagaaagacccttcataatcaatgacattccagaatagtgcatacagacttgaanagcttgttggacaggtcatcccaatgacctgtaatgcacacacttgaaggcatacttcca

SEQ ID NO: 241300 - DNA, 368 bp, Glycine max
  unsure (1)..(368): unsure at all n locations
cactatccactactcacgctggtacgcttaggagcttcttcatctatggatccctttgttcttggaatatgaacggcagtggaacggagaacgaagagagagaggagacaccactctccggagaagatgagtctagaacacgctcaccgacatctgacgccattgatacgaacttgcagaatgaaggacacgaatgatgggagagggagagcacagcaccacattntgtgctctctcagagctttgacattccgaagttaattctcgaatgatcaaagccgaaacaatgcccacacatgacctctatttataccctaagcgcacacataatggagggacatttgaattcaacttacatttccttgaat

SEQ ID NO: 241301 - DNA, 355 bp, Glycine max
  unsure (1)..(355): unsure at all n locations
aactcaactcaatctacttttgtagtgcttgtcaaacatttctctgatctcactccgcagtcaatagcttgacttcccttcgtttgcgctccctaaaaaaaacaattgtaacgaatgcttaccttgccattaaatgggatatttgaatggaaataaccgcttgagactcaccagaatctggtaggctgctttgttcctatgtaaatcacccgtatacccttacccaatgcttgattatagctacagggtgccacatatctgcttcagtggcttgagcactatgnttgctttttaacccaaaaacatcccgaccaagctggacaacaccattggctctcacatataatgaccaccc

SEQ ID NO: 241302 - DNA, 415 bp, Glycine max
  unsure (1)..(415): unsure at all n locations
gaccttagaaactcaagctggacactgaggtttcctttcacagtttatcagagtatgaattcactgtataatgtttttcaagtgtacgattaccattaatgaatgctagaggaaacctctangcatttgtcaagggttccttttgagaagcccttcggaacctatctagatggaggtggacatgattgtgtagatggaacatctttatggagagaagagatagaagtatttcatggactcactatctgatgatgatgaagcttaatcctttttgttccttgtgaaggagactacctactccttctcaccaatccagggattggctatggtcgcccctcatttgatacgtcatggtattgcacaggggatgacaaattcacgtgattctggggttgtttgactctctttgctcttt

SEQ ID NO: 241303 - DNA, 435 bp, Glycine max
ccatgaaactcatgctgacatgaacaacggaagctctcgagaaattcaaatggttataacttgtcacacagaagtccgtattaggcgcataatataccgacacgctcgaaattgaacaacgaatgctcatgagaaattaaaatcgtcataacttgtcacacgaaagtccgattcaggcgcataatatatggagacgctcgaaattgaacaacggaagctctcgagaaattcaaatggtcataacttttcaattggaagtccgattcaggtacatactatgtggagaagctcgaaattgaacaacgaaagctctcgagaaattcaaatggtcataacttgtcacacggaagtccgattaggtgcataatatattgaaaagcttgaaattaaacaaccgaagctctcgagaaattcacatggtcataacttgtcaca

SEQ ID NO: 241304 - DNA, 257 bp, Glycine max
  unsure (1)..(257): unsure at all n locations
gacttacctnaattaatgccttagattgttttctgagcctttgtttcctctcctggtctcgaagctcactacaagccttacacgaaaaaccatgatatcaccatatccttacggaattctggagctttggaattgacttccgaataactgtggggggttgttgtttcattggacaaccttgttttgttggctatgcttcatgatgtacttagtgccatatcgatgtacattgaatattggcttaatgtaggacatgc

SEQ ID NO: 241305 - DNA, 386 bp, Glycine max
ctcagcttatggtgaatcaaggtgattcacaggcgctttgatgattacaatgatgataatctaagatgatgacgaaggtgatgacaaaaagctcaaaagtcaatcaaagaacaactcaagtgaatcaaagatcaatcacagaacaactcaagagttcaagataagaatcaagaagaattcaagagtctagaagaaagtttggagtcaagaatcaagattcaagattcaagatctcaagaatcaagatcaagattcaagactcaagattcaagaatcaagagaaggcttaatcaagataagtatgaaaaggtttttctcacaaattgaatagcacatggtttttctcacaacatgtttaccagagagtctttactctctcgaaatcg

SEQ ID NO: 241306 - DNA, 439 bp, Glycine max
  unsure (1)..(439): unsure at all n locations
actcagcttggcaggaccttcgaaataatgaagtgagctctccagattgcgtcggtaactttgttctggagcgattacatgaggttgatacccatctgcctctgaaataacttttttcacattttgcaacgacaaatgacggtccagtggaagctttctcaatgcagcaggaagctgataatcaaaaaccacgtaaattcgatctccacctggcctcctaggagggataatacaagaaactggaagggtcagggcatttcctacgcagaaatattatatccagttnttaaaactagatgcctacacactcaaacttcaatgtaggtggttggttatcatctttaatccctgtattgtaattacgaccatggaggatttgcaacgctaatgatctatattacaacttcattaacgtttcttatccctattattacactat

SEQ ID NO: 241307 - DNA, 389 bp, Glycine max
  unsure (1)..(389): unsure at all n locations
tgatgcntttggtcacataatcactgtgtgaatgttatgtttgctcgtgtcagtactagaaacagcgtgaaataaacatgttatagttactaccatgattgaagtcaataaacaaataattaacttacttgtttggtgggttatccctataatccataaatatcttgcatcaaagttattctggactacttaatgtcttgaatatggttcaacagcataatagatatataaaaataataaatatttataaattatcaaagagacaattcaaataaagtttaatctgacctacagaattgagcctaccaatatatctaataggatttacgtaaagttgcttttaccacaagacttctggttataacaatttacgaaacgtgtttgtctct

SEQ ID NO: 241308 - DNA, 386 bp, Glycine max
  unsure (1)..(386): unsure at all n locations
ttgacgcgctcagcatgaactgtggacttccaaattctaaccgttgagagtgtcacaaaacgtggacttgccaacccaaaccgcctatatatcctaagcgagagtgtcgggtggactcgcttaagctatttacttggagatggtaccacatatgcattcgatggtcgaggacagatgcatgcatcatactacgcctgattgattgcaactatggactaatgatgactatttgaagagtgtgcgatgaactagtgaatgtttgcgtacgcttatgatatttgttaacgctatcttactaatctgagttatttaatttatgcattaatttcttttataatanactcacccctcgcaataatcgtaccgtgtggttggcatctatgatg

SEQ ID NO: 241309 - DNA, 398 bp, Glycine max
taggaacccaagctcttagtttcaatgcatggaaacattgtttatctctaaaaatctaaattcgggttttgaaagtggaaaggcatgaaaattaggacatgcttgtgagagttcttactcgaatttggctgccccatgaggggtactttgcacctatgtagcatggaaaatacctttcaatggtatgtaaatatgtgtataaatataggtagcatgggaaacacctttcaatggtgtgtatatatgtgaatatatggcataaaattccttgcaaagtgtgaatgagtatcaaaaaaatgtctctcaacatatgcgtatttgaggaaaggtggcattatgagccctttagaatatgtacccatgtcaaatagggcttaagacggttcctaaatgaatat

SEQ ID NO: 241310 - DNA, 399 bp, Glycine max
tctacttatgtggcagggcgggcttccttcaccttcttgtctccaacgcgaactttgaccattgttcttccttcccgcgatgcttcttttcatgtctgcctgagtgggcttgtagcctaaaccatacttcccacgatttccttgggtatttattaggctagttatgccgccgttgttttttcctaaacccatcccgggttcataaccgttccccaacataactcgggccatcattaccgctgcatcggacagacaaggctgcccaaagagggagtccacggaggaaatgctgaccacctcaaaagactggaaagcggtttctaacgattcttctgcggcttccacataaggcatggaggatgggcagcttaccaagatatcttcctcgcctgacacgat

SEQ ID NO: 241311 - DNA, 429 bp, Glycine max
tgcttctacattctctccctctccctccactcatcttctcttatcttcgagctcttatatctatttatctttctcaaacactcatctctctgacttttccaacatttcctttcaatagacttacaaaattatcataacatgtatgaaaaccaaattaatttggaggtggatcattgcattcttgacattagcaatctactcaaatatagcttttgtcctgtatctgtctaatgagtttataaaaaatcttacagcgacttcttacttctctcctactcatcatgaaatttaaaatggaaaagaggatcttagtttcaccggtggtacctaagatctatattatcatcatttgacaaactccaaaatgaatgaaaacatatatgtctacttgaagatgagatcaaaccttaagaacataatttttatttt

SEQ ID NO: 241312 - DNA, 454 bp, Glycine max
tatccatatacggagtttgcttatcatctctatccttatcttcatcaccagatttttatgggagattcacattactatatgtcttctgttcgaccttcattatactatctagctatcatataaatattttgtcatgtgtacaaatgccacaagacatcacgatatttgattatcaactcatgacgaacaatgaatgaattttgatcaactcgaatctcttgaaaaaatgcacagcaatttcctttgatgactcttagaatgtgttttgtaaaagataaaattgtatcaacagtcactaatgagaaagaacaagtgaggataattattactttcatatctaaacatgatctaatcgatcataaaatataattattgaataattcgttccaatccctctcgctctacatttccgacatgtggaatccatatcttgttcacaacttccgggtttgga

SEQ ID NO: 241313 - DNA, 414 bp, Glycine max
  unsure (1)..(414): unsure at all n locations
tcacgaaatgtctgganaagcgaagaggagagatgactattgtgcttccgactccgactctgtatgccacgcgccgcccaagaagtccctcaagaaggattccgatgacgatcccgactctattaccgcttgcgaggtcgatttctcactctactattctatttctaggatttctcttttttccttttctttctatcttttattcttttactgtgtgcttataactctttgtttacgatgaaatgtagatctctaacaacacgagggttgccgtgaggaactggaaaggcagcattatggttgacattcgcgagttttacgtcaaagatggcaagcaattgtctngcagactaggttactattctcttctttcaaatgcttatacactcttctttttatctgttcctgaattta

SEQ ID NO: 241314 - DNA, 321 bp, Glycine max
  unsure (1)..(321): unsure at all n locations
actcagcttagggttttctccctgttanggcattatctctnttttctatcaagattatattgtaagatctttccttcatctgttcttgcaccttcacccattctcattcatctacatgtttatttctattgcgattaaacggtacagatctgacaatgagtcctgtgaaggtactaataccgaggacactaacgtcgattttgaatgagtagcaaaccgagctgaggatgaagaagatgaagatacagggttttccccggagctagaaaggatggtcgctcaggaagatcgagaaatgaagccacaccaagaggagatgga

SEQ ID NO: 241315 - DNA, 439 bp, Glycine max
  unsure (1)..(439): unsure at all n locations
taagctccttcaactgcacaaggctcttaatatttgaagtgtatccttgnggatatctttctccgacgaagacactgacaaaaacttatcttctccttcttggacaaagcatggcaggctgggggcaagtaaattttcttcccatcagaccttggatgcaacagtgatcgtatacccatatcagctagatcttgacaggtattcaagccatccttcgtcttgccttgaatgttaaggagtgtcccaatcacactgtcacaaacatttttctccacatgcataacatcaatacaatgtctaacgtcaagatcacaccagtaccgaagatcaaagaaaatagacctcttcttccatatgcaacgctgactattatccttcttttgggtcttcccaaatacacgtattcaggtgttgaacccgctgatatacctgctcacca

SEQ ID NO: 241316 - DNA, 419 bp, Glycine max
  unsure (1)..(419): unsure at all n locations
nntttgannatttatcactggtaatcgattatacagttatattttgaagggccatgacttttcaatntgaatttcacgagtttcgttactgttaatcgattacacaccaatggtaattgattacaacttttaaattcaaatttcaaaacccttctgaaaagttgttttgcaaaatttgtcttctggtaattgattaccagagcctttgctctcttggaaacaatttgtgttaaggcaaaaaccaatcaaccaatgagattgtttgaggccttatctttttcttgatcttgtttgcttatccttgaattaatcttgaagcaatgcttaacactttgaatgttgaagccaccttgtattaattctactttggtataatcaaaccctgtattatatactcacattcttccccttttgatgat

SEQ ID NO: 241317 - DNA, 329 bp, Glycine max
  unsure (1)..(329): unsure at all n locations
ntacgcccagtccttactgattacacagcacttacgatgtaattcatctacaatggccacgtgattgagttagtgggagatcgcgacttgtcttttcagatgatatcacctgtccagttacgtatgttggtggacacaggtaacaccagtaccttcttccacattaaaatggaaccttccttggagacgccaatgactataactcacccaataccgacagtccagaaactcttttccaaacacgctatcctcttccaacctctatcaactctacccgcatctcgagccacagaccacagcattacccttcttcttaacttagccccagt

SEQ ID NO: 241318 - DNA, 457 bp, Glycine max
  unsure (1)..(457): unsure at all n locations
cgatgagaagaaaataagtagtttaccattgcctgcgctttttgatctcattcatggtggtcctcgatgccaggcctcattagctgttggctttttatttantttactgatgaatatattgttatagggtagttgtttaacactgttgctttgctttcagggtttctctgggatgaataggttttaaccacagtagttggagtaaagtccagtgtgagatgatattggcattcttatcctttgccgattatttccgaccaaggcatttcttgttggagaatgtgagaaactttgtgtctttcaataaagaacagacattccgtttaactttggcttcacttcttgacataatgagatgggttatcacgtaagacctatgtactgcgtctttctctctgaagaatcgccatcacagttgatgaatagaacctcaacgaaggaactaatgaatgctgat

SEQ ID NO: 241319 - DNA, 403 bp, Glycine max
ctaagcctcatctcttctagttccaacagttgcaatttctacttctcccctgataaggactcatcaaagttaaggaacatgagagctcaataagccttatctcttccactatcacctatgttgtccttcatcatggcagcaccagatctgtaaccactccattgtcgccaccacgatgcatcaaaaccctcgtcactaacaccctgtgtcgaaactctcaccattgtgtgccacactgtgtcaaaacgtctctaagtattgttagtataattattatggtaacaaaatctttgagggtgaggctctacttcgcaagatattatggcctcctcgatgagaccttctcattgtcgagaactttcttgagcgtctctaatctgcgatggccaattccattcactac

SEQ ID NO: 241320 - DNA, 264 bp, Glycine max
tatcatcctttctgtagtgactatgatatttatgaatctatttcgtccgcgctcctcgcaaaacttgtcatttctaaatacacttagcaaactcatcacataacataaactcagaacgcttatgatttgtcataagttaacaacctagggttttggactacacaagttcatcatatattggctggcctaagcatgaccctcaattcagttatctctggacatcaacatacaatcttaacgattatctccctatcttacatcatc

SEQ ID NO: 241321 - DNA, 482 bp, Glycine max
tcatagccataagaagaatatgatggttgcggttcattgttaccataactcgattgtggatccaagtaagcactccaagaagaagaagaagacctgacagatgaactctgcctccaactctcctccttagaattttgaccccccatcaacacacgcacttctcagaaaacccaaaaatacgaagacgattaaaaatgaagcaatgaacacaaccaataattcttccaaatgctatataaaatgatatgagtgtatcgcccttgaggttgcagtttccattttccaagcaacttctgaaaacttgttcaatgcgacaagtaattaatgaacaaaatggaagcttcacgataaccaaaacgactcgttaattataactaaatccaccaacgcaagtaacacataagtcgtgaagtaataaccccgaagccaaaattaccagtattattgttgtggcttaacacaggaaccaagtttttgacaat

SEQ ID NO: 241322 - DNA, 393 bp, Glycine max
  unsure (1)..(393): unsure at all n locations
tgaaattgatcaacagaagctctcgagagattcanatggtcataacttgttacttggaagtccgattcaagcgcataatataccgagactctcgaaattgaacaacgaaagctctcgagaaattcaaatagtcataacttatcacacgaaagtccgattctggcgcatagtataccgagacgctcgaaattgaacaacggaagctattgagaaatttaaatggtcataacttttcacacggaagtctgattcacgtggataatgtatcgagaagcttgaaattgaaccaaggaagctctcgagaaattcaaatggtcatatcttttcaaacggaagtccgattacgcgcataatatatcgagaagattgaaattgaacaatggaggttgttga

SEQ ID NO: 241323 - DNA, 444 bp, Glycine max
tgtggctattagatcatttaatgcttgcattaaacgcatattctgcttcatgtttgataaccactatgatcggctttcgtgttgatcactataacaaaaaatcagttccttttagtcaaagtagatctatcacagtaaaacacatcttttgatgttgtttggaaacttttacaacttaaacttcatttattcttcataggattcgacaaatcctgatagaatgtcttgtgagacaatttctgcgaaatgaacctcagacacaaagtactaaatgaagtcttaaatgtcatctttaatattttatcagatcatgacttattcatatttctgtctgaaatatcaaacagaagatcatgaagcataatctgatatcacataagacaaaacttttaaccgctgtatttatttgcatctaatacaaataattaagggtcttgattcatc

SEQ ID NO: 241324 - DNA, 449 bp, Glycine max
  unsure (1)..(449): unsure at all n locations
tatgctgcanacatttacaatagacctcttcaacctcatttgcaaaataagccacaacagaacaagtatgacctctccagcaacaggtataatcccgggtggaggaatcatcccaaccttagatggtcgagtccttcacaacaacaacaacaacaatagccttattttcataatgctgctggcccaagcagaccatacgttcctccaccagtccagcagcaacaacaacaacagcagcaacagcaacagtcccaaaaacaacaaacagttgaggctcctccacaaccttcccttgaagaacttgtgaggcacatgactatgcaaaacatgcagtttcaacaagagaccagagcctacattcagagcttaactaatcaaatgggacaattggctacacagctaaatcaacaacaatcccagaattctgacagattaccttctcaatctgt

SEQ ID NO: 241325 - DNA, 242 bp, Glycine max
tgctcgtggtgcatatatggatgttatatcttcgacctttttatgaggcctttaacggcgatatcacggccatggagatgctagctgaagacaacacgacatgacgtgagaggacgcgccatccactatggaataatctatggaccaatgagctccatcaccgatatgagccttggataacaagctcccaaacgatgctttactggacgacaagacctacccagagatagagagagggggga

SEQ ID NO: 241326 - DNA, 398 bp, Glycine max
  unsure (1)..(398): unsure at all n locations
ttactataatgtntagaaagttaagaacagaaatagattcttaaccaactagtaaagcgataattaaagtgcacagcggaaattaaagagtgtanggaagaagaagacaaccacaagaattttatactggttcgacaacaacccgtgcctacattcagtccccaagcgacctgcggtccttaagatttcttttcaaccttgtaaaagcctttacaagcaaagatccacaagggatgtatcctcccttgttctctttgaacaaccaagtggatgtaccttccacttgaactgatccacaagagatgtaccctctcttgttctcagttacaacaacccaagtagatgtaccctctacttgtaccacaaaggatgtaccctccaatgtgttaagacaaagt

SEQ ID NO: 241327 - DNA, 426 bp, Glycine max
  unsure (1)..(426): unsure at all n locations
ntaagcttgtaagagataaacctttataagagaaacaatttatggtctccactagacatggttgtaatagcaagatattagaccaaaagagaaccatagaacactgctaaagtctggcagaaaaggtaccacaagacaagggatctgagaatggaggactagaattcctttgaaggttgacagttgctggagtaacgtcatcatgatacaatttacaaggctaaggctgagtgagtgctatttccttgacactaattcctaaaagaaaaaggcacagctctgttacagtccattgtctcttatcttatatgtttatgtgattctgttatgattttaccggtaaaaggtatgtacccagctattataaagtttaattnctgtgatggttgtgcttgcattctgtctctgcaggcttgatactgtgta

SEQ ID NO: 241328 - DNA, 427 bp, Glycine max
  unsure (1)..(427): unsure at all n locations
cgcanaccaaatgctcaccactatttgaggaaaagcctttttgttgntttatatcaacctactcctctaaatcatcattaagacagattgttttcacatccatttgcagcacctcaaggttaaatgagctactaatgccacgataatacatacagacattcttttagatatacgacaaaatcgctcttatgtaatcgatcccttctttntaagtaaacacctttgcaacgagtctcgccttgtatctattaatgctgcctaatgaataccatttggttctacacacccatttataaccaatggcctttgtccccattaggcaattctacaaggatccaaacttcattactttgcatgaaactcatttcatcctttatggcatcataccatatattcgactttttacaactcttggcttgatccacag

SEQ ID NO: 241329 - DNA, 332 bp, Glycine max
ctattctcccctcctacactgcctatttttgcatcttctcaaatatcataaaacgaaacgactacttcttaatgtaatattcgtaatacataaaccaaaaatctctacaccctttgacaaattgggtattgttttttacaaattatatatcttcggtagctcaactccctgtctgactaatatgccacgaagactatagcacgcctacacccctaagctatcaaggagctgacgtatttatacttcccttttcagtcataagcgctacctatgaaaattttgccagaaagtctggtctttcatttattaatctgatatattcaaatcaattc

SEQ ID NO: 241330 - DNA, 468 bp, Glycine max
  unsure (1)..(468): unsure at all n locations
agcnngtacattttaactaagatcggaatttctttttctacgtaccgagctaggaagctagagcatgtaaaaaaaaaaattgacgatgagagacaagccatgccatcaatttgtcttctagaagagacagcgtcctaaaagcgacgaaatgaacatatgacaacatggtcttgtactcttgttgcacaaaagtgaacgacacagaagataagtctggcattatggaaatttgcatacattgaaggcttgcattcatattattgaagacaaaaaagaatattattactgcaggcaaacttatatacattattatagggctcatgagattttgtctcactgtaccattcctcacagtgaatgtactactcttggattgacaaaaacattggtggacaccaaataccttgatacatcttgacatgagcggactgatagagaacacactcctttaatttaatgagaatgctt

SEQ ID NO: 241331 - DNA, 379 bp, Glycine max
  unsure (1)..(379): unsure at all n locations
catgcaagctntgcgctactatccctcaccatcgagatagttatctatcgtcaatccattatttttatgaagggttcatgttaatggagaaaagtatgattcattcagccagtggacgcacttatttgggcaaaactcctgttgctgctagacaattgatctccacacatggaagacgaattaccacgaaattctggtcctacagttgctgcactcaatgaagtctctatctctatggttgctgacatcaaaggccggagaataaacttacagagctgacactcccatgtgaggcatctagccattggtcaacattataacgtggcggcagccaatcaaccaatgctatgtcgtatcttgtgcgctcctgatcatgcaa

SEQ ID NO: 241332 - DNA, 316 bp, Glycine max
  unsure (1)..(316): unsure at all n locations
gacaaacagaatactcaaactagtattacttcgtgtacatctatttcatatactganagattctgttatttaagccgactactacactttaaagttattacggaatcgtcactcgcttggactctgacttatacctactgcatatatgcgcttatgttattatagaacggctgatattgacgttcaaactctatcacacgtgatacacgctgatagtgacggtgatgctgattctacttattcaccttcatatttaagtggggatgaccatatatccttggatgatgagactatatcatcgcttatgtctaataaa

SEQ ID NO: 241333 - DNA, 400 bp, Glycine max
  unsure (1)..(400): unsure at all n locations
ttaagtcacctgcggcatgcaagcttctatgaaggtgtgagagtntatgttttcttagatattatgatattggtgatggtttttgttcgtcatcatatgcaaatatgttagagtagctaacaaggatttcgtatcattgcatacttatctggaaaagttcaagtcctacattgactaaagagatgttctaaaaatcatttggagatgtaccgaaggaggggtgagagagggaggtgcatggatggaggggtaagggaacctgacacaaacaaaggtcctgctgctaacggtgtttgaggtagaatttatggaaacaactatgacaacactaatagagctatgaaacaaaacaatttgcaatgatgtctttattctatcttgagggattcacatataacat

SEQ ID NO: 241334 - DNA, 463 bp, Glycine max
agctttgtcagttgtgactagaacgcagattattatcaaaggattgaataaacttgtgctagcgaggaatccaaacacccatacccttcatcaactcagacaagggttcaaaaaccaattgcataactcttacatgccacttcctcggaaggcacatgcttgttaaatggaattcaccctcttaaccccatcgtgaagttctcaccgcaatgatacagagataagttattgaccgtctcagtattttccatattatgatgaaaagttaatggtttcgcattaacattacatgagtgcagataacggcgtgcaaaccataaaacatacttgcggcctatatacattaatgaactgcaatttaattcatagcattagtggttctttcttcaacttcaatttgggataacaacgacgaactgcactatacttctgcatcttttctcaatataacaccttataattg

SEQ ID NO: 241335 - DNA, 141 bp, Glycine max
ctcggacccaagtacgagctcactctcagtgcttggataattttatttgaacattgctcatgagtacctctccgactaaatggtccatacatccgacagacacatgtaaagccttgttgtgcccctttcccctcaacggga

SEQ ID NO: 241336 - DNA, 252 bp, Glycine max
agtaccttcgcgacaaaatgcgccatacatctgacagacacatgtagagccttgttgtgccctctaccctcaacgggaatctcttcttctgcaaacgcgatataattattggcggttatatgattaacaatgccctcaaaccctcaactgagatgtcatgtgctacgtgggctcccttgaggactcttatcaacagtgcacgatgacgctcacagtttatgagcacattcagcaaagagattcttgccggag

SEQ ID NO: 241337 - DNA, 421 bp, Glycine max
agcttcagaacttcatgccaaacttgagaatgcagtacatgcatgtttcatataacattcttttttttttttcgaatacaacgtcattaaattgccgcaaatatttatgcaaacaattttaataaacacgcatatttctaaaatataatcatataaaagatcatgattaaaattctgcagcaaaatttcggtataacaacttaatgatcgatcacatggactggctgttactggatcttggctcattgaacaacactaccagtctacttactttttacctcaatttctagccttacctactcttcttgtctgtgaaaagacaattacttttcacttcatgttaattccctcttaatatttttcccctgatgtgatccacagtgaatatgctatgagttgatcatttgaatcaaagaaaata

SEQ ID NO: 241338 - DNA, 462 bp, Glycine max
  unsure (1)..(462): unsure at all n locations
agctntattaaatgttttaagtgtttgggaaatgttcatatcttatcccaatgtcctaacaaaaagactatggttgtgttgggtaatacggatatcactagcgcgtcttcttctagttcttctagtgaaagtgaatgtgatgtacaacccctcgaagatgatcttttgatggttaggaggctaatgggcagtgtgtgtaaggatagagatgaaactcaaagggagaataattttcatactagatgcatagtcatggggaaaatatgttctttgattatcaatggggtagttgcactaatgcagctagctaaagattgattgaaaagcttgctttgaaaacttcccttcaccctaggtcttataaactacaatggttgagtgagaatggggagctagttgtacatagataagttttgatatgcttctccattggaaaatatgttgatgagatactggttaatg

SEQ ID NO: 241339 - DNA, 247 bp, Glycine max
ctcctccacactctatcacactactgaacatgacggatgtcccgtcccagtcgcaaacttccttaatagttaactctgttatatatttgccaacataattaaaattgcgaacacattcaattgacatcttggcttatcttcatatatatatgaatacatatcggcttactaactcaacaatgcttacatttgctctacatgctaaatggggtcaagattttatcatcgatgctctttctagatacca

SEQ ID NO: 241340 - DNA, 482 bp, Glycine max
aagtcacctgcggcatgcaagcttagagatgacatggttcttcataatcttacttttgttatctctaagctggtggataatgcaatcttcctcacttggtcttggctgaaagggtgggaaagggatttcaatgtaccttttcaacaatggtcttcagctatgtctatagcttttaagtagagttggtttgtagggttgggtttgtggctgtttctgtagggctgttgtatttcttttttccttattcaggagatacttcactcttgcttctactatgtagtacccctggtactgattaattattaatataatttatttttgcagttcaaaaaaaaaaacagagttcaactttaatgaaggagataaagaaacttgagcaattccttgggatacaacttttgacccattatctacagttacaacgtgagaaatttttggaaaagagatggatgaaaaagatgatttgttaccaaagatatgat

SEQ ID NO: 241341 - DNA, 419 bp, Glycine max
tcatgtatattactacgagtcaaaattgaagactattgccatatttatgatgcacattactgggataacttgcgatatgacacatatttactaatgggatatttaactttgacttataggtctggttcatatttaactggaggttgaccaccactacagcacggtgaaagactatatacgacagctatacactcattgtttggtgtgttggtggtcccacacagacaaagatcaatttcatgatacgtttcatctaaattagtattatcaagggtaggatcaagagaaataatttcatgattaatttcatctacattagtattatcagagataggatcagaaggtacctctgaagatcaagccgaccctgtggagaacattgaacccattcggttatgattaaaagacactatattatc

SEQ ID NO: 241342 - DNA, 482 bp, Glycine max
  unsure (1)..(482): unsure at all n locations
taagcaccgcggctgcagcttggaagtgctatgttcaccttctcgctaagccaatatgttggcttagcgagcatttgctaagcgcaacactcctaggctaagcatgaggaagactctggaagaagatgagcggtacaggttcactaagcgcaccgcttcagttcatccgctaagccaaaaatcactaatgtgcgctaagcggtccatacgtgcgctaagcacacgagcacgaacaaggccacctatttaagcctaaaatcagattttgtgaagagagtttggactaggatttacagcttcgcatatctagggtttctagagagagaaaggtccaagttccagagagntttgagagattntgttgtgtgaagatctgcagagaccatagcatgaagcaggagccggtttgagagctngagatgagtttgcgactgattgtgagattctagaggtgaaggatacatcctcaccacttgtatttt

SEQ ID NO: 241343 - DNA, 429 bp, Glycine max
ctacccttccatggcacgttatcacctttcagctacaatacgggtttttggaagcaaaattcatattacacagcgctggggatgtctcctccacctctacgaacctataaatcactctaaaacctataatcctcttgaaagccgagatttttggggctcccttgccctactgcgtctctcacatatatctccattcttccaaaagctaaaagactcctttttttgcgccaactttagcttttaagggctttctgtcctggaaggcttgcttagcgccattttcacgctaagtgccagttagcgatttttggctgagcgagtcaagcgcgctgggtgccacaagagacaaatgactctctgggcgagctgatggcgcgctgagcgcatgcataccttggtaattttttaacaaaatctcctcactcccta

SEQ ID NO: 241344 - DNA, 459 bp, Glycine max
  unsure (1)..(459): unsure at all n locations
agctntgttaccaattattttaatacttaattttaccaaaaaaaagtaaatgttcttcaggatttcaaatcatggttagaacacgaggcttacgtcgtgccttaggaactggtagaggcagagacatgagtcaagatgcacatcaacctgaagttcctcaacataggcctattgcttcagtatgtaggcaacgagttcattttcctcatgtgactgaggacgttactcagacacctgagaatgtgcctcagttgaatgggatgttcctcatgtgtctgatgctactccaaagatgactggcattgtcgatgctgtggacgcagagggagtggctactgatggtagtgagggttcacctgctgttgatgagggatttcttggtgggctacgcgacccattggtnttgattggttttgccgagcacgtggcacatagcatctggagtggagaggacttaca

SEQ ID NO: 241345 - DNA, 337 bp, Glycine max
acgcgacacaatcaaatatcagcctgacttataccacacatgacaagtctaacatgcttctattatatttcttcaccaataactatcatgaggcataaacctagtaaaaccatccatcataactcccaaaacccaatacccacgaaaatatatatgagaagaatttaccccaaactgaaatatgaagtcccacaatggcgaggtgcgcttcacgactccgaaaatggcttccttttccgatttggagcacaaatggcgtgcaaaggtcggagctttgatggcacttcaatggtgaggaacaacaaacgaatatcaacgctagaaagagagggagaaa

SEQ ID NO: 241346 - DNA, 323 bp, Glycine max
  unsure (1)..(323): unsure at all n locations
cctgcacgcgtgcacgctagncgcaaacgagaggcacatatattttcatttcatggnacacaccactgatatgataaaccatttgcacatgttatacttacaacacactaacggacctgcttcaataaaatgcaacaccatacccccttcatcaatgactattctaaatcacctgaaattacctctttcaccacgcaattctcaacacgtctttatccttcgtccattcgaacacactgataaaaaacccactcgctaccaacatagatgtcttccactctcagggggcaaaaactatagagccttcaccacacaccttctta

SEQ ID NO: 241347 - DNA, 343 bp, Glycine max
gcaagcttctacataaaggttgatcctaatttctctactcttgcctcacctctcaatgagctggtgaagaagaatctgacattcacttggggtgaaagacaagagccagccttatttttgctcaaagaaaagctcaccatggcacctgttcttggtccttctgacttttctaaaacttttgaactagaatgtgatgcctctacagtgggtgtgggagccatattgtcgaaaggtaggcaccctatttcttattctagtgaaaaacttcacggtgccacccttaactaccccacctatgataaagagcgttttgccttaataatacgcctccacacttgggaac

SEQ ID NO: 241348 - DNA, 479 bp, Glycine max
  unsure (1)..(479): unsure at all n locations
cccccccccccccccctaaaaccctccaactcntatncccctccccccgcgcggcctgttgaccttcaaaccgccataaaaccagctgcaaagaccactccgacaaagcctttttaaggaaaaactcgccgcgcttaaaccatatccgcgcgcaaaaaatgtacaactggaaaaaataactattagttaagaagaaaacatgccttacaacaaacaaaaataaaaccttgccaataaaaataaatagtcataaaacaaacctgcctgacagcaaaaggggaaaaaacttgcctactggatgcttcttggtccatagcccgagaaaataaaaaagaaccccagatcgagatgaaaaatctctccggaaaaataactattattaagaagaaaacatgcctaacaacacacaaaattaaaaccctgcacataaagacaaatagtatcgaaacaaacatgcgcaacaacacaagcggaaaaac

SEQ ID NO: 241349 - DNA, 395 bp, Glycine max
  unsure (1)..(395): unsure at all n locations
agctttgaaatccaaagatctaatccaatgtttatgtctcatacatgagattccgttacttgtgttattcgattccggngcaccccattcctttatatcctatttgtgtgtagaaaaactcaagctttatgtgtcttctttaaataaaggtttggtggtagagacccctactagtggttctgcgctaactcctgatctgcgttcgaattctcctgtggaaatttctggtaggacattcttgattgatttgattcgttcgcctttgagccaaatcgatgttattcttggtatggtctggttatcctccaaccatgtcttgttcaactgctttgataaaagcgcggtgtttgatgactctggagtgactaacgatatggtgcttatctctgccacca

SEQ ID NO: 241350 - DNA, 461 bp, Glycine max
  unsure (1)..(461): unsure at all n locations
agcttcaagttgttcattgactctatattgctgcaaagaataaaaaagatctgtatggtgatctgcagatttctgattcatgacaagctgagttactaggttaaccaaggcatcaagtttttcctcaagctttttattttcagtagatgaagatgaattcgtggccacctcatggactcctctaaggacaatagcatcatttcttgcactgaattattgggattggaagccatcttctcaatcaaattcctagcctcggcaggagtcatatcaccaagggctccaccactggcaacatcaatcatactcatttccatgttgctaagtccctcatagaaatattgcagaaggagttgctcanaaatttggtgggaggacagattgacacaatttcttgaatctttccagtactcatacaagctctctcactaagttgtttgatgcctgaaatgcatttctga

SEQ ID NO: 241351 - DNA, 398 bp, Glycine max
tgacaatcgtacaaatctatggaaggatattgtgactctttatagccaccaacaagggccatggtgcctgataggtgactataataatgtcacaaaagctcaagatcgcctaggaggtaaaatggtgacggaagccgaatatactgattcttctgatatgcttgagcacactggtctggccaaaatggataatcaaggagactattttacttggtcaaataagcatgtagaaggccccatttactccaaaattgatagagctatggccaacgtttcatggtttcagaacaatctggatgtgaacctttcatcatgccccaaatgtctcaaccaccctcttcttggctgaacacgcgaataggtaatttgaacaaatcccacttcaaattcattaatga

SEQ ID NO: 241352 - DNA, 475 bp, Glycine max
  unsure (1)..(475): unsure at all n locations
gcagcttgatntanaacaaaatactcataagcattatgaagcattccatggcatgagcaaccaaaacaatgtcatacataaataaaagcacatacaaaattgtcttagaatttgggcttaggacctaactcaatcccacaaaaccagcttgattgatgtggaactaaacaccaagcaattaacacagcccccaaagaggccgcaaataaggtaggttaggggtgaccgcaattaaggtgactttccaacattttctgaaaacagtatctttaatggatttgacactcaatgtactactgccttgatccttaccaccaaattaaataaaccacatagtcatcatttaggttaagaatttaaaatcatatcaaacaggaaatttatttataaaattccacaatgaagctagtcttacacaaaagaaaggaattataaatacaggattcattctaaaatatgaaaagcaagcaaaata

SEQ ID NO: 241353 - DNA, 372 bp, Glycine max
tctcttggaccttgaacaagcaaccaactcctctttcagatacatgctatgtgctcgccactgggtcctttctttccttcgcaacttgagttcactattgctaccccatagagctccccgaaatttgttccggccgtactctctcttgcgagccctcttggtctctagttcaagggctcttgcgcgaattgcattctcttcccggaacctggcacacttcttccgaacgtgtgtagcagccaacctgaacctctccttggcgacgtttgcctttcctaactcgctctcgagagcttggacttcttcgcctcttccggcgctccaaaatctcttcctgatcactttacactgggacgcaactaaacctgtagg

SEQ ID NO: 241354 - DNA, 439 bp, Glycine max
  unsure (1)..(439): unsure at all n locations
atctatacattcgaatcttctcaattcatacaactctcattcatttcaaacacaaccattcatttcaaacaaaacaaaccactgaatatcaaattcaactagttcattgttcaaacatgcttttgtacaagctacacacactcaaacaacagaaatttaaaagactaataaagcataaactaaataactgacatgaactaaatagctgataaaataaactattcaaaatttgcaaaaatttaaaaactatgcaggattcaccatctctcccttgataatggggaaagtatctcaccagctcctcaaacttggctggatatttagccacaatcatgtttccctgcttgagctccaagaactccatctctttcttgttcctaacttcctcgggaaagtatttctccaaaaataccctcttgaagacatnccaggtcacatc

SEQ ID NO: 241355 - DNA, 397 bp, Glycine max
  unsure (1)..(397): unsure at all n locations
ttcgaggtacttacccgttgaagatttattaacgatgaagaacgaatgaagaacgtcgaagaacggttgaaacctntgcgaaattcttcacggaaaacgttacggaaacgtttcggaagcgcctcggcttagattttcttcacggaaacgatgtctccaagcaaattcgaaagagagagaactgccaaaggggctgaacccttttcttctcacttcctcccctatttatagcaaaataggggaggtggttgccgcccaagcgagctcatctctcccaggcgagccaggttgcttcctccagaagcaatagccttctggaggaatattctggatgacccaagtgggctgtgtgctatatcacccccatttcactaagtcacccccatctgctgttttt

SEQ ID NO: 241356 - DNA, 391 bp, Glycine max
  unsure (1)..(391): unsure at all n locations
agcttgcatnaggaattgcgaaagctctacttcttattaggaccagtaccagacatctcaaacacacaaatcaaacgtaacaagacaattatagttgttgtttgaatacctcacccactcaagtgtatcacacaattatggcttttctctaatgaaacactcttgccttttaccactctaattccccttgagttcttaagcaattcaagagattatggccacaacaaagaacaattcaccaatatgtgtaaggtaaggctatagagacaaggaaaacgttaaccaagaaaaaggctaacaatgtttctaggcacaaatgaaggaaataaaattcagaatttatgaattcaagtaacaatccttcatgcaaccaatttattaccttaaagag

SEQ ID NO: 241357 - DNA, 409 bp, Glycine max
  unsure (1)..(409): unsure at all n locations
gcatgcaagcttgtagggttaaagtctcacgattgtcttgtttctatacaagacatcttgccaaacaaagtcaggttagccattaactcacttgtgcttttctttcatgccatatgtagcaaagtcgttgatcctgtcaagtttgatgagctggaaaatgaggccgcaattatactctgccagttggagatgcattttccccctgctttctttgacatcatgattcacttgattgtgcatctggtcagagaaatcaaatgttgttgtcttgtttttttgcggtggatgtacccggttgagtgatacatgcagatcttaanagggtatactgagaatctatatcgttcagaagcatctattgttgagaggtacattgcaaaagaagccattgaattttgcttacagtaca

SEQ ID NO: 241358 - DNA, 446 bp, Glycine max
  unsure (1)..(446): unsure at all n locations
agcttcatgatgaatcaagattgattcatagaagttntgatgataaaaaaggtgatgacaaaaagctcaaaagtcaagaacatttcatgataacaaagatgatgatctcaagaatcaaagaatgagttcaagattgaatcaagaacacttcaaggttcaattggaaatttgatttcaagaatcaagaatcaagtttcaagattcaagttccaagaatcaagatcaagattcaagaatcaagagaatacataatcaagataagtattaaaatgttttttcaaaaactaagtagcacatgaatttttctcaaaaccttttaccaaagagtttttactctctagtaatcaattaccagattattgtaatcgattaccaatagcaaaatggttntcanaaagctttcaactgaatntacaacattccaattgattcaaaatggtgtaatc

SEQ ID NO: 241359 - DNA, 431 bp, Glycine max
agcttgaaggtaaactagatgccttggttattctgttaacctaactggccatggataaaaaatctgcacctttcgccagactctgtggtttatgctcctctaccgaccaccatacagacctttgcccttctatgcaacaatctgaagcaattgaacaacctgaagtttatgctgaaaacatctacaatagacctcctcaacctcagcaacaaaatcagccacaacagaacaattatgacctctccagcaataggtacaatctcgggtggaggaatcatcccaaccttagatggtcgaatccttcacaatagcaacaacaacaacaacaaccttattttcaaaatgctactggcccaagcagaccatacgttcctccaccaatccagcaacaacaacaacaacaacaacaacagacccagaaatagcaaaca

SEQ ID NO: 241360 - DNA, 295 bp, Glycine max
tcaaccatgggtctcctatgtctcgtgcagctttttcattgactcacctttttcttgaaatggcgtctccaaacatctttctttcaccccactctgctgccgtgaaacctccataaccaacggactctattggtgaaaaagaatccaagcctatatgctccacattgagttacattatgaaaaatactcggttgaaaatgtgaaccatttcaaacatattatatatatctatatattttaaattaccccagacccacatattcaagtcttacttaaactaaacaatacttaaata

SEQ ID NO: 241361 - DNA, 445 bp, Glycine max
agcttatctttcaaatatcatttttgtttttttgcgaaaaaacatcagcttcacgccatccccaaaatgagcacaacatagtcaacaacatcaagcgtaagtgacttaaatattttccaattgcttagctttcgtttgacggcaatccgatatcatcagaataactatttaagaatgtttactttccatgtattattaaaactacacgtaattaataatcacttgaactatttttaagatttgatccaataattttgaaattaatcgctcacaaattaaaagttgtttgataaaatatttaaaaaattaaattcgtttaaaactaattgtctcactcgataagagaatacatgtataaaaataataaattaatttaatcaacctacatttatttcaaatataaagaaaatcatatttaaaagtatctaaaacttgtacattcaaa

SEQ ID NO: 241362 - DNA, 384 bp, Glycine max
aaaccttcttgtgtacacaatgaattggaacacatcgattgatagaatgaccgactcgactgataaatgcaaaacaaaaccttgcttttatagactcttcgcgtccggttaagaacaccatttacaacagttataacttttacaaaaacctaacaccaatttgaaaagtcaaaaaccttttgaagagttacatcttttgatttattcagaaacaaccactggtaatcgattaccaaattagtgtaatccattacacaaaggttctgtgtgaaaagatgtgactcttcacatttgaatttgaactttaacatctcaaggcactgcgaatcgattaccacaacatcgttatccacaacaatactcatatcatcgaaaatatctttt

SEQ ID NO: 241363 - DNA, 472 bp, Glycine max
  unsure (1)..(472): unsure at all n locations
agcttcttcatttatgtccttcaactcttgtattttctgcatctaagttgcttcatatgttgccttcaaagctccatacattaagtctctaatcattgtccctcctccaaaccattatttgaagttgttgtacaagtgtgcctaagacaaaatctatgttgacctttctctcctatcatttctctgacacaataatccaacccttaacacaaataattacacgtgttaaataacattaaactaattaaatatgtacatcattaaataacacacttgcaatttgaaaaaacatacctttattgatatgataaaaggaccaaattatttataaggatcccatatatcttgaaaaagtagtgtcaagaaccatctccttgtgtccttagtctcgatatctacaacaacaaagcaagaggtagattntcgtcattagcatctctagcaacaacaactaacattattccaccaaact

SEQ ID NO: 241364 - DNA, 282 bp, Glycine max
  unsure (1)..(282): unsure at all n locations
cttacatactcagcttcttggaaatgtattgcttgacagcagcttanatgtttatatggcctcggatgaaaatcaactatgctagagcaattccgaatttggagatatgccactgcgttaagaagctgctacttctgaactgtangccatggggattcccttccatactgggcatcccattggggtcagaccctccaatcacgtgcacgggagcctttgatcaccaatttgaaccaaactcactaatggaaccacaaagctatctatcgctgaccggtcatc

SEQ ID NO: 241365 - DNA, 475 bp, Glycine max
tgcaagcttcacaagcaagcttccatcagattccttagtgggtgatcatgaaccccaagaattttccattgtcgaccccaaagttgcactttttagggttgaggcacatgttatatttacaaatttctctgaatacttcctttaagtctgctacatgttgggccacactatgagacttaatgaccatgtgatccacataaacctcgacattttgacctatttgatgattgaagacctggtccatgagcctttggtatctggcttcatcattttttagtccaaaaggcatgaccctgtaacagaagttggcctttttagtgatgaaagtggttttttcttcatttgcgggtgtatcctgatttggttgtaccccgaataagtgtccaggaagctcaacaattgaaagcccgatgtgccatccacaagcttgtcgatgctaggcaggggttatgcatctttgggacacgcttttgtg

SEQ ID NO: 241366 - DNA, 299 bp, Glycine max
tgttgaagattatgataccattaaggtctctcaaacttatcatttgctttccggcctctaaatgcccttctatcattgctatacaaatacattctgggccttcatagatcgctctcaaatcgcttggcctatcttcatctgttgtatcatactgagtacaaagaattgttcatcaacattatacactggcttatgatgagtgggagccactccacgaacgatttcaatgatgtcatcatttgctttcacaagggatgcttcaatgactgactaatgtcacatcctgctactaattataa

SEQ ID NO: 241367 - DNA, 338 bp, Glycine max
  unsure (1)..(338): unsure at all n locations
cagagatctatatgatgatctgcagaagaacatagaccacaaactcttgcaacaggggcagatgcagatttctgattcatggcaagctgagttactaagttgaccaaggcatcaagttttccctcaagctttntaatttcagcagatgaagatgaatctgtggccacctcatggactcctctaaggacaatagcatcatttcttgcactgaattgttgggagttggaagccatcttctcaatcaaattcctagcctcaacaagagccatatcactaagagctncaccactggcaggatcaatcatactcctctctatgttgctaagtccttcatagaa

SEQ ID NO: 241368 - DNA, 409 bp, Glycine max
gattgcagctgtgttcctagaacacctgtggaattttgatttggttctttttttttatatcagattttgattttctatagttacgattcacaccaggctgtttaagtaaagcagtttagttctgggatagttgtatccccttctgctttttattgtaagggatgatggattttttactttttactaatatgaatatgaatgaatgaataacgttaaggtgaaatgtattggtagctatttgtattttttgtaaggctgtgatgagaaaaagcttattctttattatttttatcctaaagtaaaaccatatattctttgataagaaaaataaaaaacgtgaatggtgattggattgatgataaaataaaatcctgggtctattaattattaacttctatattagaaatct

SEQ ID NO: 241369 - DNA, 426 bp, Glycine max
  unsure (1)..(426): unsure at all n locations
agctttgatgcatctgccatcatgtgnttggattaaccgctatcaatgcaccaactttgcttgaaggagtccttcattcatagaatcatattntgatattggcacccaaattttcttgggtccttgaatgttagttttgactaaggatccttttggaacccataccatttttccaatgctactaccattctttttaatataacatgttgatgcctttcttaccacagtaaaagcatgttaagaaggtagaactagtcttttaagtggaggcaaagaatatttcatacatctttcgttgattttcaggattatatcctaatccatctttatcacaaacacatctttgtttgcccatataaatctaaatatttctacaacagaaatttgcaagacaaatttaatctacattctttttaattatccaca

SEQ ID NO: 241370 - DNA, 271 bp, Glycine max
ccctataaaatacctcaaacaccacgctacgcggaactcctgcttttttcttgaccacccacggcacccgcagatatgtctcgggggccatgacaactcggggacctaaggcggggagctactctccaatacctagcttgacccatcccgaccaaccgaagcctcatcggccactcgcaacccgcgatgaccttaccaggtcactcccgcgcccaaccgacaaaggaacacagacacactccaggacgctcggtggtggcaggcccccgga

SEQ ID NO: 241371 - DNA, 462 bp, Glycine max
agcttatgctgcacacatctacaatagatccttctcaacctcagcagcaaaaccagccacaacagaacaattatgacctctccagcaacaggtacaatcccgggtggaagaatcatcccaaccttagatggtcgagccctccacaacagcagcaacaacaacaaccttattttcaaaatgctgctggcccaagcagaccatacgttgctccaccaatccagcagtaacaacaacaacagcagccgcaatagccccaaaaacagcaaacagttgaggctcctccgcaacctctccttgaagaacttgtgaggaaaatgactatgcacaacatgtagtttcaacaagagaccagagcctccattcagatcttaactaatcagacgggacaattgcctacatagttacatcaacaaccgtcccagaaccgtgacagattaccttctcaatctgtccagaacccct

SEQ ID NO: 241372 - DNA, 346 bp, Glycine max
  unsure (1)..(346): unsure at all n locations
agctttggtgggacatttgactcgctttctcatctgacattcaccacagattctgccttcttttattttcagaatgggaatgcctctaacaccacctntgtcaatgattatcttcatgcctcttaagcgcacatgtccaaatctttgatgccatattttgacttcatcttctttggacgatagacatgtggaggagtaactggtttcttgaggtgtccataagtaacagttgtcctttgatctgctgcccttcattaaaagcttactcttctcatttgtcaccaagcattctgactttgtgaagtttacattgaatccttcataacacaactgactgatgctgatc

SEQ ID NO: 241373 - DNA, 383 bp, Glycine max
acttgtatacactgaaacttgtcacttataaacacttatatttcatcaattcgctcaaggtctctttgcctacaggattgagagccttacacaccatgtttgctttgttttacgaataatttcttggttctcgagaactttaacacgaacatctttacgctttatatggatttcagaggctttgatccattgacagatccccactagtcatctgctaataactttgggccttgacatgagggcgctactatgtagagagagtggggaccacactacgctttctggaccatatctatcaagaaccgtttatctcgctgtttctgctcacagctgaactttcccacttcaatcaaataacattaaccgcataagacaaaacgaat

SEQ ID NO: 241374 - DNA, 333 bp, Glycine max
ttctgggggacatcagactttctttcttctgcattcccaagatctgcttctttattttaaatcgggaatgcctctaacagcacctttgtcaatgatattcttcatgcgtcttatatgcacatgtcccaacctctgatgccatattttgacttcatcttctttggaggatagacatgtggaggagctactggtcttttgaggtgtccataagtaacagctcgcctttgatctgctgcccttcattagaacttcactcttctcatttgtcaccaagcattctgactttgtgaagttacattgaatccttcatcacacaactgactgatgctgatc

SEQ ID NO: 241375 - DNA, 374 bp, Glycine max
tcacaggctctagatttgggagccaatccaatccttgtgtccggactcttagccacttatgatagccgctgatgatcccattactgcttcccctaagctctctgtgctttctttacgccgcattccatgccttgcgaactccttggagtaccctcgcgttgtggtcactgaaacccccgtgcgaagaaaggcgtgatgctttcgcctgatggcactcctcttatggggtagccaagcggtcttatggcgaggacgggattataattaatacaaccccttgttcccatcaagggaacatttggacatccttcacatgaagatagaatcctgattcttccttccttctagcgagggaagccattaacagacgcccc

SEQ ID NO: 241376 - DNA, 450 bp, Glycine max
  unsure (1)..(450): unsure at all n locations
agcttgctatgcaagccttagaatcttcttctacaagtctttgtagcttgctctgcaagtctcacaattctatataaactacagtgtaactaaaaacagttgggaataataatattagaattcataagtcttacagattctgtctctctcttctctctctctttctcttttcgattatctctttctaagatggtatcaaagcctatcctaggtccattcaaagggccacccaccatgtgatcctacattttgaattaagatcctccttctcttcatgtgtgattgtcaacttccaatttaattcagccacttctatatgcaccatttcaagttcttgccttaagccatcaattgtcttttgaaattcattctccagttgtccattnttcttgtctttgcctttgaaaataatctgaattgaatccagtctgagctgatgaaaactccctt

SEQ ID NO: 241377 - DNA, 409 bp, Glycine max
ctacaacagatataaacacctctattaaagctgaacaatatatatcataacacaactattctaacatccatcataaatactaaatacacggactgcaaaaacttcaaaattaaccactgcttagctccaaattgcatcatcaatagcctgtggctctatgctcacgcgaaagaaagaaagaaatgaatcacacacaatgtgcatgaagatactacataggctccatcatgatgcccacctccaaacaaaaatatgttgataacagagtacaaattaaattccagctttgacaccgactaacagctggaaataccatattatgggctgcagggctatccacttaataaatagtcaaaaactgacacacccacatcgcacaaggccatatgagcacatattttctgatact

SEQ ID NO: 241378 - DNA, 454 bp, Glycine max
  unsure (1)..(454): unsure at all n locations
agcttgtatgcaattgggcccatcctcacgatgattctaaagggtccataaaaatgccttgaaagcttggattgacctgttccagacaccgtggtttgttgatacggcctcaacttgaccaggacccattcattcacttggaactcatgatctctacgatgtccatccgcgatttccttcatgcgagcctgagctttctgaagctttcgtcgaagtagggtaaacatggcctccctctgactgagcaactcatccattgtcgccaccgtagacgtgcccgtcaggtactgtggaaaacttggtggtttgcggccaaaagtgacctcaaacggcgtcagttctgtggctgagtgagtggatgtattgtatggccactccgcccacagaagaaaatgcncccatacgcttggccggcgatgcatgaacgctcgtaaatattgctcgatgatcccta

SEQ ID NO: 241379 - DNA, 392 bp, Glycine max
acactatgaacactcacttttcgaaagagattcacccgggaaaagtctctttaaattctcaccctctaatccgcctaatcatgtgtaaattttttcctctgactaaacttcccttaatacacgcttaaaccacatgggctctaacaattcttggttacctggcaaaatatgttttgggaattttaaggtaagctataatgtatgatgcataatgaataatgaatgccttgaaccgttgcacataattttacaaaaaatgcctactttaacacgtggtatgtttcttatttaacctcacatttgaaaaatgtaacacagttattggttccatggcgtgggtcactcatataaatatctacctattaaatgatcctccaatttcctccttcttg

SEQ ID NO: 241380 - DNA, 461 bp, Glycine max
  unsure (1)..(461): unsure at all n locations
ttaagtcacctgcggcatgcaagctnntgttcttttataaaatgagaagttctgatctcatcacgttatctaaaaaaccttggggtggatccaagtgctccgatcattcatttgcatattcatgttntggtggcatactcaccgttgtttatttctttaggaatttcatcataactaagaaagcacaaaggcacccctataacactcgatccagaaaaatggataatgaagagggcgtgcaggaacagatgaaggccgatctatcggccttaaaagatcaaatggcttccatctcggaggtcatgctaaaactccagaaaactatagaggataaagccacgacaaccacctccagtacagttagggaagcggagccggtgctacagcccgccttaaatctgggtcgagacagaaacacggcagttgttggtcgaaggtatagtccacaagcttacccctat

SEQ ID NO: 241381 - DNA, 320 bp, Glycine max
cttcccggcactccagatcacctgcaactaatgaacccaaccggctcccgaacaaaattcaacccgaggcccttccgtaatgcttccgcgggtgatttcacgaacactttccaccctccttcgacattcttcattcgctcactgtcgttcttcgcgcttcaacccgtaagttcccgtaaatcgaacctttcaattcattctatgcacccttggtgcgccccatctgtctcgcgtactcttattctccgtctatctaccttccgtactcccttctgacctgctctacccatttacctaagctatttctgaaattctgaacc

SEQ ID NO: 241382 - DNA, 361 bp, Glycine max
  unsure (1)..(361): unsure at all n locations
gcaagcttcgctctctccatcagagacgaccacttgttagacgaggagagcaagngcgcttaccttgtggtaactctctgcccttgtcttgtttgcttcgctcttctcttaattgcacttctcatcattctcgttgtcaaattccatttctttagccacacccctctccactccttactctacaaacaaaactgctgattccccatctcgccactttttccgccttaccctcttccccttttcatgaaaagtttccgtttttgaatagtcctaggacatttgctagtaatgctgattctggggttgacaatgatgatgatgatgatgatggtggtgatggtgataatggctatgatggtag

SEQ ID NO: 241383 - DNA, 441 bp, Glycine max
agcttctttggcaagttgttgttccctcattccgatctttcttcttctggcgatggattcatggcaggctacttactggtgagaagctatagaagcagggcatttatgatgttcctatgggtcctcattgtggattccaagctaaaacttctgagaatttgtttctttcttgtccctttgtttgaaatttgtaggtgagaaggtcagacatattcatatttggtaattttctattttagggtttgttcctttgacatatttacctaattgatgatatatttgaaataaatggaatatactacaagcgggttgaatattgtgtataactaaacttgaaaactctttctcaaagattagaaaactaggtttgctctatattgtccaactctgaaaatgacatttcacacaagctgaattttaacatatatcgtccaacaactt

SEQ ID NO: 241384 - DNA, 385 bp, Glycine max
  unsure (1)..(385): unsure at all n locations
ctggagtccagattcgctncgacaatctactatgatccccatatggcactattcacacttcaacaacgaggttcactgaatgattacctcactgagtttgaacgtttaacgaatcggattgtcggtctgtcctccacggtgcttctaagctgctttatttccggcctttacccacaccttcgtcgtgaagtccgggctttgcaaactatgttcatatcacaagtcgtggcgcttgcccagttgtacgaagaaaagattcacgactctcatcgtcattcccgcacattctataccccttttggtccgcactgtcaccgtcaccactcaccgcggtttcttccatcgttttcaccccggtacgctctttacttaaacccctttcaac

SEQ ID NO: 241385 - DNA, 463 bp, Glycine max
agctttgagcaaattcaaacgacaataaccttttactcggatgtctgattgagtcccgtaatatatcgacacgctcgaaattgaatgttgaagctctgagcaaattcaaacgacaataactttttactcggatgtctgattgagtcccgtaacatatcgagacgctcgaaattgaatgttgaagctctcagccaattcaaacgacaataactttttactcggatgtctgattgagtcccgtcatatatcgagacgctcgaaattgaatgttgaagctctgagccaactcaaacgacaataactttttactcggatgtctgattgagtcccgtaacatatcgagacgctcgaaattgaatgttgaagctctcagccaattcaaacgacaataaatctttactcggatgcctgattgagtcccgtatatatcgagacgctcgaaattgaatggtgaagctctgag

SEQ ID NO: 241386 - DNA, 116 bp, Glycine max
  unsure (1)..(116): unsure at all n locations
tccacattcaatctccgagcatatntgatatgtcagcgggactcgatttantacatnncgacnaatacagttcactggccttccgcatttcgctcatgagcattacacatctcaat

SEQ ID NO: 241387 - DNA, 402 bp, Glycine max
  unsure (1)..(402): unsure at all n locations
agctttntggaggggagcaataacgtgcttcgttgatgtccncaatatgccgatgacacgatatttttcggagaatcatctatggcaaatgtcataactgtgaaggttattctcacgagttttgagctggtttctggattgagaatcaattttgctaaaagcaaatctggagttgttggtcaatctgaagagaggtgtctccatgctgcaaactatcttaactgcgctttggttcaatttcctctatgtctatttangaattccgattgttgtcaactccaaaacaagggtggtgtgggatcctgcaattaggaactttgaacataggctgaatacgtggaataagatatacatatccatggctgagagactcactcttattaaagctgtcttaacagcacc

SEQ ID NO: 241388 - DNA, 355 bp, Glycine max
agaaaatattttactcaacccatatttgggaggcatgacgacactgagatcttgaccaaagcattgaattactcgagtaacataataataagtatggtttttacaagaatttgtcgcataattaaataattaatactcaactagatattgacgcgtgcaatggataaattaacaaatatgccacatcgtatgattacaactagaattatataaataactaaatcttgtctcgcaaatttatagaaatttgagtgaaaaaacgtgctgctacaattggttactgtctttaaaaagggttgccaattatagtgggcgttgtgttggtgatacattgcaatgatatgaaagaataaag

SEQ ID NO: 241389 - DNA, 453 bp, Glycine max
  unsure (1)..(453): unsure at all n locations
agcttgatagcacgcagagactaacgttatcttctgcgcccttcgtcaatcgcggccgacaagcctgctgacacccggagattacgtcatctttcgcgctcacaagatctgtcatactgacatttgagtcacgttgacgggcggaaatacccgagtgtgtatccgtataaacattcttttttgctgtttgtaagacgaaaagcctgatagcacgcacagactaccatcgtcttttacgcccttcgtcaatcgcggccgacaagcccgttgacacgcggagatatacgtcatcttgcgcgctcataagatctgtcatactgacattcgagtcacgctgacggtcggaaatacccgagcggctatccgtacaaacattcttnttggcttgtctgacgacgaanagcctgatcgccgcagagactaaatcgcttttgcgccatcgtcatcgcggcg

SEQ ID NO: 241390 - DNA, 317 bp, Glycine max
atataaactcacagctttcgtcttacagacagcaaaaagaatgtctatactgttatatactcgcgcatttcccgccatcaacatgactcaaatgtcactatgacagatcttgtgggcgcggaacatgacgctctatcttcgggtgtcaacgggcttgtccgccaccattgaccaacggcgtccaaccaccatgctactctctacgtgctatcaagcttttcgtcctaccgaccgcccaaaagaatgtttataccgataaccacttgcggatttccgctcgtcactgcgacacacatgtgaatatgacagatcttgtg

SEQ ID NO: 241391 - DNA, 172 bp, Glycine max
cgaccccacaccaccaacaagagcgcataccagaaccatcacaagtacccccaaggggcccccgaagaacgcaaccccccacgagccggaccaacccgccacaacaccgcaacgcacccaccaacgccagacacaggcggccaacggtgacccaaaacccccaccgcgccag

SEQ ID NO: 241392 - DNA, 433 bp, Glycine max
  unsure (1)..(433): unsure at all n locations
agcttccacaacatccaagcaaaacaacatttaaacagcacagttatcacagtcaagcaaaacagagcaaaggcagaaaactctgccaaaacaccaaccaaatcacagctnttctcacttaaagaccctagtaacaattccttcgatccaattcgttaaccggtggatcgactccaaaattttactggaagtctatagtacataagcctacattttgaccgttgggatctactagcaaacattcagaactcattctgcactactctttccacagccaaccacacacaagcatttttctgcacaaagccaaaatcctgctgcacctattttgacagcaaaattctgcataagtgcagatttcgaanatcacactttccctcatccaatcttgcccaaatcaattcctacaagttccacatcatgtatcaatcat

SEQ ID NO: 241393 - DNA, 378 bp, Glycine max
cttcctataactaagctcaactccttgagaagcttccttgagaaacttttttgagaaactaccttgagaagattccttaagaaattagaacatagctacacacccctctaatagctaagctcacctccttgagatgagaagctagagcttaactacacacaacccctataatacctaaactcaccccatgccaaaatacatgaaaatacaaaaaagtccctactacaaagactactcaaaatgctctgaaatataaggctaacaccctatactattagaatgaccaaaatacaaggtccacaagaagacaaacatattctaatatcttaaagagtggacctaccctgacccatggcctaaaatctacctgaagttatg

SEQ ID NO: 241394 - DNA, 473 bp, Glycine max
  unsure (1)..(473): unsure at all n locations
ggatccttgagtcacctgcggcatgcaagcttggataaggcttgacttattaaggcataagtggtaacgataaatacttgtaacttgttgaagttgatggaacttggtggtttgtcaataactaaatgtagtcttggatggttgagacaaatcagtataaatttcctgtttcttattccttttatttcctcttctgttatttgaattaacctaggggttgaatgtgatatttgcttttgaaaactctatttgatttacaaagattttaaatcattgtcttattcatctagcaaaaatttgatacctattttcttaaatcttacttcatcagataataactttgttgttntcgaaaagattttaaatttaataaaaatcacaatttaatctctcatgctgtaatatttatctctacaagttaatttacctttagatcaacctacacgtcacaagaataaaaatgaccaaaatat

SEQ ID NO: 241395 - DNA, 372 bp, Glycine max
  unsure (1)..(372): unsure at all n locations
actgcagatgatgctttattggatgaaaagaaagagataagtggggaacacnaaactgtacgacattcacaaggagagaagtggaactttgacgtgtgtctcataagactttcattcctccaagctactaccagtgttacacatgcttctatttatagactacgcatcttccttgacaagctttcttgagaaaaccttcctgagaagcttctttgagaaaacatccttgaaaagctagaggttacttacacacactcctattataactaagctcatctccttgagaagctctcttgagaacattcctaaagaagctagagcttatctacccacacctccttcatagctaagcttacctccttgagatgaaaa

SEQ ID NO: 241396 - DNA, 475 bp, Glycine max
  unsure (1)..(475): unsure at all n locations
ggatctctgagtcacctgcggcattgcagcttctagtggtcaggcttatgagccaagtggatcatctagtcctttntgaagtaacctcagcagggttttctgaatgtagcggggacgttgggggtgttgccatcacgctgtggaaaataacaaaattgagttaagacaaattcagttatgtaatagggtgcatgaagttgaaaaaattcagttatgatcagtacgatttgcatatacatcatcctcttgttgttcatcagtagttgaaggcaagtctttggagaaaggtggcatgtttggtgcatcaagtgttgaaccatcaatatggtgaccgatagaaattgttctcccttgcaaaaccactgcccatctagagtcatagggatcttctacataaaacacttgtcaagcttgcgctgccattatgaatgggttgtccttgaacctaccttttcaaggtctactaaagtaaatc

SEQ ID NO: 241397 - DNA, 368 bp, Glycine max
cgatcaagttgttcacaagtcaatctcgagtaattcaccaataattggactcatttactccactatttgttattatttttgttgaaataaacaatcatgaatatggttgaacgcatgatagtcactaccctaaatgatttatctgcgatatctcacgcatactatctataacacaactggaatgtcgtatgagaattaacgttatataacttgtacagataaaatcaccccaagaataaagagtgacagagattaatacaagtaaagagaagaaaaaaaaattgacacctaaatacctttgaaatcacgtccatcacctcaattttttttataatcaattatgcgtctataattgtcattcctcctct

SEQ ID NO: 241398 - DNA, 452 bp, Glycine max
  unsure (1)..(452): unsure at all n locations
agtcacctgcggcatgcaagcttctagccaaatggacttaccttgaattatttcctttgatagcccttttgagccttgtttccctttccttgtnttgaatctcactacaagccttaagtgaaaaaccatgatatcaccatatccttaaggaattttggagctttggaattgttttgggaataagtgtggggggggtttttgtttcattggataacttgttttgttggctatacttcatgatgtattttgggccatacttgattgtcataccctaatttcgtccggggattattacttgattacatgcaatctttggttagccgctttgagatacttggcgtccttttttgcacaataaatgaagtcccgagacgtctcataaatctaaaggaagcaggcttgcgcgatccgtgaaaattttgtaatgtggcggaagtcgaaaagagggtatt

SEQ ID NO: 241399 - DNA, 416 bp, Glycine max
  unsure (1)..(416): unsure at all n locations
tgcgcgctngctcctatccatatggagacctcccaagctactgcttcaaccccaactcgcttggccggcaatgcccactttggtaccggttccaacgtgataatgaactttcccccgacgacaacatttaccctgatcccaatgacatatgatgacctcttggcatccctcattgccaaccaaatggttgtgatatctcccggaaagatctactacccccctttctcaaagcggtacaatcctgacgcaacctgcgtataccttgcgaaaacctcgggccactccaccaaacagtgcctggcctctaaacataaggtccaaagttcgatataagcccgatggctgacgcttcaagacgaccactccaaccgtaaaaacaaactccgttgcccatcatggacggggagccgataatg

SEQ ID NO: 241400 - DNA, 440 bp, Glycine max
agcttcctcggggccatttcctgcgagaattactattttaagttagttttacaaggtaatgcttatcttaacgcacaaaatgtcatgctaatccctctgatattacaacgaactcacgtaatctatttatgcacacgcgtatgtgtggaatatcctactatttatatcaacatagaggccatccaacagattctaattgtcatacatatatatgcatgtgaaaagaacacacattctcacgctcaaggcattgcgtcaaagttcacacttaattatatcctaaacatttactattacaaactacctacacatatttgaaatatatatcatacaaaattgattgtttctctgtcatttatttatatgcatactggaaagctaattacatcctgcacacacttgcattcaaaaaggaatctcacgctatcatacattcattt

SEQ ID NO: 241401 - DNA, 405 bp, Glycine max
tcttaagctcacgctacacacttctttctgaggctatgtctacatcttaaagccacaaaacctcggaatcaacacagttataacaacggcgcctccacatataagcatcatacgtttaaatactctaagccaaatctactaacaagaaacaatcacaccataatctacaataactgataatgtcaatcaccacaaaatatccaagaccgaaatttataacctacaagataaataagcaaagtactcagcttaataacgtaaattctaagaaactaaaagccaaaatacacgggttataaaagataaataatcacaatctaaaagctaagacgactgacgaggcggtggaagatcgaaactctgacgaatgtattcgacattttcttctagctgtgtcagacgaat

SEQ ID NO: 241402 - DNA, 456 bp, Glycine max
  unsure (1)..(456): unsure at all n locations
ctttgcttggaagaccctcatgctctctatctctatgtaggntggaaattctcatcctaggtcaaggttatggaaaaaagtcgatgtttggctcaaacaacttgcaaatggcgagacataatgtatgtcaggataaatatctggccaatggctcacaacgaagggaatgcctaaatcatttccatgaaatgcatattatgatagttagaaattcatgtaaaattaaccatagcacatatccatgtagacactcaaatataaggctttgggccacacaaacactaaggcttagggntcgtttccacattcaggccaaaccaatgtttcaatgattgctctttctatcatgtcatacaaacatctgagtccattttggcatttgggaaagtctctcgttgtttcactctctaggtgcacatttatttttctcaagaanatcctttcgtgttttgatct

SEQ ID NO: 241403 - DNA, 382 bp, Glycine max
tatcatgtccactcctcactaagcaacatggatcatcttcaacgtctaacgccttaaaatgatcaccttttacgtaaaacagaatcactcgactccaaagaactacttacgtctcacctcctcatcgcacttgacgaactcctatgagcacacggaaacacccttgtcgaccaccaaaagagaaaaaactcttaccacggtatcccggatttaaagacctataacggaccgtacaaatcaaagtcatgtttgcacattcgattaaaggctcgcgtcccttgtgacggacctgtggcgtgctcacacctttcccctacgtaaatacaactctcgaacctttcacttacaagttcgtacatcgcctcttttccggtttttctga

SEQ ID NO: 241404 - DNA, 395 bp, Glycine max
  unsure (1)..(395): unsure at all n locations
agctngacataatacctagagatggagctttatctctaatctacaaccctctcctataattagtgtctctcaagaaataaaacataacaagtgcaagatctgaaagtgatgtgagtgaggtaaatatgtcatatctgacccaaacaataataatgataaaattatatgaagtagagactaatgaagcattgtcataccgatccgaactatttccgcaacaaaaaattgggcaaaaagccataacctctccacccccaccgtctctgcaactgagccttttcaatcgaccagacaaaaatgaaaaataaattgaaactggaagttgacccacccacccaaatcaaacgctccactgagagacccgtactttgaatattctgtactagcgacaaaac

SEQ ID NO: 241405 - DNA, 427 bp, Glycine max
agcttgaaggctaccaacagaaggtggattatactgtggataacagctacaagttctatatggaagctcagaaatgacatgatctttaataatcagccttttgtcatctcgaagttggttgataatgcaaactttctcacttggtcctggctgaaagggtgggaaaaggattttaatgttcctttccaccaatggttctcaactatgtctatggcgtttacctagtgtgtggtatgtagggttgggctttgtggctatcatatctaagatcaattctaattgattaatattacataaaaattgaattattttacaatgattacttttgggcacactttcttacaatattaaatttatacaaaggttggtttatggagcaaacgctgagggcagcattgctattgtgttgtaacacttatttcatatg

SEQ ID NO: 241406 - DNA, 467 bp, Glycine max
  unsure (1)..(467): unsure at all n locations
agctntgtccataaaaatcaccttatttttcatngtgaggtccaacgccttaaatggtcctctttccttttattggttaaacgtggactttcgaaagcctaaagtcaacacataactttgtcactacttaaaaaaaaaaaccaagagatcattaatggtccaatgccttaatgttttgtctcctttcaaaaaaatcaaaagatcgtttaaatggtccaacgccttaaacgactttttgtttggtcacaatatatcttgcaaaaaaaagataaaaacaacttaaccaacatttagttctcgaagaattacgtaggtctgatttccttatcacaattgaggaattacgtaggtctgataaaaacaatcctctttccggtttttccaacgtgttcctcgaataaacgttggtggtgactccgcgcattntcctttctnggaagacgcacccatgagtctcacgtcgccct

SEQ ID NO: 241407 - DNA, 437 bp, Glycine max
ctcacactgctctacactacattgctgtttgtatttatgggatgacgttatatgccacttttgctttaacagtactgccccactggtaaaattaactcttcaaatgtttgccttcacacgaatggcccccaggaagcttgtctcatagaggtccaacaaggaccatgcggcccaatgaactacttccgctcctgagtaccacaagtcaccgctttatgagcgctgttcaccagcagcgctctcaatccatcaagggatggtcgtttcttcgggagcgactcgtccatctcacggacgacgagtatactgattctcaggaggaaatatggcgccggcagcgggcaccactggttactcctatgaccaagcttgattcacaaattatccttgagttttatgccaatgcttggccaacagaggagggcctgcgtgacatg

SEQ ID NO: 241408 - DNA, 254 bp, Glycine max
  unsure (1)..(254): unsure at all n locations
aactttgacttgtgtcccacaaaactctcattcatcaaagatacaacaagtgttacacatgcttctatttatagactaagtagctcccttgagaagaattcttgagaaaacttccttgagaagcttctctgagacaacctccttgagaagctagagcttacctcacacactcctctnaatactaacctcacctccttgagaaacttccttagaaaatccctaaagaagctagagcttagccacacatacctttc

SEQ ID NO: 241409 - DNA, 344 bp, Glycine max
ctacctattggtgtcacttttacttactccgcatcttacagcctctccctaaaaggtagcttaaattctgttgaaatatcactcgtccatgttctcttaacaatgcttcatttcagaacttaattcaggctaacattaactgcctgtgctcgatacttggattcatccctttttattcttaaatacttgacgatcccatgcgcgtttccgcaaaccgaatttcccttgaatatatttgaacgaagaaaaagtgccacaaaaagtaactgttggggaaattcaaccactactgtgggagacactgtctttctctttccatttctttcttaaatttcttgtttctc

SEQ ID NO: 241410 - DNA, 379 bp, Glycine max
aagtcttcacatataatgatcagacagcggaaatctctccgactacccatcatatctcccaaaaccccatacccccgaaaattacaggagaacaaagtccacccccacctgaattttctaagtcccactcgtagccacgcactttacgacccccaaaatgccctcctttctcgattcggggcacaaatgatggccaaaggttgaaactctgcttggagcttcaatggagaatgaagaagaacaaaatggcctcgtgagggagagagagagatgtctgaaaagtgtgggggctgagtgaagagagagaaaagctttttgggtttaaataaaagggggttccccttctctattattctatttaagccatggcacatgtctc

SEQ ID NO: 241411 - DNA, 418 bp, Glycine max
  unsure (1)..(418): unsure at all n locations
agcttctatggaggctggatcttgagctttttgaggtccttcaatggtgattctcagccatggagttgtagcagaagataaaggagaagtggtgagaggaggtgccatctactagagaataagccatggaaggagaagcttcaccaccaagagagtgccttagataagaagcttagagagaaaacttcaatggagaaaaagaatgagagagagagggcacgaaattgaaggagaaaaagaggaagagaagttgaactttgaagtgtgtctcacaagtttcacattcatcaaagttaccacaagtgttacatatgcttctatntatagcctaggtagcttccttgagaatcttccttgggaagcaagtgttacacccttccaatagctaagctcacccccatgggaacacacacccctc

SEQ ID NO: 241412 - DNA, 422 bp, Glycine max
acactatacaaactcaagctttacacgccttactgaactcagctacgatgatgacttatattctgagctccaatactaaatgtcgcctcctaagctacactggacatccgaattctaacacattcttgcacttggtataatggtggatactttagctcattaaacttccaccacattaagatatccaaacctgaacctcttgggcaaacttcctcctcctacgtaatgatccaacctcattttcatagttgacgttcttgctcttttatctctttcaatcgatctatcataatcacacacattactcttttcatcactaaccacatttggtgattcacaaagaactatccgaacttttgacgctctttggcttgatattcctgacaccacatataacacaagttgccacgcaatatgctaca

SEQ ID NO: 241413 - DNA, 459 bp, Glycine max
  unsure (1)..(459): unsure at all n locations
agctntctaaaattcatactctgagtagtgaacagttctcttggctctctcccctggctctgtgcaaatcaggcttaaaaagggcttcttgatctcgacatcgtgcttagcgccattctcgcacttagcgcgagtaagtaaatttgagcttagcaccaatctcgcgctaagcctggaaagcgatagatgactcacttagtgagctgataacgtgctaagcgtgtgcttgcgtagcaaatgcctttccagattcccctttactcgctaagcgtattggtgctgggcttagtcgttgatgcgtgctaagcgcattaagctcgcttaacgcgatgactctcttggcacttcatcaaaatagnctcatttttcctgaaattaaagaatatttaacattaattccatgtaaagaggctnttactgagcagagatcacaacaaagaaatttatttactatcctac

SEQ ID NO: 241414 - DNA, 453 bp, Glycine max
cagatattgctgctacctgaaacaagaatgacatccatatccatattacacacagtccaaagttgtataattattttatccacaagagtattcaaatttgagggcagaaatgaataggatctgcatttgcatttctaaaaagaaatacttgaaaggagtacgcatttgaattctaataatgcacatttacttctaaggagaaacataattccatccatcaattaatagagaaatgctagcaacttacatatttctattattggatgaaacacaaatggcatgagctaaatgatgtgtctactccctatttagtaagttccactcccagtttaatgggttccacttgtatttcacccattaatccattaaaataaagagggtattggaaagagtgtgatggagtgtgttgctagttgctacttgctagcatttctcaaactaatagtgtaatta

SEQ ID NO: 241415 - DNA, 461 bp, Glycine max
  unsure (1)..(461): unsure at all n locations
tcttcttcacatatggggcatgcatgatgacccttgacacacacaccactcagatttccatatgcgggaaagtcattaatggtacagaaaagcattgcatgcattncaaaagtctccttgtgaaatccatcaaacactaaaaccccctcatcccataancttctcaggtcttcaatcaacagacttagataaacatcaatgtcatttcctgactgtcttgggcccgatatcatcatagacaacatcatgtattttcgcttcatacacaacctangaggcaaactgtaaattactagtagaactggccataaactgtgttgagtgcttaaattgccatacggattcattccatcactggctagtccaagcctaagatctcttgcctctttgccgaantccgaatacaaaccatcaatcttcttccagtgngagcaatcagctggatgatggaccattccatc

SEQ ID NO: 241416 - DNA, 469 bp, Glycine max
  unsure (1)..(469): unsure at all n locations
agcttctatataagctgaaccatcttatcaataaacacatgttgangtttattcacaanattagagtgtatctctcttatcttagtgagagtgattctcctaaattcttgagtgattcaagaacaccctggctgtatcaaaggactttcacaacctttgtgtgttgccctcgctggaaagagtgattctttccttcctttcatcttcacccttgttctttcaaaccacaattccagaaaatccacctctgcccagaattatctcgtggccataactcccgttttacgcactcaaattaagtgattcttgagcctaaattgaatttcaaaacgagacctctcacctcgttttggaatcacctcattcggagccctgtagcttcagctattgccatctctatatttctgtccagccaccacttaacctacgtgttaccatcccattcatccattttatgccaagaaccacc

SEQ ID NO: 241417 - DNA, 321 bp, Glycine max
  unsure (1)..(321): unsure at all n locations
aaactcaagcatgtangattatggcgcacccatcacatgtcgcattacgtggtctgtatgccattcgccacaacaacnttctcacatccacaatgcgctcctacacccaccatctcctgttgtccactctccaattgagcccacgtactccctacgtacctcatatcctacttctcttccaaaccgtgtcctcatcaattctaccaagctctctcaacatccaagttatacaacattcatacagcccaagctatcatagtcaagcaatacagggcaaacgcacaacactctgctcaaaacaccaaccaaaatcatagcttt

SEQ ID NO: 241418 - DNA, 474 bp, Glycine max
  unsure (1)..(474): unsure at all n locations
gcaagctgttggattatggggtatccatcatatgtggtactaggtggcgatcgggcgatggcgcaaatcaactcttccactntcacaaatcaaacatgaacccaccatccccagttgcccaccttcaactgagctcacgtactcccacgtagcccttatcctcgttcctctcagcaccgggtccccatcaacccctacaagctttcacaatatccaagaaattcaatttccaaacatcatgaactaccctaaaccaagaaaacagggcagaggcagaaaactctgcccaaaacatattcacatattacagctttccttactcaaatactccagtaacattctcttcattccgatttgttaaccgttggatcgacttgaaaatcttactggaggttcctagtacataaatctacattctgaccgttgggatctgctagaaaatatccagaacccaatatgtactacctctcccat

SEQ ID NO: 241419 - DNA, 303 bp, Glycine max
  unsure (1)..(303): unsure at all n locations
ctctattctcatctagaaatncatgaatgtactataaactttgttgtttatgacaccaacacggtcactgaccaatccctatttcatgatctaaccaaattgcccacacaatgtgtgccttttgacgagtccacgattcatgaatggcaattccattcctctgcggcatgatgcacccccgttgggttttaccaaccaaaccgatatgacccgaacacttcttgtagctacattggcttttcaaagccacaccatacatacgctacacgtcgcattttgctccctataacctcaaactttgcc

SEQ ID NO: 241420 - DNA, 449 bp, Glycine max
  unsure (1)..(449): unsure at all n locations
agcttgattgtggtcggtgttgatgttactacagttgaaggatgtgctttgctgtttcaattactaaagtttgtagcgtgtaattcaaacattacgaataaattacaagaaantttttttcttacctaggagtgggattttcttgaagaatatttgcgtttgatttgaccctgttattcaaatctgattgtgtaattggttttcgttttgttcatcaggtcacaaaagatgtttcacttctgtcaagatggatggcgattgacctctacattcgggaagtggatggcctaagatttgagctatccatgaaccagtgcagtgataagttgtcagaactggcacatgaaattctaaaaggtttgcctgtttacgtttgtgtttgttgatatcttccaaatgctaatgggcatagcagtcatctctgtttatatcatgtgacctctggatac

SEQ ID NO: 241421 - DNA, 366 bp, Glycine max
tttaccacacgtatgcaactattgtcaatctcatatcatttcattggacaagattcgacacactggattggaggtcaaagtcgacacgccgatgtctaccgaaacaacagacaagtaaaagagcaaaacacaggcgtctctctgatcaagcttgagcttattacctacacgcccacatacaagaaaactactgcttcacgaatacatttctctacaaggagatattcctccgtccaaagaaggacaattgcctttgatcgccccaagaagcaatgcctaaaacaagaccacagagggattaaatgaatgacccaagcctcaatgatacatagatagagcataatatcatcattccaaatattacac

SEQ ID NO: 241422 - DNA, 423 bp, Glycine max
agtcttacaagaaggcgaacgtgttcttcttctttcagtcttcaaagttggtaagctcgtttcatctcttttatactatctgtttaattgttcgtatactagataatgaattagttagtttagatattataaaattcgtatagagttttacgtatagtaaattagtaccgtattagttctctatcttaccttacttttagttttaaatgttaaattaggtttattttgataatttaagtcttgcacggtaggtctatttctagttatagctacaaatgatattacgtttagtcttacgtttactcttagttttaattctaaatgatataagttatgtacgttagcgttagtttagctaaatatatctaaatcttctatgataggttagctatatgatacattgcatacatttgcatatatatt

SEQ ID NO: 241423 - DNA, 417 bp, Glycine max
gtgactcgaattttactttatccatatctcacacatttgttgaactaatataaaaccatcgctactattagatatcataataaacaacaaatggcctttcattacactttatgatccgatgaccttgttaccttataccgttataacctttacggcatatgcaagtaccatctacggcaatacactcactcttacttttattgctatttacaccattccatgaaaagcaataaacatagtgaaaacttgactataatgcttatgccactattgcaaaaactcaaataaacacaatttcttacaccactcataccgtcaacatatcatcactctgacctccttgagctaactattaccgtgagccacttatggatcataccttaccgactatcaatgataaacccagatacattttcc

SEQ ID NO: 241424 - DNA, 397 bp, Glycine max
  unsure (1)..(397): unsure at all n locations
agctcttactcagtgattccatcagctactattcctttcacgagaaaatcatccctcttcagatttaccatgtctcacggacatgcatttccgtttgctgggaaactggcccgctttacagtcccgaatgaccgagaaaacgtggtcccacaaccacatggtgacgccgaacaaacagaaacctgggaatcataggtgatgatcccttttgcagtggaaaggacagttacgctttctgtggacctctgccacaccaagagtcactctccagttcaatgaacaaagtatttccctgctactcaactcgcgaacctatgattttngatagtgagccttacaactccaattgtttacgcaaacgccaccaactttttcgatccgcccgtcaatacccata

SEQ ID NO: 241425 - DNA, 317 bp, Glycine max
gaagactgacaccccaataggttccaacgcgactcaagtgtttgctgatcaaccatcacgactaaacaccttgggtttgaacgctccccacactcaccctcgaggcactgagatccttatagtccttgagggtactctctatgctggattcgtgacttccaatcaagatggacatcacctcttcaacaaagtgctgaacaagggtgatcgtgtctgtgctcccaattgcgctcactgatatctgactcaatgcgcgatatggcaatgttgccgccattgttggtcttatcagttaaacgcacgaggcattactattg

SEQ ID NO: 241426 - DNA, 142 bp, Glycine max
atttgctccttgtattatgtgccatttcctcgtttaatacactactctctcactgaaaacgttttgaactgggaaaaatcactctaaccttcaagcttgtggtgatgggaatattcatcacggtccatttccttctgcgatc

SEQ ID NO: 241427 - DNA, 346 bp, Glycine max
accttaaaactcagcttgaatccatttaagaaatcacagacacatcacatggcctgagttcaaatcaaatacggtcactaccagtaccacctatgtttcataaaaacaagagagccacactagaattgacttcctggaagacaagcctgacctcctcattggaaattacactgatggaaacctggtctgatccttaatggcttctaaacctcgagcaactcgagttgttttatggcttgatcatgctactatggccataacagtataaaacacaccgcaactagctagggtgtttttggattggcaattctctaaatgttcgtcaatgctccctaacttgtatttg

SEQ ID NO: 241428 - DNA, 449 bp, Glycine max
  unsure (1)..(449): unsure at all n locations
gaatgctctattcaatggagttgacaagaatatcttcagactgatcaacacttgcacagtggccaaagatgcatgggagatcctgaaaatcactcatgaaggaacctccaaagtgaagatgtccagattgcaactgttggctacaaaattcgaaaatctgaagatgaaggaggaagaatgtattcatgacttccacatgaacattcttgaaattgccaatgcttgcactgccttgggagagaagatgacagatgaaaagctggtgagaaagatcctcagatccttgcctaagagattngacatgaaagtcactacaatagaggaggcccaagacatttgcaacatgagagtagatgaactcattggttctcttcaaacctttgagctatgactctcggatagggctgaaaagaagagtaaaatctggctctcatgtccaatgatgaacg

SEQ ID NO: 241429 - DNA, 328 bp, Glycine max
atattttctagcctcgggtttcctgtcggactcgggaagtggtccatactcatttggtaatgaaagggttaggagtactaatctgatagatgggtctactccccaaaagggctggaattcgtcggacatgcatctccactgatgatataataataaagaccggttctaggtcggatcatggaacagagtgaaggacggaatgtgtctataatcatagatgatgcatttgcttgggaattatggagtgctctgttcgctcgggttctcttgttccttctcaagatgggtgtccttctctatttatagaatcccaatccactctactgcc

SEQ ID NO: 241430 - DNA, 438 bp, Glycine max
  unsure (1)..(438): unsure at all n locations
gcttctcgatatgctatgcgtctgaatcggacatgcgagtgaanaattatgaccattttaatttcccgagagcttccgttgttcaatttctagcatctcgatacgctatgtgcctgaatcggacatgcgagtgaaaacttatgaccatttgaatttctcgagagcttccggtgttaatttctagcgtctcgatacgctatgcgcctacatcgaacatgcgagtgaaaagttaataccattttaatctctcgagagattccgttagtcaatttcgagcgtctcgatatgttatgcgcctgattcggacatgcgcataaaaagctatgactattttaacttcctcgggagcatccgctgatcaatttctagcgtntcgatactctatgcgcctgaatcggacatgcgagtganaagctattaccctttgaatttctcgag

SEQ ID NO: 241431 - DNA, 279 bp, Glycine max
  unsure (1)..(279): unsure at all n locations
aaaataacccatcagccgcccactacaggcaacaagttttttattcgaaacacagcnacgtgtcacatatgagaggacccccaaatcgcgagaaccgaaaaacaccccggacgcatcaaaggagtcaacaacccttgtgtgcggccctccatggaaagagggattctctccttcctatcatccccaccctcgcccgtcgacaccacaatcccagaaaatccacctctgcccaaaaccatctcgcgaacataactcccattctacacactcaaatgaagc

SEQ ID NO: 241432 - DNA, 308 bp, Glycine max
  unsure (1)..(308): unsure at all n locations
tgctactatatttcccacagtgtattctattggacctctttatactctctgcaagaccatgatcacaaccaatagtacttcatcaccccacaaagatggtcgtttgagaaaagaagatacaagctcnataacttggctggaccaccactaagcaaagtcagctttgtctgttagctttggccctgcggcgaacctatcatatgagcaatcaatgcagccttggcatggtttggcaaccagcttgcaccctttcttgtcggtcacccaagcggtgctctccactccacaccactgcccctactgccctc

SEQ ID NO: 241433 - DNA, 472 bp, Glycine max
  unsure (1)..(472): unsure at all n locations
agcttctaaatatccgaaacatgatattattgtgtgccttangcataaggtgtctagttatgcatatttgtcaagtgtgtggtaaattatttcttttaaccattatattggtataaaattgtttctactaaaaaatggtgacaatttttcattggaaaccttaaatgcatataagatgagtatttttcttttaatatgatttattctatacataagtgcgatcatcatttagatgcctaaaaatatgtatttctttgattgcacttaacaaattcagatactagtgggtgttatttacgatgatcacttgattntntgctaaacacataagttgttgatgagtgttccataatagtagggatcgaaaacaaattttcaaacttttgaggaatgaaagtcaaatttttttttataaggactaaaatcaaaatcttgttgatttatagggactaaaatatatatttaagtctta

SEQ ID NO: 241434 - DNA, 446 bp, Glycine max
ttgataccagtttgttgtgtttaagactaagaaattatatattctagataaggaagaagattatcagagaagaagaagagagtaacacacaacgaatatgctgttattatttatggaaaacataatacaatgaatggattcagaaactctctttcagagattgcttaaaccttcaaactaactccattatatatgagtaaggaataacataaaacaattataagacaaaacttgttatatgaaccatctaacaaataactaagagaattaggcattcctcttatagtgtgactggacaagctccaaatagcgttgtccaaccacctctttggtccaacacgtgctttcaaaccacaaggttgcttttggtcatcaagtgttaaaattacaacgcctctactcagtccacataagtaacaatcggagcagggcctcggtgctagctg

SEQ ID NO: 241435 - DNA, 485 bp, Glycine max
  unsure (1)..(485): unsure at all n locations
cacctgcggcatgcaagctttgagccatggccctaacaaggaccttatatttccaaganaaacatctgaagaaatgaacaaagtccataaacaatatgagtgcaaacaaggctatcaagcataagcttggtagtgaagtatcccaaatttcgcaaaagctagaccccaaaatcctaaatattggtcagttggaacactaaagaaggaaggggtttgaagaaacataaatagaacaccaatctcattcttaaaataaaacacccaacaataaatcatcatttgccttatctactttctttggcccaaggacaaatctgctatcaactagttgcaacacagaatacctttgaaccctaatctctcttttcattaggcttaataactaccaaggaacaagaanaccatagatcatctagttctttggcaattcaacaacctaatacacaatcttaaatcacacaccaattagcactagtaaagcaagt

SEQ ID NO: 241436 - DNA, 436 bp, Glycine max
  unsure (1)..(436): unsure at all n locations
cctcttggacctcgcaacaagcctcaactcctatttcagatccatgctatgngctcgccactggtccctttcttctcttcgtaacttgagttcactattgctaccccatagagctccgcgaaatatgttccggccatactcttccttgcgagccctcttggtctctcgtttaacggctcttgcggtaattgcattctctatccgctaaccggcacacttcttccgaacgtgtgtagcagccaacttgaacttctccttggcgacgtttgccttttctaactcgctcttgagagcttggacttcttcgtcctcttccggtgcttcaaaactctcttcgctgacgacttttaacttggcgagccaatctaaaccccgtatgcgaactttcagccattcgtggtacccaccaatgatgccattacgaatgcctctaagc

SEQ ID NO: 241437 - DNA, 461 bp, Glycine max
  unsure (1)..(461): unsure at all n locations
agcttgaaggtgtgtagcccaccatcttttcatagtagaatactggtaatgtgtctaccatcacgattatcatctccctttccaacattgggggtaccacttgggctgctagatccctccacctttgggtgtattctttgaaagattcatgcccctttttgcacatgttctgtagtagcatcctatctggagccatatcggaattgtactgatactgcctaacgagggcaaccattagctccttccaagaatggactcgggaaggttcaaagttagtgtaccaggtaacagctaccccagtaagactttcttggaataaatgtatcagcagttcctcatcttttgtgtatgcccncatctttcgacaatacatctttagatggttcttggggcaagtagtccccttgtacttgacaaagtctgacaccttgaacttgngaggggtgatgatattgngtact

SEQ ID NO: 241438 - DNA, 406 bp, Glycine max
  unsure (1)..(406): unsure at all n locations
tcatcccttagctcntagatttcgggcgatggttcttttatgtctaacatgtctcattgacgatacacttctcttccatgttttccactacgcctgtgtgatatacccttacctcccttgcctcatgcttagngatctatcaaacatgaagcgaatgaactattcctactctctaagcntcttaacaacctacttcttcttgacatttgcctagtaccatcaaactaatccactgcctcatttggcaattgatgtatctccatgtggagctcgtacgccccggatcttcttcatcaatggattcccgcttcttgaggcctgattgccgcggaatggaaaacgagaaagatcaatggagacaccacttcacgtacaagatgagtctaaacgaagctcatcaccatag

SEQ ID NO: 241439 - DNA, 432 bp, Glycine max
  unsure (1)..(432): unsure at all n locations
tcgtaatctccatggattcaacttagcagggtggggaagcaggattggaatttcattaataacccanatactacaatttctaaaattctcaaagctaaatatttttcaaatatttgatacttggatgccaaactaaggcataaaccaagctatgcatgacatagtatttttgcttcacatatattggtcaaggatgatattctgtggagaattgatggtagctccatcaatatttggagccaaccttgggtgcaagcatcagcaagctcatatatcacttcatctaccccgctcgaccttgaggatcttaaagtcagtccactcatcaaccaccaacaacaatggtggcatcaagttgtggtacaacaaatttccaatgacaatgaccagagaaatgttgcttcccaccnncctgtgaacaatgaagtcgat

SEQ ID NO: 241440 - DNA, 391 bp, Glycine max
tccacttcatcaatatggacaacaacggatgtaaaatctgcttaatcttatttccataactgactacctacgtgttcgatatttgatcatctgtccaacaaagtaaatcatatttacatatctaattaatcatgtgcaacaatcaaaatcgcatatcattatgactattaatgcttaaccacttatcaaacaattttatttatatctacatatataaccaaccatgtgccatcatatatcattaatttctgtataaccaagtgtattaatattcatcctacagataaaagtgcaaactaaattctcaagtctctcaaatgacgaaaaaaaatcaagttgatatcataaccaaacttcatacttgttcatattggatgttaataaatgcctc

SEQ ID NO: 241441 - DNA, 422 bp, Glycine max
  unsure (1)..(422): unsure at all n locations
agcttaggcttagcgcgtgaagacagggtgcttattgcaacggttgcgcttagtggatggacaactaanaaaaattctgagtctttnttgtccatctcttcacatgagcttaaaaaccccttttgttcattactaaacaagctgcaaaattaatcacaatcataagcacttatcctaaactaaatgcaagagataagaatgaaaaagagaaaagggaaagaaaagttgggttgcctcccagtaagcgctcttttaacgtcactagcttgatgcatcttcatgttatcttgggtcaaagtgtagaacagttttcaatctttccatagctccaccatgatattgcttcaacctttgtctattcactacccatgtcttgtcaggatctttagattgaggatcataaatctctgctgctccatatg

SEQ ID NO: 241442 - DNA, 430 bp, Glycine max
gcttgaatgctctattcaatggagttgacaagaatatttttcttactgatcaacacatgcacagtggccaaggatgcatgggagatcctgaaaaccactcatgaaggaacctccaaagtgaagatgtccagattgcaactattggctacaaaattcgaaaatctgaagatgaaggaggaagagtgtattcatgacttccacatgaacattcttgaaattgccaatgcttgcactgccttgggagaaagaatgacagatgaaaagctggtgagaaagatcctcagatctttgcctaagagatttgacatgaaagtcactgcaatagaggaggcccaagacatttgcaacatgagagtagatgaactcattggttcccttcaaacctttgagctacgactctcggatagggctgaaaagaaagcaagaactt

SEQ ID NO: 241443 - DNA, 479 bp, Glycine max
  unsure (1)..(479): unsure at all n locations
ccggatccttaagtcacctgaggcatgcaagctttacgtntagaacaagatgttaatgttatttttaagtcatgtataatcactctctttcttttaatcgaacctgaacaagatgaaaggttattttttagtactgttttcaaaacatcatttggaaatcaggaggtgaatcatgagataactttgtcatcatgacgcagttaaatattcctttgtcaattgtttatccctttgtgaatcatgtattttgaattttttatgcacttactgttattactttcccccgacaaaatcgagctctattggatatttgaatttatatattgctgagtaatatacataatatatatagttatattgttgagtagtagtactacagtactagtactggtatagttgagtgaattcaacacaccacacaaagataatagttgatgacataatacactgagaaaaaagatgatgcaccggtaaaagtc

SEQ ID NO: 241444 - DNA, 441 bp, Glycine max
tataagaacacaaatgcctcaatcatatccaaatatgcatgtgaattacgaagcatcaacagaatcaagccaaggctattgtgcaagcaatcaatggggcaaaacaaaccaaatgattatgatgatggatggctcaaattctcacaaaggtaaacttatcacttccaaattgagctttcaaaactatcttgacatgtagaggaaaaacaaggacttcaaatcacaaaatgtcaagagacttttattttcaaaacaattacccatttcttgaacatatcctataattcaaagaaaaacatgcaaagctgtacatgccaacaaaattgacctaaaatattaaactagcgaacccacaaaactaacaaaattaacaaatccaacaaaacttgccaaacgaaaaccaaagaacactccgccccatacttaaacaacacattgtac

SEQ ID NO: 241445 - DNA, 319 bp, Glycine max
ataatacctactttcttataatcgaccctgaacaagatgaagagttattttctagtattgttgtcaaaacatcaatcgcccatcctgaggtgaatgacgatatcactctgtgctcatgacgcatctaaatattacttagtcaattgtttatccctttgtgaatcatgtattttgaatccactatgcactaactgttattactttcccccgacataatcgagctttatcggatattttaatccatatattgctgagtaatatacatcatatatatagttatatcgatgagtattactcctacatggctattactggtata

SEQ ID NO: 241446 - DNA, 319 bp, Glycine max
ctgagatgaggaagtgctgaagggcgaaacctcctgcttttattgttgaccacagagtggtacccggagatatgttgcgggggtcccgacaccttgtggacctcaggtggggtgctattgcccaaaaccaagcttgaccaattcccaccccacccgggcatagtcggtcagtgagaacctgtgatgtacctaaacaggcgacctcctgccagtcaaccaataaaaggaacaaagaccactaagcaaggaggcttgtggtggctggccacctgtgaactttgattgatatctcgggtatgggcctctggcattgactacc

SEQ ID NO: 241447 - DNA, 248 bp, Glycine max
  unsure (1)..(248): unsure at all n locations
agcttgcaatcttacgcacataatgtatcctaataactgacaccctcgctcgccctgcaatcaccacgacnaatatgacgctctagagaatcaaaatgaataagctgcgaaaacaaaaggaaaatatacatgatgctagctgaaaggaactgctatgatcttgccacttgccaatgatataacatattatattgtggcgcgtaatacctacaacgccctcgactttaacaccacctacccaccaacag

SEQ ID NO: 241448 - DNA, 328 bp, Glycine max
cgtgacactatataatcactacgctctcttgtggggaagaacaatgtttcagtgaatattcttctatttgttgacgacactattgtttttggcgaaggcttaacggataacgctaaaacctgtgaacgccattcttacaagctatgagatggcttttggccttacaattaattttgctaacaaccaatttggaccaattgggccatttcaagagcgcgggtgtaattttgctgatatcttaaactgtgccaatgcttcattctctcttttggtacctagggttgccaatacggattaatctgagaacgcatgtggcgcgggagcctat

SEQ ID NO: 241449 - DNA, 219 bp, Glycine max
gcttgaccttggtttagacatgattgatacatgatttgagacttgtaggatttgatttgggccacattggatgaggggaagcgtggttttcgaaatttgcattttgtgccgatttttgctgcgaaattgtgcaccacgattttgcacacgtgcacaaaaatgcttgtgtgtggttggccgtggaaagtttactgcacaatgagttctggatgtttgcta

SEQ ID NO: 241450 - DNA, 435 bp, Glycine max
  unsure (1)..(435): unsure at all n locations
agctngaagatgatgctttaatggaggaaaatatttatagaaggggggagcacgaaattgaaggaataaaagagggaaagaagtaaaactttgaagtgtatctcataagactttcattcatcaaagttaccacaagtgttacacatgcttctatttatagactaggtagcttccttgagaagatttcttaagaaaacttccttgagaagcttctttgagaaaacttccttgagaagctagagcttagctacacacacccctctcataactaagctcacctccttgagaagcttccttaagaagattcctaaagaagctagagcttagctagacatacctctctaatagctaagctcacctccttgagatgaaaagctagaacttagctacacaccccctataatagctaagctcacctccatgacaaaaaacatg

SEQ ID NO: 241451 - DNA, 401 bp, Glycine max
gcttgcactcgattacacaaatcttgtaatcgattaccagaggagattctctgtatatcatttccaagagtcacatctgtttaaatggcttttgaatggccatcacaggtttatttatatgagacttgcaacacgaatttgcttacagtttttcagaacaaaaaggtattatgctctcaatagcaatatcatttcattctcttaaaaatttcttcggcaatacacttgtaattcaataaggaattattctagtgctcaattgttcaatctatctctttcaagagagatttcttcttctcttcatcttatttctgaaaaaggattaagagaccgagggtctcttgtttgaaagcaatctgaacacaaaggaacggttgtccttgtgtgttcaaaacttgtaa

SEQ ID NO: 241452 - DNA, 400 bp, Glycine max
  unsure (1)..(400): unsure at all n locations
ccgagagcagcnacacccaagaagagagatttcttgtagcccccccccacagccaagaaccacacggacactaagtcctctactactaattaatattgctaattgcacctccatcctacacccaactatcaatcaccacccaaacaagaaactatccttctattcccctagaagactaacaagaattaaccacaaaaacaccatatccctccataaagacccaaccatgtgaacctaatcaagagctacatatgccacataaagcgccccctggaagattgcccacagagcaacaaaataactcaaatgcaatccccttcatcaagactcacccatgtgtatcacccgtcaagcaaccccaatgtgatgaaccgccattgaacctcatcccaacctaaga

SEQ ID NO: 241453 - DNA, 430 bp, Glycine max
tgcatgatctacatcaccaccctcctctttctgaagcaaatctcttcttgacatcatcaaaaccttcctgatttacaccaaactccaaaaatcaactgtttactacgttttctttaattctacaagtattattgccctacttttctaaactcttattagctcacttccatagtcagactttcaatttttgtatgaacaattctgagctatcttttcatgatattagggtgttcctcacaaaatctcagctcattttgatatccgtcgagtaacttgcagttttacccccttgtcaagtgcttgttgagaaacacattatttgttgcatataccgcatgactatgggcaatctacgtgaatacaccccttcgatccctaaatatatacaaccctctatatattacctaagcatatggagcatccttgtcat

SEQ ID NO: 241454 - DNA, 428 bp, Glycine max
  unsure (1)..(428): unsure at all n locations
agctntgaataagaagatgaagaaggataggctttttgttgagaggacccgtgagaagctagcatcaaagtttgctgctgtatctgctcaagaagtggccagaaaagaagcaaggttaactccacctgaagctactgtaggaacaagttgcacttgtcatcatctcctaaatgttgggaggagtttcaaatttgatactggacagtcaaatggaatgagtgaaacaagaatatctgaagtttcaaggcccttgcctgagtttggagagaatggatttagtattaagactgctgagatgaggtggtttgcggctaaaaagatggaagaagccgcaatagcagcagaagctgttgctcttgctgagattgaggctctatgcagccctgagatatcatcagaatttgctcctccagaatgtcagaaaatgc

SEQ ID NO: 241455 - DNA, 461 bp, Glycine max
tggttgaaaattgtacaaataagaggaaattggtgagacatgctattactagatttgtcacttcttatctaaccttggaaaggctctacaaagagaaaggtaatattagaaagatgtttattttttatgaatggatcttaaacaagttatctaaggagcctaaggggaaagaagctgcaaaggtagtgctcatgccttctttttggaatagtgtggtttacactcttaaagtcatgactccacttgtcaaagtgcttcgtcttgtggatgatgaaaggaaaccaaccatgggctatatttatgaagcaatggacaaggcaaaagaaacaattatcaagtctttcaacaacatcgaaagcaagtacaaagatatgtttgcaatcattgataaaagatggaattgtcagtttcatatgccattgcatgcaactacccacttcttatatacagagtccttttat

SEQ ID NO: 241456 - DNA, 375 bp, Glycine max
taagtgcatgatttcaattagtaaattcataatttgaatcttatagggatgcttgagttcacgtccattgtacgcacaagataggctcttgatctgttgggaaacgccgtttcgaacaattcgaacggtttggcaaacatatacatattttgaaggagaaaattctgttcaaaccataatgatggaccaacaattaaattgaaactgataaattaagaacaactcataccctcgtaccaattaatcaattcagatcgtaattctctatcctaatttcataatatgaatatatatattaatccctaatttgaaagtacacaaatctataacatttcattcatgcacatttctaaactaattaagctagaatccctg

SEQ ID NO: 241457 - DNA, 430 bp, Glycine max
agcttccatgagaagttagagctgatctattttctccctgtctaatagctaagctcacctccttgggaagcttccttgagaagctagagcttagctacacacacccctctaatagctaagctcaccccatgccaaaatacatgaacattcttggctacacacacccctctaatagctaagctcaaccccatgtcaaaatacatgaaaatacaaaaaaggttcctactataaagactactcaaaatttcctgaaatacaaggctaaaatcctatactattagaatggccaaaatccaaggcccaaaaaaaggaaaacctattctaatatttacaaataagagtggacccaaccttggcccatgggctcagaaatctaccttgaggttcatgagaaccctagggccttctttagttactctagcccaatact

SEQ ID NO: 241458 - DNA, 433 bp, Glycine max
agcttatgacaaattcatgaacttgcttttattattatcatccggcgaaataacaacaaaatatagaaacaacaccatataaaaaaatttaaaactataacgaagaggattcaaacttatttttcaaaatatttcaataaagatggacttttctgaatagtaacctcatgcttaacaaaaatagaatgtttgacttgtaccaaaaaccaccaaaggggcaaaaggtgagcttttctgcgaaataaattacaaaggcaaaggaaacaagggaaaatgaaaaattaaggattttctcaccttaatcattgcaagactgaaacagtgcgttaaggagacgcaaaaatagaggattggtgagagagcttacctcagttcaaaagatgtcactacaattgaagaagggatcatggtgaatatagttaaaatcaaaggg

SEQ ID NO: 241459 - DNA, 460 bp, Glycine max
tgctgtcttcttatacacttctacgtaataccaacttatttatccaagtgagatgagaagtccattaaaactgtgcttgacagcagccctatgtcaaacacagatcaaatgcatgaggatatgttacagaaagagaagggcagaggttttttcatagggaggtagaactgaaatctaattacacaaacaatttatttatgacaagaaaaaaggaagaacctgtcctgaattagcttcctcctctccaacaaccaatatgaagttgtattgtgctaactgtgcttctcgtacctgcagaatgccacacttctagttaagacaattctcttgataagatactagattattaataaaagtataccatattaaaaaaaaaaggagaaataacttctcaattgcagattactaaacaattagcctactacactatgatatcaatacatcccccaatattaaaaca

SEQ ID NO: 241460 - DNA, 487 bp, Glycine max
gacactacacacaactcaagcttatacgagctctcacaccacatgtatccagtcccaaggcttatactccttcaagtccgctcacaatgacacctcctgacttacgtccaccctacaaaatactttaacatcacagactctacctataatctatgccaaacacacaactactcactagttttcaaaatctcaattatattcaaaagtattttaactcatcacgcctcaagcaattacacctcgttggattaccatagtagaactcattacacacttgttgcacattaactcattggacagttcatagctcacaactcactgcatacaacatctaaatttatcacttaattcactttatgttcatttatacatcttgctaacatttatcagcatgcttataggactcatcatatacatacgcactatttactgatcataccatatcgttcgcaattccctgacaataaccatttcaaaatcatgctat

SEQ ID NO: 241461 - DNA, 413 bp, Glycine max
agctcgcccagagaaggagtacacggtggatactttgaccacctcaaaagactggaaagcggtttctaacgattcttctgcggcttccacataaggcatataggatgggcagctcaccaagatgtcttcctcgcctgacacgatgaccaaatgcccttccactacgaatttcaacttttggtggagtgtagagggcacaactcccactgagtggatccacgggcgccccaacagacagctgtagggggggttaatatccattatttggaaggtgacttgacaggtgtgagggcctatttgtactgggagatcgatctcttccctaacctctcagcgagtgccgtcgaaggcgcgaaccaccattgaactcggctttaagcgggaagcattgaaaggtaatttctccacagtgc

SEQ ID NO: 241462 - DNA, 427 bp, Glycine max
  unsure (1)..(427): unsure at all n locations
agctnngatacattgaatntaaatatttttatttttaaatctccttacagcaataaaaaatatggtatgatgtaatttgatttaagtaattattaattatataactattaatttacatattgattcaagttaatatttaatttaatatatcaatggaaatcttaaattaaatcggtacaaagaaaaaaaagggtaaaaaatttaatttgaattcatatcaacttattaataaaaaaaaatattcatcaatttttcacatgatattaatttattagtaaaaattattttttttacaataaatagtggcttttttagaaaaaatgattgaatatagtaataatgcttggtttaggatttagaaattgagtaaggttgtttataaaaatgatagagttcctgttctattntaaaaaaattctaagctttt

SEQ ID NO: 241463 - DNA, 470 bp, Glycine max
ctatgaaactcagcttccggcttgaaacatattggttatataattattcgttattgttgatatagatgaaacatgcaaaccttggtttacaattgatgaaatataacaacatcacttatactcaattcagaattgtgtggtatctatctcacttcgtttaaatacactactagcataaagtgcctaaacaaataataacacatggccaaagtgttttaatttaaaaacaaacatttaatcaaacactttggaaaaattttcatgaaatgcattctaatcatcaagtccaatacacagggaaatagttttttttttgtattagtacaaaacagatcatatataggtaaattatatattgtattctatttaattcttaaatactttttgtgtaaagcatatcaacatgatctatctatatacaatatgtttggcaaccaatgacatcaaagaatttgggttttttttttcta

SEQ ID NO: 241464 - DNA, 418 bp, Glycine max
  unsure (1)..(418): unsure at all n locations
agcttattgcgttattagttntgtaatttattgatgttcatatntctatttacctaagtataagttatttgtaaatccttattgtaaacatatttgttttattttgatagggtcatgggaacaccaccaccgtcacccccgcagtcagatgttcggtcagagggtatgtctaggaatacgagataatccacatgactcaaacggttgactttaagaaccttggatcagcccagaccaattgtcactattaatgctactactgggcgaggatcgggcccacataaatagaagtttcacagctatttaggggtcttagccagagaaaaaattccaattgtacataacacctgtaaagatgtaccggacgcgctaaaagacctagtatgggatgacattctggtaagtgacgtcattgtta

SEQ ID NO: 241465 - DNA, 399 bp, Glycine max
cagctttcctctagtggctctgattaagattatctaatgttagtgagaaggagaagagattaaagcctccattccactgtcctcgtgtaatgagtacttctacctacccagacattattttgcaactcccaacaataaagttgtgaggatttcaattgcgaacgttctatccaaatttcacaatgatccaacggttaatgagtctagatcataagtttactataataacgtttgggtctctatatgaaaggaaaaggttatgatgcaaagggaatttctatcacctacgatattctttacaatttccaatggtgaattgtttggaaatgagttcttaacttggtgctccaatttcacgaagatccaacggataacgacgttgaagtcatcattttattg

SEQ ID NO: 241466 - DNA, 430 bp, Glycine max
gcttctcaaggaagctacctagtgtataaatatttgcatgtgtaacacttattggaactttgatgaatgagagtcttgtgagacatacttcaaagttccacttctctacctcttttattccgtcaatttcgtgctcccccctctctctttctctccctctttcctttcctccattgaagcatcctctccaagcttcttatccaaggctcatcttggtggtgaagctccttcttccatggcttattccttagtggatggcgcctcctctcacctcttctcctttgtcttccactgcatctccatggtggaaatcaccattaaaggacctcattgaagctcaaagatccagcctccatagaagcccctcaagcaagcttccatcaagtggtaatcagagcacaagagcttcaagtaggtgctccttaaacct

SEQ ID NO: 241467 - DNA, 461 bp, Glycine max
ctcaagctaggctgtggataacatacttatcattggcacatgcaatgatatacgttttataactaaatattcattagcatctaaatttgatatgaaagacatgggtgaagcaacggttaatttcggagttaaaattaaaaggaagggagatagtatattactatcctatgagcattatgttgagaaacttctcaagaagtataaatattatgactttaagtcagttgagtaccaccttatgatgctaactcttaattaaagaaaaacataggaaaactcattgctgaaactcaatatgcccaaatcattaggagcttattgcatttgatgaacttttctagatctgatattgcatacgcaacaggcagattgagtagatatacccataatccaaatagaaccatgggatgcacttgctagactatagatatctggaggtacatcgatatgcattaatacag

SEQ ID NO: 241468 - DNA, 362 bp, Glycine max
aaccaagaagtatcaacagaaccaagccacggctattgggcaagcaattaatggggcaaagcacaccgaataaacaaaacaatgaccaactaaaatctcaccgagggtaaatataccactcccaattccacctttcataactaacttgacatgtacagaagagaaggatttcaattcacacaatgccaagaaactcctatttcgaaaacaataacccatttcctgtacataacccaatattcaaagagaaacatgcaatgttgacacaaaacataaaaccaacataacaaatttaacccaatttaacctagaaaaacagaactcaaacaaagaacaatctccgcccacactttaacaacaca

SEQ ID NO: 241469 - DNA, 459 bp, Glycine max
attcgattcattctatgcacccgtagcggtccacattgtgtttcgtgcatttctattctcattttgtttacttcttataccccctgttgacgtgcttaagccattttacttaagtcatttctcgcttaacttaaaaataaaataaatctccaccgaacgtttgaattatattatccgttaacttcgggttaaatcaaatccgaccgttcggccgtgccgtatccacgttggaaatcaaaaagaggtaaaaaataatataataatcaaaaaatatctttttagtaaaataaagcggaaaatcaatcggacgttttctctttgggatttctcattcttaatcgaattgattaataactaaagtgaaactaaggctaaaatcaactctgctagtcaagctcgtccacaaaaataggctcttgaagcttggcatctcaatttctcactaaggaaaatggatca

SEQ ID NO: 241470 - DNA, 427 bp, Glycine max
  unsure (1)..(427): unsure at all n locations
agctntaagagtgattcctttcttcttcttattattttcttcatgtngattcaatctcattaattccatttcttgttcctataactttccaaacaaagtggcaagagacatgttagatagatctcgtgattcagtaatggttgttaccttgggtttccattccctgcttaagcatctcaaaactttatttataagatcttcatttggaaagatttttcctaaagatgcaagatgattaattatatgagtgaacctcttttgcatgtcttgtatgctttcatttgtattcattctaaataattcatattcacgagtcaatgtatttatcctggatctttttacatctattgtaccttcatgtgttacttgtagggtatcccacatatcttttgcacttttacaatttgataccctaacgtactcatcc

SEQ ID NO: 241471 - DNA, 376 bp, Glycine max
taccttgcaagtaacgaagaattctttttgcggcttttacatgaggagaggtgggagcctccataaggcgacacacatctcccagcgtgtatataagattgggcctctgtattgggtagataccttaaactccgcacaagactcttgaagatcggggagtctaccttctctccttgatcaaactacgttaacttcaagaccccttccataggagtgcccaggggattgcaatcaagcatattaaatttcttcaacactatttttgtgtacgtttgttgcgagacaaagataccatcctccgtttgctttacttctcttgccaggtaatatgacatgagtcccatatttgtcatatcaaaggcacgagacatggact

SEQ ID NO: 241472 - DNA, 303 bp, Glycine max
acagcggtggatcacaaggtgaacacgaacaccactcccttcttacatagacttgtcgacgcctacaagtatcactctgctgtgtctgaatcacttgatgcctctcttcctagagaaagccaagacctgatgaatgtcgaaaggcaacgcttacaaagggacattgtacatgcctctgcgtgtgacggccacgataagatgcaacggcgtgtagttgcacgaaaatgcagagccatgatgacaatgactggcttcacttcactccccatgagcacaaatgtgactgatgaaatccgacaactc

SEQ ID NO: 241473 - DNA, 428 bp, Glycine max
agcttgcatcagattcctcaagaggctattattattttgcaatcattgttgcaatctttaggggttgattgctcttaagagagtagtttggaagttctcatggatgagaggcagttaataggtttagaaaatggtggtgcttctaacccagatggccatgattaggctcttagtctaacgataaattccctattattgatagggaaatagagacagatcaaggtactcgggtatgaggcacttcattggattgataaaaaggcttaggagatctaatcattgataactccaagcgtgattggtcatttgggggtcttcttttcctatcacacaagctaggaatgttaggggttcgacagctgaggcccctagtggcgatggcaagatatgctcctaaggtcaaaaagaaaatgtggggtgagtctttt

SEQ ID NO: 241474 - DNA, 423 bp, Glycine max
  unsure (1)..(423): unsure at all n locations
agctncacattcaaaatattattatacattttttttaacacataggtttggcttagcgcgtggataagtccgcttagcaaggtctgtaaatcaaaaaagctgcaactctcgctaagccaagctctggccagcttagctaaaatgatgcatcttaagtacagaggagcatgcgcttagctgataaggactcgcttagcgctcacattgctgcaatgaattcagcttatctgccatgactggcgcttagcttcatgaacctcagatctggccgtaaggaattgtgcttggcgacactgagtcgcgcttagccaaggataaggtgtcgcttggcggtttggctgtcgcttatccgaatttagatcgaattcaattaggctcagctgggccttggctagcttagcagaatgaatcagcctcagatgc

SEQ ID NO: 241475 - DNA, 424 bp, Glycine max
  unsure (1)..(424): unsure at all n locations
agcttccacaacatccaagcgatgcagtcattcatttatcatgcactatcaaaaacaagaaaaatgggcggaggcagaaaaatctgcccaaaccacaaaccaataccacaactttccttactcacatactccagtaacattctcttcgttccaattcgttcaccgttggatcgactcgaaaattttactggaggtccctagtacataagtctacattttgactgttgggatctgctagaaactgtccagaacccaatctgaactactctttccacaaccagcaaatacacatcattttctgcacaaagccaaaattctgctgcacatttcaacagcaaaattttgcataatagtgcagatttttgaaatcacacttgccctcgtccaatnttgcccaaattgaatcctacaagtcctaaatcat

SEQ ID NO: 241476 - DNA, 459 bp, Glycine max
tatgcgcatacttcttcacgaacgtacacttgcacaagatattcttatttctaagaaaaatgcacccatatacaatcaaggcaccttcgctacctagattatttacatgtacttgcaaggtgtatttgctaccttcatcacacacatttcctttgctagattcacatacatgcatactctagacactttggctatcaaaaattgcatacgtgcacatcttggtatttctaatacctatacatacacaaacttcatgatgaatcttgactatctacacaataaggtgctacatttcatgctctccccttttttttttcaagtgtttttactacctaaagccgcatgcaaattcaagtatattttcttttgctcactaaaattgtattcaaattagaaggtatttttgtaatgtattttctttacataacatgcaacatagttatagatttttgtgagaca

SEQ ID NO: 241477 - DNA, 415 bp, Glycine max
  unsure (1)..(415): unsure at all n locations
agctngacagtattgcaaatctcagtatatgttgccaagtgtgagtatggatcttcatttggtaagccatgaaacaaattgctctatattagctgtatcaatgaaggtgggtaagttaagttttgtgcctgaacctctggctgcgcaacacttgaggaatattgtggcaccgaagtacttgagtaatcttccaaggtcactcatcgagcttgctcttcagccatgacttcggcttcaaattcttatgtttgagattccctggatgtatgcaaattagaagatgatgactcaaaaaagtgagcctcttcaaggattgatgctactgttctgccgcgcaaaagctttctttttctctctancgtgnttcttctaaaggtggctttaatttctaaatccaatggaaccaattcacctg

SEQ ID NO: 241478 - DNA, 215 bp, Glycine max
  unsure (1)..(215): unsure at all n locations
cttttctcctctgtcttccgctgcatctccatggtggaaaaacaccatttaaagaccccattgaagcgtcaaagatccacacctccataatatgccttcacaagcaagcttccatcagaaactggaaacgggttttgaagatcagaggatcaatcttgatctatttgaagaacacaaacatgtaccaaaacanaatgtctgcttgcaaatgatgt

SEQ ID NO: 241479 - DNA, 424 bp, Glycine max
agctttaaagcacacagaagctatgtgtcctatatccctcaattcaatgggttttctaggtttgaaaagtgaaattgagaatgaggtaaatttggagcaaactctcacctcacacaagtctataacatcaatctaaacttgctcaaactggatttacacctaaaatctcaccgaatcaaaatttgactcttcaacacccaaatttgccctaaaaatggctctttgttcactttggtcattcgtttttctctctagcacagcctaacctttctcataagtcctaaatggcattttaagctaagattaactcactttaacctccatttaccacagaatccagatttaaccttccaactcttaaagcctcactcttgttccactcataacctcacattcttactttctaaccctaggttaactctac

SEQ ID NO: 241480 - DNA, 428 bp, Glycine max
  unsure (1)..(428): unsure at all n locations
ttntgaaatncaaatttaacactggtaatcgattacaggtaattggcaattgattaccagagggtaaatactctggtaacttagaaaacttttttgtaaaacaaaactgtgctatatttggtttttgaaaaatccttttcaatacttcgcttgtgaagtcttgacttgttgcttgttgatttcttctcttgaatcttgattcttcttgatgtcttttcttgaatcttgaaatcaatcttgatcttgaacttgttgactcattcttgaaatcattcttttgggttctttcgcgcacctactaactctgtcattctccttcacctcaactcctctctccatctctatctcgcttctcttcgacttattttctacttccctcgttcgatgctcaactactctatcttagccctactctccacactccttct

SEQ ID NO: 241481 - DNA, 338 bp, Glycine max
aacacaaacagaatggattatggagtttggatgctcatatcacaccaacccgagtaatgactattgtgagaccctgcaactgaaaccatcatgagctttactgctaggaaacaactactcctgcaaggtacaaggcattggaactatgagattgaagacgtttgataacagagagtatctactgaaaaatgtaaggtacattccaaaacttacaagacatcttatttccatcaacatgtctgatgatctacgatattcaactagaattttaaatggcgttcttaagatttcaaatggatctttaatcatatctgacggtaacaagaataaaagtaatg

SEQ ID NO: 241482 - DNA, 430 bp, Glycine max
  unsure (1)..(430): unsure at all n locations
agctttnntagccgaagttgtaccatgttgctctttctatcttgaacactttgatgatgccaaacttaaatatggcattgagtgcatttggagggtctgagtcttgagactggagacttgatccttagtctatcctaaaaaattcttaacacttaagagattaattcatcatcatcatcatatatcttacttgtatatattactggtattaatgcaatgctcaatacttatgcaatgcaaccgatatgcaaatatgcaccaatatgaaaatatgcaataatgtatattcttctccttttggcattaacaaggccaaaaagtttgattatacacaaaacataacacataagtagaagagaaataaaaccataattcattaatcatagaacattacataaccattaatcataagaaaaaaaacttaattatc

SEQ ID NO: 241483 - DNA, 407 bp, Glycine max
  unsure (1)..(407): unsure at all n locations
cccttgagacgctagagctcaccgacacactcccntctataatctcagctcacacccatgccaggttacatgcatttgcttatctacacacacccctgtaatagctaagctcacccctataccaaaatgcatgaaacttctcaatagtccctgcgtcagagactacccagaatgccctggaatacaaggctagaaccctatactactagaatggccaaaacacaaggcccaaaagaaggaaaacctattctaatatttacaaagaaaagtggacccaaccttggcccatgggatcagaaatctaccctgaggttcatgagaattctagggccttctttagccgctctagtccaatcctcttggagttttctatccaataccctcggggggtaggattgcatcaatga

SEQ ID NO: 241484 - DNA, 428 bp, Glycine max
  unsure (1)..(428): unsure at all n locations
agcttggaatcgantacacacagtactgaattttatatctcagaggagatnttcacaaaatattctcaacagtcacatctttttgtgtggttcttgaatggctatcaaaggcctatatatatatgtgacttgagacacgaatttgataagagtttttcagaacaaaaaaggtcttatcctcttagaaagagaaataatcttatcctcttacatattccttagccaaaactcttgtgattaaataaggaattatttgagtgctccaattgttcaatctatctctatatagagagatttcttcttctcttcttcttcattctgaaaagggattaagagactgagggtctcttgttgtgaaagaattctaaacacaaaggaaggattgcccttgtgtgtttagaacttgtaaaaggaatctacaagatagt

SEQ ID NO: 241485 - DNA, 463 bp, Glycine max
  unsure (1)..(463): unsure at all n locations
tgtcatataaaacctgaataagagataattaatttctgattaacataatgttgaaagaaaatgataaattatattgtaatttatataaatacctgttttaataaaatttaacgaaaatacatgtggaatttttagtaaagactatacgtatcattacaggaaagttaaacaaaattgtatacacaacttaaacttaaatgattagaataaaataattccatactatttgtcctacatgacttctttcttttttcatatttataaaattcaagtttaaaaggttacttttttttataagactcaatttataatattattaatattaattatttttagataaaatatttttttcttataagaaaaaattatatattgacaaaccattagaagtatctaatgataataataattntgaacaaaaatataaatttaagatcaatttattattactaattaacataat

SEQ ID NO: 241486 - DNA, 426 bp, Glycine max
  unsure (1)..(426): unsure at all n locations
agcttagtagaaattaaaatttctttagaactttatttttacacttggtaaaattacactatgcaaatttggatagtgtacattcacactatgtagatttactttgtgcatggttgattatgtttactcttgatctgaatattagcaccattgtctaggacaattagctaaagatttactttttttggtaaaacaaagttatcatttatgtctaatcccactttagcctgctatggttaaaatctcaaaagtgaaaccacccaaaatgggccaagagttgcacaaccagcccttacactctcttcccattcttcatcctttnttttctctcaatcaaagttgcttttgtgacatggagagacttatgaaccaatgggaacttgggaccttcgaaccttggggttgtcctagatttgtttaacaccc

SEQ ID NO: 241487 - DNA, 428 bp, Glycine max
agcttcatgatgaatcaagattgattcaaggttttttgatgataacaaagataatgacaaaaagctcaaaagtcaagatcacttcatgataacaaagatgatgacattcaagaatgagttcaagattgagtcaagaacacttcaaggatcaagaggaaatttgatttcaagaatcaagaatcaagattcaagaataatcaagatcaagattcaagactcaaagattcaagaatcaagagaatacttaatcaagataagtattaaaaagtttttcaaaacattgagtagcacaagaagttttcacaaaatcattaccaaagagttttactctctggtaatcgattaccagtggttttaaaatgttaagattttcaaaattcagaatgaaaagtcacatctgttgatgtgtaatcgattacacctttatg

SEQ ID NO: 241488 - DNA, 464 bp, Glycine max
  unsure (1)..(464): unsure at all n locations
tagaaagacaatacttcattcataacatcaaataaactagaaagtcatccacaatattcaaataaaacatatatgaataattaaaaaaatatatataaaacacaataccaaatgtaagtacataccactagtcatatatcattaaagtaattaagtttaaaatacataatcataaactaccaagagcaagtcaatataatcatcatgttcagtcatactaagcaagtattaaaagaaatactaagtattcaaatgtcataaaaatatagccaaatacaaggcttaaaaacaaaatataattataatttaaatctattatcagagaatcaaaacttcattctaagtaacaaaaaaattagttataaacacatacatgataaatcattacttatctcaattnttttagcatatcaatataattttgacaaaaatccaatcatgtcaaaatatacataaatggataa

SEQ ID NO: 241489 - DNA, 427 bp, Glycine max
  unsure (1)..(427): unsure at all n locations
agcttatgcacggaaaatgtaattatgaaattgttatgttcttaagaaacaccatatcctagttaaccatgcattaggtaccatgttcaattattttgtttttaagtgaaacgggtttatgatcccaacatggttggctcgtggtgcctaacacatgaaactaagaatgtagtgtgaagtttcacgcttcccccttttttgtttttgttntgtagaggaaaacgcaaggatgagcaaacatgaaaacagatggtatgcaattttgcagatcaaaaagtttgttgaacgcatatgcatgatgatgccatgactcatgcaaaatgtgaggccggaatatgataacggacaaatgcaggatatgtccattatgatgttatgaagagatgcttatgcgatgcatgatatgaatgcattctacggacacggg

SEQ ID NO: 241490 - DNA, 404 bp, Glycine max
  unsure (1)..(404): unsure at all n locations
ntgagccaaaatcctgactcaccatataccttgacccagtgtgagaatgtcaatccttaccctcagaagcaaaaaaagggagagggaaaatttccaatcaaagagaaagcaaaaaaggaaagaaggaaaatttccaatcaaaagaaaaaagagaggaaaggaaattcccaatcaaagaatgggagaaagcaaaaagaaaagaaagaaaattcccaatcaaagaatgggagaaagaacaaagagaaggagaagaaggaaagaaagctcctgatcaaggatcgaaagaaaacagaagaaatgtgcagagaggtctctggaccaaacaatatctgaacaaataccgaattgtcaccaaatgaacaaaagaaagaataggaaaccctaacctacaagtggtcttctcc

SEQ ID NO: 241491 - DNA, 429 bp, Glycine max
agcttagataaatatgtgtgcagagatgtgtttttaagaataacgccaaagaggatgaaataatgactactcatcactgaaaagaaataaaatgcatctttaaaaggtctaggcacttaaagattcaagccagaggagtcataaacaaatacgactatgaaataatctctcttaacatcttctcgttgacataccaagttcttcaaagttcatccactgagtgattcttaaagtgaacaccttttatcttctgtaacccattgtaagcactgtgagtgctagatttgtgtgaaagtcgttagcctaaagaggctttcaaatagcaatcaatactggtgtaataacccagaagagacctagtgataaaagaacactatgcttttggcctgagccctgaagagtctattatgaacaaagagtacagttgta

SEQ ID NO: 241492 - DNA, 474 bp, Glycine max
tgcttaaagacatctctgattaattaattattctaaaacctagtgaattattaactaaacaaaagaaacttataaaattttgtataagtaatgtacaaatccaaaaataattgataaacaaaatcatattgaattcaagtcgttaaagcacaaagtatatcaaaagagaataaaaagagcataatattaaaaaatgtatggattagagattatttacactaatatagccaaacaaaaatatttaaattgtgtgaaaatgtatttacaaaacattcttttccttggaagtattaatctggttgcaatatccttttagcttgagtctctttctttttgaaaatctttcacatgcacgtgaactctctaagcactttatatgccacttcatcctgtcattcataatgccataaaaatggtatagataatcatcattaatctatcaattgctataaaactagcacacacaatataatt

SEQ ID NO: 241493 - DNA, 428 bp, Glycine max
agcttctactcctctgtctctctcttcaaattcagcaacccctggggaatgaggggtctctcttagcttttataggagccccttcactagggttaaggactttttagtcaattataaaatatgaattttactaaaaaaatttaggcatgattaacctgtgcaatttaagcaatttttgaagtgacaaaaataccacaagaagggagagttgaattgtgttttcacaaacttttgttctctttttttaaagaaagtgtattatgatataagttcagaaagatacaattcaaaatgaagaattgttctgagctcggataaaaatgaaagcagttccaaaaaaagagttttcatagttcaaaactctgttttaaaaagttgtttagttaaaaaatacttgataaaaatggtttagttctaagtgtgtttat

SEQ ID NO: 241494 - DNA, 480 bp, Glycine max
  unsure (1)..(480): unsure at all n locations
ccttgaactataganactcagcttctcgggccattcatgcgaatgcaaacattaggaaagttgtttattcaagaaacgctacccttaaaacaaaaaatggcatacaactctcctccaataaatacaaatatcaatgtcaatttagagcaagcttatgcgcatacttctttacgaatgttcacttgcacaagacattcttataactaagaaaaatgcacccatatacaatcaaggcaccttcattacctacattatttatatgtacttccaaggtgtatttgttacctacatcacacgcattttctttgctaaattcacatacatgcatactcaaagcactttggctatcaaaaattgcatacatgcacatcttggtatttctaatacctatacatacacaaacttcatgatgaatcttgactatctacacagtaaggtgctacatttcatgcttctcttcaagagttttttttactacct

SEQ ID NO: 241495 - DNA, 425 bp, Glycine max
  unsure (1)..(425): unsure at all n locations
agctnntaaaattgaattaaaacgttcagaatctgctggtaatcgattacacagtgcaaattttgaattcaaattttaatagctgttgtaaatcagtttttgccactggtaatcgattaccaaagagtaaatttgttgaaaaaagactttttaacttaaatttcttggccaaactttttgctacttcaattggaattcccttcctatttaatataccctttctaagactctagagactgtcttgatcatccatcttgaatatctttaatttctttgtcttgaataaagctttgagacgcatgtgaaactttggcatcatcaaaacattcagcttgatcctttttctacaactacttgtgcttaatttccacttattccccattgctcctctattcctttgggatttagctacttattccatattt

SEQ ID NO: 241496 - DNA, 467 bp, Glycine max
  unsure (1)..(467): unsure at all n locations
tattgaaattaaataagctaataataacttatgaatataccacaaaatattntcattagctcctccaaccacttacaagtgtttatatcataaaataagttgtaaatagactctactagagagactcttggtatcattctatatataaggtcttattctatcatgcagagctagatataagttctttgaattatatagataaacattaccatacactttgctaatactatgggtgtagaaaattgaattaaaccattctaaattgataaaaaatttaaaaatagattaatttagctaaaaactcacattttattgagttttgatttgatttttagttttttttataaaaaaaataaaccaaatcaagttgaattgcacatgtaatatacttatgttgagttgtagcattatgtagtagcatcttgaatggttgataatgatagtatgtgattctatatgtgtgttga

SEQ ID NO: 241497 - DNA, 432 bp, Glycine max
tatgcaatagtaaatgtgttctcaaactgaagtacaatgtgataagttttgcaattaaattgggcggtgactcaataatctcttgtatttatttcctttgtacttataaattataagacttttttagttaactcacattgaaaaataattagtttagttaagtcaattatttgtattattattttaaaattatccttttcacatgtttctattcacttaatttttcttcattaatgtttataaagagaataattaagtaagagtatctagagaaaataataattaatacatttaaaaattagaaaaataatcttataaaaaaggacaaataaatctttaaaagtgatattataattagcaacaaaggaaaagggagtagaagcctagagttgctgttctgtttttctgtaagctaatttatgtatcagaata

SEQ ID NO: 241498 - DNA, 412 bp, Glycine max
  unsure (1)..(412): unsure at all n locations
gcttttattttagcagagaagatttattctggccacctcatggactcctctaaggacaatagcatcatttcttgcactgaattgttgggagttggaagccatcttctcaatcaaattcctagcctcaacaggagtcatatcaccaaggactccaccagtggcagcatcaatcatactcttctccatgttgctaagtccctcatagaaatattgaaggagttgctcacaaatttggtggtgagggtagcttgcacacaatttcttgaatctttcccaatactcatacaagctctctccactaagttgcctgatgcctgaaatgtcttttctgatggcaatggtcctacatgcagggaagaatttctccaagaacaccctcttaaggtcatcccanctgaaaatggacctggga

SEQ ID NO: 241499 - DNA, 388 bp, Glycine max
  unsure (1)..(388): unsure at all n locations
tcgttgcaagccactggttggaggagaacgctggatggttaatctcatttgcggagcgcataatcatgaattggtcaagtcattnactggacatccatatgcggtgcgattgactaaagctgaaaaaacacttattgctgatatgacgaagcccatggtgaagccaagaaacattctgctaactctgaaagaacacaatgcccatagatgtacgactattaaacagatatacaatgcaagaagtgcattctgttcttccataagaggaaacgatcttgatatgcaacatctgatgaagctttttgaacgtgatcaatatatttattggcacagactaaacgatgaagacgtggctcgtgatatcttnttgtatcaccctgattcagtg

SEQ ID NO: 241500 - DNA, 424 bp, Glycine max
  unsure (1)..(424): unsure at all n locations
agcttcattggtacatcttcattgcttgtttattctncaataaaattcctacaaacaagaaaacaacccaaagatcaattgtaaaagggtataaaccaaaaatcctaactaaaccaagcttttattgaaaactcaactaaaatgaacataaacaaagctcaaaagcatgaacgatatcacataattgtccctaaactactacaaaatgtaggaatataaggcaatttatcaaggttctaagccttggggttctatccttgtataaccttagctgatattcatgttgtttgaaagtgatctagcatttcatgaaaaaaatgatatcctgagtataagtataacctttgatcaaaaggagtcaaccttgtcaaggaaaatttctgatagagagataagatagaatgttaaacaataaaaaaaaaac

SEQ ID NO: 241501 - DNA, 410 bp, Glycine max
  unsure (1)..(410): unsure at all n locations
cgaggaaggtattagcacctctcacgtttgtctcanaggacaacagcctattttttagaattatggaaattgtgttacctaactttatttctttttattttttgaggtcgacaaaagcggggcttttgttcctacgtaccctcctttagagaggaaatcagacctacgtagttctttcacatgcgtgaatcaagtgattcttttttacttgaggggtgatcatcttaaggcgttggaccttaaaaatgatccattctacttggtaagaaactgacatggataacttttaaaaacctattcttgtggacgagcttgactaagcggattgttttagccttaatttcgctttatttattagtcacctcaattaagaatgagagatcccacagagaaaacgtccgattgacttt

SEQ ID NO: 241502 - DNA, 283 bp, Glycine max
ccaaaagaagctacgtcaaaaacaaaaacggcgtacaaccccctccaataaacacaaacaacaatgtaaatcgacagcaaacacaggcacacaccacctcacgaacatgcactcgcacaagaaatacctacaactaagaaaaatgcacccatgcacaatcaaggcaccctcctcacctacaaaatatatacgcactgccaaagaggacgggctacctacaacacaagcacttgctcggcgaaattacatacatgcacactcaaagcaacctgggaaccaaaaa

SEQ ID NO: 241503 - DNA, 398 bp, Glycine max
  unsure (1)..(398): unsure at all n locations
agctntgcgaaaggcttgtcgctggagctgtattctatctgtcctaactctttcagactggcgactcctaggcccttgatcttgacttgatagaacctctttttaagcgaaggcgcctgactcgatcccatgttcttattaaagtggaataaaaaccagtgcgaatcaagactccgacatctatcataggtgaaatggatgaatgcatgaagaaatacgtatggcacagattcattctacggatacgagagcccgggagattatctctttccttaatacaacattcgggcagcatagtgcctaatgctgcatttaagaaagcgacaccgacctttcttcctcttgtgacaaagtgaacggaccctgacccatccctgtgcatgatgacatcatcctca

SEQ ID NO: 241504 - DNA, 443 bp, Glycine max
  unsure (1)..(443): unsure at all n locations
ctgntgacaaccaaattcgtgcaaccaagtttgctgttcaaacgaacaaaatgtgattcattagtattatgaacatgacagaaaacataaacgaaaataggtaaaacaaataacaatgtacttgaaagtaataccttacgaagttctaacactagtagttccaatacttgccgtttcaatactctggagttccaatattaatagtatttaaagctaaatcacacaactctaaaaaaattgatcagttttgatcggttcacttcgattttgatcggatctataaatctaaacccatgacccaactcgtatatgaacgattttgatcggtttggttcgattttgacccacatatactaatgacccaacctaaactattcggatcggcttgggtaattccgattcgaagatgacctgtctcataacaccttaaacatagtgctaaa

SEQ ID NO: 241505 - DNA, 454 bp, Glycine max
tgagcatcgccacatagatggaaggaatgtaggttctgttaatactacgtatatatagttagggatgatctgtaatcgattacaagcatatcttgtaactaccaaggcttgctggtaattgattacagccttgtgtaatcgattatagcctgttgttctatggtaatcaattatagggagtggtaattgattacttgtccctaaagcaaggatttttctatagaatcgaactatggctaagttagaaaacctacacattcattgtaactaatatcaatcacaatcaaagatcaaaagtaagcattataaatttcttagctacaaacatcaatcataaacaaagacaatcaatcagaaatcattgaactacaaacaacaaataacatgactatcaacacaaacaaaaaccaatccaagacaatcatgaatactactaacaacaacacaaacaaag

SEQ ID NO: 241506 - DNA, 428 bp, Glycine max
  unsure (1)..(428): unsure at all n locations
agcttggggtgagtgttaaacaagcacaatttttggtcaatatggaactccttcctaagaatcctagagccatgaaactgttagagatagggggagaaacacgaagactaagtcttggagcttgaagaagttttgtatttttacatgcccaactcttttgaatggcatttgtattgattgttgtattgagtgttgcatcttagtctctatctgttcatatgtacatcatgcatcatcatgtaggagtaaaaagattgttgctaaagttagaaactttctttagtgcataaaactctccattttaaatgattacaaggctaatcataattgattacacaagtgtttgtcgcttgaagagagattctcgtatcaatttaatcgattacaaggtaaccgtaattgattntacagttcaattgagacaatga

SEQ ID NO: 241507 - DNA, 484 bp, Glycine max
gtgaccttaaaactcagcttcctagacttgcgagctagtatcaatttaatgcctttctccatgtgttgacgacttggagagatagagataatgcccatatgcatgaccctccagttagctgatcgctccatcacaagaccatatgaagtgatcgaagacgttttggttagggtcaaacatttgatcttggaagaccttttatgcctaccgcaagctgtgcggtagaaattgggaagaggaaactacatatgaccatagaataccagtaaatcagttttcatatgtttcatgaagagaaagctttgcttgaccaaaatgtttgtttgaaggtgaatgtgatggaggaaaagagactacagaagaaggttctggaagttggaaccttgttagacccaggataacaggatgatgcggcaagccagagacgttaaaagagcacttactgggaggcaacccaactcttctttccctcttctctttttca

SEQ ID NO: 241508 - DNA, 427 bp, Glycine max
tgaagaggaagtcgtcctgacagcttgagatgagtttgttagtgattgtgaggctctagaggtgaaggagacatcctcaccacttgtatttcttcaatctttcatctttctcttctctttgttgtaaaggaagcttcccagttatggaaagctaaatcctctattggttcttccttatacgtacttgatgaaaatacttgcatatccatataatgatgtattgtgtgtacactgcgctatcagaactttattctaccatgcgtctaccttgatcacatatatgcatgtgttcctaggatcattctataccggaaaccggtctgattcttacaacttgataagaccgggctactttatctattactctgagggatcggcgcatcgcacctatctgttgatgcccgtctcacgcactctcggacacaca

SEQ ID NO: 241509 - DNA, 423 bp, Glycine max
agcttcatacaattaatatagaacctatattctaatgtcacatcctatcagagcgttgtgttcccgtgtcctctagcatgaggttcttcatagtcatccacctattcatctgctcccccgaacacaagttcaagatcatcacaggatccaaacacaacaacacacagagagtgagttatcacattcctagctaatagagaaacaagacaattaaatatacatattatataaatgagataccacttgcttaaacatagctcacgtaacttcatcatttcgtcattcaaaattcacttttcaattatcaatcacattacacaagaatcgcacacttcgatcaagatataataacacatcaattagcaagcatatgcaatagttatgctaagactcaatcctatatgcaatgtggtaccatgtcag

SEQ ID NO: 241510 - DNA, 438 bp, Glycine max
  unsure (1)..(438): unsure at all n locations
ggaggggactgttcaagttcatatagggacatgttgatgaggacatgaccaagagcaagggcaaggatccacttgaaggacttggagggcctatgacaagggctagagcaaggaaagccaaggaagctcttcaacaagtgctgtccaaactatttgaatacaagcccaagtttcaagaagaaaagtccaaggctgagttgtatcatggcccaaatggaggaggactaaatggcaccactttgtctcaattttagagtgtttagtttgtctaaataatggcccaatccttgtaaagttggctgaccaaaaatatgttttggtttaatcaactaaaagggctctagtaggtttagttcaagttgtaataagggcccaatnggcaacctacgcatcaaccctttgggagaccaatggtggctgacttgttggctgttgggg

SEQ ID NO: 241511 - DNA, 422 bp, Glycine max
  unsure (1)..(422): unsure at all n locations
agctntgccgtaactgtatatgatctattatttcctacaggcagtggttggtggcattggactgttgttaatattccaccaacagtaacatatttgcccgttgatgcagggagacgtgatggaacaaaactgccgactggtgctgttcaaggccgaaatgattttggctatgctgggtttggtggcgcatgtcctcctaaaggagataaaccacatcattaccagtttaaagtatgggctctaaaaactgaaaagattcctgtagattctaactccagcggagcgttagttggttatatgcttaatgctaataaaatcgcaaccgctgagataacaccagtttatgagataaagtatggtgagagtatgctggcaagaggtaagactaacttaaagatcgaagaaatacggatgcataaaca

SEQ ID NO: 241512 - DNA, 432 bp, Glycine max
tttcttatctctcttggcgttatattaaaacgattatgttatctttcagtaaacgagaaggacactcatcaccattgtctctggcaatctcgcttataggtattaccgtcgtttgtatacgcagacaacgcattatttaacctcacatcgtccagcatactttggaaacttaccctctcgcttgctagacggcgatgtaatgtagaaacagaaatgtacagatatcgagcaaccttgtttgctgtccattttgtgccgggttcggatagcagcaggctataacaacgacttatcaatgatggtttactatatgataaaagtaaatgattaacatgattcactcctaacgaaagtagaacgcccattgctaactgctcctgaattttagttgagaagcctcggaaacaaacgttttaattgctccaacatata

SEQ ID NO: 241513 - DNA, 417 bp, Glycine max
  unsure (1)..(417): unsure at all n locations
agcttgctaacccatggaagctcctaatatctttcacactntttggggggggccattcttggatggccttgattttctcagggtccacttggaccccatttctaccaactacaaaacctaagaaaactatattatctacacaaaaggtacacttctctatatttgcatagagggtgtttttcctaaggactgaaagaacttgtctgagatgtcctaagtgatcatctaggctcctactatacactaaaatatcatcaaaataaacaactacaaatctacctatgaaatcccttaagacatgatggcctcataaaggtgcttggtgcattagtgagcccaaaaggcatcactagccattcatacaaaccaaacttggtcttgaaagcagttttccactcatcaccctttttcatcctg

SEQ ID NO: 241514 - DNA, 424 bp, Glycine max
  unsure (1)..(424): unsure at all n locations
agctncattgcctaacaggccagctgacaacatcaattcccaagagactcagcataaggatgcacaggccatagttgagtatgtgaaaagattgtatgcccaagtgaaggtgcatattgttaagaagaatgaaagctatgccaaacaagccaacatgaaaaggaaggacgtggttcttgaactcggtgatgatcctagacatttgagggcaaatgttttccaagaaggagggaatgatgagaatcctgaaactagccaaatacaggctaaagccccaagtggagaaggacaaagctcccgagtggagaaggatgaatgcctcagtagagaaggatgaaggcccanaggcagagacactatcaagactattaattgttgctgaaggcctanattaatttgaaggcccataataaatatggtctaa

SEQ ID NO: 241515 - DNA, 400 bp, Glycine max
  unsure (1)..(400): unsure at all n locations
agcttcatgatgatgatgcaagtgtgaatcttgttttttgatgangacaaacagtccaaaagaatgatttcatgattgagtcaacccgctcaagatcaagattgatttcaagactcaagagacgaaatcaagacgacttcacaagggaagcactgaaaaggactnttcaaaaaccatacatagcgcagtgttgtcttacaaaagagtcttctcaaaattttttaagttaccagagtatttactctctggtaatcgattactagtttcctggaatcgattaccagtgataaagtttcatttcaaaagcttttaactgaatttgcaacattccaaatgacttttaaatggtgtaatccactacaacatattggcaatcgatcaccagtgtatctgaacgttg

SEQ ID NO: 241516 - DNA, 252 bp, Glycine max
taagcaatatcaccgttctctgtcggttgtaccgagtacttgtcatctacagctatggcatgcggcgcactactaatcgagtctttcataagaaagaacggcgtgtccatacatgcgcatggcgaaacaccacaggagacctgggatggacgaaagtgggcaatagacacaccgccgccaactctacagttcaccatcgctaatgcacagaaacgttatagaaatggctataccacatggacgacaaatatg

SEQ ID NO: 241517 - DNA, 412 bp, Glycine max
  unsure (1)..(412): unsure at all n locations
gatgtttgaacgagacccgcaatatatccagacgctgcaaattgaatacccaaccgctgaacaaattcaaacgacaataactttttactcggatgtctgattgagtcccgcaatatatccaaaagctcgaaattgaatggtgaagctctgagctnaattcaacgaacaaaactttatactcggatgtctgattgagacccgtaatatatcgaaaagctcgaatgtgaatgtggaagctctgagcaaattctaaccacaataaccttttactccgatggccgagtgagtccccgcatatatcgagacgctcgaaatggaataccgaagctttgagccaatgcaaacgacaataactttttaatcggaagtctgagtgagtgcctgcatatatccgaaagccctaaattgaatg

SEQ ID NO: 241518 - DNA, 330 bp, Glycine max
tccgtcgggccatgcctgcgaaggcagatatttggaatgttattttactgggacattactcttaaagcaaaaatggcatataacctccccccataaatacaaacatcaatgtaaatttagagcaagcttatgcgcctatttccttacaaacgttcttttgcacaagacatttaaccgaaaaatgcacccatatacaatcaaggcagcttcgttacctagattatttacacgtacctccaaggagtatttgttacttacatcacacacattatcttggtaaactcacatacatgcatactcaagcattttggggcacccaaaattgcacat

SEQ ID NO: 241519 - DNA, 384 bp, Glycine max
ggtccgaatgagcatcaatcatcaccccactggtttgcacggtacttttatcattcagtgactttgtgtagaaggaataattggtgatgtcataacccttccaagtgaggacattaagattctgcccaacaactagcaatgataatgtcttataagcattgtcggtagcaaatattgtatttctaaaccaattaatgaaactcctattgtgttcctgcaacaccctcatcatattcatgtttgggtgagaagctgtcacatattctttgtgagcatctatgtatggtataacatcacgtgcgttgtttagtacatataaatgtgcttgtgatacttgctggcgatccatggttacaacagtgaatcctcgcgtgccgctacctt

SEQ ID NO: 241520 - DNA, 454 bp, Glycine max
  unsure (1)..(454): unsure at all n locations
cttgaatcttatatattgatntgactatcgaacagcttttactcaatagcttcacttgcttgagaatgcgagcttgtacatgaaaaactattacttggttctcgcatccccgagccctataaatcatccaacatggtcgaagataccttctctgtctactaccaagagatggagatatgaacacgtattatcttggcgggattgaaaagtaggtgggaaaagtcctttactatagacattaatataatatatgtttcaatcttgaagataagagaaagaatctataaatttactattagcgtaaagccttttcttatctacacatggtaaatgagaatgcgtagtgtgtttcccatacaaagctaacccattattactaattctaaaacagtattatattgtacctattaatatgcgaaacaatctattagcattatatatcgatatctgagac

SEQ ID NO: 241521 - DNA, 371 bp, Glycine max
  unsure (1)..(371): unsure at all n locations
aacacgacttaccaataattggagtccttctaaaacaaacaatctaaggaattgttcacaatataaaaaaatatgattttttattctatcttatggatcccggtgtatattntaaagagttgtgattgggaatgaaaattcttgttacaaaagcaataatccattccattaatgacgaacaaagcatttgttatattaaacttttttttaattccttaacttatgtagctggtacataaactaaaataaaaatcaaactataatcaggaatcactaccaaaaaactatagtgatgaatgggcactaaacatctaaccttatgcagagagtctaatatttgacttaagcaccaggttcttttcttggaggat

SEQ ID NO: 241522 - DNA, 442 bp, Glycine max
tcttatccaaggctcatcttggtggtgaagctccttctttcatggcttattccctagtggatggcgccttctctcacctattctcctttgtcttccgctgcatctccatggtggaaaatcaccattaaaggacctcattgaagctcatagatccaacctccatataagccccacaagcaagcttccatcagataccctcatctgccttggcatcaaactctcctagactttctttaccattgtttagaacaaaacatttacatccaaaaacatgtaaatgtgcaatatttggttttctattgttaaaaagctcatatggggttttcttaagaatacgtctaattaacgctctgttcataatataacatgcggtgttaactgtttctgcccaaaagtattttggaagacgtgtgtcacttaacagagttctaactatttcttc

SEQ ID NO: 241523 - DNA, 423 bp, Glycine max
  unsure (1)..(423): unsure at all n locations
agctngcacttcttcactctccttaggattttcagccctactcataccttttagctttgggagccaagttatcccttgcgttctagacttcaaccatttgcgatagccgcctatgaagccattgctacttcccctaatctcattatcttttctttccactctattccacgctttacagatcctctggagtgtcttcgcattagcttcattgaaacctcgtgcgatgaaaggcgcgatgatttcctctgatggcgcacctctcatagggtagcctaactgtcttatggccaacatgggattataattaatacaacccctcgtccctatcaaagggacatttaggaatccttcacatgagcataacacttctgcccctctttctttccaccgtgggaactaactgatnggacgctctgtcatgcc

SEQ ID NO: 241524 - DNA, 434 bp, Glycine max
  unsure (1)..(434): unsure at all n locations
ctggttaaagattgaccacaggcctacatctattaaccactccatcangcactgccagtctggaagctctggttaaagatagatcgtattgagctatatcttgactctcgtctgtaaatgatgcaacctgcattggaggaatgtgtatcttttatattctactgcctacaaacatgtaaaagaacaagattgacaagctccattatgaagattggcatacttgtcgaattgaatcaattgtgcgctctactacagatgctgctacagaataagctgcttgtccatgggatggcaactctgctaacagaaagctcatcatggaaccacagattacaagacgtggaatacaacatataaagacaacggtataagccacccttgagaatgccatgactaacgtcctaaaaaacgcccacactatatgaattcctatt

SEQ ID NO: 241525 - DNA, 420 bp, Glycine max
  unsure (1)..(420): unsure at all n locations
agcttctacattcgatttcgagctttttttatattacgggactcaatcggacatccgagtaaaaagttattgtagtttgaatttgctcagggcttcggtattccatttcgagcgtctcgatatattacgggactcaatcggacatcagagtaaaaagttattgttgtttgaattcgctcagagcttcggtattccatttcgagcatctcgatatattacgggactcaatcagacatcggagtaaaaagttattgtagtttcaatttgctcagggcttcggtattccatttcgagcgtctcgatgtattacgggactcaatcagacatccgagtaaaaagttattgtcgtttgaatttgctcagagcttctacattcaatntcgagcctttcgatatattacgggactcaatcagacatcc

SEQ ID NO: 241526 - DNA, 412 bp, Glycine max
agctagtgaaaatacaattcaaccttcttctttttttcttgtagtatttttgtcacttcacatgtaacatattctccatacttgtaaagatcttttttataaaagatttaaaatgatttaatcatttaacctttaaagattttgaataaaaacaagaatttgagagtttcaattagaaggaaagtaaggaaataactataataattaagaaattatactcacataacctattattaaaaacctaacatgacattgataataatagtgttataattaaaccataaattatctataaggaatggaataacttaatcatttcacatggtttttaatctctcatttaggttattaaaatttcttgatggattagtgtagaaaggtctaggttcgataggtgtgattaaggattgag

SEQ ID NO: 241527 - DNA, 421 bp, Glycine max
  unsure (1)..(421): unsure at all n locations
agcttaacaatcatgcttatggtcactctctttgaagaaaaaaanaagaattagtcaacacatgttaacacattgattaaacacactcatttgcaacacacctgcaagttcaaggtttttgacaacgttaatacacacatcaagttttcaagaccccttgtatcacctaacggcttgccatgacatcctaccgcacttcatgaattatagagatggctagtcttataactcatgactcaacagtggatttatggtataacaaacattaaggatgcaagacacatacaagcattattatcaagtctcatttgctcatgcaaaagaaagcacaaataataattcaagcatgctcaacaaagtaatcataagtaaccacacagagtgtacaccagaatatgataagcacataacacactagccg

SEQ ID NO: 241528 - DNA, 285 bp, Glycine max
catattcatggtgggataccaccactaaaggaccatattgtaactccaagatccagcctcacatataggccacagaatcaagctttcttcaagtggtggtcagaagccaacagcttcaagctcgcgcttcataaaccaacatttactcgtgttgctttacctactcttccattatcgattattcattattgtgcatgtgtctcctcgcatgtctggtgataaatgtagataacatgattctctatagcgtccactgattctagccgctatcgcagctagattcga

SEQ ID NO: 241529 - DNA, 458 bp, Glycine max
  unsure (1)..(458): unsure at all n locations
tcttcttccatggctaattccctagaggatggcgcctcctctcacctcttctcctttgacttccgctgcatcttcatggtggaaaaccaccattaaaggacctcattgaaactcaaagatccagcctccatagaagccccacaagcaagctttcatcaagtggtaatcagagcacaagagcttcaagtaggtgctccttaaacctccattaattctttttgctttaccttctcttccatttttgtttcttcatttttctgcatgtatctcctcacatgtcttgtgataaatgttgataacatgattctttagagtttccactgattaaacatgctatagaagctagatttgattttctatggttcacatntcttgctctttttcttgaaccatgaaattgtgtagactctagcgtcccttgaactttgtcttgtattttttgggctgaacctaaacca

SEQ ID NO: 241530 - DNA, 429 bp, Glycine max
  unsure (1)..(429): unsure at all n locations
agcttaacacactttatatttgtgaaacttgttttttggaataccaactactaagtcctttntaactagatgattaagatgatgcatgtttatatgtgcagccctacgatgccataaccaagtatcatcaatcttacttactaaacaactaagttcacaaaatcaagcatgttcaatattcaacatgtagatattgcttattcttttacctatgtgcacaacctcactagagatagcttcacaaatgaaacgacaattcttgttgaattcaattttgaagcctttgtcacatagttgactaatgctcaagagattttgctttagcctattaacatgtaggacattgtttatttgtatcctgtgttgatttccaacatttccttttcccataattcttcccttattgttgtctcaaaagtggcacatcct

SEQ ID NO: 241531 - DNA, 355 bp, Glycine max
  unsure (1)..(355): unsure at all n locations
ataacgtattggaatcaacccattgaaatggcgacgaccaaacacgctcatgtataccctcgccgacctgatcccattaaagtgaagtatctcacagaatataatatcatgctataattacaacaaagccctattatctccatcattatcccacgacgcctataaaaccttaaatatcgattaacaacttatgcacatgtaaataatttcatgattcctcgtgcgatataccgtgcatctcattgaaaactgaatcttcaatcaacaggcctacttntatattttatcctctacagtgcagctttacagtgcataacttacagaggtgctaccctatgttgctgtgtatatctaa

SEQ ID NO: 241532 - DNA, 429 bp, Glycine max
  unsure (1)..(429): unsure at all n locations
caagcttggtctctgcaaatcttcacacaactttatctctcanaactctctggaacttggacctttctctctctagaaaccctagacatgcaaagctctgaatcccagtccaaactctccaaacaatctgatttcaggtttaaataggtggccttgtttgtgctcgtgtacttagcgcacatatggaccgcttagcacacgttagtgatttttagcttagcgcgcctttctcgcttagcggatgaactgaagcggtgcacttagagagatgaagcaatgcgcttagcgaacctgtacaactcatcttcttttggattcttcctcatgcttagctcaggagtgttgcgcttagcggatggtcgctaagccagcagattggcttagcgagaaggtgaaaacaaccttttccaaagcttgcctaattaacct

SEQ ID NO: 241533 - DNA, 459 bp, Glycine max
  unsure (1)..(459): unsure at all n locations
ttacagcagattctagtaatgacccactaacctagaattttaataactttatgccattaacctagggaattaaataaaccttaatggctgagtgtaactgaaattgtggcaaccaaaagtcacccccaacagccaacaagtcagccaccatttggtctcccaaaaggctgatgcctacgttgccaattgcgcgcttattacaactngaactaaacctaactaaagaccttttagttgattaacccagaacatatttttggtcagccaactctacaaggattgggccattatttagaccaactaaacactctaaaattgacacaaagtggtgccatttagtcctcctccatttgggccatgatacaactcacaaccttggacttttctctttgaactgggcttgtatctaataatatggaaacacttgtgaagagcttcttgctttcttgcctaaccttg

SEQ ID NO: 241534 - DNA, 421 bp, Glycine max
agcttaggaatccaaactttgtagcttcaatgtctttatatcatactcgtgactaggaacccaaaatttggtttttttgaaaagcataaaatagggacttgcttgtaagaatttgggctgccccatgattggtactttgcacctaagtaaagtggggaatgcttttcaatagtgtgtttacataggtaaatataaagggcatgaaattatttgcaaagggtgaaggaatattgaggtcacttcctaaatgaatgtatgatagcacgggattcccttttgaatgcaagtatgtgcataatgtaaatatcttgccaatatgcataagtgtgagtgaaacaatgaaagtttgtatggtatatatatttcgagtgtgtgttggtagtttgtgatatcaaatgtttaggacatagtttagtgtaaa

SEQ ID NO: 241535 - DNA, 244 bp, Glycine max
cttaaatactaagcttcgagcctaacttgaactgcctacacggaaacatgtttatggctatgaaccctaaatctggctggaggactagagctgtatgagaatacgcactcgtttggaaaaatttgcgctgccccatgattggcactttggagctcagtgacgtgggagatgctatttcacggtgtgtacatatgtgtgtgcatatatattgcatacgaatatgtttccccgagtgtgaatgtat

SEQ ID NO: 241536 - DNA, 395 bp, Glycine max
  unsure (1)..(395): unsure at all n locations
agctttttgctatctgtaagacgaaatttttatatcacgaagagactaacatcgnctacagcgcccttcgtcaatcgcggccgacaagcccgttaacacgcggagatttacgtcatcttccgcgctcacaagatctgtcatactgacttttgagtcacgctgacgggcggagatacccgagtggttatccgtataaaactttttgctatctgtaagacgaaaagcctgatagcacgaagagactaacgtcgtctactacgcccttcgtcaatcgcggccgacaagcccgttgacacgcggagatttacgtcatcttccacgcttacaagatctgtcatactgacttttgagtcacgctgacgggcggagatacccgagtggttatccgtataaac

SEQ ID NO: 241537 - DNA, 349 bp, Glycine max
  unsure (1)..(349): unsure at all n locations
cttgtaatcgattacacatcacctgcatcgatcaccagattagtttntttacactcatcctcacagtcacatctttttatctgtttatcaaatggccatcaacggcttatatatactgtgacttgcacacaccatatttcacaacgagtctttcagaccaaacaggactcatcctctctataagactaacagctttattctcttacaatctctcgccaaacaattttgattcatcatgaactatccgagcgctccaattgttcaatctatctctcctcagagagatttcttcctctcttcttctctattctgaacagggattaagagaccgagggtctcttgtcgtgaa

SEQ ID NO: 241538 - DNA, 423 bp, Glycine max
  unsure (1)..(423): unsure at all n locations
agctntaattttaacttaagagtggaatgtttttgtttatattcatataatgtaatttactctaaataaaattccaataattttttattagagaagaatactaaatcacattatattgtgggcacgttttttctattagaaccatatatgcctatattcctaatcaataatgacagggctttggtacatgagtattggccttcatttaaaattacattatagttgtcaagctaactataccgttggactacgttgaaggttcatggacctaaaatattttcacacacacagcttaaggttattagacacaggtaattaacaaaactgaataccaattagaatctatcagatatagtagtcaataattaatatattatgcgtgtgaaattgccggccctagaagttctcacaaaacgtgtctag

SEQ ID NO: 241539 - DNA, 472 bp, Glycine max
ggtacgattatggtgtacccgtcacatgtggtagcaggtgtgtggcgttcgatggcgcaagacgactatccacatgcaacaatcacacataaatccacgctctccagttgtccaccttcaactgagctcacgtactcccacgtaggccttatcctccttcctctcaacaccgggtccccatcaatgcctgcaagcttccgtaacatccaagcaatttcaacatccacacatcatgaactatcaaaatgaagcaaacacagggcagaggcagaaaactctgcccaacacacataccaataccacaactttccttactcatataccctactaacatttccttcgttccaattcgttcaccgttggatcaactctaaacatttaactggaggtccctagtacataagtctacatatggacctgtgggatctgctacaaatcgtccgatacccaatatgtacaatcctctccacaa

SEQ ID NO: 241540 - DNA, 401 bp, Glycine max
ccttaagtcacctgcggcatgcaagcttctgagatgagtgggggtttcttttgtttgataatgacaaagatgatgataaaaagcccaaagaatgatttcaagattgagtcaacaagttcaagatcaagtttcctgagaagaaatcaagaagattcaagaatcaagagaagtttgatttcaagattcacgagaagatgaattcaagattcacgagaagaattcaagatgacttcccacgggaagtattgaaaagtttttttcaaaaaataaacatcgcacagttttgtttttcaaaagagtttttctcaaaattttctaagttaccaaagttcttactctctggtaattgattaccagtttcctgtcatccgttaccactgataaaatttgatttcaaaagt

SEQ ID NO: 241541 - DNA, 278 bp, Glycine max
  unsure (1)..(278): unsure at all n locations
ggtcaagcttcntaaaatcaaatctcacccactcatatgatatagatatactctccaggattaatataacatttatgataacgtatccaaaaatgtactccagaacaaaatataattctagctttcacaaaactcaattataataagcttcagcttagctcttcatgtagatcaacatgatcaacatttgagcacataaagacatgtaaaatcttaacgtattataacagatttaatataatactaatgctaacaatgaatatgtatcccttgaaaaa

SEQ ID NO: 241542 - DNA, 401 bp, Glycine max
  unsure (1)..(401): unsure at all n locations
agctagcatttggaattgcgaaagcctttcttttttttatgattagnacctgacatctcaaacaaacaaatcaaacgtaacaagacaattatagttgctgtttgaatacctcacccactcaagtgtatcacacaattatggcttttctctaatgaaacactcttgccttttaccactctaattccccttgagttcttaggtaattcaagagattatggccacaacaaagaacaattcaccaatatgtgtaaggtaaggctagagagacaaggaaaaggttaaccaagaaaaaggctaacaatgtttttaggcacaaatgaaggaaataaaattcagaatttaggaattcaagtaacaatccttcatgcaaccaatatattaccttanagaagaatttttta

SEQ ID NO: 241543 - DNA, 65 bp, Glycine max
aaaccaacaccaacctccccatgaacactgacccgaggaaacaggatcaccacttctccaccccc

SEQ ID NO: 241544 - DNA, 414 bp, Glycine max
agcttatggttaatctgccaaagttttctttttaagagtggccaaaagtaagatttgcagagggtcagagaatggtttataacaacaaaaaagcagaaggctttggtaacggagtaaatcaagtgtagaaggaaaattcatacgcaagtgttgcgagaaagcagggtcaatttgaacagaataaaaacaggtgagcctataaatataagggagatgtgaataggaaaaagtctgttcatatggctttctctcctaagcaaaaagttctaaagagttagaaagggcctatgtgggtagagtaaccactaaccaaacagagggattcatattttactgggaagaagatgcaattggaaggcattatgatctctctgtcccatatgattgaagatctctaaatttcttaatgataaa

SEQ ID NO: 241545 - DNA, 435 bp, Glycine max
tagttgagctacctactaatggtgcttctctgcaactgtatgcctcaagctacagatgttgttttgtctttggtgattaattccatctcgaccatatggtattgccggaactaaatgatatcagtaacaattatgttccttcaaatattgccattgctaatatttttgcaactacctctcttgttggatacatctccaatggttgtctaaatattccatatagtgtgaatgtatgtatacatgattttgatgatgtcaaaagaagaatcaaacaaggctcatttgcttcaagattaatacaagattgtttcaactaacaaagccttgattcaagatttcttcaagatcaagccttgcctcaaacaaaaggtttcgatcatacaaggcacatgtaattgattaccaatacatgttatcaattaccaacgcacatgt

SEQ ID NO: 241546 - DNA, 422 bp, Glycine max
  unsure (1)..(422): unsure at all n locations
agctngnngtatggttaagatattatcttgttgtattgctctaagtttttatattttctagtatgattagtcatttatgtatgttttatattacttacacactttggctttttgatgttgacaaaggggaagagaaaaatgggtattttaagaaatcaagatgttatatttttcaagatttaaaattaagcataaattcaaaaacaaagggtgagaatatggagaattaagtgagtgatcgactaggaaaaagaatgtgtatgtgtttcttgatttcagggttgtcatcatcaaaaagggggagattgtggaagcaatgccttccaaggttattttgatgatgccaaagaatcaagagtcaagcaaattccaaagattcaagaatgaagttttcaagaatcaagtttcaagaatcaagattc

SEQ ID NO: 241547 - DNA, 406 bp, Glycine max
gttcctcaagtggtatcagagcacacgagctcttagtatgtgctccttacacctccattaattttcagctttaccttgtgctgtatagcaggtccttcattgttctacatgtatctcctcacatgtcttgtgctaaatgttgataacatgactctttagaggtttcaccaattaaacttgccatagatactatatttgatttctctatggctcaaattacctgttctttgtcttgaaccatgaattgcgttgagtctaagttccttcgagttttgacttgacattttttgcggctgaaacctaaaccatataattcttaccaaaacatttaagtagaagaaaacctcaaaaatttagagtgatttgttcacctatctgagttttgtaatagaagccatgtatagtc

SEQ ID NO: 241548 - DNA, 425 bp, Glycine max
agcttgtaaatatgtagaagaaaaaaggagtatttttttttttatatgttcttatatagcaatatgttcttatttttcaattattttaattttttgcattagcagattttttatgcttaaccatgactgtgttagattttgcataaacataaatatatagagttaatgttatatttaatcggtcttcaatttatttttattttcttaatccgcaatttattttgttactaaccttatctactattctaatagaattttcctttttttattattttattagaattatttatttttttaaaaaataagatattcaaagacggttatttaaaaattgttttaaaaaggtgtttctttaagacgggttttagcatttctctaaaacgattttctaaacctggttcgaaccgtcgaagaaagttcacttt

SEQ ID NO: 241549 - DNA, 454 bp, Glycine max
  unsure (1)..(454): unsure at all n locations
ctgntgtgcaacaatggtggatgggagatatagaaaaattgctgcgtgagagagagagagggctgtctgacattctgtggggctgagtgaggagagagaaaagctttttggtcttaaataaaaagggttttccctttttccattattttattcaagctcagccacatgtccttatttgattggagcaaaaagggcccactttctctttttgactgtgacccatactcagtcacaaaagtggggaaaaatctgacctttgaaacgctaaaatcctgcctcggtttgcgtgccatttctctgattccagtttctcgcgtttctctgcgtccgtcggggccagctttcgaaagcaagcaatatatatatcataacgctcagaataaaaccccgagcgtggttcagaggttggttcgtcacattcaagttgcacgcaaacgatgattttaactaatta

SEQ ID NO: 241550 - DNA, 440 bp, Glycine max
  unsure (1)..(440): unsure at all n locations
ccttaagngaccgccgctgcaactggattcttacaataattaatttctacttccaaaaaaaccaccaaaggatacaaatcatcccattgtctaacctcaattattatattcaactgttttctaacatttacacgaatagataataaagcaacaatcaactcattgttnatcaaaattaaattctagattcaaatgcaacggaaaaaccccatagtctaaatgcaaagcatatttaaccttgtaattggaatcttcaaaccaatacaatacaattcaatgtctaacatatttttctgatccctcaaatactttcaccttcaatagctgatcggcgcaaaaaaactgttgctgctcaagtaatgaacaaaaattataatcaaaatatgtgagcttttatgacacaacctatgctaaatcacaaaattatatatctcgatcat

SEQ ID NO: 241551 - DNA, 445 bp, Glycine max
  unsure (1)..(445): unsure at all n locations
cgcctcgctcgcaatattcactcataaccgattatggtccatctccttacaacggccctctttgcttttattggccaaaanggaccattcaaagcatacaatcaacacataactctatcgcttatgaaagaactacactaggttctaacactcctcatcgcaattgacgatacgcatgagcaaaggaaacacccttgtctaccacccaatgatcaataatacacaatagcccataaaaagcaaaataaaacataacaaaggggaaaatacataaaacataaaaccgggaaaatacgtatctttgaagtcatatttgcacactatattgaaggctgttgtcccttgtgatggacgcgtggcgtgctaatacctttcctgtgcgtaaaaacaactcctgaacctttcacgaataaagtttgcagaccacccgctccggttttctgac

SEQ ID NO: 241552 - DNA, 427 bp, Glycine max
  unsure (1)..(427): unsure at all n locations
agctntagtgttttttgggcttctatgcaaatctttgtttgagaaggatcaggaacacccaaacaattaaccaaaaaaattaagctttgaaagaactacaaagaaaacgcacctgtggtcataaaaatcgctatttttgttgagataaaaatcaaagctttagtgtgttgttcgaccttctctgcgaaacaaataacatgcaagataagtttaagcaaagcaacatcataaagctttgaaggagatcaatataaacgcaaccgtacttataaaaatccaaaaattgaagctttagtgtgttcttcgagcttctctacgaaaccaaaagcatgcaagaaaactttaagcatgaaaaaccgcaacagatcggaataatagaaaacgcagaagacggggagggtaaacgaagcacatcaacatcgaagca

SEQ ID NO: 241553 - DNA, 400 bp, Glycine max
  unsure (1)..(400): unsure at all n locations
agcacgagtattcatgtttcatctacgccttccgagtatgtgcattctatattatggggatcatntatagtgaataactcatggcggaagctcatactatctcactatcatagatgatttctcaacaagagtatggttgtatgctttgaaaaataagtcaaaagtctttcaaacattcagagaatggcatactctagttggaaatacacttggtacagaattaaaagttctaagaactgacaatggcctatagtttttttccgagcagctcaatgagttttacaggataatatgcatcaaaaggcataaaatagtccctcacactccacaacagaatggcttggacaaagaatgaatatgaccattttggaaagagtgaagtgcatgcttctaagtgtat

SEQ ID NO: 241554 - DNA, 271 bp, Glycine max
tgcactatctttaaacaaggtcatttgaactcaccagttcatgtagactcatatagtctcatagatgcgactcatatacttaactagttaattcgtaagagttcatttcatataacactaatagccaattctctataactaacacggatcagatatctgaactatgtaattacagacaatacgaaatcataaatgtcataatacttagataacccactctagtaatgtatcactactaaataataactcgcagatgttacagtagtgatat

SEQ ID NO: 241555 - DNA, 425 bp, Glycine max
agcttatgacactctctacccctcacatatatattctttaaaggaataaaaattcaaatattaattaaaagtatttttaaaacatttttaaatacaagcctttcaaaggggtaaaaggctcacattcccttccttctacatcatattcaaacttgtccaaataaataataaagtcatctcggctcaaacaaggctgtctaagcttcatacaattaatatagtacctatatcctaatgtcacatcctatcagagcgttgtgttcctgtgtcctctagcatgaggttcttcatagtcatccacctattcatctgctccctcgaacacaaagttcgagatcatcataggatccaaacacaaacaacacacatgaagtgagttatcaaattcctaactaatggagagaaacaagataacatgtaggtat

SEQ ID NO: 241556 - DNA, 386 bp, Glycine max
tgtccctgagaaactggttcccagatagaaacagggagtgaatattgttgttaaccttaggcttgcatcaagatgtatggaagcagacactgagatggaccacaattaccgcacaattgctgaatagccttatgaaagatacttgtgagcctgatgctgccatagatgatccaacatacttctctccaactgttgatgagccctatgcctataaagatgtactatatactccgttccaatgctggactgtctcttctcctccttagaggaaccactatgaataggatcttcctgaaaggtatccgtgtaccagactcttatgtgctccatagaagttacacctggccagactatttgggaaaaccctttcaacaagttggcaccgc

SEQ ID NO: 241557 - DNA, 440 bp, Glycine max
  unsure (1)..(440): unsure at all n locations
tcattacttcctcctttacccttaatggatcttccatccatccttccttcaattacgaacccctaatagaatttttctgcctctatactttatggaggaataatttatttttttgaattagtgtcaccctccatagttcatcttgttctagctctttgcttctctaaagactccaaatacgtggaaactcttcaaagatccttttgtagcttcttttttctatccaactcactttaaattaaaccgccttcatctcctttcatctccaagctatttatttcctccatgatagctttgaaagatttatgcaagacaccaaacagttctttattccaaatctccaatttacctttcaaaccctttcatttctcttttaagatatatgcccccatccttgtgttcacatttcctaccatgatntcttcacaaagtcaccaaat

SEQ ID NO: 241558 - DNA, 423 bp, Glycine max
  unsure (1)..(423): unsure at all n locations
agcttggccaattcttccatttcatgggtcttattgagttnggaagtatgaacttttgcacttgaataattgggctgtgagtttgggttttgtttggtgtaattagtttaattaggtagattagatgggtctaatcaagacctatcccttccttctgagtagtcactctatatattagtggaagttagttagttcattttgtaaaaaatggaattagttacttgttgtacaagttttaggatcaaactnttttttctctcaactgttcttcattcttcttcctcttttcacttttgttcttccattttcttgcacaaaatttcatcgattttccattggtgatgatcatggagggctaaacaattaatcaatccaaggatccactccaagcaaggttgaaattgagttcttgtttagtatttc

SEQ ID NO: 241559 - DNA, 394 bp, Glycine max
tatacaaacccaagctttatattctgctgtattcccactaatatcaccacacatattcttatatttataaagcctttatattaagcctcctgctcctctttatctgccataacttacacctatacttaattctttaccccatgtgtggttcctaaacattattatcatcatcacatactacgtatcttttggaatctttcaaatgaacaacaggatactatctcgataatcaatatataatcataactcatgataatcaatccaactaatataatcataattcatgctcaataatatattctatttcaataattccctgaaagacgatacatccgtatataattcaatctaacttcatttgaaaagacgatcaaacgaagatgtggctgttcac

SEQ ID NO: 241560 - DNA, 423 bp, Glycine max
  unsure (1)..(423): unsure at all n locations
agcttcaagcacagatgctaggacngattgttattgtttttctnnnnnnnnnaaacaanaanangtagtgattcctgttatgggtcaacattggagtatgtagggttctatttgtttgcatggtaatggtaggattagatgggcaacaaaggtatggatgggttgaaacttgaaagtcaagcttcttgctagtagggattctagtgatattttgtgactgctccaagaaagtggctattgaaactgatctataagtgaattttagtgccaatgctcttgtggtgtaatggcaatggtgttgcatttgggacctgtttattaatgattttctattgaaaagatgggagaatatcttggttatagtctactaagtgtcatttttggaaaaaagtttctttttgccttacgagatatagatatcat

SEQ ID NO: 241561 - DNA, 370 bp, Glycine max
gctctcgcgtgaaccagagctattttggatataacgactatcacatgcggcaacccagctgccactcaagctctagtgaagtggaaacatcaactctccgaggatgccacatcggagttctactctgatcttttgccgcactatacttccttcaatccttgaagtcaaagatatttttgaagggcgggtaatgataataaagaataaatagccctcatgagacaataaatacagatccagggagacaacttgggatcggactgacttataaatacagaataaatacgataaattgagtgagagtaaattctgtcatggagacaaattatgcgatggattgaccactacataagaatgtgtctggatggac

SEQ ID NO: 241562 - DNA, 420 bp, Glycine max
  unsure (1)..(420): unsure at all n locations
agcttcggggtggatgatctgctagatgnatccttgtcttcatgttcgngtgtctctgaatttggattgtcgaaagattgtgaaaaaagttcatgcaagtgatttgaaaacgtggaatggttgacatagagagtttaagatgcagttctctctaggtgtttcagcatcttgtctactgttttggcaaatggttgcacgatgatgttaaagttttgcatcttctttttttggaggaggcggggattggacttggaaagtctctgaataaaagtagtttgttcattggtgcaataataggggctaaggtctggtgtcccttgtggttcatcatggtgcatgcactctccacagagggcaagagcagttggacctgcatatagctcttaactggcctgtctggtttctaataaaaggatggga

SEQ ID NO: 241563 - DNA, 414 bp, Glycine max
agcttccatcatctagtgtcaagggatattgtcttgtgttaagggagattgttcggtgtcgagggtggtaacctcgactagtgtaagagttgtagctttgtgaggcatgtcaagctcccctagcttggacgactgttgtttaggcttcttctggcaagttgtctggggtggacatgcttttgatcttgcaagcaaagttagacgtgtttggtggatgatgtccttatatatgacaattcaacccttttttgatcattggaggatgcattgaagacaaatgtttcgttttgtctttagctacaggcgagtgcaacacacacatattactcttgcatatgtatcactcatgaagtgggtgtgtactgaatatgcaatacgtgggtgagtggagctgcatcatggtttaaaaaatta

SEQ ID NO: 241564 - DNA, 400 bp, Glycine max
ggccctaacctttggaatgagctatagaaatagccaaatcaactccctctagttcagttgtaaagaaagaaagatacccacatataaaacatatcctcctaagaaagcaccagagtaataatgaaataacctaccatagcgaagggaaccatgaaatgattttaccagccttgggtgcatgaatattgatgttaaaagctttgatgacctgaaactcactcaaagaggatctctaacagcttgaagtaagataaccggcccacaagcaaaatatgagcaaacataaggatcattgcttgctgctatgagacaaaaagattatgaaagcacgcttgattgtggcaacttaatatcgccccaaccacacagataaaactagcaagaacaacatctttagctt

SEQ ID NO: 241565 - DNA, 426 bp, Glycine max
agcttataagaacaaaattgcctaaattattttcaaatatgcatgtgaattaggaagcatcaacaagaatcaagccaaggctattgtgcaagcaatcaatggggcaaaacacaccaaacgattatgatgatggatggctcaaattctcacaaaggtaaacttatcactttcaaattgagctttcaaaactatcattacatgtagaggaaaaacaaggatttcaaatcacaaaatgtcaagagacttttattttcagaacaattacccattacttgaacatatcctataattcaaagacaaacatgcaaatttaacacaacaaaactaacaaaattaaaataatttaacacaactaacaaaacaaaaaccaaagaacacactccccccatacttaaacaacacattgtcctcaatgtagcacaatta

SEQ ID NO: 241566 - DNA, 448 bp, Glycine max
  unsure (1)..(448): unsure at all n locations
tggctacnacttccttataatacgctgccaaacactctatctcttataagacacccctaccttgcaagtattttgttaaataatgtgattgacgtaaattgtttattatattcacttatataaatgtttactattttgttctttcctattagtatgctgatagctcactggaataaaagaaaagctaaggtcggaccacgtgatagctaactggaatacaagacaagctaaattgctgggaataattctgatatctttttatttcatcattacccctttttatagccatttcatacaagatattctgctaagttgttataacagaattttgaaattgcataaccacacaggtatcaagtacaacgtgtaaaaagctttaagcccatagtacaaggaattctagaatctgctatccggcttgtagctcccctggtccttatacaaatca

SEQ ID NO: 241567 - DNA, 419 bp, Glycine max
  unsure (1)..(419): unsure at all n locations
agcttaggataaggttatggattgttgttttttctcataggtcaagctacaaattgggacaatgaagttggctcgagtattttcggtggaaagctccagttatctatttatggtccatggcctactcaatctttaataaatgaccaagttttacaaaaatcaaacttttgtttttctgaaggaaaaatcaacttattattcggctttgattttaacattgttactcttacgtatcttgcaacagcgcaaggggtccagctccaaaatctagttgtggataaatctaaaattcaaatggatcaagtgtcattataaaatagacagttatgattctaggaatcccttctaaattgtncaattttagactctggttatcacatcaaacttgttgtttttggtttttttttttttttataggc

SEQ ID NO: 241568 - DNA, 409 bp, Glycine max
tgctctaaatatacattgatgtctcgtatgtatgggaggtggttatatgccatttttgctttaacagtagcgtcccactggtcaaattaactttccaaatgtttgccttcgcaagaatggccccgaggaagcttgcctcatagaggtacactaaggacaatgcggccgaaggaactagttccgttctggagtacgacagtcaccgcttcatgagcgttgtacaccatcaacagcttctaagccctcaagggatggttgtttctccgggagcgacaccttcagctcacggacaatgagtatacttgatttccactacgaaatatggtgcccgcggtggccaccacttgctactcccatcctaatgtttcatccacaaataatccctgtgtcttaccctatgcatggtcac

SEQ ID NO: 241569 - DNA, 391 bp, Glycine max
cttacaaaaaaggttcatcaagtcaagttgaaatatggatgtaaccatcctgacaaattgcggcaaaagatgaatcgagtcacatcactgcttcgtctactgccaaacatatttaggattattgatgtccttgttacttccactttcaccttgacaaagatgtcatggaccatgttgaaaatctaaattgattcaaccccatatcctgcgtaaaaattcgcaatacttcgactgtacatcattcgcatgcatccatgcttttcattggttgcattgctcattgcattctttccttgaaaaataaaataaaataaaatgaacttatcaaatagaaaaggacacgctttacggcgcccttaccgaactcgtgctagagctatagtaatgggtg

SEQ ID NO: 241570 - DNA, 428 bp, Glycine max
agcttatcccctaatgcacctattccattcttcttttggtcatcatcaccataaacagcaataacctctctccagccaaagtagttaacaaagtctgctattgcagtcatttcataaatgtcactaaaagcagttctaataaagaatgggaattgaagtgaagaaagagtagggtcagtggctgtaaatgatagtagaggaacttggagctcgttcgctatatgagatatgacatgagctgttgtagacgtctggggaccgattatagccacagtttgtgttgccatgagctgcaaggctattacacacaatttatgtaaaccaagagtaataatctgccaaactttgaagtaacttgtctaatagaaaaaaagatgcttttaaagttttaacacataaaaaagatgggaatattgtgaaggacgtac

SEQ ID NO: 241571 - DNA, 404 bp, Glycine max
taaataaccttcttatccctataaaacaggatatgctgtatctactcacttttattaattccttataactcaatcctttaaagacttttctacctcatatatattgctcagtaacatcatatgatgtactaacaaccaattcttattaatctatcatgtcatcaagaagtttagtagattaagcatgtataattctccttggataaaacgtggcttaaatctataatcaactactctgacgctgccaactagtctgaataaacgaagacttacaaatattttatttcttcagaccaacataatgttaacaagttgaatacgggtattctatcaaactcattaatctcatatatgacctggtaagtgcctacacagccaatatgcctattatctgttactaaaat

SEQ ID NO: 241572 - DNA, 421 bp, Glycine max
agcttccttacgtttctccttacacggattcctagtattattgatcctaacagcgattagatggagaagcgcgtcgttggggttctgcacgagattctgagtttgactctgcacaagaaaaccaagaggaactacttgaggggcttgagggaagagtttaaccttccgcataagtttacccgaattttcaccaggtatcccgggattttttacctctccttgaagtgtaaaaccaccacggttactctcaaggaagggtaccagagtgggaagctagtggacccgcaccctcttgctcggcatagagataagttttaccatgtgatgcagacggtgcttctatatcgcggcgatggatcgttgaaacctcaggagaacaattcgctggctgagaatgataaattaaggagtgaagactctg

SEQ ID NO: 241573 - DNA, 446 bp, Glycine max
  unsure (1)..(446): unsure at all n locations
tagagtaactcatgtacctcaacttctttntgctgaccccgatcgctagcttcaatcttgcgatgagtgcttcatactttgcttggttgtttgaagccttctagtcaaattttactaattgcttgatggagacgttatttggtccttcaacggttacagtcacgtcgttgcccttattattgaaggcttcatccacatacagcgtncaccagccttcactgatgcccttagtaagggggagcttgattaggaaatcatccaaaaacttccctttgatgaagcctctaggttcaaatcataagccaaactcgaagagctcgaccgaccatgctaccattcgtccgatgaggctcagctttttgagtacttgcttcagggagtggtcaatnttcaccataacctggtgactttgaaaatattgtcgtatatgcctggcagaatgaatt

SEQ ID NO: 241574 - DNA, 416 bp, Glycine max
agcttgtaggattatggggtacccatcacattgttactaggtggcggtcgggcgatggtgcacaacaagttttcccacatccacaatgcgcgcataaacccaccatcccctgttgcccacctccaactgagctcacgtactcccacgtagcccatatcctcgtttctctcaacaccgggtccccatcaatcctcccaagcttccacagcatccaagcaaaacaacattcaaacagcacaagctatcacagccaagcaaaacagagcaaaggcagaaaactctgctcaacacatcaaccaaaatcacagcttttctcacttaaagaccccagtaacaattccttcgatccaattcgttaaccgttggatcgactccaaatttttactggaagtctctagtacataagcctacattat

SEQ ID NO: 241575 - DNA, 422 bp, Glycine max
  unsure (1)..(422): unsure at all n locations
agctcattaatggtgaacaacaggtattcctgattgagaataaggcattgnacaactcccataactttgcaaaactgcatggcatcactggctggagtgacatcataaagttggagagtctctgaaaatgattaaggggttatgcaggttatgacccgcccatataaaatttatctaggacatcatggatgaacttgagttgagagagaaaaagtcctgattaggtggatatgagctcaactccaaaaaagtaacgaggagtgcccatatttttttagcacaaaccactttgatagagctgcaataaaggcttaaaggaaggtgttgtttcccgttaagagcaaatcatccacatacacaaggaaataggtttgtatgttccatgttccaaaaatgaagagtgagggatcactctttcttgt

SEQ ID NO: 241576 - DNA, 394 bp, Glycine max
tctgacgacagtgaagacgtacaagtccctatcgcagatctcgaaagagcccgagtacctcaagagaagtataagttcatagccatcaaagtctgaatagagtatgatgaactaacggacgtccatatggccaccgctgatgccttggaacgagaaaccaagacggcccataaggaagaacacgtgccagccaacgtttgaggggctctatatggcagcactagtaagctcaagctccgaagaggtgaaaggaatcatcatgggtcaaaggcatgatctggaaggaccagctataggcttgccttacgccgaaaagaaatttgtcccaacagttaacgtgagactgaacggaatatgtgggccatcatccatgagtcgcaagagaagctaatct

SEQ ID NO: 241577 - DNA, 417 bp, Glycine max
  unsure (1)..(417): unsure at all n locations
agcttgagcttggcctttatagtaaacaagttcttccgagccgagctttacataggccgagccgaaggccctcgacaaactgtttggctcatttccacccctagttgtgttgatttctttagcagaaaattaacacaacaatttgtttccattgtgtagtgcgaaattgcaccggttatgctcatgactcgccgtggcatttcgatagaggaataggctatagtgatgactacgttgatgatgttaatttattgtatgaagacttgtaatgctatgctagttttattgtttttattgtgtaacattataacattaatgtgtacttggatatttcttagatgcttttatgcttgtgttattttattattattattattgatttatttggatatttttagtcatgttntaaacttagca

SEQ ID NO: 241578 - DNA, 405 bp, Glycine max
tgacgatttcttcaactcatgcattccactagatattggcttatacataaccacattatctgaaatttgatatttcatgaacactgcatctctcataattcaatggttacattgatgaacatcacatacaataagtcacatagttattgccgaagtgttcgaattggtttaatgtcattcatgttttactaacatgggcattacttttgaattaattagtctccatgaaataaaaaattaggactttatggtccgtagtttcacctactagtggtcaatatcaacggataatataccccttatgttgtccctgaagaaataataggcttcttctgtgctgattctgttacaaaaaaaatataatatttctgggtatagcacaaatatttttgagatttgatgtta

SEQ ID NO: 241579 - DNA, 392 bp, Glycine max
  unsure (1)..(392): unsure at all n locations
cagctnatccaaangcgtgcggagatacgcttgatttacaacgccggcaacgcggaagntctaattcagtgacaaaatctccctcccagagataatagtcggaaatctgtggctaaattacatgaagtttttccgacttatcaccttgatgacaaggtgagtcttttacgcgggggtattgataagcataacccacacattaccaaggtgtccacccgcaaacaacgagcaagagaagcattatccatggaccaccaccagcaacagggcgcacaacacccaaggggtgcaaaccacccaacagttactactcacccaaaggatgcaaggtcacaatatgtgaatcaaggggacatgatccttgggaacagttacaaccaaccgttatgatc

SEQ ID NO: 241580 - DNA, 458 bp, Glycine max
  unsure (1)..(458): unsure at all n locations
tgtgactctnggcaatttctatacaactagttacttaattagttgcgactcttgaaagaatcttcagaaacaagtcacttgaagaattatgacttttggaaatgtatttttcgaaatcagtcactggtaatcgattaccattaaagtttaatcaattacacatcaacagatgtgactcttcattttgaattttgaaaattagaacgtttataaacactggtaatcgattacaagtactgtgtaatcgattacacaagttaaaaatgtttaaacacaagtngtaactcttgaaatttgaaatcttaacgttttaaaacactggtaatcgattagtaccttttggtaatctattaccagagagtaaaactctctggtaaagatattttgaaaaacttcttgtgctactcaatgttttggaaaacttcttttgtacctatcttgatcgagtcttcccttgt

SEQ ID NO: 241581 - DNA, 406 bp, Glycine max
  unsure (1)..(406): unsure at all n locations
agctntaacattcaatatcgagtgtttttattattaatggactgaatcagacaaccgagtaaaaagttattgtagtttgaagttgctcagagcttcaactttcaatatcgagcgtttcgatatattacgggactgaatcagacatcagagtaaaaagttattgtcgtttgaattatctcagagcttcagcattccagttcgagcgtctcgatatattacgggactcaatcacacatccgagtaaaaagttattgacgttcgaatttgctcaaagctccaacattcaatatcgagcgtcttgatatattacgggactgaatcagacatccgagtaaatagttactgtacgttgaagttgctcagagcttccacattcaatatcgagcgtttcgatatattacgggac

SEQ ID NO: 241582 - DNA, 391 bp, Glycine max
cgcttgagcaaatgcaaacgacgataactctttactccgctgtctgactgagccgcgtaatatattgagacactcgagattgattatcgaagctctgagcacattcaaacgacacgtaactttctactcggatgtctgattgactcccgtaatatatcgagacgctcggaatggaataccgacgctctgacataattctaacgacacatacctttctactccgctgtctgactgagacccgtaatatattgagacgctcgaaattgaatatcgtagctctgagcacaattcaacgacagggactttcttctcggatgtctgactgaggccccgaatatatccagacgctctaaatgaataccgaaactttggataatcaaacgacattaac

SEQ ID NO: 241583 - DNA, 354 bp, Glycine max
  unsure (1)..(354): unsure at all n locations
catataagaaacaggcccactctcccaattttacgaaatcatattcatacatcattggggcatttcaccgaacacttggtgagcgcatgtttgaacataaatngcaagaggatggggacaatgtggtatgccccattgcttcaaaatacagcataggcctaaggccttnttattcaaatccttcactcaagaaaacaagcccaaaaacacaccaaaactgccccacaaatataagcacattctcacaatttggagcaccaaaagatgaagaaatataccaatgggaagctaaaaacatcaagaaatgaatacttacttgttggagtgaataataacaccaaaaatgaaagcaaa

SEQ ID NO: 241584 - DNA, 396 bp, Glycine max
  unsure (1)..(396): unsure at all n locations
agcttgcgcaatgtcagctgattaaaagttttttgtgcttnataacttccgatgtccgctattgcgttttctattcaatccctaaataatattttgatgaggacataaccaataactatgaagactttgaaggtcccatgaccagaggcagacttaaacaagcccaacacgtcttaaaaacaaggctggtcatttgtatagctgccattgatgatgattgaaggcccaagtggagaaagatgaaggcccaaaggcagaggcactaccaagactactaattgttgttgaaggcccaaactaacttgaaggcccaaattaaataaggttttagttataatttatttttattggaattttggcccacacctgttagaaacccatgtctatgtttatctt

SEQ ID NO: 241585 - DNA, 372 bp, Glycine max
aatctacacgctgttgcaaggagtctcgtggtcctatgctcctctctgcaggatccaccatgtcaagatcttttgtctcttctcttgccagcaatcctggagtcaaatgaagaaactctgacagctctatgctacaaaacattttataatatgactctcctcatgcagcagaaactcaaccaacagcgaaaacatattatcgacccttttaatgcatcagatatcaattcagtgttggagagaatcattctaaatctaaaaatggacaagccgctccacaacaaccaatagtctaatgcctcctttttcagaatgtggcggggccaggcaagccatatggttctcctcccatgcggcaacaactacaacttg

SEQ ID NO: 241586 - DNA, 407 bp, Glycine max
  unsure (1)..(407): unsure at all n locations
gcggcatgcaagctttaggctgttcaattgttttaagtngttgtttcagaagggcaaagggctgtgtggcggccgtcagaggagcataaaccacatantctggcgataggtgcaaatatttgattcatggccagttgggttaccaggttaaccaaagcatctaatttaccttcaagcttcttattgtcacctgatgaattcgtggctacttcatgcacccctctaatgacaatagcatcacctctggcactaaattgctgggagtttgaagccatcttctcaattaaatttctggcttcagcaggggtcatgtctccaagggctccaccactggcagcatttatcatacttctctccatgtngctgagtccttcataaaaatattggagaagctgctctgaaatctg

SEQ ID NO: 241587 - DNA, 329 bp, Glycine max
  unsure (1)..(329): unsure at all n locations
gaccctaggctcttgaccttgacttgatagaacctctttataagtgaaggcatttgacttgatcccatgtttactaaagggaacaaaaatcagtgcgaatcaaaactctgacatctatcatgggtggaatggatgaatgcatgaagaaatgcatatgacacanatgcaatttatgaatacgggagcccgggaaattgtctccgtatttaagaaggaggcacagaccatccgttggtttggcaaagaaaaaggatcaaaacagaatccgcgtgtgatgcatatgccaaaggtgcaacacgggaatggacaatatggcaatattcacaaaa

SEQ ID NO: 241588 - DNA, 318 bp, Glycine max
  unsure (1)..(318): unsure at all n locations
agctnnggattatagagattatttacaagcttcnttangcagagctngaaagagcccgggtagtctaagagaagttcaagtccatagccatcaaagtctgaaaagagtatgatgaactaagggacgtcagtatggccacagctgaagccttggaacgagaaaccaagaaggctcgaaaggaagaacacgaccaaaacaagttttgaggggctttatagggcagcaatagtgagctcaagctccgaagaggtgaaaggaatcatcacgggtcaaaggcatgatctggaaggaggagctaaaggtttgccttaggtcaaa

SEQ ID NO: 241589 - DNA, 307 bp, Glycine max
cggcttcaagggtggctttgtcttgcttgcccactaacaccactctgtataacttaacgcgcattaatgaatatcggcttagcgcatgcttttcttgctaaacaaatggacttgaggcggcgcacttatatgggaatacccctttgttcaacgagcatgcacatatcatccttcatttaaattcttcctcgcgctcagccgaagaatgttgcgctcaaacgatggctccttaaccatcaaatggcttatcgagagggtgaaaatcatcagctcacaaacttgcctaattaacctgaaatttgaagaa

SEQ ID NO: 241590 - DNA, 389 bp, Glycine max
  unsure (1)..(389): unsure at all n locations
agcttccatcaagnggagatcatacacattatcttcttttatgngctccctaaacctccattaatttgttgctttaccttctcttccattggtgtttcttcattatttctccatgtatctcctcacatgtcttgtgataaatgtttttaacatgactctttaaagtttccaccgattaaactttctataaaagctagatttgattttctatggttcaaatttcttgttcttgctcttgaaccatgaattgtgttgagtttaggttcctttgagttttggcttgttattttttgtggctgaaaccttaaccataaaattcttacaaaaatattaaagttagaagataacctcaataatctagagtgacttgttcacctattgtaattttg

SEQ ID NO: 241591 - DNA, 351 bp, Glycine max
  unsure (1)..(351): unsure at all n locations
cccacccttggngccaaatcgcgcagagctttatggaattcatctcaaggaggtatttatatttggcctcattctttgagagaaggtaatagaattgcggactttttaggtaatcatggttcgaccttgaatggtcagtgttgggttttttattttattcctcgatttttgcgtaacattgttttagcagatgttagttccaccatgttttcaagcggcttttaatggtagttgtgttaaaggtgttcctcctcctatttaaaaaaaaaatctcgaatgtatgaaataattgtttattcaatgaatatattcttgagcctggataaagtgtttcaataacaaaattgattg

SEQ ID NO: 241592 - DNA, 292 bp, Glycine max
ttcagaccgcgtgccgaaaaaaaggcaaaaaaacgcccttttctgtgccgcacccatggaacatgtgctggaatttaataaaagaagtaaccgggcccgcctcatatgacagtgcaaaaaagaaagtgtcaaaagcaccccaccattataaatggcaaacttcaagggaattaacatatcacccgactcgtgatataataatataaaacgagaagcaataaccacctattactcccaaaacatatcctattattacataaaaatcagaaaaactatcattatctcatcaaaa

SEQ ID NO: 241593 - DNA, 399 bp, Glycine max
  unsure (1)..(399): unsure at all n locations
ancttgcctaaagaggtcctttaaggatttttctgcctatagaactagttccgctcctgagtatgacagtcaccgttttaggagcgcggtacaccagcagcgcttcgaggccatcaagggatggtcgtttctccgggagcgacgcgtccagctcagggacgacgagtatactgatttccaggaggaaatagggcgtcggcggtggacatcactggttactcccatggccaagttcgatccagaaatagtccttgagttttatgccaatgcttggccaacagagggcgtgcgtgacatgaggtcatgggtaaggggtcagtggatcccgttcgatgcagatgctatcggtcagctcttgggatatccgttagtgctggaagagggccaagagtgcgagta

SEQ ID NO: 241594 - DNA, 241 bp, Glycine max
caccccaaaccttttattttacctcgagttcctatgttttacaactagtatcttcctaaggacccaatgtaaaagctcgtcctgccatcacagcgctaaccattttatgagtctaaatgaagcggggtataactaaaatacttaatggattcgtgtgctggaggcacataatgaacataacttgattttggataattaaatattgtgtataaagagattggaagagaaacctacagtaact

SEQ ID NO: 241595 - DNA, 357 bp, Glycine max
  unsure (1)..(357): unsure at all n locations
agctntgactattttataatatacaggatttacttagtgngncatccactaaaatggatagagattcaacgcctttttctcacaagattcttagtaggtttggtgcggaatacttcgcatggatcctctttttataatctccatagaaatattcgatgaggatttgaacattgatcctctgattggaatttgttccccaatgggttaaaattagatgtgccatgctctgattggaatagagaagataagcgtgccaacatcaattcgacatgtttcttttcttctgtaatgacaatcgactatgaagaaaaccttctctatttgcttttcttctaatctttaacctcattaccaaag

SEQ ID NO: 241596 - DNA, 344 bp, Glycine max
ggcccttacccagcgtttatcttctatagcatcactcaatatgcctaggttccacttctgaaaagaaaatatgtgaaccttgatgtcagaaaaaatcctcttgtctagactttgggtgaaggatcttcaatgatttgactctttgtgaggttcttccttatgaattcattcaattagttccctttttttttaatgttgtttagtcacttgcttggatgcctctatttctgaagatttttttgccagtgcgtcaatgcctcctgccaatattatacctgcaaaagatgttgcacgcttacacacttctatatcatactttgtgtcattaaatcttacatgaatag

SEQ ID NO: 241597 - DNA, 315 bp, Glycine max
  unsure (1)..(315): unsure at all n locations
taggttttccngcaacatccacggttgagcgtctatacaaacggacccctagagcctggcgaatgttccattaatttccaacgtagtatatttaagataggacccgggttctttcttccaaagattatatactagcaccttgacataaaaaagaaagatagactttatatcgaactatgaaatggatcttacttggctctgttttgtcttctaccttctgccatgctctaataaaccagtatttctctgattaacccttgaagcacagtatctggatacgaatataggttgctacctcttaaaagggatacctaa

SEQ ID NO: 241598 - DNA, 400 bp, Glycine max
  unsure (1)..(400): unsure at all n locations
agcttatgactctnggaaatttctttaaaattattcacttaaaaaagttgtgacttttgaaaaaatcatcagaaacaagtcacttgaagaattgtgacttttggaaatgtattttttgaaatcagtcactggtgatcaattacaattaaggtgtaatcgattacacatcatcagatgtgactcttcattttgaattttgaaaattaaaacgtttaaaagctctggtaattgattacaagtattgtgtaatcgattgcacaagtttaaaatactttaaaactatttaaacataatttgtaactcttgaaattttaaatcttaacattttaaaacactggtaatcgattactactttctagtaatcgattactagagagtaaaactctttggtaatgatttt

SEQ ID NO: 241599 - DNA, 384 bp, Glycine max
ctgcaagctttgagcatcaaagtgtcttacttttactcggagggccgattcaggcgcataatatatcgagacgctcgatattgaactttggaagcttttgagcaattcaaatggtcataactcttcactcggaggtccgattcaggcgcataatatatcgagatgctcgatattgaacaacgaaagctctcgagaaatttaaatggtcataactttcaacttccaggtccgattcaagtgcatactatatcgagattcacgaaattgaacaacggaacctctcgagaaattcaaatgatcataacttttctcacggaggtcagatttaggcgcataatatatcgagacgctcgaaattgaacaacggaagctctcgaaaaattc

SEQ ID NO: 241600 - DNA, 135 bp, Glycine max
gctgatcacgaacttaactattctctatcttcttctgaattgatgaattaaggggaaccactccacacctaaggttagaaaactgacatcagaaagctagtgactagacttgcacctcgccaccaggaaatagga

SEQ ID NO: 241601 - DNA, 183 bp, Glycine max
  unsure (1)..(183): unsure at all n locations
gcgngaggaaagcaagatttttaattccacgaaaacaaggaaacggcaagggacaccccccccaaaagaggtccgacagatacacccccgggaaagggcagggtccacaaccccacgcctctcaaagaaacgctcaaccaagacgaggcggagcgcaccatacaaataaccccaacacgagac

SEQ ID NO: 241602 - DNA, 320 bp, Glycine max
  unsure (1)..(320): unsure at all n locations
agctnatgagttnggaagatgttttcagttttattaangngcacaaatcagaatgtggtgttatacattaactattctgatcatataagccagtgggagattttattcaaatcatgtattggcaccagcttgatatgaatgagatatttgagatttgaagggtatccttgtttggttaatatgagaactatgttaggtgatatcttttaaacctgcaatttggaaaaatagttactattattgttgactactcagaaaaaaagaatgtgaaagtttcatgatattatggttccttccttctggtccaacttgttgacatt

SEQ ID NO: 241603 - DNA, 343 bp, Glycine max
ctaacgttttaaggagggtgattgctaggctcttgacctttacatgataaaacctctttttaagcgaaggcgcctgactcgatcctatgttttactaaagtgaaacaaaacccagtgcgaatcaaaacttttacatctatcatgggtggaatggatgaatgcatgaagaaatgcatatgaaacaaatgcaatttatgaatacgggagccccggaaattgttccctttttagatacaacattcgggcagcatggcgcccgacgtatgcatttaaaaaggcgacacagaacccttcgtcgattcaacaaagtgaggggattataacgcaatccctgcatgatgca

SEQ ID NO: 241604 - DNA, 282 bp, Glycine max
aacgtgagcacacggggaggtgggcaacacgggatggcgggttcatgcgcgaacagcggacgaggaaaaccagatgcgcaccatcgcccgaccgccacctaaaaccacaagggaggggtaccccaaaaaccaacaaacgcgagaggaggaaagacagaagggggaaacacccgggtgaaaccgaggacacagagaggaccccgaaaaaagacccgggggcacgacaaaaggggaacaaaggggggtgtaatgcccaaaacaagcatgaccaaccccacccaa

SEQ ID NO: 241605 - DNA, 361 bp, Glycine max
  unsure (1)..(361): unsure at all n locations
aactaatgcaatcgatggattgaaaagataatccatactactcttctaatgtagtctacaattaaaaaattaatctcacagaaaatagtgcttaagccattcaaatcaagtcaacatgacggtggcaacacaacagcaaagtgggatcgacagagagagggagaaggaagcttcctataacaaanaacggaaatgtagaaatgaggtgaggttgctctacatgcagttggaatggaaacacaaaaatcagctgaggtttgaatgaaaacgcaaaaatgatatttggttggtgttgcttgttgacgtgcagaagcttcctttgtcaatgacatgacctcataggtattgaggtgcagaagta

SEQ ID NO: 241606 - DNA, 262 bp, Glycine max
  unsure (1)..(262): unsure at all n locations
aagggaaggggnaagaaaacccccactaaagacaaagggccaaaactctctggatgaaggagggagacacaaaatcaaaattcttcatgcctctgccaatgcaagaaagaaaaaaagccatatactcctagaacccagaagacggggccagtagttacgacaaaaacggcatatatgatataggcgcgcaaactctaacaaaccattccaaactgacaacaactgaaacgaggacctcccatggagcaaaaaaactcccaca

SEQ ID NO: 241607 - DNA, 399 bp, Glycine max
  unsure (1)..(399): unsure at all n locations
tctaagtcacctgcggcagcaagcttgggggggaaaggtctccccaaataatccntttttgnccccaaacaaacatatttactctcttaagctagcgtatgaaaaaaatggatgttggcgcattaaaggcacatacttcttcatgttgagaaaccatttttcattgggggcgtgttgaacacttcaataggaaaccacttccttttattttaaagcaagtctgtgtagcccaactcttcttttgatggtgattaagaaatttcaaaagttagcttcatttaatcttgatagaattcgacagatccttatagaatgtctctatagaatagatctctgacacccagattaataaaaggtcttacattccatctttaatgtcatattagatcatggttctat

SEQ ID NO: 241608 - DNA, 243 bp, Glycine max
ttcaaaaaggcgcgccttataattgcctggcgcataatttctcattcataaattaggcaatatatcacttgtaaatgtcatgtttaacacacttattctcaaatccattgcatatttgttaactcatttgtagattatactctgttgaccaatttacgaaggaacttatgatttagaaaaaaaaaaattctagaaaatatgctatagatagaatcacagattacatattgaagatgtatttat

SEQ ID NO: 241609 - DNA, 408 bp, Glycine max
acctgcggcatgcaagctggtagatgcttcgaggctctccaattttcttccttgggtttgatgagcctttggagaagcaagactcactaagggtggatcttgggtttgacgagcctctggagaagtgagactcaactaggacagaccttgggtttgacgagcctttggagaagtgagaatcaccaaggatagactttgggtttcaaaaacctataagtctcaccaaggacaaaccttgggtttgatgagcctttggaaacacaagactcaccaaggacggaccttgggtttgatgagcctttggagaagcgagactcaccaagggcaaaccttgggtttaacgagcctttggagaggcaagactcactaagagcaggcattgtgtgatgagtcttatactagggaatg

SEQ ID NO: 241610 - DNA, 350 bp, Glycine max
  unsure (1)..(350): unsure at all n locations
anccagcagacgcaagaagttgttctncttttatttgagancnccgattgcccaacataatagtaattggggggaatctgatgattgatgttcttttaccatgattcaaaggtttatcccacccaaacttctccgtctccagaaggcacgtgtgatgctgcaccaaatgataaagttaatgatgtgaacactctgacagaaagattactgctgctttttaaactctagtgccaaagaatgctttgtcaatacctcatggctaaacttgcggaagataccgtctccggtatctgttgtttgacatcttgcatatcataacttaccttgatttacaaacaatttatctaatg

SEQ ID NO: 241611 - DNA, 397 bp, Glycine max
  unsure (1)..(397): unsure at all n locations
agcaccgagctgcacncatagagcagatttcgnatcttttttccttttgaagaacgacctgcacctcttgcattggaaatttgctttatcgaggtgcaactgtcggcattgtgttccttcaacgttagcaagatatttttcgggttcaccatcgactntgtcatatcaacaaataattatcttttctttcttaatcaatcgcccgacgtatggatgtccaactaaggacttcgccaattcatgatgatgaatcccacagatcaacttcaccatccaacctttccctccatgcactggtttcccacgaagcctgaaggtacaaccacatttcctactcccggtgtctttttaacgaattctttatttctacacttgtacgtactactcctttcacacc

SEQ ID NO: 241612 - DNA, 400 bp, Glycine max
  unsure (1)..(400): unsure at all n locations
catgcagcttaacatatccctgatttttaagctttttangnccacgnggaaactatggggtggtacgtagttggtgaccaatgtacacggctagtgaccttgggaaaagtgtatgatagtacgttcaccatacacaatgtctcttatgcaaatgatgtggttagggtgagtgttgtcacagtttacgacggtgaagctcaggtcccttttccaacatcaaaaattcagtttgtgaggcaagccgttggtacatttgtgagatgaccatcacatcttgtaaaacctgtatctaatcaggttgtatcttttccctcttaatgtattattttcactcacattgttaaaagttacgttataaaattagggtcattgactattgttctcattaaccatgtaggat

SEQ ID NO: 241613 - DNA, 262 bp, Glycine max
  unsure (1)..(262): unsure at all n locations
agcacgcataactttgaaggtttatngtttaatttcacnccgcaatgatatgggctattgagttggggaggattgattttggaacttgtccgggggcaaaagttatttcaagtgccaacactactataaaaagagctttttgcgatgcacttacgacatcggtccaacaaaactgtcgaagtatattaaatggtgcatttgtgtaattacaacgaaagtgtgcaccttgcccattttatggttgacattggcacaattccct

SEQ ID NO: 241614 - DNA, 386 bp, Glycine max
agctttgagctttaatcctttttacctataatttgccctcggaagagaacaaaaaaagaaagctaatgaagaaaattcccaatcaaggagtgagagaaagccataactcataagaaagaaaattcccgatcaaggattggaagaaaacagaagaaatatgctgaaaggtctttgaaccagacaatatctgaacaatacgggattgtcaccaagtaaacaaaaaaagaaaggaaaccatgacctaaagtggtcctctccctttgattgccaaccaaaatcctgtgcgtcggtggcttgttcacctcactaaacaaaaacagaaaaccttggcagatatcatgtccagccgttctacaagccttgagccaaaatcccaacttaccaaa

SEQ ID NO: 241615 - DNA, 309 bp, Glycine max
  unsure (1)..(309): unsure at all n locations
ttggattactttggttgactaaacctctctgctggagtatgtatgggagaactctattactgttattcaacacatacaagtgaacttgtaacaaatcttctacacttggagtgataacatgcagtcctcttgaaccttttatctccactctgtcgtcatgacaagacttangaaggccaacaggtttagccttttcaatgtactctgaacaaaattaatggcttctctacaatgacctttaacaatagatgctccggatgatgagattcttggatacccttctaagatctcatgtatgctcaactggga

SEQ ID NO: 241616 - DNA, 391 bp, Glycine max
  unsure (1)..(391): unsure at all n locations
gttgcctgatgcctganatgtctnttcttatggcagtggtcctagatgaagggaagaatttcttcaagaacacnctcttaaggtcatcccagctgaaaatagacctgtgagtaaggtagtatanctaatcttttgccactccctctagagaatgaggaaaagcctttagaaagatatgatcttcctgtacatcanggggcttcatggtggaacaaacaatatggaactccttaagatgcctaataagattcttcacctgcacgaccatgaaacttgcgcagcaaatgtattagntcagtcttgagaacatatggaacaccctcatcgggatattgaatgcacaagttntcataagtgatnatangtgaatcatctcctatgagtcctctca

SEQ ID NO: 241617 - DNA, 160 bp, Glycine max
  unsure (1)..(160): unsure at all n locations
tctaatatacatgtgacacaattacacaatatttacttttagtatacacatgctcttaaaatatttgctttagtatgataatatactttaaatttggttgttttaattaaatctaacatttgttttgtttggttantatgaatattcttagaaacatata

SEQ ID NO: 241618 - DNA, 313 bp, Glycine max
  unsure (1)..(313): unsure at all n locations
tgggaatgtactgtgcaacananatggtggaccaaccttgaatggtttccttcttcttctctaagactaagactcgaatggccctctcttcttcactcgaagctcaaacaagcacgctttccgtttcccgtcgtctcgcttcaaaaccctaccttccgtcctggtatctgcagagcctccgagtcacccaccgttccacctaagaagcgttcttttaacacagataccctaaaacaacagcnaaagaacagaagagtactctgtactgtgattcaactcatttcaattttctcttcgctctcttcccgtactg

SEQ ID NO: 241619 - DNA, 432 bp, Glycine max
  unsure (1)..(432): unsure at all n locations
cttaagcacctgcagctgcagcttccgcttatgcatnttgttatgcgctaagccctattctcacgtgcttagcatcaaccctgcatctaggctgattggtccctaactaatcacgctgactaaccaattaactcatataattggctatgacggctaccactaacgcatgtatgttggtaacgcactatgccgccactcatttttgcaccgaactgaggttctggtgctaacgccaatcatgcgggctaaactgaattccttgcggcaatgtaggcactaaccaacctcttatagctaagcggctctctcttacttaaagctatttactatcataaaccactacagagtgagtttgactgctactcctagcggttattgacgctaccaagccttgttgccaaaagaaaaaaaatatattgatcaacgtggtac

SEQ ID NO: 241620 - DNA, 454 bp, Glycine max
  unsure (1)..(454): unsure at all n locations
attccctagtggatggcgcctcctctcacctcttctcctttgtcttccgctgcatctccacggtggaaaatcaccattaaaggacctcattgaagctcaaagatccagcctncatagaagccccacaagcaagcttgcatcaagtggtaatcagagcacaagagcttcaagtaggtgctccttaaacctccattaatatnttttctttacccttctcttcccatggngggttcttcatatttctccatgtatctcctcatatgtcttggtctaaatgttgttaacatgattctttagagctttcactgattaaacttgctatagaaactagatttgattntctatggttcacatntcttgttcttgttcttgaaccatcgaattgtgtgagttaagttctttgagtttatcttgtattttttgggctggacctaaccataaattttacaaaata

SEQ ID NO: 241621 - DNA, 388 bp, Glycine max
  unsure (1)..(388): unsure at all n locations
ctttatctcagatattctatatgaattccgagtatatctagacgctcgagattcagaacacaagctctgagcaaattcacacgaatataactctntactcgtatgtccgattgtctcccgtagtatatcgagaccctcgtaattgaaaccagaagcccgtagcaaactcaaacggcgataaatcttaactccgatgtccgaatgaactccatgatatatcgaggcgatcgtattcgaaaccagacctagagcaaattcaaatgacaataacttttactggatgtgcgatgagtcccgaatatatcgagacgctcgtaattgataacagatgctctaagcatattctaacgacaataacttttactcgatgtcgattgttttcgtgata

SEQ ID NO: 241622 - DNA, 353 bp, Glycine max
  unsure (1)..(353): unsure at all n locations
gtggtactaactctacttctcaagaagtttctcaaagaagcttctcaaggaagttctcttaagaaagcttctcatggaagctacctactctataaatagaagcatgtgtaacacttgttgtaactntgatgaatgagagtcttgtgagacacaactcacagttcaacttctctcccttgtcttccttcaatttcgcgctcccccctctctctttctctcctctttatttcctccattgaagcatctctccagcttttatcaaggtcatcttggggtgaactcttttcatggttatccttatggatggacctctctactcttctcttgctccgtgcattctggggaaatacata

SEQ ID NO: 241623 - DNA, 112 bp, Glycine max
  unsure (1)..(112): unsure at all n locations
atctctaagggctactttgtctataacttacaaactataaaactcgtcatcagtcgagatgttgaagttgatgagtaagcttcttggaatcgcgatgaagaanaagtagaga

SEQ ID NO: 241624 - DNA, 299 bp, Glycine max
  unsure (1)..(299): unsure at all n locations
ctcacttttccttggggcacaaactttttgtggatatatttcaaacatggtgnatgacgaaatacactaaaaaatgttttctgttggtgatcaaacaaatgctttcttaaaatcactacaaaagcatttgatgcttattggaaccatggttaatatttaccaaactattcattttgtgaacacattcgtgaaagaaacattttttggtgcacatgaacttttgggtatttataaacaccaaaaggttctactaaagctttacatcagctaattaagggggattgatctgcttttttttt

SEQ ID NO: 241625 - DNA, 373 bp, Glycine max
  unsure (1)..(373): unsure at all n locations
catgaaaactaagctacctatagcctatataagaaggaggagacagaanggaaagacacatcgaatctcagagttatccaaagtctgtgcctatcccttaggggaaaccctccttcttttgtcattcttccctttctttcttttagtcattcagccgcttcttccattcacatntatccctgaagtgtaaagcctattatggtcatgagaggctaaacacccattattgggagcctggcaggccaacacctttgtaatgtaacttttcttattatctattaaangaaanttctatttctattgcttcttttctgctcttcatctttattggatggtctgatcatccatgcattattcttagcggatatacatt

SEQ ID NO: 241626 - DNA, 321 bp, Glycine max
  unsure (1)..(321): unsure at all n locations
gtctgtgtggtggtctgcagaggagcataaaccacagagtctggctacaagtgcagattttttattcatggccagttgggttaccaagttaaccaaggcctctagtttaccttcaagcttcttagtctcgattgatgaagatgaatgcgtggctacttcatgcactcctctaatgacaatagcatcacttttggcactanattgctgggagtttaacgcatcttctcaataaatttctggcttagcaggggtcatgttccaagggctcaccactggcagatctatcatacttctcttatgtactgagccttataaaatatt

SEQ ID NO: 241627 - DNA, 417 bp, Glycine max
  unsure (1)..(417): unsure at all n locations
gcttctaaggaagctacctaggctatatttataagcatgtgtaacacttgttgtaactctgatgcatgagagtcttgtgagacaaacttcanagttcaacttctcttcctcttttcttccttcaatttcatgctcccccctctctctttctctctctctttcttttcctccatagaagcaccctctccaagctctttatccaaggcactctcttggtggcgaagctccctcttccatggcttattccctaatggatggcgcctcctctcacctcacagatccagcctccataaaagctccacaagcaagcttccatcacaataatataatgtattggtagatatatataaaacggtaatatatatatatattatacatagataacactaagacgcgtatgtcatatatacatatatt

SEQ ID NO: 241628 - DNA, 244 bp, Glycine max
  unsure (1)..(244): unsure at all n locations
gctcgatatctccttcttcactacatcaagaatcatacggttgagtcttctctatggttgtcttactagtatagctccatcctctaaatatattcgatgcatacatgtggatgggctaataccangaatgtccgccagggtccaacctatagccttcttatgcttcttgagaacagacaacaacttcttcttttgctcatcaacaacggaggcagatataattacacggaaaactttgctatca

SEQ ID NO: 241629 - DNA, 195 bp, Glycine max
tgatatctcaaacaaacaaatcacacgtaacaagacaattatatgtgctggttgaatacctcacccactcaagtgtatcacacaattatggcttttctctaatgaaacactcttgcctcttaccactctaattcccctcgagttcttaggtaattcaagagattattgtcacaacaaagaacaattcaccaatat

SEQ ID NO: 241630 - DNA, 183 bp, Glycine max
  unsure (1)..(183): unsure at all n locations
catgcctacggtattaatgaggactactcanagnatgcttattacgactgaatgatgtcatccaattaacacaaaaaatgaagaatggcacctaagctcacttaacatcttcattacctttccaggtgactactagggaatgttccatctgcctctttttctgacaaagcctaagctttgctt

SEQ ID NO: 241631 - DNA, 333 bp, Glycine max
ttttttatcaggttcttctgaactcctcttggaaaggtcttcagttactccatgccgcacttgattaaccgacaaggtgtagatgttcttctagataatgaatactctggacactaaaggttcagaactaaaggacatggttcaaataaataattgatggtgaaccaactcagggtggttagaattgctcatctgcaacctggtttcggctattcatatttgtatgcaatattcagacaattatctcctgtatgcaagattctgaagggacaataaaatacttcggacctaccactccttttttcaaattgtacaaggccatactaagggggg

SEQ ID NO: 241632 - DNA, 222 bp, Glycine max
  unsure (1)..(222): unsure at all n locations
atgagcaactatgtgtgtcttactatgattagtgatcaaataacaagcatagattcaaaaggtactaggttgcctcctagtagcgcttctttaacgtctttagctggacgcatgatggcttgtaggtcacggacctantactttgcttacctttggctntggacttggtcgcctgctggtcggccatgtgtcgtaggcaatactcaaacctctttgtggatg

SEQ ID NO: 241633 - DNA, 367 bp, Glycine max
  unsure (1)..(367): unsure at all n locations
ctaactccactaatatatacaatgactaatcaaaagaaaaggatgagccttgattaggcccatctaatctacctaattaaactaattacacaaagcaaagtgcaaattcgcagcccaattattcaagtgcaaaggttttgacttccaagcccaatttgacccttgaaatggcagaattagcccaaacttatttctgagaaaaatgaagttcaattttcttacctctccaggaattatntacatgctctattttgagttctgtagtgtcatataggccctgaacaattatcaagtaagtaaaacatccaaaaataagaaacaattatcaattaagcccaattatttgcctaagaccaaaactgagtta

SEQ ID NO: 241634 - DNA, 381 bp, Glycine max
  unsure (1)..(381): unsure at all n locations
ctaatgatctantttccaggtctcggtctaagaatgtacttgctatgacctttaggctagttntacagcagatttagagctttgacctaaccgtctttcaaccgggagaggaacggaagatggttgatcttgaaacaccgagagagggtcgctgcctttcatgggaatttgaccgtttttgagtttgatatttctgttgctattgtaaattgtaatatcatattataatgtatgtccttcaggtgtacctgatactgatgcatctgagttcttttatgcatttcatatgagctggttcctgcatcttttgctctagctcaaccgatgaatatctcatctcagtgctttcagaagcgagttgcatctcagcactttcaagca

SEQ ID NO: 241635 - DNA, 198 bp, Glycine max
  unsure (1)..(198): unsure at all n locations
cacacggaggtccgattcttgcggatagtatatcgagaagctcataattgaacaacgaaagctctcagatattcaaatcttcataactnttcacacggaagtccgattcaggtgccatatatatcgagaagcttgaaaatgaacaacggaagctctcgagaaattcaaatggtcctaacttatcacacgagagtccga

SEQ ID NO: 241636 - DNA, 51 bp, Glycine max
aatctgcctcactgaaggctctttttcgacttttgacctggggggcaggcc

SEQ ID NO: 241637 - DNA, 180 bp, Glycine max
  unsure (1)..(180): unsure at all n locations
tcaatataaactcgtctcccaagcaccaagtttgagtgttatagatatgatcngatcacaataaataggaagatatctcagctgataattagggattatactcattattaggcattatgtttccttatattgtactcttgattcattatagatcacaataacatgtgtgacacaactaca

SEQ ID NO: 241638 - DNA, 204 bp, Glycine max
gctcccctatctttataattttgttaataaagatatgagtgtgctgtccccccaacaatctgtatcacagttgatcttgcggcctggtgatcagagagaacagagtattgaagaagcttgaggaagttgatggtgaatctgtgaggggtcctctgttcaaaagtatactcggcgatgtgatagtcaagtgacgtgtttcaatgg

SEQ ID NO: 241639 - DNA, 442 bp, Glycine max
  unsure (1)..(442): unsure at all n locations
acattgagcatggcacaatacacaacgaaataattgctgcctgctcntacaaagatgctgcttccaaggattctgcagatgatattgtgatgtccccaccacaaactggtagacatgaatctttatcatgctaaaaattgtcctaccccaccccagcaactgcaagatgtatgtttctattgaaccaggaaatacagggctgaaaactgtacataagactgatacacttctgcaccctatgaagaatttagtttctaacattctgttcaatactaaatttcatataccagaagttaggtttgactaatctttctggattctatatggtgaggatgaccaagtacactgtacatcaatcagcaagcaacctcatgatgtggtgtggactccagcttagataacacacagagntgtatacatgaatatgttgtatgttctattg

SEQ ID NO: 241640 - DNA, 247 bp, Glycine max
tgacacacaacacttgaaaatgaattaccaatatgatagcagatctgcactttcttcagaaagaatagttatctacagccacaaaaatgaaatgggtggcgtctgtactcgacttttatgaaaaataagcatggatcgggtcgaccaaatacataggtcttcgatttcagctccatagtaagggttgaaattcctggattggactaggagcattcttaaacatagaagcttttatgagccctgggaa

SEQ ID NO: 241641 - DNA, 426 bp, Glycine max
  unsure (1)..(426): unsure at all n locations
gctacaatatggctagcaactcttattcgagaatttttttaatcaatagacctctaatctctaatggagaggggtaccactactgaaaaacccgaatgcaaatctntattgaggcaatatacttaaacatttgggaagtcatagaaatagggccttatatacccaccacagttgaaagaaccacaatagatggaagcacaacaagtggaagcacaacaatataaaaacctanagatagatggtcctgagaggatagaaaacgagtcaatataattacaagccaaacataattacatctgcctggaatggatgatattcagggttaaattgtagagtgctaagaaatgggacacttacagtacactgaggccacaatgtaaagactggataacacttactctgattgacattagataagaaatgaac

SEQ ID NO: 241642 - DNA, 149 bp, Glycine max
  unsure (1)..(149): unsure at all n locations
taatggctgagtgtaactgaaattgtggcaaccaaaagtcacccccaacagccaacaagtcagccaccatttggtctcccaaaaggctgatgcctaggttgccaattgngcccttattacaacttgaactaaacctaactaaagcactt

SEQ ID NO: 241643 - DNA, 197 bp, Glycine max
tctgaagtctgagagctctgcgcagataagtctgctcaagctggaggtcgagttgaagtacaagatgccaacatgccagctattggtgtaaaggaatgaggaatatcagcttctctgagcttagtcttctctgtctctggaaaattaactgggtgggcatttgcattccaacaattccttatgatataagctaagtc

SEQ ID NO: 241644 - DNA, 434 bp, Glycine max
  unsure (1)..(434): unsure at all n locations
ctgcagctatgctcactagcgggccactaactgattgtaaataaagaggcattatgttggactgatgccattgagaaggccttcatcaaactaaaataggccattacatcagctcctgtattggcactacccaactntactcaaccttttgtgttagaaacagatgcatctgggattggaataggggttttgttgagtcaaaatggccacccaattacatacttctccaagaaattggttcctagaatgcanaaataatctgcttacaccagggaattgtttgtataacaacaacattggctaaattcaagcattatctgttgggccagaaatttggcatanaaacatattagaaaagtttgaaaagtctcttggatcaatcactacaaactcctcaataacaagcatggttgcataaattcattggttatgat

SEQ ID NO: 241645 - DNA, 465 bp, Glycine max
  unsure (1)..(465): unsure at all n locations
ctgcccttttctgggattttccatccaatatatatttacacatcaaaggaggagaacacaactcaattaaattaatgattgtggtatttctcccaatacgttgttgtgagacaaatctaanatctccatcattaccatgcttgatagctgctaaggaattgttgaggtaagcatgcccatccctacttctatcantctaacatgttgaaatgtcngagcttcgtgcatcaagcaatcctctgggtatatcttataaaagaatcagttctatcacagaaaagtanaattgcaaggaattttctctcttgttntatgccaagtctggttgtagtacaatatatacattgccacgtaaagctntaggctgttagttgaatgcttggacacttaattgtcgtgagctaactctgttataacactatgtggctttatctggagattaatgtattgacttcatgctcacta

SEQ ID NO: 241646 - DNA, 401 bp, Glycine max
acgataaatggaatggtagcccaccacacatggtaatgttattcaaccgactctgattaatagactctgaaattggttctcgaaatgcaatcccctctgatctttgcatcgacattctagatgttctctctaattccatttcctttctcacttcgtcttccaactctcgtcgttgtgcaaaagccatctcacgagcaatgatttctcctccggatttctcctctctagctctcgccatatttgctctttctccaactctcgttggaatacttcgttgacattgatcgcgatgaccattgagaaaactctaggcgctgaaacattgctaggaaagccacctgatgcacagtcacaccctggaatatgattgttatagaatgaattgggacaaagtttgtatt

SEQ ID NO: 241647 - DNA, 211 bp, Glycine max
  unsure (1)..(211): unsure at all n locations
acgagctgcactgatagaggatatgggaacttctgtttactcgtgaccacagagggacctggagaatgtcgcggggtcaagagacctggggacgtcatgtatggtgctattgcccaaaancaagctngancaatcccgacccaacccgggcatataccagtcggtgagaacctgtgatgtacctaaacaagcgagctcctggcagtcaata

SEQ ID NO: 241648 - DNA, 205 bp, Glycine max
  unsure (1)..(205): unsure at all n locations
ctcaccactagatatcttgcaactccttcttcatatttttatgangttcttagcacaacggagaggagtatgattgatgctgccaatggtggagcccttgntgatatgactcatgcgtgggctcggaatttgattgagaagatggctttcaactcccaacaattcagtgcaagaaatgatgctattgttcttataggagaccatg

SEQ ID NO: 241649 - DNA, 153 bp, Glycine max
ataagatcccctatcttaatagaaattacatcacccggaacaagaatgattacaatcgtcttaattcaatttctatcttttatatttatctcgaaagactctagctttatacgctagatgagccatgacaactactatatcattaccaacatt

SEQ ID NO: 241650 - DNA, 361 bp, Glycine max
aatcttaaacctaatgaaattttcttatcatgtttacgcttgccaagctacttcttcctaaaccatgacatttggtttttttcccccgataacgaacatatattcatttacttaatttatccattaccgacacgtcatccatgattaagcaactagaattgatgatttctgagtttccccaaatccatcacaaaggaattttacaatgacctccaggcttttaactatgccaaaatgtatgaaattttgataaccaaactaaaaagtggttacctgcagtaagtttaaagaaataagggaaataggaatatatgatctgcctaccatttaagtcttactataattggtcgagaaaaaaatc

SEQ ID NO: 241651 - DNA, 376 bp, Glycine max
  unsure (1)..(376): unsure at all n locations
ccctcttgtggactagacttagaccatttctcattattgtaactgtatacttaanaccagaacttaatctgcagatccctcttgtaagactacagattcaatttgcttcattcaagttctaaggcaacaatacatttcccaatgctaaagtcacctaattatgcacacaaatgggtgatcaggccaagagcatacaaaatttaagcactgagagaagcatngaacacaagacacacaaccaattaaatattaaaataatacatcagttgttctttagaaatcccaacaagggtgtttaccagccattgcagaagaaaccctaacaataatgagattacaaaacctangtatctctgcanaagctgctcctcttgct

SEQ ID NO: 241652 - DNA, 376 bp, Glycine max
cactcccctcattctggagcatattaatcatatgcaccaagcttggaacatatagtctgaattttgggtcctcttaaggacatagtcaaaatatccgctggctgatcattataatcaataaactcagtgacaatctccttggacagaagcttctctcgaatgaaatgacaatcaatctctatgtgcttagtcctctcatgaagaaactgggcttgaaggctatattgaaccagccagcctgattatcacaatacaacttcatttgcaactcttcacaaaatctcaattcctgcagaaattgtttaatccatatgagctcacaagtaaccatagtcatagatcgatatttagcttctacaatggaccgagcaataac

SEQ ID NO: 241653 - DNA, 390 bp, Glycine max
  unsure (1)..(390): unsure at all n locations
ctagttgtagctcctatctntnttttctttttagntctaggcttctcttcttcttttagacactgntttgtttagcaattccaattgttacctttcgtttntgcaataaactctcattctctattgattaatggaaggctaactctccagtgttgttntctcttgaggatcaaacacaactctctttgagggtctattattactattanaatctgctcagtttttctctccaccaataccctgtatttgtgctataatgcatgcatgctagtgcttggtaattgctctgcgctaattacgtcatgctaatgatcgtcatgataatgggatgtgcgctaacacatagtgcctatgtaattcactagtattaattaagtgatatgggtgact

SEQ ID NO: 241654 - DNA, 160 bp, Glycine max
  unsure (1)..(160): unsure at all n locations
caccagaaagaggctgagacacacataagcgtacactanccacagcctcaattgctcttctatgacaggattataattactaacaccatgtactctattgttttccctgatatactgaccatgagatanacaattaacaagggatttcacgactccactt

SEQ ID NO: 241655 - DNA, 137 bp, Glycine max
  unsure (1)..(137): unsure at all n locations
gtctaatgaatgactaataatggcataacacatctgtaccaattctatngcaggcgtgaaactataatctagtagaagacgttatgttcaaaatcgaactacacacaatgtcaaggtgtatgtgctatgcacaagtg

SEQ ID NO: 241656 - DNA, 395 bp, Glycine max
  unsure (1)..(395): unsure at all n locations
atcgattgcagcctctggtaatcgattacgagagagtaaataaaatctcaaaaacttttgaaagattcctttggccaaaccttatgcatcacaatttagaaactctctctaagactctagagactagatccatcatttatcttaaatttcttgaagtcttgtcttggatcaaacatgagaagcgcgtttctttggcattatcacaacttcatgacatatttgcttctacaataagtggttcgatagtaatataaagaagatttcaaatacaattggtaaaatacaaatgttgcaaataaanacaaagataacattgcacacatttgctaaaattctaatgtttatgcgtttcatgaccgcttctcgngaccgacatatacattgcatcgaatata

SEQ ID NO: 241657 - DNA, 425 bp, Glycine max
  unsure (1)..(425): unsure at all n locations
ctctctaatagcttatctcacctccttgagatgagaagctagagcttagctacacaccctctataatagctaagctcacccccatgacannaaacatatgagaatacaataaaaaagtccttactacaaagactactcaaaatgccccgaaatacaaggctaaaaccctatactattagaatggccaaaatacaaggcccaaacgaggaaaaaacctattctaatacttacaaagaataagcggtcatgcttagcccatgggctcgaaatctaccctaaggctcatgagaaccttanggccttcccttggatctctagcccaatctacttggagtcttctacccaatgcccttgcgggataggattgcatcaccttcaataacaagaagtatgtcaacaactttgactcgtggtattaagtggta

SEQ ID NO: 241658 - DNA, 367 bp, Glycine max
  unsure (1)..(367): unsure at all n locations
ctctaacactcattntataccaaacaatccactacatatcattntcaatcaattcattcttcaaacatgcttttggtacaagaaaacaactcaaagtgctgaaatttaaagaactaaaacataaaccacactaaatactgataaactaaaatgttcatgctttgcagaaattaaactaaacacaatttaaacattttgctcatcctaaggctgatcttcattaagatctagtgctggagctgctgatgaatcttggataggctactcaggctctgtgactagtgtagctggttgggtctccttangaatacgtgcaggagatgaatcacgtatctaatcntgtggaagtcccctctctgagccatgt

SEQ ID NO: 241659 - DNA, 441 bp, Glycine max
  unsure (1)..(441): unsure at all n locations
ccacagcagcattgtgatggccggtagcgggcaatagacacaccgccaccacctctagagttcacctcagctcatccataanaaggtgaccaagtccaaagccaaaggtaagcaaagtactaggtccatgaccgacaaatcattatgcgtccagctcaagacgttaaagaagcgctactaggaggcaacctantaccttntgaatctatgctgtgttattgatcactctttatagtaggacgcacctagttgctcatgatcctgngaattaaatanaatgagcacaagctcganaggtagtcatacctcacaaaatatatgtatgcgtgttaggtagtgaaatacctacatatgcatgtatgaaacaaaaatacttacaaatataatatgatgttaggagaaagtaccttcatatgctattatacacaatactacaaacat

SEQ ID NO: 241660 - DNA, 355 bp, Glycine max
  unsure (1)..(355): unsure at all n locations
ggactacttttcttagcacccttatgttcaatatgttggataaataaaaagttcttcttcctatatgcatgagagtttcaatgctaattgtcacacaaatgtattacacaaaagtacctatcacataaagagtggctatgcacattataatgcatcacgaagttttagattgtgtggctacattctttggaaccaaaggcattggtatggagaaaatacttaaatacccatatctaacgggaatttctattctcctgcttggctnttttgagtgagatgtcaccacacgttatgcaggatggtggaagcagtcaatattgtatcattatcatgaatttgcacagaatattactcg

SEQ ID NO: 241661 - DNA, 357 bp, Glycine max
  unsure (1)..(357): unsure at all n locations
gctactcttaaaacaaaaatggcgtacaacgctctccaataaacacaaacatcaatgtaaatttagagcacactcatgcacatactttcttacgagcatntattcgcacaagatattcttctaactaagaanaaatgcacccatgcacaatcaaggcaccttcgttacctagattatttatatgtacttcccaggtgtattcgctacctacattacatgcacttccttggctaaagttacatacatgcatactcaaagcatcttggctaccaagaattgacacgtgcacattctggtatttcaatacctatgtgtataccctaattcgtccgggatatacttgagacatgcataatg

SEQ ID NO: 241662 - DNA, 177 bp, Glycine max
acaaatggcggtgagctgtgatatgaatctggcaatataatttaagcgtcccacgaagcctcggacttgcctctcagtacgtgtgtccggaatctcaaggatagccttcaccttctcggggtctacctctatccctttctggcttacaatgaaaccaaacacattccctgatttgac

SEQ ID NO: 241663 - DNA, 255 bp, Glycine max
acatatttgtgttggttaaatatttatttatttgaactctctttaaattgttaggattatacttaattataagtttattataagagtttttgtacccatgagaaaataattgcccttaactcacctgggctagtggacagcacgcttttgccagtgaatgtgtggtgtgagaaataaagatgggtgaaatctaattcaccccactctcattcacacttcttgttccttcttttgcatgaaccttagcccttattc

SEQ ID NO: 241664 - DNA, 390 bp, Glycine max
  unsure (1)..(390): unsure at all n locations
ataaatactcaagcttttgaagaagcctcttatgaagcttcgtgaggaagctacttgttttctgtctgcngaacacgctgnccagccttcatttaccgtaggatcttctcgacatttggtctgccgcttcacaagaaaagcttccactatctgaccgctgcgatctttgacaagatgtatggagtgtgctccaacctctacttcccgagagcatgtcttatttaagcacttcagcctttgctttcgtggagctgacgaaaaacgtcattacttcttctttctttcttccaagccatctctacaagtccaagaactttgtccatcacccacatccaccattatgcaccacaaaccattcgttgtcttcattgaatcctcacaccgagagga

SEQ ID NO: 241665 - DNA, 418 bp, Glycine max
tcgatcactatcggtgaataatatatttttgccgaggtgggctaatggtttccttggcgaataaatgagaacttgccattttcggccgatacgaaacatcggttgagctcgcacgacaaaacctagccgacctacattgtatagttttcatgcaacaccgaaacaagaaaaattcccctgccgtaagaaaaaacattatgggccagcgagcgttttttaaaaataaaaaatagcgcaatgtcggctgacaaatatcagtcggtgccatttcacgaccgatgtcggctattgagtttctattagatccttgaatgaaatttgcatgatgtcgatccggaaatgttggatcggacgcattcggtgatgcttcttttttagaccttgatcggacatctctccatgccgacgtcagctatca

SEQ ID NO: 241666 - DNA, 159 bp, Glycine max
  unsure (1)..(159): unsure at all n locations
tctaggcttgagaagcgaaattgagaatgaggtatnattggagcaaactctcacctctcacaagtctataacatcaatttaaacttctcaaacgggtttacacctaaaaatccacccgaacaaaaattgacctctcaacccccaattttaccctataaa

SEQ ID NO: 241667 - DNA, 393 bp, Glycine max
tctaaggaagtttctaaaaagcttctagaatttatctatttataatagagcatgtgtacacttgttgtacttgatgatgagagtctgtgagacacaactcaatttctgcccttttcaggaagctttctctctttttcttcttcaatttatgctccccccccccctctcttctctcttctttcttttctccttgagcatctttccagcttttatacaggacatattggtgatgaacctcttttccatgcttattcctagggatgggtttctctcacccttttcttttcttcactgcatctcatggggaaataccatgaagactcttgaactaaaaacagcctctaaagctccaagcacttcataactattgttgctttagactacatctttttt

SEQ ID NO: 241668 - DNA, 421 bp, Glycine max
attccatcttgatgcaaacccttttttttggatctcaaggtcgagaagggaatgaaaatggttatttgggggtaaccctcatctcaacaagtctatacatttaatagtcttgcttaactgattttaggggaaacttcactgttcataatttgacctctcacacccaattaccctagaaatggctcttgctttcacctttctcactcattattctcatttgctctgcccaagcttacctacaagtcctaattgacattctatactagaatcaactcactctagactctcatttacactaacctcagatctagcttctctacacttcaaatctcacacttttctactacaacattgcattctcacattacccctaataacttccccatatctctaccgtttctatcacaattctgccataacc

SEQ ID NO: 241669 - DNA, 475 bp, Glycine max
  unsure (1)..(475): unsure at all n locations
tgtccttcattntgntggcttatctgagactgtcagtgtttatttactatatctgcttgctacgnttcgaatatgcattgaacaaggacgaatagatagatatgaatttgtattataagactcagtcccattaaagaatattaattagggggtgtttttttattagtagtaattagtaataaaataattatttatgagcataatattttcaacgtttaaacatgttttataagttcgaaagaatgtacaaattttattttggttctttaataaaaaaattcttttgggttgaatttttaataaaacaattttatttttggctcttattattctattttaattcttttttcatctttgtttcacaaatatgcagactatttattagtctgtatcacatattcttttaaagagattgataaacaatgaataaattattataagaattaaaataaaaaatacgtttactagaatgagt

SEQ ID NO: 241670 - DNA, 129 bp, Glycine max
  unsure (1)..(129): unsure at all n locations
acaaanaccaactgggcgcatcaaggcgaaacaggatctctttagagggacaagaccaccgggagggcccccgagcaacgcgaacaccacacatggacccccaggagtggcgcaccgacccaaaaggag

SEQ ID NO: 241671 - DNA, 412 bp, Glycine max
atgaacacaatgtgacccattgatattatatacatggcaacaaaaataaatatgaaaaaaggtgaaacaaataacaatgtatctgaaagttaccttaagaagttctaatactagtagttcaaacacttgcagttccaacacttagagtcttaatattagttgtattcaaagccaaaccaaacaactctaaaacttttgatcggttttgatcagttcagttcggttttgattggatctataaatctaaacccatgacccaacctgtacatgaacggtttggattagttcgattcgatcttgactcaaatacataatgactcaacccaaactgttcggatcagttcggtcaattctagtcgcgctaacccatactctgaacaccctaaacaacatgataatagattaactattc

SEQ ID NO: 241672 - DNA, 254 bp, Glycine max
cctaaagaaacaagcccatagcgcgccttttttagagaccccgaacggcggaaagagcaataggcgccacccgcaacatcaatcgcccgaacctaaggcaacgcacatccctcctgcgaacgcgaaataacggagcaaacaaaacatacgaatcaccccgttacttaaaccataaacatcacagactcccagcttccatccgaccaacgaataataaaacgcgagggacaacaacggcggcagccttacaacat

SEQ ID NO: 241673 - DNA, 426 bp, Glycine max
  unsure (1)..(426): unsure at all n locations
tgaagntgacctaagcaaggcaagcatgggtgcaaattactcttcatacctcannngagtgggcgtaacctagtatataatatattcaattcttgacttaacactcctttttcctttctgagaaaataaccttattacatcactagcaagtgtatttccaagtcattaagatagaataggctaaacatacatttgttagaactagactcacaatataatgcccttcattatagttaatgtctttaaggcaagaatgtggataaccttttctgaaaaataaatagcataattgcctaaatactcctaatgctattaccccaaaatccctccatttgggaactactgcccatacttaagtactgtcttacccccatcccttggtgataaaaatacatacctccacatctgacaaacttgacaagcccc

SEQ ID NO: 241674 - DNA, 452 bp, Glycine max
tatgagaagaatgtggattcaccattggagaacgcggatcatctgtcactggctcaacccgcgtatgtgtgggctcaagaggagcaacctccgtgggtctcaccaatgaaagctgagcttcaagccaagctacttgcttaagaaaatgctccataagtatgattggcctgttgtgagccaactctcacatgctgtgcatgaaaataaactgccccctgaataagctttggagcataaggactacggcttgtgagctttggacatacggtcctatggttgctaacggaggagctcgagtggatgatgaagggacatcatctgctctaaccccttttctcgatgccatctgtaactagaaagaactcaaaattccttagacctgatttactctagtacaaaaaaaactgaaataaaaacttgcaataacgatgggcgcttagcaggctacaact

SEQ ID NO: 241675 - DNA, 459 bp, Glycine max
  unsure (1)..(459): unsure at all n locations
tattctttatctagagtagttgagcacaacaacttactacttgcatatattcgactctagtagtggacaatgtagttgagccttgcatcttgcatattcatgttactaagatagcaccgataaagtaatagcttccactagtgctttttctttcaactttatcaccaacatagtcaacatcataatagcttgtaagtctgaaactttctcttcttttgaacataagaccacgattagaagttccaattaaatatctacaaatatgtttaattttagttacgtgaacttccctttgttcttattgaaatcttgcacatagataaacattgaacataatatcagaaatggatgcagtgagatagaccagcgagtcgcatccacttnttttgatccttgtccaatccaaggtatgtcatggggtgcattggagtctcatttctttcatcgccatgtgaattc

SEQ ID NO: 241676 - DNA, 491 bp, Glycine max
  unsure (1)..(491): unsure at all n locations
acactatattatactagctngacagtaacttatgcctcggtaacctgaaaccatctttctatgtataatacatctgcacctgtcgcagactctgtggtttatgctgcttagccgaccaccacacagacctttgcccttctgtgcaacaaattgaagcaaatgaacagcttgaagcttatgctgcaaacatctacaatagacctcctcaacctcagctagcaaaatcagccacaacagaacaactatgacctcttcagcaacaggtacaatcccacgtggaggaatcatcccaaacttatatggccgagttcttcacaacaacagaaacaacaacaaccttatttccagaattctgctggcccagctagaccatacgttcctttaccaatccagcagcaacaacagcaacaagcccagaaacagcaaatagtgaggctgcttcgcaaccttcccttgaagaacttgtgagaaaatgactatgcacaacatgc

SEQ ID NO: 241677 - DNA, 480 bp, Glycine max
  unsure (1)..(480): unsure at all n locations
gctagagaggaggcttcatgaatgacaagaatgagagagagggttgttatattattgaacgagaataagagggagagaagttgaactttgaagtgtgtctcacaagcttcacattcatcaaagntatgacaagtgttacacatgcttntatctatagcctacgtcactaactaaatgaaagcttccttgagaagcttccttgagaagctagagcttatctacatacacccctcttatagcttaactcaaccccatgccacaagtctctattacaaagactactcataatgccctgaaatacaaggctaaaaccctatactactagaatgaccaaaatacaacgcccaaaagaaggaagacctattctaatatttactaagaagagtggaccccactttggcccatgagctcaaaaatctactttgaggttcatgagaatcttatggccctctttatccgctctaggccaatcctctttga

SEQ ID NO: 241678 - DNA, 350 bp, Glycine max
cttctcaaggaagtttctcaaagaagcttctcaaggaagtttctcaagaaagcttctaaaggaagttacctagtctataaatagaagcatgtgtaacacttattgtaactttgatgaatgagagtcttgtgagacatacttcaaagttccacttctctccctcttttattccttcaatttcgtgctcctcccctctctctttctctccctctttcttttcctccattgaagcattctctccaagcttcttatccaaggctcatcttggtggtgaagctccttcttccatggcttattccttagtggatggcgcctcctctcacctcttctcctttgtcttccgctgcatc

SEQ ID NO: 241679 - DNA, 410 bp, Glycine max
  unsure (1)..(410): unsure at all n locations
taattacatatccatgatgtaagatccaatttcaaattttaattggaaagtaaagtaagcaaatctttccaactgaaaataacataaacatgtatcttgcaatttatattcttaatttgaaactcaaagcagcagaccaaaaatgcagaacataatggcagggaaattaaactcaaaacctcaaacattgacataattaacaaacaaaaaaagaacttaaagagagctgttatagttacctcagtccaaggttaatgatgggtagttgccaactattcttccttgctagaggtgctactttgatctcatgtcagtggttaatgaatttactaagctctccgtgttacaaaattgtaacccaattagtcaaaaacaaacacatnaactgtctatacatgccaaaagatcat

SEQ ID NO: 241680 - DNA, 441 bp, Glycine max
  unsure (1)..(441): unsure at all n locations
actcagcttctcaggaagtttctcaaggaaacttctcaaggaagctctatcttctcaaggaagttttcgcanagaagcttctcaaggaagttttctcaagaaagcttctcaaggaagctacctagtctacaaatagaagcatgtgtaacacttgttgcaactttgatgaatgagtcttgtgagacacaactcaaagttcaacttctctccctcttttcctccttcaatttcgtgctccccctctctctttctctctctctttcttttcctccattgaagcctcctctccaagcttcttatccaaggcacattgttggtggcaacgctccttcttccatggcttattccctagcggatggtgtctcctctcacctcttcntctttgtcttctgctgcatctncatggtggaaaatctccattgaaggacctcattgaagctc

SEQ ID NO: 241681 - DNA, 403 bp, Glycine max
  unsure (1)..(403): unsure at all n locations
gtcttaaaccaagacctcatgtattcaacttcattctttttattgtatttttttcggatatatatttttttaaacgtgaacagtagcaattgaaagcattttaaaaataaagcaacaattagacaatatatgtatacatcatcaagcatggccaataaaaacatattatccaatgaaacatactccccctcacacttattcccaaaacaattccaaagctccaaaattctttaagggtagagagaaatcatgngttttcacttaaggcttgtaatgagctncaaaacaaagaaaggggaacataggctcaaaggggctattaaaggaattaatacaatgtaggttcatctggctagaggcttatataaacaaaatgcctaaattatctttcaacatgcatgtg

SEQ ID NO: 241682 - DNA, 455 bp, Glycine max
  unsure (1)..(455): unsure at all n locations
ntaacctcattgtctctcacagtctgtagatttgggagccttttcatccttgcgtccggactcttagccacttatgatagccgccgatgatcccattactgcttcccctaagctctctgtcctttcttcacgccgcatcccatgccttgcgaactccttggagtaccctcgcgttgtggtcactgaaaccccgtgcgatgaaaggcgtgatgctttcgtctgatggcactcctctcatggggtagccaagctgtcttatggcgaggacggcgataatacaaccccttgttcccatcaagggaacatttggacatccttcgcatgaagatagaatcctgattcttcctttcttctagcgagggaaccaattaacagacgctcctccatgctagccaagagtttgtcccaattcgccttttctttttcgacgcacgagcgatgaccttgtaccggat

SEQ ID NO: 241683 - DNA, 365 bp, Glycine max
  unsure (1)..(365): unsure at all n locations
cactatagaaacacgagcccccaatataaggagatagacgtcgaatagcatgactacttatggcttgacgtggacgcccaacaaataccgaaggcttgataagatcggcaatgcgagctcatacactactagaaagaacagtcaaccaatgcaactgcatcgatgacaagaaaggctctgaaaacactctactagatggcgatctatatacaacgacaactgaacattgtgaatgcaatgccgtaggatcaccgaacctctgaaaattatggcccacgaacatgaagggatatgcggctcccattgatccgcggcaaaaatgaagaggcagaataatacgcatgactatnattggcacaccataa

SEQ ID NO: 241684 - DNA, 445 bp, Glycine max
  unsure (1)..(445): unsure at all n locations
tggttcccaccctttgcttctggctctaatatgtatgtgtttcttcaaataaaacacagaagataattacaagatataatcgttattttgtcgcctctttgatatcatctatgtcattacggaaattaaatccgaagcctaactttgaaggctaaaaggttatgacggcacgactggattggataaagcatgttgttcatgaaacgaaagataggctagcctacaattgtgcaagttgaagttgaagctcagtgcaacctaatcgtcttaataaattgctctataattgtactaataatctattcttaaaactgggtttaaaggagaagacttgatatgattcgcggatatagaactagaatattaaacaaaaaagaanaaaaaaacgaacaggaaaggcattcatacgaatcaaacttatgagttaaataataaaatctctatg

SEQ ID NO: 241685 - DNA, 490 bp, Glycine max
acacttagaaactcaagcttactaagttgcttgtgttattgacaaatatgctttctgattataacatgttatcgaagagttactgtgaggcaaagaagatattatgttctgtgggtatggactaccagaaaattcatgtgtgccctaatgattgtattctgtacaaaaatgagtttgtgaaaatgtgtaactgcccgacatgtggggtatcatgctacacagtgaacaatggcaaatacagtaatgatgcaaccataaacaacagtcattcaacaaagggttgttggtatctgtcaataataccaaggcttaagagattgtttgctagtgcagatgatgcatataaccttatgtggcatggagatggcaaaataattgatgggttgctctgacattccactgattctccacaatggaaaccattgatcgtttgtatccacaatctatagaggatccaagaaattcttttggtaacttgagcactaaccat

SEQ ID NO: 241686 - DNA, 451 bp, Glycine max
  unsure (1)..(451): unsure at all n locations
ttncgtaagaatggaggaggagaggaaaataattatctcttgttttgcccaatgaactcttcttgacaaagcatgtgttgaacaaaaacttctagaaagatgtcgagaataatcagttataaaatatgtgtcatggtcacatatttatagtcatgcgcacatatttatagacatttgacgactcttgaataaaccatgttaaaagttgtgactcttggcaatttcttcaaaactagtcactttaaaagttgtaactctcttcaaaactagtcactntaaaagatgtgactcttggcaaattctatatatattgtgacttttgacaatttatttttcaaaaccagtcactggtaatcgagtactattatagtgtaatcgaattccatcaatagttgtgaccctctatgtntagaattgataaccaactgttagaaacactggtaatcgatta

SEQ ID NO: 241687 - DNA, 460 bp, Glycine max
  unsure (1)..(460): unsure at all n locations
tgtctttggtttanatatgatntatacatgatttacgacttgtatgatccaatttgagaaaaattggatgtgggcaagttggatttcgaaatctgccacattatgtagaaaaatgttgtcaaattgtgcaaccaacttgaccaaatgtgtagaaaaatgcttgtgcattgctagtcataagaagagtagtacatttcgggttccaggcattttatagtagatcccaacggtcaaaatgtagatttatgtactgngaacctccagtaaaattttcaagtcgatccgatggttaacgaatcggaacgaaggaaatgttactgcggtatatgaggaaagctgtggtatttgaatgtgctttggccagagttttttgcctctaccctatnttcttggtttaagggtagttcatgatatttggaattgaattgcttagatattgnggaagcttggagggattgat

SEQ ID NO: 241688 - DNA, 475 bp, Glycine max
tccttaagaagattcctaaagaagctagagcttagctacgttatttctctaatagctaaggtcacctccttgagatgagaagttagagcttagctgcacaccccctataatagctaagctcacccccatgaaaaaatacatgaaaatacaaaaaaaaagtccctactacaaagactactcaaaatgcctcgaaatacaaggctaaaaccctatactactagaatggccaaaatacaaggcccaaacgaaggaaaaacctattctaatatttacaaagataagcgggctcatacttagctcataagctcgaaatctaccctaagactcatgagaaccctagggcctttccttggatctctgacccaatctacttggagtcttctatccaatgcccttgcgggataggattgcatcatgtttcttcatctctatttttgtgtgtgtgattccttcacagatcgctacaaaaacaaag

SEQ ID NO: 241689 - DNA, 368 bp, Glycine max
  unsure (1)..(368): unsure at all n locations
ataaacttaagagcagctccaacgatacgttgttcactaacatggagatgcaaaataaactcanaggcaggttcttaaccattggagtactgtatgagtttctcacttcgtgctagtgagttctttgcaaagaaatagttttctaccgcaaaagtacgtccattgcaataaaaagtaatattattatattaagttaaagtaatgtgaagttatttcttatcatgcatcaattgttctacctttaaaagatatatccattgcaaaataatggcaattaaatgaatagtaaattatggtagtgtaaatcgaacattcttgtaattatttcacacacaacaatctgtcaattgcgtctatttgttctctta

SEQ ID NO: 241690 - DNA, 433 bp, Glycine max
  unsure (1)..(433): unsure at all n locations
ggcccagagctcggcttagcgagagttacaggttntctgatcttgttaactcgctaagtagccctactcgcgcgctaagccaagctttgtgtgttaaaacaatgaattttaatttcaaacattggctaagcgtgcagatccgctaagagagcctctttgagaaaccaaacatctcttaggctcgcttagcgaggcaatccgctaagcgagagggtcagaaattgcttaagtgagtgtaacatcagttatactcacatttgcccaaatttgctgaaccttacctgcattntctctcacaaccaatttcgtgcattcgtgttttctactgcattntcatgcatcttctgctactaacagcaatccaagtaagttcctcattccttttatttctcttttactttgttaaacgttaggttagaaaacattagaatta

SEQ ID NO: 241691 - DNA, 444 bp, Glycine max
  unsure (1)..(444): unsure at all n locations
tcacatacatgcatacacacacacttatttattcacacatattangcacaagaatgagtattataacatataatcactgcaagtaaatacatacatgcacaaatgacacaacacatagttatctctatcagtctgagtagtaatttttgtcagggtgttacaaattgcatcatgttgactcattctatggactttgntatctctcatatttattgcgaaggaaataagtgtgcggattgttaggcaaatgtgggtctcaattttgttggattctcctggtgggatgaagctctttattttcttagacaaacctatgttagggataggattagacttcctaattatagatattgttaattttgtttctgctctatcgtgggttttggtctaatcctccatggtcttcagtgtttttctctatcctttgattaataaacttttgtt

SEQ ID NO: 241692 - DNA, 473 bp, Glycine max
  unsure (1)..(473): unsure at all n locations
ctgatacactaagtaagttgccaattcaattgttgtctttcaacctttaccttcatctattntgcaggttacaagttgcacactttttgatggagctcatgggtcaggcttgtatattcccactgaagaaacatctcatgaagttaattacatgggaaaccagcctagacaaaattttaatgcaggtggattttctggattgcaacatggacaaccttaccagcaacataatcaatggagaactcaccctggtaatcagttcaataaagaccagggtggactacctaacaggctacaacaacaagggccgagcttatctgagagaacaacaaagttggaagaaactcttgctcaatttatgcaggtttcattgactaatcataaaagcacagagtcagccataaaatatctagaggttcatgtagggcagttatccacacaacttgcagaaaaatcttctagtacttttggag

SEQ ID NO: 241693 - DNA, 442 bp, Glycine max
  unsure (1)..(442): unsure at all n locations
ctctgcttggggttgagttaagcccacatccaaactttatatattattgcaatggagttgtaatttgatagatatacatttcaattggtcattttatttattgtctgtatgttcctatgtttgtctatgcacttctccatttgtgacctatttatatgcctaccattttctaaacagcttcttttgctggaatctcgtctttgttcttcaaagttatattcacagtcaatttattggcttagtcgttgcatgtttgtatgttgcagacagaggatgttcatcattcaattatattcgatctttagaatggaaacgcagaaattaggtggtgccttgttgtgtattgtttgaaggtttgtattctggctcttttatctanggatgctctntgttgctacctttcatactatgcttgtgttattgctgcatgtatatctccctt

SEQ ID NO: 241694 - DNA, 426 bp, Glycine max
ttctaaatgtatatgatctctactagtcgtcaaacaaaagttgtgggaccactaatcttaatggaaaaaaatgagggatcttcaaaaatcaaacatttggttagagactaaaaaattgaatttaaaaaaagtttaattactaagaactcaattaacccttttatcttttattgactatttttttcgacaattggtatcctattcagctcattggatacttttattctctattcaactaaatattttatttccttttcagctcaccaaacttgattttatagtattaatgtttttatttgaatatgtacggcgataataattattgagagaggcgcttcaagttcaacagaatcttcgttagaatatgatcataacagcctcaaaaattaaagttggagatttaaatatacatcaagtggcttatgt

SEQ ID NO: 241695 - DNA, 191 bp, Glycine max
ccctaaatggaacccgcgaaaggaaagacacaatttcataaaaaaaccaaggaaatcagggaaaaggaaagcccaaaaaaaaacccgccccacaaaaaagacaatttggaaaaaacaaactttaaggaaaacccgaaaccaaggacgaaaccgccgaaaaaaaaggcaaagaacgccccccccccccaaaa

SEQ ID NO: 241696 - DNA, 466 bp, Glycine max
  unsure (1)..(466): unsure at all n locations
ntaaaaggataggggatgcatcttttcagntgctgaatatgtttgagacgcctagtaatcaattgcctaagtcatcaattataggtttagatagagagtaagactttctgtcttcattgaaatgatcgattgcccaagttggtaatcagttacaggtttacctagagagtctagatatctccctcaactcgaaataatcaattacatgatatgctaattgattatcatgcaagctaaaaacataattttctggaattaaacatgctaaagtgatttttatgaatgttaaatgttcaagaatacaaatcacatgtacaaataatcaatcaaacaaatgtaaatgcatatgtacaagaatgaatactccttaattggcttaagtaagattagactcacttagaatgccaagttcattacgaaggtggaagaacctatccctttgctaaaggttagtgaagatatcaac

SEQ ID NO: 241697 - DNA, 364 bp, Glycine max
  unsure (1)..(364): unsure at all n locations
taaccctggcattcttattctaaaactgagactcttaaatctccaactcttctaaacttataatagttcccatattttaaacaaaaaatatttaatttctcacttttataaaaatccattattttgataattccgtgaaagtgtgacagctaaaaaattaacattaattaaacaaacattcttatttcactntattaaaatttgatagaagaattaaaattataacatttacaaaattagaggattacattctaaacaactggagcaaaatcacaaatttgaaaatatgaaattanaatctctattaaaataagatgataacatatgaatttcaaaatgaaaaaccaaatatattaatcctaat

SEQ ID NO: 241698 - DNA, 122 bp, Glycine max
  unsure (1)..(122): unsure at all n locations
aaggacnacctgaaaaaaacctagaaacccttttgagcccgcgaccactccttgaaacgaagctcactacaagccataagcgaaaaaccacgaatataccatatccttaaggaatactggag

SEQ ID NO: 241699 - DNA, 480 bp, Glycine max
  unsure (1)..(480): unsure at all n locations
catgattcacattctcctccttattcagcaaaatcatcttgttatatcaacancttcatgaatnacattctccgcccttttgatgatgaccaccacctgtcggttatgagctacaacaaagaagaaatatctatttgcatatagtttactcccactctggttntgcaatgttcgcttatatgagacaattgaagatttcatatttttcatatataataaagttgtctcataaagaatagataatatttccttactactttatcttttatctttctctcccgctttggaacattaaaaacaaatcatgaatagagaggagaaaaatgttaccacttgttgcaatgtataacaatcaagtgataccataacgcattagaacaaactattttgcactcaccaaaacacaatcaatcaaacacacaatcaaaagcaattaaccaaacattatcatatacaattatcatagaccatatccatcat

SEQ ID NO: 241700 - DNA, 466 bp, Glycine max
  unsure (1)..(466): unsure at all n locations
tctttcaaactagaactcttctttctttattgtatgaaaatatagnactctctggcaagaatagtcaaacgttgggagtggtgatacacagacagataacatgaaaaggtaatttgagtcgctttcaagcgtctttacttatgttctaattaatgattaatgatattcttttctataaattacatttcataactatttcaggacaaaacttaagagagtatgtttgttaatgttattcttagatcataaattataatttcgtcttcataactcgcacaatagaaatgacattaaaaattaacacggattatccatatgaaactctaatntaaattagaaaacatcacaataaatatctataagtaatacacctaaatgttatccattctttaagagagaaggcgtgctggagtaattctttgtttatacgttaagaaatcatgtccataccttgaacttatcaatt

SEQ ID NO: 241701 - DNA, 326 bp, Glycine max
gacccacttttataacaaaactgacccgcgaagacttgtggtaagcacccgccgacacctacaaccttgccttctgtgcccaaacggacaaaagaacacccgaactttgctgcaactctcaaaagacctctcaacccagcagcaaaatatgccaacagacaattatgacaactcagcacaggacaattccggggaggaacatccaacctagatggtgaatccttacaacagcagaacaacaacaccctatttcaaatgcacaggcccatcagacatacattctccacaatacacacaacaaagaatacccagaacagcaacagtga

SEQ ID NO: 241702 - DNA, 455 bp, Glycine max
  unsure (1)..(455): unsure at all n locations
gtgcgggtctgggagacgaaggtcaagtgttcgttatatgtgaagatgatgttccaagtacttcggatttggtccgaccatgccctcctgatttccagctgggaaattggcgagtggaggaacgccccggcatttacgcaacaagcataatgtaaacctttacggttttaaaagctctatagttgggcctaggctttagagttttcgttttgttaaggctttgtgtcttttgtttttgaatttataatacaaggatctttcttcatctgttcctggtctctacccattctcattcatttgcatgtttacttctttntctgaaacggcagattcgatgacgagtcccccgaaggtactaatacctgngacccgtctatcaacttcgagcaagaaatgaaccaaacggaagatgaatgagatgaggatgtgagactttcttcggaactagaaagaat

SEQ ID NO: 241703 - DNA, 467 bp, Glycine max
  unsure (1)..(467): unsure at all n locations
cgcacatcgntcgtgtgtatgatatccactctttatttgtttgaagcggaggagaccttcaatcctataacgcaacgtggcggacaaaaatggacagttaacttgaatggccattattgtcaatgcggaaggtattctgcgcttcactatccatgttcacacattattgcagcttgtggttatgtgagcataaactactaccaatatatagatgttgtttacaccaatgagcacatcttaaaagaatactccgcacagtggtggcctcttgtgaatgaagcggcaattcttccttctgatgaggcatgaacactaatccctgacccaactacaattcgtgcgaaaggtcggccaaaatcaacaaggataaggaatgagatggattgtgtcgaaccatctgaccaccgacaaaaatgtagtagatgtggagctgaagggcacaatacgcgtccatgtctatgcaatct

SEQ ID NO: 241704 - DNA, 479 bp, Glycine max
  unsure (1)..(479): unsure at all n locations
ttgagccaanatcctgactcaccatanaccttgatccattgttataatgtcaatccttaccctcggaagcaaaaaagaatagaagggaaatttccaatcaaagaaaaagagaaggaaaatttccaatgaaagcataaaagaaaagaaggaaaattccccaatcaaagagtgggagaaagcaaaaagaaaagaaaggaaattcccaatcaaagaatgggagaaagtaaaatagggaaggaaagatagttcttgaaggaaaaacagaatgaatatgcagagaggtctttggaccggacaatatctgaacaatacagaattgtcaccaaatgaacgaataaagaaggaaagggaaccacgacctaaaatagtcttctccctttgtataccaaccaaaatcccgtgcgctagcgactnttttttctcgccccgcactatacaaaaacagaaaaagaaaaagccagaataatcaatagccaaaa

SEQ ID NO: 241705 - DNA, 419 bp, Glycine max
  unsure (1)..(419): unsure at all n locations
ttttttttcctgagaatgacagtcaccgctttaggagcgctgtacaccaacatcgcttcgatgccatcaacggatggtcatttctctgggagcgacgcgttcagctaagggacgatgagtataccgatttccaggaagaaatatgtcgccggcggtgggcatcactggttacccccatgaccaagttcgatccacaaatagttctcgaattttatgccaatgcttggtcaacagaggagggcgtgcgtgacatgacgtcctgtgtgaggggtcagtggatcctcgttgatgcatatgctatctggcagctcctgggatatccgatagtgctggaagagggccaggagtgcgagtatggccagaggatgatccggtctgatgggttcgatgaggaggccatctgccaantgctatgtata

SEQ ID NO: 241706 - DNA, 450 bp, Glycine max
  unsure (1)..(450): unsure at all n locations
taagcttgccactcagctcgcccaggcgagcaaggatgcttcctccatatttctttgncttctggaggaatcttctggagggcccaagtgggtctggttgctatttgcacccccatttttactaagtacaccccctgcctttatttggtgatccttttttcgtaaagttacggaaacttacgaatttcgtaacgatacttgctttctttctgtaatgttacggaaccttgcggattacataatcatccccttttttgacttacggaatgttatggaacctcactaattgtgcaacgatgcttccatttgatttccggtgtgtcacggaaccttacggattgtgcatcaatattttcttttgttatccggcatgtcccagaatttcacacattgcctaatgatgggtggcaagcacctcacaaggaccaaacaaaagttgcatgtcatcaa

SEQ ID NO: 241707 - DNA, 410 bp, Glycine max
  unsure (1)..(410): unsure at all n locations
cacagaatcttgcgacaggtccagatttctgattcaggccacctgngttaccacgtttaccaaagcattcaatttaccctcaagcttcttagtttcagctggcgaagatgaattcgtggctacttcatgcactcctctaatgacacatagcatcatatatttggcgactaaacctgtttgggagtatggacagccaatacttcattacattaagaatacctcggctctcacgcagggggtctatgtctttcatagggatccaccacccggtagcatctatcatacttctctccatgatactgagtccctcataaaaatattggagaaaaactgcttatagatctggtggtgagggcagctggcgcatacttattatatctctctcaatatcataatagctctcttcactg

SEQ ID NO: 241708 - DNA, 480 bp, Glycine max
  unsure (1)..(480): unsure at all n locations
tcgcttctacagaagggtctcttggagattcttgagtattactatatgctttatgtcgtcaaaataaacttgaaagtgtagaagcaagcttcatgatgaatcaagattgattcaaagatgttttgatgataacaaagatgatgacaaaggtgatgacaaataactcaaaggtcaatcaaagaatgagttcaagatgttcaagatagaatcaagaacacttcaagattcaagaggaaagttgaagaagatagaatcaagaacacttctagattcaagaggaaagttgaagaacacttcaagattcaagaggaaagttgatttcaagaatcaagaatcaagattcaagattcaagaatcaagagaaggcttaatcaagataagtatganaaggttttatcacaaactgagtagcacatggagttttctctaacatgtttaccacagagtttttactctctaagtatcggctaccagaatatt

SEQ ID NO: 241709 - DNA, 458 bp, Glycine max
  unsure (1)..(458): unsure at all n locations
ctggtgggacatcttgacttgctttccaatctgatatttttttttgattctgccttcttctattntcagagtgtgaatgcctctaacagcacctttgtcaatgatattcttcatgcctcttaagtgcagatgtccaaatctttgatgccatattttgacttcatcttctttggaggatggacatgtggaggagtaactggtttcttgaggtgtccataggtaacagttgtcctttgatctgctgcccttcattagaacttcattcttctcatttgtcaccaagcattctgactctgtgaagtttacattgaatccttcatcacacaactgactgatgctgatcaagtttgcagtcagtcccttcaccagcagtactttgttcagactaggaagttcatcatggactagctntnccattccagtgatctttcctttagagccatctccaaatgtcacat

SEQ ID NO: 241710 - DNA, 318 bp, Glycine max
taaagaagcctacctgctggttttattgcccaacacttggaagctggaaaaagtggaagggctgcttcctatgactactggagacagaaaatgacaccttgtgagtctgagttaatgacttatgagaagttaacatggcccttgatattggtggctcactatctctattttacccagatgaccctgctagcctggaaaagttactcctacccaggggcgcttactttgaaattacttaaaggataattattggaacttgtttctcatgaaatttatcaactctgatatggctactcctaatacgttaccaggactccc

SEQ ID NO: 241711 - DNA, 465 bp, Glycine max
  unsure (1)..(465): unsure at all n locations
ctgaatttgcaacgntccaattgttttttaaatggttgtttcaattacaatatattggtaatcgattaccagtgtatctgaacattgaacttcaaattcaattgtgaagagtcacatcttttcataaaatgctttgtgtaatcgattacatggttttggtaatcgattaccagtgacaagttttgaataaaaatcatgagatgtaactcttccaatggttttcaagttattctcgaggttataactcttccaatggttttcttgaccagacatgaagagtctataaaagcaagaccttgacttgcatttcaataactttttaacaattctttatgaacaactttgagaaacctttgctacttattcttcttcttcctttgccaaaagctntctaagtnttctgggttccaaaccttgctctttcacagaacacaaaagngngctatatctttntattctcttctc

SEQ ID NO: 241712 - DNA, 435 bp, Glycine max
  unsure (1)..(435): unsure at all n locations
agtcatcaagagaatataaatatgttttcttttatgttttcaaactatgatctatctttcaatcttctctcaacatcattcaatatctntcaactctctctacaaaattctttgattcatttctcttcacctttctaaaaatttttgttcaacactttctcttccaagaaaagttcttatatcaaaaacttatgttattcatctttttcattctcttctccctttgccacaagaacagaatgactaaccgcctgaattcttttgtgtctctcttctcccttacaaaagattcataggactaaccgcctaacaattctattgattgtttcccttccccttaagcaaaagatttcaaaggactaaccgcctaagatatcttttgtttccccttacacagattataggactaaccgcctgaaattcttatccaacaca

SEQ ID NO: 241713 - DNA, 402 bp, Glycine max
  unsure (1)..(402): unsure at all n locations
ggtagtattaaacgtatgtgcatatgttctatactatgcgnttcacttactcgtgttgtgtagtgtttcaaattcctatttcaatatgcaattgcatttgcttgtggattaatgtgagtgcaagtatctacaaaggcgtataaattaatacatatggttgtgattcaacagatgcataactatatgtacatttcccctaagatgtaagatgtgtatatatctttccttcctatttcacatattaccatgaacctcactcctttctttctctatgctgcctcgctcttctatatgatgaacaacacggagagttgacatgcacaataagcacctaaattagtggagcaaatggatattatgaccgaatgcaacttattctttctctaggagtcttccatattt

SEQ ID NO: 241714 - DNA, 472 bp, Glycine max
  unsure (1)..(472): unsure at all n locations
tatgagcaggtgctatgcccatgatcaatcatttttttattctgcatccggctaaagacgttaaagaagcgttcctaggaagtagcctagtatctctaattctgctctttcaaatttctgcctttatttatttgttttcctaaattatatttgaattcagctaagtatatttacaactataggattttagaaaatatatgcctaacaaggaataatccaaatttttgaaaagggattttgcaaaaaaaaaaaaagtgaaatcatccactggccgagcgtgttcgacgctggttttaaaaagagggggggtgaagccattcttcaccccatttcttccncaacattcacaatcaccaagtgcttacgggaacttctgaatccagcagccccaagtaagccattgcacatatttgctttcattttctacacttttgttcatctcctacaagtgagtaccatctcctttgaattt

SEQ ID NO: 241715 - DNA, 465 bp, Glycine max
  unsure (1)..(465): unsure at all n locations
agttggtctaccttattgaagtctacattgttgnttttgataccctatttaagtggcatcatctaatttctgtcttttcaattatataatgataatctcgaacgctttgtcagatgtttaattctttgtcacttaattatgtgagatctaatctatatcatgtagattcctcttcaaatactctttgctctgtctgtaaagggacttggtagctttgctccattgatgtttttctgctgctctactttgcatattctattgctaagggagatcaattatccttcatattcctcatctccttgtacttttctttcatcatgatgaatattgttacccctctgaaatctgatatgaagaggaatggaaagaatgaaattaatatagaactgagaatgcagcactaaatgcggaaagaattgataagcattctaattcattgtctccttccacgttgtaatttataac

SEQ ID NO: 241716 - DNA, 208 bp, Glycine max
  unsure (1)..(208): unsure at all n locations
ccttaaccgctaacgagatattaacaatattgcagattagtattattttttgctgataaagnaatggtgggtaatcttgtataggaagccacttcaaagcagcagtaacgttaacgagatagaattatgtgactcttagatgatcaattattagaaaaatagaacaatgaaccagtcaaaagttactttgagcccaattagctacaac

SEQ ID NO: 241717 - DNA, 444 bp, Glycine max
  unsure (1)..(444): unsure at all n locations
agttattatgaatacgatggttcaagcaaaagtgacttagtcatggcctcctattgcataataattgagaaatgacaaccaatccagtgagtgattcatcccgtgatgataaactgaacggagccaaaccacatatcacacccttatcactctcacaatcacatccttatgctatcacggntatcgctctcacaatcacacccttatcgctatcacggtcactgaacataagatgctctctcccaacgcgtgtcactcaaaatcccatgagtattcttcacactcaatcaatggcggatcgattccatgccccaattngaccactctctcactcactcggagcaacgcttttggttcttggtacttttagattaaggggaggggatgacgcccagacaaggctttcgactaaaaaaacgctatatagattttaagntatctact

SEQ ID NO: 241718 - DNA, 450 bp, Glycine max
  unsure (1)..(450): unsure at all n locations
ctcagcttgcctcaatcctcttgtggactaggcttaatttagatagtctttctangtttagactaacttaaactaagtagtgtccccaatgatggagagggagatgattacaatgatagtatacacgttaccggtgttctactatgagaagatggtgggttacacgccttcaagctttgctgatttagttntcaccagcgaaaggatcaaagtaggcctaaaaggagggaaaattgattacgctgcttcgatgaattctagtgatatgaggcctgtggaaaatggagggaataagaatgagggagaaacccatgttgtggttgtcgttccttgcatggccgaatttccattagcccaacaatatcaatactcagccaatatcagtccttcttattacccaccagcctaccagccaagaacacccaattattcattaaggccacccccaaa

SEQ ID NO: 241719 - DNA, 395 bp, Glycine max
gcactcgaatttgtaaacatttggtaggttaaaactatcacacgtatgttgatcgacgctatattttttctcattcaatagctttcatattttctgaatccctcactcaatagattagtacccaaacttcttattcttttttctaaaaaaaacatttaacggattcgacacgttattattgtttataaagaaaaatataaatagcatatatatttagcagccatagaatttggaccgcacaggttggttgttcttcagctgcaggcaacttagagaaccctgcgccatgttcaattgttttccaattaatgctctagaatatactatacgtacaaaaaaagaagagtggatcttgctgttcacttgaaattctgaattaagcacttcataatttt

SEQ ID NO: 241720 - DNA, 367 bp, Glycine max
tcatcaacttcctcgggagtgaatgattcttcaacttccttatgttcccctccaccctggccctattgctgcctcaacttcctgaaatgtagataatagtgtcaatggttcctcattatttctctgtaatgtccaagtctatttgcattggcattctttgtgaagtgtgatttcatttttcggtgaggtttactctatttatttggtgcagctacttaaagaattggagagttacacttcaatttttaagaataatcaatttctaatttttggtggaaaattatgatttgtaaaagtcttatcaatttgtttaattttaatttaacaggaaaatcctactttgagaaatttgtaatgttgacatttt

SEQ ID NO: 241721 - DNA, 421 bp, Glycine max
  unsure (1)..(421): unsure at all n locations
tcgtccgcagatccctcttgtaacaacataatttttatcattatttattccgcanatccctctcgtaagacntaagtttgatcctaattcaatcaagttctaaggcaacaatacatttcccaatgctaaagccacctaactatgaacacaaatggatgatcagaccaaaagcatacaaacattaagcattgaacatagaaaacataatcaattagatattaagtatttacattagttgttcattataaatccccaactagggtggttagccagccattacagaagaaaccctaacaataataagcttacaaaacctaggtatctctgcanaagctgctcctctggttgcctccagagctcttttcccgaaataggcactgtggtgtgctttggaatctgtgtcaatcatctactaaaagtc

SEQ ID NO: 241722 - DNA, 435 bp, Glycine max
actcagctttaagaatcaaaattgatggtcaccttattatgtgtttgatcgagtggcctcacaataattaagaaggggggggggatagaattaattattcctaaaaccttaccaattaaaaattactcttttaaggcttttacttatgttgttaagagaatatggagtataagagaaacttaacagaaagtaaaagcggaaattaaatgcacagtggagagtaaaatagtatggaagaaggaaacaaacacacaaggatttttatactagttcagcacaaacccgtgcctaccttcagtccccaagcgacctgcgggccttgagatatttttcaaccttgttaaaatccttttacaagcaaagattcacaagggatgtaccctcccttgttctctttgaacctagtggatgtaccctccactagaactgatccac

SEQ ID NO: 241723 - DNA, 442 bp, Glycine max
ctagactcatcttctccttgaagaggcgtcttctctctctctttctttctccattccgctgccattcatcttccaagaagcacaggaatccattgatgaggaagatcctatgcctacaagctccaatggagcttacatcatgtggtatcagagcatcttcatctacgtgaagtcctttcgcttcctctatctttttgttcggtgaaatctctttaattccttcgtcttcatcttattctccatgtatatcctccattgtcttgtggtttggtgctgtttaaagtatattaaaaaaaataaaccgattaaatcttagatctacacttgttcttgcatttctatggttcaaatttcgtacatctactcttgaatcttgtttctgtgttgaatttacgttctagcatttttcattcataataatcttgtgttgaaccttagatct

SEQ ID NO: 241724 - DNA, 384 bp, Glycine max
  unsure (1)..(384): unsure at all n locations
acttcccggcctaaagatataattggaccggttgttttcttatatcacatcagctcgggattctcatctttaactttacatctctctcatactttcatcaatctttcaacactntctacagaactttctaattcatttctcttcatctttctaaaaagattttatcaacactttctcttccaagaaaagttctttgttcaaaaacttgtgctatccaacttttcattctcttctccctttgccagaagaatgaaggactaactgcctgaatcttttgtgctcttttctccctacaaagatcaaaggactactgcctgcaattctttgatctttccttcttttagcaaagatttaaatgactaccgctgagaatttttttttctc

SEQ ID NO: 241725 - DNA, 338 bp, Glycine max
  unsure (1)..(338): unsure at all n locations
tttctatnggcttaaaaatccctacccaggagggatattgaaaactatatataaactatcagaaagtttgatcggataaaccttagattcatttgcatttattatattgacttaattcttttcatttaattattattattttaccaattttatcactcaaaatttggttgacaaattttaacacttaaattatcagcttctatccattttaccaccttagttttcttttcactaaatttattacccaaatttttaatttttacacatcttaacatcatgttggtaataaaacacttcacttcacaaaaaattgaacgttttagtgacatcttaccttt

SEQ ID NO: 241726 - DNA, 393 bp, Glycine max
tgatgttgcgcgtactgatgggtaccatgaggtgttttttgttgtttgacccacgcgggtgttgaagagacagcatgggcatctccttccttcctttttgcccctgttgccccgattcttttggcattcgcgtttgtggaggacacgtaatcaaactttcctcctttcaatccaacctcgattctttccccggcaaacaccagatccacgaagctggacggcatgtaacccactagcttctcatagtagaacactggcagagtgtctaccatcatggtgatcatctctctctcaaccatgggaggagctacttgtgccgccaaatccctccatcgctgcgcatattacttataggtttcaccctctttcttgaacatattctgcaagtgagta

SEQ ID NO: 241727 - DNA, 453 bp, Glycine max
  unsure (1)..(453): unsure at all n locations
aaactcagcttcagccaggccagattctcgtgcatgcagaggcttctaatgataaatatgccaaactcctctcacaaaatctgatttcaagcttgaataggtgggttggtccgtgctcgcgcgcttagcgcaaatttgaatcccttagcgcgcataagtggatttcggcttaacgcgcctctctcgcttagcggatgagctgaagcttgatgacctggagcggtgcgctcagcgaacctgatagctcatcttcttctggattcttccttgcgcttagccactgagtgtcgtgcttagcgaatgctcgctaagccagtagattggctttgctagaaggtgaaaacaacacttttggtcaatttcctaattaacctgaaattgagagaaattgattattaaacacacaaaacaaaagtatanattatctactacctatatttaaacagtaggact

SEQ ID NO: 241728 - DNA, 419 bp, Glycine max
acactctctgtggataaccgcaacattattttataatcttaaaataagcacaacataaattcaatcatcaatgttcataaacaatcataaaatgtcggaatttcttcccagaaatggtatttgaaaaatgtcaattaaaaagaccataaaatgttaataataaacataccctgtcaaaataactcgcttaaggattatcaaaagttttcagtgagccaacagtagccactgcaggggcagcattgtctccatctctctttatgattatcatacgaagaggaggagataaaattggtgcatagattgaagcaactgaaaaatgccaacatggagaaacctctccatcttgtcttgtctgatttatgaactcgctaagaaaattggctgcagacaaaaattgcattaccaaaattttccta

SEQ ID NO: 241729 - DNA, 309 bp, Glycine max
atgcaagctttccgcaagacttacggaaagatcttagagttgaccttatcagaggtatccatagaagccattgcatcactcacccaatactacgaccaacctttgagatgcttcacattcggagacttccaattagtaccaaccatcgaagaatttgaggaaattctacgatgtcctcttcggggaagaagaccatatctttcatccgggtgtctcccctttctgagcagaaatgcaataatggtcaaggattcaccaagaggttcggaccgcattaaacagactcggaacggcatagctggcctacca

SEQ ID NO: 241730 - DNA, 382 bp, Glycine max
taatgctaatgggcagcctttgaagattctgaggaagaacatgaccacgctttctcagacttggagcgttctttccttttctaacctcatccccacttctcacacttctgatgtcaccctagacagagccaaactcatttatggcatcatcatgaagatggatatgaatgtggggtaccttatctcccactagatctcccttatcgcacagcaagacacatccagactaggattccctgccttgatcatagctttgtgtaaggctaggggagtttagtcagattcaaggtccctagagagcttgagtcctgccattaatttggcatatattaagaagaactgttggaatcttgatgatccaacagtaactttcagaggaccc

SEQ ID NO: 241731 - DNA, 407 bp, Glycine max
  unsure (1)..(407): unsure at all n locations
cacaacaagaataanagcttccacactaaggtctaaaagaaagacatatagccttaggataagtaactgccagcatgtcttgatcacgactgtggtgactttttgtactcaatattgcatttggccgtgatcgaacgatcatggctnggataatcgtcaactattttccaatgttgggccatgatcaaaccatcatagccttggtgacttcaggttgatcacgactgtgatgactgatcacaaccatgatagagtagcccgatttctcacttcatccaattgcgctattttgagcctgttttctcaccaaattcctcctagtcacttgcgtaacaaatctaattatagaccatgactgtcgcaacaaatatatcataaatgccacaataggccttaactacacataa

SEQ ID NO: 241732 - DNA, 283 bp, Glycine max
  unsure (1)..(283): unsure at all n locations
ttttgtcaaggatcttcttcatgcctcttaagtgcagatgtccaaacctttgatgccatanttctgacttcatcttcttggaggatagacatgtagaggagtagctggtttcttggggtgtccataggtaacaattgtcctttgatctgctggccttcattagaacntcactcttctcattngcaccaagcattctgactttgtgaagtttacattgaatccttcatcacacagctgactgatgctaatcaagtttgcagtcagttccttcaccagcagtact

SEQ ID NO: 241733 - DNA, 164 bp, Glycine max
ttttctattattaatttacctctttttttatttccaacgtggttaccgcacgaccaaacggtcggaatttattttaactaaaattaacggatgatacaattcaaacgatcggtggacattttatttatttttagaataagcgagaaatgacttaaataaatgac

SEQ ID NO: 241734 - DNA, 298 bp, Glycine max
aacactgtctgttgtcatgcagcgggataatgcatggataatgccccaccactgttggtttgtggggtgctaaacattttggtgtattgaatcatacattgtgcacttctgtagtggcttctcacgcgatcccaagttcttacagatgacggaggtgaatagaaccgctaaggctatccactactaacgctaatgcataaaaaagaactggttttaaacttaataatacaactggttaaaactgggcccataatgatactatatttggccatatggttgtgaaacccataaatttttt

SEQ ID NO: 241735 - DNA, 286 bp, Glycine max
  unsure (1)..(286): unsure at all n locations
aaagattcactatcttcatgcagatcattgaaatcatggatttcaacacaccaaccttctatggctccaaggcccgatttgcctcttaaaggtaagtcccttttcccccccanatactgtctggttacaaacatcagttatgttattgcttgaggtcacttgcgtgacagttaaactactcaatgcttggctcgtgtgggatcagctgatttcgagtagctagttcaatctggtgcactacgttatgtgtgtcataatcttacaggacctagtctcgaccactgat

SEQ ID NO: 241736 - DNA, 332 bp, Glycine max
cgggcgctccgagacgtctccgaaggatttccgaaattttgcgtcttcgtcgctcttggcttaaccgtaagttccgaaacgaaatttcattattctatggccttggggccccgttggtcgatgctttatgtcattcataacttgtcgacccctttgaccgcttagtcattattacaccgttttcgctagcaaattaaataatttccccgatcttctatgtacattttttttcttaaaggatccgacttcgcctcccacccgttaaccaaatatcagttttttatataaaattctttttaatataaaagcacggcgttttggtttctttatca

SEQ ID NO: 241737 - DNA, 426 bp, Glycine max
  unsure (1)..(426): unsure at all n locations
tgtcatctaagcaatntcatgtagcctcatcaaggtaaggtgggtctcttgaattcttggaccctaatcttgttgtctttggaagctaagcttcattgaatgttgttttgatgttcaaaattcgtagcaactgccttgtctggaactgtatgatgtgttagttctcttgaaatttaaagttaanaatgagttccttgggtgtcnaaacctaggggtagccttacatttaccaaaactcgagttttcaagtaaaacatatgaacaanacaagtttaaagatcttttaggactaaattgtcacgacaataaacatgttctggttctatggacgcgctttcttannacattgaattcacaaatgagtttttagttgttacaatatacgagtacgtgtaacacttatgaacatcaattctcgatacactt

SEQ ID NO: 241738 - DNA, 378 bp, Glycine max
  unsure (1)..(378): unsure at all n locations
aatttttattcatagtgatcatcaatcacttaagtacattagagggcaaataaaattaaacaagaggcatgcaaaatgggtagagtacctagagcaatctccatatgttatcaaatacaacaagggaaaaacaaatgtggtagttgatgccctctctaggagacacacanttgtttgctcccttaggagctcatatttaagatttgataatattagggacttgtatgctctagataaacatttctctttcatttacgagagttgtgggacaaaggcccaagatggattctatttggctaaagggtatttgttcanagagggaaagctntgcataccccaaggatccattangaaattacttgtgaaagagagccatga

SEQ ID NO: 241739 - DNA, 312 bp, Glycine max
  unsure (1)..(312): unsure at all n locations
catgaagttattcatgccaatgatgaagttcataatctaaatatacgggaagaataaggcatcttttcttgggttgctgtanattatgctcttggaaacttgcgatgagaggctcaagacacaaatggaatacttgaccttcgggggctcctttcagggtcttcattcctataatgacattcatttacttgtcaacaatttcgtcatatcagataatcatatcatcaatcttattctactaggacatgtatactagagcctatttcacacttgctgaattacatttcggagcatggtataattgctcttttt

SEQ ID NO: 241740 - DNA, 382 bp, Glycine max
  unsure (1)..(382): unsure at all n locations
cttggacctgttctgactatcctcgtggatacccaacttttaattcttcgaagaagcatcatagaacttgttgtaatcttccttgttctccgcaatttcattgaacatctcaatgcacttcttcacgagattcttcctgatcaccttcaggatcttgnnttgtgcagcatctcacgagagatgttgagcggcaagtcatcggagtcaacaacacctttcacaaatccaaggtactcaggaatngagctctcacaatngtccattataaacacccttctgacataaagctngatgttgttcatcttcttcctggtgtaaacaaatcaaagggtgccctcttcnggacaaagaggatggccttgaactcaagctggcccttcac

SEQ ID NO: 241741 - DNA, 367 bp, Glycine max
  unsure (1)..(367): unsure at all n locations
atgagtaatgtgcagatgtaaatataagtaatagtaaagggttaaatcttacctcgaggagaacatcttatgagttattcaagaaaatgtcatcaaaattattacgaactactattttaacatcatgattattatgttataagttaggaaacacgttatgcatgatatttaaattaataggaatatttgacggtgggataataaataatatacactttcaggaactggatatgacttgaaaaaggtttagtttgtattaacgaatatttccaaatggtgtggaaaatgaagatagaaattactnaaatattgtttcaaacgttataagtgatagataaagtatcatgacattacttaaattaaatgt

SEQ ID NO: 241742 - DNA, 306 bp, Glycine max
tattatgatactaatctatcatgataactctagaaaaacctaaagtaatgtaaaaacattcaccatcattgagaggttggcgacttgaacctatacatacggcattaatatgttgtaattgataatccataacatcgatgacatagtcttctctctacacaattctctaagactatcaactatcaattatgaactatcaactatcatctgaccaactaccaacgtgcgcggaatatggagattgtcaatgatcagacatgacaaccttggttacttaattatatatcagccacaataacatatgat

SEQ ID NO: 241743 - DNA, 389 bp, Glycine max
  unsure (1)..(389): unsure at all n locations
ttaacacagcatccacaatatttcggtcaaatagcttcaacaaatacagaatgaatntcatttctttaggaaacatcaaattaaagccatataaaagttgtacgtttgataaaggggtaaacaaaacttattcttgtataaaatgaataaataatatttctaacctcnttcaaaaagtatccgtctctaaacaagnccccctcatctccctcatcaccatcatcgaagtcatcaaagtaatcgtcatcgtccccatcatcatcacctccatcaccaccaccatgattgattttctttccgatatctcccccaccttccccaatgtctagctgcaaacaaaagcatganaatgaattccaaataggcaaatactaacaacaagtgaagtc

SEQ ID NO: 241744 - DNA, 337 bp, Glycine max
  unsure (1)..(337): unsure at all n locations
atgcatatgtcgaccaacacgaagatgaaagcttcanatttgcttatgcaactgatctcatgtggctcaatattagtgaaaaaccatagttntggccttattcctttctataagccccatgtttatagttcaaaatgtcctttcttttgtgttgngggagtttgattgcttaatgattgagcatttgtagttaatatttttctattctttntatctcaatcgacatctcttttgacttttatttttcaccttaactcagttntggtctaaggcaaatgattgaggtaattgagaactgagtcaaattaagatttgtgctacttacctatctgtctat

SEQ ID NO: 241745 - DNA, 288 bp, Glycine max
  unsure (1)..(288): unsure at all n locations
acatcacttctcttgaataccttcaatggtaccatattaatttggtacaaccaaggaaaataattccacaatctaacaacaatggtccaaacgacatgttgaaagaagactgataagtgccatatttcacgtatttttgggattaaaatgttagcacttatctctttattcgaatacgtntcttataaacttcatttaaatctagttgtnttatatatattgtacatttactaatgttcntgttcaaatatggaagattcatccatgattctataggttttgatagtt

SEQ ID NO: 241746 - DNA, 361 bp, Glycine max
atacacacgctgttccaccacataaaagggtccaaagaggaaggctaaagaaaaatagaaggagatctgttgatgaggacaatgtcaaaggacataagctaaagaggaaattggttgagtttacatgtggaaggtgtggccaaaccaatcataacattagaagctgtaaaaatatttggagtcctggtaggccaaagaaatattgtgcaccatcaacttcaaatgacgatgaccacctattatctcaagatgaacaatctttgaatgaagctgaagaagctgctgctcatgttcaacaagatccggtggagaataattcatctcagcctcatttgtcacaagatagtgacatggagttgat

SEQ ID NO: 241747 - DNA, 328 bp, Glycine max
  unsure (1)..(328): unsure at all n locations
tggacaagacctggccatgcttaatggcttgactgactcgtcatccttctacttgtcaagggtactacccncgacacgggacaatctcctttgacactagacaacctctttcgcttgcaagccggctcagaagcttggatgcttatgtattgtccaaggtccacaaaatacacatgtcatgctacgtgacactccaagacacacgttaaccctctatgtcagtctcggcatacgagcacagacgtctaacccgtagtagttggcttcccaacagacaggttatctctaacctcttaagtatgtgaatatatcggcatctccatatctc

SEQ ID NO: 241748 - DNA, 170 bp, Glycine max
agtaaactcattacattatggcatattttaaacaacaaatttggaaggtgctcgctgtaacgaatttctagaacacactccggctggaaaacttactttcctctgttcattactgcgtaccttgatgaaaaaggttgttatgaatttataacaacttacgtctagcttct

SEQ ID NO: 241749 - DNA, 370 bp, Glycine max
  unsure (1)..(370): unsure at all n locations
ctcttataacttcttttctggcgagccgccaagatgtctcgctttgccggcgtttgatgaccgccgtatctgccttccggccaggcctgcccagcgctccgctgggcaatgtaagtcgtttttgtcgcaccctgtcgattgtaattcgtttaggtgtaagccttttgtgccttcattgactcctcctcctcctccctcaccaccattgccatcgccgcctccgccgtcgcctgttacatttctcattnccctcaccacncccaccgacggggtattcgccaccacctccaccaccagtgtattcgcctgctccaccgcgctcaacgtattctgcaccaccaccgccactcgtgtctgcaccaccaccacc

SEQ ID NO: 241750 - DNA, 386 bp, Glycine max
  unsure (1)..(386): unsure at all n locations
attcactacataagcanaggcccatagaataataaataataaacaaaaggcacgcgcagttcataatctcaaggagaacagaaaacaattatataaagtcagaacaccaaacttcaattcattgtgtatatatatatatatatacactctaaatcttcataattcaccatcgttgtaatttggaacattctcagaagcacggatggtcacaaaaattcatgtatgtgtagttgagacagcttattaaaaaagattttcatatcaatttcgcatcgaaacatcaattgtgtcgtcaatcacatgcaaatcacgattacaagcatcaaaacacaattatattcataanacattcacaattggtcttttagattctacaatgttctaat

SEQ ID NO: 241751 - DNA, 209 bp, Glycine max
agaatgtaagctctatcaccaccatctctctgaatccccctagctttcttatacatagctcctaaacaagcgttcggatttaacatccatgccgataaagaatagcaacactctctgtcttcttcatccaaaatgtctcgagtctgaattccttttgtctaaatatcatattattccttcgtaaccaaatagctcccatcatcgcggat

SEQ ID NO: 241752 - DNA, 344 bp, Glycine max
  unsure (1)..(344): unsure at all n locations
gtatctcgaagcggccaatcaaagggtgtatatcatcaaataataatccctggacgaaattanggtatgacagttgccnctctttacttacctcatatcggagataagaggaaagcanagataagacactgatttcgtccgtcctgccctttccatgatgacaactctcgtctctactccttctctctttttttctgcncaanacanaacaaacaacaacgcgaacaatgaatataatatacatatacacatgtttggcgaaggaacccatccggagaataacagtaaaacatatttcctagtcaccagaggcttcgcgcttgataacggaggacacatgaaca

SEQ ID NO: 241753 - DNA, 390 bp, Glycine max
  unsure (1)..(390): unsure at all n locations
gaaagataaaggagaagaggtaagaggaggcaccatccactatggaatcagccatggaagggaggagtttgtaacgcccagaaattttgataattgaaaatagatgtttgatgtttttcttgtgttatttgattacttgattaatctggatgagttaaggtattatgtgaattatccatgtgtgattttctcgatgtggatgttgagttatgtggacttttattgacttacgttgaaattatgagatttcaaggtttacttaaacctgtgtcactanaaccacaatcctgaattattacaccgtggatcgctttaaaattggaccgtagacttgaaacccaattgtgcataatctgattgttgtgatgtacaatataacatcttgaatat

SEQ ID NO: 241754 - DNA, 181 bp, Glycine max
tgcattttaaacatcgttaagttgatttgaagatcttcgaacagtactgaaaattggactttgaatgattttcaaatcagcactggaatcgataccattaggtgtaatcgattacacattaacagatgtgactctttgtgataccctcaatttcgtgcggggaatattacttgatgatatg

SEQ ID NO: 241755 - DNA, 444 bp, Glycine max
  unsure (1)..(444): unsure at all n locations
agccactacgtatggtgttacctttagccgaacaactttaactatacagaatatattacagggtcttcgaacattgacgccgttgaagagatgctaactgaccgggatatcactttccaagctattcgaaataagcttctaaggaacaagctgctatgaaaagccaagctgatgggaaacgtcgcgaagtgaactacccgatacgagactgggtctccttaacctcaccctcgtggaaggcacgcaaaggatctanatagtctatgcagcttgcagcggtctatgaccttcaagcataaatgcttggctcgtgatataatacaattgcatcgaagttaatacacccgattcacattcaagctgaatctttgggtcaccaaaatatgcggaatgctgccangagtactacgacaccctcggttcatacgatctgataccgaacat

SEQ ID NO: 241756 - DNA, 424 bp, Glycine max
  unsure (1)..(424): unsure at all n locations
gctatgggtcgaactgctctgctaacactggagcaaggcctatctctgctcaacactaccttcgacagaagagagaccgnggtgctgatgaagattaactacattanggttaagtttgcgaatntagtgtcgagcgacgccaatttcttttccttcactcttgcaattctctctaacttccatttcacttctgcctagtgcaagactctgattctggacgtggatttggcacaaggtattcaggatattctaattttttgtcaaaagtgttggatttacttcttgatgaatgagtttgattgtcttgtgctcacgaataagaggttgctcctgataccacaccaggatatgacatgacctttgcacccaaagtatggattanggccgtactgtgaatggtttctttcctcattgtgcgcgatat

SEQ ID NO: 241757 - DNA, 285 bp, Glycine max
atcgtgctcgcattatctggatttgaattatggcctaaccaaggtttcttcataacagtctctgactcttctcattcaacctatgtctccctctccaaggaagacaacgagttcatcttgaataataagctgcagcttgcgcaattcttttatgtggatagaatcgagtcttgtacacttgttccaattctggttggagtagaccagtccccggacggcacccttttgaggcaatcctaaggatctaatgcagatgctagagcaatcagataatgttggagtaat

SEQ ID NO: 241758 - DNA, 231 bp, Glycine max
  unsure (1)..(231): unsure at all n locations
tacatgaagtatctactaatcaaacactangtacacaatangtatttcatcctggtatttctacacatcctcaatcttttccttaagatcaataaagaatatatcagagcagaatggacaacacttgaatatcttacattgcaaaagttgttatgtgctgagcttgatatctctttataagcttagaaaagaaacggtgcgggattaaagcttctaaaaaaatattcgtct

SEQ ID NO: 241759 - DNA, 440 bp, Glycine max
  unsure (1)..(440): unsure at all n locations
ctgggtccttgactttagttctattctaggctagtttcttggttctaagtatatgaagattatcctattctacaccggagttcctacatatactaagaggggaaggagctgcatcaacttcttgggattttggcagatcttggagctctaatctcgctgagttcattaaggattgtggcggatttatctacacgtttgtgtcatccagaactttctttttagttnntttnttttattttacatcattntttttaattatattattgatacgaaagtagtggttaatttttattatgaactgtgagaacacacgataaatattnttcttcctatatgatttattntatatctaaaatcaacatttcaaatttacaatactggatcaatcaagaaacacataacattattaattatctcacctagtgtcggaactcttatag

SEQ ID NO: 241760 - DNA, 379 bp, Glycine max
  unsure (1)..(379): unsure at all n locations
cttatacagctgaagctntataccacttgtatacatgtggcctcagatatcttaagaaggggggttgaattaagatattgcaaactatttcccaaattaaaattctatttcactttctatgcangttacaaattcccttaaaaatgaactcttacataatgattcaaatagaacaatctaactataaatataaaacaataataaataaaagagtttaacggaagagaaaatgcaaactcggatttatactggttcggccacacccttgtgcctacgttcagtccccaagcaacttgcttgagagttccactatcttgtaaaatccttntacaagttctgaacacacaaggacaatcctntctttgtgtcagaatctttt

SEQ ID NO: 241761 - DNA, 195 bp, Glycine max
  unsure (1)..(195): unsure at all n locations
acgagtcttatgtgcagcgcatgtgctgtgctcttgcatacatgtcactcactgtgagtggcatgtacttgagaactaatggtgtactcttgcatacatgtcacctacaagtggcatatactggagacatggtggtgtgctctcgcatacatgtcaccgtgggtggcatatactanagatgtaccatcatgaatc

SEQ ID NO: 241762 - DNA, 113 bp, Glycine max
  unsure (1)..(113): unsure at all n locations
tacgatggacattattgtggtggaatanaaattctatgaaatgcattccattccatccaatgcctctctaagctctttatctctaatcctccatttgagatatgaaattaatg

SEQ ID NO: 241763 - DNA, 321 bp, Glycine max
  unsure (1)..(321): unsure at all n locations
aatataaagaatttgaaattcttgaaccaacaagggaactctattaaatgaatgaattccgatgagcatggtgggcgngcgtttcattattataaaataaactaccacaaggaagatgattacaaaatcctgtcttgaaaatgcttcctaacttgcagctgctaaatataagcttctaaccactaactagctaacaattntccanattgggaaaactaacataatcaaatcttactaactctggacacggtagccagctgctaactacctttctaagctagctcacatgtgtgtcggcagtgatagcaacatctttaatga

SEQ ID NO: 241764 - DNA, 68 bp, Glycine max
  unsure (1)..(68): unsure at all n locations
ctttaacaatagttcactcttcagaattattctttttntttacccccccccgccatatatttggattt

SEQ ID NO: 241765 - DNA, 244 bp, Glycine max
  unsure (1)..(244): unsure at all n locations
atttgccgaacgaacacaagaacgcacttttcaagttgttttgcccccgccccccgggctataatagttttagagggatttacatattnttccgctgatagataccatcccttcttcaattaactttgtgaggttaagcacttctacgatgatcacgaccccagaacactgagggggaaatcatattggagaactgacagggaggccatttctggaaatactttcctacctctgggggcgaaag

SEQ ID NO: 241766 - DNA, 342 bp, Glycine max
  unsure (1)..(342): unsure at all n locations
tgaggctgcaactgcttgtaatttgaacgccgaaatatgtcctgatctttttnnnnntaaccggccgaccttccgaatatctngagagcttncgttgttcaatttcgagcgtctcaatatattatgcgcctgaatctgaccttcgagtggaatagtatgaccatttgaatatctcgacagttttcgttgtcaaattcgagggcctcgatatattatgtgcctgaatcggacatcctagngaatagttatgaccactttaatttgctcaagagcctcgcattgtttaatttagaacgtctcgatatattatgcgcctgaatctgacatcgagttacaagtatg

SEQ ID NO: 241767 - DNA, 173 bp, Glycine max
atttaatttgataaaatatttgaactttccaattatttgttatttaagaacggacttattagttaaaaagatatattgggtaaaaacgagaagctagcggagggacgttagaattattacctcgaaaattaatgagtggggtaaagggaattgatattggaaatagaaaaagg

SEQ ID NO: 241768 - DNA, 309 bp, Glycine max
  unsure (1)..(309): unsure at all n locations
accanaatagaattaccatgtatactattctgaatgggataaagaaatggaaacaaggcaattgaataaaaatagttgcagataaacatgaagcataccagaatgaccctaatatatattttataaaaggttctctataatagtgaagtctgctatacaccctagaaattaaatattaatataagttatattatatttatataaaaaccgttacatcttttagacgggaacaggcagtaaccatgatataaacattcttgtggcttataatagaaaaaaattgcttttgttgatggcgtaaaaaaaaaa

SEQ ID NO: 241769 - DNA, 235 bp, Glycine max
  unsure (1)..(235): unsure at all n locations
cccccccgcccccaaattgtntttaaaaatgtgtggattctaaataattatggttacctttgacccaccattcgaccgcttttattattctctgagctgcaaacaagaccactatgactggaaggggcgttagcctgagaaaatatcccttgggacacagagaagatttggggatgaaattgtttactccaccaataaaatcctttgtgccggtagccactttggcttacacttt

SEQ ID NO: 241770 - DNA, 362 bp, Glycine max
  unsure (1)..(362): unsure at all n locations
tcttctagtgcccattaattggagtttgattctggaggtgcagacacacctgcggctacccctgcagccacctgcaataaacattgatgactntgtgacactatgtatagctaagctgaaatgtcataaacataatgaatgatgtgtgaccncagcttttgtggtagatcccatgtcttaattatttttttttgaactggcaaaataatttatattaaaagataaagagtaccaggggtactatataaacacacaggagtatagatctcctgtatatgatatcaaanataccacaccccaacaaatacagccacaaacccaaatctacaaacccactcttattaatagctatagacatagct

SEQ ID NO: 241771 - DNA, 288 bp, Glycine max
  unsure (1)..(288): unsure at all n locations
tgcagcttttgttgtatagccacgagtgacttagtgacattctttgctngtttgttttaacccaccgcgagtccgacggctgtgtcangagtgaccttgaaaatacctttaagccataagtggcaaagaataatacttggtgtaatcaaatgagattagtggaaccctctactagttggtaaaagagaactgacgtagcctatgttaagtgaactagtataaaatgaagtatttctattgttcctcattagcttattaaagtatttcattgtctattactggcatact

SEQ ID NO: 241772 - DNA, 185 bp, Glycine max
  unsure (1)..(185): unsure at all n locations
gttcatgactttatagttgctgatngaatacctcacccactcaagtgtatcacacaattatggctcttctctaatgaaacactctatgcctttaccactctatttcacttgagttcttatgcaacttaagagattatggccacaacaaataacaattcaccaatatgtgtaaggtaaggctatac

SEQ ID NO: 241773 - DNA, 358 bp, Glycine max
  unsure (1)..(358): unsure at all n locations
agacaatgactgatttttttangagtctctactttaatcgattaccagatgtattaatggattacttctctcttgttaagctgtctagaggcgaacaataacacctttattactcaactaagtcatctgatcaattacattgctcttgagttgttcttcagatgttggatgaacactttaatctattacttagtataatcaattactccattgaaataattgattaccttatatgtttaatcacctacaggcgagtataattgctgtctctataaataaccagcctggcgttatatatatagaccatgagatcattaagaatacccatacactttgaatctactccttatctatgaat

SEQ ID NO: 241774 - DNA, 195 bp, Glycine max
tggatgcatgtatctttccatatagctagatcttgacggtattcaccatcttctcttgcttgatgtaagagcgcccataacactgtaaaaaatttctcaatgctaaatcataaatgttaacgcaaatcacacctaggaaataaagaaatggactcttttcataagcaattactttatcctctttggtcttccaaa

SEQ ID NO: 241775 - DNA, 195 bp, Glycine max
  unsure (1)..(195): unsure at all n locations
aattttatngaagctatatacctaattatttgtgacgccataaaaatagggccctatatacccaccacagtatatataataccatagatggcagttcatgaagtgaaagtactactatagaaaaacctacaaatagatggtctgaagacgatagaatacgagtactatacaattcaagagccatacacataataa

SEQ ID NO: 241776 - DNA, 346 bp, Glycine max
  unsure (1)..(346): unsure at all n locations
agctcaacttctgacacacccacgtgtaaggttcattttgacgcccccccccttcggttatatgattgnntnaaatattctacaaaatatgctctttttaaaagatattatagaacactgcgcccacataaattctcatgccgattgtctggcagctctctttattgccctgccattttattatgaataaaattatgggcagtattctatgttgtgatataggaaggtgcacggaaacactgatgacttacgtgaagcaagaaacttaaggccctttgcttgcttgaacttaaactagttgtaattacaaaaaagaaaaaggtgttgaataataaagaaaaagaaa

SEQ ID NO: 241777 - DNA, 177 bp, Glycine max
aagtattaaattaaaaattattaaagattagaataaaaaaaaaagaaaaaaaaaataattagagcataataaaaaaaataaaaaaaggaaagaaaaaagataacaaaatttaaaaataattataaaaaaaatattaaaaaaaaagggaattttaaaaaaaagaaaaaggaaaaaaaa

SEQ ID NO: 241778 - DNA, 63 bp, Glycine max
tgatctgaaggcgaaaggttgtaaacttttttttcagcccccaccccccaagtataattttta

SEQ ID NO: 241779 - DNA, 254 bp, Glycine max
cccccccccgaatgttaaaatctttactagaatacttacttgtgataacctacgcctttaaggagtcttagattaatggagacatatcgtgaatggttaatcgaatatactttttcgaatcgactttttcactatgagattgctggggaattgtatttcatttgttatattgacagggaatttgaattagactacttctccattattaaaagttaattcttgctaatatagataacctttaagtaaaagctagt

SEQ ID NO: 241780 - DNA, 293 bp, Glycine max
  unsure (1)..(293): unsure at all n locations
attacctatacttaanagaaaatagttataacactacataatgaccataaattgtgagagtgtgatacaattgatacaacgtttatacacaaatagtaagtagttgtaccgactaacagctaccacaaatttacatgttggcttgtgcttgtgaaataagagaacaacttacttgtcctcaagtgacaatgacatgcaatgactatgtacaaaggtgtatgctacataggtactgattgcatgatgagaaagatgtaacaatgtgtacctatcacttgtctccacaaaatatg

SEQ ID NO: 241781 - DNA, 494 bp, Glycine max
  unsure (1)..(494): unsure at all n locations
ttaagtcacctgaggctgcagcttgaagttatggtgtcccatccatgtggactttgtggggtcgtgctatgtgccaccaccgctccacatgcacaaatcacgtattaacccaccatcctctgttgcccacctcaactgagctcacatactcccacgtagcccttatcctacgtcctctcaacgctgggtgcgcatcaattctnccatgcttccacaacatccaagtaatacaacatccaatcatcatgaactaacaataccaagcataacagggcagaagcagaatactctgcccaaacacaaaccaatatcacatcttttcacacacaaataccgcagttacaatctcttcgttccaattcggtaaccggttggacgactcgacattgtactggaagtctctacacataaatctacattatgaccgttgggatctgctagaaaacgttcataacccaatctgtactactctntccacaaccaacaaatacaca

SEQ ID NO: 241782 - DNA, 297 bp, Glycine max
  unsure (1)..(297): unsure at all n locations
gcttatcatcaaaccacttccagagtgctggaactacttctcatggacttgttnnnnnccgcacgccgccagcctcggaggaaagatgtatgcctatgntggtgtggatgatntctccagattcacctgggtcaactntatcagagaganatcatatacccttgangtattcaaagagttgagtctacacttcaaagagaacaggactgtgtcatcaagagaatcatgagtgaccatgacagagaggtttgaaccacatgttcactgaattctgcacatctgaaggcatcactcatg

SEQ ID NO: 241783 - DNA, 68 bp, Glycine max
tcactccacttttttttgttccccccccaataattgttgattcaaaaaaacatgcgatggctaaaaaa

SEQ ID NO: 241784 - DNA, 186 bp, Glycine max
  unsure (1)..(186): unsure at all n locations
ccccccccgnaaaanngaagaagaagaaagaccggggaaggaaaagaggaacagggaaccaagacacaaaaaaagcaaccgggggaaagaaccaggaaaggcaacaaggaacagggcaaggagggaaggggaagcagagacacaaagggaaaaaagcacaacaggaaggaggaacagaaaagaaaa

SEQ ID NO: 241785 - DNA, 320 bp, Glycine max
  unsure (1)..(320): unsure at all n locations
cccccggcaaangaanagggngagaatgagggagaagcccatgctgtgactgccattcctatacagccaagtttcccaccaacccaacaatgtcattactcagccaataaccacacttctccttaccaccgcccagttatccacaaaggccatccctaaaacaaccacaaagtctgttaccgcactcctaagacgaacatcacctttagcacaatctcaaaacaccaaccaagaaatgaattttgcagcgagaaagcctgtaaaattcaccccaattccaggggcctatgctgacttgctccatatctacttgataaatc

SEQ ID NO: 241786 - DNA, 196 bp, Glycine max
aaaatacccaattaaaataatcaaacatcaaatataattactaagaaaatatagatatacataacacggtggtacatcactcaaaaatgcacataattgggtatagaaaccaagattgacatataaataatgagggaattatcagtggcgggagtgaaagaaatacatactagacaaatatggtgaataggtagta

SEQ ID NO: 241787 - DNA, 333 bp, Glycine max
  unsure (1)..(333): unsure at all n locations
cgactccccccgagagatttgctctaattgagctgcccatgttgatactttgcataagagagcgtggaaaacaacctgcaatagtgtgatattataggtaaatataaggggcatgaaattctttgcagagggtgaaatgaaattgaggtcgcttcctatatgaatgtatgatagcacaaaatactctgttgaatgcaagtgtgtgcataatgtaaatagcttgcttatatgcataagtgtgagtgatacaataaaagcttgtgtgatcatatatttcaagtgtgtgtangagctcgcgatagccaatgcataggacatacctacgtgaaattt

SEQ ID NO: 241788 - DNA, 274 bp, Glycine max
aagattgctctgattttcacttcataaaccctgcagaactctgaggtagtcatgaagatcgacgccaccatctaggccactgctttttctcccattctagggtctcatggagttggagagaaggcactttgcctctcaccacagttggaaattaagagtggtggtgatgatgcacgtgtggcgcctaaaggggacgaagaagtgatcagaaaccaccttggttggattgacacaaagaaagcttcacggaatcgatccgtttgcgaatcatcca

SEQ ID NO: 241789 - DNA, 268 bp, Glycine max
ctttggaacgcccccccaaaaaaatatgcatacctgaggaatagtagcttgattttgatggactgatctcttttggtaagcgaatataatactcaggtgataaactttggtgattgctggtacagatgaagagagtttaactatgtgaaatcaaataagcacaagtgagagtaaaagcatcacgactttgcttacttgaagttttttcaaccggtccccggttgatccactctttgaaagccgctcgctacagctagattaatgaggt

SEQ ID NO: 241790 - DNA, 398 bp, Glycine max
  unsure (1)..(398): unsure at all n locations
acactaggctcattatcacccaattggttaatcatgttctagaagcaaaagttatctttagcatcaacattcgagaaaagattttcattctcaaattattattattgatcccatttgatcatagaattctatttcattttcaatataaacaatttttagtagtgatttattttgtaatgacaataaataaaagtcaagaataatctctcaaacatgttggaatntatttctcaagacattgaagattcttatatacaaagatgatggacattcaatatgacttcaaatgttgttattgataataagtctttcaaatttaaaacatgtattgtattacttattattttctatcactatctcttatatactctttaatatttattagcatattacttctt

SEQ ID NO: 241791 - DNA, 373 bp, Glycine max
  unsure (1)..(373): unsure at all n locations
ggacaaatgaacagcccggcacaccaccacccacgcggcnccgaaaaaaggcgagaatggaggagcgccccgagggagctcacacacgcaaccaaggaacacagcaccaaacccgaaaaaggaggacacaagaacaacccgaaccaacaacagtcatgcggcaccgaaaaagggtgagaaaggagaaccgccctcgagggccacaactacgcaagcatggaacacaaccccaaacgcgaaaaggaggaacacgaacaccccaagcaagacatccacgggcgccgaaaagggcgaaaggaggaacgcccgagggcccacccagcaacacgaacacacccaacccaaaggagaccagacacccaacaaacaccag

SEQ ID NO: 241792 - DNA, 323 bp, Glycine max
ggacctggagatatgtcgcgggggtcacgataccttggggacgacaagtgggggtgctattgtccaaaacccaagcttgaccaatcccgacccaaccccggcatattctgtcagtgagaacctgtgatgtacctaagcaggcgagctcctgtcagccaacagattaaatgaacaaagaccaccaagcaaggaggcttgtggcggctggccagctctgaattttgtgagatatgaggattatggcctctggtaattgattaccaatggtgggtatcaattacaacgcttcaaaatgaagacagagactaatacggctctggaat

SEQ ID NO: 241793 - DNA, 316 bp, Glycine max
cctggagatatgtcgcgggggtcaagaaacctttgggacctcatgtggggtgctattgcccaaaaccaagcttgaccaatcccgacccaacccgggcatagtccgtcagtgagaacctgtgatgtacctaagcaagcgagctcctggcagtcaacagataaaaggaacaaagaccacaaagcaaggaggcttgtggtggctggccacctctgaatcttgtgtgatatggggattatggcctctggtaatcgattaccaagggtgggtgattaattacaaggcttataaatgaagacaggagactaaaatggtctct

SEQ ID NO: 241794 - DNA, 233 bp, Glycine max
caatacataattaacctcaggattaagcggatcttggcagcaacatccgccaagaatctaagggaggcgtctcgaatcacatcagcggcatcgacctcaagcaaattgacgcgatcaacggcgatgagttgccgggtgctgtaaggctgctggaagaagtctaaaatggtggcttttcccaatgggatgccgcggacatgaaagtgaagctggactgggccgacttgatccaa

SEQ ID NO: 241795 - DNA, 233 bp, Glycine max
  unsure (1)..(233): unsure at all n locations
cccggaattaaggggggggatatttttttttgcnaacacgggctggggattggggggctctgtacatagaccactgagaggtacaaattacctattgaccagcttccacccatctttagttgactagctagctaacagattattgtacactgttaaacaaacttagccgcaaccctcagaagatattcgacctggctatcaattaggaacgacatttccatgtgagccctatg

SEQ ID NO: 241796 - DNA, 309 bp, Glycine max
ttaggagctcgctttatatcccctgaggggttatagcctaacatacttccagatttctttggcattataagctgtatgccgcgttgctttgcctaacccattcgggtcgaaccgtttccaacatactcgccatcattactgtgatcgggaggcaagctgccagagaagagtccggagaaagctgaccactcaaaactggaaacggttctaacatcttctgcgttcacataggcataagatggcgctaccagatgcttctcgtgaccataccaagccttcacacaattaacttggggaggtgaggacact

SEQ ID NO: 241797 - DNA, 148 bp, Glycine max
agggggtccaccccccacaggaatacctaacatattccacaattcttggattataactaatatcctcctgcatgctaaccctccggtcgaaccgttccacatactggccacatctgtgatatgtagaagtgccaaaagatcacgagaa

SEQ ID NO: 241798 - DNA, 332 bp, Glycine max
  unsure (1)..(332): unsure at all n locations
ccccanaannctacaagctngatatgaggaagtgtggaacggtgaaacttcctgcttttattgttgaccacagagtggtacctggagatatgtcgcgggggtcatgagaccttggggacgtcaggtggggtgctattgcccaaaaccaagcttgaccaatcccgacccaacccgggcatagtcggtcagtgagaacctgtgatgtacctaagcatgcgagctcctggcagtcaacagataataggagaacaagaccacaaagcaaggaggcttgtggtggctggccagctgtgaattttgtgtaatatgtggatggtggcctctggtaatcg

SEQ ID NO: 241799 - DNA, 309 bp, Glycine max
gcaaaggggggggggttgtttttccacaaccaccgggcatcctttttggggaccccacacaccactcccaatcgaagaattttagcctcgagagttttctcagaagatgcgtacttcattctggagaagctaaggtggagcaaatcgagctacatggaaaaatggaggagtatggatgacagcttaatgaaaaaagttggaaagttgagaaaattgaattcctctgagaaggactacagggttcctgttaggcatggaaaaactattgtggcctcgtattggagaaagccaccctctcaacttaattac

SEQ ID NO: 241800 - DNA, 330 bp, Glycine max
ttttttttttgtaggcacaagggagtgttatttgatggccgtgagacaccaactggtaccaaacccggcctcacaagcaacccattgcttttaggagtaggagtgcacccaattcttttctacaactctacatgtggatataggaatcaataaaactactattacttatgaatgaaaggctatgacactgctgatgtgtaaatcttttataggacaatccaaataaatactctaatattatacattggctactaataccaattagacttggaagatgcgctatattaacctaagctattgctcagtaacaatctgaatgaattttgaaca

SEQ ID NO: 241801 - DNA, 180 bp, Glycine max
aaatattttttttttcattttttttatttattttttttttttattttttttttttattttttttttttttttttttttttttttttttattttctttttttcttttttttttttttttttttttttttttttttttatttttttttttttttttttttttttttttttattatttttttt

SEQ ID NO: 241802 - DNA, 176 bp, Glycine max
cggggtacccgcggcatgagaatgatattaatttatgaacctcttcttatagaggcattaacttaaaatttgaattcgggtagcaatcctttaaattccttgtcgagtttagcatacataccttcaacctctttccttaaattgattcacaccaccttattagcccaccacctacc

SEQ ID NO: 241803 - DNA, 203 bp, Glycine max
aagaccgcgtctactcctaatagacattgcatatatagggatttttggatgtggagaaagcataaaagccttttcatgtcatgccatattctgcattgatttaagacaaaggcttttataaaaggtggactaaatggtcttttgtcgttattgttccctataactcaattttttcagctgatcgaacaagaaaatcttagatg

SEQ ID NO: 241804 - DNA, 369 bp, Glycine max
  unsure (1)..(369): unsure at all n locations
ctttatcatccgctgcaactccatggatgaaaatcactattgaaagaccttattgaagctcaaagaaccagccttcatataagctcttcaagcaatattccatcatatgccacccacggtgagtgacatatatgcaagagcacaccaccatgtttccagtgggtgccacccacgacaagtagcgtgtatgcaacagcacgacgcccaaaacccaggtcaaacaattccttggatgatcctccaaaggtctcacanaacccaatgcctacccttggtgagtcccacttatttacaccactatgtcttcagtatgtgtcatttcataagtgacacgtattcnagagcccgccaatgcattctcagcacatg

SEQ ID NO: 241805 - DNA, 298 bp, Glycine max
  unsure (1)..(298): unsure at all n locations
gggtttttttttttcccacgcacncgatggttttctaaataccttactcctgacaaatctgtgagtgctgaacctttttcatcatcttccttccaactaaatttatggagcacttcctattcttggaagaacttgaatgcaaacatacttttttgtatctgatgacaacacttttgcttaaatatactactcagcttcgatttgaatttacaaaactattaaagttcggcgaaattgatcttgtcatgtaacacaatataccatcttagtggtcaaccaatataccgtctacattatt

SEQ ID NO: 241806 - DNA, 364 bp, Glycine max
  unsure (1)..(364): unsure at all n locations
acgcacatcatgtacaactcacttgtatatgttttgattatcaatgatataatattatatntttctttcaaaacaatagaagactctgggcctattttacaatttgatctgcgaacttgttcaaatctttggaaacatgctccagaactaaccccacaggaagcttaaacatcttaatatcttaaatcagcgaaaatgactcattctcacaagggaaagtagatccacaacttatatagaatttgtatcaactagaatgtgtgtgaagcctttgccaagggttaacttcaacccaacaatgatgtcatccacctcataatgatgatggaaactntacaataccaccgtaactcacaacaaatca

SEQ ID NO: 241807 - DNA, 244 bp, Glycine max
ttggctgtgttttaaataagtggacaaaactgtgctggggcccaacgattttatgtccatagggaaatctattattctattgttaactgaaggaccaaaattgtgaagatctgtgtacagcttgtaattgtttttgacaacattatactaagaataactcttttgtaactttataataggcttctgatgcatagaatcacgtatgcttacacttcattgccagtttgacacaagaatgcttttt

SEQ ID NO: 241808 - DNA, 302 bp, Glycine max
  unsure (1)..(302): unsure at all n locations
ttttttttaagggaangcaccatgagtgttcaaagataagaaagagtgaaggagcccatcataggaataacctggaagggagttgacacagaaaggttgataaaacttaagagaactcatggagaaaaaatgaaaagaggggaccaaattaagaaaaaaaggaaaagtaacttgaggtgctacagttctatcataagtatacaggtacacatctcattaagctagcatactatgaagctctgaaacttcttaaattcttgaataagtactccacctttatactaatacctctagacttctga

SEQ ID NO: 241809 - DNA, 398 bp, Glycine max
cgatatggggacccagacatgaggttctattgtttgtctccgacagcgcaaaagagttacacattcacaaatcacgtataacccaccatcccctgttgaccaccaccaactgagctcatgtactcccacgtagtccttatactcatagctctcaacgccgggtacccatcaatccttccaagcttgcacaacatccacataatcccacatccaatcatgatggactaacaaaaccaagcgtaatagggcgaggttagaaactcgtgcccatacacaactcaaaataacaggtttgcacatacaaataccccagagacatattcttcgttccaaatcgtttaccgctggatcgactcaaaaaatttactgaaggtctagtcataagtctatatgtgacc

SEQ ID NO: 241810 - DNA, 400 bp, Glycine max
  unsure (1)..(400): unsure at all n locations
tttctggcttagcgcatgaaaaaatttttattccagncgtttaaccagacctgaagtttaaccacgccaaggatcatggcgaggataataatgattaacaacactgaagttttattattcttacgcagccaaaagggcttcaacagacagagatactttgctatcaacatacgaagcgtaatgggaatggttatcattagcgaaaattgattgtgccatccaatgattatctatggcaatgatttactgatgaaatttatttaagtatcatttaacaatatgaaatataaaggaatatttcattttcagcggttatggttatgctattgataatcaaagatattgctaatgccctgatgcataccacgtaagccaggaattttccaagggaagatgatga

SEQ ID NO: 241811 - DNA, 168 bp, Glycine max
aagacagagggagggggcaaagtataactcacaaaagaggaagaaaagaaagagggggaaaaggagctcacacaaggaatttaggggccggggaatatgagaaaacacaatcagggataagggggcgtagaacactcaaaagaaaaaaaagaaaaaccgaaaacaaag

SEQ ID NO: 241812 - DNA, 147 bp, Glycine max
  unsure (1)..(147): unsure at all n locations
ccaccccggggggggggggcacggagaggacacgcccccccccccgancacaaagccacgaaaagggacgacacaagggccagcaaccaaccgaaaaagccgagcaagcaggccagaaccaaacgcagagagaaaagacagcagccg

SEQ ID NO: 241813 - DNA, 294 bp, Glycine max
acagaataatgaaaacaccctctggtgacgataccacatagaaaactatgtgaaaaaaactatttaacttagatttcttggccaaaccttttgctacttaaattggaattcccttcctttttaatataccctttctaagactctagagactgtcttgatcatccatcttgaatatctttaatttctttgtcttgaataaaactctgagacgcatgtgaaactttggcatcattaaaacattcagcttgatccttttgctacaaaatgaaggctgggatatctttaatgagcaaa

SEQ ID NO: 241814 - DNA, 492 bp, Glycine max
  unsure (1)..(492): unsure at all n locations
ntggatcganactaagctctgaataccatattaaagctggagagagtataagagaagcacaagattcgagtgaaaactgattatgattcttcactcaacaagataactcatttgtttatatatagatagttacacaattgtgagcatctcaactaactctaactattgaacaaaacatataaccaactaacaaaaaataaacagttaagctaactttaactaactaactaactgcagttgaactaactacatacttaactggctatacatttatctctaataaggctaaatctgaaacgcttactatctttaaacaatttatagcgttggttgaaaagcaatataatctttctataaaagttatccaaacaaactatgggagagttcggaccttntaccctctnttcacaacaagaaggcatgatgcatagtgtcctcatacacatcaccaaaatggtgtgggtgagagaaaacatagacacatagttgagc

SEQ ID NO: 241815 - DNA, 451 bp, Glycine max
  unsure (1)..(451): unsure at all n locations
cgctgagtatattatttattttttatatttatatgatggtccatggatatagtggttgaaagtaagggtaatgattttatttggtctaacacgtctcaaatcctataataatagtgaattgttaatactgctttcactaatgtttcccctggtgaaatgcaacgactgccatgttaaagaaacatgtggtggatgcttgtgtgatgttgcagactgatggatcacaacagttccataagaattataatctaaacacaatacacaggcttaagctatacgacagnctttctcaaactcacttggtagctgatacaaactactgacataatactgaaactgccaggccatgccatatacatctttgtataaagggagttatgagtctaactcaaccctatcaaactgacttctaaggtgacaattactccccacctatataatttatacacta

SEQ ID NO: 241816 - DNA, 468 bp, Glycine max
  unsure (1)..(468): unsure at all n locations
tagcttncttgagaatcttctttgagaagctctcttgataagctcgagtctagctacacaccccctctaatagctaagctcacctcctcgagaaattctcttgagaagctttcttgagaagctagagcttagttacacacacacttntaatagataagctcacccccatgccaaaatacatgagaatgcgtagctacacacatgcccctaatagctaagctcacctccatgccaaaatacatgaaaatacaaaaaagttgctactacaaagactattcataatgccctgaaatacacggctaaaaccatatactaatagaatggccaaaatacagggctaaacagaaggaagacctcatatgatatntacaatagaagagcggacccaaccttggcccatgggctcagacatctaccctaaggttcatgtgaaccctagggccttctttaactgctgtaagctaatcc

SEQ ID NO: 241817 - DNA, 417 bp, Glycine max
ttgtctgaagaacttgctaagcgcacttactacgctaagcgagtcctttctttgaggatgaacattcatcctcttgctgaactacctgtggctaagcgaggctgaatcgctaagcccaggtaacttaaccattttttttatagccgcacgccaagctgagcattcttgagccaagcgcaattggttgcgacatccgctgagctaagcgagcttcactcgctaagctcccacaactaagtgaaatttttgctcagtttagtgccgctaagcgcaacttattcttggctaagctcaagtccatgcggctaaccttaggcttagagggctcctcgccagctaagccacatttgaaaacactggatcgtagcaatttccactaagcggcactcctgtgtcgctaagcctagtggtcatttt

SEQ ID NO: 241818 - DNA, 280 bp, Glycine max
  unsure (1)..(280): unsure at all n locations
cttgngaatgctacctggagccttatcatattttctataggactatnagnctatttcatctgagtcacaaagggttgttctttgaccataacttctgcccacatactttaattatctggtctttgcccgataagattgaaacctgacaatataagaatctattatcttcacttaagcccttgctgcaaatgctgcttgatctgtaactttcacagcatctttggacaaatcggtaaagcttgatgatgtgtctcttaccacacagttacactggacttgt

SEQ ID NO: 241819 - DNA, 261 bp, Glycine max
gatctttggtgacgaggatacttctgtcacggtgaggaagctttccgatgggccttcaagaaatgttagaagttggcgaggattccatatccacaagtattcggtcttctccaaatcacaagatgacaagacgtcaatgccatatactgggcttaatcttaaggatgaatcctaacactttgctactggacatgatgacaatgcccgtatagtgtccatgccttactttggagtcattggagaaatctgcgagctaattat

SEQ ID NO: 241820 - DNA, 412 bp, Glycine max
gcttcaccggatgacgccgatcgaacatttctctattctatgtcatgcacaattcgttcacggattgaattgaaaactcgttaggcgacatctgtcgcgaagtaacgaccgatatttttcagccgacactgcacaattctttttagaaaagctcgctggtcgataatggcctttttacggcagagtaagattttctgttttggtgttgcataaaaaaagtaccatgtacttcggctaggtttttcgtgcgagctcaaccgacattttgtgtcgcgcaggaaaacattatctcacctctgctaaaaaatatttgctaaccgtcttcatgcatatttcattcaacgattgaatacaacactcaatagccgacaacggtcgtgaaatagtcccgactgatatttttcagctggca

SEQ ID NO: 241821 - DNA, 481 bp, Glycine max
  unsure (1)..(481): unsure at all n locations
ctaagcttctttgtagacctcgatcggtcatctntccaggccgaggtctaccgtcanttttttcgatccatttcggtgaataatatttttttgccgagatgggctaatgttttcctggccgaataaatgggaaaatgccagtttcggccgaaacgaaaagtcggttgagctcgcacaaaaaaacctagccgacctacattttaaatttttcatgcaaccccaaaacaagaaaacttcctgtgccgtaaaaaaaaaaaaaaaacattacatgacagcgagcgttttgaaaaacaaaattgcgcaacgtcggctgaaaaatatcagtcggggcttcttcacgaccgatgtcggctattgagttttcaattcaatccgtgaacgaaatttgcatgatgtcggttaggaaatgttcgatcggcatcatcctgtgaagtttcttttttaggcctcgatcagtcatcattcctgaccgacgtcgact

SEQ ID NO: 241822 - DNA, 495 bp, Glycine max
  unsure (1)..(495): unsure at all n locations
tccacaacatccaagcagaacaacattcaaaccgcacatgctattatagtcaagcaaaacaaagcataggcagaaaactctgccaaaacaccaaccaaatcacagcttttctcacttaaagaccccagtaacaattccttcggtccggttcattaaccgttggatcgactcgaaaattctactggaagtctctagtacttaagtctacattttgaccgctgggatctactagcaaacatccagaactcattctacattactctttccacaaccagcaaatacatgaatttttctgcactnttgcaaaattctgctgcacaattntacagcaaaatctgcacaaagagcctatttcgaaaaccacactttccctcatccaatcttgcccaaatcaaatcctacaagtcccaaatcatgtatcaatcatgtctaaaccagagtcaagcttcataccacagcaacacacaatcaaggtgccaaaacccctcatttaat

SEQ ID NO: 241823 - DNA, 331 bp, Glycine max
agcttcaacattcaatattgagcgtctcgtattattactgtactcaattacacatcccgagaaaaatttattgtcgcttggattggctcaaagattcaacattcaatttctgagcgtctcaatatattacgggactcattcagacatccgagtaaaaagttattgtcgctcgaattagcttagagcttcaacaatcaatttcgagcgtctctgtatatcacgagactcaatcacacatccgcagtaaaagttattgtcgtttgaattggctcacagcttcaacattcaatttcgagcgtctcgatatatgacaggacttcaatcaacatcc

SEQ ID NO: 241824 - DNA, 423 bp, Glycine max
  unsure (1)..(423): unsure at all n locations
ctgagccaattcaaacgacaataactttttacatggatgtctgtttgagtcctggcatatatcgagacgctcgaaactgaatgttgaatctctgagccaatccaaacgacaataactttttactcggatgtctgattgaggcccgtaatataacgagactctcaaaattgaatggtgaacctctgagctaattcaaaccacaataactttctactcggatgtctgattgagtcctgtcatatatcgagacgctccaaattgaatgttgaacctctgaaccaattcaaacgaccataactttttacttggatgtctgattgactctccgcacatatcgagacgctganattgaatgttgaagctctgagcctatncaaacgaacactaacttttactccgatgtctgattgagtncctgcatat

SEQ ID NO: 241825 - DNA, 359 bp, Glycine max
ctccagttctacttctctcctacttgaccattatgaaacatactatcaacttcccattcaattaagccagcctccttacaaactagagagttgctgctagcatctctctttaggatgagcgcaaacaatactctgcaacacattctctcttatgggtcataacctctctaaaaccactaaaccatgagcgagactcatcaaatatggagcgtgagtcacattccttgaatatccactacgttttagtcaataacagtacgtgctaatacaaagagtgttgtaacaccctaaaccaaaccacccaacatatattgcctttcgactccgcgcgcggcttatcgccacattaacgtaaacta

SEQ ID NO: 241826 - DNA, 291 bp, Glycine max
  unsure (1)..(291): unsure at all n locations
aatgcaacgaattgaacaacttctgcgcagatgttngtagaaacttgagacaataaggttgcacccatgacccatcgggggggtgaagccatgattttttgcttggcatcaaacttaaatggttgtgcccttgtgtatacaagtatgtttggccattaacattatttttttgtatgaaagacaaccaaaatattgatgaacatgcctaatatattaatttaaaaacttttgaatggttattatttgcgncacaccttaaaatatcattgcttaattatatgctctatactc

SEQ ID NO: 241827 - DNA, 474 bp, Glycine max
  unsure (1)..(474): unsure at all n locations
tacgaacccaaacttgtagtttcaatacaagggaactcgcttatggctaggaacccaaaatttggttntttgaattagaaaagcataaaatagggacttgcttgtaagaatttgggctgccccatgattggtactttgcacctaagtaacgtgggaaatgcttttcaatagtgtgtatacataggtaaatgtaaagggcatgaaattctttgcaaagggtgaaggaatattgaggtcacttcctaaatgaatgtatgatagcacgggattcccttttgaatgcaagtatgtgcataatgtaaatatcttgccaatatgcataagtgtgagtgaaacaatgaaagtttgtatggtatatatatttcgagtgtgtgtaggtagnttgtgatagcaaatgtttacggcatagttaagtgtaagtnttgaacaatgccttaagcgtgagaatgtgtgtcttttcaatgcatgatatgt

SEQ ID NO: 241828 - DNA, 397 bp, Glycine max
gctctagataccatctaagataatatgagagagagagagagagaacctgcgtaacacaatgaatgaacctcatctcattaacttgaaagaaagcgagctaccaaagagatatccatagctctctaaactaagagtagtacagcctgtcaatagctgtacattcccctaagacaagctgctgtgagcaaaggctaacaaccctaactaaaccggttgcacagccttacactcatatactctaatacgataccatctcaaaaagcagatcatgagcctaactcaactctacaaagctgagtctacacccacattctaagacggtattagagtctatcctagagccattaaaaagccacaatagaatatataagtgggaggaaaccctcacccatgagca

SEQ ID NO: 241829 - DNA, 431 bp, Glycine max
  unsure (1)..(431): unsure at all n locations
cctcatggactcctctaatgacaataacatcatttcttgcactgaatttgtgggagttggaagccatcttctcaatcaaattcctagcctcagcaagggtcatatcaccaatagctccaccactggaagcatcaatcatactcctctccatgttgctaagtccctcatagaaatattgaagaaggagttgctcanaaatctggtggtgaggatagcttgcacacaatntcttgaatctttcccagtactcatacaagctctctccactaagttgcatgatgcctgaaatgtcttttctgatggcagtggtcctagatgcaaggaagaatttctccaagaacaccctcttaaggcatcccagctgaaatggacctgngagcaagtagtatagccaatcttttgcactccctcagaaatgaaaaaagcttaaa

SEQ ID NO: 241830 - DNA, 494 bp, Glycine max
  unsure (1)..(494): unsure at all n locations
tggtgtccctctcatttgtgacattggcattcaataagttatttactctataccctgcattcattgggtctgaaataccaaaaatcccaactcaatgttcagcagcgccttctttatgtcatcaaataccaatggaaggaatggaagaggcttaaaactacatcacttttaattgattcaatggtttccaacgttatgaaaattaactaacctacacttatttccacgacgttggatacaactttacagtctttatactgccttccaaaaagagacgagacacattcattcagcaagatttatataattcagtctgataaacatagaagagaatttttattctctacaatttacagaacatanaacagaacatgacataatagccaatctttattctcttaaattttgatgacatatctagaggactacaaacccatcaacgcggcatagcatgtngatctcttgtgcaaaacattcacgcagaggaagcacaa

SEQ ID NO: 241831 - DNA, 172 bp, Glycine max
atcgagctaaacacagagtcttcgcctctgaagaaaatctccctaacttagaaaatcttcttcactcacactatgatgatgcacaatgcaaaacagatatcagatgtactaagatgcaacaatcaaggttacaaccaacacataccagcagaggaacctaactaagcctcat

SEQ ID NO: 241832 - DNA, 477 bp, Glycine max
  unsure (1)..(477): unsure at all n locations
tccaaaatcagattgtaggcactacgagtggaatatacccttgttttatctcttaaccattcccattcatccgatccttgccgctgaatgtgtataacttcgatgtcccttaaaaaattgactgctgactcaatttcattttcgaacagcgggcttcttcacagaaactaccaatcccaacctgactgcatgtgctggcccatgtgtctgatgggttgggtttgctgtgtagatatttggtacaatctaagatacctctcagctacaggttgctggtgctgatgccatttatcctccccaaagcctgaccttatcacctcttacaattttccacctcatgttgctgtacactatatcttcatgtcgtgctgaatagacagcttgttttaaatctttccaccatagagattgatgccctgcccttagtgtcnattggttntaaagtgatatntctatcatggtatcagagcctataac

SEQ ID NO: 241833 - DNA, 422 bp, Glycine max
  unsure (1)..(422): unsure at all n locations
aaaactaagctgaagangagaaatgatggaaacaaaacacccctttacttaacagtctagtgccctaaatacaaggctgaaaatttacattacaagggtatcctaaacttgtggggtaccctccctacattatggagcactaaatacaaggcccaaaaaaataatgaaaccctaatctaatatatacaaagataagtgggatcatacttagcccatatgcccaaaatctatcctaaggctcatgagaaccctagggtcttctcctgcatctctagcccaatcttcttggagtcttctattcaatgcccttggagggtaagattgcatcagtatgggtgcctaaaagcaagatattcactatggtacttggatagtgactgctctatacacatgacgtgtgacaagtccaaactatggtcatg

SEQ ID NO: 241834 - DNA, 309 bp, Glycine max
gagctcttctgctgaacaccatacaaacctttggccttccatgcaacaaccctggacaattgagcagcccgaagcttatgccgcaaatatatacaatagaacctcttaacctcagcacgaaatcaccacaggaaacaatatgacctttccgccactatacaacctggaggaggaataccctaacccaaaggccagcctcaccaacacacaacagccgctcctccttcaaatgctgtggccaacagacataattcttcacaatcaacaacgaacaccccaaacagcaacagtgagccctcacacctcctc

SEQ ID NO: 241835 - DNA, 437 bp, Glycine max
  unsure (1)..(437): unsure at all n locations
atatgagtgtatatttgttcattgagaaagtggcttggcctggagcccaaccttcttttgtgggagataatgaaagtnttatagcccaagcacctcaacagcatgagccaaaaccagaaaacgattactcttctgaagccaccatccctagagctggtgattttgcgaaaagaagattagagacgagatccaatgaggctgctcatcctagaccagcgccagcattagctgatgcacgcatttcaggagtggatccatcttcacctcagcacccagcagactcttccattcctgtcttatagatacatgaaggccaaaccataccaatcctgcctttgacacttctccttagctactcacgatgacatctacagatgaaatgatgttagatcaaacacatggaccagcatggaatttgatctgagaacctttgcttt

SEQ ID NO: 241836 - DNA, 493 bp, Glycine max
  unsure (1)..(493): unsure at all n locations
cctgcggcgtgcaagcttgtagggttaaagtctcacgattgtcactttctcatgcaacaattggtagccatggctgtacgagacatcttgccaaacaaagttaggttagcgataactcgcatgtgctttttcttccatgctatatgtagcaaagtcattgatcctatcaagtttgatgagttggaaaatgaggccgcaattatactgtgccagttggagatgtattttccccctgctttatttgacatcatgattcacttgattgtgtatctggtcagagaaatcaaatgttgtggtcctatttatctacggtggatgtacccggttgagcgatacatgaagatcttaanagggtatacaaagaatctatatcgtccagaagcatctattgttgagaggtacattgcagaagaagccattgaattttgttcagaatacttagagaaggctaaacctgttggccttcctgagtctcggcatgatgacagagtgg

SEQ ID NO: 241837 - DNA, 446 bp, Glycine max
  unsure (1)..(446): unsure at all n locations
ctatgatactcagcttggaattgtttgggaataagtgtggggagggttttagttcattggataacttgtcttgctggctatacttcatgatgtatnttgggccatacttgatgtacattgtatattggttaaatgttggacatgctgaatgaaatgttgtttctcaaaggatatagagtaaaaaaaaaaaatcgaaaatgaaaaagaaaatcaataaagttgagtgaataagatcttaaatggcaaaagaatgatgagactcttggttctactctntatgtttaaatnttatctgtacttctttntatcttcttattntttcttattatgcacttattccccattgctcctctattcctttgggatttagccacttattccatatttttccataccttgtccttggccccattacaaccttaanagaacctttgatcctcatgtgc

SEQ ID NO: 241838 - DNA, 328 bp, Glycine max
  unsure (1)..(328): unsure at all n locations
ggctagacatgatacacgttttgtgttggntcggntcaacgataaaagggatgccccacaatatatccatgacacaaacgcacaaatgatgatccggaaaatttatgcaaaactggtcatgcctgcacctatgtggacgctcaagtgtcaaatatttatgggcatgtgatgctaaggctcaagaatcatttcctctattttaaatcaacccaatgccgccaaaatatgctcttttatcaatttgcgcattcctccgagtccattaccggcgtcctgggaaattcacagcattcacccctcatgcgtacacacattttccaaacaatgg

SEQ ID NO: 241839 - DNA, 494 bp, Glycine max
  unsure (1)..(494): unsure at all n locations
tctgacgagtggaaacaatatttgacatagtaatatgaatatgacatgtttactntccaaagaaactgggccacaaggtacaatggttcaaagaatatcacaagatcctgctatgttaatacaaattcatttcaatcattaacacccggacagaattactagaaacagtctacattgtaactgaaaaaagaaaaaatcactgttgcggagtcaacaaaatatggagtctgaatttccccttcctgttttctttccacaactataggcctctaatgcttacaatggcatgggtgacaggagatcctctatggttcatcaggtaggtggaagttaattcatctggttcttctcttgaacaaaagatgaagatgttgtctagacagatggagagattatgatgaatgctcacgtgtagatgatgacacccacgcncccacacttcctcaaatatatgtattgaatacaatagcagtaatgccaaaataattgaatta

SEQ ID NO: 241840 - DNA, 366 bp, Glycine max
  unsure (1)..(366): unsure at all n locations
gctacctacatcatcaccctaggagagaacgacaaccaggggcaagacaacagagcangaagggaaaaacaaaagcgacaagcatgcggtgcaaccatgaccactccgaaagaaataaagaaaagaaagaaggcgatatacgtcctctcaataattctgccacaacgggaccaccaaagagaaacgttatgcaacctatgctacaaaaatgtgtaaccctcatggtgcatgtttgctaacgacatcaaaacacatacataatgagaacattccatgtccaanaataagaaatgacgcggaagccacttctagcagccactggcggatctacctctacttggaacaaacgtgtcaccaaacacacca

SEQ ID NO: 241841 - DNA, 396 bp, Glycine max
  unsure (1)..(396): unsure at all n locations
atagaaacncaagcctacagcaaaaanancaacgacccactaacctagaattaatataacttaatgccattaacctacggaaggaaaaaaaaacttaatggctgagtgtaactgacatagtggcaaccaaaagtcacccccaacagccaacaagtcaaccaccatttggtcctccaaaaggctgatgcctatgatgccaaatgggcccttattacaactcgaactaaacctaactaaagcccttttagttgattaacccaaaacatatctctgcgcagccaactttacaaggattgggccattatgtagacaaaccaaacactctaaaatcgagacaaagtggcgtcatttactcctcctccattngggccatgatacaactcacaaccttggact

SEQ ID NO: 241842 - DNA, 413 bp, Glycine max
  unsure (1)..(413): unsure at all n locations
agcttcaaaagcctatctttatggacgagctntgttatgcgaattgattntagcctctcaggacactctaggtattaatcaactcgactaacaatgagaaatcccaaagagaaaacgtccgattgattttccgctttattctactaaaagaggtcctttcgatcattatactaatttctacctctttttgatatccaacgaggttacggcacgaccgaacggccggaatctattctaaccgaagtcaatggataatacaactcacacgttcggcggaaatctattttatccttacagcaagcgagaaatgacctaagcaaaatggcttaagcacgtcaacacggggtataaaaagtacacaaaacgagaataaaaatgcacgacacacaatgtggaccactacgggtacatag

SEQ ID NO: 241843 - DNA, 343 bp, Glycine max
acccgggatgggtttaagcgaagacaaccgtgacataactagcctgattaatgccaaaggaaatcgtgggaagtatgggttaagctataagcccactcatgcagatataaagagaagcatcgtgggaaagaagaacggtagtcaaaactcgcggttgagacaagaaggtgaatgaagcccaccctgccacataagtaggagctttataagcgcgggtctggtggacgaatgtcaagtgtgcccgatatacgaagatggtgctctgagtacattggatcttggacgaccatgccctcctgatattcagctgggaaattggcgagtggaagaatgctccggcatt

SEQ ID NO: 241844 - DNA, 402 bp, Glycine max
  unsure (1)..(402): unsure at all n locations
agcttncatcaaaccattaaggttagncggtgttttattatttgtgtatattgccacgatcgcaatggctaaggttataactgtaataaaattgtgtaaaactaatcgtgtgtttgttgtttctatgataacggctaagattattatcatttaaaataaaaattactttcaattttatgtgtaaaaaaggtacacatcttttaagacaatgatgacttattaaaagatagatatctaaacaattacaaaggatgaatntttctagcctcctccccctttaatatgtttctggatccgtccctggttgggagataacatttcaataaaggtggtgtattgtacaatgtccacgagtgatagactagccaaccactatctctaacacacgttcatagtgaaata

SEQ ID NO: 241845 - DNA, 303 bp, Glycine max
tgcttgtggagcttctatggaggctagatctttgagcttcttgatgtccttcaatggtgattttccaccatggagatgcagcggaaggcaaacgagaagaggagagacgaggcaccatccacaagggaataatccatggaagaaggagcttcaccaccaagaatatgccttggataagaagattgaagagtgtcataccctaatttcgtccggggacctttgcttgatgacagacgacctttgtttggtccttgtaaggtgcatggcacccatcattatgcaattggtgaaattccgggacat

SEQ ID NO: 241846 - DNA, 448 bp, Glycine max
  unsure (1)..(448): unsure at all n locations
gctcgaaatgggaattttttgtcttgctttcanataactgccatcatcaacagagggagaatgcgaatgaatatgtctgaacattctgatgatgccacagaccgaagccatacaagtctacctcaagtcccaatcaatatcatgtgaacaacaaatctagagaacaaacccgccctactctatttctgctcaaagaatctcttaatgattgaaaagggctggcctcaaaacataacttctaaactaattataacaagtcctaaaatattttaacatttctgaaaaaaggaatttttcctctgcgaatcgattactagaacgtgctatcgattaccacaagcacaattgctttaaaagctttcacgaagtgaaatttgaatttgacactgaggcgatatatttgatgtatcatcaccataacggactctgaattcaattgaaagctgat

SEQ ID NO: 241847 - DNA, 432 bp, Glycine max
  unsure (1)..(432): unsure at all n locations
gctgcagcttgactgagttataagagatataaattttgtccatggcatgacattcaataatcaatattctatctttcaatcttctttcaacattcttcaatcaatctttcaaatacctttcaactccttctacaaaaatatctgattcatcttctcttcatctttctaaaagtttttgttcaatactttctctttcaagaaaagttctttgataaaaaaattgtgctattcatctttttcattttcttctctctntgccaaaagaacgaaggactaactgcctgtggtcatgttgggtcttcgactcgcttgataacaatgaagcctcatctagaaatttcctctcttagtgatgcattgtcactgatagtccctatcgccacaatgtattacctaagaagatgatatttgtagaagccagtaaagttacat

SEQ ID NO: 241848 - DNA, 450 bp, Glycine max
tcattgggtctattgatgttgttaaaacctgaaaggattgaactgctatacttccagctcaagttcaacttgaatgaattgatcaaagcaaataagtgagtacataatacagtataaaacatattttgaactagaacgctttacaaccacaagctcttaattatatacaaattcattgtgtcaaatgatgttgttaaaacctgaaatgattgaactgctatacttccagttcagagttcaacttgaataaattgatcaaagcaaagaagtgattacataatacagtataaaacaaatctattataaatgaaaaatatcaactaatgatgtaatgggtatcagttcgtttaatcagttcattcgaaatggctattacgatgaggagtacgaatcttctagagaatagatgaagcatacataatctaaatcaaagagaatatataacaacct

SEQ ID NO: 241849 - DNA, 359 bp, Glycine max
tctgtatggcggtcagcagaggagcacaaaccacaaactcttgcgacaggtacagatttctgattcaaggccagctgggttaccaagttaaccagtgcatccagtttgccttcaagctttttagtttcagatgatgcagatgggtttgtagctacctcatgcactcctctaatgactatggcatcatttctggcgctaaacagctgggagttggaggccatcttcttaattaaatttctggcttcagcaggagtcatgtctccaagggctccaccactggcagcatctatcatacttctcaccatattactgagtccttcataaaaatattggagaagaagctgttctgaaatctgatg

SEQ ID NO: 241850 - DNA, 498 bp, Glycine max
  unsure (1)..(498): unsure at all n locations
ntcttgagaaaacttccttgagaagcttctttgagaaaactttcttgagaagcttctttgagaaatgtaaagacccgcctcgtcgctacggtatccacactctaatattcgataatttcaatttttataaaaagaactcccttaatttttttgattatgaaaatagaagtgattttgtcacaacataaattcatccaacaacacactattacttaagtgaatatgcataattacatagaaacaataattcagtacatgtcatacacataacgaaaattaaatatgttcatatatatatataattaaaattccagttttacatctttaactcaacaaaataaaacttaaaagccaactacggaggagttgattacaaaacacaactctctcccaaaataacgccaacgtcatcacgtcggctcggcgactcctcaccagaatcttaactcctacatcctgccactgtcattctgctcccacgaacaagggtcgtgatca

SEQ ID NO: 241851 - DNA, 426 bp, Glycine max
  unsure (1)..(426): unsure at all n locations
agcttatagntgatactatntcatgatttcaatttattgttgttaagattgagggtgagccttggtgcaacagtaaagttgtgccttggtgataggctggtcatgggcttgaattccaaaatagtctctttgcatatgcaaggggaaggttaatttaatgcagctaagatatgtttgattcacagataacataatttagagttcatcataggagcacggaacaaaaccaagaaaccaaaagaaacaatagaagttctaccataagagtcaagaagaatagacatacatcacacattcacatatcttgaccctgtggtacgaagatatccaatctataagttcttacaatttataagagaatcaggtaacctgcttatttctctgcttctaaaatgctttacagntntccattctccacaaattatt

SEQ ID NO: 241852 - DNA, 463 bp, Glycine max
tcctagtcttctggacacaaattgccataataaaggcagagcttgttgttattgaacttgtttgcaatcatgggaatattttacctaagcttcataatgatacttcacgtgatattcaatttaatgaatgttcctattataaattccaacatcacttgaagggtcatgatatcacatccgtacaactttaaatatagaatcatattcgaagacttaaaaaaaatgagttgaaatgcctttggaaaaaggaaatgcatgaatagatatgttctgtttcgagtatgccctttctgtggatacccatgaaataaaatatatcttcaaatacttggcatgagttcaaatcagattggatttggaatatttacgcatagcaatatctataaatagaaattggtcaatgtcttatttcatcgattgaatttgaatttgatgattcaacatcagaatattgtgggtaatc

SEQ ID NO: 241853 - DNA, 467 bp, Glycine max
  unsure (1)..(467): unsure at all n locations
agcttctatgtgagctgaaccatcatatcaatattattcttctcgaggatgattcanaacatgacagcttatctcttttatcttagtgagagtgattctcctaagttcttgagtgattcggcaacaccgtggctatattaaacgactttcacaacctgtgtgtgttgccctcaccggaaagagagattctttccttcctttcatcttcaaccttgctatttcaaaccactaatctcaaaatatccacttctgcccagaattatcttgcggctataactctcgttttacgcactcaaattaagtgattcttgagcctaaattgaatttcaaaatgagatctttcacctcgttctggaatcatctcattcggagccctatagcttgatatatatccattcttatatttatatccaggcatcacttgacctacgtgntatcatctcattctttccatttatgccacgaat

SEQ ID NO: 241854 - DNA, 375 bp, Glycine max
aactcagctataaacactaattaatctcaccttgcggcttctttctttttgtcttactaaagatggttggtacttgccatatgaagcatagctttccgcttgaatatttatgcattaaacagcattttgattacgtttacatattttatcacaaaatagagtatgttcgacttgatgctgaccacctgtatcttgtccgacaatgctgaagcatgggtaattggtaataacaggatcgttactaaaagaatgcatctattatatgtaatcttaatgcactgtgcaagaaagacttttgtatgttattcaatacacattgtacaacttcatgtacactaagcacatccctcattactaaaatgattctggcggaca

SEQ ID NO: 241855 - DNA, 407 bp, Glycine max
taatgtcatgctttggcgcatcaattaacctgtgtatatgacacttgaataagctcatcaaccagttcactgaatttatctttcaagcaatgaaataaaagaatccaatttagtttttacaaaaaaatttccaaatagcagtctgcagttgatagatgtatactatagtgacttgcttcacacaatttatttctttcataggatggttataacaatacattttccccgagcagagtttccccatgataagtgtgaacaataaaactagtacagtaacatgaacaatgagtggaaagggattggagcatgtcctaaaatcactttctcaatatcagcttcctagagccatgtcggaaatcaaatgagataccaattgggaaagagggttttcagtttatgtaatattt

SEQ ID NO: 241856 - DNA, 389 bp, Glycine max
ctcgaatcttagaaaaaccattgtttattgtagcccattctttctataatcctataaaagtcctttcgattcaatttatccattcctaactgtatgccatgagatgaagtgcaaaggttggacctcatgttagttgttaattattgattagcttaaacacttaagcttgagtgaaatagtgactgtgagacactggttaggcatccttccttgaaatctgtttgctgattagtttcattcagttgtgttgtttaataaaaatgctcttatctctgaaaagctgcatgtcttgtgaaaaaacctttgattgagtcattgtatagatttcttatcatatgaattaatttttggaagcaaacaccctttgtaaataatcactgcattatttt

SEQ ID NO: 241857 - DNA, 453 bp, Glycine max
  unsure (1)..(453): unsure at all n locations
gcaagcttgaaagcacaatacaaaagtgggtcactctctcctagagggttaaagctgagaccacaatttctcaattagagatctagcacaaagtattataaatttggaattctttaatttgcgattcatagcctttgaaaattccttataaagccctgaagaagaccgttggagtgcttcatcattcttaacactttacaactcaatgcattccgaagttgatcacttcagaaagatttagtggaattttagctgttggtgtgttagtattctatctaacgttagactgagtagtattcttcaatctttcattttgatgcttctcatcagtctttctcatggcagcttctttattcaacaatatttcatcttcttatgcaattggntcttcctttctgatgtgtctatagggattagaaacttatcatagtgaagaactgtgagactttagtc

SEQ ID NO: 241858 - DNA, 405 bp, Glycine max
  unsure (1)..(405): unsure at all n locations
tgaggggaaacttgatgccttggtcaacctagtaactcatcttgtcttgaatcagaaatatgcaccccggtgcaagagtctgtggtctatgttcttctgcagatcaccatacagatctttggtcttctttgcagcaatttggagtcaatgagcaacctgaagcttatgttgcaaacatttataatagacttcctcagcagctaaaccaacaaccgccaaataattatgacctttcaagcaacagatacaatctaggttggaggaatcacccaaatcttagatggacaagtnctccacaacaacatcagcctggtcctcattttcagaatgttggtggtccaagcaagccatatgtntctcctccaatgcaacagcaacaacagcagtcacaacaaagacaacaag

SEQ ID NO: 241859 - DNA, 419 bp, Glycine max
  unsure (1)..(419): unsure at all n locations
ctatactttgttgcaagagaataattttcatgaacgaagagaaagaatttcagaccaacaagctgtaagggaatccttctacacaaagaacaaaacataaaagaataaaaacaatcaaagaacaatggaaagcaactataaaagctctaaccgatgtttcaaattttttttattgagtaaaaaagtaaagatacatctctgggcactttattcttcgtgaaatatatcaagagtaaatatgtatcagcttcgattatttatatgccaaaatctttacttaatcagncataatttatgtttataatctctttataaaacaacagagtaagcatatattcaaaatagttctctatatntaatatttttaatgtaattcttaatttatcttctttagtattgtccttaattaagcattacat

SEQ ID NO: 241860 - DNA, 402 bp, Glycine max
  unsure (1)..(402): unsure at all n locations
ngagacaaggggatccattggcccctttattgtctgacctggttgcttattgctcgacacgaatgataagggaagaaatttccaaaaactgctaccacaactttatggtgggaaagaaaaaggtcccagtcaacatccttcaatttgctgatgacactatcttttttggggaaccatcaatggataatgttaaagctattaaggctattctcagaagctttgagatggtatctggcctcagaattaattttgttaagagccaatttggtgcaattggccaatctgaggagtggtgcagacttgttgctgactacctgaattgtggccctctgcagtttccattttgttaactatggatgcctataggtatcaatcctataaggaaggtggtgtgggaaccta

SEQ ID NO: 241861 - DNA, 476 bp, Glycine max
  unsure (1)..(476): unsure at all n locations
gcaagcttcacatgcaattaagaaagtgattaagccttcttatggatatggtatactgagaaatacaatgaactcaccttatttgctgagttgaaaatgatctttctcccattatcctaatgcacatgcttacccaaacaatacaacttactaaaagacattggatacttagggtgtgtttggttttatggtaagaataatgagaattgtttttgactataatcaaacttgattttataaaaatataaatgtttatttactgtaaggtaaaattgattcttcctcaaaatgttaatttagctagaagtgacaaaaagtaatcttggtgttgggttgaaactttacactaagttttacaaaaaaaaaaaaaaaaaaacttgctttcagaataaaattattcaaataaaaattacttcacttgaaaatcaattntattcanaataaatttttgcaatactaattcaaacacactcaat

SEQ ID NO: 241862 - DNA, 394 bp, Glycine max
ggtaagaccacagtatgagtagtgttgtagcagtggagaacatccaaccccttattgtagccccacaaccccttattgtagccccacagtatgaattattgcatgaataacaacgaaacttatagaagaaaaacacttgataaaagatatcatcaacaaggaaatcacaaaattttaaagaagacaggatgaaacgctgaagttcaaacaaataaatcaagtaaaaaaataatcttaataatgaaaggttacctaataggtgatttcttgcatgttatttcacttgggctctgcaagagtttattagtgtggtggtgaaaactactaggaatatgattgacttctttcattcataaattgtggtcttgaatatcatgaggacaaaaacatgcat

SEQ ID NO: 241863 - DNA, 304 bp, Glycine max
cggaacctaatggcgccaagcgcaattccttactggcataactgaggtcgataaagctaaacgccactcatggcagctaagcaagattcattgcgaccatatgagcgctaagcgagaacctctcaactaagcgcatgctcctctgtacttaagatgcctcattttaactaagctggccacagcaaggcctagcaagagttgcagattttctaatctgcacactcgctaagcggacttactcgcacgctaagccgagtttctgcgcaaaaataaatcgaatttaaacgtccgtaagccacgctgc

SEQ ID NO: 241864 - DNA, 481 bp, Glycine max
  unsure (1)..(481): unsure at all n locations
tataagaacaaacatgccttaatcatttccaaatatgcatgtttattangacgcatcaacaagaatcaagccaaggctattgtgcaagcaatcaatggggcaaaacacaccaaatgattataatgatggatggctcaaattctcacaaaggtaaaatcatcactttcaaattgagctttcaaaactatcatgacatgtagagaagaatcaaggatttcaagtcacaaaatgtcaagaacttttattttcaaaacaattacccatttcttgaacatatcctataattcaaagaaaaacatgcaaagtcgtacgtgcacacaaaattgacccacaatattaaactaaaaatccgacgaaactaacaacattaacaaattaacacaactaacaaattaacaaaaccaacaaaactagcataatcaaagaacactccccccctcccatacttaaacaacacattgtcctcaatgtagcacaatta

SEQ ID NO: 241865 - DNA, 387 bp, Glycine max
  unsure (1)..(387): unsure at all n locations
catggaacacgtaacctttttatgcaagttttctcctccacttctgatctttattatttaagtgtactggtaattcattatctgaataccattcaaagcattgggctaacaaaaatcaaggagagtggcaacccttgcgaaaggacttaccaggtgagagctcagtggataagtattcatgttataacttggctgaaataatttccttattcgtctcattctntgtatctgattaaattcgattccttttcaagccaatagatctgtactgtatgactgtatccatgatctttaataatatgctanagggatactaccaaataactacctatggacgcattctttttaatatatatccatatgacacacatgtcatgaatcattccc

SEQ ID NO: 241866 - DNA, 435 bp, Glycine max
  unsure (1)..(435): unsure at all n locations
actgagctgcactaacaaattacaaactttgttgttatttatgctaagnctagtcctacaagagggatatgaggatgaagcttagcttaagctagactaaacctacgacggctgtctaaattgaacctagtccaacaagatggatctgaggacaaagcttgaattgattcaatctaactggggatcgaggtttagtaacttacgccacaacatagaacacaaaagcatgattgatcggcgtgctttccggtaaaccggatttctcttgaacatttttttataaagaaaaaagtggacataacaataactgcaggggaattctaacaaagtattcatggcgccgctgtccgcgaactagatttaagaagagtttaattcacgtttacgacattgccttatatntttctctttaatcattgattctttttgtcatac

SEQ ID NO: 241867 - DNA, 431 bp, Glycine max
  unsure (1)..(431): unsure at all n locations
taagcttttgcttctgtagacgaaagcctgatagcacgaagagtttattttttctacagcgcccttcgtcaatcgcggccgacaagcccgttaacacgcggagatttacgtcatcttccgcgctcacaagatctgtcatactgacttttgagtcacgctgacgggcggagatacccgagtgggtatccgtataaaactttttgctatctgtaagacgaacagcctgattgcacgaagagactaacgtcgtctactacgcccttcgtcaatcgcggccgacaagcccgttgacacgcggagattacgtcatcttccacgcttacaagatctggcatactgacttttgagtcacgctgacgggcggagatacccgagtgggtatccgtataatacctttttgtatctgtcagaagaanagcctgatagcacgc

SEQ ID NO: 241868 - DNA, 298 bp, Glycine max
ttacccacatgcagtaaacctatgcaatgcatgttatctggcgtttcttatagacagtacctacaaaacatacatggtcacactcccactacttgactttgatggagtgacaccaacggcgatgacaatctctgttcggttcgcatatctggaggctgagcgcgctaatattattgtatgggctctggaacgatttcgaggcctatctttaagacacgatcgccctcctctcgttattgccactgacagagacctatcactgatgaatgcagtgaaaactgttgttcccgagtctact

SEQ ID NO: 241869 - DNA, 478 bp, Glycine max
  unsure (1)..(478): unsure at all n locations
tattcttttgtttgtcggcaaaatatctgtctagtgataattgttatatctttaaatgaccgtctcttactgtgtctaagcttaaatcagaaacatcacctgcacaacacagatcatttcttgtaatctctgtattatctagctttctacaatttgtttcgagttgctcaaaacgaatgtctactgcagaagaggtagtcataaatctttgctccttaatgttgtcagtgttcaactctatttcctcatctggacaacacagaataagaagcttattctntgacttgccaacaacactaagtctaatcagaattgtgaaaactttaaacaataatctcttactgtgtctaagcttanatcagaaacatcacctgcacaatacagattatctcttgtaatcccagtatgaatctagctgtctaccatctgtttcaagatgctccgaatgaatgtctactgcagaagatgtagtcataat

SEQ ID NO: 241870 - DNA, 326 bp, Glycine max
agcttgccaggttgtattttgtgaaaattaggttttaatgattttgtgataccctaatttcgtccagggaccatctgtttgttgggatgcgaccctcgtttgaccacttcgagatacttggcacccatcatcaggcaatccgtgaagttctgtgacatgccggaagtcaaaaggaagtgttaatgcacaattcgtgaaatttcgtaacattccggaagccaaaaaaatggatgattacgtaatccataatgttccgttacattaccgaaagaaaacgagtattgttgcataatacactaaagtccgtcatggtaccgacaaagaat

SEQ ID NO: 241871 - DNA, 402 bp, Glycine max
  unsure (1)..(402): unsure at all n locations
tagacttgtccttcatttaactatctttatgcttgtttgtcacgctcaacaaagtactttcgacacctactgtacgttgatttgaccaatgttgttatgggaatgttgcgataatcctttaaaaccttattgatacattctgagaggttggttgtcatgtggacatatcgacgtncttctctatcataagtcatcgtccattttttctttgaaatgcaatcaatccatgttgctatggctagactcagttgaccaaatttttctaaattttgattaaaaaaatgtgcttgcaaggaatgtatgctgcataaaattagttatgaataacaattntaactatatatgagagttaaataaacgtgaccattagatatgaaatcttacccaatttcttaacatctc

SEQ ID NO: 241872 - DNA, 357 bp, Glycine max
  unsure (1)..(357): unsure at all n locations
aagccatcgcatccctcactcagcattatgatcacnccctaaggtgcttcacgtttgtggactttcagctagtgcccactgtggaagagttntatgagatcctgtgatgtccgctagaaggaagaaagccatatctatcttccgggtcctatctctccatggccagaataaccaaggtagtcaaaatctcagcacaagagttggaccaagtgaagcaaaatacaaatgggatagtccgaatccaaggaagcatctggaggataaggcgacagcattggcatatcaaggtgaatgggctgcattcattgacatcttgtcgctatngatattccgattcgtcctctttcaaatatggat

SEQ ID NO: 241873 - DNA, 385 bp, Glycine max
  unsure (1)..(385): unsure at all n locations
tgcatgggaantatgacaatgaacacagtattaagtgtgtttttattggaaccaaaataattcacatttgagaaatgtgtaaaatcactaaagcatacacataaagacaacgcatgagactaattaaagggttgatttgtactatttgcaaaattccattaaaacacttggtaagtaaatatgataagtatcacaagctcaaggggaaaaagaagggtcccctaaagttggttacgttggatggtggtgtgatcattatcaataataccaagtaaattatataatgagaatggaaacagccattattgttctacaaaggtaacacaaaaggtaagaggcacttcaaagaagaatatttgttataatagtgatcacaagaccattt

SEQ ID NO: 241874 - DNA, 428 bp, Glycine max
  unsure (1)..(428): unsure at all n locations
acctctaagcgacctgcggcatgcaagcttctatgggcaaacaaattatccttatacttttatattttattatncaaagggagctagaacttgtgtttttattaataacttaatttggtgcccaatgcacttatataaaacatgcgttcaacctttatgaaaaccaatatcaatacactaagtcttgctttgcacatttaaaggaaataaacacttgcactaagtggtttatactcaacaaaatgatgatcatttagtattgagttcatgttagctggcacgaaatgaatattcttatttgtatcttaatgattcttgttatctcttataatttgaagtgataatattttcatttagagtatacaatggcagagaacaccaatggaagaatatcacaacgacaagaatcacatcgtacaagtagtgga

SEQ ID NO: 241875 - DNA, 400 bp, Glycine max
  unsure (1)..(400): unsure at all n locations
caacatanagctttcttcacgctgaggaatgcttcttcaacatcaacgctccagcggaaggagtgcttatccacgagagccgtgaggggagctgcaattgaagagtatcctcggatgaaccatctatataatcctgacaggcccacaaagcctctcacggctcgagtggattgaggagttggccaattctggacagcttcgatctttgccggcattggtgccactccttggtgaggtaggatatgacctggatattccacttgagaagttgcaaaggaacacttcgaaagcttcgaaaaaaattggtgtaagctcaagatttcgaaggccttgcggaggtgctccaaatgctctgcaaatgtgttgctatataatagcatatcatcaaagaagatgataa

SEQ ID NO: 241876 - DNA, 302 bp, Glycine max
ggcatggcaagagaatgagatgcaactggagcgatccgccacacccataagaccatggttgaagcatgtcctaaccaagttgctatgacgccgacagatgatctacctgacgtttctcctgcggagactgagccacatacttcacgaaatgccacacccagcagggtgcatttcctgaaccagatgaaccacaacaggagcgcttcagctcattcgcatgctatcaaagaaaatggtgtgtatactggtgaacccgattctcccttgaacaagaccgggtgaaacagcctactgaactctac

SEQ ID NO: 241877 - DNA, 371 bp, Glycine max
  unsure (1)..(371): unsure at all n locations
tatgcacggaaaatgtaattatgaaaacgacatgcttctattttcaccattnnctaggtaaccatgcattaggtaccatgttcaactattctgcctttaagggaaacgggtttatgatcccaacatggttggctcgtggtgcctaacacatgaaactaagaatgtacgtgtgaaggttcacgctcccctcctttttttgtctttgttttgttgaagacaacgcatggatgagcaaacatgacaacaaatggtatgccaattttcagaccacaaagtccgttgaacgcatatgcatgatgatgccctgatcatgcataatgtgaggctggaatatgataacggacaaatgcaagatatgtcattatgatgta

SEQ ID NO: 241878 - DNA, 365 bp, Glycine max
ttgaagataaattcagccaacttaaagataataatttgaagagcacaatgagcccaagagtttatactcaagattaatctatgggctagagtttatttgaatagattacatagcttttcgtctaaagaattaattatggcccattttctaatatttcttcaattttcgtatgttattttcatgtcataaattcagattgttgctgacatctttaggttagttttgtgtttctattcttctcaagttattatagtggttagtgggattttatagctagtggatatttaatgttagtgggaatctaattctaagtggaaattatcttttaatgggatgtttggaaggacgcctagcctataaatagt

SEQ ID NO: 241879 - DNA, 310 bp, Glycine max
tctgtgatggacgaataaataatgtgtaatgtgagctccaaagcctgtaatatattgtctatagagggaaattaaacgaggggagaacatatttaaaatctaaccaaccaggtgagttgcggaattcaaaagtcgttatcttgacttccaattgaagggcctcttacacgtcactgatatacacactactctgatgctatagaaggaaccttagagattgaaccaaatgaccaagctatcatatatacctactcaatgaattgttgtgatgctgcgaaagtgttagacaatgcccacgaacctaacgaat

SEQ ID NO: 241880 - DNA, 70 bp, Glycine max
  unsure (1)..(70): unsure at all n locations
cccccgcccctcttccnncgatacgggaggctcaccccccccacccggccctgatctgcatcccacccaa

SEQ ID NO: 241881 - DNA, 408 bp, Glycine max
attaattaacctatgacctttgatattataggatgaattacaccgtctattaatggtccaacctagatggcaaaagaattttctttcatgcttgggaaatttgagcctgtactgatccttaggagtgatttctattgggcaacattgcttatgccttttgtaagagctactgcaatcctttttgacacccttcacattgtgcttatcacacactgaagtcatatttacgtttatgattgtctgccacattgtaattccaaatcaccctttacaagtaaatatcatcctaaggtctttcaaggaggatgctgccaacctcatgtctggccaacatataatatgaacagctggactccagcaacaagtctaagtacaacaggtttgaatagtgatgacaactgggctgat

SEQ ID NO: 241882 - DNA, 394 bp, Glycine max
  unsure (1)..(394): unsure at all n locations
taattactggcgaagcgtcgaagggaccactcctatcgcgtggatccatgtgngacattccgaaaatttctacccggaattctgtgaacagggtattttgaatgattatatatctattttaaaggtttcttctccggatatgcatatatgtttcctgtataagtacgaattatgggggcaagatacgccggttaggataattcacgaagagaaatcccttactggaacggtttaattaatccttaattaatagtctaaaaacatcgtttgcgtgcaattagaattaacaaaccacctttgaccaccttaggttcattctgagattttatatatatattgcctacttcaaattgcccnaccggccaattaacccaggactgaaccaataacacac

SEQ ID NO: 241883 - DNA, 462 bp, Glycine max
  unsure (1)..(462): unsure at all n locations
tgcttataagaacaacaatgcctcaatcattttcttatatgtatgtgaattangaagcatcaacaagaatcaagccaatgctattgtgcaagcaatcaatggggcaaaacacaccaaatgattatgatgatggatggctcaaattctcacaaaggtaaactcatcactttcaaattgagctttcaaaactatcatgacatgtacaggagaatcaaggatttcaagtcacaaaatgtcaagaacttttattttcaaaacaattacccatttcttgaacatatcctataattcaaagaagaacatgcatagtcgtacatgcacacaaaattgacccaatatattaaactaaaaatccgacgaaactaacaacattaacaaaataacataaccaacataacaagccaaaccaaagaacacttccnccctcatacttaaacaacacattgtcctcaatgtagcaca

SEQ ID NO: 241884 - DNA, 349 bp, Glycine max
tgcacgatctgcttccagatgttattctttttctaacagctactatcacgccgagagaatactgtgtctgatgggcctggagtatcacaagaattctgcttgccccaatgattgcacattgatcaagcattgatctgcagatatatccctatgccgcttgagtggggcctcaccgtgcacaatgaaggatgatgacgatttgtcttctgatgaaaactctcagatagggcctccaaccaaagcgtggaggttacttcccatcatttccagggttacactactttttgcttatggagactatgccgaagaccttacctggcatgcgaatgggacaaactctgatagaatg

SEQ ID NO: 241885 - DNA, 390 bp, Glycine max
  unsure (1)..(390): unsure at all n locations
gtcacctgcggcatgcaagcttgcaatgaaagatatcgtgtctgcacgattctttgtccatctaaacacacaaaccacggccataattcaaaataagtcagatagaaatgatgatagtcattggcacaaacatngacttctgcaactgctactaagctcgcaatcaaagatattgtatatatagtaattaactttccattcagccacacaaatttgctttattcgtacgcttaaatttgctagattgcctattcaatttgaaatgtcaaatttctatcttacatcttttatttggacaatatgtaacaaaagatgcaacacagaagtttactaaaccttatattagacatggacatcatgttcctatatattgcttgtctggcgcaccac

SEQ ID NO: 241886 - DNA, 452 bp, Glycine max
  unsure (1)..(452): unsure at all n locations
tcaacctttggccatcatttctgtccaaatcgcgatatgatgtgtttntccgngtcgngaagtgcgtgtctacgagtgggacttcgaaaattcaggtttgggtggacttctttctcctttgattttcgtgggtatggggtttggggagatatgatgggtagtcttgctaggtttctgctgtgtgatgattatttgtgaagacattcgctgaaagcttgttgaaattgccatgtttggatgagttagacatacccattctgttttagggtttttgtgatgatgtttgtgatgtttatatgctgaaattacttatggaaaactgttagagatgaaaggtagagttaacctangcgtagaaagtgagaatgtgatgttatgagtggaaaaagagtgacgctntgagagttggaacgctaagtctgaattctgtggtaaatggaaggtaaagtgag

SEQ ID NO: 241887 - DNA, 429 bp, Glycine max
  unsure (1)..(429): unsure at all n locations
tctcgatatattatgcgcctgaatcagacttccgttacaaaatgttttaccatatgaatntctcgagagccttcgttgttcaatttcgagcgtcttgatatagtatgcgcctgaatcggactttcgtgtgataagttatgaccatttgaatttgtcgagagcttccgattgtcaatttagagcttctcgatatattatgaacctgaatcggacttccgtgtgacaagttatgaccatttgaatacctacatagcattcgttgttcaatttcgagcgtctcgatatattatgcgcctgaatcggacttccgtgtgacaagttaagaccatttaaatttctcgagagcttccggtgtccgattanagcatctcgataagtgatgcgccagactcggactttcgtgtgagaagttatgaccattttgatttc

SEQ ID NO: 241888 - DNA, 300 bp, Glycine max
  unsure (1)..(300): unsure at all n locations
actcagcttgtattatatatgtatttaataactncatagcaggatatttctagattgagatatgaactatgtccacgtgctatgaaagaaagacacttttggaagatatatttcacacttgtcaacactcatgtggctccgtaagtactgtatcatgctgatattccatgtactatgttatatttgtcaatgaagggggaaactagcctttctattntcttatagaacttttgtttaaccttaactctgattggttcctttattctccaaagactaaatattaacataaataaaagacgt

SEQ ID NO: 241889 - DNA, 274 bp, Glycine max
  unsure (1)..(274): unsure at all n locations
ttgacctcattctaacaaatttattgtatctttggaacgccgggcaaggagatacgctagttatgcacctcgtaccttattcacttccacccctaatgcaacttctaaactaataatgaagacgatgacgaattgaaatcatcacgggcgcaaatcgcagggagaatacaagactacaccacgcgtaagaacattgtgantcacactggcacagatattgaacaggctttgaaagcactcatcattcccggagagaacagggaatcaagacaca

SEQ ID NO: 241890 - DNA, 449 bp, Glycine max
  unsure (1)..(449): unsure at all n locations
tatatagatntataggtatattctacatgcatttttatgtttctcttaaaatctaacaatgagaaacaacaccttgattatgaatactgcacatcatcctggaaaattaatcacaattctctttttaagattatttcatgagtaaaatacaatctgatagaatttatcattgtcaaaaagggataaaatgtgataagcatctaaagaaaatcatattgtagagaaatgaaaaaaaatacatttctcttccaataaattattccttgcttaattatcaactacaaaaatacccaaattttttaaggatttctatctaacacagaaacacgttaatttcataaaacacaatccgtctacaccatcaatccgtgattaagacataatgcataattactttcataaacagccatatgaccaaaattgatctcatatttttaccatgttatcta

SEQ ID NO: 241891 - DNA, 472 bp, Glycine max
  unsure (1)..(472): unsure at all n locations
agcttgtgtcgcactctcaactatcgatgttgtttatatatttgcaagaagntgctgggatcaactcatccaaatcaancaaataacacaagaattaccttaaacatcaattttgagttatcgaaattccagggcattacaaatgtagcgatgttaaaaccattctttctagtagtgattattactactgcatagggtacatttgtccttgtgcgaacactattctacgcatcacatgtaatgtaccttcaactaaaaaataaagttgcgtatgttaaatgtttgtagagtttgctaatatacacacacttgatttttagttcaagtgcattaacaacttataactaaagattgtcttacagtacatcgacattatagcttgttaatgtactccaactaaaaaacaaatgggtgtatgtcaacaatataagactcatgtatgtatgctaagattgtattaagatgtatttga

SEQ ID NO: 241892 - DNA, 478 bp, Glycine max
  unsure (1)..(478): unsure at all n locations
acatataagtcagatatcttcttatgcttgtaatttttttggccatggataatacgggttctgctatttattatatatgttgtcttgctttgctaattaaataaaaatcttcaaactagctagtgcaacttccattntacactgatgaggcaaaggaccaccgtatagtctatagtgtcttcttcagaccatatggtggatgctttgcacgtgtccacatgtgcaagtttgtgccttgtgtcttctacttgttagggatagtacagttagataggtttggcaccacctataatttccccccatggctcttactagtccctttcatagggcattattaatgcttgcataaataggggcacacacatatgtacactgacccncttggatcccaaagttcatcatcagtttccaaagtttaggaccaccattggcttagtcaagtctagccatgatgtngatcgagcatatacatgcatgc

SEQ ID NO: 241893 - DNA, 444 bp, Glycine max
  unsure (1)..(444): unsure at all n locations
caacgaagcgcacacttcttactaaccttctcttgtgcaagacattcttatttcttataaagangcacccctcttcgatcaatgcacctccgttacctacaatattcacctgaacttgcaaagcgtgtttgatacctacatcacacacatttcctttgatctattcacatacatgcgtacgcttagcgctttggctatcaaaaaatgcctacctgcacatcttggtgtttgtcatacctatacatacacaaacttcatgatgaaacttgactatctacacaataatgtgctacctttcatgctctcttcaagtgattntactacctaaagccacatgcacaaagaagtatatcttcttttgctcactaacatcgtattcaaatcaaaagagattgtttgtagtgtattatctttacataacatgcaacatatttatagactttt

SEQ ID NO: 241894 - DNA, 116 bp, Glycine max
  unsure (1)..(116): unsure at all n locations
cccccccatggaccgtcaggaagaacggagccccaccacccagggggggttgaacgtgaacggcaccaacnacgaggcgcaccaccccacaaggcgcgagtttcgcccacccgcga

SEQ ID NO: 241895 - DNA, 240 bp, Glycine max
  unsure (1)..(240): unsure at all n locations
ccccaccacaccctgaggntcccgggggggaaacccccccccccaagcggnaatgactgaacccacnaacacccgcgcacaaaaagagcaggggaatctaacccctagcacaacaaaaggaaggaaacgaccagccccccccgcagccacaccagcgaacaacgaggccaagtcaaacagagaagagaacccgagaaccaaacgaaaaccaaaaggcccaaagaagcccccaaaaaaaag

SEQ ID NO: 241896 - DNA, 446 bp, Glycine max
ctaagcttaaccaagggagatggccatttaagtgcttgatttaattttttcaatgcttacaaagatgagctgcccggtgagtataatgttagttcaaccttcaatgtctttgacttatctctttttgatgcacatggagaatcccgatttaggacgaatcattctcaagagggagagaatgatgatgacatgaccaatagcacgggccaggatccacttggaggacctatgacaacggttagagcaaggaaagccaacgaagctcttcaacaagtgttgcccatattatttgaatacaagcccaagtttcaaggagaaaagttcaatgttgtgagttgtatcatggcccaaatggacgaggactaaatggcaccactctgtctcaactttagagtgttagtttgtctaactatggaccaatcctcgtaagttggctgcaaaaatat

SEQ ID NO: 241897 - DNA, 212 bp, Glycine max
accatctgtggtaaggctcatgaaacacgccaatgtactcccactgaagaaaacactccagaacatcattatatgggaaatcaataacgacaatggtataatcaaggaggattttcacgcttccagcatggcccatataaataacaaggacagtggaggagaccctgactcagtttatgtatgtaacaatgtctaatcataaaagcactgag

SEQ ID NO: 241898 - DNA, 459 bp, Glycine max
  unsure (1)..(459): unsure at all n locations
ngaaactagaccccaccacaggtgatggtgccattatatcatatgtttagctggccatggagaatcaatataatgtttagatgattccatgggtcttcttaacccatcatttgtcttcatatatttattacctgttttgcctccaccaatcttatgaggaacttggtcatggtagttaaactgcctctgacggaaacctctaaacgatctagcattccagtcatttctattttgaaacctcctaatctgtgaataagcatttgaacatgaagcagttcataaattgatatggctacagcattcatgtgagatgaagggagggattggaaaagagatacaaaaacattcttacgcctccattgtgttagaaaccaaacggaacacactattctcactaccaccaggagttgcttgcaatcagcatcaacccattgaaccattagagtatatccataactc

SEQ ID NO: 241899 - DNA, 275 bp, Glycine max
cgtctactcgcgattggtcacttgtctcgctctggagctaaagcacgctggtactgccccatatagcacctcataaattgttcccggcgtacttccttcctacgagcccatttgggctctctgctttaagccttgtggggagcattattaacacctattagttcgggatactcctctcggatcataagagcagctgatttgaaccctttttagactgatggggcttgctctagatcagccgtaaaggcccgcacctttgttaattactgcggagc

SEQ ID NO: 241900 - DNA, 396 bp, Glycine max
cttgtaataaataagtcattgatatttggcattttcgtttaagccatccttcatatgataggatgcaattgttaaaacaaacttatcctatggtgacttgggataaaacctttggttgtcatacttgccatagagcaaaacagagaaaacttccatttcccattagtgactcctatgcttctagtcctttctctttgatacatgtagatatattgcgtccgtgtgccacaactgctttgaatggacataagtgttttcttacaattgtggatgatcatttacttattatcttaattctttattaaaatattattgaaaaattatctaataacacatttttatataatagaatgactctaatcgtactaccattattcttaaactaagcttaccttg

SEQ ID NO: 241901 - DNA, 392 bp, Glycine max
  unsure (1)..(392): unsure at all n locations
tggtctatngagcgactagatgattctcttttcacgtgttttatttttctcgacacgtgcacgagcatgcgctgctactggtggaggcactctaatttgctctgccagacctcaatgcgataacactcacattattctgattatgcacagactatgaagccaagtcgttcgaattttgggattgagctttgttgcatacattggcctcataaaaaacaagaaggggggggtgaattaattattaacgaacctacactaaataaaaatgcattgttcttaatgtcccctaaagtctaagcaataatctacatgcacagcggataatatagagtgggcggaagaacacgcactctctatagtttatactcggtcgggacaaccgtgcctacatc

SEQ ID NO: 241902 - DNA, 421 bp, Glycine max
tcaagctggttcgaggtaattacccgttgtagatctatgaacgatgaagaacgaatgaagaacgtcgaagaacggttgaaacctttgcgagattcctcacggaaaacgttacggaaacgtttcggaagcgcctcggcttagattttcttcacggaaacaatttttccaagcaaattcgaaagagagagaagtgccaaaggggctgaacccctttcttcttcacttcctcccctatttatagcaaaataggggaggtggttgccgcccagctcgcccaggcgagccacgttgcttcctccagaagcaacagccttctggaggaatattctggagggcccaagtgggcctgggtggctattgcacccccatttttactaagtaccaccccctctgctggttttttgtgattcctttttcgtaa

SEQ ID NO: 241903 - DNA, 405 bp, Glycine max
  unsure (1)..(405): unsure at all n locations
actcaagctttttttagacctcgatcggncatctttcctggccgacgcctactgtcatttttttcgaacaatcttggtgaataatatttttttgccgaggtgggctaatgttttcctggccgaataaatgggaacatgccagtttcgaccgaaacgaaacatcggttgagctcgcacgaaaacacctatccgacctatattgtaagttttttatgcaacaccgaaacaagaaaacttcccctcccaaaagaaaaaacattatcggccagcgagcgttttttaaaaaaaaaaattgcgcaatgtcggctgaaaaatatcattcggggccatttcacgaccgatgtcggctattgagatttctagtaaatccctgaatgaaatttgcatgatgtcgattagaaaatg

SEQ ID NO: 241904 - DNA, 355 bp, Glycine max
cgagcgaaggtgctttctccagaagcaacagtcttctggaggaatcttctggagggcccaagtgggcctatgttctatttgcacccccatttttactaaatgcaccccccttctatttttttggaattctttttccgtaacggtacgaaactttgcgaatttcgtaacgatacttattttcctttcgcaagggtaccaattcttaccgaatatggatttactcttttttaactttcgaagaagttacggaaactcacggattggcgcaaaacacctattttcgacttccgccacattacgggaattcacggatcgcgcaagcctgcttcttttgatttctgagacgtctcgggac

SEQ ID NO: 241905 - DNA, 356 bp, Glycine max
  unsure (1)..(356): unsure at all n locations
tttataattctaaaatattagcatcgtccgaatatttcaatctatttcttaacaacggcactgattaagcaaatcctttaccttataatattatcactgctatattaaaaagatatacactatagcacactttcttttttatattaaaagtaacaaaatgttggggacaggtgccactcatgccgcctttaagaatcgtattatttagtgtagcgcttatatcgaacttcgtctgctattctcataacntcatctgactaacttatacaattaacgtcggtattgactataagggngaaatcctaacttaattaaaacactaatatacacacacaccaactgacttaacatttccc

SEQ ID NO: 241906 - DNA, 418 bp, Glycine max
  unsure (1)..(418): unsure at all n locations
gaatgtgtattgatcagtggtaatggtgcagaagaacctccatgtcacattggaaagagctgtcatatccataggtcaactttcagagttgttgatcatgctgagaccaactttaaaaaccatttgtttacaacaaccacgaaacctctctcaaatgatgctgcaaaactcacaaatagaggttctcaccttttttcgctcgcagtgtgctagattcangagggttcgaaacttcattctcttatgtctatttggtttgcaatttggtgggttcggttacagaaacaagcaaagctgggcctcttggtgagtatgaacgaagaattgataatggtgaacttcgtgaaggcgatgcttgccangtagagtggctacactttcatttaatgccctaattcattgatgaaatggatttact

SEQ ID NO: 241907 - DNA, 346 bp, Glycine max
  unsure (1)..(346): unsure at all n locations
ttataaatatgttaccatggcacgagnctcagatgagtattatcatcatcaatcatctttgaatcatctatttttcaatccttgttaacatcatccctcaaacatcattcaatatctttcaactctttctacagaattttctgatctttttctcgcacctcaaaagcttacaacacttttctctaaaaaagtctttgccaaaaacttgngtattcatctttttcattctcttctccctttgccaaaagaacggaggactaatcgcctggattcttttgagtctctcttctccctttaccaaaagaacaaaggactaaccgcctgaattcattaatgtctctcttct

SEQ ID NO: 241908 - DNA, 460 bp, Glycine max
  unsure (1)..(460): unsure at all n locations
aactatataacagcaccaagggtctagtttatgttgaccccnccccccnctctctccctcgcgggagactctctctctctctcctctctctcttctatttttcgnttttagatttagactctcttctctttctcttttattttcgctttttttttcaattccagttaagacttttagttttagcaataaaaattcattctctatttgattaatggaaggctaagtccgcagcgttggtttcccttgaggatcaagcacagntctctttgaggttctattattactgctaaattctggttagtttttcctcttcactaattactttgaatttgttgctcttaattcatgcatgcttagtgcttgattaattgtctctgcgctctaattacgttcatgcttaatgactcgttatgagtaattggggatgtgatgcttatcacataatgaatgctctatgtga

SEQ ID NO: 241909 - DNA, 461 bp, Glycine max
  unsure (1)..(461): unsure at all n locations
agcttgtttcaaaacacccattntggtttgatttacttgcgagacgcaagtntatgaactaaatcccacacttcattccttttaaactgatttaattcttcatgcatagccagcaaccaatgctcatcaaataaagcttcatctatgtttcttggttcaatatgagaaacaaaatccatgttattgcataaaatcctgattctagagtgagtagatactccctttgatatttcaccaataatgttgtccaaggagaaggtctcttgagttctccattctctggggaattctttaagaggtgtggcagtgactttcttgctcttttcaagctctttaactttgatttcatcttcaagtgcaatgtccttatcttgaaaacctgaatcttcatcttccaaagaattctcttgaacaatagagttagtttcatcacatacaacatgtacagattcttccactca

SEQ ID NO: 241910 - DNA, 491 bp, Glycine max
taaacattcaatttcgagcgtctcgatatattacgggtctttatctacatccgagtaaaaagttattgtcgtttgaattggctcagaggttcaacattcaatttcgaacgtctcgatatatttcgggactcaatcagacatccgagtaaaaagttattgtcttttgagttggctcagaggttcaacattcaatttcgagcgtcccgatatattacggcactgaatcagacatccgagtaaaaagttattgtcgtttgaattgggtcagagcttcaacattcaatttcgagcgtctcgatatattacgggactcaatcagacatccgagaaaaaagttattgtcgtttgaattggatcagaggttcaacattcaatttcgagcgtctcgatatatgacggcactcaatcagacatccgagtaaaaagtgtttgtcgtttgaattggctcagagggtcaacattcaatttcgagcgtctcgatatattacgcg

SEQ ID NO: 241911 - DNA, 455 bp, Glycine max
  unsure (1)..(455): unsure at all n locations
agcttgtaacctatggttacttgaaatgtctttattctntctttgcaactatctggggctccaaaacttgcgcaaatatgctcaccaattctacttgaagttattgatgaactcctcttgtatacatataatgtcttgtttgtaagtatgtagcaaagttgagaggagcaccacaagatacgccactgtttgaaatctcatcgtttacatgatcgtaatcaacatcaatgttaccattgtatgtatcttgttcatcttcaacaatcatgttatgcaatataatgcatgccaatataatatttttcattgtatcgatgtgtcaattatgcgaacgaccacatgtaattgcaaatcanaattttaacacatcaaatgctctctccacatnctttctcgccgattcttgatattntgcaaataactttctttttatttctctccttgtgggcatggga

SEQ ID NO: 241912 - DNA, 303 bp, Glycine max
agttgttttctggcgttcttaaaatccaatcctattttggagatggtttttttaaatcactctatttaaaggtatttctttctagtgtaaccaactctccctacattggattgattctcaattactggtattgcaataacttctcaactggtgcgcttagatgcgtattctattatgacgaatgatgttgtcactaactaatgttggactttagtttaggcaatacccaggtttaataaatattcatctggtgtacacacatcatatacaacataagtgggctcactttcacttgcttcatct

SEQ ID NO: 241913 - DNA, 355 bp, Glycine max
  unsure (1)..(355): unsure at all n locations
agcttcttggccctgacttctcttgttatcctatacctacaatgagnacctcgtactcaacctaattctttgaggctttgaagttgagtttaagagctttctccagggttacattttcagggccttcgaggatgattcttgccctactccctttcacattggacgcaccatcaatgtagaggctccaccagtctgaggtggtttgaccgtccctgatgaattctgccacgaagtttgccttgactaccacttggtgactctganagtatggcctaacgcatcgagccaatgtgatgagtgctagcaccaccttttcccctcctcttgtacgacggttgctctgaccgctttgtca

SEQ ID NO: 241914 - DNA, 352 bp, Glycine max
  unsure (1)..(352): unsure at all n locations
ntataagtgcgggttcnggagacaaaggtcaagcgttcgcgatatgcgaagatgatattccgggtactttggatttggtacgaccatgctctcctgatttccagctgggaaattggcgagtggaggaacgccccggcatttacgcaacaagcataatgtaaacctttacggtttaaaagctctatagttgggcctaggctttagagatntcattttgttaagggctttgggcttttgtgtttgaatntataatacaaggatctttcttcatctgttcctgggctctacccattctcattcattngcatgtttacttctttttctaaaacggcagaatcgatgacgagttccc

SEQ ID NO: 241915 - DNA, 438 bp, Glycine max
  unsure (1)..(438): unsure at all n locations
agcttcagctttgtccccaaagcctcatgtagtctcgtccaaaatcgtgaagtaaacctcggatccctgtctgacacaatactagaaggaattccatgcaaccttactacttccttgatgtacaactacactagcttctccattctatacttcatattcaccagaataaaatgagcagatttggtgagtcgatctactatgacccacacaacatcatgtccacgactagtcttgggtaaactagatacaaaatccatagatatgctctcccatttccattgtgggatttccaatggcttcaattctcccgatggtcgcaggtgctcaaccttagcctnttgacatgtcaaacatcttgctacatattcagctacatctttcttcatgacatgccaccaaaaacttctcttaaatcttggacatcttatcattcctgat

SEQ ID NO: 241916 - DNA, 484 bp, Glycine max
  unsure (1)..(484): unsure at all n locations
cgcatgagttacattctnccnctttctcaaggaaattcttatttcttcttgacatcatcaaaatcttcacgatttacacaatttacttaccttcatttcttttaagttttgtaacaaaaaggcctttcattggaagtgtgttgggatcctccaataggttaccaaacttccatttgtgtgtaataattttaggcaattttcccttaagatagtgagttttttgttgggaaccttaaatgtgttcatccatacactcctaggatctgcctagtttacatttcttgcactttaatttcttgcttactttcataacttattttctttactagtcacacctagtttatcttgtaattacataatactttcttcttgcttatcacacttattttcagttattttgaaccctagctnttaccttnntacaaaccccaacaagaaagaaccataacttangaaccaacatgagtcatcattcatctagtgg

SEQ ID NO: 241917 - DNA, 305 bp, Glycine max
  unsure (1)..(305): unsure at all n locations
aaatggtactgaggacacttgttttaagcatgcaaagcttatgcatgaaaatagatttgaacattaaaggtattgagaagaattatgaaccacacctttcttagtgtgtacaagatcttccacaactttatggccttttggagactataaaaccatgtattcctaacttaatcactaggagattattccccttcaaggctaatctttaatgatcttaagtcgacaaggaattttgtagttcataattttcttggtgaatggatgtccgcactnttctcatctctatctctcaccgatccatttcc

SEQ ID NO: 241918 - DNA, 276 bp, Glycine max
  unsure (1)..(276): unsure at all n locations
agctntgagccaattctaacgataataactttttttctgatgtccgattgagtcctgtaatatatcgacacgctcgaaattgaatgttgaagctctaagccagatcaaacaacaataaccttttactcggatgattgattgagtcccgttatataacgagacgctcgaaattgaatgttgaagctctgagccaattcaaacgacaataacctttttactccgatgtttgattgagtcccgtaaaatatcgagacgctcgaaattgaatgttgaacc

SEQ ID NO: 241919 - DNA, 487 bp, Glycine max
  unsure (1)..(487): unsure at all n locations
cttaattctatctgctatgggtctcagatggcaagatttgtgcttacccaagaagataggcactcccaaataagagaagggaagactcccaatcttaaagccgagaagttgcttgagagccatgattttcctacgagatatgtcatcgagaaagaaagtacacttctcaagactgatatgttgccatgaaacttatgcatagttgtgaaacaagtttaataagctatctaaggaccaagaattggccttataaaaaaccagaatgccattcgcgtaaagggtgtgcgaaggcattggaaaagaacacaagctagacatgggagagaaggccttagaatcaactaattgagaaatccctctacctaaaacatcttaagncagacaaataagaagcagagatagtaggtcttcctaacgaacacttcttttanagggtacataccataagggatcattaatgaagaagagagctagttgagacaaatgg

SEQ ID NO: 241920 - DNA, 379 bp, Glycine max
  unsure (1)..(379): unsure at all n locations
agcttgtgcgacttggaggctataacactaacttatttctttcgggtattggtctctggaaacaaagctagtgagcattgagttttatgaagttggtgggtattgtatagctctgtgagtaagtggttttgaattcaatacctaggtggataagggattcgtggcccaagtagcagatgttacaaatggaagatcagcttcaatgaacgaggaacanagaagggaagctgtaaagactgttgntggtngaattactgaagtcaaacatngtcggngtattcttttcatgggaaggntaggtctctctagacagcaactgatggntgtagccttcatattttctgctaagntcttgattcatggcattcttgcacttttt

SEQ ID NO: 241921 - DNA, 443 bp, Glycine max
  unsure (1)..(443): unsure at all n locations
agctctttcttctaagagaagnncacatgggatggtgatattgaagntaccgcaccgcaaaacagagaatcaaagggctgacattctgatcaaggcacttccaaaagtcaaatttgaatacttgagacaaaagcttggagtttgcagctccaaagtcaaggaggagtgttaagatgtgactgttggaactgtctaacaaactatagtagataagattttatgctatnttttaggaaaaataaaagtcatgttgactaataggataaagcagttntgatcctattctctaggcatgatatgttagtggcggtatctttctgttagtgatgttatctctntgttagcagttactatcttttccatgtttttaaataccgtggttcatatcataataaaacaaacctttgcagnctcacattcctttctttatgcctcctctcatt

SEQ ID NO: 241922 - DNA, 355 bp, Glycine max
  unsure (1)..(355): unsure at all n locations
atgtgcttcctttccttttcgattccaagtgctagtcattataggatatccattggagctcatgcttccaagaagatataacatatgtcaacctatatctaaacatgcacatcaacttcatataaatgttttcataaaattagtgaatactcaacaaatatcatggcggattattcgtacttccattatgattgcaagtgcgaggattggnttatattattgtattatttctatacatgagttgaaattattttctcatgtgatgcctatntattcacactgacatttgaactcgcacgacgaaagtctaaaagatgtacgcttttttttctaatatgtatatgtataattcatg

SEQ ID NO: 241923 - DNA, 161 bp, Glycine max
  unsure (1)..(161): unsure at all n locations
aagccnantgaaggagcttgaattttaggatccagaaaccccgctgtataaagatttacaacttttggagtgcctcctggaagaagaatcttcctctatatcccccctgtgttcaaccacattcaaaatcaccttgccaaatatctcggacataactccat

SEQ ID NO: 241924 - DNA, 207 bp, Glycine max
gaacaagcttggcgatcaacttgatccgcaagaagctagcgtctgttatctttatagagggatcttatcttatttttgaatacgaataacataagaattgcgcgaattcagacatagaatcttttccaacatcaaaataacattaaattaactttcgccagactcgaaagatatagaattagcatcaaatacgacaactaagtgatg

SEQ ID NO: 241925 - DNA, 125 bp, Glycine max
ttttttcgctacatggcacgggacctctatggaaagttcggtctaatcccctataaatacaatggaagaaaaaaaaaacgcttgctcatttaacaaaggggataagtgggaataattattatttg

SEQ ID NO: 241926 - DNA, 304 bp, Glycine max
  unsure (1)..(304): unsure at all n locations
ttctataccaccccacttctcctccacacttgtctctttatattatctanaggacgcggcaataacaacacaatagcatgcatataattcaatataacacacaaacactaataccaaaaataatccaaacattcataaggtatataaataatccacacatctctaagtcaaaccacatagaatccaatcataaaagactaaagctcaaataccaaaagataactaaagtgcagaaaatgatagcctagagatcatagccaaatacacggcttataagaaaagagaactatgaactaaacactaa

SEQ ID NO: 241927 - DNA, 235 bp, Glycine max
atgcccaataatccagtgataaagaataaaaagcacctttttttgaaaaaggacttttcagtattcatgtgttgttcaataactgaattcctactaaaaacctttacatcgcataacatagtttgaaactgagtaacaagcgggggattttgtataaaggcactacatcgttataagcgatgtacactaagtacatggattaaaacctgtacatagtagagaatttacacgttga

SEQ ID NO: 241928 - DNA, 173 bp, Glycine max
tttttttctttggaggagggaggactttagtatctttttccctttgaggtatgaggtaagcttacagtatgctgttattataacattctgctgtcttgttagaatctataattatcgaagatctcagaaattagtgttatggatctggaccttatcatttaggcctgtcttta

SEQ ID NO: 241929 - DNA, 295 bp, Glycine max
  unsure (1)..(295): unsure at all n locations
agcttaccttgtgtatgaatgatctatcccttgcacccaattttgtcttgaatttntgatngtttgattgaacctcgagcctgtacagcttatctccttctaccttgccttaagttgtatgagagcatcattcctgaaagggaaaatttggttcacatatatttgcctcaaatttgggggagtttattgggtgaaagcttccaacggtcagaaataatatcacacacaagagtttataagcacaacaatgtgttaaaaaaactataactatgtaataaaaactaaaatgtatgtt

SEQ ID NO: 241930 - DNA, 53 bp, Glycine max
  unsure (1)..(53): unsure at all n locations
ttttttaatatncaagaaaaggcgatggggctatattaccccttttttctttt

SEQ ID NO: 241931 - DNA, 286 bp, Glycine max
agcttgaaagtgtgtaacccaccatattatcatagaacggttttgtgttgtggcgaaattgaagcccctccaaagtagtgttgaagggtataccaccagctgcttgcccttcaatggcatattcgacgcaaagctcaaagttggctatatcgcggtgaggaatttcatgtgtctcccccatgggttgagagacatgtacatgatgaagctgtccgctctcaatgagtatgggagcggagttattgacatcctcaatgggagtgtacgccacatcgggtggtgtata

SEQ ID NO: 241932 - DNA, 73 bp, Glycine max
attggtcatgattttaatctcgttcattacctttttaccccttttacgggcttaaccatttatttaagtcatt

SEQ ID NO: 241933 - DNA, 510 bp, Glycine max
  unsure (1)..(510): unsure at all n locations
agcttaatcttgtttctctgtcacaaatgcattcttgaatatatatcttaaagtgaaaggaatctccttctagcttcgatcagaggcattagtattggtacaaggagtgggaactgaaaaatccttgcatggatcaatcaatcgcctagaaaatgggttgataattgtactcgatctatgaagaaacaaggatactttcaagggcagaatgatctcattntatttcttattccatgatatccttgacaaagtaggaaactaagatattcatgaattaataataacacatagaaacacatgtgttgaaccaaagaaaaattaatattatatcacttttagtagaacctatcaagttattcttacaagtgctaaccatctacagtgttaaccctctagatcattggcaataaaacagtgtacatgttgtaataagataagagactcatacaagacattgataacacttttgaatgagtgacacattatattttagtatactaactggtagta

SEQ ID NO: 241934 - DNA, 482 bp, Glycine max
  unsure (1)..(482): unsure at all n locations
agcttccacaacatccaagtaattcaacatccaattatcttatactaacacagccaagacaacagggcagaggcaaataactctgctccaaacacaaaccaatatcacagtttttcacattcaaataccccagtaacattctcttcattcctattcgttaaccgttggatcgactcgaaaattttactggaagtctctagtacacaattctacattttgaccgttgggatctgctagcaaatgtccagaaccccatatgtactacccttttcacaaccaaccatacgcaagcattnttctgcactnatacaaaaatctgctgcacatttcaacagcaaaattctgattaagggcagattcgaaaccactctgccttcatcaatttgccaaatcgaatctacaagcccaatcatgtataatcatgttaaccaaggacaacttagacttagcacacaaatctaagtatcaacacctcatttaat

SEQ ID NO: 241935 - DNA, 446 bp, Glycine max
agcttacctatgacatgtgttgtgtacctaagctctagcttctcaaggaagttctctcaaagaagcttctcaaggaagctctctcaagaaagcttctcaaggaagctacctagtctataaatagaagcatgtgtaacacttgctcgaactttgatgaatgaaagtcttatgagacacacttcacagttccacttctctccctcttttattccttcaatttcgtgttccccgcatctctctttctttctctccataaagaattctcttcaagcctcttatccaaggcacattcttggtggagaagctccttctttcatggcttattcccttgtggatggagcctacgctctcctcttctgctgtgccttccgctgcattccatggaggaaataacatttgacgacctcattgaacttaaagatcatcctcatataagtccacaagca

SEQ ID NO: 241936 - DNA, 159 bp, Glycine max
tagagctcagctacacattcctttcttattgcttagctcaccttcttgagatgagaaactagaagctatctactcaccctcctataatagctaagctcacctccctgacaaaaaacatgaaattcaaagacaattcttactacagagactactcaaaat

SEQ ID NO: 241937 - DNA, 341 bp, Glycine max
  unsure (1)..(341): unsure at all n locations
agcttgcttctacacaaaccacaaccattattttgngctgctctacatcccattcagcatgatgcacttttcaacactagcacagaccacaaaccggtataccaaaactctatttgattgtccaattatgtgtgctcaattcattgcttggatatctgcatgggagctgaaatcaaaatcatagatgaagacagtgtcagcagtttccaaatttatcattatctccacaagagcatgtggataagaagaaaacaattcaacatttgtcttcattaaagtgtgcaattgctgactagcaatccactacagaaacaaatccatcacttcttcatctgttttgt

SEQ ID NO: 241938 - DNA, 304 bp, Glycine max
  unsure (1)..(304): unsure at all n locations
agcttgccaccatggagtgtttcgactatgctcttgtgttgtggaacaagctacacaaggcgagagcaagagatgaagagcctatgggtgatacatgggcggagatgaaaaggatcatgaggaagcggtatgtgccggctagttactcaagggatgtgaaatttaagcttcataaactaacccaaggcaacaagggggttgaggagtatctcaaggaaatggatgtgctcatgattcaagcaaagattgaagaaaatgacgaggtaactatggctcaatctcttaatggctngactaatgatat

SEQ ID NO: 241939 - DNA, 319 bp, Glycine max
ggacatcttgactggcttttcaatctgacattcaccacatattctgctgatgcaatccaaccccccaatggcattggatataagactccaagaagattgggccaaaaatgcaagataaggccctatggttctcatgagccttatggtagatttcgggcccatgggctaagtatgagcccacttatcttggtacatattagattaaagtttcattaattttgggccttgtatttatggctccataatgtaggtagggtaccctacaaatataggaattttcaacccttgtattttatggcacctagactagtttttgtat

SEQ ID NO: 241940 - DNA, 276 bp, Glycine max
  unsure (1)..(276): unsure at all n locations
gtgttcctgttctgtctacctatagtgcagaatgtcatgaanaaaacacgaactctctccagactgtctgaaatatgatattcataaaaacattggaatgcagcaagcgcatcagtgagctcaaatggcataactagccactcataatgtccatggtgagggctagaaagtggtttattcatatgctgagctcccacataatctgggataaccacaccttagggcaacttgtacaaaaacaactccancaactcatcatcaattcatcactattgg

SEQ ID NO: 241941 - DNA, 351 bp, Glycine max
acaaggagacaacacctttcaatattttatttgtcaaatatacgggctgatacacaattgaaataggctaacttggcaacgtgccgcaatgattgtccctatgcaaccgggccacttctcaccctctacttagcattatattcctggagacctacaaggtactttacaggccctgttttttgactatggaaaaggggggcttatccaaaagcacccggaaatccattgacagaccttctcatatataacaaattggtttccctgatagacttctttctttatactgttgaaaacatctataccgtggggacattcaaatcatgaacattggtgcatcaaaaatttattgga

SEQ ID NO: 241942 - DNA, 350 bp, Glycine max
  unsure (1)..(350): unsure at all n locations
tgctgactcagtaaatttgcaactacacactgagcgtgtatgcgcactgaacgcaagtaagtgagtgggcactaagcaaaccatgtgtgctaagcgccattttgcctgactgcaagtactctatgccgtatcgtcacactgaggggacacccttctaataagcgacaacagctcactaagcaagcctagtgtgctaagcgcgaaccatcaaactntaacttgttctgtctatcgcatgctttgatctctactaaacaaaccatcaaacatcaggtgaataactacgttaaggcacctactacacacaaactcagagctcaagcaagtgtaagtcatacatacaactaaca

SEQ ID NO: 241943 - DNA, 315 bp, Glycine max
  unsure (1)..(315): unsure at all n locations
agctnngcctgagaggctaaagactctctctcttctcttttattgnttgtaaagaagacttaaggtatcttttttttcttcactcatatcatgggaaggcatttatcaattatcaagcctatgcattggtatgctttcaccgaagcttggtgtgggataatatgctctaagtgtaatacttattggagggagggtttggtatctggatctagtgtatggatgccttaccctatggtaggtattttgctctgagttttctttttttttttattgtactttggggtatctctggcacctaatatgtcttcaatatgt

SEQ ID NO: 241944 - DNA, 398 bp, Glycine max
  unsure (1)..(398): unsure at all n locations
gaacactctaagatttatactgggtcttttcaaccactgagactacattcaattnttgacaacccactaaatttcactaactttatcaaaagttacaagtattcttctgtttcacttctgactcttacaaagacaagctctacaccaaatgtgacttcaaccaagtattttttgtcctatataagaattgttgtaagtttgcataatgactaacagtcttacaaatggatattacactgaacactttactcttntctctcatgatntacactacaaacgtgtattgagagcttttatctatatagatatttgcagaaatctttacaataaagaacaaagaatatttacaagttgattgtatcttgttcttcaaaacttcttattatagcatcacctta

SEQ ID NO: 241945 - DNA, 239 bp, Glycine max
  unsure (1)..(239): unsure at all n locations
actataacaagagaatgtgaaccagtctgtctggatgcgaggaccctcgaaaggcatcacaaagaaggatcaataaagaaacaaccgatgcaagaagcaaactatcggctntgtctagactcaaagatgtggataagctgtgatgctaccgatctgtggcagcactctttgtgtagaaactgaatcttcaagaaggagcttcccacccctacaaaagaagcagcgacagagcaacatgc

SEQ ID NO: 241946 - DNA, 236 bp, Glycine max
taaatcttacccatacacattgtagcactgtatgaatatcaccacacttaaactctactagtttgcattagatcccacgtgcagctggcgacattcgcactgagaacaagtactgtgattatactctcctgtgatattttctttttgattgcataacaaaaactacctatattctcactcatgtgctatgtggccctggagaactgtcgctatctctcattctttgacccttcata

SEQ ID NO: 241947 - DNA, 285 bp, Glycine max
  unsure (1)..(285): unsure at all n locations
gactgcagcatgcaagctcggattcattctactacggaatatacctttctattatggagcccaacccactcaccctcgctcagaactagctgttttcttcctctatagcctttntatgacacacctttggtcgggtctctatttgggtcttaaccctctcatgctacttctttacaaactatgacctagattccccttctttatgtataaaagacaggtccatcgggaggggaatgaggtctaacagcgtcaggggagtaaactcatagacaacctcaaaagggg

SEQ ID NO: 241948 - DNA, 226 bp, Glycine max
tggagctgacccatcaacagacctaactcttttagactggtgattcctacgctctggaccctgacttgataaacctcttttaaacgaaggcatttgacttgatcccctgttttactaaagtgaacaaaaattggtgcgaattataactccaacatctatcatgggtggaatggatgaatgcgtgaagaaaagcatatgacacagatgcaatttatgaatatgggag

SEQ ID NO: 241949 - DNA, 317 bp, Glycine max
  unsure (1)..(317): unsure at all n locations
tgangcatgcaagcttgatcactaaacanacaccagctcaattcacaagaatttgattttatgaatactntaagaacttttatgctcgtaaacttgaaagaaagtcttacagagatgtcttgacaatagagcatcacaattgaagttcttaaaattagtaagaaaataaatatctccactaattataagtgtgatatgcgcacagtagaaaatatagattgatgacctaaattagtttatatatgagtaatgtgtggagtgcaccattactctaanattactgaccggaataatggacactacgcggactggtattt

SEQ ID NO: 241950 - DNA, 130 bp, Glycine max
tctatatatacacagcttactggtgatggatttatgttccactcgctgaatcaccactttgaaccttgtgtggaaccaacagcttatatgatcgcatcacatccaaagacgttattatgaaacgcacctt

SEQ ID NO: 241951 - DNA, 461 bp, Glycine max
  unsure (1)..(461): unsure at all n locations
cctatattcatagatctatgtttgtatctattgcggctctgtgactacttcatgtgattgctgattngatgccacttaaatgaacgtaactgcaattgtgtggactcggggatgcatatagaatatgtcattatcaatcgaagggtaaaaaattacagaaacttgtgaataagctggatctctgtctttggataattgcctaaattctaaaactcatataacttggacataatgcacacacttctaatgtgttgctgttttatagntncttctgtgcactattcagaggtaccttgttccttagctttataccacatctgtttgtgctggacaaatagggaactggatttggttttactatgatgatccctaccaacataataaacacgttgttaaatggctactagtacacttcattgggggggaatgatattcatataaattanactggcggatatcaa

SEQ ID NO: 241952 - DNA, 229 bp, Glycine max
ggggaaaaggtgctctattttttttagccaatcattcatcaatatgtacaagagtacgtactctttttgagaacgagtacttttcgtaaaatctgtatgccacttacacgtttcaaacgagtacaatatgtacatcattcaaacgagtatgtatctacacggttaaaatgtgtacatcctattcatatgccggttttacatcgttgaaacctgtattgcagtaattctt

SEQ ID NO: 241953 - DNA, 312 bp, Glycine max
tcctgactcaccataaaccttgatctatggttataatgtcaatccttaccctcgggagcaaaaaagaaaagaaagaaaatttccaatcttagaggaagcacaaaaaaaggagagaaggaaaatttccaatcaaaggaacggaaattccctatcatagagtgggagaaagccaaaagaaaagaaagaaaattcccaatcaaagaatgggagaaagaaaaaaaaacaagttaaaaagaagaaagcttatagatcgaaagaatatataagaaatgtgcagaaaggtcgttggaccaaacaatatctgaacaatac

SEQ ID NO: 241954 - DNA, 214 bp, Glycine max
  unsure (1)..(214): unsure at all n locations
tttctagtcgatcactcacatataattccattcttcccatttgttttngaaattatgcttatcttaaaattaagttggatactcatgtgagttcttgatttaatccctatttctcttcccctttggcattcaccaaaaagccaagtgcgttacgagtagaaaacattccttaattacttatcataccagagaacagaaaacaattaagccacat

SEQ ID NO: 241955 - DNA, 356 bp, Glycine max
  unsure (1)..(356): unsure at all n locations
catgcaatcctgtataatggctatacacgacacatgccacggttttgtttggttctatgataacaaggatgccccacattatttccatgacacacacgccacaatgatgacttggaaatcttatgcaaaactggtcatgcatgcacctatgtggacgctcaacagtcaacacactatggtcatgtgagagtatggctcaagattcatttcctctattgtaaaacaacccacaggtcccaaaacatgttcttttatccatttgcgcattcatcccactccatctcgggcgtccagggatatatcacagcattcactcttcangtgtagacacactttccaaatataggttatgatca

SEQ ID NO: 241956 - DNA, 406 bp, Glycine max
tgggccacaggggcaatggttcatatgaaatcacaagatcctgctatgttaatacaaatttatttcaatcattaacagcccggacagaattactataaacagtctacatcgtaactgatgaaagacaaaatcactgttgcggagacaaccaaatatggagtctgaatgtccctttctgtttctttcacaactattgcctctaatgttacaatgcatggtgacagagatcctctaggttatcacgacgggaacgtattatttggtcttctctgacaaagagaaatgtgtcttacgatgggagatatataaagtcagtgtgatatacaccactccccactcttcaaatattggtggatcaatccggatgccaaatatgattcatacgatttacatgaaatacattttt

SEQ ID NO: 241957 - DNA, 387 bp, Glycine max
  unsure (1)..(387): unsure at all n locations
accttgtcagtacgtgtgtttgtgttggagctttantattttataatcttgnattgaggagaaagtctacctttgctctaatgtcttgtaggacgcttgatcacctcaatgttattgtgccccacaagggtaaattcagaaaggatgatcatggcacgatgaagtttgttgattgtgagttctatgtttgggaggacaatgaagtggatttgatgataatgtgaactattattgacttgtgtaaatattgtggaggttattcaagatatttctgtgtgtattntttggaacctgataagtttggatggtggcttgctttatctggagaatgaaagacacatcttgcacattgtgtaacactaagtatgtgtcaccctaacaaagatg

SEQ ID NO: 241958 - DNA, 418 bp, Glycine max
  unsure (1)..(418): unsure at all n locations
tccctaacttgcctaagccacccttntggttctcaacctatcgggtaaggacttcttgtctgcctctaagtttgcttgaagctcatgcatggtgtctgtcattgccatggcgtacggttcagaggtatatgttgttctcgtttgtcatgaccttgtagcaacaacaaatgaaagaaactgtgtagcttctcgaacaatacatttcaaggacaataaatatttataggattttcaatcgatagattaagtcaattnaacttttgatcttacaactcactttttctctcaaaagactacttttaacattgatcaaatgatgtcacatgaattcctatacttcttatttattaattgaaacacagtcaatcacacgatcttattctgatgtttaaactttactcgcatttatggaccccca

SEQ ID NO: 241959 - DNA, 380 bp, Glycine max
  unsure (1)..(380): unsure at all n locations
gctctacctttaactacaataccatcgcctatctaaactatatataattaanatatgttttctatgcttctaatagacttgaactttatatatttgatcaaataaagagtacactagatgaatttctcaataaatattaatagaagaaaaaaataataaggtaaaatgaataaaatttctttgtaagttatataacttcaactaacaagctaattgtaactcataagtacttactgagaagtttatccaaataagggttaaagcttaatcagataacttcaattaacaagctaattctaactccaagtagagtatataacttcaactaaccatttttctggcgttttcaaaatcatgtgtgttccaaagcactgatgaac

SEQ ID NO: 241960 - DNA, 297 bp, Glycine max
  unsure (1)..(297): unsure at all n locations
ttctctataattgcatcacctctctatgttctggngaagaagaatgtggcatttacttggcgtgataaacaagagcaagcctctgctctgctcacagaaaagcttactaaggcacttgttctagctcttcctgacttttctaaaacttttgagctagaatgtgatgccttggattgggagttggagctgtattgttacaaggtgggcaccctattgcttattttagtgaaaaacttcatagtgccaccctcaactaccncacctatgataaagagctttatgccttaataagagctt

SEQ ID NO: 241961 - DNA, 326 bp, Glycine max
agcttcttatccaaagctcatcttggaggagaatctccttcttctatggcttattccctagaggatggcgcctcctctcacctcttctcctttgtcttctactgcatctgcatggcggaaaatcaccattaaaggacctcattgaagctcaaagatccagcctccatagaagcaccacaagcaagcttccatcaattcacaagctgcgagcctgatgacatgcaggaaccatctggtccctcactattaaactttcttttgctatctctaagactaaagcatgatagcacgcagagaataacatcgtcttctgcgccttttgtcat

SEQ ID NO: 241962 - DNA, 351 bp, Glycine max
  unsure (1)..(351): unsure at all n locations
acacctctctatagctaggtcacctgctcgagatgataatctagagcttagctacacaccccctataatagctaagctcacccccatgacaaanaacatgaaaataccaaaaaaaagtccttactacaaagaatactcaaaatgccccgaaatacaaggctaaaaccctatactactagaatggccaaaatacaaggcccaaacgaaggagaaagctattctaatatttacaaagaagagtagatccaacctttacccatgggctcaaaaatctaccctaagggtcatgagaatcctanggccttctttagtagctctaacccaagcctcttggagtcttctatccaatac

SEQ ID NO: 241963 - DNA, 298 bp, Glycine max
  unsure (1)..(298): unsure at all n locations
tcttaagncacctgcagctgcagctttaccaaggactacctgtattattctttttataccctttcgagccttgnttccctttccttgctttgaagctcactacaagccttaagtgagaaaccatgatattaccatatccttaaagaattntggagctttggaattgtttgagaataattgtgtgggagttttgtttcattggacaacttgttttgntgactatgcttcatgatgtatcttgggccatacttgatgtacattgtatattgggtaaatgttggacatgctgaatgaaatg

SEQ ID NO: 241964 - DNA, 433 bp, Glycine max
  unsure (1)..(433): unsure at all n locations
cggagagggtgcttcaatggaggaaaagaaagagggagagaaagagataggtgggagcatgacattgaaggaagaacaagggagagaagttgaactttgagttgtgtctcacaagactctcattcatcatagttacaacacgtgttacacatgcttctatttatagactaggtagcttccttgagaagctctcttgagaaaactctcttgagaagcttctttgagaaaaattccttgagaagctagagcttagctacacacacccctcttataactaagctcacctcctttgagaagcttcttaagaagattcctaaagaagctagagcttagctacacatacctctctaatagctaagctcacctcctcgagatgagaagctggaacttagctacacacncnctataatagctaagctcacccccatgacaa

SEQ ID NO: 241965 - DNA, 224 bp, Glycine max
ctcttcccttgcagctagagtgcattgatgcgaccccacagagcttcgcgaaacaaggtccggccatactctttcatgcgagccctcttggcctcttgctccaaggctcgcgcgagacgtgcattctcttccccgaatccggcacactccttacggatgcgtgtagcggacaactcgaacttctccttgacaagtatcgtcttacctaactcgcttcgagagct

SEQ ID NO: 241966 - DNA, 413 bp, Glycine max
  unsure (1)..(413): unsure at all n locations
tttttcatgttcaaatcanatcagtgttttaaatgttgttcttttatcaagcccaagcaaaaacatctaaattcattaggtattttggaaagccattcattgtttttcattctcaatctttccaaaacaaaatcactttgttgtgttctgatcatcaaaagtaagtttcaaaaacatcggttgttgattctttccaaagcatgttatgtccaagaaatttttttgtttaagtcccaaaaatagttatatataatctacaactacaataacaaaaccaaatatatcaaagcacgtgtaaataagtcaaaaatacaaactcgcataagtttgcaaacaaaattcaaagcagtaaataaccgtatanaatactaaaatttaataaaaagcaataaatgaacataaagacaagtcac

SEQ ID NO: 241967 - DNA, 226 bp, Glycine max
aaaacaacaacaatatcaacattgtagtaatcaatgcgcaacatgcctatgaatcatattataattcttaaccactttgagttcgcaatcttaactaaaaatgcattctctacagtcaaattagggagtagtatactaacttgttgtataccaagctagtatcccactagattatggtcttccatgtatagggcggcatatgtagcatagtcctgtctaactaaaa

SEQ ID NO: 241968 - DNA, 344 bp, Glycine max
tattttgatagatataacaaatccaatgttaaagctgatcttatgcctataaaacatgtttgcaaatatggttgatgtttaaccaatcagatgaatcatgatctgatcacattaaatgaattcagactattaatacttgtgctgaataattttgcgagacttctctagattattgatctatataataatgagtcagtttgtattctcattgctaaaaacatttatgcaaactgttgacaaagagggttctctggggtcactgtttgaaaaatgattcactagaaactgtttatgcccacaccttttaaccagctaaaaaaaattgttaaacacatttgtgaagc

SEQ ID NO: 241969 - DNA, 192 bp, Glycine max
tggactgaatcatataaatgttgattcagcccgacatatgactgagagaagctattaaacgcttgaacttggatatatacataagtgacattaaaacttgtcgatggaattaccctacccgatcaggtcttaaagatgaatctgtcggaggcaacttctcctggttgtaaacttaattgcacccttaccatc

SEQ ID NO: 241970 - DNA, 385 bp, Glycine max
ccacagaccgacccgacgttcacatgtatcgagcggcctcctgaaatgcccttggttgcaagtgttacacaatcttggttcatgcctcaactgctacatgaaaaagtattccaaggtgtgatgagttacttcaagaaaaatgctttgactttacatgcatttcctgcacaacacacagcttatgtcagtgatattatcaacaattgttctctttggcacattatccaaaggtttgagcctattatatatagggctacctccatataaacccttttattttggatggtagattctttgtcggcctaattatcctgatctaaaataaattcctactccttatgcacctacaatttaaacacaacaactgaacgaattttgccttttt

SEQ ID NO: 241971 - DNA, 244 bp, Glycine max
gagactaccatgtttttgggagccctggataactcttgctatgtaaaaggattttaagtttatattgttgaagtgatgttgatgtcagctatacttttttttgtgcctaaaactcaacatctacttataattttagatttacacttgatttaattggtcaaagagctctaaactgttcgacgctggatacttaaaatcctttctattttgttattcaataaccctagtactctgaaagctttag

SEQ ID NO: 241972 - DNA, 268 bp, Glycine max
aatagcaagaataagagaatataccaaatcaatatctttctctaaatttctccttactttattttatcaattcatattaattagaagaagtactcaatttatagggttcacgctcaacacaatagcatatcatattcacaacaattggtttgtcaaacatatataattcactgtaaacaattataggataaaatgaaattgcaaaacacccataaactcttccaattgatatctctaaggatccctcacatgttctactaagtccaat

SEQ ID NO: 241973 - DNA, 425 bp, Glycine max
  unsure (1)..(425): unsure at all n locations
agcctttaatgtctctccaccaatgagaataagcccttctgtctctattatatcgaaattctgaccaccccatattagaggtaaaactctaacctatagctgatgctgatcagatgcaaaagcccataaccatctacccaacaaagctaagttgaatttggagatattctttatccccagtccnccatcagacttaggcaaacaaatatcatcccatttcacccaaaggatttttttatgatcaatagctccaccccacagaaaattcctttgaaaggatatcagcttattgacaacccttctgaagtatcntaaagacagaaaggagataaattgggaaggctttgaggacacaacttatcagaagaatcctcccccgcatggatatatttttctgagcccatttggctaatcttgagttgaat

SEQ ID NO: 241974 - DNA, 407 bp, Glycine max
  unsure (1)..(407): unsure at all n locations
tgaattggatcaaattatgatctaatcaaaaatgaattgggtctttttttctaattagctcaaaaaaaaaaataagtatattattttataaaactaatttggtttactaaattattttgaccaaaccaatttgattaatccaactcatttttatttaaatatttctttatttgaaaaaattagttcgaaaaatagcttgaaattaattctactcttagaactagtcaaaattaggttaaaaattgattaacaaattaattcaattaaccattaattgtttaaaattaaattaattctaaaatagttnttaaatcaatcttaatttattaaatattaaatcgaactactaatacaattcaaattaacttaatttcgatttcatataaactaatttttcatgtcctaca

SEQ ID NO: 241975 - DNA, 412 bp, Glycine max
aaagcggagtaataggctgcctctatttttatattaagggccaatcgatttcatacagattcatggaaccaaaggagttaccgttacatcaaatttattggtagaataccgatgtttacttatcatacgtcaaaaatcgatggaattgaacgacgtaacatcggtttttcagaaccgatgtaacgaattaatgtaacatcgattgtcccagaaccgatgtaatgtcaatcattacctcagtttagaaaatgatgttacgaatacacttttttacattatgtaccggttatttacatcgatttgtcaaaccatgtaattgcatgtaaactaactttgtgtggatgtcagtctactataataaaataatatttacatacatgtggttagtagctaaaccacaaaatctataaag

SEQ ID NO: 241976 - DNA, 466 bp, Glycine max
  unsure (1)..(466): unsure at all n locations
gagcatgcactccacatcaagcaagncatctctaagctcttatgctttttatataactcacaagttggagaatttgcttggaaaccttgtagctgcgcttaaagtacgatctgcagaagatccacacatgaatcaagccttataagctatagatcaagaggtatgaatttataattctacttattcaacgatttaactatgatatgatattctacaaagacaaaacattctcttaacttacggacctacaaatgattctactaatgaagatcatctaacttcaaaccatccttactagaggtgagtggaaatttagaccggaatgaagatgccagccggcgaccaaatgttattccaagaacatgaattatatggtcatgaagatgtgagccggcgacaaatgtcaagtgtgtggctttactttgccatttgccacaactcgatagctctttatcacctaaaacta

SEQ ID NO: 241977 - DNA, 142 bp, Glycine max
gaataacgacctgatgaacgccatgattgtatatacaatccaattgaccaaaaagcttaccttgaattataactgcatccttcgcaccctgtgcgagctaaatgatattttcacaatcgaaccctgaacttaaaagactatc

SEQ ID NO: 241978 - DNA, 165 bp, Glycine max
aatgaacgggttgaatattttgtataacatcaaaatctcattaccaccatagtacaatatacaattacctgaccaattggcaattgttcattgaccctcgctctgttcataaactttatataccagaatgaacaagccaacttaatgcgataaaatgggtcatac

SEQ ID NO: 241979 - DNA, 131 bp, Glycine max
  unsure (1)..(131): unsure at all n locations
ccttcaatattacactaaatacgccttcctgatcatcatagtctaaacacggtgttttttatctaacattaacatggggtaatcattacgcattanaattacaacgttatcccatgccaatacaatttagc

SEQ ID NO: 241980 - DNA, 312 bp, Glycine max
  unsure (1)..(312): unsure at all n locations
gcacaacaagtttgtccacatgcacaatgcgcgcataaacccaccatcccctgtagcccaccttcaactgagctcacgtactcccacgtagcccatattctcgtttttctaacaccgggtgcccatcaatcctcccaagctttcccaacatcaaagtaatacaacattcaaacagcacaaactatcacagccaagataacatagcaaaggcagaanactctgccaaaacaccaaccaaaatcacagctgttctcacttatagaccccagtaacaattccttcgttccattccgtaaccgttggatcgactcc

SEQ ID NO: 241981 - DNA, 251 bp, Glycine max
  unsure (1)..(251): unsure at all n locations
ccccattacccgataccacaccaccccccgcggtgtctgtccgacacttanacacccaataagccaacaaaaaaatcttttacccgcctcggcggaactcacacagacacaaacacagactacaccccacaaaaaaaacaaaaccacacctgagaacaaatccacgactcacgcgagaaaaagggaaggaggcagaagagggaaagaattagaagcgacaaaagaacacgacagacaggaggcgaaaaagc

SEQ ID NO: 241982 - DNA, 232 bp, Glycine max
  unsure (1)..(232): unsure at all n locations
gcatgcaagctngctctnaattacattgacgttggtatagaggagatgatgttatattctcattttgccttaagagaaacgtcccactggttaaactaactctacaaatgttcgccttcgcaggaatggccccgaagaagcttgtctcatagaggtccatgaaagacaaggcggccgaaggaactaattccgccctggagtacgacaggcaccgctttaagagcgttgtaca

SEQ ID NO: 241983 - DNA, 406 bp, Glycine max
  unsure (1)..(406): unsure at all n locations
ctgcagcttcccaccaatcttcgatatctttcaagatcagaataatggcttctcctgattaggtaagcaattttgatccatgggactatcaattggtctaccatctgacataccagtttctttaagtatgtctaacgcatacttcctttgtgagatgataatcccatcttttgactgagcaacttcaattccaagaaaatatttaagttttttcaaatccttattctgaaaatggctaaataaatgttccttcagttgagcaatttttcctaggtcatttcctgtgatgactatatcatctacatagatcaccaagtaaacacatctactcgatgaggtatacagtagaaaactgaatggtctgttcacttcgtttatcccnaagcctgaacaactgactgaattt

SEQ ID NO: 241984 - DNA, 226 bp, Glycine max
ccataggaattggacactttgccgcttctgtcagcatttgagcctctaccattaccatgaaaaggttgacctcctctctctctattcgatgataaattacttggatagccattcttttttcaacaatcttcaacaacattgtcattctttccataatagctacaccaatttctagaatgagaagcactagtagcattaatcaagctgagattattcaaataacagt

SEQ ID NO: 241985 - DNA, 310 bp, Glycine max
  unsure (1)..(310): unsure at all n locations
gcaagcttgagctaattcaaacgacaataatgtcttgttctgttgtttgttgagctcccaaatacatcgagacgctcgtaaatgactgttgaagctctcagcaaatctcaacgacaattagcttgttactcagatgtctgantaagtctcgtaatatatcgagatgatcgaaattgaatcttgaagcgctgagctagattaaacgacaataactttttgctcggatgtctgattgagttccgtaatctattgagatgctcgaaagtgaatgttgaacctcataggtatttcaacgaccataactttttac

SEQ ID NO: 241986 - DNA, 348 bp, Glycine max
  unsure (1)..(348): unsure at all n locations
gccccctgatatatttgaaggactcatggacactatgaatttccttattcttccgataaaggcagaggtgccatgttttcaaaacacgtactaacgcatacaactccttatcataagttgaatagntaacggtacgaccacttaanctctcactaaaataagcaattggatggccttcttgcataaacacaagcccaatcccaacatttgaagcatcacactcaanttcaaaagatttttgaaagtttggcacncaagtatggaggcattagttagcctttgcttaagaacaatgaaagcttcttcttggttctctctccatttgaaaccaacatttttcttgagcac

SEQ ID NO: 241987 - DNA, 285 bp, Glycine max
  unsure (1)..(285): unsure at all n locations
actctgactcgagncatcaagagagtataaatatgtgtttctggtatgagctcgaaaacaatgagctatcatctatctttcaatctatctctcaatatcttctttcatctctttcaacagagctgtctgaaccatctctcttcatctatctaaaagtttgtgggcaacactttctctcccaagagaagttctgtgttcacaaacttgcgctattcatccttatcattctcttctctcttcgccaaaagaaggaaggactaaccgcctgaattcgtttgtgcctct

SEQ ID NO: 241988 - DNA, 453 bp, Glycine max
  unsure (1)..(453): unsure at all n locations
gagctcctggaagtcaaccaataaaggagcaaaagtccacgaggcacggaggcttgcgtggcagctggccaactaactatcttggaaataattatctgaaaaattccctccagtaatcgattacaagacttgtgtaatcgattataggttntaaaatttgaatcaaaatgtttagtaactggctggaattgattaccatttatgtgtaatcgattacacagtgtaaaatttaaattccaatttgtaatggctgttgtaaatcgtttttgccactggtaatcgattacatactctggtaatcgattaccagagtgtanatctcttgaanaagacattcttgactgtacgcaacagtcataagtcacattgtattgttggcctgtgagtagattcttgtgaagagtctaccctttctttctctctgtaatcacgatgtagcgcactgatctggat

SEQ ID NO: 241989 - DNA, 342 bp, Glycine max
  unsure (1)..(342): unsure at all n locations
catgggtgtggattatacctataatcagcacattctttctcaatcttcaacttgncatggttctgaaagtgcatcacagataatacataagagcttcagctgtacctcttatgatgggaaacctgtgttctcctttgaacctcaccctgacactctcatggactttcaatgccatgtcttgaactcccctgaaaacactttcttcgcagcacaaatgaagagagtgtgcagtacatgagacttgcangttcactaccaaacctattgatagcatttcttttcatcgtaactcttattatagaatcaaaaaacatgtcatgtaatccattacaaaattacatg

SEQ ID NO: 241990 - DNA, 463 bp, Glycine max
  unsure (1)..(463): unsure at all n locations
tgctattggttttttatatatcgcaatcttatgtttattctttntgtgacagatcaaaattgatagaaaataacgttttttatgaataacataaagaaaaatttcctttaagaaaaactcttcacgaaaaggagaaagaaactgtgaaattgatcgaatataatggttgatcgagcacaggatgtggagaagaaaataantagcacaacaattaatttaacaatgcgcactttcacacaaaattttgtcaatattagatagaagaccaatccctttggagttgaacatctcgtaattatgattactcggccgttaacctacataatagttgttgactaaagtagaacgactctttgtcaaaacgttgagatatcaattctttctttcaccaacttgacgagatagtagtaatctaagcccacttcatcatcaattacctcacttatcactcttatttaattat

SEQ ID NO: 241991 - DNA, 134 bp, Glycine max
  unsure (1)..(134): unsure at all n locations
cgggggggccccccggcctgtgtgactgcccgacnacccgacccaagggcgaaatttttcgagacaaacaccggtgcacagccgaccgaaagcagagcccgatacaagaagaacccggaaaacaaaggccagca

SEQ ID NO: 241992 - DNA, 178 bp, Glycine max
  unsure (1)..(178): unsure at all n locations
actcagcttctaccaatggacttaccttgaataattcctctgatagctctcttgatccttgnttccctttccttggtttgaagctcactacaagccttatatgaaaaaccatgatatcaccatattcttaaggaattttggagctttggaattgttttgggaataagtgtggggggtt

SEQ ID NO: 241993 - DNA, 409 bp, Glycine max
  unsure (1)..(409): unsure at all n locations
agcttcttgatanagcctcttaatgaagcttctcaaggaagctacatgaactgtctcggtaaaaacgctgcccaaccttcgttaaccgttggatcttctcaaaatttggtttgcagcttcataagacacttgtccacgatttgaccgttgggatctttgcaagaatgtgtggagtgtgcgcgaagcttccattcccgagagcatttctcacttgagcgtttcagcctttgctttcgtgtagcttaagaaaaacatcatttcttctcctttctttcttccaaagtcatttctaacgtcccaagcactttttccatcacccacaaccaccattagccaccacaaacttgccgttgtctctgttgaaacccccatcgagaggaacccttcaaccgaaacggaatcttccaac

SEQ ID NO: 241994 - DNA, 406 bp, Glycine max
  unsure (1)..(406): unsure at all n locations
taagcttgattccaccagcttcagcaatggcaccctatgatggaatacttcaaactttaagcattaaatttcaacanatgaaaaactaaataagatacaaaatccaaattccaaccttgtgctcttctccaacagagagattccataatccttcagcagcctcttcaaccactagcttgttcattgacctggccaacccagcaagaatctcaatcccaccctcttctgcaacagctttggccacattggcattgacggacaaatttgcaatggcctatcgcaaattagaaagttgggaggacaaatacacattgatngtgtcagaattttcttagcttcgatttctagtgaaatatgcatgtaaaagcatcnaaattaagagtacctcaacaaaatgcaatatcaa

SEQ ID NO: 241995 - DNA, 324 bp, Glycine max
  unsure (1)..(324): unsure at all n locations
tgagaagaatcctaaagaagctagagctcagctacacatttctctctaatagctaagctcacctgctggagatgacaagctagagcttatctacacaccctctataatagctaagctcacccccattccacaaatacatgagaatacgaaacagtccctactataaagactactcaaaatgccttgaaatacaacgctaaaaccctatactactagaatggccaaaatacaatgcccaaaagaaagaaaaacctattctaatatttaccaagaagagtggatgcaaccttgacncctgggctcaaaatctaccctaaggctgat

SEQ ID NO: 241996 - DNA, 382 bp, Glycine max
  unsure (1)..(382): unsure at all n locations
agcttcttagtctcacatgatgcaactgagtttgtagctacctcatgcacttctcttatgactatggcatcatttctggcgcttaactgctgagaggtggaagccatcttctcaattaaatttctggcttcagcaagaatcatgtcttccagggcttcaccactggcagcatctatcatacttctctccatattactgagtncttcataaaaatattggagaagaaactgcttcgaaatctgatggtgagggcaactggcacatagtttcttaaatcgcttccagtactcatacaggctctcttcactgagttgctaatacctgagatatcttcttgatggcttgggccttggagccggaaaatttttctagaatactcttt

SEQ ID NO: 241997 - DNA, 476 bp, Glycine max
ggcttcttccccccccgcgggtttatcgatcgtcggacttaagcacgagcagcaacttgcgtaatgcccatgtatacaagatttatttgtctcctttgctgagtggcctcattagcactttgttagttgaaataatggcccaaacttttcgtaaagtggctgtcaattctcttgcgatttgcaccacctatgggcttgttttcaattacagaaattaaagtctgatcaggtgtacactctacgattggagctgcctcttggctgaccaaagagttgcacaatcttccatatgtttatgtgtcttaattctagctttaattacgtataatgacacccataattggcgctacaattcttgtctaattaaggttatgacaccataattgctgtattggtgacattcacttgtgaaccacttatgtcatcctattatatgtgcccattttataaaaaaataaccttgaattgaattttat

SEQ ID NO: 241998 - DNA, 387 bp, Glycine max
cgtgtctatcattggtatcatctccctctccatcattgagggtgctacttgagctgccaaatccctccaccttcaagcgtattctttgaaagattcatggtccttcttgcacatggtctggagcttcattctattccgagccatattagaactgtactgatactgtctaatgaagggaaccattaaggcctctcaagaatggacccgagaagggtccagaatagtataccaggtgacggctgcccagtaagactttcctagaagaaatgcatcaaaatttttcattttttgagatgcccctattttctgctgacattttcaagtgatcttatggcaagtagccccttgacttatcgaaattgacacttgacttcgaggatacaacgc

SEQ ID NO: 241999 - DNA, 393 bp, Glycine max
agcttacctcgacaccaacagtgacaatggcagcgagagtggctgtgataaataatagtcgcacaaggaaccaatactattaatgtgtggaattgcgagactggcagtgacaatggcagcgagatgcggacgcacggagttgcgatgaatacgatgacgcgggcgacactagagttgcggcagagacttgaatgaattaaggcgtggagccaataatatttttaaaaattgagtcgttaacatctggtgttccatcaaaaccgatgttaacacagtgatgtttacgttaacatccgttctttttataataaaacaattgatggtaacttatagattaccaacatcgggtttgtcaaaatacccgatgttaaggaagggatgttaaccttaaca

SEQ ID NO: 242000 - DNA, 268 bp, Glycine max
  unsure (1)..(268): unsure at all n locations
caagatgttccacatgcacaatgcgcgcataaacccaccatcccctggtgcgccactcaacagagcgcacgaactcccacgtaaaccatacccctcantcactcaacactgggttcccattaattctcccaagcgtccacaagagccaagcaaaacaacattcacacaagacacgctatcacagtccagccaaacagaacatagagcaaagacttggccaaacaccaaccaaaaatcacaagctttcccactcaaagaccccagaaca

SEQ ID NO: 242001 - DNA, 369 bp, Glycine max
tagccaaaatccaagtggtcaggaccattcatgatctaagaagtcatgccacatggagcaatgatattagaggacccaaccaccaaaagaacatggaccatgaatggttacaaaatcaaacactacttaagcggtgtctcgagaggctgaccaccgtcgtccaactgcaagaagctcgaaccacaacaacgatgtcgcacctaagaaacataaacaatatctctcggaggcaactaacacgtctgacttaggttcaagtggcttacagcttcttgaccacaaccagccaaaaacctattcgcacacagatatcaaataagtattaagttgatacaaaaaggggacattacccgctggcgatgggactcg

SEQ ID NO: 242002 - DNA, 407 bp, Glycine max
ctaagcttctcaatggctttgtctaccctaattcgttcgggatctttgttgtggatgcactttcgttgacactttgagacttggacccatcgcttgcaattcgtgaagttcggacatgccgaaatcaaaagaacattgttcgcaatcgtgaattcatacatgccgaaatcaaaaaagattgtatgcatcatgagttccgtaacatttcgaagctacaaggagaattacatggctataagtctgaacctacgaagaaacaatgtgtacgaattgtatgttctaacgtcaaaaaatcaccaaaaggcaagggtgtcttataaatgggggcaatagaccagccacttggctttagatgtctcacagcgttgctttgagaacaagcactcgtgcaactcccctttttctta

SEQ ID NO: 242003 - DNA, 149 bp, Glycine max
  unsure (1)..(149): unsure at all n locations
gtgctctgatcattcattagcatattcatgttntaggggcatgctcaccactgtttgtntctttacggaactcaccataactaaaaaagcgcagaagcacccctataacatcacatccagaatcaagatggataacgaagatggagtgc

SEQ ID NO: 242004 - DNA, 303 bp, Glycine max
gatgacggaaagagtggctttcgaaatctgcactttatgcagaattttgctgttgaaatgtgcaacataattttgtacaagtgcagaaaaatgcttatgtatggctggttgtgaaaagggtagtacatatggggttctggacattttctaacagatcccaacggtcaaaatgtagacttatgtactagaaactttcaagaaaattttcgagtcgatccaacgggtaacgaattggaacgaacgatatgttactggggtatttgtatgtgaacagctactatgattctgagttgtattttgggc

SEQ ID NO: 242005 - DNA, 472 bp, Glycine max
  unsure (1)..(472): unsure at all n locations
agcttctagccaaaaggacttaccttaaattaattcctttgatatgtcctttgagccttgtttccctttccttggtgtgaagctcactacaagccttaagtgaaaaaccatgatatcaccatatccttagggaattttggagctttggaattgttttgggaataagtgtggggggtttttgtttcattggataacatgttttgttggctatgcttcatgatggattttgggccatacttgatgtacattgtgtattgggtaaatgttggacatgctgaatgagatgctgtttctcanaggctacaaaaaaaatatcgaaaaagaaaaaatcganaagaanaagcaagcaatanagtgagtgaatacatcttatatggaaaagaatgatagactctcgctctanctttatgntaaatttatcttagtcttttattttttcttttcatctttctaaatgcattatcccatactc

SEQ ID NO: 242006 - DNA, 363 bp, Glycine max
  unsure (1)..(363): unsure at all n locations
ctctactacaaagactactcaaaatgtccccaaatataaggataaaaccctatactactataacgaccaaaatacaatggccataagaatgaaaacctattctaatatttacaaagaagagtggactcaaccttgtgccatgggcttggaaatcttccctgaagttcattagaatcttaaggccttctttatccactctagtccaatcctcttggaatcttctattcaatacccttggtgggttggattgcatcatcttggggccagattaatataccttcccaacagagtccaatgaatgcaaagttattcttttcctattgtcagactctaagtncatccaggaattatcattcactgatg

SEQ ID NO: 242007 - DNA, 152 bp, Glycine max
  unsure (1)..(152): unsure at all n locations
agcttctaaccaaaaggacttaccttgaatttattcctttgatagcccttttcagccttgtgtccctgtccttgtnttgaagctcactacaaaccttaagtgaaaaaccatgatattaccatatccttaaggaattttggagctttggaatt

SEQ ID NO: 242008 - DNA, 403 bp, Glycine max
  unsure (1)..(403): unsure at all n locations
tcagatacctcttataggaggggacttagactcttctacattattgtcacaacatatttaaaaccaaaacttgatctacagatccctcttggaagactaagtttcaattctgctttattcaaggtctaaggcaacaatacggaatttaagcactgaaagaagcattgaacacaagaaacacaatcaattagatattaaagtaattacatcagctgttctctagaaatccccaactatggtgtttagccagccattacagaagaaaccctaacaataatgagctnacaaaacctacgtatctctgcanaagctactcctcttgctggctccagagctcttttcctgaaatatgcactgtggtgtgccctggaatctgtgcaaatcatctaccctaaagtctata

SEQ ID NO: 242009 - DNA, 223 bp, Glycine max
gaagcatctatgtctacatctacattcaacatcatctcgcacacatctgtcagatcaatttgtgaaatcctcctacagaagtgtctgagtgacttctctgcatctttcgaagaggttgcgagcaacactttctctttcaagaacagctctttgatcaaaaacttaagctattcatgggggtcaccgccctcacccttggccaacagaacgaaagactaaccac

SEQ ID NO: 242010 - DNA, 457 bp, Glycine max
  unsure (1)..(457): unsure at all n locations
gcaagcttgaagaactatctggagaggtataccctgaacatggaactctacttaattgaagttgtactacaattaactcttgtaaaagttgtgtactctttttcctacctcgactttttatctataaaatgtgaaagggttttttctaagaaggttttaatgaggcacacctaaacatatactatcaatgaaggtgttttctcaacaattatacttgaattttcatttttaacaattcccttctaaataacctcttcaactgaggacgaactcaaaatgatatcataatttccctcccaaataacctctttgcccgatgacgaactcaacaataaatcataagttccctctcgaataccttcttcggccgaggacaaactcatcatanttaattaaaataattgcacatcttataagcaagttccaagcacaaaacactcatctatattcatagtac

SEQ ID NO: 242011 - DNA, 374 bp, Glycine max
  unsure (1)..(374): unsure at all n locations
atgtgaaaggatgtgactcttcacatttgattttttatttcaacgntcaaaagcactggtaatcgattaccaaaacattgtaatccattacagctttttgaaatcaattggaacgttgtaaattcatttgaaaactttttcaaattcattttgctactggtaatcgattacaccaatctggtaatcgattaccacaaagtaaaaactctttggtaaacatgttttgagaaaaatcatgtgctactcaatttttgagaaaaacttttcatacttagcttgattaagccttctcttgattcttgaatcttgagtcttgaatcttgatcttgattcttgagatcttgaaccttaaatcttgattcttgactcttaac

SEQ ID NO: 242012 - DNA, 187 bp, Glycine max
gccttgtttgatcaccccgctgcaacacgtggaagggagggtgatttttgccctgatcaactgcgggaaagtttgacatagattctcagactccgcgtcaatttaacgttaagtaaggggcctgaaggacgtctatatggtatgaccatttgattgctagaggtgcttgttaaattggcgtttatga

SEQ ID NO: 242013 - DNA, 280 bp, Glycine max
ctaaaatgaatcacactggaatgataggaatctataagtttggtacgtatgcactttatagtcgaaatgacctcaaagaattaataggtactactttgaccaacaagatgcttttacttttgagtaacccatcacttaagaactttttgataagtgtgcttgactcaacaagattatgggatagatgaacttctatgaagatgtacaaaggttgcttattgctggaaaatttgtgacatacggaactataaaatgatgggaatctcaattttacgacaac

SEQ ID NO: 242014 - DNA, 306 bp, Glycine max
  unsure (1)..(306): unsure at all n locations
aaatgaactntattaggagatgtatttgtattttcatcaccctacatttctttatgctgctgttatttaaatctttaatttgcaattgcaacacttccttcctgcagttagtggaagttcaaggatgctggcaaacacgtcctttgtttctggcatgagtacacgaacgggttggtttatggctgtgtcctatgcagactgtttcagcttaatgaattgttccttacaaagcctcacaaggctaggagttatcattantatggatggggctttctgtggtggaacagcagattactgatgcctatc

SEQ ID NO: 242015 - DNA, 374 bp, Glycine max
  unsure (1)..(374): unsure at all n locations
caagctcgctcannnnncatgagagagagtgattcgtcanaacaggctcatagggcttcacatgggagtcaaatgtcactttctatctgctgctaacacttagatgctcctcactttcatccctgcattaacaaaataagaagtgtgaaaaaacaacatatatctatatcaaaagcttccacaaatagtattgaactaattttgaaggtcgtaaatgggaatagcttactggagttgcggtataaaggtaataacatttgtggagcaaccatgataccaagagacactatgttgctcttgcttgctattgctactatcaattcatttgaagaaaaaacaacaaacaaaacttatctctgtttggctgctgaaaa

SEQ ID NO: 242016 - DNA, 177 bp, Glycine max
agagaaaggaatcccattgcttgcgggtgcggctatgatgtgatgaagatattcccccatggtttgggttcttcaccacctcctactaacattacaagatgcctctgttgttgccaccgcaagtgaatggatcttgtgggaaaaccaccgcctctaaggtcaatggttttttgtttt

SEQ ID NO: 242017 - DNA, 87 bp, Glycine max
atagacagtgaacgcatgtatatcatgcagaaaacaaaacctcaagccgggggtatggcccaacttcattatatactttttgtatac

SEQ ID NO: 242018 - DNA, 400 bp, Glycine max
  unsure (1)..(400): unsure at all n locations
ctattcatactctaagggtaggcatcgtcggagtatagaattagcatcctaacgggatgacaacgaggcaagcttgacttttttgcccctatatctctatccctgcttagcattgtgcaagtttaggggatgcctgaataatttaaatccccttccatctttgttagaatgttatgggtaaaggaacctgcccacctcttataaagaaacttaattcattcatatatatatatatattaactccaataatatatatgaaatgtaattggaactcacatgtgtcgaccccaccccgattttacaaagtgaggaacacttcatctcgacctcgttaaggcaagtnttcaatatataccagaaaaacataaattacaccaactattcgatatgcctatatgat

SEQ ID NO: 242019 - DNA, 435 bp, Glycine max
tgcaatgataaaataatgataataaactcagcaaaatcatgttcggctgcaaaaagtaaaaacaaaaagaagttcaatccacatgtgttgaagtaaaggaactacatcagattcatagaatatgttcagaaattcaagtgttgtttgtgttatttctgcacacaggtataaagcaacaaagagttgttaaattccatgcttcaatatttgattaaatacaaaatagtatacaaccagtagagtttatgtttgaactactctcacaatacgatttcaaagaaatggaatgagagaaaaacaaaacatagaacaaaatacaacctcctaatgaaaggaaatgaagaaagtgagagaacaaaggagtgaggaaggagaacaaactcaatgtttggaggcatgaatagtcctgaatggattcacaagaagttatgatca

SEQ ID NO: 242020 - DNA, 401 bp, Glycine max
  unsure (1)..(401): unsure at all n locations
cctttgnctcataccttcattacacttcagttgtacctgagctctgcttcctatttataattaatttcttcatgtatatgagtgagttgaatctctcccgcgaggacaaaaagggtgataaaatattaatataagaaccaaaatgatatcttaatttacggactataaaaaattatcacaactatagggattaatagagtaattatatcagaataaaatatactagtgcaaaataatggtggtgtggttagacacttttaatcctaaatgtctcgttgttgacatatatacttctacatatgtgtgcatttcgccaccaccaccattagtggagtaaaattataaatgctaacccttctacggtatatatcctacatatgcattgtatgtattaataccaa

SEQ ID NO: 242021 - DNA, 216 bp, Glycine max
tcacccgcccactgggaagtgtgtggtttttcctaaaggcccaactgtctccggtgaattctggactgtcaacgaccctttagttctttacaattttgttcaccaaaataacgtcctctattatgccactaaccctttaaggcaaggttgctctattaacatctcaagactgtatgccatcaaagaagtttatcattcttaatatgaagataaaga

SEQ ID NO: 242022 - DNA, 363 bp, Glycine max
  unsure (1)..(363): unsure at all n locations
agcttgttctntntatataatgagaaggactgaacttatttgnnatctaaaaaaccttggggtggatccaagagctccgatcatccatttgcatactcattgtttggtggcatactcaccgttgtttatatctttaggaatttcatcataactaagaaaacaccaaggcacccctataacactcgatccagataaatagattatgaagagggtgtgcacgaacatatgaaggccgatctatcggccttaaaagatcaaatggcttccatctcggaggtcatgttaaaactccagaaaaccatataggataaagccactacaaccgcctccattacgttagggaagcggatccggtgctgcagc

SEQ ID NO: 242023 - DNA, 379 bp, Glycine max
aagctttctaaagagcatcagaaacttgaaaaagatcttctagataaagatatgtttctttggacaagtccactcacatatgtaatgcttgcgaaacttttaaggaaaaagagtgcaagctatgtcttgagaatgagacaatcaccacaaaaattgctttattagagaactttcaagagttggataacaaattgcaaggcctataaagatatgatctgtataggaaatgtacacaagcacacaaagattatgagaacctctgaagagtaagtataatctttgggtggaatgtgaagaacataacaggttcggaaatatttacatgaaagcatttgatgaatgaagaatttatgggcaacttcaggatgttgcaaacttc

SEQ ID NO: 242024 - DNA, 262 bp, Glycine max
  unsure (1)..(262): unsure at all n locations
gatgatgttttgtgattgttatatgctgaaattgcctatggaaactgttagagatgaatggtagagtttaccttaggtttaaaagtgagaatgtgatgttatgagttggaaaaaaatgaggctttgagaattggaaggttaagtctgaattctgtgggagatgggaggtaaaatgagttaatcctagcttgagatgtcctttaggacatgtgaaaaaaggtatgctgtgctagagggaanaacaaatgaccaaagtgaacaa

SEQ ID NO: 242025 - DNA, 422 bp, Glycine max
  unsure (1)..(422): unsure at all n locations
gaaggagcatgtaggagtagagaagcaccattctcttttgtagagaacaaaccaaggttgtttgcgcgactatcaaaagagagactggataagctttcaattaccgactgggagtctggtaatggcaggcctccactccccgaggagagagattccaatttggagccattgttgtctaaagatcattgaagtctactttgcatcataaggtaaaaagtgtatatagccattcttttaaaaaaacaataatgaataggctaaatgtaaaccgggtggaatcagtgacagtaaaatcatctactactcatgttttaattacagactaatttgattgagtcatgttntagagaactttggtcgaattagtttactggacatataccatctgaacttgcagactatttgtcaaccatgtacctgaa

SEQ ID NO: 242026 - DNA, 467 bp, Glycine max
  unsure (1)..(467): unsure at all n locations
taagtcacctgcagctgcaagctagccgaatatagatacaagagggttggctatctcaaccttggccagcttagcggaccaaatcagcctcagatgcaagggttgggtgttaagtgcttgagactcgtggcttatcgtatgaacaaagatgcatttagtgcgaggcttgcacttatcgaaaggactatttttcagaaaaaagtcttctaagttattttttagttctttttccaagaaattgaaacccttatgttaaacattcaaagattggctgatatactcctatgtacagattatatagcaagttccaaatgattaaatgcatgaaaatcaaagataccggagattaaaactgggttgcctcccaggaagcacttctttaacgtcattagcttgacacttttacctcactgggtgatcttattgtttggttcatactntcagaacctcttgacctccttccatta

SEQ ID NO: 242027 - DNA, 304 bp, Glycine max
ctttccttaactgagaaccccattggatgatccaattaaacactctcctttaaatctccattaagataggaaggtttcacatccatctgtatgtactccaagacataatgggctaccaatgccatgacaatcttgacagaattctttcatgagaccggtgaaaacgtctctttataatcaattgtcatatttctgagttaatcccttagcaacaagtctagccttgttacatcaacgttaccataagagtattgttaggcttgaaaacccactaccaacaatttttttcaaccctttggaattc

SEQ ID NO: 242028 - DNA, 276 bp, Glycine max
acaccccctcacgacagaggagagagtattttatttcacccatttttttttatcttttgtactgtgtgctctattcctcgtatttcatccccaacaattaacgtatatctttttatctatttttaaaattaaaaaagccatttactcaacaatcacgggctcaccggtcacctcacacatggcccaatgacttgactgagtgtgttttaagtaactgagaccatttcaatttgcgctaattgccacctgcaccctttttccccccccacgatttac

SEQ ID NO: 242029 - DNA, 447 bp, Glycine max
  unsure (1)..(447): unsure at all n locations
agccctactatgcagagaatgttcaaggaaaatacctccatctgacttagcatcagatgttcctcagttatctttttcattattcaatacaaaacatttaccaccaaagatatgatgatgtgagatgtttggttttctgccattgaacaattcatatggagtgttctataagatgggtcttattaaagccctatttaaaatgtagcatgcagtgctaatggcttcagccccaaagtattttggaagaggagtatcatttaataaagttctagcaatctcttccaaagatctatttttcctttcaacaacacccatttgttgaggggttcttggtgcaaaaaggttatgctcaatcccatgcttatcacaaaataattcaaatctctattntaaactcaccacatgatcactttatagattaatcttgaatttacttatttgatgatt

SEQ ID NO: 242030 - DNA, 391 bp, Glycine max
  unsure (1)..(391): unsure at all n locations
gctttcgncttacagaatacagaaagatgtattcttattaccactcgggtatttccgcccgtcagcgtgactcaaaagttagtatgacagatcttgtgagcgcggaagataacgtaaatctccgcgtgtcaacaggacttgctgccgcgattgacgaagggcacagaaaacgacgtttggctctgcctcttatcaggctgtttgtcttacagacaacaaagaccttatacggataaccactcgggtatttccgccagtcagcgtgactcaaaagtctagatgacagatcttgtgagcgcggaagatgacgcaaatctcctcatggcaacgggctcgtcggtcgcgaatgacgaacggcgcanaaaaccactttagtctctgcgtgctatta

SEQ ID NO: 242031 - DNA, 412 bp, Glycine max
gcttgataatatgatcttcaccgacgaaatgtttttagttggtctaaaaagaggcaaatctgatcatcatgctttgataaatgccaaaaaaactagggcaaatgaagagggtgagaatgagggagaagcccatgctgtgactgccattcctataaaccaagtttcccaccaaccacaaagtctgtctaccgcacttccaatgacaaacaccacctttagcaaaaaccaaaacaccaaccaagaaatgaattttgcagcgagaaagcctgtataattcaccccaattccagtgtcctatgctaacttgctcccatatctacttgataattcaatggtagccataaccctagccaaggttcatcaacctccatttctccgagaatacgactcgaatgcatcgtgtgcttgtcac

SEQ ID NO: 242032 - DNA, 419 bp, Glycine max
  unsure (1)..(419): unsure at all n locations
ctgcaagctgaggaaactggtgcatgggaaacttggttatccagctggccttgaataagaaatctgtacctgttgcatgggtttgtggtttgtgctcctctgttgaccaccatacagacctttgcccttccatgcagcaacctggagcaatcgagcagcctgaagctcatgctgncaaatattacaatagacctcctcaaccttagcagcagaatcaaccacagtagaacaattatgacctctccagcaacagatacaaccctggatggaggaatcaccctaacctcagatggtccagccctcagcaacaacaacagcagcctgctccttcctttcaaaatgctgctggcccaagcagaccatacattcctccaccaatccaacaactagcacaaccccagaaatagccaacagttgag

SEQ ID NO: 242033 - DNA, 341 bp, Glycine max
  unsure (1)..(341): unsure at all n locations
gcttgcctcanagaggtccaggaaggacaaggcattatattgaactagttccgctccggagtatgatagtccccgctttaggagcgcggtacaccagcagcgcttcgaagccatcaaggggtggtcgtttctccgggagcgatgcgtccagctcagggacgacgagtatactgatttccaagaggaaatagggcgccggcggtgggcaccactggttactcccatggccacagttgatccagaaatagtccttgagttttatgccaatgcttggccaacagaggagggcgtgcgtgacatgagatcctgngtaggggtcagtggatcccgttcgatgccga

SEQ ID NO: 242034 - DNA, 342 bp, Glycine max
ctgtttgtttttataggttaacatggatcaattctaagcctaaagacaacagggaactttactgctattgcaagaactacgcaggcctgattatctaatggcaattaaggatacgttggagcgaacgccccgcttttgtcgaccaccccaagagatcgataatagtccaacgccttaacgttgctcttctttcacataccaagagatcattaatggttcaatgccttatcgtgtctctcctctcaaagaccaagatatccgttatggtccaacgccttaccatttctctacttaagaaacaagagatcgttaatggtccaacgccttaacagttctttcctt

SEQ ID NO: 242035 - DNA, 360 bp, Glycine max
ccaggctcaaatatgaggctgagatcatgctcttgcgcgaagcgcaacactgaactgcttatcgcgcattatagaatttcaggttatcgcggcttttatcactcaacggatggaacgaaacattgcgctaatcacgatgacccttcggtcaaggaacatgcgcaactcatccttcttccagattcttcctcgcgcttaaccgaggattatagcgctcagcggttggctcgctaagccaatatgttggcttagcgagagggtgaaaatcaacacttcaaacttgcctatttaccctgaattaagagaaatgatttgtaacacccaatgggaggactagtatttcttactatcttactcaaa

SEQ ID NO: 242036 - DNA, 414 bp, Glycine max
  unsure (1)..(414): unsure at all n locations
ctgaaaagtctgatgtgtatagctttggtgtgttgacacttgaagtgctgagtggaaagcggccaacagacgcagcattcattgaaaaggggctcaatattgttgcgtggggatgtcattcacacaaatattggattctagtataagttatgatctcgttctagttttctgtnttttacataactaaatattctatagtttaatataaacacacattgagtatctttcgttaactgagactatacgaccttatgttttacaacgggcttccttatggctgtcactaatcagcagagtgggttgagtgagtgttacatggcaaaataattgcaattattatcatcttcttggcgttggttcttgtacaaatcatcccacacttcgagggtaaagtttggcgtaaatcaataattg

SEQ ID NO: 242037 - DNA, 402 bp, Glycine max
agagaaagagagagggggatcatgaatatgaaggatgaacacaaggagagaagtttaactttgagttgtgtctacaaggctctcattcatcaaagttacaacaagtgttacacatgcttttatttatagactaagtagcttccttgagaagctttcttgagaaaacttccttgagaatattctttgagaaaaattctttgagaagctagagcttagctacacacacccctttcataactaagctcatctccttgagaagcttccttaaaaagattcctaaagaagctagagcttaactacacatacctttctaatagctaagctcacctccttgagatgagaagctatagcttagctacacacaccctataatagttaagctcacccccatgacacaataca

SEQ ID NO: 242038 - DNA, 376 bp, Glycine max
ctcatgcactcctctaatggctatagcatcatatctggcgctaaattgctgggagttggaagccatcttctcaattaaatatctggcttcagcaggagtcatgtctccatgggctccaccactggcagcatttatcatacttctctccatattactaaggccttcataaaaatattggagaagcagctgctctaaaatttgatggtgaaggcaactggcacatagttttataaatctctcccagtattcatacaagctctctccactgagttgtctaatagctgagatatccttcctgatggctgtggtcctagaagcaggggaaaatatttctaaaaatactctcttaaggtcatcccatctcgtgatggacctt

SEQ ID NO: 242039 - DNA, 202 bp, Glycine max
tttttagcgttaactttactataaattggtcaatccctgtaaataaaagaccatgcacaattcctgcatggaagaaattcagtatcctaatgtcatattctatggaaatatcaagatcattattattgtatttgatccgaactactttttagaaatactacctgcgataaaatagaagaatttaataactattggcatacta

SEQ ID NO: 242040 - DNA, 337 bp, Glycine max
  unsure (1)..(337): unsure at all n locations
ccatctagcctgatgggcctgtgaccctcagtcgtccctcttccgacctgaggccgcgcttgactttctgacccctggttcttaagtttgccttaagcttgacctcttcctacttgaaacccttagctttgggagccagtctatctcttgcgtccgagcctttatccacttgtgatagccaccgacgatcccatcgctgcttcctctaagctccttatcctttctttgcaccacattccatgnctttcggactctttgaagcattcttgcattggggtcacttgagccacctgcgatgaatggtgcgatactctcttctgatggcgctcttctcatg

SEQ ID NO: 242041 - DNA, 374 bp, Glycine max
tttaatggtgattttcaccatggaaatgcaccggtaaacaaaggagaagaggtgagaggatgcaccatccactagggaataagcctaggaaaaaggagcttcacccccaagatgatccttggataaataagcttggagaggatgcttcaatggaggaaaagaaacaaggacataaagagagaggggggagcacgaaattgaaggaagaacaagatacagaagttgaactttgagtatgtctacaagactctcattatcaaagttacaacaagtgtttcacacatgcttctatatatagactaagtaactccttgagaactttcttgaaaaacttcttgaaagctgtttaacaaaacttcttgagagcttctttg

SEQ ID NO: 242042 - DNA, 204 bp, Glycine max
cagaagatgtgtgtacgtttgaaaaactaagcaaaataaaagtctacacttaagaagaactatctatgtgagatacacttagaacaaaatgggtaacgaggatggtgttctagaagagcttctaaaatagggacaaaaaagcttcattacatgcagtttgtatgtatctatctacaactaaatctgtattcagtatctgaaaca

SEQ ID NO: 242043 - DNA, 89 bp, Glycine max
tttttttaacccccaccacggggggattaacattccctaagctccttatttcttgtctataatatgtaaaccacccttttatacaactt

SEQ ID NO: 242044 - DNA, 345 bp, Glycine max
  unsure (1)..(345): unsure at all n locations
ctgcaacttggaaaggctgttttcaccttctcgctattctaatctnggggcttagtgagcatccgctaagcgcaacactcctgggctaagcataaggaagaatccagaagaagatgagttgtaatggttcgctaaacgcaccgctttatctctctaagcgaactgcttcagttcatctgctaagcgagaaaggcgcgctaagccaaaaatcactaacgtgcactaagcggtccatacgtgcgctaagcgcacgagcacgaacaagggccacctattaagcctgaaatcagattttgtgaagatagtttggactgggattcagagctntgcatgtctagggtttct

SEQ ID NO: 242045 - DNA, 392 bp, Glycine max
  unsure (1)..(392): unsure at all n locations
ctccttaaacctccattattttttttctttaccttctcttccattggtggttcttcatttttctgcatgtatctcctcacatgtcttggtctaaatgttgttaacatgattctttagagtttccaccgattaaacttgctatagaagttagatttgattttctatggttcaaatttcttgttcttggtcttgaaccatgaattgtgttgagtttaggttcctttgaggtttgtcttgttattttttggggctgaatcctaaaccataaaattcttacaaaaatattaaagtagaagaaaacctcaaaaatctagagtgacttgttcacctattgtagatttgtcatagaagtcatgtctagtcatgaaacttgtcacatangatttcttatg

SEQ ID NO: 242046 - DNA, 437 bp, Glycine max
  unsure (1)..(437): unsure at all n locations
gcttgactgggcgattagattgtagccttattttttctttagtcannagtcaattcaattaagaatgagaaatcccatagagaaaatgcccgattgatttttgtgcttcattttactaaaagatatattcttttattattatattattattttacctctttttttttatttccaacgtggttatggcacgaccaaacggtgggaatttattttaacaaaaattaacgaatactacaattcaaatgatcggtggaaatttatttttttagattaggcgcgaaatgacttaaataaatgactgaagcacgtcaaaaggtggtacgaaaagaaaatgaaacgagaataaatgtcacaaaaaaaatggtgaccaccacgggtacagagaatgaattgaaaagcttgtcctgaaactacccgtgaaaatgaaaaccgttaaa

SEQ ID NO: 242047 - DNA, 389 bp, Glycine max
agcttcatcctgagatccctcttggtggactatacttataccaaacaacattattgtaacaacatatttgaaaccaaaacttaatccgcagatccctcatttaagactaagtttcaatcctgcttcattcaagttctaaggtaacaatacatttctcaatgctaaagtcacctaaccaggcacacaaatggttgatcaaaccaatagcatacaaaatttaagcactaaaagaagcattgaacacaagaaacacaatcaattagatattaaagtaattacatcagttgttctttagaaatcccaacaagggtgtttagccagccattacagaaaaacctctaacaataatgaaattacaaaacctatgtatctctggaaaaaatgctcct

SEQ ID NO: 242048 - DNA, 313 bp, Glycine max
tctccttcaacaaagacatctctcctgctgggatatctttccagcatttttcttctctaatcagaaaaacatctctggtcaggtcactaatcgcctgtaccttggcaggagtctattggtgtgacatctccaatgttgaacacccatgtttttctgctggatatgatattctgctgtgcatttttctaccatgtttcaaacagattttcagttgccatgtcctcctttcaaaagtttgaagagtatccctgacttgttctatactctggctgtctcctccactggttgtctcactgtcaacttcttctgtcat

SEQ ID NO: 242049 - DNA, 363 bp, Glycine max
  unsure (1)..(363): unsure at all n locations
gctttgataatatgatcttcaccgacgaaggttctttggggtctaaaaagaggcaaatctgatcatcatgctttgataaatgccaaanaaactagggcaaatgaagagggtgagaatgagggagaagcccatgctgtgactgccattcctataaaccaagtttcccaccaaccacaaagtctgtctaccgcacttccaatgacaaacaccacctttagcaanaaccaaaacaccaaccaagaaatgattttgcagcgagaaagcctgttgattcaccccaattccagggcctatgctacttgctccataattacttgataataaagggagccataccttaccaaggtctatacctctttttcc

SEQ ID NO: 242050 - DNA, 398 bp, Glycine max
  unsure (1)..(398): unsure at all n locations
tctctttttcctaggaggggggaatgttggaatttcantantgctccaccctcgaggtatctgacattcacttaaactcaacgacaacaatcgtttctgtgaagaaaatccaagccgaggcgcttctatacgctttcgatacgtttccgtggtgattttgcaaatattttcgtcgtcttccgcggtctaattcgtcgtcattcttcatgtcttcggttccaaccgaagttccgaatcgacatttcattcctcatggccctagaggccccagttggtccggctttattttattcattactgtccgatccctttgcgtgcttatcattttttaagcgtttctccatataaaaaaaaaatttccccgatcttgtattgaacacctttattttgtaaatgaa

SEQ ID NO: 242051 - DNA, 259 bp, Glycine max
  unsure (1)..(259): unsure at all n locations
tttctgactntggaaccaccatggtatggtttacgcttactttggaaaaccctataaaaagagactntgtcaaagctatccttttctgaaatgggtgttattttcgtgaccttcattgaactccgttcgcattgacgtgattggaattttcaaatgatgctccttttgtagaacccgttataccccttagcctttttatgtagcgacatgagtatttgactcacggtattcgtgtcacattatttctgaaatccgtatg

SEQ ID NO: 242052 - DNA, 331 bp, Glycine max
atctgatcatcatgctttgaaaacgccacaaaacccatggcatacgaagagggtgataatgatggagaatcccatgctgtgtctgccattgctataaagacggttaagcaccacctagcaatgcagcctcccgcacttgaaggacaaacaccatcttgagacctaaccaaatcaccatccatgagctgatattctcgacgatgataacctgtcaaattcatcccacttacagtgacctatgctaactcgcccccatatctactagactatccaaagagagccgtagccgctgccaaggtacataaacctgcattaatcctatatgaccact

SEQ ID NO: 242053 - DNA, 433 bp, Glycine max
  unsure (1)..(433): unsure at all n locations
agcttgcccaagcgagctaatgctgtagttnttattgaatgagctcacccaggccagctggttgcttaagcttgaatcccattcatggccaaggcgagccatatgctaacctgggggagctagggtctagataaatccaaaagagaccctcttgccccctcctaggtatctttttgttttcttgatcaaaacactaatagattccttgctttgtactagaactagcgccaaatattataattcgactatcaagaatcaaaatatcatatcgaacgatatttcccggacaaaattacggtctgacattttcccttctttacttatcttttatagaaaatgataaggtaagtaaagataaggacactaatttcatttgagcaatcttgctattggaaatacgacgccataggaaataaaggaagtgaaaccgaaa

SEQ ID NO: 242054 - DNA, 458 bp, Glycine max
catgcagcttgaatggagagaggggatcttttcctatctaatggaggagggccaagtgagtaacagaccttcattggatagtggggatctttgtactcttgctgaagaaattatacaagaattgaagttcgtgaaggatctgaatgcgaatcttcaatttcagtttaagaagacacaatatgcaaattctgaactagttcttgcagtgcaagacctgtatgaaatgctggagcagaaaaatagtgaaatatatagtctttccaataaacatgaagagggtaaaaactcccatgagttagcgggaaagctctttaattgtgaaacagatgacgaagaacagaaagagttggaagagctatttaaggagcacaacaatgcccaggagtctcacttacttgagcaaaagattatagatctctatggtgaaatagagatgtataggagagacaaagatgagt

SEQ ID NO: 242055 - DNA, 472 bp, Glycine max
  unsure (1)..(472): unsure at all n locations
ttgagtcacctgcggcctgcaagcttatattcaacaacccaagtagccaaagagcctgntgcctaagttgggaatgcatataagataagctataggtgtttggttgaaacaagggagagaagcatgtgaggatgtgaaagattgctagtccataagacatatagaagagagaattaaggtgacaagctatacatgggacaaatctgttatgggtagggtatggacgaattttgttggtaaattgaggcttcgggtgaattctcatctcttgaggatcatccattatctgttttcaattaccaaacttgaatcatgctacacatattcacaattacttattgctaccatgagtggaagtgacaaagtgtgtcaaagtcctccacattgcatgtccaagtactgaggtagacaagaatgcctngcctgcctaagcaacctgtngcctncacactgaataactaagcaacatact

SEQ ID NO: 242056 - DNA, 394 bp, Glycine max
  unsure (1)..(394): unsure at all n locations
atttgatttcctacttaacctgtgaagatggtacgtaccacttttttcgaaaaaaaaggcatagttgatattgctgttccttattttactgaattgattcaaactaagaacatttataatgactttcttcatgttatcaataaaattcccacctgtgtttccaattatgataatgattctctcctagcacctttttctatggacgaatataagggtgctctntttcacatgaattccgataaatctttaagacatgatggcctgaatccggttttcttaaaaaaaattggcatctttgtggccctgaatggttccaagctggaatctgtaatctccctcccaagtcaataaaatccattgccttatcctataaaacaaccctcccatgacaatt

SEQ ID NO: 242057 - DNA, 427 bp, Glycine max
  unsure (1)..(427): unsure at all n locations
gcttctcctgctctagtaccgcagagacaatttacatatatacttatataccaacatttattgtatgtttacataattacttatttaaataaatgattagagcattagagttggaagttaaattttgttttatttatacataactagatggaagttttgtcttgtcagctaaataaatactgagagaatagacttacatgtgttaaggctgaacctttaagacttttaagtctagtgtgaaagagtaggtgctctcttcctattagggattcccacacgcagctnaaataatataagaaaaaatatatattaaatttctcaactgttatgaatntaacttaatattaccttaaaagaaccatataaattggaggaaattccaacttactcatgctatgggcatacacccatgctagtatatattaca

SEQ ID NO: 242058 - DNA, 368 bp, Glycine max
  unsure (1)..(368): unsure at all n locations
gcagcttganaacagctggatgtgatatatgctctgtgtgtggattggccaccgattcggggataaaggatatgtcccacattatttccatgaaacacatgcaacaattgatgattaggaaattttatgtaaaactggtcatgcatgcacctatgtggacactcaagcatctaattgttatggccatgtgacactagggctgaggattcatttgtcctacttaagtcaacccgatgtttccaaaatatgctcattgatcaattcatgcattcattcgagtccattatgggtgtttcgggaaattttcgcagcattcaccctatagggtcatacacatttttcaaaactggtgttatgatcagtgaatc

SEQ ID NO: 242059 - DNA, 428 bp, Glycine max
ctgcagcttaactcgatggcgaggaggcgcatatttatcgagacacttgatattgaataacagaagctctctagaaattccaatggtcataacttttcgcacggatgttcgattcgggcgcataatttgtcgagacgctcgaaattgaacaacggaagctctctagaaattccaatggtcataacttttcacttggaggaccgattcaggcgcataatatatcgagacgctcttaattgaacaacggaagctcccgagaaatttaaatggtcataacttttaactcagaggtccgatacaggcgcataatatattgagacgctcagaattgaacatcggatgctctttatagaattaaatgttgataacgtttaacttggaggtccaattcacgcgcatcatatattgagacggtcgaaattgaacaa

SEQ ID NO: 242060 - DNA, 305 bp, Glycine max
agcgcacggcgcacctacctttggggagggcaaccaactccggatgctgtcacaaagaaaccgcggatccccccaactttatttgagaaaacggcgaaacatgaaagacgccactactaactttagtgaagggtcggaatgatccactccgcggatgtatttccccccacccccgtccagggacgggccttaattgatggccacatgacttgatcttgctcctctaggctatatccttatccttttaatcttccttttgtggcacaggggtcccttgctctcgattctcattggatgaaaaaaaa

SEQ ID NO: 242061 - DNA, 325 bp, Glycine max
ttcggaaactttcacaagcctataagtattattcttcttgcaggaatctatcttttcttacatcactttcctcctatagaatttatccttatgaatttcaacttttgcaaaacttgctggcttcccttcattgatgatgaagatgtactccaaaccatgggaccttctaaatgattggtgctctttatttgatcttctgaacagcaactgcttttcttgctcaacaccttcatcatcaccatactttattgctagctcatcatcaaccctaagttcattatcaagatctaccccttctatggcaattcttctagcacgggtgact

SEQ ID NO: 242062 - DNA, 473 bp, Glycine max
  unsure (1)..(473): unsure at all n locations
atccttaagtcacctgcggcagcaagctttggggtgcatagcccaccatcttttcatagtatagtatcgataatgtgtttatcgtctccctttccatcattgggggtaccacctgngccgccagatccctccaccttttgggcgtgttctttgaaagatccgtccccctttttgcacatgttctgtagttgcatcctatccgaaaccatatcaaaattgtactgatactgcctaacaaaggcaaccattaggtccttccaagtatggactcgggaaggttccaagttagtgtgccaggtaacaactaccccagtaagactttcttggaagaaatgtattagcagttcctcatctttgcgtatgcccttatcttccgataatacatctttggatggttcttgaggcaagtagtccccttgtacttgtcanagtccagcaccttgaacttgggaggggtgatgatattgggtact

SEQ ID NO: 242063 - DNA, 318 bp, Glycine max
  unsure (1)..(318): unsure at all n locations
agctgactngattaaaaactaaaacttgagcttgtctngacttgactngcttaattcatttataacgttaaattttttaattttcaaaaaagttcttaaattatttaacttaatcaatttaatatttaataaaatatgtcaatactagatggtaacctacaaataaaaagaagtgttacacatgtggtaggatattgtgaaactagatgaaatttaattttttatagtataaatttaaacgaattattcacaagttaccaatgtcaagcttgcaaaacttgagattgatttattaaataattgagttaaatctcaagc

SEQ ID NO: 242064 - DNA, 431 bp, Glycine max
gcttagcccatagtcgagtagttgtttttgatactataaagcaagtttatatatcagtgaactgagcccgaccaaggaaaaatacatcaaagaaaataaataatctagtatagctaattttataatcagattaagcttaatggattttcttgagcgacaaagttttaggaatagtttaacatataatctttcaaaaaaactaacatcctacaacctttaagagtggtagttttataaaaataatgcttttatttataaaaatacatcacatttttctagaatggtagtttataacttttcaaaaaaatcttctaagtagctttgttgactagtgttcttttaccgacttgttcaaactttattggatcattctttatactaatgtttatggattcgaaatgcatgctcaattgtgtttttattttttaaac

SEQ ID NO: 242065 - DNA, 306 bp, Glycine max
gagatttattaatgttgtcaatcgttggatatttcctccattggctatctgaactgcctacaatatttcttaaaccaatatgagtagttacttatccattaagagtgtcttatttttattttgtatttcctataaaagggtaccaaggtcacatttttctgaatgagattagacgtaatatacatagagagattgaatgtgagaaactcttcctcctgtatgtgagagagtgtgagaatacttctctcaattttattcttcccgtgcgtgtgtgtctatgggttcaaattatctcaccgctaataa

SEQ ID NO: 242066 - DNA, 384 bp, Glycine max
cactggaggattgaggaaatttttttttagcgctcactatagacgcctcatcctttgcaaacatatctatatattgggcatttaccgacacttgatgggtgctgtttgactataattgccacagaatggggccgatgtggcatgcaccaatgcatgataatacaacacaagcctaaggccttctcattcaaatcctcaactcaaaaaattctttcttagtaacaacccaaaactgccgcacaaatataatcacattctcacattttgagcccctaaagatgaataagatataccaatgggaagctaaaaacatcacggattgaatacttactctgtggagtgaatagaatctccagatacgataccccaccacaatcaaatgtg

SEQ ID NO: 242067 - DNA, 427 bp, Glycine max
  unsure (1)..(427): unsure at all n locations
gcttccatcatgtgctaccgaaggtttgatcttatgtggggtgttattgtatgggtctgcataaggattttattgcaatcaggaactcaatataaataatggtgttagtattgcgaataagatgttttggctatgagtacacgtggtcagttttggatacataaagtagtgagaagaggttttaatgttttgcaaaatttatcattgtgattgtgtactctatgtttctatggattggccataaattgtggcaaatccatttctcttttagtaaaatatttcatttgcctcttaacaaaaatgagtgtcattgttagcaaaaggaacaccagaaagtttgaaacatatatgaacttggttatctaatggttggaacctactancatttggttaatgcacatgaacttatcanacagaantttactca

SEQ ID NO: 242068 - DNA, 396 bp, Glycine max
agtcacagacagagaccacattgagtgctctatagtccacgcaaaatcgccaagagtcatcatggttcctgatgagcagcactagtgacgagaaatgacttgtactcggactaataagccccttttgcaacattgattccacctgaagctcaaattcctacttctggtaatggcggtacagataaggacgcacgctcattgatgcgactcgtagaattaagtggatgtggtggtcagtcaccctctccagtggcaacgaggatggcggttggaatagtaaccaaagtaattcactatagctcggatacgaggacggagaggtatactggagttcgaagacttggcctctgcataccaccccaattgattgaaggagctagtatctgatttacgagt

SEQ ID NO: 242069 - DNA, 162 bp, Glycine max
taactaggggggttttttttacaggcccctcctataaaattcgatatatacacaacaatatatccaatcaactatgtttaatattatatatatatatcacataatttataatattatcataatgttattttatattaggggtacagatgttagaacactttt

SEQ ID NO: 242070 - DNA, 235 bp, Glycine max
ttgtaataatatgtttggcttgagtctcgtggtcagtttggatacataatgattgagacaggtataatgtttgtaaattatcattggactttaacttcagttctatgattgctatatttggcaatcctttatttttacaaatattatttcctttacacatcgatgctttgtacatatgacacattagcttcactattactttggtttaatgtgaacctctacacttgttaatcca

SEQ ID NO: 242071 - DNA, 366 bp, Glycine max
  unsure (1)..(366): unsure at all n locations
gaagcnactgatgcattggttcttttacccattgtccttgaatcagaaacatgtacctggcgcatgggtttgtggtttgggcctctctgctgacacaccatacaaacctttgcccttccatgcagcaacctggagcaattgaccaaccagaagcttatgctgctaacatttacaattgacctcctcaacctcagcaagcaaatcaacctcagcagaacaattatgacctctctcgcaacagatacaaccctggatggaggaatcaccctaatctcagatggtccagcccttcaacacaacaacagcaaccttgctccttcctttcagaatgctgctggcccaagcagaccatacttctctccacca

SEQ ID NO: 242072 - DNA, 401 bp, Glycine max
  unsure (1)..(401): unsure at all n locations
gagaagaatcctaaagaagctagagcttagcgacacacacccttctttatagctaagctcacccccatgacaaaatacatgtaaatattataaaaaaagttcttactacaaagactactcanaatgccccgagatacaagggctaaaccctatactactagaatggccaaaatacaaggcccaaacgaaggaaaacctatctaatattacaaagacaagcgggcccatacttagcccatgggctcgaaatctaccctaaggctcatgagaaccctagggccctccctttgatctctagcctaatctacttggagtcttctacccaatggcccttgcgggataagattgcatcactatntataggaaaatggnggagaagcttgccacccagctctcccagg

SEQ ID NO: 242073 - DNA, 285 bp, Glycine max
ctctgatcattcattggcatattcatgctatggaggcgtactcaccaccatttgtttctttatggaatccaccctatctaagaaagcacaaaggcacccctataacactctatccacacaaatggacaatgaataaggcgtgcatgacagatgaaagccgatctatccgccttaaaagatcaaatggcttctatcaccgaggccattgctaaactccagacaactatagaggataatgccatggcgaccgcctccaatgcaattatggaagcggaacccgtgcta

SEQ ID NO: 242074 - DNA, 344 bp, Glycine max
gcttaacgttaaaactaatatcatcgctgcgaagacaatcctatgcaccacaaaacatggatagattcttggccccatgttaaatatccttatctgcagcaatccaatgattttcatccatgtgtcaaaagatcggtttcatgaccaatatttccctcacacaatctaaggtgatgtttggaagttgtaacaatttttttttccggaataataataaattatattatttctttcaaatacattcacgcactgagcttcttcctctctcccagaaatattagagcggaagggaatcaattattaccacaataattagaaataagacactcacacacattgcagtg

SEQ ID NO: 242075 - DNA, 359 bp, Glycine max
atctatgaaagtagagcttgaacatacctatggtgaggagagcccttgattggcttctgtccatacttcctccacgaataatcatcaggagggatattctgcaagttgttgctgatagcacgcaccttaattgccctcttcactctatgtttcctgtggagaacacacagaattattagtgacacattagaaggactaataaaaacctcttaagtaacagaaattaatgctaatttacctcttcttagagcaatgacatctaacactgctcccacatttcaagctttcctcatcgcctctggcagaacattatctcttatgcttgtgcgaattctgatcagaagagtgtggagcttcta

SEQ ID NO: 242076 - DNA, 348 bp, Glycine max
tgacccgtgcgtccatgcattgcttatactcggccaccacgtgccattttgacttcttttgttttatacataacggacacaatgtcactctcttcaatagcctgtagccaagctaaattctggagatgggaggaaaatgtatcacttaaaatgtttcaaaaaaacagtgaccaatatggaacatctctgaaatgaatgctagtgtaagagatgtcatcttcctcaacaattaacaaagtgaagttactaaaaaaggtgtatagcattcctatttaaaatagaccttctgaaaaaactatccatggatgtgtctggtgtgagcaacaatgaaccactgctcgattcaaa

SEQ ID NO: 242077 - DNA, 365 bp, Glycine max
ttctaactcaggcgtaatcgatgtgtaatttttttccctctgactaagcttgcatgaacacaggctgagacaacatgggctctaacagttcttggttacctgtcaaaatgttgtttgggaattttaaggtaagctataatgtatgatgcatcatgaataatgatgctttgaactgttgcacatagttttacaaagattgcttacttttacaggggttatgcttcttatctaacctaacaatttaaaattgctacatgttgattgtttcattggcgtgggtcactcatataattatctacctattaattgacctccacttcttcttttctgatgacagttcataagctagatatgtctgggtattt

SEQ ID NO: 242078 - DNA, 260 bp, Glycine max
  unsure (1)..(260): unsure at all n locations
ttttttccctgtcccggcgcccccatatattttgccaattaatttatattaaggatcgggaggcaatttatcatctcacccattgaaatgaagactttgtccctctccggcaaaatttcaaacatgtgggctttaaaccgtgaatcaagaaaaaccngcctatatttttttccaatacttatataatctatatactgactttcaaattctttacttgcaacctgatgtttactcaacgacataaggatggtgattgcgat

SEQ ID NO: 242079 - DNA, 398 bp, Glycine max
agctggtagaatggcatgacacgatacatgtcttggttttgttcggttcaaggattaaaggggatgtcccacattatttccatgacataaatgcaacaatgatgatctggaaatttatatgcaaaactagtcttgcatgcacctatgtggacactccagtgttgaaaaatatttggccatgtgatgctacggctcataattcattctctctactttagtcaacccagcgtttccaagatatgtacttttatcaaattgtgcattcatccgagtctatttagggtgttcgaaaaaactttcacatcatttacccttcaagtgtatacacatcttgttttcgaaaactgggtatgatcagggaatcctttcaagatatgtggaagttagctcttttcaca

SEQ ID NO: 242080 - DNA, 192 bp, Glycine max
ttgagacttgaggaaacctgatattattaagatgtatggggtcactatctatcaaacttcttctacctgctttgccttgatccgtaaagctgtgttttaagaacatcaaaggaaactggttgattttaaacttgatagacgggctagttatcctttatacagggatggggacaatatctattgtgttggtgt

SEQ ID NO: 242081 - DNA, 118 bp, Glycine max
acgtcaagtggggtgctatttgccaaaaccaagcttgaccaatcccgacccaacccgggcatattcagtcagtgagaacctgtgatgtacctaaacatgcgagctcctgtcagtcaac

SEQ ID NO: 242082 - DNA, 274 bp, Glycine max
tattctaactgcccaaataactcatataagccttttgattaatctacctgcgtcatactcttaaatcaaaatgctacaacacattaaagcttttcttaacttctccaaaattttaaatctttaattgcttactcatcaaatatgctacttgtgaatcagtgagacaatagacaaattttgatcacacctttattcatgttgtcctttagaaagtgacattttgtcccaacatgtttgctccctttatgggagaatgagttcttggccaagttaa

SEQ ID NO: 242083 - DNA, 247 bp, Glycine max
  unsure (1)..(247): unsure at all n locations
tttgtgggtgacaagcggttgaaaattactatttagtgcccaacttgctccacaaatgccttcaataatggcttatgatcttagagtccctatctcttacaatgcttcttggcaaacaatggagtctcacaatctcctttgaaaacaaatcagccacatgggaaacnnnnncaactattttacatggaataaaatgagccattttagaaaacctatcaacaaccacatatatggaatctctaccatt

SEQ ID NO: 242084 - DNA, 375 bp, Glycine max
agaatctgttaaatgagaatgatttgattacatgtgttaatgaaaataaaatgttataacaatcaatttgatttttaaaatccattatgggggaatgtagccaaaagataactgacaataccaagaggtgaatgacaaaaagccatcttggtattattattggacctttccattaaaatgtccatcttttatatttgttatgtacggctaaaaatccacccattgtttaggtatatctaataagacgcattgcttcgattttcattttaaatctcaattttaaagcgaaacttttaattgaagacttaggctgggtaattgtaacatactcatttctcctaaataagttataaagaggcaaaattactacattaa

SEQ ID NO: 242085 - DNA, 397 bp, Glycine max
  unsure (1)..(397): unsure at all n locations
gactgcagcatgcaagcttgttcgaatgttagaggcaacttcttcttccatggtaatctctgaatccatcctatcaaatctcatgtccacttgtaactccaaagcatcaaacctatcaccaacaaaggtttcaagaccatcgaaccttgccaaaatcttttgaagaagagaggattcttctccaccttgtagatgcccttctccatcattgggttgagcaccctttttcacccaaaaaccatcatgctctntttcggaaccaaatgatgcaatcacagcggcaccatataagaaggatctcttgattggaacataaggtttagactcaagagggatgctaaagtgttgaacgaagagagtactaagtgtgatatggcaatggagcattaatccaatg

SEQ ID NO: 242086 - DNA, 169 bp, Glycine max
tttttttttgcacgacactgagctgggacttacagctaaccagtaacatgtacttcacaaggtgctactttaaacacccctttctgaaaaccccggtacatgcctgcacagagggctaagcaccctgttcatctaatatactgctaaaatgccacctgtaaatgtacaa

SEQ ID NO: 242087 - DNA, 347 bp, Glycine max
  unsure (1)..(347): unsure at all n locations
tgcaancttagctacacacccctctaatagcnattctcatcccatgccaaanacatgaaaatacgggaaagtccctactataaagactattcaaaatgcccttaaatacaaggctaaaccctatactactaaaatggccaaaatacaaggcccaaaagaaggaaaacctattctaatatttacaaagacaagtggacccaaccttgacccatgtgctcaaaaatctaccctgaggttcatgagaatcctagggccttcttcagcaactctagcctaatcttcttggagcctcctgctcatggctttgtggactggtgatgaaatcctaccccccaagggcattggat

SEQ ID NO: 242088 - DNA, 345 bp, Glycine max
ttataataaaaactatgactttgtagattctttcatgttcctccgatgaaccaatgctatttctcacaaaaggatatttacatgatgttgcagaatctttagaacaaatgcatattcatggaccacattctaaagggaaagggaaaggaagcaatgaagatcctccacaagaagccaaaccaaatgatgaaggtggcatccatggagttcactgactatgctcttatttggtgggactaacaacaagaagatttggagaacctttggtgaatacttatgaggacatgacaaagataatgagaagaagatttgttctcctcattataataaagaccttcataacaa

SEQ ID NO: 242089 - DNA, 202 bp, Glycine max
agatgaacttttgctgaaattttttgggtttttttggttggccaaagggcgggtattggaaggcgtaacagctttgggtattatggtggcctttgggaaatgggggggggaagaggagtttgtatggctgttaatgacatgtgggtgggggaattgccgatagaagatgtccacatgggtctcctctttctacctcttattg

SEQ ID NO: 242090 - DNA, 349 bp, Glycine max
acccactcttgacgtgcttgagccattttacttaagtatttctcgcttaacttacaaataaaataaatttccaccgaacttttgagttgtattatccatcaacttcggttcaaaaaaattccgaccgttcggtcgtgccctaaccaccgtcgtaatcaaacagagggtaaacataatataataatcaacaagacatctttagttaaatagagcgaaaaatcatcgggcgtttctcttgggagtctcatcttattcaattgactataactaagtgaaactaacggctaaatcattccctaatcaggtttcctaaaaaaagctttgaattcggatctcatttctactaata

SEQ ID NO: 242091 - DNA, 162 bp, Glycine max
gaccccgagtttaaacgctgccgtttcttctagtttcccagataattcttcttctttggaaaaagaaaagcgactcatactttatttttctctcgctgcctgggactgcactaccggattgatcttgctgaatttatcaacttcatgttcatccacaaaata

SEQ ID NO: 242092 - DNA, 142 bp, Glycine max
tcagctgggggctataaagcagagcgttgttttttacaggacgggaggacatcaccgaaaagttattcttttcttaagggaatataattaagctttcccaactactggatttgccggtttcccaattagaaaagcatttttt

SEQ ID NO: 242093 - DNA, 235 bp, Glycine max
cggaccttaagcactgagatgcacttttgacggtattcatcattttttatgaagatgagtggggcggatctgttggtgccctaatcataaagtatgcatgatgcattgagttttataacagacctcaaacaacagtcagactccctactgattgtgaggacacacgggagactttttgtggttgaaaattgagctgcgtgtaaatatgttggcttgacaatttagctttttaaaa

SEQ ID NO: 242094 - DNA, 320 bp, Glycine max
atgagtgggtcccatatatctactccacagttagtgcgaatcaaatcactttcgcattttatctctagcatacattcattattctttacctactgctcacgtttgggttttttatatgaaaaacaccataactaaacgcgccacaaggcatccctatagcaccagatctcaatctagaaccatgggtgaccaagaggagacatatgaatagatgaaagccgacatgtcggctttgaaagaacacatggcttctatgatggaggccatgctatgaatgaggcaactaatggagaaaaacgtggcaccgttgccgtgtcagt

SEQ ID NO: 242095 - DNA, 235 bp, Glycine max
aaccactgaacttccaccataacaaaaaatccatggacatcaatcgttacggagccaaccaaagggtaactttccatccacatcctggcagaaaaggttagtccttaagactcataaacttttatatatcaactcctcccacctccaatgcactgtcaaacactactagattgataaagatcacgattagaatggcgccctcataacatataggaaaactaaatctccaagggaa

SEQ ID NO: 242096 - DNA, 339 bp, Glycine max
  unsure (1)..(339): unsure at all n locations
gaaacagatgccttgntaatttgtaaccctttgtgtcatgaancaaaaatctgacctggcgcagactctgtaattaatgctcctctaccgaccaccacacagacctttgcccttttgtgcaacaatctgaagcatttgaacagcctaaagcttatgctgccacaattacaatagacctcctcaacctcagcagcaaaaatagccacaacaaacaattatgacctctcccgcacaggtgcaatcccatgtggaggatgatcatcccatccttagatgggtgaatccttacaacacaagcaataacaacacaggcttattttagaatgctatggccaaaca

SEQ ID NO: 242097 - DNA, 382 bp, Glycine max
  unsure (1)..(382): unsure at all n locations
tcgcccaggcgtgcagggatgcttcctcctataacacatccttctggaggaaacttcttggaggcccaagtgggtctggttgctatttgcacccacatttttactaagtacaccccctgcctttttatggagattctttttttcgtaagttacggaaacttacgaatttcgtaacgatacttggtttctttccataatgatacggaaccttgtggattacataatcatccgctctttgacttacggaatgttacggaacctcactaattgagcaacgatgcttccattngatattcggtgtgtcacggaaccttacggattgtgcattaatatttacttttgtttccaccacgtcccggaatttcacaaatatgctaatgat

SEQ ID NO: 242098 - DNA, 261 bp, Glycine max
tattctttgaccatattagtggtaccctacaaatatgccgcgtgggtcaagagaccttggggacatcaagtggggtgctattgcccaaaacctaacttgaccaatctctacccaacccatgcatagtcggtcaatgagaacctgtgatgtacctaatcacacgagcttctaccagtcaactgataaaatgatcataaacccacagcaaagaggtttgtggtggctgaccacctgtgaatcttgtgcgatatatgggttatg

SEQ ID NO: 242099 - DNA, 435 bp, Glycine max
gctacatttaaagatggatatctgcgcagcatctgagactattcgctgatttaatcattaccaacaacactttcagaggggagatcagccagtgaagctgcactcaaggatataaatgcttctcttacgtcctcacgtggaaggatgcatggtacaattgttttatcacgttacttagtcgggtacatcttcttttgcaatgaccgcgatgtcaatgtcaccgcttatgaatgcctcgtctatttcttttgtgaacaagcccttcccgccgatgtctgcaagaggctgtgatattattttgtcaccagctgctattattatcacaatctgaatagccccttctttcgcatcctctggatgagatgcactgagctcgctctggtctcatatgcctgagccccaacttgtggactgctctatataaacaaaattatt

SEQ ID NO: 242100 - DNA, 333 bp, Glycine max
  unsure (1)..(333): unsure at all n locations
taatgcatataatacacaaactataccatgaacaaaacacaaaccaaacccaacaattacagcttgcagaaaaaacaaaactccgattcaattgtaagtaaggtaatatttctacaaacctttgtgtaccatcgttacgctgcacaaacagtcccatcaatggtatggcattagcatcatgttcttgtgaagcctgcgcattggtaacaacattacnttcctgtgtgctgacacgcgcacctagatgttgtattgtcggctgaatttggagtgcctcttgggatcctttatttgacaactcttttttaatagcctctttcaatgcattggtca

SEQ ID NO: 242101 - DNA, 396 bp, Glycine max
  unsure (1)..(396): unsure at all n locations
actcagcttctagtgggagggtacatgaatgaattgaatacacactctaatgttatatatcccaacgctatggaagtatgaaactatacagttgattatgaatgaaaggaattaattagtactacctataccaacaagatgaatctactttttatagcccatcaattaagaactccacaattaagtgtgctggcttggagcaatatgagatgtgtgaccttatgaaaagttcatcaaaaagtgtgtgagtgaagacaaagcacactataacatcttgtgttggtttgcatggacaatcaacaatcctacaagtagtccagcattgcacctctaatctccttcttagacactaataattagaatgtcatntgtgacaccctttattccgacatacat

SEQ ID NO: 242102 - DNA, 330 bp, Glycine max
agcttgacaatgtccgatgttaatttcatgtatttcttaaggattttagtactctaagccattcacatttaaacatagtcttccaagtttcgattcaggatgtgtatgtgactatttgaaacagttcttcctaatttgacatttgaatgttgtgcactgctttataattagagctaacaagtcttattagcttgacgttcacagtttgtctaacgacatactattatttagttcttgcaagttgcatctcctttgctacgtgagcgaatatactatctattctttttttacataactagtataaaagcattctttttttttgttataaat

SEQ ID NO: 242103 - DNA, 193 bp, Glycine max
aaccaactaggggacagagagaaaaaggaggagtttctctataagcccgcggcacaggatagaaaatatgttatgggcagcacaacattcaagaagtgaggccttgtataaaaagagaaaaaattagacctatatgttaaacgtcaaaaaagcatttggcaaatgccgataattcttctcagatgacgttaca

SEQ ID NO: 242104 - DNA, 316 bp, Glycine max
agcttggttatctccttcttcactacatcaataatcaccgggttgagtcttctctgtggctgtcttactggtttagctccatcctctaaatttattcgatgcatacatgtggatgggctaataccaagaatgtccgccagggtccagcctataaccttcttatgcttcttgagaactgacaacaacttctcctcttgctcatcagcaagggaggcagatatactcactggaaaactcttgctatcatccaagtaagcgtattttaaatttgatggcagaggcttcaattctggtgtggtcggctggacagtggtaa

SEQ ID NO: 242105 - DNA, 283 bp, Glycine max
ttacgtgttggttccttgatattgccatgcatatctttgcaatatcatgtttgtgtgcgtcttttctatgtcattatttgatgacgttaccatgcatgctcggctagtatgtttcttttcatgcttgtccgtgtatgatcgaagccgtacccgaatcatataaacatgaaaatgcagtaactatgaagtgatcctatgtcgtttcccaacgagcagtgacaaaccaaatgttcataatatactatcagtaacaataacgattggggggggcgggggagtcctg

SEQ ID NO: 242106 - DNA, 375 bp, Glycine max
ttatatacacaatgggtctaccatatagttcttatcgaagaacaagttgtaaagcaaatatgcaactaacaacgggaccaaaccttcttttacttttctctattcataaagcggatccaaaaacccttcctaccgtatagcggttctcttatttttacatttgaaatagggacagtgatttacgagaagtataaaccaaaatatagtctgtcactctatctatatgccaattaaatgataatatcttccgccaaactttagaattcaggggggaaagaagtaatactcgaagatataatatctataggagtaacttagaaaaaagaaattctccctaaatatagaaacttgtgaaaataatatatattaacacaa

SEQ ID NO: 242107 - DNA, 416 bp, Glycine max
  unsure (1)..(416): unsure at all n locations
tactaagcttgaacttgcgaaagctcgatacataagtgttntgagacaatgactgatttattcaggagtctgtgctttaatcgattatcatgtgatataattgactacttctctttctacaattgttcataagtgaacaagaatactttaatcgactactttgagtatctaatcgattacattggtcttgagttgttccaagatngttggaagaacactttaattaattaaaaagataatctaattgattacttcattgaattaattgattaccttgtagatttaatcaattacagacaattataattgttttctctataaataactgtcgcaacctacccttcngcgggagggcgacgcgagactcgcgggatgctgtgttcacgaaaggaatacgcgcggagtcgccaccaacg

SEQ ID NO: 242108 - DNA, 338 bp, Glycine max
catgcaagcttcacgcaagagcgaaaccgcgcattactctttttcgcacttttttaccctcaagccgaaaaaatttcctcacacagttccggcaatttctttctatcatcttcctccctttttttgttcaataagattatttccggttattaaaaagaaaaggtaaaatatatattgctcaccatgaattcgtccatcgagcacccgatgaacagatataattgttctactaatcaatagtctcaagttatgagaataaggttggcccctgggtaacaaaccgaccacatacatttgggataacaaataaacataaacgatcttagttactgcttcac

SEQ ID NO: 242109 - DNA, 435 bp, Glycine max
  unsure (1)..(435): unsure at all n locations
agctctaggagaaaccattagaactaaggtagttcctaaacatttatttattgaggaagcttcgccaagtgtccccattgtaaaacctttattcaaacttttcaaagttagtgagaaggctaaacgaaaaattatggaacttataaaaactaaatccttaactgaaggcgtaggtgacaatcatagtgaattactaaacaagattggtagtttacttaaggtcattccagatactccccaagcctcggaaaatacttccaaaatggtaacaagaagtacctccaaattaattaatgttattaatgaagatagtgaccanaactcagataacacaactgagataggatcagcgtcacaaaacaatattaattcaattaattccaaacactggaaaacaccctcccaattatattatcaacgtccaactggccctga

SEQ ID NO: 242110 - DNA, 119 bp, Glycine max
acttggagtggatccttggattgattgagtggttagcgtaacacccctgatatatatatctatatattattaagaatatgttgatgtcgatatttgtacgctatttcatcgaatatttt

SEQ ID NO: 242111 - DNA, 294 bp, Glycine max
  unsure (1)..(294): unsure at all n locations
gcttatcgcaaagcttacgggaaaatctatgacctatccatggcagaagtctccacagaggccattgccttcctcgnccagtattatgatcaaccattgagatgcttcacttttgggaactttcagctatcacccatggtagaagaatttgaagaaatcctatgatgtcctctaggaggaaggagaccatagctcttctcaggggtctatccctcattaactagaatttctaagatagtccaaatctcggcgcagggaatanaccacagaaagcaagtcgaaaatggggttcta

SEQ ID NO: 242112 - DNA, 309 bp, Glycine max
gaagtcgtatccagtcaaggtctgagagaccatacaattttcctaacgatttctaattatgtgggccattaagtctatcatatgctgacaatagccgagaagcccatgaatctcttctggggcggagtaggtgtctgccatcgccttggccttggctaacaatcggggaagttcttgacttcccgttcaaggtaagagcaaaccgatccatccacatggttgcctcttggtgtaaagagtcgatcacccttcctctagcctctttttccgcatacacttgagcatactcatccgtgattctatgctcgt

SEQ ID NO: 242113 - DNA, 275 bp, Glycine max
ttatggagttcttttgggaagatacgagaataaccctatggttttataatttcatctattactggccaagcacactgatcatgttgaataaaattcggtttatgcaatttcatttctgtcgaaatctaccatttcgttttctggtgattaatggaaggctaagtcttgcacattgttttttcttgaagatcaaacacagctctctttgaagattgttattactatgggaactgaacagtctgcctatttaccattctctgtattggtgtaaaaaa

SEQ ID NO: 242114 - DNA, 359 bp, Glycine max
aatgaaatcatgtattatctttaaaataataataacgaattattaaagaaaatattattaaaaatgatatttccatattttggtttaaaagaaagaaaacgcaattatctttccaataatattataaaaaggagatgaaattttatccaaaaaaaaataattcaatctctttacaatgataactataaaaggataataaactattttatcaaaattatgaaaatgatataaaatacttaagtattattattaaattaatatcaaaccctatcaataaaaatcattactatgatattaaattattgaaaaaattatatcatgttgataccaaagccgtaagctcattaactaatgtattt

SEQ ID NO: 242115 - DNA, 372 bp, Glycine max
aagcagaaaccccatcctgtttcgaagtagtctcactctgacctaacatgtggaatatcttccactcccaaacctgctggagctaccagatacttgttcagctgaattataactatgttccgtcccatcaacatctttaaaaaattcaggctccttagtggtaaccatgaagtccatcaagttgcggctgaaccccaaatcaaaatacaccctctaggcatcctagatatgaaaatagatactactagatatagcagtggcagaacattaaaaaaacttgaatattgaataatatcacaataaagcacccatatatatgttcatatcctctactggcaaatcagacaaagaactcatatgactgtgtctcat

SEQ ID NO: 242116 - DNA, 216 bp, Glycine max
tgacccctaaatactaagagctcacatcgatttacgcagaggtagattaagcacattttagtaatgctacaacagtgcaactacagaccaaatatcactattacgataagactcctatcctatccctatattaaataaggaaagaagccttatatagcattacatttattactcttcaatgaatatgtgtgagggacacgctagataagataacta

SEQ ID NO: 242117 - DNA, 374 bp, Glycine max
  unsure (1)..(374): unsure at all n locations
ctgactgaattatttataattgtgtatatctatagntggcaagattcttgggaaacccaattcccagagaaagtgattgtcaatggatggagggcatactcatgagatatcacatggtgttgtcttctgtccaactatgaatgataagttgtgaagacttgcgtaaccccaccttatcatacattatttggccagcataaagtctccacatgtaactcaatgagacgtgcctcattgaaacgtaacgtctattcaagcatttgattgtattccatatttctgtaaacatgctctgtgcatgttctgaaaggtattctggctgataattatacgcaccgatatctaaggcatatatcattaattattctgagctg

SEQ ID NO: 242118 - DNA, 385 bp, Glycine max
  unsure (1)..(385): unsure at all n locations
tgggtttcatcatatacctgtggtgtgggattgtatctaatggattctgtangaacgatggtgtgacaacagaggaacgttggaagacgttcatacaaagatacaaatgaggcaagaaggagctttcaaaagagacagagccatggcttactctcttgctcacaaggtaacttgtctgcttgcctgtgttgtcattgtgtgaccatttctgctgaacttcaaaaattaattttgaagttagatgaactttaactccacattaatttaaaattaaattatatatgtagacattgacttaaaatcatgtcagttgacattttaatgtgagtcttaaccatatataatttgatttcagacaagccacaccaaagtccaataaactatg

SEQ ID NO: 242119 - DNA, 419 bp, Glycine max
  unsure (1)..(419): unsure at all n locations
cagctntaagccaaaatcctaactcaccataattcttgaccctgtgtgagaatgcccatccttgctctcagaagaagacaaaaaaaagaaagttcccgatcaagggtcggaagaaagcaaaagaagaaaactcccaatccaagattgggagaaagcaaaaaaagaaagaaaattcccgatcaaagatcggaagaaaacaaaagaaatatgcagaaaggtctttgggccagacaatatctgaacaatacagaattgtcaccaccaaataaggaaagaaaggaaaccacgacctgaagtggtcctctccctttgattgccaaccaaaatcctgtgcgtcagtgactatttcacctcgcactaaaccaaaatagaaaaggaaaagggccaaacactcagagccaaaatcccctccaaaacac

SEQ ID NO: 242120 - DNA, 398 bp, Glycine max
ttgaaaatgattgttgtacaaagttgtcttttaaagtgtctatcaaccttttattcctgactcacttggtcatatgtgctggcttcttcactttatatttggaagattctaaagatggttgaccactcattcctccaaaagaatattggcggagaaaatccatactttattttacagaacgaaaagcatatttaagcttaccatttttacccaaaaaaatgtgtacaaaattatgagtacctacatatttaattagtgtcaacacgtagaattaaagatatacctgttatcataaaatgttccgagaataaatgtttattttcaagcgtaattatcagacatttattcatttactagattaacatattaaaatgatcctgactaaatttatattggcc

SEQ ID NO: 242121 - DNA, 416 bp, Glycine max
tcctttaccacaatgagaaaagaagatgaaagatagaagaattacagtagtgtggatgtctcctccacctctagaaacctcataatctcttaaaatctcatctcaagctccgcgagatggcttcctcatcaagctcagctctctctcagtctttccacagcacataactctcataaaactcaaccacccctcagaaattgtgattgtagcttaaataggcaatcctgtctgtggacgcgcgcttagcggacgtaagtgacttctggcttagcgccagtcacactcgctcaacctgaaggtgaagaccgcgtgcttagcgagttggctttcgctcagcgcctctatacagctcatccttcttctagaattgtccatgcgcttagccattaaatggggtgcttagccgatgatgcgct

SEQ ID NO: 242122 - DNA, 295 bp, Glycine max
gtggacagggcctagttatttaaaaagggggtgaataaatacaaagctttcccaataaattaactctcttttgataaactaccagtagttctgagagttggacttttaacttaaattaattttatgctggaatcaatacacaaagagaattgttacagctttaaattaattcaattctaaagtgtacaaatgttaactctttaccaacctgtcgctaataagaatttttaagatttacaccaccttggcggaggcacctgatcctgatctgtcacgaagaataccgatcccccct

SEQ ID NO: 242123 - DNA, 359 bp, Glycine max
  unsure (1)..(359): unsure at all n locations
cctaagcgacgcagctgcagcttgacatacaacttgtattcttactgtgaatcggcatcttctgtttcgagcatatagtacttctgaaatctatacacatctgcgaaaagattatgaaaaaagaaccgcgcattttggattaaaggaaaaaaatagaaaaatcacacaatttggctcagaaatcagtgcctatgaaaataaagtgaaagggaagtgtgcttgtcgttttggctcaaaatatgttctataattggtgcctattttataccaatcctatttctgaaatttgaattgaaaattactatgaataccagttccaanactagaggtttcttgaggctcgtttttataattttttt

SEQ ID NO: 242124 - DNA, 172 bp, Glycine max
tcgcggatgaatatgctcaagtgtatgcggaaaaaaaggctagaggaagggtgatcgactctttacaccaagaagcaaccatatggatggaccggtttgctcttaccttgaacgggagtcaagaatttccccgattgttagccaggccaatgcgatggcagacacctacccc

SEQ ID NO: 242125 - DNA, 387 bp, Glycine max
atatataactctcatgcaaaagatccttattcgatgatatataactaaaagggactctttcactctcacttgattggtagataagttactttgattggaatgtgccgcatccacatggtttctgctcgatgtaatttctaaattaataatattctctctaatatggctactaatgtacctttagtggaaaataaataactatttcctccattttccgtccttttttcttaaataaaaaacttgattgctgaaattgagttgcttgcaaagagtttattaatcgggagcagcaagttctttctgtgacatgagtgttttgaacaggtgttatcggcaactctcaacaagtctgtgtttttccctgtctacaggcaagatcaaaaattc

SEQ ID NO: 242126 - DNA, 239 bp, Glycine max
ataatgaatgacatccatggatggcaatggctactaaatgcaatcttgatgggagaatgcctatatatagcacatatgtttggtccctgagctcatatctttcatatttcttctcatatatacatcatctacacagagagagagagagagaactaggaagaacccgaaacaaaacaggtctttcatgacaatggtttgaggcatattctgatttttgtttctacaatatgtaatgacat

SEQ ID NO: 242127 - DNA, 166 bp, Glycine max
cctattgacattttgtttcagagattctgctttcttttctgaacttatggaaacaatctgaagaaatcttgttcgctttcctttttaagggtttcattcacaagaatcttggactagtatatatctgaacagtgccctgagacctcggaatgcaccttaagatata

SEQ ID NO: 242128 - DNA, 237 bp, Glycine max
ttatgacaccgattaccgtatactaaaaataaataaaaaaataataattatactacgccatgaagactaaattaaactttaaaatcttgaggtaaaggtatcacattctaactcaaataattctaactcaaataaaagctttaattgtcaataaagtatattgtcccaaattttgcctaacaagttccttacaaaaaaatcacccttaagaataaaaatccctgatttattctcaaa

SEQ ID NO: 242129 - DNA, 337 bp, Glycine max
  unsure (1)..(337): unsure at all n locations
tcttatggctttcattcttaagttggcctaattctgggttctatgcttccgctttttacaagctttaaccgatcgattaagccgttttctcgcttaatcaaaaaaataaaataaatttccaccgaacaattgaattgtaatatccgttaatttctattaaaatgcaattcgcacgtttggtcatgccgacaccacgttggaaaccataaagaggtataaatcatcttatattaattaaaacntcttttacttaaataaaccacagaacaaagcaatcggacgtctttctttgggatttctctttcttaattgaattgactaatatctaaagtgaaac

SEQ ID NO: 242130 - DNA, 362 bp, Glycine max
  unsure (1)..(362): unsure at all n locations
ttaaaacaaaaatggcatacaacctcctcttataaacacaaacatcaatgtgaatttagagtaaactcatgcacatacttccttactaacgtatacttgcacaagatatcctcctaacttataaaaatgcacccacgcacaatcatagcaccttctgcacctaaattatttatatgtacttctgaggtgtatatgctacctacatcacatgcgcttccttggctaaatntacacacacgcatactcaaagcattttggctaccaaaaaatgcacacgtgcacattctggatttctaataccatacataacaaactttggatgaatctgatattacacaaaagggctcatttatgcttaatca

SEQ ID NO: 242131 - DNA, 142 bp, Glycine max
ttttaaaacgaacatctttaccaaaattttaatggactttaacctccctccaaacgcgaagacatgtttataaacccctttacatttaacccccaattcaacccccaacaattcgcacaattgatggaaccccccctgccaa

SEQ ID NO: 242132 - DNA, 417 bp, Glycine max
  unsure (1)..(417): unsure at all n locations
agtatctgaatcctattccatttttaatgcatcggctacattgcacattaaaagcactggcacacgaagtgaggattgacgaaaaagtaccatatacaaaagtatcctccattgctttaacttatcaaaacacttatgtctcgttaatatcagagtccttgtaggcatctctcccggataacttagaaacaatgtcttatcacttgaacatttactttgaggggaaagtcccaactttcaaatcaacattacaagattttaacaaaaattaaccacattatgtacttcttgattgaaaagtcccatcatcatttgttactgcaggccaataaaatatataaaaaataacgctttcaagtcagacacatatcttcattttttatttgatacacaccattacatggnttttattaaata

SEQ ID NO: 242133 - DNA, 357 bp, Glycine max
aaggtattgtcgttagaattgcaacaccatcacattcattattatcgtggtgatatattacgcgactcaatcagacatccgagtaaaaagttattgtgatttgaattggctgagagcatcaacattcaatttctagtgcttagattatactgggactcaaacggacatccaagcaaatagatacagttggtcgaaattgcttagagcttcgcattcaattttgaacgtctcccattattaccggacttcaataaacattcgagtctaaagctattggcgtttgaattgctcagacattaacattcattttcaacgtgctgtatattacggactcctcatacatccagaataagttat

SEQ ID NO: 242134 - DNA, 351 bp, Glycine max
tgtacccggatcttaagcacctgggctgcagctaaacccctgtttattataaatgtgaaataattacaatcacaagcaaggtattctaactacatgccagagataaaaatgaaaattatatacgggaaagaaaaactgggttgcctcccaaaaagcgctcttttaatgtcactagcttgacacaacatcctgttatctaggatccaatagagttcctacttcaaggaccttcttctcaagtctcctttccttcatcacatacactttaaaatagacatattggccacggggatctttgtcctcatggaacaatcaaagctgatcctctatgcccatctgcacatcttcttt

SEQ ID NO: 242135 - DNA, 329 bp, Glycine max
atactgaaatacaatatcacatgctctttgttttatgtttctaaacaaattgtgttttcttaaaacatcttaaaattttaaattatgtgggggaatgttagtaaatatatgttatataatttcaaatttataaaaatatattacttatattaactttctttataaaataaaatatttgttttataatttgttacctaaaactagaaatcctatcttttaggaatttgcctttagtgggtcaatttgatttgatacgatcggttgttattttttttttgtctacacatgggttccacattcactacgtgtgataatttactttgagtttt

SEQ ID NO: 242136 - DNA, 191 bp, Glycine max
  unsure (1)..(191): unsure at all n locations
agcttatgctgcanacatttataatatacctttttctccgccaaaccaacaatagcagaattattatgaccctcttagcaatacatacaatccaggttggaggaatcatccaaatctgagatggacaagtccttcacaacaacaacaacctgtcccttctttcaaaatgatgctggtccaagcaagccata

SEQ ID NO: 242137 - DNA, 378 bp, Glycine max
  unsure (1)..(378): unsure at all n locations
tttcgctcctgagtatgacagtcaccgctttatgagcgctgtacaccancagcgcttcgaggccatcaagggatggtcgtttctccgggagcgacgcgtncagctcatggacgacgagtatactgatttccatgagaaaatagggcgccggcggtggacatcactggttactcccatggccaagttcgatccagaaatagtccttgagttttatggcaatgcttggccaacagaggagggcgtgcgtgacatgagatcctgtgtaaggggtcagtggatcccgtttgatgccgacgctatcatccagctcctgtgatatccgttggtgttggaagaaggccacgaatgctagtatggccagaagaggaacccgtctga

SEQ ID NO: 242138 - DNA, 51 bp, Glycine max; identical to SEQ ID NO: 234853

SEQ ID NO: 242139 - DNA, 347 bp, Glycine max
gatttgtgctcttttacctcctctatgactatagcatagtgtttgcgcttaacttgtgggaattggaagtatcttctcattaaaattcttgcattctacaggggttaagtcttcagggcttcaccactgggcacatttatcgtacttcttcttcatgtacttgagtccttcattaaaatattggagaaaaagctgctcataaatttggtggtgagggcaacttggcgcataaatttttaaatatcttccagaattcatttaggctctctgcactgagttgcctaatgccttgaatatcctttctgatggctgtggtcctggaagcagggtaataattttatgaatac

SEQ ID NO: 242140 - DNA, 356 bp, Glycine max
gagagaatagatgaaatcattaaagaactttttgtctccatggataaatcctgcatggttaatattaacactctctgccattgataaaattcttactatgcctacgaaacgaaatataacatatatatatatatatatatatatatatatatatatatatatactcatatcagtaatcataataataaatctaaaacgtgtcatttaatttacatagatgaagaaattactttcaattatattaatatctatattatcactgggaaaataggtttttggtataataataataagaaaatctcttttgtgacatacataataatttgatttgtttgatacacacaaatatcaaaaaa

SEQ ID NO: 242141 - DNA, 302 bp, Glycine max
tgtaatgacgcctctgtggcttccacatacggaatgaaggatgggcatctcaccaaaatgttttcctcgcctgatacaaagaccaaatgcccttccgctacgaatttcaacttttggcggagcgtcgagggaacaactctctatgagtggatccacgggcgccccaacagacagcggtagggagggttaatatccattatttggaaagtaacttgacccgtgtgagggcctatctgtactgagagatagatctctcccttacactctggcggtgcgcgcgaatgtccaaccaacattgaact

SEQ ID NO: 242142 - DNA, 314 bp, Glycine max
ggatggtgggtttatgcgcgcattgtggatgtggaaaacttgttgtgcaccatcgcccgaccgccacctagtaccacatgtgatgggtaccccataatcctacaagcttgagatgaagaagtgttgaagggtgaaacttcctgcttttattgttgaccacagagtggtacctgtagatatgtcgtgggggtcaggagaccttgttgacgtcaggtggggtgctattgcccaaaaccaagcttgaccaattccgatcccaccccggcatagtcggtcagtgagaatctgtgatgttcctatacaagcgagctcct

SEQ ID NO: 242143 - DNA, 327 bp, Glycine max
ccacctgcagcatgcaccttaagctccttcaactgcacaaggctttttatatttgaagatattccttggcgaccttccccgacaagaactgaaaaaactatcttttcttttggacaagaatggctggctgggggccagtaaaattttcttcccatcataccttggatgcaactattatcttatacccatatcaactaaaacttgacgggtattcaagcaatccttcttcttgccttgaatgttaaagagcgttccaatcacactgtcacaaacatatttctccacatgcataacatccagaacatgtctaacgtcaagatcacacca

SEQ ID NO: 242144 - DNA, 291 bp, Glycine max
  unsure (1)..(291): unsure at all n locations
ctgatgaagataaatcgggctactttatgctcttctctaatgacaatagcatcaattctggcactcaaatgctaagaatttgaagccatcttctcaattaaatttctggcttcaacaagggttatgtctccaagggcttcaccactggcagcatctatcatacttctctctatgttactgagtccttcataaaaatattggagaagaaagtgctcacaaatctggtggngagggcaactggcacataattttttaaatctctcccagcattcatataagctatctccactg

SEQ ID NO: 242145 - DNA, 435 bp, Glycine max
  unsure (1)..(435): unsure at all n locations
gaaactaagcttctgatgatgatgaatcaagatggattcaaggtgcgntgatgataactatagatgacgacaaaaagcccacgagaatgatttcaagattgagtcaataacaatctcaagaatcaagaganatttgatttcaagattcaagaatcaagtttcatgattctagactcaagactcaagaatcaagagaagactcaatcaagataagtattaaaaagtttttcaaaacattgagtagcacatgaagttgtcacaaaagcttctaccaaagagtttttactctttggtaatcgattactaatttactgtaatcgattactagtagcaaagtttgttttcaaagctttcaactgaattacaatgttcaattaatatcaaatggtgaatcgattccagatttggtattgttaccagtgtgttgacgttgaa

SEQ ID NO: 242146 - DNA, 296 bp, Glycine max
gataaaggggatatttcacattattttcatgacacacatgcaacaatgatgatttggaaattttatacaaaactggtcatgcatgcacccatgtggacactcaagcatcaagttttatggtcatgtgacactaaggcttaagattcatttttcctattatagtcaacccaatgtttccaaaacatgttcttttatcaattcatgcattcatccagtccattttgggccatttttttgaaaaatttcacaccattcacccttcaagtgcatacacattttttcaacaaaaccctttg

SEQ ID NO: 242147 - DNA, 246 bp, Glycine max
ttctaaagctctctcttgtatattatctcactcttagaataaattagaataaaatttatatctacgctcttctaaatttaacaatatgagatccaatatctctcttttttatattatctcactcttagaataaaggtaaaatcgaaaggatctaaaatgtgaaatattgaatattttattcaatctgagcggattttctggattaatttttaaaaaatatccaatcccaaccacatttatacatat

SEQ ID NO: 242148 - DNA, 437 bp, Glycine max
  unsure (1)..(437): unsure at all n locations
agcttgtgccaatcaaatcactcctacattttatctctagcattcattgtantgtggtctccgccctttgccacgggaagccgggaagtccatatcaccttcttaattgtacacatggggcactgcgccctcttatgcgcgagtaataagatataattntccgggctctcgtgtccgtaaaaggcattcatattatgcataagcatctcttcataacatcataatggacatatcctgcgattgtctcgtatcatattccaacctcacattttgcatgagtcatggcatcatcatgcatatgcgctcataaaactttatgatctgcagaattgcataccatttgttttcatgtttgctcatccttgcgtttatctctacaaacagaaacaaagaagggggaggcgtgaacttcacactacattttagttttatggtta

SEQ ID NO: 242149 - DNA, 320 bp, Glycine max
attccatatgatggatgcatatgtatcacgcatatgtacctactaagctcattgagcaatagggtttttggacgcctaatggtgtgtcgtgaacatccacgtagatttgaaaattcattccacaaggaacatactaagcttttctcttaatgagattaacctattctcagcaaggatagtttgttaacaaatccgcaagttgatctcctgtggatacaaactataattccaatagacccttttaaacatgaacccttatgtgttggcacgggaatcatgatgagaattttaaaagatcatgggacagtatattttaaaga

SEQ ID NO: 242150 - DNA, 379 bp, Glycine max
  unsure (1)..(379): unsure at all n locations
tgactaggcgagatgattntagccttagtttcactttatttattagncaattcaattaagaatgagaaatcccaaagagataaaatgtccgattgattntttcgctctttatttactaaaaggtattttttgattattatattattattttacctctttttttgatttccaacgtggttacggcacgaccgaacggtcggaattcattntaaccaaaattaacggatgatacaattcaaacgatcggtggaaatttattttatttttagattaagcgagacattacttatataaatggcttaagcacgtcaaaagggggttataaaagcagatgataacgagaataataatacttgaaacaaaatgtggaccaccacca

SEQ ID NO: 242151 - DNA, 361 bp, Glycine max
tgccccagcacaagctcaaacaattgctttgatctcttcacaaaaaaatggagcctttaaccaattactatcctcattgcttatcttgttgaaatccacactttccatctggggtcgtgagacatagttctcctaaagcatgttagaaaagaagcgttaactttttccttaacccctaccacattttcaatataactgcatcagaattaacgcactttattttattcttctgacattttgttcaaaggcaagagtggaaaaattgggtattataatcctcaagtttcacccacgcgctcttgatttctgcagaacatgccttcctcattctgaacggggccaaaattattgcctgaattgt

SEQ ID NO: 242152 - DNA, 362 bp, Glycine max
  unsure (1)..(362): unsure at all n locations
tgcttctgaatggacctganattgtgatcccttatgcttttctaaatcgaaaaaaaatagtgntaaaacttttgttgctcaaagaattgtatcacaactttctgttaaaacaatattcaatcaatcacccgaacatagtacccttttgttaaagtgcatcaatttgaaatatctttgagacttagcaaatttataaagaatgcaatagagagatgagagttaaggagaagatagagaacaagatttatactagtccactctctatttctagagaagctaatccaggtatctaattcaacccgaattagattttcactatgcaatgtgagttntacaagcaatcataatttccaattctacct

SEQ ID NO: 242153 - DNA, 376 bp, Glycine max
gctttatagaaagtcgttcctaattctctacaattgcatcacctctcaatgagctggtgaagaagaatgtggtatttacctggggtgaaaaacaagagcaagcctttgctttgctcaaagaaaatcttactaaggcacctgttctagctcttcctgacttttctaaaacttttgagctaaaatgtgatgcctctggagtgggagttggagctgtattgttacaaggtgggcaccctattgcttattttattgaaaaacttcatagtgccaccctcaactaccccacctatgataaagagctttatgccttaataagagccctcccaacttgggaacattaccttgtttccaaggaatttgtcattcatagtgatca

SEQ ID NO: 242154 - DNA, 116 bp, Glycine max
gggatttacgacctggagatgctacctcatacgtacgctaactaatgtaacgaggctcccttcactatggaattagccatggaataaggatcttcaccaccacaatgaaccttgga

SEQ ID NO: 242155 - DNA, 359 bp, Glycine max
ctagcactaattaactcctccattctgttaagacattattttcaaagccatcaaatcatagtgaagactgatccttcatttaaacaagtgcatacgaaactacaactcaccggaagaatgggtgcatgggccattgaggtctcgaagtttaccctacaatctgagccataaggcccccttaaaggacaatgtctacccaacttcatagtctaactccccctacccaggacaacgatgaaggttgatggactttgtatgtagatggagccttcaataacaaggacagccggcgtatgtgttaccactcaaggatcggatcaccgctccattgagcaatcaattatgtttgattataaagc

SEQ ID NO: 242156 - DNA, 405 bp, Glycine max
aaactcagcttttgggcaaggaagaagaagaagaaagatgagctcgaaagaattgtttatgtttaaaggtttctcaaaagttgtcaagaagctctaaaaagatctaaaagttgtttaaatgcaagtcaaggtcttgcttttatagactcttcatgtctggttaagaaaaccatcggaagagttattaccttgagaaaatccctaaaaccattggaaaagttacatctcttgactttttattcaaaacttgtcactgataatcgattaccataaccatgtaatcaattacacacagcatctaatgaaaagatatgactcttcacaattgaatttgaatttcaacgcttatatacactcggaaatcgtataccaatatattgtaatccattacaccatttaaaatca

SEQ ID NO: 242157 - DNA, 224 bp, Glycine max
gtgttgaggcgtgtgattttaataggaatggctactattgtgacacaagaaccatccaagggaagatgcttgttccctattaaaattctgacaccggtgaaatgctcaaatcaatgtcgacattcggaagccttttattggattgccatctgttttataccattaacgtaagaccattaatgttatcatgatgaatacacgcattattttattccttctgcgct

SEQ ID NO: 242158 - DNA, 253 bp, Glycine max
aaaaagttgctcaattctttggcagctgccagagagccatctcttgcagattcacagttgagcccacccatctaccttttaaaaggcagacccttctaggagttttagatacatcaagatattctatggttgaaaggaggcataagagaatatacttgtcctgaccttgaacagaagggccctgtaattgattccaaaagattagtctgtcactgacatgaaggctaactcgggaaggtccttggtcattaac

SEQ ID NO: 242159 - DNA, 296 bp, Glycine max
  unsure (1)..(296): unsure at all n locations
nacttgccgnntcatatgctacgtttngcgaacatagganatctttaagaggcatccctatgccctcagcaagcttatggctccctgtggatcctctaccgtgaacaatagctaatataatctttgggctacgcccacttgaatataaaaaaaacggtgacatcattctcgctcacatatatatttaataaaaaacagatttactatgggatcttcctacccttaattacaacaatgcaatgcgtaaataaacttttacatgccgataaaaatcatactgaaaacatataaaaaat

SEQ ID NO: 242160 - DNA, 416 bp, Glycine max
  unsure (1)..(416): unsure at all n locations
tattgtgactttacacttattgctttcttatcataactctntgggtacaagtattgcttaactaatttacaatcattcttatactttattcanggaaccgatgatgaggttgtcgattgctctcatggcaagcaattgtgggaactttgtaaagagaaatatgaacctttatggctccnaggagggaaccactgtaatctggaactctatccagaatacctacgacatctcagaaaattcatatcaataatagaaaactcaccatcgcaggggcaaactttgtggaaaagcatacgtggagttgaagaaccccacaaagtgtgattgttttaagcttccacgataatgctgatctatgggacaaccacggaaagccctgataaacaaaacaactgaatttaacggctaagttgata

SEQ ID NO: 242161 - DNA, 391 bp, Glycine max
ataaactatatttcatttctcattcattcccagccaactcttggatatctgactagtttcatactgttactctggttttgctaatgcttgatggtcacacagagcaatttggttgctatagtggctaagggtgatcagattcttatgcctataaaccaaatcactgtacataatattaatagttaagtgggtaggatcttaatttatgttgttaaaaataaaattgtgaatgacggaataataataacaaattgatttgcttggctctatgtaattataaatggatgttgatttttgggttgcacgatctcatctcaagggcgtatgctggttatctgagactgctgtacaattaattgatgggactagacatgtatcctggggttctttg

SEQ ID NO: 242162 - DNA, 420 bp, Glycine max
  unsure (1)..(420): unsure at all n locations
gcatgcaagctatgccgatttantgtttttcggcgatatgttctaantgggtttgagaagaggaaaatttgattgtctcgcattgacaagtaaaaagcctgtggcaaatatagagaatgagaaaggggaaggaacccgtgtttttactgccagacctacatggccacaatttttacctacttaacaatgtcattactcagccaacattatcccttttcattatccaccacccaatcattcacgaaggtcatcactaaataagccacaaggctcgcctgccacataaccaatgccaaacaccacttttagcacaaaccaaacaccaaccaaggaaggagttttgcgcaaaaactcttatgaattcaccccaatttcggggtcctatgctaacttgctcttatgtctactccataattcaat

SEQ ID NO: 242163 - DNA, 318 bp, Glycine max
  unsure (1)..(318): unsure at all n locations
tcctctaatgacaatagcatcacttttggcactaaattgcacggaagttgaagccatcttctcaattaaatttctggctttagcaagggtcatgtctccaagggctccaccactggtagcatctatcatacttctctccatgttactaagtccttcataaaaatattgaaggagaagttgctcaaaaatatgatggtgagggcaactagcacatagcttcttaaatctctcctagtattcatataaactctctccacttgagtgtctaatgctcgaatattctctctgatggtcatggntctggaagcaaggaaaaat

SEQ ID NO: 242164 - DNA, 360 bp, Glycine max
tctaacaaagtattatttttctatctagctgtagcttttgttttaatgcacgtatctcttaactctggaggttgtttcttccctttttaatttattcattcttgttagtcaagggaaatgacaattgaattattaatctcgtccatgctttggtctttctcgaaaattgtgcagggacattattggttataatacttcatggaaaaatccttctggtgaatggcatgtgcgttataaattagtttatgagctactcacagaagatgtgacttctcgtttgaacgtggtattacagttgtatgaaatatattagtttctctttagccttcatagtctggcctttagatctaatatcttttt

SEQ ID NO: 242165 - DNA, 315 bp, Glycine max
acaccacagaatctgccttcgtctattttcagattgaggatgcccttaacagcacctttgtgaatgatttttctcatgcctcttaagtgcagaagtccaacattttgatgccctattctgacttcatcttctttgaaggatagacatgcggaggagaaactgcgtttttgaggtgtcataggtagcaagtgtactttgaattgctgccctatattagaacttcactcttttatttgtcaccaagcattctgactttgtgaaatttacattgaatcctcctcacacagctgactgatgctgatcaagtttgagtca

SEQ ID NO: 242166 - DNA, 366 bp, Glycine max
  unsure (1)..(366): unsure at all n locations
ntctcataagtcctaaatgacatttcaagctatgattaactcactntaacctccatttaccacagaattcagacttaaccttncaaccctcanagcctcactctntttccactcataacaccacattctcactttccaaccctaggttaactctacatttcatctctaacagatttccatgggcaatttcagcatacaaacatcacaaacatcatcacaaaaccctaaaacagaatgggtatgtctaactcatccaaacatggcaatttcaacaagctttcaacaagtttcttcacaaataactatcatgaagcagaaaactagcaagactacccatcatatctcccaaaccccatacccacgaaa

SEQ ID NO: 242167 - DNA, 221 bp, Glycine max
tagaagagacacttatattgaatggctcatactatgcatgtgtgcatatagtcttagactttctcatgcttagcgattgatcacatatgaagtagatgaagtattttcattctctaagctttggtagaacttacttctacttgacacacagaaggaaggattcaccgcttaggctaactgattaccccctttgataattcaattaatagcttctagaaaca

SEQ ID NO: 242168 - DNA, 302 bp, Glycine max
aatatgcactcagagccggttccagaagaaagaattgtctactttaggctacagaatggctacttaaagggtacgtgacaactgaataacataccctcaagcaattgattggttcctgggaaagtcaaaagatacttattagcatactctgacactaataattacatacttaaataattaaaatgggaaggtactttagaagtgtatgcgatggaatataaacctagaggactggatggcaacaaatggttgcacataaagccaatttatagagagaggtgctttctgttacattttccacc

SEQ ID NO: 242169 - DNA, 400 bp, Glycine max
ggacttaacgactgagctgcagctggtcaggactgaccgcgatatcttttattattgagaacgagtgaacaacggccgaaacctttgcgagattcctcacggaaaacgttacggaaacgttacggaagcgcctcgggttagattttcttcacggaaacaatttttccaagcaaatttcaagggagagagaaattgcctaaggggctggacccctttcttcttcatttcctcccctatttatagcaaaataggggaggtggctgccgcctagctcgcccaagcgagctcagctcgcccaggcgagcatggttgcttcctccacaagcaaccgctctttggaggaatattccagaaggccccacggggcctgggtgctattcgcacctccatttttactaag

SEQ ID NO: 242170 - DNA, 449 bp, Glycine max
  unsure (1)..(449): unsure at all n locations
agcttctccccaatttctataatgggggataatgaagtanaaaaaggttcaaccccttaggcacttctctctcttttgaatttgctgaggaaaattagttccgtgaagaaaatccaagccgaggcgcttccgtaacgtttccgtgagtaattacacgaaaattctcgaccgttcttcaagattcaccgttcgttcttcgttttcttcagtcttcaacgggtaagtacctcaaaccaagcttttcgattcattctatgtacccgtggtggtccacattttgtttcatgtattttttattctcgttttcatttactttttatacccccttttgacgtgcttaagccatttatttaagtcatttctcgcttaatgtaaaaataaaataaatttccaccgatcatttgaattgtatcacccgctaatttcggttaaaatgaattccgaccgtc

SEQ ID NO: 242171 - DNA, 420 bp, Glycine max
  unsure (1)..(420): unsure at all n locations
acctgcggcatgaagcttanactcacccatttgttaagcttcatttttgtctttccaacctcatctaactcaacgtcacggagcatctttctcaaatatttcatttccatctcacctttaattggtgtcgttctcttacaagttcccccattaagccactccatattttcaaaatgatcaggtgtgaatgtccggaaaaaaaatcctttgtgattcgaagacactatgaagttcattactaatttcaaggcattgcaataagcaaagttaaaccccacctctgtcaggttcttcttatgacaggagtggcagcccaatatggggtcattctcatagtagattgcagatttgagaaaccatttcccggttgaacaactaatgtaatcaaagtcaaggtactgatccgctcattaactatcc

SEQ ID NO: 242172 - DNA, 451 bp, Glycine max
  unsure (1)..(451): unsure at all n locations
agctttgaattcattctatgcacccttatgtgtccattcttgctttgaatgttttcttcttcatctcgtttactttcggtattcttttcttcattttaaatgagttttgaccgattgtttaaaccgtaacctcacttaatgaatgataaaatgaactccaactgatcatttgtgttgtaatgttctttaatcattgttaaaataaaatccaaccgatcattcacgttgtaacctcgattaatcaaaaataagtaagttccaaccggaaattttactctgaaagttctcttttaaatgagttgagaaataactaagtgaaactaaagctaaaatcaactcacaaatncaactttgtctgcgaaaagttcatttgaaaccatttgaggtccaacgccttaaacggtcctctttgctnttatcggtcaaaatgggtcgttcaaaagtataaaat

SEQ ID NO: 242173 - DNA, 422 bp, Glycine max
caccccaccttacttccccaagggttcctgaccctcgcgacatatctccaggtaccactctgtgatcaacaaacaaaagtaggaagactgactcttccacgctttctcacatcaagcttattggattatggggcacccgccatatgtggcactaggtggcgatcgggcgatggcgcaattcaactctcccctttccacaagtcaattataaatacaccctccctagttgcccacctttcaactgagctcaggcactcctacgtagcccttatcctcgttcctctcaacaccgggtcccgatcaacccctccaagcttccacaatatccaaacaatgcaattccaattatcatgaaactaccttaaaccaagaaaacagagtataggcagaaaactctggccagaactcattcaaattccaca

SEQ ID NO: 242174 - DNA, 314 bp, Glycine max
atgcaacctcccatcactatgaggcgaaggaatatgttctaacctatcgagcccaaggtttcaaacagacatcggttcatctcgggcgccatcgaatactccaccaaatgggtggaaacgcgctttatacgccacgctaacaaggagcgtggtggtacgttcatcaaaacggagataatctgtcagcacgccgtgcctaagaacattatcactgaccatgcgaccaatctgaaaaccaaaacgatgaaataattgtgtgaggatatcaagaccccacctcacaatctcatatcttatacgcccaaaatgaatgg

SEQ ID NO: 242175 - DNA, 407 bp, Glycine max
agcttacaagcagaatttgtggattattctgtttaatttcataactacaggaaatttaaacgacgatagttatcatcgagaattgttgtagtttttttcctctaattataaaactatcaccagcgtatattttaatacagtttctcatcattatcttaaaataagataatgtgcgtcataaaaaataaattttactcttctaattgtaaaattgtcaacgcatcatattttaagacaattccacatgggatttattgacttatccatgaattttttttatctttttggtaggcctcaattgcgtttgatggaaagtatttttttttactccagtgtaatccaactatagggataaatgtagcaataaatatagagaaaatctcttcatcttgagatgtagataatcc

SEQ ID NO: 242176 - DNA, 387 bp, Glycine max
aattaacaaatgactcttacaacgtcattgcgcatttggtgatgtgtgtgacaaaattaggttattacaagttacatgacatataaaattaagcatggtctttcattaggagaattcattgttagtaacaatgaaggtggagaagccaccagcaataacttcgatagttagccaaggagaacaaaaattctatgagagagagagagagagaaagacggagcacagggtataccttgttctagggcattttcaactcaaaagaaaaataaggtcttttattaaacaaagatggcgtatgcagaagacaaatcatcattcgagctccgaatgctatttgtggtaatggtataccgctgagaggcttctaatgaagcttggcactatgac

SEQ ID NO: 242177 - DNA, 391 bp, Glycine max
catgcaagcttgtgtagatggctagacaacctcgctcatatgttaggcagctatgccactcttgaactgactgctgctaatactctgccctctttccctttcttcctatgagaagcctgccttacaggcgcgttcctaacacactcttaaccatgcagcacccattactggttgacaaggatgatacatatttaataagcataacgagcatcctatcctatataattggatattaataattacgtaacttctctgccggcatttatccaaacctcaatgttagaaaataaaatctcggagacctactcagattataatacacagcagcaacattataaaatatgtttaccatttctatacatgccatgtcatcccctaccatatcacaaaa

SEQ ID NO: 242178 - DNA, 375 bp, Glycine max
agactcttttcttttccttcggctgcccactttgaccatctaggcgcccactattttgctccttcctgaggagaggacaatctctttgaatatgtgctcttttgcccataattaaaacatgctatgcctttatcgggacaacttgaggaaatgggccctaacttactacacttctaacaaatgatatgactggggaaagtaccgggtttgctaccactaccaccccgaaatcccataccaaaagcccttcgattgttgggacggttaccatattgcttaagagggcggaagtatggtcttccccgacgtcgaggcccttcattttgtcctcattgacccaactcctataaaggacgcccctcccggagtctcctc

SEQ ID NO: 242179 - DNA, 458 bp, Glycine max
  unsure (1)..(458): unsure at all n locations
agcttgtaggtcttggatcttcttcatcaatggagtcctatgcttcttgaagttcaatggcaacagaatgaataagaaagaaagatgattggagatgccacttcaaggagaatatgagtcaagaacaagctcatcaccgtagaaaatcatggataagatattgaagataagagaagatgagtgaagggagaaggagaaaaggagcacggaattttatgtttcaaatgagatgtggactttgaagtgtaattctcaaatgatcaaagttgaaaaaatacacacacaaggcctctatttatagcctaagtgtcacacttggaggaaaatttgaatttctattcaaatttcacttgaatttgaatttgaatttgaatttgtggagtcaaatttggagccaaaatttcactaattatgattagtgaattntagctatggttcagcccactaatccaagatca

SEQ ID NO: 242180 - DNA, 370 bp, Glycine max
ctttctttctttacccactcctcacagttggttttttagggaaaaacaccataactaaacgcgccacaaggcatccctatcgcaccagatccaaatctcaaacgatgggtgatcaagaggagaccccgaacagatgaaagccgacctgtcggctttgaaagaacaaatggcttccatgatggaggccatgttaggaatgaggtagcccacggaaaaaaaacgtcggcaccgctggcgctgctagtcggtgctgaagaaacccaactctcttggaactgcgcaccatcctcctcaaacatagtaggacggggaaaggacacactgttgcacgatggcaaccctcacctgggagacaaccgagcgggttacc

SEQ ID NO: 242181 - DNA, 402 bp, Glycine max
aagtggcctcaataactcaagagggggtgaattatttcccactaacaaacttttaacccccttctaaacgataggctcacaatgcagaaaaagaaccatcaatcaatttaataatgttctttaaacatgcaagacaaaattgattccaataaaataaatgagataagggaagagagaaatgcaaactcgatttatactggttagactactttccgtgcctacgtccaacccttaagcaacccacttgagattttccactatctttgtaaaactccttttacaaagttcgaaccacacagggacaacccttcccttgtgttcaggaatccttacaacttaagagaccctcggtcccttaatcaatctctttgaataagaagaagaacaagaattctctcttta

SEQ ID NO: 242182 - DNA, 307 bp, Glycine max
aacaaaagaaaccctctattgccattaaagcaccatctgatgcacctggtggaggtctgcattgccaacaaaatagatggggatacctcatcagcaccccaaaatgcaatcgaacgcctggtcaaacagatccccctggaactcagcagctctaatggctctcttaaagggaaagcaagggcggctcaacaaatgcgctaccaatctatagacgacgcgtacactatcgtgtaccacaagacaaatgcccaaccaacaacctctcaagagcttctaatctacgcgaaaaacataccccatcgagaga

SEQ ID NO: 242183 - DNA, 451 bp, Glycine max
  unsure (1)..(451): unsure at all n locations
ccccacctataaaaccgcagcagcaactnagcgcatatatctaaaaacgttttcttgcacaagacatctctataaccgagacaaaatgcacccatatacaatcaaggcggctccgttacctatattattcacacgtacttccaaggcgtatttgtcacttacaaacacacctccatggctaaaatcacatacaagcatactcagagcattgtggggcaccacaaattgcacatgtgcacatcttggaatttgtaatacctatacataccccaactgcaggatgaatgttgactactctacacaaggccgtgctacaatgtatgcgtgttccaaggtgttgctacctaaagccgcatgcaaattcaagtatattctcctttgctgactaacatggtatccaaattaagaggaatacattctttggaatgtatcttcttacataacatgcaca

SEQ ID NO: 242184 - DNA, 434 bp, Glycine max
  unsure (1)..(434): unsure at all n locations
agctntagggatttcaaattccgcctgactaacaataaattaggttttattgttagtaaattaaaattttggctactaaagaaaatcaaagaagaaaactaaaatacctgaatatcctcccatatcaaatccttctgagtagtagggacttccttccaagtctcgtatgtcacatcgaccttatcacgagcaagaatccccaaatatgctcttaatttcttcttgtggggaccgtcggccttgccggtcacaggatcgacctggaccactagtctctctgccccaggtggtctagtggccaaggatcatagttgtgtcaccttgcatgtccgcttcaaggtggacggagacgctaatgctactgcaggagaaggaggaggaggagcacgagcacgaggaggcgaagcangtggagtggccatggtcctgtaaag

SEQ ID NO: 242185 - DNA, 426 bp, Glycine max
agcttgagatgaggaagcgttgaagggtgtttcttcctgcttttattgctgaccacagagtggcaccgggagatatgtcgcgggggtcatgagaccttggggacatcagggggggtgctattgcccaaaaccaagcttgaccaatcccgacccaacccgggcatagtgggtcagtgagaacctgtgatgtacctaaacaggcgagctcctggcagtctacagataaaaggaacaaagaccacaaagcaaggaggcttgtggtggctggccacctgtgaactttgattgatatgtgggttatggcctctggtaatcgattaccaagggtgggtaatcgattacaaggcttaaaaatgaagacaggaggctaagatggtctctagtaatcgattaccacgggatgtaatcgattaccacgcttgaaaa

SEQ ID NO: 242186 - DNA, 441 bp, Glycine max
  unsure (1)..(441): unsure at all n locations
agcttggaagaaaaaaatcgggtaccaaacctttcttggtaagtgttggagtgaaagaaagaaagggtggtccacaacgtgctctcttactctctttttgacattttcaaatgcgaagngggtttcatctctgtcattccatttccaattgagctgaacagcaagcaagctcaggttggtgcctagttggtttgttccaatcaaacaactgggttgagaatttttgctaattccgtttttggaaaaatcatcgccatcacccttaagagtttcctcattgttgtatccaagtaggatgaaaattctacaacttttgatgtagttaaggattatgtttgtttgtacttttgaggcttgcattcaaaatttaatactatatctgactcaagattcagacaaaattatggaatcctgtgttcggcatggttgcagagccgttga

SEQ ID NO: 242187 - DNA, 452 bp, Glycine max
agcttgaactaaaatcatgagagagaaagggattgttgtgagaggtaggtctctctcccattactcttggatttttcattttctctctttctttttcattttctaatcatctcattttcctttgcatttttttatatgtggtagagtttctcaagggctactagtgggtggtttatttttcaattttgagcatgtagagttttggaaccaaggtaaggggaagtttttccaaatccttcggatctatgtgtggatgcaatgggtagagctttaatttttatgttgaatattttttcatatttgcctctgtcaatgcaattgggaatttttttgtttgttattttctattttgggcacaaaaattgggttccttgaccccaaagcctagaaaagcctataaagtttgttaaatttggatttgtgtagcaaaagttatgcaaaaatcaatttcc

SEQ ID NO: 242188 - DNA, 449 bp, Glycine max
  unsure (1)..(449): unsure at all n locations
agcttcaccttttggtcctccttatagttgttgcattataaaacatgctctatgatgtgccatcattntcttctatttcttaaaccctttttgcaccattttaattattgattagtcttaattgtcaaattaattaggcagttttattatttgggctcatttagctaatttgatgtttttaatctaatttcaggaattaattatgcattgggcttaatccggattttggttgtggacttgaagagggaaaataaagcagcgcttaccttagttaatttctaattaggagattgcaattttattttatgtaggtcagtgtctatttcgttttgggccacaataatgtaatagggcccaattactttgagtgactctcttagatattaggctcgggattcgtgcaaggctattatgttagactattaatcacggcatatgggttatgtttt

SEQ ID NO: 242189 - DNA, 444 bp, Glycine max
cacaattttctatatatagggggatatagtgaagtagaaaaaggttcacccctcttggtaattcagaatcacttaaaattagtgagaaaaattggttccgtgaagaaaatccaagccaaggcgcttccgtaacgtttccgtgggtgatttcgcgaagggtttcgaccgttcttcgacgttcttcattcgttcttcgccgttcttcggtcttcaaccggtaagttccctagatcgaacttttcaattcattctatgcacccttagtggtcctcattgttttttcgtgctttcatttacatttcatttacttttcgtacccccttttgacgtgcttaagccatttatttaagtcatttctcgcttaatctaaaaataaaataaacttccaccgattggttgaattgtatcatccattaatttcggttaaaatgaattccgaccgtt

SEQ ID NO: 242190 - DNA, 353 bp, Glycine max
  unsure (1)..(353): unsure at all n locations
tgccgcatgcaagctctgggttcatatatgcgagtccacccttgttcttatgaagagccacacgcttccaaatgttcatttcagtggtaccccttgtcttctgaacgcagctggaaggaagttatttcacgtatctctcttttacttgatactccattgagtttcaaaaaaaccagancggagcatctgtattgatttattttcataacacttattcttgatactgataatatgatacccctctggaagattttccatgactctattatctgtgcatatacaaatcaacaccctttgtttccactgtagatctatacttgatatgcaaaaccattcacgtgcctgtgcctaac

SEQ ID NO: 242191 - DNA, 398 bp, Glycine max
agctctacacaaagagaggaagcccttatttactatgaatagggcggcgaaatagcataacaagactctcctaaattgggctacagatacaacccttggctacgataatgcttttgaaacattaaggaagtcaccagcaaggcctcacaaaaatgttataactcggaaaggatatgatatcaacaggtattcgttctacacgaaattacaagacgacgagagtacaacgcaaaataatgggttagtctaagggctgaatctcaacacttcgctattgcacccgatgacaatccccgattggcatccatgccttactttggaggcattgaagaaagctgggagcttaattatgaaaacacactatgtgtgctctcaagagaaagcggggagaaagcaat

SEQ ID NO: 242192 - DNA, 471 bp, Glycine max
gcgaccttaagtcacctgccgcatgcaagcttctattgctatattggaaaatactttgttctgtcaaagattacattaacataacttggtagtgctatgcaatcccaagagcagtggaggttgatgagacaagacgatgcagttgaaggtgctttaccatccaaacaccatcatgctaaatccagtagaaagaaatatgtctagaagaacaagccagcaagcaacaaaaatagtgcaaacaaccaaaacaaaggtaagtgtaaaaagaaaaattatccaccttgtcagcattgcgaaaaattgggtcactcaccatacaaatgttggaaacgaccaaacgcaaagtgcagcaagtgcaataagtttggacacgaagctataatttgtagaagcaaatttcagcagcatgaagccaatgcccaagttgttgagcaggaggaagaaaaatatatttctactgcaacatattat

SEQ ID NO: 242193 - DNA, 453 bp, Glycine max
agcttaagcttcttcaactgcacaaggctcttaatatttgaagagtatccttatggaaccttcacccgacgaagacactgacaaaaacttatcttctccttcttggacaaagtatggcaggctgggggcaagtaaattttcttcccatcaaaccttggatgcaactgtgatcatatacccatattagctagatcttgacgggtattcaagtcatccttcgtcttgccttgaatgttaaggagcgtcccaatcacactgtcacaaacatttttctccacatgcataacatcaatacaatgtctaacgtcaagatcacaccagtacggaagacaaaaaaaaatggacctcttcttccatttgcaactctgacttttatccttcttttgggtcttcccaaatacagtattcaggtgttgaacctgttgatatacctgctcaccagtcaacggtatc

SEQ ID NO: 242194 - DNA, 462 bp, Glycine max
  unsure (1)..(462): unsure at all n locations
gatccttaagtcacctgcggcatgcaagcttgatgaattntagcttcatcacaattttatttttcatctcctacaagtacttattgaggagttaacttataaattggatctgaaagacaacaaatgatagttaccatataaccagtccttgaagtagacatgaagtgcagatgaaaattctcgtttgcgactttcttctaaaggtgcttctcgtaagagttgccttatcttccctaacagtgacttaaaacaataattgaacaaagagaaaattgatgaacttgaagtgaaaattgagagagttttaatcattttcactagggtccatcgataggtagacaaacaagtcatatgtcattagatgtgagtattgtgatgattacacaaaaatctaatgattcattaaataattacattgttagattcactagagaaactctacaagtacgcaacctcattagt

SEQ ID NO: 242195 - DNA, 400 bp, Glycine max
agcttctctatataacaatactccctaatttactaggagaagtatcccaccaagtgacaccatggttagtagcaccataattagcaagaccattcacacatttgttcccttctcgatatatgtgagaaatttcaaacttgatagatttcaaaagaaccaagcaattctcccatctcactctcagcttccatgaaactagtttacaagatttaaaagtagaaactaccaagctagagtcacacttaagccataactgaaaccaccctttattgtaagccaattcaatggttgtcatggcagctactaatgcaacatacatggtaaagttaactcctaaagttaacatcctagaaccacaccatatgatattttgaaaagtccgctacaaccacctggacct

SEQ ID NO: 242196 - DNA, 443 bp, Glycine max
agcttgcaaaacagccaagtaagtgtctctgccaacaccagcatggagcttgattctgccttaactatccaagttcatcagcaaaactcttttgtgaacaattatccagggttgttgttctccgaagccaagcatcataggcctgattcagaaacaatgacatcatcatgttgctcaatatgcttggcagattacaaggacacggactgtgtgaagcttctttctaattgtggtcacttgtttcatagagaatgcattgataggtggttgcaggtgaacctctcatgccccatgtgtcgaaattcgccattgccatctcctctttcaactcctcttgctgaagctactcctttggtaacaagacgtgattaaatagaataatttagaacggtgagaatttaaactctgaagtataggtacttctaaaaaattatgttgtagga

SEQ ID NO: 242197 - DNA, 459 bp, Glycine max
  unsure (1)..(459): unsure at all n locations
gaccttaagtcgactgagctgcagcttctatataagctgaaccattttatctattatcacaagttgagtcttattcagaagattagacgttatctcttttatcttagtgagagtgattctnctaaattcttgagtgattcaagaacaccctggctgtatcaaaggactttcacaaccttngtgtgttgccctcgatggaaagagtgattctttccttcctttcatcttcacccttggtctttcaaccacaattgcagaaaatccacctctgcccagaattatctcgtggccataactcccattttaccaactcaaattaagtgattcttgagcctaaattgaatttcacaacgagacctttcaccttgttttggaatcacctcatttggagccctgtagcttcagtttttgccatttctatattatctgtccagccaccacttaacctacgtattctca

SEQ ID NO: 242198 - DNA, 461 bp, Glycine max
  unsure (1)..(461): unsure at all n locations
tgcggcatgcaagctntgattgagcaatgtcacagtttgcaaattttattctgaactctataatcttaattctttggcattcattagataaatttttccaccataaaggagggtaaaagtgcaacaatatgtcatagatatttaaatattaataatatgtagatataaagagcttgtcatatgtttataacaagaaaagctattggaaaggagctgcaaatgcaattactaattggataggaacctaactaacctaacagaactactgccacctaatacatggacgattcagttacaagttacaactgcataactaactatattttatgttaccaagtaacactgagggagcatttgttgtcatccatccttatttttcttgtactatatcttatgataaatagtaccatgaaggatttccagaagaatggtgtattcaatccagttcttctagctaattt

SEQ ID NO: 242199 - DNA, 466 bp, Glycine max
atcttagagtcacctgcggctgcaagctttaactcggaggccgattaagcgcatttatatcgagacgctcgaaattaaccaacggaagctctcgagaaattcaaatggtcataacttttaactcggaggtccgattcaggcgcataatatatcgagacgctcgaaattgaacaacggaagctctcgagaaattcaaatggtcataacttttcacacggaggtctgattcaggcgcataatatatcgagaccctcaaaatttaacaacggaagctctcgagaaataccaatggtcataacttttcactgggatgtccgattcaggcgcataatacattgagacgctccaaattgaacaacggaagctctccaaaaattcaaatggtcataacttttcactcggatgtccaattcaggcgcatcatatatcgagacgcccgaaattgaacaacggaagctctcgagaa

SEQ ID NO: 242200 - DNA, 345 bp, Glycine max
  unsure (1)..(345): unsure at all n locations
agcttgactagggcgagtgattctanccttattttctctttantttattagtcaattcaattaagaatgtgaaatcccaaagagaaaacgtccgattgattttttcgctttattttgctaaaaggcatcttttgattattatattattattttacctctttttttatttccaacttggttacggcacaacccaacggtcggaatttattttaaccacgattaacggatgatacaatttacatgatcggtggaaatttattctatttttagataaccgataaatgacttaaataaatggcttaagcacgtcataagggggtattaaaagccaatgaaaaccacaat

SEQ ID NO: 242201 - DNA, 246 bp, Glycine max
  unsure (1)..(246): unsure at all n locations
agctntaatggaagaactaaacttgagaaattttttcctatgaggttgttgatggacaacaaatcagcaattggattagctaagcatcctgtggcacatggcaggagtaaacatattgaaaccaagtttcatttcctgcgtgatcaagtgagtaacgagacacccgaattggagctctgaaggtctgaagatcaagttacccacatactaactaacccattgaaggctatcaagttcaaggagctg

SEQ ID NO: 242202 - DNA, 214 bp, Glycine max
gtgagacaaaaatccccctcagacctgcattaaggcaacccacagaggctgccaccaaggtgggctaatggtgactgccattcgaattgtcttttaacacaccctttcatgcccaaggctattggctttgaaggaaccctgatatgcggaatcaacttttaacatcacactactgggaacccaattgagactttttccgaaaaaaaaggggaaa

SEQ ID NO: 242203 - DNA, 439 bp, Glycine max
agcttgcatttggagaggttccattatcttttctaattccttgatgctggtggtatctaagcttttaaccttgacttggtagaacctcttgccggtttgatttgttcccatgcttgctaaagtgagacaaaagctggtgcaaatcaaaactctgatatctcatgggtggaatggatgaatgcatgaaggaatgcatataacacagatgcaatctaggaatgcgggggtccggggaattcgtccccttcttagacacaacgtctaggggtagcaaagtgccccaacgtacgtttttaagaaggcgacacggaccctccgttggtttgtttacagaaaggatcaagacagaacccacatgtgatgcctatgcaaaagacacaatgcgggaatgtcacaatatgacatattcactgaacataagcaagggatatgaacttat

SEQ ID NO: 242204 - DNA, 442 bp, Glycine max
  unsure (1)..(442): unsure at all n locations
agcttgcatccgctagaagagaaagacatgtgattagaatttgactgaaaatgttagtcagtttgtcagattgattgcgaaggaatgcattgaccgtattccgctgagagtgtcatccttaaagtttgagagaaacgactatcatttagtactgaatttttcatgaatctttgaagtatggactgaatgcatgaaattaaggatgatgaaggccatgtttgattgtgatagccacttanccaacaaggtgaccatgtgcttgaatggtctatcccttgcacccagtttgagctgaatgaattattgattgattgattgaaccttaagcctatacaatgttatctcctgctaccttgtcttcggttgttggagagcatcatccacaacaagcttggttcaaagcaaatttgtcccacatttggggactaattattaagataaa

SEQ ID NO: 242205 - DNA, 451 bp, Glycine max
  unsure (1)..(451): unsure at all n locations
agctntngacaataccaataactatggctttcactaactatttacttttaaacaaaacaagccatatatcctggtcaagaaaacatatactaggagtaattttctttataaatgattatgaaaatgaattatccgcatctccatgttcccctcctatccatcaaaaggaataagacaaggaattttgttggtcaaacaaatatcaaaataacaatgtcaaaacaacaattatgtacaatgatttataatttagtccccacaccatctatagaaaaaattaaacaccttggacctagtaatcatgattaaaagcaaaactaacaaaaaatattttgatcctccccacttgttcttaggccactaagatcttttcttcatggcccatcatcaagattgcagaggaataaaagaaattaatacccacgcattagaaaatgcacattacaacaag

SEQ ID NO: 242206 - DNA, 363 bp, Glycine max
cctacaagtcctaattgacattctatatcttaatcaactcactttaaaccacaaatttccactaaccccaaatttggctttttaaccctcaacatactacactttttccacctacaacactaccattctcacatttaactctaagttaactctccccatcctctctaccgagtttctatctacattttaagcacacatatatttcaaaaacatcattattaaaccctcaaccaacatggggtagtttgcttacatcaaacatgccaagtttagcataattacaacaatttccttcacaaacaactaccctaaagtaataacctagtaaaactacccattatagctcccaaaaacccaacaccc

SEQ ID NO: 242207 - DNA, 451 bp, Glycine max
agcttagacgaccttgttgagccgatattactttattatttatttggacaagtttgaatatgatgtagaagaaagtgaatgtgagccttttacccctttgaaaggcttgtatttaaaaatgttttaaaaatacttttaattagtatttgaatttttattcctttattaatatatatgagaggggtagagggtgtcacaattttcatatatgtattttgttagaacaaaaaccaaaagaaaagagaaggagcatggatactaagttgcatacaacatgatcaaacatggtctaatggtatgatagcattaatactaattataaacaaagggactactacacactttcgttacatactaatcaattatagtacatgcttcagtccaaagaaattattgacaaggttacgaaataatcataagttcacctttgacatagcatatattcttaaag

SEQ ID NO: 242208 - DNA, 447 bp, Glycine max
agcttgaacactcttggcgggcttaatcatgtatcatggcgacttgcccttcacacctgcaacccacactcacgaaactcttgttgatgtggcatggaggggcttcattcacttacggcctttgttgctggcccatgcccctacttcttctttctagggtgcctcttcatacatcggcattgtagaagcaaagcttcatggtgaatcaaaagtgattcaaagatgttttgatgataacaatgatgataacaaaaggtgatgacaaaaagctcaaaggtcaatcaagggatgagttcaagatgttaaagaagaaatcaagaacaaattcaagactcaagaggaaaagttgaagaacacttcaagattcaagaagaaggatgaattcaagaatcaagattcaaggatcaagcttcaagaatcaagatcaagattcaagattcaagattc

SEQ ID NO: 242209 - DNA, 429 bp, Glycine max
atgttttggaaacgtccaattatggtttggatatcttctccctcttccatattgaagagttcatacttaaatgttagaaggctcaatgatgcaatcctaccccgcaagggcattggatagaagacttcaagaagattggactagagatgtcggagaaggccctatggttctcatgagccttaggtagaatttgggcccatgggctaagtatgagcccacttttctttgtaaatattggaataggttttccttcttttgggccttgtatattagtcattttaggtttgtagggtaccctacaaattaagggcaccctaccctacgagttaagggtaccctaatactatagggttttagccttatatttcaggacattttaagtagtctttgttgagggacttttatgtattttgatgtattttggcatgt

SEQ ID NO: 242210 - DNA, 422 bp, Glycine max
  unsure (1)..(422): unsure at all n locations
agcttcgagtaaacggtcgaaccggtttcttgtttatctcgcttcgccttcacaacgcgaacgtatagaaacggcatacgatcaacgaggtcgtaggcactccggctccgatcgcctctcagagatcgcagttcgtgatcgctaacgttcagatccgcacgcttttgcacttctacgtgcttttccttcggcggctttggcttctctgtctgcgcaatcggtgggttctcaacctccggcggcggcaccgccgcctccggagcctcctcctttggtttttcttcttcttttgattcttctttagggttattctcatcttctttcttttcctcgncttgcgtgttctctgccttatcttctttcttctctccttcttgcgaattctccggcagcttctcctccgtgccggtggtgctgactct

SEQ ID NO: 242211 - DNA, 374 bp, Glycine max
agcttgcataacataagcacagatagaaatattgttctcataaaaacaacatcaaatagatagtaataatatttgcatcaagtatcagtagaatttcccaataaaagattctagccctccattacaagggagtacctttcacaaattggagaagggttttagagaaaataccagattacaaagcagtggggatgtcttctccacctctaagaacctaggaatcactcctatacctaaaatctacctaaaagttagggcctttttcttccttgctcaacttttcctctgttctttgttcagcactaggctcacgtagtctattcaaacctcctctcttcattctctgcaattcaagcttaaaaagggctttttgt

SEQ ID NO: 242212 - DNA, 355 bp, Glycine max
ttaagcaccgcggctgcagcttattggcactcaatgtcctggtgttatttaagcaatcaacggaacatatgcaaaagatcagggtgctgaatttaagtacccattacataaagggccaccatatctattgttcaataatggggagaaaatgatttaaggcactttgagtcttgaaatttctcatcacaaagtcatatagttttgaaacaacctaagaaaagaagtcgatttttgagactactgttggtctaaaccaataccaacttttttgtagatttgctctccaaatataaggagtactatgttatattttttgcaatgaccaaattaatactcattttgcctttaccgtgtt

SEQ ID NO: 242213 - DNA, 465 bp, Glycine max
atcttaagcacctgcggcatgaagcttaagccagggctagattcttgtgcttgtataggcttcttcaagaaaaactccagactcccttggcaaatctgattccacgcttaaatacgtgtccttattcgtgctcgtgtgcttagcgcacgtatggaccacttagcgcacgttagtgatttttggcgtagcgcgcttctctcacttagcggatgagctgaagcggtgcgcttgatgacctggagtggcgcgcttattgaacttgacagctcatcttcttctggattcttcctcgctcttagccactgaatgtcgcgcttagtgaatgctcgctaagccaacatattggcttatcaagaaggtgaaaacatcactgttaccaatttgcctaattaaccagagattgagaggaattgattattaaacacacaacacaaaagtataaattatctattacctatatttaac

SEQ ID NO: 242214 - DNA, 442 bp, Glycine max
agcttcctgcatcccatgtgttcggaaatgtttatttacattccaggtacccatcataaccaatctgcatcgtcacccaacatcgccactaactgccctcatcgcacaattacattatgttcattggtatgcgttttatgttcattggtgaatctgattgcggtgtttatttgtgttatgttgtggaacaattacgtcgtcagcatcggagaaatcactgacgacggcggcacatgtcgaatagtgacaagaggagccatgggatgggagactccaggaggagggagacaaagttttgatgtgggaaggtgcacaataaaattatgcacatagattaatctgaaacccaatgatagtgatccacaaagatcacttaccctcatggtccaccttagacgcagttgttttttttttttttggagtcctcatctttcatattatg

SEQ ID NO: 242215 - DNA, 429 bp, Glycine max
  unsure (1)..(429): unsure at all n locations
agcttccanaacttctttggatattggttattaatattatgaacttgaattccatggcattgatgaacccattcattctatagcccttagacataacatcaatatatttaaaagctaacttcacgggagatataaggttgacttattggtgaaggaagaaaagaggttgtgggtttgaatcccccagctaacaaaaagttacaactaacaactaacatttgccgataaaaaaaaagaagctaggattcatgaacaagtcttacaaacatatataatctcctccaatcccttatgttaaagaagtcctaaaacaacaaataactccacagtttacaaccgagactattggcagatctatattcataggctggtcatacatcttatcaatcttcaatttcacactaacacagcttcatgatctaactagct

SEQ ID NO: 242216 - DNA, 385 bp, Glycine max
  unsure (1)..(385): unsure at all n locations
gatcttaagtcacctgcggcatgcaagctntgataaggtaaaacttcanaactttgttattttttctttcatcttcttattcctttaacaagtttcattatgagtcttgtttatgttcacgtcggtcttgttactcggtgatatatgatttcagttttggattattttatataacatggtgatttcagcttatattattaatatattcgtcacactacccactaaattaaaggtagattaaaaattaagtcaaattatatattaaggccctgtctagcctattatagaaggtgcgttattcttttccgaaaaacaactatcaaagggatattaaacgtgtaatgtgaagaatatatttaaaaaggctgtcaggctaggcttttaa

SEQ ID NO: 242217 - DNA, 447 bp, Glycine max
  unsure (1)..(447): unsure at all n locations
agctnttgaataaaactctgccactggttatttttacaggaaactggtgatcaattaccagaaagtaaaaactctggtgacttataaaattttgagaaaaacgtttcttgtaaaacaaaattgtgctatgttaggtttttgaaaaattcttttcaatacttcccttgtgaaatcatcttctcttgaatcttgattctttcttgatgtcatttcttgaatctccaaattaatcttgatcttaaacttgttgactcaatcttgaaatcattctcttgggatttttgtcatcatcaaaactacttgaatcaacttgattcatcatcatgaagcttgcttctacaatgtatatcaagatatttctctaatcaatcctgcttttgtgttctatgttgtagcctcaattactaaacctcaatccctagttaggctgaatcaatccaagcttca

SEQ ID NO: 242218 - DNA, 437 bp, Glycine max
  unsure (1)..(437): unsure at all n locations
agctntgacttgagatacatggatataatatatgattcggntgcgggattaatgcactaattctaggctcaataataatttatttatgagatgaatacgcttaatttttgggagaagattccgtgtatttgacctgaattgtaaatttggactgaacaagcccgtgataatagattaataagataaatgaaatgaaataaaatataaatacaaatataataaggaatagatttggtgtcgttaggtttataatttaagtgctatattaatgaataatttggttactttatcacattctgttctattttattttagagaatctgagtctaaaaagaagacgatctgcacgataatgtatatcagaaaaaaatgtattttaagttaaaaaaaattaatagtgcttctgacattgaaggatctcgattctcaactatata

SEQ ID NO: 242219 - DNA, 428 bp, Glycine max
agcttgacggtttgaatatatctctgttgtttattgtgagtgagagaaaaaatagaagtatcatggagatgacaaggggtatgctgcatgaaaaaggagttgccaaatgagctttgggcgaaggctgcaaacactcgaatatttttgctgaatagactacctacaagagttctgcacaaaaaaactccatttgaaggctggtttagttaccaaccagatttacaaaatctaaaaatctttgggtgtgtgtgtttctcttatgttccacaggttaaaagggacaaacttgataaaaaggcagaactcggagttttcattggatactgcaacacctccaaagcttacagaattttccaacctctaaatgggaaaattctattgagtagagatgtcacattatggaagatcaacaatggagttgggatgag

SEQ ID NO: 242220 - DNA, 450 bp, Glycine max
  unsure (1)..(450): unsure at all n locations
agctngaaccataaccagtgagagtggatcttttttatgagttaatgactagctttgagtaatagtctttgcatcaatctctgaaatttagaatgaaatgtatgaatgaggacatgatgaaggccatgattttatatacaagacaattgaccaaaaagcttaccttgaattataattctatcctttgcaccctttgtgagctgaattacattttcaaaattgaaccctgaacttgaatgaatatctccagataccttatttagattctaggagagtagatagttcaaggcaaattaccccaaattcaggggagttgattgggatgtaaagtaaaaggtaaagcatcagcacacacaacaaataagttgtgtgtttttttaaaaaaaaataagagcaatcaaagaacatattgtgttgtgtaataaggtcaaagacaaattaaagtgaaag

SEQ ID NO: 242221 - DNA, 227 bp, Glycine max
tgaggcatgcaagcttgacgagagttacacgccgagcaaagttttctttcttgtcggtgatggctttcacaacttgaagggtaatttgtattttattggtttgggcttgattgggatgattatgcttaattatttggtgttgactttgggaacatttttaggagattaatacccggggactcctgaaacccactggggggtatatctatccttcggtggagctgatc

SEQ ID NO: 242222 - DNA, 452 bp, Glycine max
agcttcttcctctctttccatgttgcttttctcttcttcttctccaccattgaagcctccattgaagctccaaaattccttctcatttctacctcaaattgcaaggagaagctattttcggagtcttggaacacacctctacttcgtggggcttcaaatttcggtatgggtggactttttctcacatgaaattcgtgggtgttgggtttttgggagctataatgggtagttctactaggttattgccttagggtagttatttgtgaaggaacttcttaaaatcatactaaacttgacatgtttgatgtgagcaaaactacccatgctgatttagggttttataatgatgctttgaatatatgtatgctgaaaaatgtgatagaaaactggtagagatgatggggagagttaactacgggtaaatgtgagaatggtagtgctgtgagtggaaa

SEQ ID NO: 242223 - DNA, 438 bp, Glycine max
  unsure (1)..(438): unsure at all n locations
agcttgncttcaacaaacaaataaattttatttttctgatcttcaaaacctaactctagcttcctcttgcccatatcaactatgcagcttgcggtcaacatgaatggcctttccaatattatagggatgtcagtatcttcagagatatccattaccacaaagtctgccagaaagataaaatgttttactctgaccaacacatctttaattactccatatggcctggtaatggagcggacacctaattgtaaagtcattcgagtaggcattatctccaactctcccaagtttctgcacatggagagtggcatcaaattgatactagctcccacgtcaataagagcttttccacattgaattctccaattgaacaaggaatagttacactccctggatctttatgcttgggtggaaggatctcttggatcacagcactgt

SEQ ID NO: 242224 - DNA, 372 bp, Glycine max
agcttattaattatactgacatcatataattttttcttcttggcaaaaagaggctctttcatggactaatagctattttactttctaaaccaccttcaagggtcgcgggattggctcaccgcgaaaatgatcatcttctatatcagtttacgaattgatggagaaagttgcaaacttaatttctagatcggctgaaatgaaaaacaatctacaacagtaattctctatatatagctcttaatcgattcagtaattttttacatcgatgataccaccaaggtacaaagttcggcttttctttataaaaaacaacgcattgacacacatatacttgcttgtatcctataaatcataaaactacattgtcccata

SEQ ID NO: 242225 - DNA, 279 bp, Glycine max
gcttgccagagaagagtcacttggtttgcttaccacctcaaaactggaagggttctatgactcctctgcggcctccacataaggcatagaggatgggcagctcaccaagatgtcttcctcgcctaatacgatgaccagatgcccttccactaccaaattcaacctttgggggagtggtaaaggaacacacttccacctgagtggattccccggcgccccaacagaaaactggaggggggggtaatatccattatttggaaggtaacttgacaagtgtga

SEQ ID NO: 242226 - DNA, 349 bp, Glycine max
  unsure (1)..(349): unsure at all n locations
ggaccttaagcgactgagcagcaacttaactatatgaagaaattctactcacaaaaaagaaagaatcagagtagacctataaactaagactttgcaaaagcagctcttttttatccagattgaaccttagttcaaatgctatgttgtaaccagtatccacttacagcantttataattgttggttggaaatagctagacaaattgtaattgctttaaaaaaaactattatctattaaaacagaccctaacactgcacatgggatcataaagttaagagttagcttttcagatcttttctcttgaacctntatctgaacgcatccctatctgaatatggaacattgctct

SEQ ID NO: 242227 - DNA, 442 bp, Glycine max
  unsure (1)..(442): unsure at all n locations
gcttttgcacttgctataattggttctattttattntcccatgatcatctgattgctgtgctgacatattcatagaacagaagatattggcccctctcttctgggatgcacaaaatggtttaacactcaaacagcaactgtgcttttcaaaaaaacatgatgtaccctgtgcaacaagaaaaagggggaactttaccttatgaagccagtaaccacaccttataaaaacacttttttaaccaaatgtagaggtagacaagattcaaaagagttctaataggcatacactgttaatataaggttttatgctatcaaacaataagaaatcatcctttgaatgacttttaaggtggttattataaaagtcaatgaacttattatacacgatgatctgtgattggatgacactgtaaaagacatttaccgcgagtacatgtattat

SEQ ID NO: 242228 - DNA, 436 bp, Glycine max
  unsure (1)..(436): unsure at all n locations
agcttagcccaagaggggatggaccttttcttgtcttggagaggatcaataataatgtctataggttggacctcccaagagagtatggagtcaccaccacttttaatatttctgatttaattccttttgcaggtggagcttatatagaggaggaggaaccaacagatttgaggtcaaatcctcttcaagggggaggggatgatgcaatcctccctaggaaaggaccagttaccagagccatgagcaagaggctccaataggattgggctagagttgataaagaaggccttagggttctcatgaaccttagggtagatatttgagcccatgggccaaggttgggtccactcttctttgtaaatagtagaatatgttgctttcttattttgggccttgtattttggncattctagtaatatagggctttagctctgta

SEQ ID NO: 242229 - DNA, 418 bp, Glycine max
  unsure (1)..(418): unsure at all n locations
agctnttcttctctgatgtgacagtgtgttgatgctcggggtaaatatgctcgtcgaccttgtgatatgggatgcaactgctctcgtattcccatgtcaaccaagtcttgacgacatttcaaaccatcctttgtcttccctttaatgtgaagaagagcaccaattaaactatcacatacatttgtctccacatgcataacatctagacaatgacgcacatatagatcagaccactatggaagatcaaagaatattgagcgtttcttccacatgttgttgggagatgatgtcttcttctgggacttgccaaacacggttacaatgtcctttacacgatcatgaacttggtttccagttaatgcttctggggggccttcattcccctgacttccattacaagctcttctcaatccgcgat

SEQ ID NO: 242230 - DNA, 411 bp, Glycine max
  unsure (1)..(411): unsure at all n locations
atttcaatntctcactaagtaaaatggatcattttcaaggtccaacgccttaaaatgatcacctcttaagaaagaactacgtaggtctgatttcctcatcgcaaattgaggaatacgtacgagcaaagggaaacacccttgtcgaccacaaaaaaggagaaaatataaaaagggtataaaggatataaggacataaaagggaacataaaaatcaaagtcatgtttgcacattcgattaaaggttgccgccccttgggacggacgtgtggggtgctaataccttccccgtgcgtaaatacaactncccgaacctttcacttaaaagttcgcagatcgcgttttttacggattctccgacgttctcctcaaataaacgctggtggcgactctgcgcgtatcctttcgtggaca

SEQ ID NO: 242231 - DNA, 466 bp, Glycine max
atcttaagcaccgcggctgcaacttatgccctttggcggtttcctcttctagttgaatccagtgtttcttctaatgctcattaagaaacgaaatgcaaaatgtcttaatctcattattggttaagagaaattctatctttgtgctttcattcctcattcttcgcattatttttttggaaaaaatgtgtgttgttctgatcggtttggggctttgtttctttaccatgcgtgcttgcattttagtgaaagttttcagaaacttcaaggtcttcagtcttttacattcacaagacttcaatgtcttctgtcttttacatttcaaatacttcaatgtcttttatcttatacatttacaagacttcaatgtcttctttcttttacatttcaaagacttcaatgtcttctgtcttttacatttcaaagacttcaatgtctttagtcttttacattacaaggcttcaatgtc

SEQ ID NO: 242232 - DNA, 454 bp, Glycine max
agcttcaagattaagacttcatgttgttcctctttatctctaacagtaggtctacttttgaataaatttctcaaaggtatactatttggagataatataacaatacctattccataaccatctacatgttttgatccatcgaaataatacccaaggttttactcctacataacattctaaaattttgacacaagtatgattaactaaaaaattgccacaatttgacccttaatagcttttaatggtacaaagtttaaagaaaattccgtcaatgcaagagcccattttcctattctaatatccaatataaatttagatagcataaatgttataacattattatgagataaaacttgaacattgaaaggcctaatgtaatacttaagtttagtacaagggaaagacatacacgaacataacttttcgataggaatatatctagtttcaatatctt

SEQ ID NO: 242233 - DNA, 395 bp, Glycine max
actcatttggatagagcacaatgggaaaagatcaataatacctaacaaagtatgcaaaagagtacccctttgatcttatttgtttataaatgacagactgattcctaaagttatcaaagtgagcaagtcaactcggttcaccatggattccatctgggttgggttgataaaaatcaaatcatcctaattatatgtaaaaagggactgctcacatgaacccaactcattccgattagatccaacaacattggctcgtagattaggggatcctactttaaaaaataaaacactctactattattctaaatatatagaccatagatatataatatataccatccttaattatagacaactatttaagtgccacaacattaatttaaaactttaagttt

SEQ ID NO: 242234 - DNA, 462 bp, Glycine max
gggatcttagaaccacctgcggcatgccagcttaagagtttgagagctttattattttgtaactttacaacgctggatgttctgcctgattcaatacgtaaattgatccacttgcgttatttaaatctccgttttacaacgataaaaacaccgccggagtcattgtgtaactcgtacaatctacaaactctggtgttgtctcattgcgacaagttgaccaggttgcctactgacatgcaaaatcttgtaaacttgcgtcatcttcatatttatcgtactcgtatagaagagatgcctaaaggaatgggaatgttaactcatttgcagcatttggatttctttattgtgggcaagcataaagagaacggaatcaaagaactggggacactctcaaatcttcatgggtcgctttctattacgaatttggagaatgtaaccagcaagcatgaaccattggaggct

SEQ ID NO: 242235 - DNA, 231 bp, Glycine max
ttctatggatgcttaatctttgagcttcaatgagggcctttaatggtgattttccactatggagatgcagcggaagataaaggagaagaggacagaggaggccccatccactaaggaataagccatggaagaaggagcttcaccaccaatatgagccttggataaaaagctctgagaggatgcttcaatggaggaaaagaaagagggagagaaagagagaggggggggggg

SEQ ID NO: 242236 - DNA, 168 bp, Glycine max
gacatattcatagaacacaagacactggccctctcttctgggaagcacaaaatggcgtaacactcacagcaacaacgcgtgctcctcacaaaaacatgatgacccctggcacaagaaaaacggggaactttaccttatgaagcccgctaccacaccttagaaaaacac

SEQ ID NO: 242237 - DNA, 447 bp, Glycine max
  unsure (1)..(447): unsure at all n locations
agctttntggagagtcatagaggctaaccttttatcatatcaggtattagctgcacaatttacaatgacatctacctcctctgctataacatcacatatatcctcatctagtcgaagattatgttcacaaatattgcctacaacagaaactagttagataagaatcaagagaggtggaagccaaccttttctcctttcttcaatttggttctcttttctttccaattttagtcacgaaatatagctaagtccaacaaatttaggtgcatcacagctagtaatcatgtcacttcatccccttagatcacagntttattcatcaccatagccgagtccactttctttctgaatcagaaaatacaaaacgaattgggttggagcaccaacaatataagcatattgttaacaatgcaagtcaattaaatgctagaacatgcaaattgaaga

SEQ ID NO: 242238 - DNA, 314 bp, Glycine max
agcttgcattacatccatggagtatacatgtttactgccagctactaatctcctcgaagtccaatgcatactcatgttgagtaataacaaaccaaaatgtgactaggctacctcaattctcaagaaatatttataaggaccccaatctttttatctgaaatttatgagaggcatgctctttgagatgctagataccactctcaccatcactagagttgacaattctactaccataaagtacaagacaaatgccatgacctgcaggagaatggatgaaacccaaggggactgtgtcaaaccatggagagaacatg

SEQ ID NO: 242239 - DNA, 302 bp, Glycine max
  unsure (1)..(302): unsure at all n locations
agctnntgcttcacacttcttaaactgcacattttgtgcactgcacccacaaatgcgcaagtaagaagagataattttctgggccctcgtgtccgtaaatgcattcatatcatgcatcacataaggatctcttcatggcatcataatgaacatatcgtttttacatttgtccattatcatattccagcatcacatcttgcatgagtcattgcatcatcatgcatatgccgtaaacattacttttgttctacaaactgcataccttttggtttatgtcgctcatgcatgatccttgcaatttc

SEQ ID NO: 242240 - DNA, 295 bp, Glycine max
cacaccacatgacctaccaaccccgaagaggcagccgccaccactctgctaaaccccccagcgggaacgagcccctaccccacatccccacacaaatggcgaccacaccctcggccaacaatacctcgcgacaaatacaaacgaactcccccaaaagcatatgccgcaccaacacctcgagcctcctcgctaaacccaggccactgccctcaagactcggacgaaacccatcatccatatgaaccccaacactagcaggcaatatcccagacaacggaccccagcggaaaacccc

SEQ ID NO: 242241 - DNA, 324 bp, Glycine max
gctgcaaatgacaggaactttttctactagatcgagaaacaccgagcggtctggccttcatctcacaaccactaactggggccaagtacctgcacttgcagcttagatgacacggatggtgctttaaatgcacacctacgactgataaaaaagttgaaacaaggcatttgaatcggaatgacagggaggcactacttccttctgactccccaatggggcaccttaaatgggtgacaggtaggcactcaacaacccggcatgagccaaaccaaaccattggagtcaatcgcttaaagcctgtgcaaacaagcgaaattgaccaaa

SEQ ID NO: 242242 - DNA, 429 bp, Glycine max
  unsure (1)..(429): unsure at all n locations
agcttgtaatcgattacacacatactgttttttgtatacncagagaagtttttcagagaatattctcaacagtgacatctttttacttgattcttgaatggttgtcaaaggcctatatatgtgtgacttgggacacgaattgaacaagagtttttgagaacaaaaaggtcttatcctcttaaaaagcaaatcgttttatcctcttacaaactccttggccaaattacttgtgattcaataaggaattatttgagtgctcaaattgttcaatctatctctttcaagagagattccttcttttcttcttcttccttctcaaaagggattaagagaccgagggtctcttgttgtgaaagaattctaaacacacaggaagggttgtccttgtgtcgttacaacttgtacaaggaatttacaagatagtggaac

SEQ ID NO: 242243 - DNA, 431 bp, Glycine max
gctttcataagttaaagcaggagcaactatcttcctaagagtcctctcatgaggtggaggttgagccatgttctcagcatgaaaattagtagtggaacgctcaaaatcagaatattcacaatcaccctccacagaatgctcataatgctcaaaatgctcaaaatacatggaacgaccacgatgtacactatgcctaactattctatgaaaggtcctatctatttcaagaattgaaatcacctggattgcccctagcatgcactatatgcaacaaataatggcgtcctcaacaaccacccaacaaggggggaaaactacagttatactcaaaccaaatcaaaatgagctgaaattctcggaggaacactctacaaacatgaaaagatagcacaaaaaattctcaacaaaaatttatagcgcagctatgaaaa

SEQ ID NO: 242244 - DNA, 187 bp, Glycine max
ccaaaaggcacccaacaacaaagcaaacgcaccgacccgcacacaaagcaacacaaaaaaccaacaaacaaaacaaagcaacacaccgaacacaaacaaaccgaaccaacccgaccaaaccaacaagacccgagcaaaaacaacaaacacaacccacaaacaccaaacccaacaaacccaacgaaac

SEQ ID NO: 242245 - DNA, 446 bp, Glycine max
agcttctattgagagatcttcctgttctttctttctagggtaaggttggaaatttccatcctaggtcagggttatggccaaaaagttgacatttggctcaaaaggcttacaaatggcgggacatggtgtatgtcgggagatctgtttatcaaatggctcaaaaacaagggaattcccaaatcatttccatgaaatgcatattatgatgactagaaattcatgaaaaattaatcacaacacacatccatgtggacactcaaacataaggctttgtggccatgcaaacactaaggctcaaggtttgtttccccattcaaatcgaaccagtctttcaaagattgctcattttatcaagtcatacaaacattcgagtccattttggcatttgggaaaatctttcgttgcgttcatcctctaggtgcacatttctttttttccaaaaaccc

SEQ ID NO: 242246 - DNA, 447 bp, Glycine max
agcttctatataagctaaacctagtcactcggatgtttgattcggcgacacaatatatcaaggcgctcgaaattgaacagcggaagctcccgagaaattcgaatggtcataacatttcactcggatgtctgattcgtggacataatatatcgagacgctcaaaattgaacagcggaagctttcgagaaatttgaatggtcatacctttacacacggatgtccgattcggggatataatatatcgagactctcgaaattgaacaatggaagcgcttgagaaattcgaatggtcataacatttcacacggatgtctgattcgtggacataatatatcgagacgctcgaaattgaacagccggagctttcgagaaatatgaatggtcatacctctttacacggatgtccgatttggggatataatatatcgagactctcgaaattgaaca

SEQ ID NO: 242247 - DNA, 298 bp, Glycine max
cacttagccagtaggggaaaaatagatgaatactctataccttcgtgtgagaagcgccttatacacatatgacataatgtcttttagtaattatgattacaatttctctacaatttatcattatcttgatgatcatgatacatacaattttttaataaaagggattcagctacgaaaatatcaacttattatatataaacatcatattttatgttaatttatcgtcctgtatgtcctcttattctaacataaatctttactcatccactctagaaagtatatcacataaattgccata

SEQ ID NO: 242248 - DNA, 300 bp, Glycine max
atctcctcaaattatcaatttatgtcggttataatttcatttatatcggtagtttcagattatatgtctattctgaacaatattacgccggttttgttttggatttaatcagataacgtagcgggccttgagtgtcaaacctaacatatcctttccaatgattaatgtaaattgtcagacccttatttcacttgagaattaataatgcttttatcgtctgggtataatgtattataattttcatctaattacgttttgtgagggttcaatgaacgccaaggtctctcaggtttatggttg

SEQ ID NO: 242249 - DNA, 223 bp, Glycine max
caaactttaaaactattacggattttaaccactgtatctttattttgccccttacacgtatcatctttccttattctttttcattagcgtcagggctgaagccaccacaaaagggtacacgttggaatcacgatgataccctatacacgagaacagatgctgaaggacacacaccacttgacactgactggaaagcgatgtggacctagggaggaaaggcagg

SEQ ID NO: 242250 - DNA, 347 bp, Glycine max
  unsure (1)..(347): unsure at all n locations
taaatagaagcatgtggtacacttgctgtgactttgatgaatgagagacttgtgagacacaactcaaagatcaacttctctccctttttcttacttcaatttcgtgctcccccctttctctttctctccctctttatattcctccattgaagcatccatttcaagcttcttatctaaggctcatnctggtggtgaagctctttcttccaaagcttattccctagtggatggcgccgcctcttacctcttattctttatcttctgctgcatctccattggggaaaatcaccattaaaggagctcattgagactcatagatccagcctccatagaagctctacaagcaa

SEQ ID NO: 242251 - DNA, 270 bp, Glycine max
  unsure (1)..(270): unsure at all n locations
tttttttngccgcgcacaggcacacaattctggggccatcgctgaaatgtcatgtcttcaccatatgaaaaattttgacctactaccagtcatatgcctcttgagaatatgattatagaaacctttcaactatgatacctacaaagcttgcgtttttgaagaactttctcagctcataatgccttgccacaacagggggctatgatccacagcataactgtccccaattgagcatcagctggtgtctggcaacccggtaggggtctgact

SEQ ID NO: 242252 - DNA, 188 bp, Glycine max
caaggcgcactaggactagttgaccatagcacttcaacctcccaatgctaggcacatcgacgtgcaagtagtaccaacatactctaaaaaacttgaacattaaaattgtcaaaacgctgtagggaaatgccacttaagcctataaccattctaacaattggacaatcacacctgagtagaatagcacc

SEQ ID NO: 242253 - DNA, 420 bp, Glycine max
cacctgtcgccagactctgtggtttatgctcctctgccccaccacacagacctttgcccttctgtgcaacaatctgaagcaattgaacagcctgaagcttatgtgtcaaacatctacaatagacctctttaacctcagcagcaaatcagccacaacagaacaattatgacctctccagcaacaggtacaatcccgggtggaggaatcatcccaaccttagatggttgagtccttcacaatagaagcaacaacaacagccttatttttagaatgtttgtggcccaagcagaccatacgttccttcaccaatctagcagctacaacaacaacagcaacaacctcagagacaaaaaacagttgaggctccttcgcaaccttcccttgaagaactttgaagcaaatgactatgctaaacatgca

SEQ ID NO: 242254 - DNA, 361 bp, Glycine max
atggcacaaaccccacaacagatacctcactgaagtctaaaaggatgcctcccacaatgaaacaacttgacgaaaaatgagaaaaagatagaacaagagcgcaagataaatacttgaagtgaaactctgatataaacactacaagttctacactgttattgttccttgcaaagaaaagtaatttgtatctgtgcttaactgtatatacactctttgagtgttaagaatacttgtattcaatcaaacatttttttatgaaagccaagagtggcttagtgttaaaaaatacttgggttcttagattcatgaggagtctaaaaagatatcaaaagtggtgttaagaatacttgaaaagtagaag

SEQ ID NO: 242255 - DNA, 278 bp, Glycine max
cacaagaacacaactgattgtagaaaatattattgcatacttgtgttaaaaactacattctactacgtgcactttcttacctgctttatagttttagcataagttattaaatctgttgaatataatcatacatgtcttacaagcttattttgaactactcagctacattattccctggtcgatactcgatcattcttaatttttaaactgacattggtgcctttcgacaacggattccttgatattatgtcaaaaaagggacacaagtacgcaggaat

SEQ ID NO: 242256 - DNA, 327 bp, Glycine max
ggttaacatggaccgctaaagcataaaatcaacatgtaactttaccgcttttgcgagaactacgtaggtctgatttcctctttgatggaggatacgtaggagaaaaagccccgtttttgtcgacctcgtgagatggttagaggtccaacgccttatctttctcaccaagtaaaatggatcatattaaggtccaacgccttaaatgactcccttccaagtaaaaagaatcacttaattcgccctttttgaaagaactatgtatgtctgatatccttatcacaattgaggaatacgttggagcaagggaaacatccttgtcgaccccaa

SEQ ID NO: 242257 - DNA, 407 bp, Glycine max
  unsure (1)..(407): unsure at all n locations
acttagaaactcaagcttgagaatggtagacatgatacatgtcagggtttggtttgtttcaaggataaaagggatgccccacattatttccatgacaaatgcaaaaatgatgatttggaaactttatgcaaaactggtcatgcatgcacctatgcggacactcaagtgtcaaatttttatggtcatgtgatgctagggctcaggatccatttcctctattttaatcaacccaatgtttccaacatatgttcttttatcaatttgtgcattcatccgagtccatttcgggcgtccggngaaatttcacagcattcacccttcaggtgtagacacattttccaaaaattggttatgatcaatgaactttttaaagaaaagttggaaatcgtctcttttcaaaagcatgc

SEQ ID NO: 242258 - DNA, 481 bp, Glycine max
  unsure (1)..(481): unsure at all n locations
nntgcggattggtcttcgccggcgaaaggatcaaagtggtcctataaagatgtaaanttgatcatcatgctntgataaatgcaaaaactggggcaaataagagggtgagaataagggagaaacctatgttgtgactgccattcctatacggccaagtttcccaccaacccaacattgtcattactcagccaataacaacccttctctttacccaccacccaattatccacaaaggtcatccctaaatcaaccacaaaacccacctaccacacaaccaatgatgaacaccacctttagcacaaacaaaaacaccaaccaaaaaggaattttgcagcaaatagcctgtaggattcaccccaaattccggtgtcatatgctaacttgctcccatatctactctataattcaatggtagccataaccccagccaaggttcatcaacctccatttcttcgangacacgactcgaatgcaacgtgtg

SEQ ID NO: 242259 - DNA, 318 bp, Glycine max
gaatcgacaacccatgaactatcatcacgagcaatgtttaggatattaccttcaccaacgagatataacagatcttcttttgaaactacgacagtagtattcttctcttattgcttcattgttgggctgacttggtctgacttaacgttaccggccttttgatctctcttgaaagatcaacattctatttgtctgtggcctatacttccacagtagtagcacgtcattctttagcgtgatttggatctacctcgagattgatgtggatctcgactcttattacatccacgagtctcaatcctaccccgattctcaata

SEQ ID NO: 242260 - DNA, 448 bp, Glycine max
  unsure (1)..(448): unsure at all n locations
ggagacctacacgtggcatatacatataccatagatgcatcnatttgtttggggncgnccncnngatacgngaccactaacaagaaggattccgttggttccagaacgtttcacatgagaaaagatntttatttcttgggattatagaaagagaaatttaatttctaatatctgatatgtattttaaaaaaataaatattcttttaaaaaattatttcttgaaaatgtttctttaatgaatttttcataaaaatattttcatgacaggagatgaaatttttttttcttttgttatattaaaaatatcattatattgtttattaaattatataatataataaataattaaaattattgataacaatatacgtaattctgattcctaagaaatntatctaatttttttaatgattaatcatatatactctattcatttaaacaaatatga

SEQ ID NO: 242261 - DNA, 349 bp, Glycine max
  unsure (1)..(349): unsure at all n locations
ggaagaagccgcaacaagatccattaggcagaagatgatttaatgccaacaaagtaattcaatacagtagaagatgtattgctgtaggtgaaaagatagggaccacacttgctgccagtaaacccaaattgaagaatattggatattaaccaaaccaagctctgggagcttgtttaaggccatacagggctctttttaacttgcagaccagagatctgtctgaggattcaaatcctggtggctgaaccatgtacacttcttcttctaggacaccatntagaaaagcattatgaaatctgcttatttagtactgtgggaggaattatcggaacagcagcaggatggagca

SEQ ID NO: 242262 - DNA, 213 bp, Glycine max
agaggatgacgatagaccaattatcgagaatgacaaatcgaaccggaagaagctgcagaagaagacaccttagaaaaaaaaaattgaggttaaaagagaggctgcttgttttgaattttgagctatgtcacatattaggcatttccaaagaattaaactaaattgacttagaaaattgtccgcttactttcaagctaaaatatccacctttaa

SEQ ID NO: 242263 - DNA, 280 bp, Glycine max
  unsure (1)..(280): unsure at all n locations
tgggcacgttcaatattacatattccaagctccacgggcggagcaaaagttaaattttcttctgccgaactaaacacacaattttacgaattgtntctccaacttacggggccataattcaagcaagtttgtaaaccagatcgaatacctacaacgggtctgagggctcattctctcgtaaatcaacacagaaatccatactatgaccagtcaacgattcatagcactaaaagagtttggcccgcaatgctgctagataataaagaaatattcctatctg

SEQ ID NO: 242264 - DNA, 265 bp, Glycine max
tagccctacaaataacgaagtacttttactgatgtcgaggagcctgcatttcgagaccccatatggacagatcttagcaattctacacatactttactggagccgatgtataatcggacgctcgaatgaaacgaactttacaattctacgacaaactgtatgatgtcattggtccgattatcggacctcaatgaaacggagctgtgcaatctacactatatttaccggtgccaggatctcgataactgagctcgatgaacggagc

SEQ ID NO: 242265 - DNA, 372 bp, Glycine max
  unsure (1)..(372): unsure at all n locations
tgtcaccnccatgaatattgatattgtatcatgcttttatatgcatttgcttattctaatcattgtgtgttgtgtgattatttcttccatgcaggtacatgattcctatttgttgtgagagtgaaatgatgggcagcagcaccaactgaggtgagtttatatttccttttttttgtctttatctttgttagtttgttatatattttttattttatatgtttgagttttaaatgtgtaaaaaatagaaatagaaaggtctgctgattgcttangaattacttgctgtttcatggcattccttttgaacctcaaaaggtgcttatgatnggccttggataaatntctgattatatgtattggggtccttgtgct

SEQ ID NO: 242266 - DNA, 390 bp, Glycine max
  unsure (1)..(390): unsure at all n locations
tatcatgncacagcggcgggcaagatatgtaattctgatgtcaggcttgggctcctatcaagactgcagcaagtctgatctggaacctagtgcttgacatcaatatctgtaagcttagtacccctggtactcaattaatactacttatacttttgctgagcaaaaaaaaatattggcattaaacaatttaaataagtaaataaataaataaatctcatgaataattcagacacatattggacatcacagagcttcacccctcaagatatatatcctagaaaaatctgctcatgcaagtttcaactgtatctgtccatcaagccatcaagagtttgatgaataaagtttcactttttctaacaacaaccaaggcttatctcactagatgag

SEQ ID NO: 242267 - DNA, 296 bp, Glycine max
  unsure (1)..(296): unsure at all n locations
tctttttcttgaacncaanncaaacagaataatccataaatgtccaagaattgggcgttcgaaaatcacaacaagactttctatgattggtttaaagataccaatcttgccgatgacaactgcttacaaacatctagaaagctagcagatgggcctaaaagaaatgttataacctggcaaggatacgacatatataaatattcattttacacacaagcacatgatgaatatagtacaatgcagaacagcgtggtcatcctaatggctgaatctcaacacttacaagtgtgaatgac

SEQ ID NO: 242268 - DNA, 434 bp, Glycine max
  unsure (1)..(434): unsure at all n locations
aagcttgtacccaccagtagtatgagagccctatttaatcatgngccatttcttttgtccagccnncttcttaatggagttggaacatgcttgaagcacaagcatccaaacacccttaggtgcttgagacaaggcttacttccactccaagtttcttcaggtgtcacattctctagcctctttgttgaacatctgttgagcacataggctgctgttgacactgcctcaccccaaaactcctttggcaagtgaaaattccttaccatacacctggtcatgttgactatggttctattgagtatctcaaatacaccattgtggtgtggtgcatatggaggtgtgatcttatgaatattacccttattctcatagaatatcttgaattcatgtgatgtgtattcactaccaccatctgatctgagtctttaatacta

SEQ ID NO: 242269 - DNA, 398 bp, Glycine max
acacttattgtttctcctgaatggacaacaaacttttaaggagttatagctttagtagtaagaatatctgcatattagtctggagatggatcatggtacactaacatgcttttatttagtacctttctgcacataaaaagtgcccaattttttatgctttgtcctggagtgaggaacaagattgtgcgagagactgtactaaggttgtcacagtagatctttggagtctgaaaaaactcataagagattgaatccataggatttcagcttcagtactcagcctcagtgctggactgggccactaagttctgtttcctgtgccaccacaaaattaaataggggtccagatatatacgacatcttattattcatctatatatgaggcctagttagcatca

SEQ ID NO: 242270 - DNA, 333 bp, Glycine max
agcgacacacgcttcaacaatgtcatctaaatggatatttgttccttatagaacgtcaatagattcacaacgcttcggcctcgttgcgcatgattggcttcaacgtactatgtagggcatctttattatcacacaggcttaattcagctattctccaaaactggaatctgtctcaccaactatcttaaccaaactatctaatccgtaggttgcgacctcgcaaagtgagccaatttggctcatccaggttagctaaaacgtgagacgcaaccaactttgggaagctacccaaacctttatgtttgcttgatgatatgagcggcaacccctctc

SEQ ID NO: 242271 - DNA, 215 bp, Glycine max
ccactgaccacgccagtgagggggagttttatttttttcgcacactcaatcaattatctgagaagaccacataacgttttttcattctaaagttaaaatgttaaaagttatctgcaccctttgcttcttcctaggctgacttctactccactatttttttgattcagatacttaaacttagtttgtatacctgcattataatccaactggtgctt

SEQ ID NO: 242272 - DNA, 297 bp, Glycine max
gaaaatttccgatcaaaggaaaaaggagaaggaaaatttccaatcaaaggaaaaaggaaaggaaattcccaatcaaagagtgcgggaaagcaaaaagaaaagaaagaaaattcccaatcaaagactgggagaaagaaaaaaagagagaagttaaacagacgaaatttcctggtcacagaaaccacaaaaaatgtgccgagaggtccctggaccacacaatatttgaacaaatacagaattgtcacccaatgaatataaaagaaggaaaggaaaccacgacctaaaaggggctccccc

SEQ ID NO: 242273 - DNA, 365 bp, Glycine max
actcacatgtgactaattttgaatctttagcaagtagccgctacctgtccctaattactcgaataattgattgtggtttatctacgtgatttactattcaaacatttgaatatggttgcagaataagagttgcaacttctgatatgagagtgttgctctcagttatatgtttcatgtggcactttctttctttcttgtcatctaccatgatctaatactatatgctttatgccctccttgctatattctctcatcaagttgacaatgcgcttcgattcattgagaaatgggctgcttatttgatgagggcttgcgggtttcacgtcagtaccatattggccatggacattacgcattgcacaaac

SEQ ID NO: 242274 - DNA, 442 bp, Glycine max
atgaattcttattattatacgtgttttctttattgccactcatatctctacgtgcgaatgtatctctgatctgatcagctcattcttcagggtgttctttatattcctctcgatagttgtatatctctttatttcggcacctcttctctggtctctccaatacaaaattgttcttatatcaatacaaacgtacccatctttaacttcatttcattcgttgtcttctacatgagctagaattgacaatgacacgcactgtacttctatgcgtatacttttcatataaaacaaataaccggaactaatttttcgttgatgtcttcaataatcccgacctctcattaaacttcctattctgctgtctatataaacttattaaccttatatgaatgccatgcttcttatatgttatgcctccaacgcagcatgcatgttcatttct

SEQ ID NO: 242275 - DNA, 348 bp, Glycine max
  unsure (1)..(348): unsure at all n locations
ccataatngnngggcctcttccaacacctgattgttacaaacaatnttgccttttaatcctccttctgcttccaactgcttgtgactttgactttggttctggatatcagttgaggtagccatgtctatgtctccttctagcacgtgaggttcttctaccacacgttctagctgggggggcttatagtgagaaaatctatgtctctcccaggactacttattaattgtttgggtgaattcacttgataaacactgctattgatctttatcaaagtaacacactttcaatgtgttgatctaacgtgtcttgattcttcaattgtgcataaggtaaagcttcacctcatg

SEQ ID NO: 242276 - DNA, 281 bp, Glycine max
aaaacagctcgcgggttagttgtttgaaataaccaaagtgaatctagttcacctttctcaaaattcttggagtattgcgacattcaagcagagttatgagatattctggcagctattcaccttccctctcgctcatgtattccatcaaagatatcccatgttccccaacatacttaaagaactcatctatttattaattaagtctcttctaataaatatattaactaagatgaaccctgtgaatttatattcattgttctcattctttacatcaataccat

SEQ ID NO: 242277 - DNA, 389 bp, Glycine max
  unsure (1)..(389): unsure at all n locations
cttctatagaagggttgggcctaatgtctctaaatcgcagtcttctcattgttctggtgaagaagaatgtggaatttacctgnggtgaaaaacaagagcaagcctttgctttgctcaaagaaaagcttactaaggcacctgttctagctcttcctgacttttctaaaacttttgagctagaatgtgatgcctctggagtgggagttggagctgtattgttacaaggtgggcaccctattgcttattttagtgaataacttcatagtgccaccctcaactaccccacctatgataaagagctttatgcctttaatagagccctccaaacttgggaacattaccctgtttcaaggaattggtcttcatagtgatcatcaatcacttaagta

SEQ ID NO: 242278 - DNA, 390 bp, Glycine max
  unsure (1)..(390): unsure at all n locations
gaggatgctctaatggaggaaaagatagagagaatttggtgtcacnaaattgaaggaataaaagagggagagaagtgtaactctgaagtgtatctcataagactttcattcatcaaagttacaacaagtgttacacatgttagggacgaattctccataacccaggacaagagaatggcgtctgaatcagaggaaacaacccgctcttaatattattagtttcgtattccagcttacttgttttgttctttaaatcacaaaacaaacaaacgcccccccccaatcgttactgttatctgcagtatattatgaacatttgggttatcatggctcgttgggaaatgacctaggatcacttcctagttacagcatnttcatgtttatttgatt

SEQ ID NO: 242279 - DNA, 357 bp, Glycine max
  unsure (1)..(357): unsure at all n locations
gctatctctgcttccttgtttaaatttgttttttttcttctggaaactctncgaattttttgaagcttcaaatgctttagcagtcgacttgtcaaacacgacgttacaacaaagacaaagcataacctctttctcaacgttttgtttcttcaatagaaattcgaccaatgattcctctgcaagtggaaactcttcttcctttttgaactcttccaaagcttggttgacctcctctctagataaaggagcactcactcttggtgttcatatcgaagcttccatcatcatgatctgcatgggtttgatatagttagcctgaatatggaatggatcaatatccaccctcattgggttctc

SEQ ID NO: 242280 - DNA, 274 bp, Glycine max
tttctatcaggctgagctgcctacaggcaccttgacagacaaacatatgatgctggcacacacatgtctaactggacagcgtaccacatcaacaactgctacaggagaaccactggatataagtgggctccatgagacagtagtcatcttaaaagctagaacggggagctccacgaacaaaaatgccatagagatcgtctgccacaccggcgcttataataaagtatgtttggttgaatcctgtgtccagctcttcaatgtatgtaggaccaac

SEQ ID NO: 242281 - DNA, 339 bp, Glycine max
cccacaccggctaaggagatcgtgcactcatgccctattggacactatacaccataggtatatcccccgatgatgtccatatctctcgaaaactcgttctgccaaactcttatctgatagcgagagagaggttccccttgtctaaaaccccgctgccctttgaaggggtcataaatggatccattgactgtcacactaaatgaagtggaaaaaacacattccatgatccaagtacagaactgggctaggaagccaatggacttaagcatccaattcaagaattcctaggaaatggaatcataagctttatgcaagccattctcaggaaacatcttggag

SEQ ID NO: 242282 - DNA, 370 bp, Glycine max
tacagggccaatagcggaatataaagccaaaacctctgcactactgcagctgattagggggacctatctagtccctacaatgtcattattccatttaaactcactttagaaattccacatcttctcagccttaaagggagtgtctgcttattttttaaaagacaaggtttagcaaaatacaacttagtggaatacttgtgatcctataaattaataatctggaagtttgaataacatttacatactaagtgcaaattttgggaaggttattcatcaattacaaccctgatcccaatgctcactaactagctccctttttattttttattttcctttccatgcatgtaaccaatcacatttagtaaaaaga

SEQ ID NO: 242283 - DNA, 286 bp, Glycine max
  unsure (1)..(286): unsure at all n locations
atgcatggctaaccacaggaaaatttttatgttttctattatgttggacttccaaacgcacgatcactctcctagagaggcactatgaacgttaggctcatggattaagcacctgaaggcatatttggtcacatattctccacaacttaagtgacctcatatcagtttattctttgtatggctatctagaatgatgttcaaagtatagcagcaagcaatgatgttcgaacaagctcctaatgccatttgttatcacctgacacatcgntcgattctaagatggatg

SEQ ID NO: 242284 - DNA, 174 bp, Glycine max
acatgtgcacatcttggtatttctattacctacacatacacaaacttgaggatgaattttgactatctacacaataaggtgctacatttcatgctctcttaaagtttttgctacctaaagccgaatgcaactgagacactattttctttgctgacaaaattcgatccaaataaa

SEQ ID NO: 242285 - DNA, 325 bp, Glycine max
  unsure (1)..(325): unsure at all n locations
gagaagtgaaattgagaatgaggtaaaattggagcaaaccctcaccttccacaagtctataacatcaatttaaacttgctcaaactggatttacacctaaaattccaccgaatcaaaatatgactcctcaacacccaattttaccctagaaatggctctttgttcactttggtcatttggttatctctcttgcacagcccaagctttctcataagtcctaaatgacatttcaaactacggttaactcactttaacctccaaataccactaaatcccagatntggctctccactctcacaaacttacttctttttcactcataaca

SEQ ID NO: 242286 - DNA, 373 bp, Glycine max
  unsure (1)..(373): unsure at all n locations
aagaagaatgattaagaggcnnattattaatgngaactacaggaacaaggatatgtctcacttgaagacaataaaatgatgattatatcgaggaaaaggaggaccattcatgtcctntcagctagaagcttagcctttccagatagttagtatatgacaattatatatggtagatctattttagcatttgaaaagaaaaatatattgcaaccagtaaccatccatgctttctccattgaccgcaatgtcaacccgacatttgtatggtggattctatgcttgctactatctactaataataatgccaacttctaatcacttggncattcatgctctgcttgttaaatgttaaagaacctttcaagccaaaatt

SEQ ID NO: 242287 - DNA, 325 bp, Glycine max
  unsure (1)..(325): unsure at all n locations
tactacagtcaccgntttacgagcgttctacaccatcaccgcttctaagccctcaagggacggtcgtttctccgggagcgacgcgtccatttcagggacgacgagtatactgatttccaggaggaaatagggcgccggcggtgggcaccactggttactcncatggcgaagtttgatccacaaatagtccttgagttttacgccaatgcttggccaacagaggaaggcgtgcgtgacatgagatcctggttaggggtcagtggatcccgttcgagccgacgctatcagccagctcctgtgatatccgacgggattggaagacggc

SEQ ID NO: 242288 - DNA, 271 bp, Glycine max
caatcatttataccccattgtattatatacatatagtcattctcaaatcattcttagtcatactaatcttatgttactacactccctcaaaaataaaattcacaaataaaactacggttgaaggatcgatctgtgaagcatacgtatcggagcagaccatcacatttgtctcgcttacctatctgaccacatgctcaagaacgacttgatgcccgaacgttgatgcaacgaaagtcttcatctcactattatatcatttcactacccccaa

SEQ ID NO: 242289 - DNA, 300 bp, Glycine max
  unsure (1)..(300): unsure at all n locations
ttatgatggagcttcttacccatttccctnatcgagaactagctcctctcttcctctattgcccttagttgaatacacctttgttcggttctctattagcgtcttaaccctctcatgcaacttctttacaaactctgacctaaattccccttctttatgtataaaagaagtgttatatgggaggggaatgaagtctaatggtgttaagggatcgaacccatatacaacctccaaaggggattgcttggtggttctatgaacccccctcttgtacgccaatcctacatgaggaagaacctc

SEQ ID NO: 242290 - DNA, 366 bp, Glycine max
gccttagatatcttaagaaggggggttgaattaaaatatcgcaaactatttccccaattaaaattctatttcaatgtcaatgcaagttataagttctcttaaaatgaactcttaaataatgattcaaatagaacaatctgaatataaatgtaaagcaataataaataaaagagcttaactgaagagaaagtgcaaactcagatttatactggttcggacacacccttgtgcctacgtccagtccccaagcaacccgcttaagagttccactatcttgtaaaatcctgttacaagttctgaacatacaacgacaatccttcttttgtgtcagatctcttacaaaagacacctccgtctctcatccct

SEQ ID NO: 242291 - DNA, 235 bp, Glycine max
ccagctgcaaatggagcacgattcgcgagtggggggatgtgttaccctattttctccgccaacagctatacccatatacatgctgcctattcttacaacccctacaaaagtggttcactagataatctctatttagagaaactctctctggcgatgtggcaatgatgcaactaagaccccttggtgcaattgggatacacgaccgtctccctaaaaacaaagaagggttacggat

SEQ ID NO: 242292 - DNA, 371 bp, Glycine max
  unsure (1)..(371): unsure at all n locations
cgcctactctcacctcctttcctttgccttccgctgcatctccatggtggaaaatcaccattaaaggaccccattgaagctcaaagatccagcctccatagaagccccacaagcaagcttccatcaagtggtaatcagagcacaagagcttcaagtaggtgctccttaaacctgcattaatttttttgctttaccttctcttccattgttgnttcttcatttttctccatgtatctcctcacatgtcttgttctaaatgttgttaacatgattctttagagtttccaccgattaaacttgctatagaagttagatctgattttctatggttcanatctccttgtcttgttcttgaaccatgaattgtgttg

SEQ ID NO: 242293 - DNA, 341 bp, Glycine max
acggacgaaacacccggacgggccaattggacctgtatgcatttaacacccacctttttactaaatgcacccccttatatattcttctgtaattctttttccgtaacgttacgaaactctacgaatttcgtaacgatacttattttcctttccgcaaggttacgaatccttacggatttatgtatttactctttttggctttcaaagaagttacggaaactcacggattgcgcaaaaacacctcttttcgatttccgccacattacggaatttcacggattacgcaagcctgcctccttttggatttctgagacgtctcgggacttcatttattgcatgtc

SEQ ID NO: 242294 - DNA, 188 bp, Glycine max
cacgagcccacctgcatatgccttggtctctcaaggcctccacaactccaacactagctgccacacttcatgctctaattcctgaactcagcttgttactgagacgatgatattctaaatctcctcaagagtcataatcgcttttacaacaatctccgggacaatgaatgatactgatatagtcacta

SEQ ID NO: 242295 - DNA, 314 bp, Glycine max
cagaaccaagaaaacagggcagaggcagtatactttgcccaaaacacacaccaattccacagctttccttactcatataccccaattacattcctcttgttccaattccttcaccgttggatcgactcgaaaattttactggaggtccctagtacataatgtctacattttgaccgctgggatgtgctagaaaaagctctcgacctaatatgtactacccttatcacaaccatctaatcacaacaattgcttgacaagcacaaatttctgttggtcaaaatatgacagcttttggtgcacaaatggcagatttc

SEQ ID NO: 242296 - DNA, 437 bp, Glycine max
  unsure (1)..(437): unsure at all n locations
tcatttccaaatatgcatgtgatttangacgcatcaacaagaatcaagccaaggctattgtgcaagcaatcaatggggcaaaacacaccaaatgattataatgatggatggctcaaattctcacaaaggtaaaatcatcactttcaaattgagctttcaaaactatcatgacatgtagagaagaatcaaggatttcaagtcacaaaatgtcaagaacttatattttcaaaacaattacccatttcttgaacatatcctataattcaaagaaaaacatgcaaagtcgtacgtgcacacaaaatngacccaaaatattaaactgaanatccgacgaaactaacaacactaacanaataacacaactaacaaagtaacaaaaccaacataactagcaaaaccaaagaacacttccccgcccccccgcatacttaaacaac

SEQ ID NO: 242297 - DNA, 477 bp, Glycine max
  unsure (1)..(477): unsure at all n locations
cgctggtgactctnggcatgagtttcaattaattattatcatgtatcatatatcatctatctttcaatctatctttcaatatcttctttcatctctttctacagaattttctgattcatttctcttgatctttctaaaagtttttgatcaacactttctcttccaagaaaatttctttgttcaaaaacttgtgttattcatctttttcattctcttctccctttgccaaaagaacgaaggactaaccgcctgaattctttgtgtctctcttctcccttacaaaagattcanaggactaaccgcctgagaattcttttgattcttcccttccccttaaacaaaagatttaaaggactaatcgtctgagatantctttgtttccccttacaaagattcanaggactaaccacctgagaattctntgtcccaacacatnggaggatacatcctttgtggtacaagtagagggtacatcta

SEQ ID NO: 242298 - DNA, 317 bp, Glycine max
gcgtgtatgatatcgactccacaaagtttaagtttatgagaccttcaatcctattacgcaacgtggcggacaaaagtgggctgcttacttgaatggtcattattgtcaatgccgaaggtattctgcgcttcactatccatgttcacacagtattgcaacttgtgggtacgtgagcatgaactactaccaatatatagatgttgtttacacaaatgaacacatcttaaaagcttactccgcacaatggtggccttttgcgaatgaagcggctattcctccttctaatgacgcatggacacttattcctgacccaacta

SEQ ID NO: 242299 - DNA, 382 bp, Glycine max
  unsure (1)..(382): unsure at all n locations
ggatgctctctcttttgtgattcactcaatttggactgcttcttagtccaatagctattaaggtggttggccccttgcttcttgactcaaattcttcaagggatggcatcaatcctcctttccaatttcctatatggcaactcacaaacaaggaaacaaagagacaagcaataaccaaagacaaaaaaaaaatgaaatgaaagctaaaccaatggagttttaacaagacaatttatcaaggattattcaacaattaaagcaatgaanaggacatagaagcaagctaggactcanagagaaacttagaatggctctagagtagagtaaaanaactataaaaaaagactcacaaaacctctagctttggaactttgtttcacac

SEQ ID NO: 242300 - DNA, 323 bp, Glycine max
  unsure (1)..(323): unsure at all n locations
actaagcttgtaggattatggngtacccatcacatgtggtattaggtggcggtcgggcgatggtgcacaacaagttnttccacatccacaatgcgcgcataaacccaccatcccctgttgcccacctccatctgagctcacgtactcccacgtagcccatatcctcgtttctcccaacaccgggtccccatcaatccttccaagcttccacaacatccaagcaaaacaacattcaaacagcacaagctatcacagccaagcaaaacagagcaaatgcagaaaactctgccaaacaccacccaaatcacagcttttctcactta

SEQ ID NO: 242301 - DNA, 220 bp, Glycine max
ctggatctttgagcttcaatggcgtcctttaatggtgacttatcaccatggagatgcgcggaagacaaaggaaaatatgtgagaggaggcgccattcattaatgaataagccatggacgaaggagcttcaccaccaagatgagccttggataataagctaggagaggatgcttccatggaggaaaagaaatacggagagaaagagagaggggggagcact

SEQ ID NO: 242302 - DNA, 472 bp, Glycine max
  unsure (1)..(472): unsure at all n locations
gcatgcaaccttgccgtccagctcgcccaggcgagccaggttgcttcctccataagaaacagccttttggaggaatcttctggaaggcccaagtgggcctagttgctatttacaccccccttttactaaatgcaccccccttttctatntttttgtaattcttttttccgtaacgttacgaaactttaccaatttcgtaatgatacttattttccttccgcaaggttacgaatatttacggattatgtatttacttctttttagctttcgaagaagttacggaaacttacggattgcgcaaaaacgcctcttttcgacttccgccacattacggaatttcacggatcgcgcaagcctgcttcctttagatttctgagacgtctcgggacttcatttattgtgcaacanaggacgccaagtatctcgaagcggctaaccaaagaatgcatgtcatcaagtaataatccccgga

SEQ ID NO: 242303 - DNA, 417 bp, Glycine max
  unsure (1)..(417): unsure at all n locations
tgtagaggcttgttgccttggtgagacttgttgcctcggtgccgattcagatgttggctatgattcgtttggcttgtctaagcttgtccattgcttgcgcattcacagacgtcagcgtcgcgacattgaaatctcagcacaccggacaaacaagctccaccttatcctcttcctctttcttcaatttgatctcattccattgattcaacctttcttcagttcctccaacgtcngcgagggtggatctcaatccggcgaactcgtctcatcaccgcctcgaaatgcataaatgattggtgttagggagttcttggtttggttagttggagggaaagggaaaggttaaaggcagatactatanggtgcttgtctgagtctgagaaggaggtttataaacaaaaatcatacgaatttgaa

SEQ ID NO: 242304 - DNA, 345 bp, Glycine max
  unsure (1)..(345): unsure at all n locations
acgcgtcactaacacttatacaacgactacaatgcaagtagcccgctcgntgatggcttatttttttatatataaaaaaggagtaaaattttaagttatttcgttaggggtatattttaaagaatgataaaaaaggagtaaaactttntttatatatagtttacgactttaaaagttataaacccgttttccttttattaatgtttaagttaattattttaaaaaatatatatataatttttttatgttttctttctttctcaatttttttttaaaaagtatttaaatgtataataaataatattaacttganttatttattattatatttttttatgactttac

SEQ ID NO: 242305 - DNA, 354 bp, Glycine max
  unsure (1)..(354): unsure at all n locations
ctgatgcatctaccccgcagggcattggatagaatagtccaataacattggaccaaagatgcaagagaaggccctagggttctcatgagtcttanggtagatntcgggcccatgggctaagtacgagcccacttatctttgtaaatattagattaaggtttcattatttttgggccttgtagttagggctccataatgtaggtagggtgccttagaaatataggatttttcagcccttgtattttagggcacctagactagtttttgtattatgggtagttttgtaatttcatatgcactaagtgaatatttgatcgtgtggttggaaactaaattaattgaattggtagaagc

SEQ ID NO: 242306 - DNA, 502 bp, Glycine max
  unsure (1)..(502): unsure at all n locations
ngacagantgtggatgacacgacacacgtcgatcgatgcttgctgtgtggcagatggtgcacacatacgaatgacgatccactaagctcgcataatatcaccctccactgttgcccaactattacttgagcgctactcacatctctcgtanaactcatattctgtgaataatacttgatagccggggcacaccataagataccttccattgctgaacacatacattcttgccaatcagcttggcttcagaacaatctatgacatatcatcaaagcaaaggaaggtccctatctcatctcatctcatccactactgtcatagcttttctacttatagaccaagtcacattccattcgatcaatgactaacctgtggtcgacatcaagatctactgtgagtctatcgtactcagactacattatgaccattgcatcttcatcatacatacacaacaagtgtgctctgctcttacacaccaaaaatacgtgagttttttcactcn

SEQ ID NO: 242307 - DNA, 336 bp, Glycine max
agcttggatagatcttgagcttttagtagattatggaagttaaacccttgctgagagaaccactccaagtccagatacttgggtattcttacattctccatagcataaatcatcttctagtcattcttcttacttttgttagtaaaccatgtatctagcctgttgatagcaacttaagagcattcaccttgcttcctcttggaatacttggctttcttctgagctctggaagggttgctcgctcattttggaagggaaacaaagggtttggaagcagaagaaggttaggttcagagatgggtgtttcaaggaggtgttggtgtgatttgtggatgg

SEQ ID NO: 242308 - DNA, 364 bp, Glycine max
  unsure (1)..(364): unsure at all n locations
ctttgcgtaagaaccagtttatccaatggaacgatgactgtcaagtggcattcggaaggatcaaatgatgccttatgaatcctcctgtgcttacgccactagtgcctggaaggcccattatcctatacatgactatgttggatgagtcaatggggtgtatgctggggcaacatgacgagtctggaaagagggaacatgccatctattacctaagcaagaagttcacatcatgtgaaatgaactactctntgcttgaaaggacatgttgtgccttggtatgggcagcccaccgtctaaggcagtacatgttgagctacaccactnntgtggtgtccaaaatggacccagtcaagtacatatttga

SEQ ID NO: 242309 - DNA, 449 bp, Glycine max
  unsure (1)..(449): unsure at all n locations
agcttctaaaaaggctacgtgaatatgggaggtgttccaccactaaggatggcgacatgcatgtgcatgtgtttcgctaatggtgatggcgaaacccatggtggactcgctggcaggaatggcgacatgcatgggcatgtgtttcgccaatggtgatggcgaaacccatggtgtttcaccaatgtggatggcgacacacatggcactcacgtgaacctactacgctgacatggatgcatgcactgttactgcgtgttacgctggaaggaatggagaaataaatgtttcgccaataggaatggagaaacccttaccaaacccttacaaaatagaccctccaaggaaaatgtttgaaaataaaccccttttgggaataagtttctaaaagaaaccccctgtggtcatnttgccgcttaacacacacaccaacaacaagaagaacaacaata

SEQ ID NO: 242310 - DNA, 214 bp, Glycine max
gactgaactactacaactgaaaagagcacatgttactaattttataaagctcacggtcttcttgaatttattgcatcttactaattgaactcacaaaatgcccaatttaattatcttacaaaaaatgaaatccacttgattctgtacacctaatgtcgcacaatagacattcagagcacagacactttgctttataaataatatatgttattat

SEQ ID NO: 242311 - DNA, 399 bp, Glycine max
  unsure (1)..(399): unsure at all n locations
agcttatccncacaagagtgcataacaactggtgagtctgcattgattataggaggctgaaccaggtaacccgaaaagatcatttccccctgccattcattgaccaaatgcttgagcgcttggcaggtaaatctcattatttttttcttgatggtttttctagttatttacaaattcatattgctcttgaggatcaagaaaagaccacattcacctgtccctttggcactttttcctataggaggatgccctttggcctatgcaacgcccctggtaccttctgtcgcaacctacccttttgcgggcaagcgaggcgaggctcacgggtgccttttccaaaggaggaaaatgcgcggagtcgtcaccaacgtttatttgtggaaaacgtcgaaaaaatcg

SEQ ID NO: 242312 - DNA, 520 bp, Glycine max
  unsure (1)..(520): unsure at all n locations
aggccggcgcgcgcncccagtaactgatacntttgtannnncngacacaggagagtgcgtaagctttgttgatttagttctcaccggtgaaaggatcgaagtgtgtctttatagacgcacatttgatcatcccgccttgacgaatgagaaaactggagctaatgaacacggtgagaatgaaggagaaaaccttgctgtgactgtccctcctacctggctcatatcccctacctctcatcaacactaatccttaccactatattcattatattactccctccccgtcgtgcatgtggttcttctgacgccatcccaacctcttctcccttcaattcattcaagaatctcctcttcaccactgatcacccaccccggctgatccttagcaaatgccgtacaactacctccatctcagttcaatcgtcactctctcccattcatctctacttattgattccctctctcacactacatactccttcttcatgagcattctacgctactctgatccttccccccc

SEQ ID NO: 242313 - DNA, 449 bp, Glycine max
  unsure (1)..(449): unsure at all n locations
tggaaggatgcttcaatggaggaaaagaaagagggagagaaagatagaggggggagcacgaaatcgaaggaagaaaaagggagagaagttgaactttgagttgtgtctcacaagactctcattcatcaaagttaccacaagtgttacacatgcttctatttatagactaggtagcttccttgagaagctttcttgagaaaacttccttgagaagcttctttgagaaaacttccttgagaagctagagcttagctatacacacncttctcataactaagctcacctccttgagaagcttctttaagaagattcctaaagaagctagagcttagctacacatacctctctaatagctaagctcacctncttgagatgagaagctagagcttagctacacaccccctataatagctaagctcaccctcatgacaaanaaaacatggaaatac

SEQ ID NO: 242314 - DNA, 130 bp, Glycine max
aatggtagtcatcacagacgggttgttgaatctgatacgcttgcggcatcagtactctggcgacacgcgttgatatctgccacgctgcaaccggcgcgaaaaattgtcacactgtcccgtaacccattcg

SEQ ID NO: 242315 - DNA, 211 bp, Glycine max
tatacacttaaaatggaagttcttagtatttattacctatacttaatagaaaatacttattacactacaaaataaccataaattggaagagtttgatacaatttacaccatttttatacacaaaagttagtccgtttgactgactaacaatatacttatgtttccttgataacatatcttttcaaaaattggagtacagtgacatttgcta

SEQ ID NO: 242316 - DNA, 176 bp, Glycine max
  unsure (1)..(176): unsure at all n locations
gctttagccaatggacttaccttgactntaattccttgatagcccttttgagctttgtntctccttccctggtntgaagctcactacaagccttaagtgaaaaaccatgatatcaccatatccttaaggaatcttggagctttggaattgctttgggaataagtgtgggggttttt

SEQ ID NO: 242317 - DNA, 191 bp, Glycine max
atatatcaaaaatttgtaggacaaatctgaccatttgataatttggggaaaaaacatcttttatccctaacggaaccataactagaccttcttcgtgactatctttacgacccctatataattcttcgccccatcttttcccatgtccaattcccccccccttcttaacacgcactctccttctactcaaa

SEQ ID NO: 242318 - DNA, 149 bp, Glycine max
  unsure (1)..(149): unsure at all n locations
gagttcatctagggcatgctntgaagcaaacatatccactccggagatcnttctttccatttctttcgttcaatttcttgtcttcagcctctgatgactatgagagactcacttactcactgttgggggcttgagtaccaaagactctg

SEQ ID NO: 242319 - DNA, 339 bp, Glycine max
  unsure (1)..(339): unsure at all n locations
agcttatgcgcatacttctttacgaacgntcacttttacaagacattcttataactaataaaaatgcacccatatacaatcaaggcaccttcggtacctagaatatttatatgtacttccaaggtgtatttgctacctacatcacacgcattttctttgctaaatttacatacatgcttactcaaagcactttggctatcaaaattgcatacgtgcacattctggtatttttaatacctgtacatacaccaactttatgatgaatcttgactatctacacaataaggtgctacattccatgctttttctgaagtgctttctatacctaaagccggatgc

SEQ ID NO: 242320 - DNA, 463 bp, Glycine max
  unsure (1)..(463): unsure at all n locations
atatngaacatcacaagctctcgagagattcagatggtcatatcttgtctcacaaacttcgattcaagcgccatatataccgagacgctcgaaattggacaaccgaagctcctctgaaagtcacacgggcatagacttttacacggaagtgctcactaagcgcatgcatatccagacgcgctaagttgacaccgaagcgctcgcgaaattctaatggattaactattcaccggaagcccgttccagcgcatcgttatccaaatcctggcatgtactacgaatgtctctaacaattaaacgtgcttccttggcctcggcccccaggccttggtttttcttttgcaccctacaattcctaccctatctcccttcgcttcttgcttcttttctttcctctcccctcttgctctcaattctaacccttcatctactcccaagtctcgtactccattttgtcttatcc

SEQ ID NO: 242321 - DNA, 419 bp, Glycine max
gaagcgtttgtgaaagagcatttgtatgcatcacgtatcgctgtaacacatttctaatagtaacatgctcaaagtatgttaacagataaaatgattcttatagacctgccattaccattccaccacatacttatctgtctatgtgttaaaggagaggtacagcatcgtcatcgcttatactcgtgactgtacaatgcgcagatacaaccacattatgttcatgtgacaacgcgagtgattgtactgtagtccaatgtgcattttcgaagacaaaagataatgcatgcatctagaacatagtggtaattaaactaattcttcttaaaggtcagtgctctcgaatacgtaatgaattcaagaatatacgaactacgaagacactgacagaggtaaaatcttgtaaaaaattaagaaggagg

SEQ ID NO: 242322 - DNA, 452 bp, Glycine max
  unsure (1)..(452): unsure at all n locations
agcttccattntctctttctacttgaatgagtaattcttaagtttcatacatcatcaggtccatccttatattnttttttccttctaattattaaataaaaatattgttttcttgaagtctcttccttccatgtaataatgaaaccgtaagatgaccaaattaattntacttgctagttanttgaagaaccaacgtcgcacgccaaaagtcaaaacctacaacccatctgtcatcccgattcattactctcgggattacttcagggtcatttcattgttatctcttcttccttttcacaccctcatttaaattttaaaacacctaaaatacccttctttctctttaaaatttaaaatcttctctcctactcatgtccatgctgatattntagaagtcctaggcggattaataaacaaaagttatacattttttcgataaccatatntattat

SEQ ID NO: 242323 - DNA, 419 bp, Glycine max
  unsure (1)..(419): unsure at all n locations
tctcgccattggcagcagcgagacaggtgctgactgggcactaaggcggtatcgccattatcatcagcgagacaggtgctgactgggcacaaaggcgtaagtgctgactgggcattccgccagtagcaccagcgagatcatcatgcacctctgcacgcgctacagacaccttcttcacgtcttgcatagcttctggcttgacacaacagcttatgacactcgtgtttgcaggtaagggcacatccaggctatggttctattcatctgcaggttatggttctgctcattgcacgctanggcatggcatggtgaggagtcacatgggtacagtttcatattcacatgcgcctgtaattattgtagaacatcatgggtgtagactgcgttaaatgagagcattctaagacaaaatttacata

SEQ ID NO: 242324 - DNA, 413 bp, Glycine max
  unsure (1)..(413): unsure at all n locations
agcttccttgagaaactatcttgttaagatntctatagaagctagagcttatctacacacacctctctaataactaagctcaccttcttgagatgagaagctagagcttagctgtatgccccctataatagctaagctcaccctcatgccaaaagacatgacaatacgaatgacagtccctactactaagactactcgaaatgccctgaaatacaaggctaaaaccctatattactagaatggccagaatacaagcccgaaatagtaaaaacctattctaatatttacaaagaagagtgaacccaaccttggcccatgggctcaaaaaatctacccttaggttcatgagaaccccagggccttctttagcagctctagcccaatcctctgggagtcttctatccaataccctt

SEQ ID NO: 242325 - DNA, 453 bp, Glycine max
  unsure (1)..(453): unsure at all n locations
tctatggaggctggatctttgagcttcaatgagatccttcaatgttgattntacaccatggagattcagcggaaggcaaaggagaagaggagaggggagacaccatccactatggaataagccaaggaagaatgagcttcaccaccaagaattgccttggataagaagctngaagaggatgctttaatggaggaaaagaaagagggaaggggggagcacgaaattgaaggaataaaagatggagagaagtggaactttgaagtgtatctcataagagtttcattcatcaaagttacaacaagtgttacacatgcttctatntatagactangtagcttccttgaaaagctntctttgagaaaacttccttgagaagctcgagacgtatctcatatgtatctgttcacctatgtttcttaagtcatagttggacacacctagttgctcataatc

SEQ ID NO: 242326 - DNA, 396 bp, Glycine max
  unsure (1)..(396): unsure at all n locations
agctnggatttcctntgctccggatacctctcctttctcatgtgaacccaaacctaatctccgggttggaaaacaaccttnttgcgccccttgtttgcttgtttaacatagctctcatttctctttttaattatggccttgactctttcatggagctttttcacgtagtccgctttggcttgtccttccttatgcttaaaaactgaaatattaggcattgacaacaaatcaagaggagttagtggattgaaaccatatacaaccttcaaaggagaacaactagtggtgctatgcacagtcctattataagaaaattcaatgtgaggtaagcaaacttcccaatttttaagattctttttaaaagggtccttatcaaggtacccaatgtcctattca

SEQ ID NO: 242327 - DNA, 329 bp, Glycine max
  unsure (1)..(329): unsure at all n locations
ttcacanagcttacngtataatctgggacttagccatggtagatttctccacataggccattgcctccctcgcctagtattatgatcagccgatgaggtgcttcacctttggggacttccagctatcacctatggtagaagaatctgaagagattctaggatgccctctatggggaaggaaaccctacctcttctgagggttctatccctcattacctagaatttccaagatagtccaaatctcgacgcacgaattagaccataggacgcaagtccaaaatggggtggctgggataccaagaaaatatttggaggccaaagcaagaatc

SEQ ID NO: 242328 - DNA, 366 bp, Glycine max
  unsure (1)..(366): unsure at all n locations
agcttagatcaatataccatctgaattgatattcttatgtaaaaggatggttntattttctcttaaacctcacaaactaatctctttatttgtatttcttttatattggtatagcagaattgttagctttgccaaagctgcacaaatgatgttgatgtcaaatttgcataaatcagtagaaggggttcagagtactcattattgtaggggtctttgggggacttaagcatgttatggccataccatattgacatcttgggcagtgctaatataactgatatatatttaccccttaagattnttatggctggagaattgtgtgttggtgagtatgtgttgttatctataggtatagaatggttgtat

SEQ ID NO: 242329 - DNA, 223 bp, Glycine max
cttatgatcagttaggatgacaaaggcatgacctataacgtattgatgccatctcttcaccgcggtggttatggcgtgcaactcgcggatgtatgttcatgaacggagtagtttatggcaacaatacttactgaagaaagcaatttgatgacctcgttgcatcaacacaactcccattcccgacctcgactcgtcggtcttgacgataaaaggaacactggaa

SEQ ID NO: 242330 - DNA, 466 bp, Glycine max
  unsure (1)..(466): unsure at all n locations
agcttttccattaccctagttaatttctaanaatatatgatatctactacttcaatatgataatggaaatattcaactataaacatagttcatttaagaaaaagatgaatccgctaaaaagattatatacttgactaaataagaaattgcaaatttaatttcatatggtcatcccccatcaatgcaatatgataatttatcttttacctttactatcacaagtttgactgatgggtcattttcatacactctagaacttctatatttgataaatctaaaaaatagtagagaagccactgccattcttttacaacaaaagaactatagttttttattgttaattattctaacatcatccctttggttaatgcgacatatctttaattagtgtctcatccttgcagctagctaggagatgaaaagggatatatatctcttaaaaactacaccacttgagatctcacct

SEQ ID NO: 242331 - DNA, 473 bp, Glycine max
  unsure (1)..(473): unsure at all n locations
tcaagctcgcttctacaatgatgatggagtntaaagaagacattatgaagatctttgagatgaccgacctcggtttgatgagttacttccatggcatagaagtaagtcacagaaatgaagggatattcatctcacaaaagaaatacacaaaaggcttacttaagagattcaagatgtatggttgcaaacctgctgctactccactcaaaacaaatgagaaactacagaagaatgatggagcaccaaaagtntatgcatcccaataccaaagtctaattggaagcctcctatatctgaccgctacacggcctgatataatgtatgctacaagtcttctatcaagattcatgcagagtccaagtcacatacactttggagcaggaaaaagaattttaggtatctacaacgaacaaaagagttccgtatatgggatactaccgataccaactcacaattacttggctacactgaca

SEQ ID NO: 242332 - DNA, 544 bp, Glycine max
  unsure (1)..(544): unsure at all n locations
aggacgcccgcgcgcatgcgcccttgtttgancccctgcatnacggacctatgagtctcagcttgtgatgtgaatcgcgtctantgaagatgactatgcatgccctatcatactgattacaagatcgacccaacaagttcgcaatctcgaatgcttacatgattcgggcatgagactcacactcgatgagcgtatgtttcgacattcattgcaagagatcgaggcgctgcgggttgccacttcgcttcggaagtcttggcanggcttattgccaaccattcatatctcagctccgctatacaagcagagtattctagagctttctgatttaccagagtagctactcttgtggaactgatgcctcgtgacacgattttggttagccaaattatcaacgtgaattgcactcgctcgagatgagtgtatatggcgtgataagggcagcatatcgcaaccaaggacgcttgtggctgatcgttgaattcacactcgagcgtgaagagtcacgtactttgtggaatgcattgtgtatcgatacatgccg

SEQ ID NO: 242333 - DNA, 446 bp, Glycine max
  unsure (1)..(446): unsure at all n locations
agcttaacctctatacccttaatccanaactctattaactaaaccctaaactctaaggcttagacaccaaaccctatatttgaaaacccgaaacccttaacccaaccttntaagcccttaaccctaaaatataaaaaataaaccctaaaccctaatggtttagacaccaaaccccaaacctcaaaaccctaaaccataaacccttaaccctaaattctaatccctaaaccctaaactcagaattctaatacctaaacccaaaactatgcattataaaccctaaaccctaaactctaaaccacaagggttagacaatacaccatacatcttaaaccctaatcccttaaccctaaaatttaaatactaaaccctaaacccttaaccctaacctttaaacccttaatcctaaaatatcaaaaataaaccctgaaccctaaacctaaaca

SEQ ID NO: 242334 - DNA, 377 bp, Glycine max
  unsure (1)..(377): unsure at all n locations
acacttagaaactaagctcacctttggtcctcctatagttgntgtatgagaaacatgctctatttcatctccactgcngtaggcctncggatcattctttcctttaaagggaggaatgttgagtttaataccatcaattcggttttgtctaggaacaccatcattccctcttctccttctttcttcttcattatgatctctattctccattngatccaacctctcatggagcgcatcatcttcgtgttcattaaccctctcatatgttgcatcaaagcttgcatttggatttgcgaaagcccccctccatcattaggatttgttcctgtcatctcanacaaacaaatcaaacctaacaagacaattatagttgttgt

SEQ ID NO: 242335 - DNA, 344 bp, Glycine max
aactagcgatgaagaaagtgaacttgtttccctttctcttggaattttatccacaggccaacatgagatgaagaacaagaagaatagaaatgaaaagatgagagaaaatgaggatttgaaagatatacttgcacttggattagatatcagatttgactcttcagctataaaaaatctaagcactgaaagtagttgtgatggggaaaggaatgatgaggaactttcatagacatggccaccaagtaaagtttgccagacaattatgagaactagagataaaagtgaagtttctcaacatgctgaactcaagaaggccagggtgtgtatcacagcgagatgtgata

SEQ ID NO: 242336 - DNA, 383 bp, Glycine max
  unsure (1)..(383): unsure at all n locations
agctnggagcgctatccgcagactcagcagaagttatgtgtgaaagatatcagactatgtgcacgaatcttatacccaatgggttatggataggaccaagagctttggcctaccctaccgcttacctagatacctatcgtccaccatcccaccatcatccttgcctatccccttcgacaccaaggaagaagttcatgaacaattaaccaaaagaaaggcaagaaaaagaaacttggaagaggagatgccaggagctcgagcaagagaatgagactttgaaagggaagatagcccaacagagccgtgagctttttatccagaaccagaggatgatcgagaaggacgacttgcttcgtcagaaagacgccttgctccaccgagat

SEQ ID NO: 242337 - DNA, 421 bp, Glycine max
  unsure (1)..(421): unsure at all n locations
cttgtccatntatcacatgtccagcaatcatactattctaaganactgaatccttgttctccatgttatcaaaaacaactctagcatctcttaacatccctgactttgaaagcatactaattagagagttgcacacaagtctttctgtctcaaaaccgagctttacaaccaaggcatggatttgcattcctatagccaccgcaccctgattggccaaagctgcaattacagtacaaacagtataatagtcaggtctgtatccctcaacttgcatcagacagaacaattcccacacctgatcattaaatctattccatgaataacccgtgagcaaggaattccacgacaccacgtctctgtcacccatctcatcaaaaactctcctcccatctctaacattccccgttntcgtgtacatatc

SEQ ID NO: 242338 - DNA, 471 bp, Glycine max
  unsure (1)..(471): unsure at all n locations
agctntaaacaacttgtataatcgataacaataatgctgtaatcgattataaataaagagtntttccttctgaagaaacttttctaacttggaaatatttcttctcactactaaaaaaaatgctttcaacatcgctactttaacatcggttntatgaaaaccgatgttaacaaaagaacaatggcattttcgtaaataaattgattttgttaacatcgattcttgataaaatcaatgttaatcattntttggtcaaaaaccctcttttcatcttcagccacatccactctcacttactcactcagtcactcactcattcgttcttggccaaaagccatctttcattttntgccacgtccactccaccattctcctcaccctcaacccttacccttaagttcagtactggcttcaaccatttcctccttgtcacctctcttgacgcccatgacgacaattcttaccgctcca

SEQ ID NO: 242339 - DNA, 307 bp, Glycine max
  unsure (1)..(307): unsure at all n locations
atactaagcttccttcaacctcctccttgctaatgttcctaaaggagacaagattatagactcacaaatngcacaaacctcaactcttcttgaacanctcctgtctctaacctttccatcactcccctagctactccctcagcactagcaagactcttcccaacaatgactgtgtttctcctcttgctcacaagttcactcaaaacactagttacatcatctacatgatcaccaacatggtctatagactngaatgatgccccaaattgaccaaaagatctagatggngacatgctgctgctaccac

SEQ ID NO: 242340 - DNA, 418 bp, Glycine max
agcttgtcttttctcttctggtcaaaaatcatatttacgagaattattaatttgaattctgcgaaggacatttgggactacctcaaatcagagtattaaggtagtgtgcaaactaaaggtatgaaggcacttaacttggctacagaatttgagatgcaaagcatgaaggagacaaaaactatcaaaagttatgctgacaaacagttgagcattgcaaacaaggtacgtctccttggtaagggatttcctaacgaaaggatagtgcacaaaatagttgttactatacctgaaaaatatgaatccaaaatatcagcattagaggagtcaaaagaattgtcaaatatcaccctcggagaattggtaaatgctttacaggcacaggaacataggagaatgatgagacatcgggtggcaatac

SEQ ID NO: 242341 - DNA, 516 bp, Glycine max
  unsure (1)..(516): unsure at all n locations
tgtccggcgcgcgncggtgtnctaatatcctcgacnnacngaaacngaaggtnatagatctctcatgagcttaatatcacaaatggacacaatatttatgagctttatttatcacgagcctttcaagctgaatgggactaagctgcgtatgagcactgcttaccatcctcatagtgatggacaaactagagtgcctgattgagtatcggaacaacttacgtaggtgttttggataataagccatcctaatgggataagtttttgtatcgtgtctaatggagctacaaccccactacttagttgaccactaattgaacctccatgaaattgttgatggaagcctcctgcctatttgtcctatcataagctggtactttgcccggaagcgatgaatctatcttgcttttgcccgaaacattccctctctcgactacctggacagccgacacattcaaataagtggtttcctttcgaatgtcaaacgtcttgcatgggacaagtgaatggtcccacaac

SEQ ID NO: 242342 - DNA, 483 bp, Glycine max
  unsure (1)..(483): unsure at all n locations
agcttacggcccatgaaaatactccaaaacttaacttttaaaatatagcangaaacaaaccacaaataaaaatttcatcctcatctctaagaatgatcccacagtgtcaacttacatagtataaaaaaatctgtaagtttgttctagatagtgtttgaaatttagtaagatcaaattacatagttaaactcaaaaaaatgcttttggtctcttagccccctccccncggatatttggtcttagttttttattttcaaactgatgaattaaaaaccaaattttgaaatgactaatttatattttaacattaaatataaaaaaatatttacaaatcattattcaataatatttcattaattaaactnaatttgaagatatttntaaactaaaaaagacaaatacatgtggttggtatatttaatttaatattttttaattattaacacaacaacctttccttaaagagaaagtgattacaaattt

SEQ ID NO: 242343 - DNA, 435 bp, Glycine max
  unsure (1)..(435): unsure at all n locations
gtgcaccttcaatctattgatcaacttcactttgtcattgacattgaaattgaatngtatcgccaagacttaaaagtgttacaatgttaaatggattgatcatgttggaaccctaaacattattaactntgaacttctaagatggttgtaaaaaaaatcatcgtacaaatttggactttcctctcatcgcgatagattgtatttctaatttattttatatttaaaaattgaaaatagtgacctaattntattttaaaattattttatgtcctaaaattaaacattaaatagggcctgaattagcgaccgaaatacatttttaatntagtttacatttaacaatcaattataaattagcgaccgaattggccatcgaacttacttttaattcattttatatctataaaatagtcaccaaatcagcgaccgaatgta

SEQ ID NO: 242344 - DNA, 457 bp, Glycine max
agtctttatcactgccagactatttatgtgagtctctttagaggtaagggatgagtttatcacaattacggttagaatgaacatgtgcagagattcttacaggatcaaattggggtttattttgggatgtttattgtattacaattcttcatgtatgattataataacgagattgttttatttgatggattaattgatgccctaatgcgaattggttgatatagtgagtgctcatggtgtgaaattatttgcggggcccatgttgtgagaagcattttgtataatatgtctgtgttttggacaagatttactatattagctcgatatattgttatatcgtgatcatgaaattgtgattaaaactatgtgttagtgatatattgaatatgtgacgaattatgagacattaagttgtggacatgggatatggtatgaataagtgtgggtaatattgatg

SEQ ID NO: 242345 - DNA, 370 bp, Glycine max
tctaagcttaatattgcaacaattggcaagaatgaaatatttttttagctatattgtggactttgtgactatcatcgacaagatggtagtacgaacaattttcacttgctttgcaatttttaaagcagaccaaagaagttggatgtgattctacatatttacagagatatgtacaccactacaaatttgtgtatatatagacaggggaatcgattgctagcagtttacaatcaaacgcatacgtggaaggacaaatgtttcgttgtgtttgcataaatttaacaaacagttaaaaatgtgactataagaagcataatatggtatgctcctccattcatgcatatattctcgctcataaattcacttatta

SEQ ID NO: 242346 - DNA, 432 bp, Glycine max
  unsure (1)..(432): unsure at all n locations
ntatgtgcttganatataagcagtccacatcacagtgcttttaaggttagaaaacttcgacataaaagaattccctaccacataaaagacccctcttcactatagcacaatggatcagcatttctaaaattaccttggcagaacccttgcaaacatctatgaggcttgcaaatgtaatctcaaatggtttcactctcacatttgcatcttataaagaagagtaatagaatctttcttgttgtttatagcatcatctcgcatctgagcattctctccgactccccttttgcttcggtctgctatagataatatattgctatcttccatgctcctctctcttctttatgtgcaatcccttaatcttctccctctcgtctttcctcaacttctctctctcactcttttctcctcctctgtccgactcttccctcg

SEQ ID NO: 242347 - DNA, 377 bp, Glycine max
  unsure (1)..(377): unsure at all n locations
tatcctggtgtttcttacccgttttctgtgggtaaacattataattagccaattctaaggcttcgttaacaatggtgttcgactaggttttcctttcacttgatgattntaatnttatcagtgcagtgaagtatatggggaatgtctctaacagaattaccccccaactcacagtgatatatttatggttatcaaccaagtgctgtaaatgactgttgccattgggaagggatgtctatgctgcttctaacttttcagattagcctttggtgttctatcaatgtaatgtcatattactcatgtctgaatgctatgtactgtgttcatccaacgggccatttcgtagacttgagccgtcctatcttaattacttaact

SEQ ID NO: 242348 - DNA, 326 bp, Glycine max
  unsure (1)..(326): unsure at all n locations
agcttncatcaagtggtaatcatatcacaagagtttatagtggtgctccttaaacctnncattaatttttttctttaccttctcttccattgnntgttcttcatttttctccatgtatctcctcacatgtcttggtctaaatgttgttaacatgattctttagagtttccaccgattaaacttgctatagaaactagatttgatttctatggttcaaatttcttgttcttggtcttgaaccatgaattgtgttgaagttaagccctatgagttttgcttgttatttttggggctgaacctacaccattaaattcttacaaaatatt

SEQ ID NO: 242349 - DNA, 389 bp, Glycine max
  unsure (1)..(389): unsure at all n locations
tctggtgggacatcttgactggctntccaatctgactattacctcatattctgccttcttctattttcagattgggaatgcctctaacagcacctttgtcaatgattttcttcatgcctcttaagtgcagatgtccaaatctttgatgccatattctgacttcatcttctctggagaatagacatgtggaggagtaactggtttcttgaggtgtccataggtaacagttgtcctttgatctgctgcccttcattaggacttcactcttctcatttgtcaccaagcattctgactttgtgaagtttacattgaatccttcatcacacagctgactgatgctgatcaagtttgcagtcagtcccttcaccagcagtacttttgtccagact

SEQ ID NO: 242350 - DNA, 363 bp, Glycine max
actttctgtgattggttaaagatacaatctttgctattagaatgcttcagaaacattaagaaagctagctgatgggcctaaaagaaatgttataacctggcaaggatacgacatatataggtatttattttacacaaaagcacaagatgacaaaagtacaatgctcaactgcggcgtcactctaagggctgaatctaccactttgcaagtgtcaatgacgccaatccttgcgtagcattcatccctaactgtgtgttcattgatgaaattcgggagccttactatgtgaaacttacggtatgtgttttcaaatgtaaatgggttgacagcaacactcggtgtgcgcactgatgatatacgatt

SEQ ID NO: 242351 - DNA, 343 bp, Glycine max
  unsure (1)..(343): unsure at all n locations
acacaagaaactaagctggtttcaaacttgggccacctaagtaccatcggattataatatatagaaatatattgacatgcttgattcaagtttacatttaaacgaaagatatatnttggtgcaactaaataacttggtaattgaatcttagattcggaagtgtgtgattatattatatagagcccaggcaagaaacataacataagtgtacatccatgactccttaaagacgttcttgtaggctttctagctctccttggaattgtggttggagattttttttcttgttggatggctggaagataggacatgttatgtaaaatagaaagacattgatattaaa

SEQ ID NO: 242352 - DNA, 349 bp, Glycine max
  unsure (1)..(349): unsure at all n locations
agctngattctttcaattaagtatattaaatgtcttagttntgagaatgttacccctgcatttcacaaatgtctctgccataattaaaataattttggttagcctacagtatattaactggtgatagtattgtaatttttatcacccaatagcatagccattgtcattctaaacactatcttttttttccacttacagaagaagaaaactacttggtcaattaaaagcttatagtaaataaatatttaagtgaaagtaaaatatattgcaataatttaaaaacaataccaaaattgaatctgtagtccaatgattacaacaaagaaacaaaatgagggggaaaaaagct

SEQ ID NO: 242353 - DNA, 438 bp, Glycine max
tcatcctcaaatccctcttgttggactaggcccaatttatacgatcctcttaggtttagactaacttaaactgagtttcatccgtagatccctcttgtaagactagactcagctcaagcagcttacaaaagtttagccaaaattggtccgcagattcctcttgcaagactaggcctagactaaacagcattattgtaacaacataattaaaaccaaaactttatctgcagatccctctcgtaagactaagttttgatcctgcttcaatcaagttctaaggcaacagtacatttccaaatgctaaagtcacctaactatgcacacaaatggatgatcaaaccaaaaagcatacaaacattaagcattgaacgaagcattgaacacagaaaacataatcaattagatatcaagtatttacatcagttgttcattagaaat

SEQ ID NO: 242354 - DNA, 441 bp, Glycine max
  unsure (1)..(441): unsure at all n locations
agcttagtttttatacacgatagttggactggtattattttctgaagtgttagaaactctatcaaattgtttgatgatcatacacttgtgattagagagtttattctttgcttataaaagatatatgttcgtgttcgagcttaactatatatcatccagctctttgagagctctaaatcttatattcatttcaaattgttggttggattccaacttacattcacgtatattcgctaatctccttcatatgaacttgtaccaaattaaaaagctataaagtaagtagaaccctctttcacaatattntgaaattngtattaagtgtttctcttatagaagcatcgaattgataccctacgtttggaaagaatataataaataacgagtaaaccaacctccatgaagcatcaaaagaaaactcaaaacccatattgaatgaag

SEQ ID NO: 242355 - DNA, 144 bp, Glycine max
gtcatggcgggtatcttcgacgtatgttacaagctctatggctgccgatatagtcctcacctaatctctatgtgcaggtgacagccgtgagtatgaaagtaccgagcttagaggatagcgaaccaccattgaagcccctgatgt

SEQ ID NO: 242356 - DNA, 206 bp, Glycine max
tgaggcatgcaagcttgagtctaatctgactacataacttgaccaggtgaaatgccatcttacctcgagtaaaagagagaggaaatagagaagcaaaagaagaagaaattccataagagaacaaaaaggaaaagaaatttcattcaagagaagcacaagaaagaaaaaaatttccatcaagacgggaaaagaaaaagagagtaaaa

SEQ ID NO: 242357 - DNA, 406 bp, Glycine max
  unsure (1)..(406): unsure at all n locations
tgtaggaatatggngtacccatcacatgtggtactatgtggctgtcgggcgatggtgcanaacaagttttccacatccacaaatcgcgcataaacccaccatccnctatggcccacctccaactgagctcacgtactcccacgtagcccatatcctcgtttctctcaacaccgggtccccatcaatcctcccaagctttccccaacatccaggtaaaacaacattcaaacagcacanactatcacagccaagaaaacggngcaaaggcagaaaactctgcccaaaacaaccaaccaaaatcacagctttctcacttaaagaccccagtaacaattccttcgttccagtttcttaaccgttggatcgactcgaaaatttactggaagctctagtacataatctacat

SEQ ID NO: 242358 - DNA, 69 bp, Glycine max
  unsure (1)..(69): unsure at all n locations
agcttgtaagaagtatagcaatataggagaatggttttgnttgatgataaagacttagattttaatcat

SEQ ID NO: 242359 - DNA, 375 bp, Glycine max
  unsure (1)..(375): unsure at all n locations
actaagctgtgcanataaatcactcctacatttcatctctagcatgcattttctttctttacccactcctcacgnttggttttttagggaaaaacaccataactaaacgcgccgcaaggtatccctatcgcaccagatccaaatctagaacgatgggtgatcaagaggagacgcaggaacagatgaaagccgacatgtcggctctgaaagaacaaatggcctccatgatggaggccatgttaagtatgaagcagctcatagagaagaacgcgaccaccgccgccgctgtcagttcggctgccgaagcagacccgactctcttggcaactacgcaccatcctccctcaaacatagtatgacggggaagggacacac

SEQ ID NO: 242360 - DNA, 413 bp, Glycine max
  unsure (1)..(413): unsure at all n locations
agctnttntaaaaacntttttttagataaaaggcctttgtcaaactataaaaaaaagctcgttaagtttgataagccggcttatttaactaataataataataactcttaatccataacattttatgacattatgaatgacaggatgaagtatcataaagtgcttagagaattcacttgtatgtggaaaanttttaaaaagaaaaagactctaagttaaaaggataatgtaaccagaataatactttcaaagaaaagaatgttttataaagacattntcagacaatttaaatatttttatttggctatattagtataaatcatctctaatccatatnatttttaatatttatgctctctttnttcattntcttttgatatactttgtggtttaataacttgaattcgatatga

SEQ ID NO: 242361 - DNA, 457 bp, Glycine max
  unsure (1)..(457): unsure at all n locations
ctaagcttacatcttcctgagtagctgccattggttgtattgtagcacttttataccttctaaaggaacaagtatagctggtaaattgtttgtttgtctgtgatgaattcctatggtattctccttttatagagctaggaatcaggactagctagtattcagcagatacgtaatcaattagaaaagatatacctatatacatatcatgggtatagtcaatagtggggacgataacaaaaaaatgggaaagtgctaccgtgtattaaattcattttgattgctgcgtatgaatgcggagacattgcacatgagaaggatctaganaaaatatgaaaaaactnttccctatcaagaagaatcctcagagntaacaaatgtggaaaaataaatgatgtaagagattgcgtaaaccgtgtagagaagattcctctaatatactcgatcctcaatcaaatat

SEQ ID NO: 242362 - DNA, 430 bp, Glycine max
  unsure (1)..(430): unsure at all n locations
agcttctatataagcagaaccatnttatcaataatgtctagttgagttttattcagaatattagagtttatctcttttatcttagtgagagtgattctcctaaattcttgagtgattcaagaacaccttggctgtatcaaaggactttcacaacctttgtgtgttgccctcgctggaaagagagattctttccttcctttcatcttcacccttgttctttcaaaccacaattccagaaaatccacctctgcccagaattatctcgtggccataacttcaattctacgcactcaaattaagtgattcttgagcctaaatggaattccaaaacgagagcttccacctctgtttggaatcacttcatttggagccgtgtagcttccgntattgccatctctatatttctggccagcccccacataacctacat

SEQ ID NO: 242363 - DNA, 227 bp, Glycine max
gctgtacattcaatttcgagcgttccgatatattacgggactcaattgtacatccgagtaattagttatcgtcgcttgaatttgctcagagcttcaacattcaatttcgagattttcgatatattacgggactcaatcagacatccgagtaaaaagttattgtcgtttgaatttgctcagcgcttccgtattcaatttcgagcgtctcgatatattacgggactcaa

SEQ ID NO: 242364 - DNA, 347 bp, Glycine max
  unsure (1)..(347): unsure at all n locations
agctnggaatggtacgatatatctacaaggctgttttggatacaagagtntgtgcccgcaaaatatttggaaagaaatcctgcacctctggttcgaactcctcttaagactctagtaatcaattccctttacgtagcaaagatagacccttagatacaaaatgatggagtgctattttaagaaaaaaagaagtattctggtctccttgagcatgcccttagaatctcgatttttctcgccataagcattcctgaaagtgcaaaactatntgcatctccttttgtgctagaacttcttgattaaataatgcatccgagtatcctatattcacaatctattggtggata

SEQ ID NO: 242365 - DNA, 376 bp, Glycine max
  unsure (1)..(376): unsure at all n locations
actaagcttcaggctactcaatngctccaggttgctgcatggaagggcaaatgtctgtattgtggtcagcagaggagcacaaaccacaaacccttgcgacaggtacagatttctgattcaaggccagctgggttatcaagttaaccaatgcatccagtctgccttcaagcttcttagttttagatgatgcagatgggtctgtagctacctcatgcactcccctaatgactatggcatcatttctggcgctaaactgctgggagttggaagcatcttctcatttaatttctggctcagcanggtcatgcctctaaaggctcaccactggagcatctatcatactttgtccatatactgaggcttcataaaaaattga

SEQ ID NO: 242366 - DNA, 252 bp, Glycine max
  unsure (1)..(252): unsure at all n locations
tgttgtaacattntcaattaagggggtatgatgtagtggactaattcatatgctcgtatacgttagtttatggtagttaaacaattaggtggttataactaactgggattgttgttgtaagttccctccatgtataaaaattattcattgttaatcatttcaagatgatcaataatacaagtctcattctcaattccatttactctatcacttctcttaattctctctaaacagaaattgtgtgtgtgtgtg

SEQ ID NO: 242367 - DNA, 262 bp, Glycine max
ccttcatctcttcggtgtggcaagcttgttttcttttgtgttaggatatctacatcgtctgcctcagtcattgtggtgcagtttatatatctgttggacaacttcacttaatgccacattgatttaagatgaaatctaacatgatatcagagcttatagtccggcttagttctctctaccatgttggttgtaaaagcagcagtacctgagattctcattcagttgtttgctcttagaagagccctacatactactaatctca

SEQ ID NO: 242368 - DNA, 351 bp, Glycine max
  unsure (1)..(351): unsure at all n locations
agctttatgaatgctatngccgattgttaacaggttgattagagtatcttcccaaactgtaattgttatctttatattttctttcaccgtcttgatggctttccacattccgatttcagattgataacaattcaagtgttgatacaaaatgtgatttcgaacttggtaggtgcagctacaataaatctgtctcggggtggatgggtgccaattataacattttttctccgtctttcgttatgttatgctggtcggtgcaatcacaattggactgttcttgttattcccgtgtaacctttgagttatgacttatgataacacagcttttatctatattccctcatgcatctc

SEQ ID NO: 242369 - DNA, 288 bp, Glycine max
  unsure (1)..(288): unsure at all n locations
agctctgaatgcactattcatgtttttgacaagattatcttcagactgatcaacacttgcacagtggccaaagatgcatgggagatcctgaaaatcactcatgaaggaacctccaaagtgaagatgttcagattgcaactcttggctacaaaattcgaaaatctgaagatgaaggaggaagagtgtattcatgacttccacatgaacattcttgaattgccaatgcttgcactgccttgngagagaggataacagatgaacagctggtgagaaagaatcttatatcct

SEQ ID NO: 242370 - DNA, 341 bp, Glycine max
  unsure (1)..(341): unsure at all n locations
tgactnnggcgatttgatttagccttagtttcactttatttattattcaattcaattaagaatgagaaatcccaaagagaaaatgtccgattgattcttgtgcttcattttactaaaagatatatttctttattattatattattattttacctctgtttttttatttccaacgtggttatggcacgaccaaacggtgggaattcattntaacaaaaattatacgaatactacaattcaaatgatcggtggaaatttatttttttagattacgcgcgaaatgacttacataaatgactgaagcacgtcaaaaggtggtacgaaaagaaaatgatacgagaa

SEQ ID NO: 242371 - DNA, 291 bp, Glycine max
  unsure (1)..(291): unsure at all n locations
agctngagtacaaatcaatgttgtttatataatnttacatatgtactctcatatatgttcatgatgaacaattattttaagctgttctaagatttgtgtctggagaagcttctttgttgttcaataaaattacgcactacaacatttgttctttccttgaacccggccgtaacatttttcttttctctattagggaagtggcaccagattatctttctctaaagttcagatgaggcttccaacanattccaatgatatcctcagtcatttcgcatgtcttatgaaccccat

SEQ ID NO: 242372 - DNA, 359 bp, Glycine max
  unsure (1)..(359): unsure at all n locations
ttcaccatntgttacagagtttaatgccgntaactgttggtcattgtatttagtgtcctctttaaactcttctgcattgaacttgaaagggaagggaaaattcatttcattcaagaattgtggttggctggatgaaccttctctccactgcattatgaagggtgtgtcaaaatgagattgtaaaaatgatagatgaagccaacaccaaanattgtaataataaatctgtgaaggtctgtttcccgggaagcaaagtcccaagccagttcaaatgtcaatcaacagactcctcaatcactgttaatctgtcttcttaccttaatgaatatatgggatcaactctgtgtgtggttctttca

SEQ ID NO: 242373 - DNA, 384 bp, Glycine max
  unsure (1)..(384): unsure at all n locations
agctatgatgatatggtcttcatctacgaaaggattatagtgggtctaanaagaggcaaatctgatcatcatgctttgataaatgccaaaaaaaactagggcaaatgaagaacaccacctttagcacaaacctaaatcaaccacaaagtctgtctacccgcacttcaatgacgaacaccacctttagcacaaaccaaaaacaccaaccaagaaatgaattttgcagtgagaaagcctgtagaattcaccccaattccagtgtcctatgctgacttgctcctatatctactngataattcaatggtagccataaccctagccaagggtcattaacctccatttctccgagaatacgactcgaacgcaacgtgtgcttgtcacgga

SEQ ID NO: 242374 - DNA, 401 bp, Glycine max
  unsure (1)..(401): unsure at all n locations
tctacttatgtggcagggcgggcttccttcactntcttgtctcttatgcgagctctgaccactgttcttccttcctgcgatgcttcttttcatgtccgcctgagtgggattatagcctaaaccatacttcccacgatttccttgggtttttatcaggctagttatgccgccattgtctntgcctaaacccatcccgggttcataaccgttccccaacataactcgggccatcattaccgccgcatcggacagacaaggttgcccaaagagggagtccacggaggaaatgctgaccacctcaaaagactggaaaagcggttctaacgattcttctgcggcttccacataaggcatggaggatgggcagcttaccaagatatcttnctcgcctgacacgatga

SEQ ID NO: 242375 - DNA, 447 bp, Glycine max
  unsure (1)..(447): unsure at all n locations
agcttgtaatatntatagcttcttttattaagcgtgtattatctcacagtggatgaatttcctgagtgaaactggtgtctgatgcttatgacccacggagtattaactgtatacattaaatgcacagccttccttgtgcaaccgaaccactttgatagactaattggtatagcacttctgtacaaaatcaattccttttgcctgaaatgacgtctacactacagaatgtgtcttctgataaagaatgacaacttctagatcttgaacttcatttattcttcaaggattcgacagatcctaggagagtgcttttgcataatggatctcagacaaagtatcaaatgaagtcttatatgtcatctcttacatgttgagtgcatcatggctatagtcgactatcgtatgatattccacatgcaaactcatgatgcatttttgatatccgat

SEQ ID NO: 242376 - DNA, 136 bp, Glycine max
ctaagctggatgcgtaaggctcactatagaagcatgctcatgccacaattgttattcgtggctatacgagacatcttgccatacactggccggttaactacaactcgcctgcgctgaaaattccatgcgtatatgc

SEQ ID NO: 242377 - DNA, 385 bp, Glycine max
ttcggagcgtcgcgatatattacgggactctattggacattcgagaagaacgttattgtcgtttgaatttgatacgagcttccgttttcaatatggagcatctcgatatattacgggactcaatcggacattcgaataaaaagttatcgtcgcttaaatttgcttagagcttctattttcaattcggagcgtctcgatatattacggcactgaatcagacatccatgctaaaaagttaatgtcgtttgaatttgatacgagcttccaatttcaatttggagcgccgcgctatattacgggactctattggagatcccagaaaaaagttatgtctcgttgaaattgatatgagctcccatattcaatttggagcgtcttgatatat

SEQ ID NO: 242378 - DNA, 374 bp, Glycine max
ctgcataccccaaggatccattaggaaattacttgtgaaagagatccatgagggtgggctcatgggccactttgggatagacaagacccttgtcttcctcaaagaaaagttttattggccccatatgaagaaagatgtccataagcattgcactaggtgtgtggcttgtttacaagccaagtctacggtgatgcctcatgggctatacacacccttacccatcccatctgcaccttgggtagacattagtatggactttgtccttgggcttcctagaacccaaagaggtgtagactctatctttgtggtggtggatagggttagcaagatggcacactctataccatgccacaaggtggatgatgcttcccaca

SEQ ID NO: 242379 - DNA, 265 bp, Glycine max
agcttgtatgataaaactgtcttgagaagctagagtttaactacacacacgcgtctaagagctaagctcacctgcttgagaagatgtcgtaagaagctagagctcagctacgcacaactctttaatagcgaagctcacctgcttgagatgagaaactagagcttatctacacccccctataatagctatgcttacccccattccacaaattcatacgaatacaacagttaaatgtccctactactaagactactgcaaatgccct

SEQ ID NO: 242380 - DNA, 314 bp, Glycine max
ctgcggatgtggtcttctccagagagaggtatcgattttatctgtactaggcaaatctaatcatcctgcttagacgaatgagaaagctggtgcatatgaagagggtgagaaagatggacaaacccatgctgtgactgccattcctatacggccaagtttcccaccatacccatcaatgtcattactcaggcaataacacactttctccttacccaccaccccattatccacaaaggccatccctaacactaccacagagtctgtctacgcgacttccaatgacacacaccacctttagcacataccataaacac

SEQ ID NO: 242381 - DNA, 432 bp, Glycine max
  unsure (1)..(432): unsure at all n locations
tgattgaangatgaagttgtggtgcgtgatcttgtttggtgtcacccaaatgcaataaaagtatgcaatggatggtatcttggtgtttttatagacaagacctaccaaataaacagggacagaactccactaattgacttttgtggagtgacaccaacggcgatgacattctctgctgggttngcatatctggaggctgagcgtgttaataatattgtatgggctttggaaacgatttgaggcctaattttaagacacgatcgcctcctcttgttattgcactgacagagactagcactgatgaatgcagtgaaactgtgtttctcgagtctactaaaattgtgtgcaggtttcatatcgataagattgtgacgcgaagtgcacattttaatcggcgaaaaaatgtgtgtactatgaatggataccgacgan

SEQ ID NO: 242382 - DNA, 221 bp, Glycine max
  unsure (1)..(221): unsure at all n locations
tttgaggagagtgtacattattcagaagccgttgganaaatctctaactgtcataatgctggtgttgtagagaataagactatagagagagagagactaacagtgcttcgggaaaagagaaataataatctgcggagagagaaagttgttaaggcctgnggaacacttgcatgccaggcgccaaacggaacgaccactaacaccctntctttctcctccac

SEQ ID NO: 242383 - DNA, 146 bp, Glycine max
ctggtccttatctaactgaagcttaccttagtattgaatcaggtactcatttcactagaggtaatctgttcaacctggtcatcaaacctaaattacatgttcaaagtatggagagtattgtaactcagcctgtttgataccaagaa

SEQ ID NO: 242384 - DNA, 549 bp, Glycine max
  unsure (1)..(549): unsure at all n locations
tcgcccccccgcgcgtatgatctcatgacatctgacactatgatactcaagctgagtggtaggaacaatntgagatcgctctcgaatgaactatgagcgctctaattttaagaataggaaaacgtagtcggcaactgatgcgtgatcatgaatctgacaaccgatctaataaagatgaatatgagaggacacattactcacactctaagttacagacatgattcttgtatgctccacaaatggaacgctatgagaagattacaagtacaagagactctgataggaaagtgaagcatgaatatcctatggatctaatgaggaatatactcgggcgcatgactcacacctaaatcaaaggatatgatggtggttctctcgcatatacgaacgcattctgatagtgaatagacataggaaacgttgacaggaatacgaaatatgacagctcataaaaataatgaagaatatatatgggcacatgagtcacacctcagcatgtattaaagcttactaagtatangaatgaaagttattgacacgtggtgatcn

SEQ ID NO: 242385 - DNA, 458 bp, Glycine max
  unsure (1)..(458): unsure at all n locations
agctataatgctcatacattctntaatatgtttaatattcggaaattaagaagttgtaagtgtcatgttaagccttgtccttgtgttatttagacttgttattatgaggcaattcacgtagtaaactccaagttcattagtttttccatcaattactgagtgttttatgtgtctgtatttttcattccgttcacgtctttctccatcttagcttcggctttgcattntattgactcgtttcaaacattttcttggctgccttgttcttcttctgctagtcttttgttgtttttggtatttatgtcatctgcttcattggtttgtctaccactgacatctnctgcataacataacacccgtgtttcttgttgagttccaatctctttcatttgtgcattttccagtgtggtttaaatagtctcctgccactgtggctgatctccactgccatatcatca

SEQ ID NO: 242386 - DNA, 381 bp, Glycine max
  unsure (1)..(381): unsure at all n locations
tactaagctataaggcaatgatgaaataacttaatcatattattttgcattacctgtttcataatattctaaatgatatcaattgtgatttgttgttgtaggtacttgatgaagattcccccaagacattggagtaagtctcggtttacactagatgcaaagacaaacatgttactcaataacatgtctgaggcatttaagagtgtaattgtggaggccggacacaaaccaattgtaaccgtgtgtgatgatataaagatatgtntaatggaacggtgggctntaaatataatgaaggtgcttgtatgggaaggaagtgcgttacctaagataaagaagtnggtggatcttaagtctattaacacacaaaactggttatgc

SEQ ID NO: 242387 - DNA, 438 bp, Glycine max
  unsure (1)..(438): unsure at all n locations
agcttcatgatggatgaatcaagtgattcaagaagttttgatattgacaaagatggtgacaaaaaacccaaagaatgatttcaagattaaatcaagatccaattccagaatcaagagaagtttgatttccagattcaagaaaagatgaattcaagttccaagagaagaaatcaagaagacttcacaatgggaagtattgaaaagattttttaaaaaacaaacatagcacaattttgtttttcaaaagagttttcacaaaattttctatgttaccagagtttttactctctagtaatcgattaccagtttcctggaatcgattactagtgggcaaagttgatttcaaagcttttaactgaatttacaacgttccaattgatttcaaaatggtgtaatcgnatacaagatattggtaatcaattactagtgcatctgaac

SEQ ID NO: 242388 - DNA, 307 bp, Glycine max
  unsure (1)..(307): unsure at all n locations
tatgagaattccaagctntataagtaaagagtaaaaatntatcatgatcaaaatctttcaaaaaagaaatttcagcctgtcataccctaattttgtccagggactatcgttcgttgatcttttgatccttgctagttgacttacggtcttgaatgccagttacagtgcaaagcaaggaaccattcagtgtttcgatcaggaatgcgaaaaataccaaaaaagaggggcaaaaaggtcttttcattgagtttcctggaccctagctcgcccaggctagcctctggctcacctgngccctcaaattact

SEQ ID NO: 242389 - DNA, 463 bp, Glycine max
  unsure (1)..(463): unsure at all n locations
agcttagggaagagaagatgaaagtaatcactaatgaaacaaacatgtctaatattgtcgaccatgtaagggagattcaataccccacacggtggtccaagcaaacctttgattnttgcgtaagtagcaaaatagaggaaaggcctcatcggtcgacctggaaaggaatcttgaaaaggaatttatccgacccaacaattggttaacctctttaacgttgcttggactccgcatgagcatcaatcaggattagccttgattcatcgatatctgagcatgaacttgaggaacttgcctactcgtaccccanacgagcacttctcanagttcaactaaagttggtattggcctaacatatcanaaagttnttagaggtcagcaaaacgtttaccaacttctaaggactntactaccagttcattaacatangcctcaacaattntcttggataagttggcaaaat

SEQ ID NO: 242390 - DNA, 420 bp, Glycine max
  unsure (1)..(420): unsure at all n locations
atgttactatttattaaatatgaatcatctttattttgtttatattcccaaaatcttatgaaatgaaggggatggagaaaaagaaaaaagaaatccattagcaagctaaaataacctncttaaaaaaaaaagctaaaataagccctaccaatatttcattgtcgtgcaatagtgaaaaggacaaaagggaaaaatatcttcctctactaatagtataaagcgtctccttttctcgtgtacgtgttttgaaaactgagtttagacgtcaaattgaagcanaatcttaatgttatcttatctttaatcttaataaatgtaaaagtaacatagtcgctgatgtgtaaggataactctctatactcttacataaaatataataactcttaccgcgaagtagagtgtttctaatattgcagaaat

SEQ ID NO: 242391 - DNA, 422 bp, Glycine max
  unsure (1)..(422): unsure at all n locations
agctatagaagaccgnggaantatttattgttgtgtggnctggatcttctgttggactagtttgacccctttgcttgacaccatgtggcccaagtactccacctgngtttgggcgaaggaacatttcgagagcttaatgaagaactggccctgcaacaaaaccttgaaagccaattccaaatgaagtaaatggtcattgaaggagctactataaattagtatgtcgtgatgtggacatcaaagcccaagcccatgacaaccaccagccccaggcccatgactagatggaagcccaagacccaatacaaggcataggaagacccatgacaagagcaagagctaaaaaggcacaagatgctttggaacatatggtgattattctgagggtagttcaaatgcagggagaggcccaacacttggag

SEQ ID NO: 242392 - DNA, 379 bp, Glycine max
  unsure (1)..(379): unsure at all n locations
cttgatgccatggtcaacctagtaacttagcttgtcatgaatcagaaatctgcatctgcacctgtngcaagagtttgaggtctatgttctatagcagatcaccatatagatctttgtccttctttgcaacaatctggagtcaatgagcaacctgaagcttatgctgcaaacatttataatagaccccctgagcagcaaaaccaacaacaacaaatacaatctatggtggaggaatcatccaaatatgagatgggcaagtcctctacaacaacaatagcctgtcccttatttccaaaatgttgctggtccaagcaagccatatgttcctcctgcaatgcatcagtagtagtaacaacaacaacaaagacaacaagcaact

SEQ ID NO: 242393 - DNA, 443 bp, Glycine max
  unsure (1)..(443): unsure at all n locations
agtcacctgcggctgcaactgctttacaacatacattatttttattgactggtcatttaaaaaatcaaaacctttaaaaaatcattccaaaagaggtgagtttttttacaaattaaaagtgtcattacaattgtaattttccctaaaaagtgttcatggatctaatttaactataatattttacaataagtatttttttacttgaacctttcatgaagcatgggagtacaaaataattatttgcgagtttctaaaacaagtattcttttttcttttagactcaatttaatttacaacgttttatcattaatttaaaattaataaagcanatacaaaaataattatttattatattgtttcttatttgaaattttttctttcaccttaattgcatgatctaaattntagttagcaatcaaatcanaaattttaatgtacactaa

SEQ ID NO: 242394 - DNA, 429 bp, Glycine max
  unsure (1)..(429): unsure at all n locations
tctcaaggaagttatctntagaaagcttctcaaggaagctacctagtctataaatagaagcatgtgtaacactngttgtaactctgatgaatgagagtcttgtgagacacaacttaaagttcaacttctctccctttttcttccttcaatttcatgctcccccctctccctttctctccctctntattttcctccattgaagcatcctctccaagcttcttatccaaggctcatcttggtggtggaagctcttcttccatggcatattccctggtggatggcgcctcctctcaccgcttctcctttgtcttccgctgcatctccatggtggaaaatcaccattaaaggacctcattgaagctcaaagatccagcctncatagaagccccacaagcaagctttcatcaagtggtatcagagcacaagagc

SEQ ID NO: 242395 - DNA, 393 bp, Glycine max
  unsure (1)..(393): unsure at all n locations
tgttgtgcaactctcatgggactaaagtntaaaagtacaatatataaatcaagctttcagcttgtgcaactcagcccacaaaagggattctataatgaaaggaaaaaaaatcaccaactaaccaagaggtaaagaaatgattggtcaatcctaaatgcacaccacaatgtagaagataaaccaagtagaagaaaatgaaaaaatgggggaaggaaagttcaacaaccaacccttactctgaattggaaaagaaaaactatcaaataagcaagctatgggtctattagaaaaagaataaaattagactnttaatttaaatacttgaattggaaaaaggaaaatgctagtttgtatgaaaatgttntcgtaaaacagtatacaaaggagctaatt

SEQ ID NO: 242396 - DNA, 416 bp, Glycine max
  unsure (1)..(416): unsure at all n locations
agcttggttcccaacgctttgttcatactctcccataacctagaggtgaatctaggatctctatcagacactatgctagatgacacaccatgtaatctaacaatcttactaatgtatagggaggccaacttctctaaggaaaacctaatattgatggggataaagtgtgcagatttggtcaatttgtcaacaataacccaaatagaatcaaaacctttgggggtcataggtagtcctaaatcgaaatccatggagataccgtcccacttccactgnggtatctctaagggttgtaacttacctgaaggtctctgatgtttatcttagccttatgganactaaacatgaatacacaaacttcctaaccactcttttatgtgggccaccaaaacattatctttagactctaatacatc

SEQ ID NO: 242397 - DNA, 239 bp, Glycine max
  unsure (1)..(239): unsure at all n locations
cgaataggatgctntaatggaggaaaagacaaagagtttgtggtgtgttctaaatcgaaggaataaaagacggagaacagtggaactttgaagcgtgtctcataagactgttattcatcacagttacaataagcgttacacatgcttctatctatagactaggtaactttcttgggaagctttcttgagaagcttctttgagaaaacttctttgaaaagctacacaatggcttcacaca

SEQ ID NO: 242398 - DNA, 377 bp, Glycine max
  unsure (1)..(377): unsure at all n locations
agctntcactcggaggcccgatttatgcgcataatatatcgagacgctcgaanatgaacaacggaagctatcgagaaattcaaatggtcaatacttcgaactcggaggtcctattaaggtgcataatatatctagacgctcaaaattttacaatggaagctctntggctatacaaatggtcataacttttcactcgaaggtccgattaaggcgcataatatatcgagacgctcaaaattgaacaatggaagctcttgagcaattcaaatggtcataacttgtcactcggaggtccgattcaggtgcataatatatcgagacgctcgaaattgaacaatggaagctcttgagcaattcaaatggtcataacttgtcac

SEQ ID NO: 242399 - DNA, 416 bp, Glycine max
  unsure (1)..(416): unsure at all n locations
ctgatgtaaccattggagaggttaatgaaacaacgatatgatgctctccatgagaggttggatcaaatggagaatagagaccatatgaattgctcaagagcttccattgttcaatttcgagcgtctagatatataatgcgcctcaatcggacctccgagttaaaagttatgaccatttgaaatgctcaagagcttccattgttcaatttcgagcgtcacgatatattatgcacctgaatcggacctgcgagtgacaacttatgaccatttgaatngctcaagagctctcattgttcaatcttgagcgtctcgatatattatgcgcctgaatcggacctgccagtgacaacttatgaccacttgaattgctcaagagctctcattgctcaatttctagcgtctcgatatattatgcg

SEQ ID NO: 242400 - DNA, 442 bp, Glycine max
  unsure (1)..(442): unsure at all n locations
nggaaactaattntatgctacaacaattgttacaagatccactatccataatgagagaacaagttttatctaaaattntgcatcatgtatgaaagatgttctctccttgggattaaaatatatcacaagattgacctccaaggagccttctaaccattaggaattcaccttcttcatgggggtagacttcctcactagactcttcaccccttacttcatcttcaattccactagaggaaggggaagaagtagtctgctttcgagtactataaatgtctcgacccctcataatcattgcttgctctatggggggcattgagaggcaatgtgacctctccaagaccttcttagcatttaatgttctcttccttctgggaacatttaacgggtgctttctccatgacctacctaatcttcctgggcgtgcccccctctctatatc

SEQ ID NO: 242401 - DNA, 419 bp, Glycine max
  unsure (1)..(419): unsure at all n locations
agctntgaggctgtaaaaactatataacagcaccaaggttctagtttagctcatctctctctctcctctctctcttctatttttcggttttagcctctcttctctttcttttttattttcggtttttacaattccagttcagacttttagttttatcaataaaatttcgttctctatttgattaatggaaggctaagtccgcaacattggtttctcttgaggatcaagcagagttctctttgaggttctattattcatgttaaattctattcagtttttcctcttcactaattactttgaattttttctattaattcgtgcatgcttagtgcttgattaattgtctctgcacttaatttatgttcatgcttaatgatcgtttatgattaattggtgtgtgtgatgcttaatcacataat

SEQ ID NO: 242402 - DNA, 420 bp, Glycine max
  unsure (1)..(420): unsure at all n locations
nttccggaaggtttccgganatacttctttcggaagaagaattgttgaaggggcaattggccacttcactgtttgctgggtgccccagcaataatgctgggtgcacgtagcaactccctttaacatgccatgaacttggtccaaattcgataatgtattaaacataaagtttaaaatgttattaaagtaggaatgtgtgcattggaccacaaagagcaaatgctcaacaactttggaattgtgttctaagaggcgcaagtgagaagtccaaagtggagaggtccaatacattacgtgcatgttatcacgctataaaatgtaatattctaaagtccttcaaaagctataaactattcagaagcaactatgaaggttcgtatagaaaagcttttgtgttgcctactaaaagatcttttgtac

SEQ ID NO: 242403 - DNA, 309 bp, Glycine max
aactataactatttgactgaaatttaaaagttgaactgtgaattaagaactagggcataaacataagatgtactaaagaaagaataataatggagatgttcaaaatgcaagaaaataaagatcctgtggaacattctatgaatgatcctctgcatgctcgttcacgtccagtgctggtgcagatggtggatcctgagaaataggcaactttggcactggtgtagatggctctgcctgagacgatatcattgaatcatcctcaaaaatgaaaggctcaagtggagagggctcagagatgtaatataagca

SEQ ID NO: 242404 - DNA, 385 bp, Glycine max
  unsure (1)..(385): unsure at all n locations
gtggcagggcgggtttccttcactttcttgcttccttcgcgagctctgaccactgttcttccttcgcgcgatgcttcttttcatgtccgcctgagtgggcttatatcccaaaccatacttcccacgattcccatgggtttttatcagactagttatgccgccattgtctttgcctaaacccatcccgggttcataaccgttcnccaacataacttgggccatcattactcgccgcttggacagacaaggttgcccaaagagggagtctacggaggaaatgctgaccacctcacaagactggacagcggtttctaacgattcttctgcggcttccacataatgcatggaggatgggcacctcacaagatatctttctcgcctgaca

SEQ ID NO: 242405 - DNA, 100 bp, Glycine max
  unsure (1)..(100): unsure at all n locations
tatatttttttaaaaanaaggggagagagagagagagagagagagagagagaatggtggaaccacctcaaatctcataaaaatttttccgaaaccaattt

SEQ ID NO: 242406 - DNA, 226 bp, Glycine max
actatgagactaagctgctctaattacatgatgttgtattatggaggaggttgttgccatattgtttaagagtagtggccactggtaaactaactttccaatttttgccttcgcaggaaatggccccgaggaagcttgcctcaaagaggttcatgaaagacaacggcagccaaggaactagttccgctccggagtatgacagtcactcgcttatgagcgctgtaca

SEQ ID NO: 242407 - DNA, 317 bp, Glycine max
  unsure (1)..(317): unsure at all n locations
tacttattcatctatggaatcatatcaaagcggattttcaatatattgttctggatcaagccgaactatgcttgtgagaacagcgaaattcattgtatccaaanaatacactcaccttcattgtgccctctgaactcaagcaggtatttcttaaacaagttttgaattcccataaataactcacaagtaatgaaataaagttccagatattcttgatgattattcattttcttcgttatatagtgcaacatatgccccaaaatacaatattgncaanatacatatactatatatatatatatatatctacatatcat

SEQ ID NO: 242408 - DNA, 410 bp, Glycine max
  unsure (1)..(410): unsure at all n locations
agcttgtagaacggctggtcatgatatatgtcatgttttggccagcggttcggngataatggggatgtcctacattatttccatgatacacatgcaacaatgatgattagggaaatttatgcaaaactggtcatgcatgcacccatgtggacactcaagcatcaagtttttatggtcatgtgacactagggctcaggattcattttccctatttaagtcaacccagtgtttccaaaatatgctcttttatcaatttatgcattcatccgagtcccttttgggcgttcgggaaaattttcacagtattcaccctttaggtgtatacacnatttttttttcaaaacaactggttatgatagtgaaatcattttcaaagaaaagctggaagttatttctcttctaaagcatgt

SEQ ID NO: 242409 - DNA, 384 bp, Glycine max
  unsure (1)..(384): unsure at all n locations
gcgagttgatttagccttagtttcactntagttattattcaatttatttaagaaacagaaatcccaaagagaaacgtccgattgattnttttggtttattttactaaaagatatttttttattattatattattattttacctctttntggtttccaatgtggttacggcatgaccgaacggtcggatttcattttaacggatattacaaatcaaatgatcggtggaaatttaatttattctttgattacgcgagaaaatgccgtaaatgatacaagaactaacgaattgaaaagtaaatgaaacaagaataaaagtacgtgaaacaaatggggaccaccaagggtacatagaatgaattgaaaagttcgacttcaggaactta

SEQ ID NO: 242410 - DNA, 421 bp, Glycine max
agcttaagcacgagtaaattgctacatgcttaagttgtgtttaaggtgcatccttaaagtgtatgcttaagaaagttatgcaaaatgcttttttttttaaaaaaatggtattccaagtgtgataaaatgaaaattggttcatgatatgagtatttatatatagtatggagttaattgtatgctaatatcatgcacttcacattcatatgaggattttgatgtggtgattgtaaaaattcatggtgttggatgtcttactatgcttaacaaactattgatggattcataagtgtgatgaatatatgaatggttaacttatgatatggtaatttgatgaaatatcgttataatgaaaagataattatattgataagataattatgtaaattattgaatgtctgagttatgtcgggttaatttc

SEQ ID NO: 242411 - DNA, 461 bp, Glycine max
  unsure (1)..(461): unsure at all n locations
actaagcttattgacatgggatttacaggtttntcgaacattgattatagtttattgatttattggatgagagttaataattaataaattttcttaagtatagacccatgtatatatagctaactccattgtgtctcttcctttgtttttaaaaacttatcttcttatacttttgcaaattaatggctcttagaatttctttcaatgataagattgcgtgtggaagcattgattggtgaatcacagtaagagtagctgttcatctttggaagcaaactcaatatagtaatccaaatgaaatacgtaatactgaatcgatcattttggatgaaaagatattttatataaattgattttgggtattattctacaatgtctattttggaacacaattgatatcaacccttattatacatatgacaattgagagtctcaaatatatgcttaatctcaatttattc

SEQ ID NO: 242412 - DNA, 374 bp, Glycine max
ccatgaatcagaaatctacacctgttgcaagagtctgtggtctatgatcctctgcagatcaccatacagatctctgtccttctttgcagcaatctagagtcaatgagaaacctgaagcttatgctgcaaacatttataatagacctcctcagtagcaaaaccaacaacagtagaataattatgacctttcaagcaacagatacaatccaggttggaggaatcatccaaatctgagatggacaagtcctccacaacaacatcagtctgtcctttctttccagaatgttgctggtccacgcaagccttatgttcctctctcaatgcagcaacaacaaagacaacaagcaggtgaggcctccttttcaaccttctta

SEQ ID NO: 242413 - DNA, 401 bp, Glycine max
aacaagagggatatgaggatgaagcttagtttaagttagtctaaacctacgagggttgtctaaattgagcctagtccaacaagagggatctgaggacgaagcttggattgattcagtctaactagtgatcaaggcttagtaatttaggctgcagcataaaacacaaaagcatgatatattagagaaacatccttatatgcattaactggtctgttaggaagacccaacacttctacctactgctgtcaattctacttacttgcatatttactgcttctagcctacacttagtttaatcctattctaaatattaattatcaatgtttctttaacaatgctctatatctaattaaacctgtctatactattccttgcgttgatacttgattcatcatttaatt

SEQ ID NO: 242414 - DNA, 389 bp, Glycine max
agctctttgaactttgtcgtacttgtgggacaactttcagaggaacaatatctgggttattttatgagtggtttgaagccacaaattcatcggagggttcggactctcaatcccctgaatcggatgcaaatgatgcatatcgctaaagacgtagaggaagagttgagagaagatgatgatgacgcacgcaaatatggtagcaaaaaaggagggcaggatcggttgggtcgtaatgattgggccgggtcagtcttttggagcaggagcgggtcaaacccaaaagagacacatcgttcccgttgggccaacccgactcagaaaacaggatccagtggatctaacacgctctctacgatgtcgttagtttcaactgagaaaaagggtgcaaa

SEQ ID NO: 242415 - DNA, 340 bp, Glycine max
  unsure (1)..(340): unsure at all n locations
cggacatcccagctngaggttaatctcaaagctctattatcatattcttgttagaggacttccaaagctatcgtatcaagattcattttgtgtagcttcccaaaaagggaagcaagttaaaagttcttttaaagccaaaaaaaatctttccacttctaggccttttagagctcctacaccttgacctttttggaccaaccaagaatacacccctctttggatgcangtatggtctggtcatagtggacgattacaccagatggacatgggttaggttcctaacccacaaggatgagtcttttgataccttttataaactttgtaaatgattcaaaatgaa

SEQ ID NO: 242416 - DNA, 501 bp, Glycine max
  unsure (1)..(501): unsure at all n locations
agtactccacgcatacttgaacccngttganccngtgagatccgtgatccttaagtcacctgaggctgcagctgtacagttttggtatatttttatgtgtgtgtgcataatagagcacagagnttgaactatagttcatgtaatttcacaatccttcattaccacctctaagggaactgttcaagttaaaaccatgcaatgaannaaaaacgttttgaggttaaataaaatcggcttggtttaggcttttaaaacaagctaacttcccatcactcaatatcatgtgatctactgtagccaccactcggtcaccacttggcgcccgtgcgaattcttaactgaattactctctctttgaaacaacactcttattctcctattcttgcattaacaactgacccgtcactcctccactcctactcaatatttttccaactcttttccaattaattaaatatatcctatcgcttatgctatcattccctccctctccacttctcg

SEQ ID NO: 242417 - DNA, 418 bp, Glycine max
  unsure (1)..(418): unsure at all n locations
aatagttattcttaattatataaagataatatatatataaaaatataaccacccaaatctaaatatataaatattataattaaaatatcgtttcaacaaaaaaatgaaatgattttttttcaaattttctatantttcattntctacatattaaaagggttttataagtctactaatcagcttcaataattactatgtagtttcttaaactggaattctcacttactttcttatacagtntaaatntcaaagaacactcataagatatatataattacacattgcatganaaatagaatntaattatcatgcctcgacagtgtaattaatataaaaagctcttatagatacccgaaggtctntatacagtgagtgcatttaaatgaaatttatcagaaaccgatatctactatagaat

SEQ ID NO: 242418 - DNA, 185 bp, Glycine max
taccatcagatccgagtgaagcctgaggatatactaaagactgcttttaggacccgttatggtcactatgagtatctagtcatgctctttggtgtggctaatgctccaggtgtgtttatatacttcatgaataaagtctttcacccttacctagatagttttgtggtacgattcatagatgatat

SEQ ID NO: 242419 - DNA, 366 bp, Glycine max
  unsure (1)..(366): unsure at all n locations
tgaagtgaggaagtgtggaagagccggtcttcctacttttgttttgttgaccacagagtggtacctggagatatgtcgcangggtcaggagaccttgnggacgtcaggtggngtgctattgcccaaaaccaagcttgaccaatcccgacccaacccaggcatagtcagtcagtgagaacctgtgacgtacctaaacaggcgagctcctggcagtcaaccaataaaagaacaaagaccacaaancaaggaggcttgtgtggtggctggccagctatggatcttgagtggtatctggaatntggcctctggtaatcgattaccaaggatgtgtaatcgattacaaggcttaaaaatgaagacaggaag

SEQ ID NO: 242420 - DNA, 302 bp, Glycine max
  unsure (1)..(302): unsure at all n locations
atattgcactgagacaataatctttgcctcacttgcaaagttaatgagtaaatggaccattatgtaaaacaatgaggaaatattttaaagacaaatattattagaagagggattgaattgtacattttactaaacttaaaatcttttttgaatacaagaaagatattgtctgatatagttaaacttaagagaacatatgagatttttgtaggacaaatcaaacgatagttcagatctttgtaaaacaaataatntgttaaaagtaaatctcaaattaaatcctaagtcagttaaaaacaaaa

SEQ ID NO: 242421 - DNA, 404 bp, Glycine max
  unsure (1)..(404): unsure at all n locations
cctagactcgtaagcttcttgcgtcgccgctcttggtgctcagnaaatcccatatacaattcctcttattactagctatttggaattctttagttcctgaatgtacaaccttcaaattgttgctcgttcccctctttcttttctgcaaaaaagaaaatcaaatgctgtgaaaacatggatgaagtcctaagaaaatcaatatcaaagaaaacatggatgaaatcacaattaataagcacaaccacctatctttcagagtcctttggttaatgtgtcttgtctccttatgtggtggggttttgtttaataatattatacttttgccttcccaaaaaaacttatgactgatcctctctccattaatccaattctgtatgttattgtataaaagatcatgggttctc

SEQ ID NO: 242422 - DNA, 320 bp, Glycine max
gatgatatctcgcggcgtcatattgattgttggacatcaaactgctgggtttggaaaccaaaacctaatggtcaattttctacaaggagcacatactgtatgctactagaaggagcagcagatcatactgtggatgaggctttagaggacctatggcagctcaaaatccctttaaaaccaacaatatttgcttggcgattggataaagatagaatccctactatagggaatttttcaagaagacagctggagaaaggctctgcccaaccctacaactatcgtgtctagtaattatcaacaaacattttttattacggtag

SEQ ID NO: 242423 - DNA, 296 bp, Glycine max
  unsure (1)..(296): unsure at all n locations
tcttgcgtagccgctctnggtgctcagattatcccaaaaacaaatccctcttattactagctattttgaattctctagttcctgaatgtacaactttcaaattgttgttcgttcccctctttgttttatgcaaaaaatgaaatcaatatcaaacaaaacatgcatacaattgtcatcgttattgctacttgaaccataaggaataccatctaaagaagtacttcaaaacggttatttatttcttttgggattttttgaattacaatttgacttcaatatctaattctttaatgtac

SEQ ID NO: 242424 - DNA, 231 bp, Glycine max
  unsure (1)..(231): unsure at all n locations
actaagcttgcagagtgatgacttccctncncaaatgctgcattatgtaatccgccnnncacncccatgtacaggtttctgtatgtaggattgggcctcgatcttacctcgaccacttatttgtgtgctcttctttagcacttgaatgtggcctctttccaacttcgtccgaataagagggccatggtgagggccttcgaaattctgtgcctcttcttcaacattcgacct

SEQ ID NO: 242425 - DNA, 435 bp, Glycine max
  unsure (1)..(435): unsure at all n locations
agccaatgctatttgcaataaccatcttccaagtggacattggacttggaaatttgaaatggggtttaatttccacaacatttaatggccatgctgcgagaacattaatcgagaaggttgaccaagaaatgaagcaggaaaatcttaacttaatactactacccattttgcataacccaggtatccaatattgggaataattaatagggaaaaatcagtggtgtagaaatgcattacactgatgtggttgatgtatataacaattggacaaaagagaaaaagagctaggcngatgttatagaaagagaactaaacaagatcaacgtaacattattaatgaaagttctaatccctattgtgcaaaacacttcaaaaagaaatcctatctagccaccaaagccaagaaaactgtatagtcaatatcacctacagctg

SEQ ID NO: 242426 - DNA, 527 bp, Glycine max
  unsure (1)..(527): unsure at all n locations
agttgtttcnnnnnnnnnnaaggggncccccncgnnatggaaaccttannnnagtctatctcgtagcgcncaagctcnacgancgtacacgtnnaactacatgtatccttcattggaagttcttagagtggacatgcaaaataaataacgctgacactcaaataagtccatgattgagttgagtttgaaaattgaaaggggtganataagatctgatctttataacgtgagataggagtttcgaagtcttgattgtaagagagttataacagtgatgtaacaactctagatattccctacttggtaataattataggagaaaatcatagctggtaaatatagttatagatattcatccttatagataatcaatggatatagaaattcattatatagatattcattctagagatagtagtcctgtacctgtaagaaatatacatttcctcaaatcaattatgttttgtacacatgtggcctatcttactgggccattccccactgtagatagcttcaccggtggtccn

SEQ ID NO: 242427 - DNA, 446 bp, Glycine max
  unsure (1)..(446): unsure at all n locations
catgacaacaacattattacttacatgtttaatattctttttattcctggaaccctttggtcgaccacgcttctttggcctcacaatctcacctaggcctgcaccttcatcatcggcactaccttctctaacagaaagcaatggcctttcagactttaaaactgtgataatactcatcctatctgaaccctttggtcgatcacgcttctttggcctcacaatctcacccaggcctgcaacgtcattctcagctntatcttgctcaccagaacacaatgatctgttagactctaaaactgtgacattacttattctagttgaaccctttcgtcgaccaagcttctttggtttcacaatctcacccagacccacaccttcatcacctgccttatcttcctcaacagaaaatacagatctttcagactctaaaaatgtgacattattca

SEQ ID NO: 242428 - DNA, 278 bp, Glycine max
  unsure (1)..(278): unsure at all n locations
gagatcttcattctggtttaatagattactggaccactgtatcgattatactatncagccgagaccatgtctgagtctcatgagtctctactttaatcaattaccaagtgattgtgatcgattacatcgctcttgaaagtgttcccagtactgatcaagaaaactttgatcgattaaatcaagagtctaatcgattacattgttcttgaaagctttctaggtgttcggaagaacactttcatcgactaacaatgattatctaattgattacttcttta

SEQ ID NO: 242429 - DNA, 267 bp, Glycine max
  unsure (1)..(267): unsure at all n locations
ttaagtcacctgcggcatgcaagcttcttgggtcctgcanacatgacaacaacattattacttacatgcaaaatattctttttattcctggaaccctttggtcgaccacgcttctttggcctcacaatcttacctagggctgcaccttcatcatcgcactaccttctaacaaaagcaaggctttcagacttaaactggatatactatctattgaccttgtcacaccttttgcctacattaccagctgcactatctagttattctaca

SEQ ID NO: 242430 - DNA, 400 bp, Glycine max
  unsure (1)..(400): unsure at all n locations
tgtagagagatcttcattctggtttaattgattactgatatttgtaatcgattacactattcagttgagaccatgtctcattttcatgagtctctancttaatcaattaccaagtgattgtaatcgattacatcgttcttgaaagtggttccagtagtgatcaagaaaactttgatcgnataaatcaagagtctaatcgattacattgttcttgaaagctntctaggtgttgggaagaacactttcatcgattaaaaatgataatctaattgattacttctttaaaataatcgattaatgtggcaatntaatcgattacatgccaatatgattgtcttctctatatatagccaccttgtgttctcagctcttacgactccacattctagtcttcattcct

SEQ ID NO: 242431 - DNA, 463 bp, Glycine max
  unsure (1)..(463): unsure at all n locations
gtcacctgcggcatgcaagcttgtccattggcaaagttacagaaggccaatttataaaaatgatctattcagtcaattattcttcaccatcatttttaattatctaaagttcattggttggatttaacattaacaattagtcagtcaagttcaagaggacttaattacatgggttaaagaatatgtatctttttttctccaaaaaaaaaataagtcccttgatgcatttcataagttaatggaaaataaaaggtgtagaagaaatgcnattaaaggtgataagccatagcaagtgtttgcagtttaccgcttgaactcangtgactgcttatattngtcaaactcttgcaaccattcttcatccgagaaaggagggagagtaccggtgaattccaatcagtcattgaagaccagatcggtgagtcttgtaaactcccgagcaccaccatgctgaacacccatg

SEQ ID NO: 242432 - DNA, 409 bp, Glycine max
  unsure (1)..(409): unsure at all n locations
gcttcanaaagtcaagcagaacagcttaaagaagaacaatgtggcgatctctgatgtaaccaatcatgctcggaaagaagagttagaaactggccgttaataatttgcatctgtaattacagaacttgatgttgcaaagcaagaactgagtaaaattcgtcaggggtatgatttatccttggaagcaagagtttctgctctcaagcaaacagcagaagctgaagatgcaatgaaggcaaacatggaaagagcatgtgaggtatcctaaagaaatttggttgtgcaggaatcagttgagaaaatgaatgctgaatctgtccaagcacatcaactgcaagaagagacattagccggacaaaaagttcttagacaatcatatgaagccatccttgaagaatcaaaaaagaag

SEQ ID NO: 242433 - DNA, 280 bp, Glycine max
  unsure (1)..(280): unsure at all n locations
agctntaggcctcactcantgttgngcctgcccttgtgagaactcttttatttgagaaataagaacaataaaaatatgctactactattaaaccatatttattttgagactagaggtgtcattggcttttgagatgtgtcttttcttctttttcttccccctccctctccttttttaaatacttcagatactacactttttactggaattcttattcgtacataaggcanaagagggttggggggagcataccatgtagtgatgcaaacttcgtggacag

SEQ ID NO: 242434 - DNA, 426 bp, Glycine max
  unsure (1)..(426): unsure at all n locations
cacggttgcaccggcctctctagtgatcctccaaagtgttatcctgttcaacactgcacatggagagtgagtcatcctccacatcaagcagtgcaagaattatatgcgactgtagattactaggtggacacgcttcatcgtcaagcatttctggtgcgtccaaagcattaacttgtaacctagcccgcttgattgcctcggcgtcaccctgaaggagctntgagatctgtggtccaaatgtccgagagaatatccatgagattttcaataaaaaggactaatgtactgaatgagaatatttctatggngatcaaacaagaagataaagttaacggctgcactatagaggtcagataccacattgattaggataagcaaaacgcagaaagtccgtccattgtccaggatatacactcaatatgcaac

SEQ ID NO: 242435 - DNA, 428 bp, Glycine max
  unsure (1)..(428): unsure at all n locations
agctgggtgataagatcgcgagtttctagccaatctcagatantaatgagaatgtntattttctttgtgaanaataagaaccttaagattattaatatattatgctgctatgtaagtagaaatagccatttcacatatactgcacctttttcttcaagagaaattcagtcaatgttgcattttactgatatccttaatacagtaagttaatactcgaaacaggtaaatatttgtagagtttcccttcaaagacccgttgaaaatggtcatgcatagatagacaatgccagctgagcatagtacaggacattnnttgattttgttggtctcgggactcataattcatgagccaatcactaatccaaatattggaaataaaatatggaactggcttacgtaaacagtaattaaagtacatgctcctacga

SEQ ID NO: 242436 - DNA, 330 bp, Glycine max
  unsure (1)..(330): unsure at all n locations
tcccgcatccgcacttggaaggaactgattaccgccttccttatgttgtatcagtacgattctgatatggctcccgactggactcagttgtagaacatggntaagagggaaagtgagtcccttaaagactacgctcggcgttggagggacctggtagcacaagtagcccctcccatggtcgaaagggaaatgattaccatgatggtagacaccttgccgatgttntactatgangaaatagtgggctacatgccctccagcttcgtagacttggtattcgccagggaaagaatcgaagtgggcttgaagagagggaagtttgattacgtc

SEQ ID NO: 242437 - DNA, 264 bp, Glycine max
  unsure (1)..(264): unsure at all n locations
agcttgagatagagcttgcaagtgttagagctagttgtggcagcgaacaatacttgtaactttgataagttagtgaaaatttggtggttgtcaagaatcggacgtagtctcaggatcgagatgaaccaatataaattctttgtgtgctctcttgttgtttaaatgacaaaggcgttgaatttgctnttagatcttatatctctttctatttttcaaggaaaactattttcctcatcgtttaatacagcctaaataaatacctgt

SEQ ID NO: 242438 - DNA, 441 bp, Glycine max
  unsure (1)..(441): unsure at all n locations
ggatgtagagctngattgtgtaagagtaaaaagtgatactaaacttatacttgtaactngtgtgaagttagtggaaattgatgattttcaagaattggacgtactctcaatggtagagatgaaccagtataaaactttttgcatttgatctttcttgctttcctttaagttttatctaaccaaagggtgtgaatttgtttttagatttaaatagatatctcgtggtttctaaaaaccattttacatcatctaatagnttctttgaaaaatctataatatgctctntacacaagtttatcagatgaaaactttgttttaagtgaaaaaagaatttaaaatgtataaaatcagaattcaatccccattcgtgatagttgcctttacattaaataaaaagatgaaaatttagatagatatcaaagctgtgttaacatttgtttc

SEQ ID NO: 242439 - DNA, 303 bp, Glycine max
  unsure (1)..(303): unsure at all n locations
agcttccatcataagcgtnggtttagttggttttattcttaattgcaagatatattntgactgaacaaaagtcgttntaaggcgttgcaccatttaaacgatattttgattctttttgagttgattttagccttagtttcactttggtttctagaaagtagtgacaaagttatgcgttggctttaggctttcaaaagtccacattttcaccaaataaaagcaaagaggatcattcaaggcatcggaccttanaatggtttttaggtgatgacaaaagcttgacttgtgagttgattntagcct

SEQ ID NO: 242440 - DNA, 445 bp, Glycine max
  unsure (1)..(445): unsure at all n locations
ctatgctgcanacatntacaatagacttcctcaacctcagcagcttattcaaccacagcagaacaattatgacctctncagcaacagatacaaccctggatggaggaatcacnctaatctcagatggtctagccctcagaaacatcagcagaagcctggctccttcttccaaaatgctgctggcccaagcagaccatacattcctncaccaatccaacaacagcaatagccccagaaacagccaacagttgaggctcctcccgcaaccttcctcaaagaacttgtgagacaaatgaccatgcagaatatgcagtttcaacaagagaccagagcctncattcagagcttgaccaatcagatgggacaattggctacacaattaaatcaacaacagtcccagaattctgacaagcttgcttctcaaatctgtccaaaatccaaaaat

SEQ ID NO: 242441 - DNA, 431 bp, Glycine max
ccctctgtaactggtttaaacccaatcttctttttcggccctcctcattattcgttctaaagctctggatgggccctgttgacatccttatctcatcacactctttcctaaccttgaaggctgtcatcttgaactttctcttgaccacttgcattctttcaagctccacattcaaagcttgcacttctttgctgttcttaaggacattagccttgttcccacttgaaatatttagttcgggagcccagttataccttgcatccgagccttcaaccatttatgatattcaccaataacaccgttgaagctggcttcaagctccttatactctctttgcccacacttcatgcttttctgactcgtccaagcatctatgcaattgcgtcacatgagacacctgctatcataggcgtgaaactctctttctatcg

SEQ ID NO: 242442 - DNA, 192 bp, Glycine max
  unsure (1)..(192): unsure at all n locations
ttggaagcctntacaaggatccagctagactaacacatagaaattgaactgtttgattgatgttatcaacggctcacaatgatttgttntggtaatctgtgtctttccaaaccagtcaataagatgtcattatatggtatccatttgttattcgatgtgcgttcttttaaatcctaattggattgagatgtg

SEQ ID NO: 242443 - DNA, 437 bp, Glycine max
agcttcatctatggcagccaagttctcagcaacttttaaatataatctcctagatccgatcaattggttcagtgcgatcctgcacagcaatcccttctgagacatcggcgagtgatttgagattgcacttaattaaggcctcaacgaagtagcaggtttcatctttggtgttgccctcaggtacatccaccacaaaagattcaattaccagtgtacctggccttccatcaataatttctgggtggagggacatgatagatgagtagttctgaaagataagagatacaacttatgttaaaaaaaattattgtgtcaggtgacacggacaagatagcttaatcatttagcccaacttcttagacaggccgggaaaacaaaaatctatataattactcatggtggacgtaatgcttggtgcgtctttaatacatgaatat

SEQ ID NO: 242444 - DNA, 405 bp, Glycine max
  unsure (1)..(405): unsure at all n locations
gacacttaaaactaagcttcgttttcataaatttaatgagcaatttgccnctatcttgtttttctttaaatntactacgccttccagttttacgcttcctttgtgtttcacttacactgtcgtgtcctgtgtgctgggtggtttttgcaagctntggtggtttttggcaagttgttggaagtcgttgttcggtgaaggttaaatattggtggtttctatcatagttgctcttcttattccgttggaggtacgcattntatgattnttctgttttttttttgtgtgttcatgttacagaagaagcagtaaaatggcaaggaaggttattcagtaaaaacttctttcgaaagaagttccttttaccggaagaagctgttctggaagtaatgctacttatttcggaag

SEQ ID NO: 242445 - DNA, 286 bp, Glycine max
  unsure (1)..(286): unsure at all n locations
atccttaagtcacctgcggcatgcaagcttgaaagtgtgtaaccaaccattnttcattgtgaacaccggtaacgtgtatactatcattgtgatcatctttttctctgtcattgaaggtgccacttgagctgtcaagtccctccacctttgggcgtattccttgaatgactcatngctctttttacacatgttttgtagttgcgttctatccggagccgtatcataattgtactgatattgcctaaccaaggcaaccatacgttcttccaagaaagactcgggaagg

SEQ ID NO: 242446 - DNA, 366 bp, Glycine max
  unsure (1)..(366): unsure at all n locations
aaagtatgcccgagtcattcatccctatgagatgttgtcgatgtattggcgatcagaattgccattccttggatnatannggtgaaccaagctcatgctnttacaaaaaggttcatcaagtcaagttgaaatatggaagtaaccgtcttgcaaaattgnggcaaaagatgaatngagtcacatcactgcttcgtctactgccaaacatatntaggattattgatgntccttgtacttccagtttcaccttgacaaagatgtcatggaccatgtngaaaatctaaatngantcaaccccatatcttgcgtaaaaattcgcaatacttcaactgtgcatcattcgcatgcatccatgcttttcattgg

SEQ ID NO: 242447 - DNA, 422 bp, Glycine max
  unsure (1)..(422): unsure at all n locations
agctntacatgttttcaaacttataaaaagctnttgaaaagggaattttagcttggacaacaggttntattatttaattatagattgagaatgtttccaggtaagccggaatctatgtggtatggaacactcatcatcaatntcgtcaagccacatggagctatggtattggatgatctagccacanagatgacatggattgtgaatggcagcaggatcaaacactacttgggtggtgatgttgagagccttaccactattgtccaatngaaggagtctaaaccatgacaagaacgtccagctaataagatgttaaagaagagctactangaggcaacctaatgtttctaaactttgtctcaatttgtgttacctgaattntatgtctcgggtttttgaatatgtttatgaaatttactttt

SEQ ID NO: 242448 - DNA, 178 bp, Glycine max
atactcagcttatgatgttgaatcaagatgatcaaggagttttgtgatatctaagatgagacaaaaagccaagagaatagttcaagatttgtgacaaaggatcaactgatgttttgatgatgcccaagatacatgtttacacgctttattcacgactctaaatcccgatattcatgat

SEQ ID NO: 242449 - DNA, 439 bp, Glycine max
  unsure (1)..(439): unsure at all n locations
tcttgagtcacctgcggcatgcaagcttcatcttcaatccaagaagaaagtgataatgtttactntaatgatttggatgaagatgatgatcttaacctttntggaaaaaggttcaacaagttcctcagaatcaaaggaaatcaaaggagaccaaattttaaacctaaaagaaggacagaagattcatcctctacttcaaaatgctatgaatgcaatcaacctggacatctgagggttgattgcccgatcttcaagaaaagaatggagaaatttgaaaagaaatattttagtgaaaagaaggtgaagacggcctacatcacatgggatgacaattatatggaatcatctaaggattcaaaatatgaagagataaacctgtgtctaatgggctaaaagtatgaaagtgatgaagaggtaacatcttcaaataacaacttat

SEQ ID NO: 242450 - DNA, 357 bp, Glycine max
  unsure (1)..(357): unsure at all n locations
agcttaggagaaaaaggtggattcaccactagagattgtggatcagctggctttggtttaacccgtgtagttgtgggctcagcaggagcagcctcgtcgggtctcaccaatggaaagtgagcttcaagccaggctacttgcttaagaaaatgctccataggtatgaatggccctgtgtgagccaactctcgcaggctgtgcatgataataaactatcctcagaataagctttgtagcatagggactaaaagttgagagcgntggacacccagtcctatggctgctgacggaggagctagagtggatgatgaagggatgtcatctgttctagcccttttcttgatgccatcattacta

SEQ ID NO: 242451 - DNA, 369 bp, Glycine max
  unsure (1)..(369): unsure at all n locations
agcttcatcttctattcaggaagaaagtgactcatgactnggaagaattatctcagtctttntgtcaaaagaattaacaagtntcttaaaatgagaggaaatcaaagacgccaaaacttcaaaccaaaaaggagaattgaagaatcatctcatactttaagatgttatgagtgcaatcaacccgaacatctaagggctgattgtccaacttttaagaaaaggatggagaaatccgagaagaagaactttggagaaaagaatgcaaagaaggcctacatcacatgggatgataacgacttagaatcgtctgatgattctgaaaaagaagtgattaatctatgcctaatgggcaaaaactatgaaagcgac

SEQ ID NO: 242452 - DNA, 197 bp, Glycine max
  unsure (1)..(197): unsure at all n locations
atgcatgcatatatgtagcatgtgactaaccaacaagcggctaatcataggggtcaggtgcagctaaatgagagcttctaccagtacaccctacaccagcaaagccaggaccctagacctttcccgtggtccactcccgagcagttnngngccacagntgcatggctgagagatacgctcctattttaaacaggggc

SEQ ID NO: 242453 - DNA, 427 bp, Glycine max
  unsure (1)..(427): unsure at all n locations
tattgttgcattctactaatatatggaattgtccactgcttttgcttgataataacaattgcttgaccacaacaacgctggaggcggtaagggacaatggtctttcaaataaacctgttgtacatgaacaaagattatatcatgcggtgaccgtgtcaaatgaaccagcgaagtcattgcataattgttatactaactatattcaatgtacctgaacaaaatgatttccaaacacgtgactgacacatatcatgcggtgcccagaagaatcaggtggtgattgacttctaagaggaaaaaatgtcatgctnntgtgtcgggacaacgatacaaggattacattataccgtgatacaatcacatantccatctnncgtatatccatccacttgtncacactaacctgaatcaaccaaacatacacatg

SEQ ID NO: 242454 - DNA, 379 bp, Glycine max
  unsure (1)..(379): unsure at all n locations
agcttgaacctcacagacccaattccaattatcttttacaggacttgttgtttccatggaggactgaaccaccaacttgtttgtcaagatcctcaaaccaagacttgtttggagtcatatgaaatgaacacccagagtccaagatctatttgtctcagtgttcttatgagacaccattaaagcctcagctgaatcataaccatcttcaactagagtagcatttccaggttctttagatcgatcttgctggtttcctttctgtctattaggacagaatcttcgagtatggccttctcttttacagtggtaacatctaatgtttagtacattagatccaaatcgagttggtgactnggatcttttcccttctgtcttatca

SEQ ID NO: 242455 - DNA, 395 bp, Glycine max
  unsure (1)..(395): unsure at all n locations
agctggttagaattgttggtcaataccatcaattacgctnttaaaaacttatgactttcttacaaagaagtgaaagaactatagctagttcagagatggtgaagatcgaactaaacaagttttgattaacagtggctgtttttgttttaatagtattagagatatagattagttcagttaattacaagttaattattaagttagttaattagttacaaattagttatttttgtaaccaattatgtaacattactagcattagttatataaggatgaatgtattcatataaaaactgatttactcatttntagcattatccaaattaatatctcagttttcttttctcttttcatctttctatcttaactctatcaaatagtgattggaacacatg

SEQ ID NO: 242456 - DNA, 335 bp, Glycine max
  unsure (1)..(335): unsure at all n locations
agcttganattgaataatggaagctctcgagaaatataaatggtcataacttttcactcggattgccgattcaggtgcataacatatcgagacgctcaaaattgaacaacagaagctctcgagaaattcaaatggtcataagttttcacatggatatccgattctgtgttataatatatcgagacggtcgaaattgaacaacgactcgagaaattcaaatggtcataacttttcactcggatgttcgattcaggcgcataacatattgagacactcggaattgaacaatggacgctctcgagaaatacaaatggtcataacttttcactcggatg

SEQ ID NO: 242457 - DNA, 401 bp, Glycine max
  unsure (1)..(401): unsure at all n locations
tgcatttggaanttgcgaaagcccactccatcattaggattagttctctgacatctcaaacaaacaaatcaaacgtaacaagacaattatagttgctgtttgaatacctcacccactcaagtgtatcacacaattatggctnttctctaatgaaacactcttgccttttaccactctaattccccttgagttcttaggcaattcaagagattatggccacaacaaagaacaattcaccaatatgtgtaaggtaaggctagacaaggaaaaggttaaccaagaaaaaggctaacaatgtttttaggcacaaatgaagggaaataaattcagaatttaggaattcaagtaacaatccttcatgcaaccaatatattaccttaaagaagtttttttttaagttc

SEQ ID NO: 242458 - DNA, 454 bp, Glycine max
  unsure (1)..(454): unsure at all n locations
agctggtctcagcgtttatgcgatacagagaccattatgttagccatcgtcagcangtaccaagaagaattaaatctagccacggcccacaagcacaaagtggcagacgagtatgcccgagtgtacgcggaaaaggaggctagaggaagggtgatcgactcgttacatcaagaggcaacaatgtggatggactgatttgctcttactttgaactggagtcaagaacttcaccgatggctagccaaggccaaggcaatggcgaacacctactccgtcctcaaggagatccaggaacttcttagctattgtcagcatatgatagacttaatggcccatataattagagaccctaggaagtttgtattgtcactcagatcttgactagttataactttctgaataaaatgagtttattccaccgttttactccaaaaatcagtgtgaatcaaatcac

SEQ ID NO: 242459 - DNA, 341 bp, Glycine max
  unsure (1)..(341): unsure at all n locations
tcagacaacttgtgtaatcgattacaataaggctgttatcgatgttaacacaatntgtgtaattgattaggataaggctgtaattgatctaaacaaagagttctttcttctgaagaaacttttctaacttagaaatntttcttctaacttactcatgataatgcatgatgcacaaaagatatgatatggactaagatgcaaaattcagtataataatcaatacaaatgccactcaagggagttgggcatgtaaaagacaaaacatcttcaagatnttgtccaaactccaagctntagtctntattttgttcatgttgctcnctctatctaacaatctcccc

SEQ ID NO: 242460 - DNA, 460 bp, Glycine max
  unsure (1)..(460): unsure at all n locations
agcttaacctctaagggttaagcacctgacaacgtttagagaaaaatattctaatggaaaataacaaccgtaatggagctaaatacaaaagctcgttatactctaacatgtgctctgtccaggaatgagtataacaagatttgtagattgaagacaaccaaagagatctaggacatgctgagaatcaactacgaatggacaagagatgttcaactgagaaaagttgtcaccctaacaaggcgttatgagattttctccatgaaagaaggagaatctatggatgatacgtttggaagacttcaagtgcttctaaatggacttgaagctctgggacacatcttcctcanagctcanataaatctgaagattctagatgactttcttaagatgtggaatgtaattctcttcattaaataacaaccctaataaaagtatacttgttcataacataataatttat

SEQ ID NO: 242461 - DNA, 294 bp, Glycine max
  unsure (1)..(294): unsure at all n locations
tcttctnttctcaagttcagcttctccatagtaagaatacatgtgtgttaaatgctcagaaattatgtggaattcaagatgcattcccaatgagcttgcttcttccacaagcacattcatactagcttgaagttttgagttttcttcattgccagttaatccggtgatccggagtgttggaggcccttcaggccttgaagaaagggcccttattagggaagaccactgaagggtatgctccattcctaaatcaacaatgtgtatnngagctctttcttgtgatgcttggcatat

SEQ ID NO: 242462 - DNA, 456 bp, Glycine max
  unsure (1)..(456): unsure at all n locations
agctngatcaaccncattntcaatgcanaacatgttgattaatcattcanacaatcacaaacaagtattctcaaactaaatgcaattaacataaaattaaaaaggactgggtttcctcccagcaagcgctcgtttaacgtcattaacttgacgcatcttactttatgggtctggatcaaatttggttcccaccttcaaaaccatctcttcccatactttatntacctctgaacaaacattctagttgagcgaatgctnttctttctcaaataagtcgaaacagatcttttgatcagcaattcccatctcaagctntttctttcccatgtccactacatagctagcggtcaacatgaagggacgacccacgatcaaggggatctcagtatcctcttcgantccatcctacaaactcagctnnggaaagtaatgctcactctaaccaaacatgatgta

SEQ ID NO: 242463 - DNA, 430 bp, Glycine max
  unsure (1)..(430): unsure at all n locations
tatcctntcttgatntactgtgattactatctacattctccttttgtctatcattcttcctttcaaagtttctgttctaagtgcttgctcctcatgatangttacccgattaactttntcttgtttcttttttaccatcaaggacaacctaaagtgttttgctaattgagaatgactttaaaagaaaaacttatattgaattgctgaacacctcgtttaatcttatttctttgtgatctggaaaagagatgaaaataaaatttaattgtaaggccaaaaaccaatgtgatgtgttaatgatcttgtttaaagggtggtctgcattagaatcgaagtattcaccgganaaaaagttatacttttcttgaaaaaatcttccattatgatttcatctttaaaaccttccattctactatcatttctattaact

SEQ ID NO: 242464 - DNA, 365 bp, Glycine max
agcttatccttatggcttgcctctggacttcacttttcgtgccaccctataagatttaagccaagcccctactttcgaggggcagctccaaccttatgacgactatcccgggcaagacgatgaggaaggagatacccatctcggtcctctgctccacctcaaagatccgtccccccatgaactaccccaaccgaacatagtccgccatatcccagctttacctacacccgtaaaagaatctgttcccgtcacggaagataggggaaagattgaggcgcttgaagagaggttaagagcagtcgagggccttgacaattacccattctcggatttggcggatttatgtctcgtgcccaacatcgtca

SEQ ID NO: 242465 - DNA, 482 bp, Glycine max
  unsure (1)..(482): unsure at all n locations
ntgcactgtcatggatattctcatggcaatatcgttacagcatgtctgaaaagacaaaccaatatccatcactacaaaggcacgcattcgtaaaatggtgggcataatttcactcatccaaagcggatccagaacaagtaaaactctggttccaatcccatccagaattcctcaaagcagctgatccagaaacttctgtgtttntgaaccaaaagtctcatctggcagcatttttagcaggatcgacatcaaaggaggtcttagctaanaatctgaaggaatttctacaaatgttacagcaggaagaagaagcttcatcctcaaagaaggaagaaacaagttctgctgaagaagaagaagaagatccctcttaccaaaacgaagatgattgttttggtatctggttagaattaaattaatttcggtcacaaaacacgctgtttgtaataatgtgtaattaatgctcgacaatactacctgtc

SEQ ID NO: 242466 - DNA, 457 bp, Glycine max
  unsure (1)..(457): unsure at all n locations
agcttaacatgtatagnatgtacacatcatcgatattattccaaaaggaatgtgttcagttctgtaagttaaggacgttgaagtataacttctcaatggttcttttgaaaaattgcatttgcaggtgcaagaaagaaaaggactacctatataagcatgaagtttagccgcttcaagaagctgggacttggctttgatatgcttatgaaggatagggacacaggctagtaaattagtgtcgagcaagagtaatgttataaactatcgtgcaaattattttcatgtattcattatgaatagaaagggttcaatctttagtgacaccctgatattcgaatatttgaaatgtgtaatttgctaagatgaaattcaatcgtcacgatatttcatctatgcagtagnttgttgtatgttatgactatggtgattngatcgacaattacactataatggggga

SEQ ID NO: 242467 - DNA, 277 bp, Glycine max
  unsure (1)..(277): unsure at all n locations
ctcatgaatgccaatcatgccagaaactttttgtgatggttgttataaaaacgcgagnagcaaacacttaagttaggtggcatcagaaaatcggaaccaatggcagcagcctcactatagtagcttgctgtatgctaatgagctcgctgtgccaaagaaattgcttattggtgaaatagttgtgtctcaaaatatcacaagatgaatgatgcctcaaaaggtggtcactactcactagtagcagggttagtatcatgctgcaatacatccatcggtg

SEQ ID NO: 242468 - DNA, 443 bp, Glycine max
  unsure (1)..(443): unsure at all n locations
agncttggcagatatgcgcggtcataccagatctttttttacttctttcttttcctccgcgggccccaggtttaccaattcagtttcttcttggtgaggctttatttcacgttcttcctgagcgaccaacctcttcaactctggtgacaggacatcctcttcctcttcctcgtttatcgtttggcttatatctcaatcgaaatcgattatcacaccctcgttgttaggatcctcanagaatcgaccctcatatttataccaaacaagacaaaagaaacaaatacatgctaaatgatatgagaaaaggtggaaccacaagaacagatgaaacaagatctctttgtatatttaataacgtaggtttcacaaaacaaaagagaaaggaaatctatatgctctaattacattgaatcagcggtatagacttctgattggcttatcac

SEQ ID NO: 242469 - DNA, 339 bp, Glycine max
acactatgaaactaagcttcccaagttcccattgaaaaccttattcaatctttttatttctagtgagaaggataaacgaaaaattagggaacttcgaaaaactaaattcttaattgaaggcgtaggtgacaaccatagtgaattactaaccaagattggtagtttacttaaggtcatttcagataccccccaagcctcggaaaatacttcgaaaatggttacaagaagtacctccaaagtaattaatgttatttatgaagatagtgaccaaaactcagataacacaactgagataggatcagtgtcataaaagaatataaatccaattaattccaaaca

SEQ ID NO: 242470 - DNA, 329 bp, Glycine max
  unsure (1)..(329): unsure at all n locations
agcttctcatatttaagaagtttatntattccatttctttctcattcttagctgcgtgtttattctgacgtgatgaattctataattgtgggcacacctcttgaaccataaaagaaatgtcacatcttattggctgaatttcatggatatagctgttgtatcctattccatgattctttaatatttctgttatcatttgtaggcttatagaacatgcatttgtcgactgccgctcatcagcacatgagcatgtttggtattggatattggcatgcatgtcggacatattagtagtagtacaatctaattattcaattttgcacttttct

SEQ ID NO: 242471 - DNA, 277 bp, Glycine max
  unsure (1)..(277): unsure at all n locations
gagaaaggcatcaaaatttctcttttatgattatatattccnncgtcatcggctgngatttatattattaaatntctgtatgctcttaaacttccacataaattggatgatgcttcacttaatgactngagttatgtgtttgctatctatcaaatacagctttcttaattatatatttgaactgtatgttgactttcctgttagttcttatcatcaaattaaggggaaaagtgagattgaaaagtattacttctaaatttccctcacatacaacatt

SEQ ID NO: 242472 - DNA, 530 bp, Glycine max
  unsure (1)..(530): unsure at all n locations
cgccccgcgtgaatcactgcgacacgcgatcctctgagtcacctgctgcatgcaagcttgatggagtgtacacacccgactctcctattatgtttgtggctgagggtgaatctaatgcacgtctgaaagaccttgcaagtgtcctcaccaaactgaattgtgcgggccaataaatccatcgtatggcgccgatacgcctaaatcccatgaatgactttcggggctgaccaccatggtttcatagacatgggcatgagcaacaagcggcgaaggactttactcccgttcgaggtcggagcaaacccacccctccacgtgagtgcctctcggagtgagtagtctaccaccctgcacctagccttttttgtcgaaagacttgtgcatactcgactanattatatgcgtcgggccgcggataaacctaactctttacgtaccttggcgaagagaagaacatagatggcgtcatgttttatagggctgtgacataccctttttggacctgtaacaagcattttctcctccttctg

SEQ ID NO: 242473 - DNA, 481 bp, Glycine max
  unsure (1)..(481): unsure at all n locations
agctnttattattaataaacgtattggtttaatgcatcanatagttattaccatgatttanaaattatttatctaattttttcctagctgtctctggtcccaacctagagctaaaccttgtgacgttttatcaagatttcaagggaaagggctggtaaaaaagccagtttaacgagcaagtattataagtaagtttttgtattatcaaacaataaaagctgattnttgttatgaagacttttaaaataattatatattataaaaatcataaatttatcatacataataatttaaaattagatgacggtgaatagtttaccatttattcaaaattaagaagaagaanaatcaatggagacggaagagaagaatggaatgatggagaagtgcaattngaaatcaaactcctttacttcacatatatcatttactnggctcataacgtatccaaagattttgtgaaaaaagggaaaaaagaaac

SEQ ID NO: 242474 - DNA, 501 bp, Glycine max
  unsure (1)..(501): unsure at all n locations
ctaatgaanaatcatacttgggatctagttcctctgcctncacacagaanaccaattgtctgtaagtgggtgtttagagtgaaagaaaatgcagatggctcaatcaacaagtacaaagctaggcttgtggcaaaaggtttaaatcaagttgctggctttgacttttctgagactttctcccctggggtaaaacctgttaccgtcagacttatttcaacattggctatcactaatcagtgatcctaacctcatatcttggtggtcccacaagcagcaacttgttgctagatcccatacggaggcagaatatcgtagcttagctcagatngctgcagaaatcttgtggatgcagacattgttgactgaactcaaagttcccttcagcactcctattgtcttctgtgataatcaaagtggcagtgccattgcccacaatccagtccttcatgcaagaacaaaacatatggaactcgatgttttctttgttcgtgagaaaaattn

SEQ ID NO: 242475 - DNA, 492 bp, Glycine max
  unsure (1)..(492): unsure at all n locations
agctntgatataacatgatatagttcttcacctatacanatatattaaaatggagtgaaacatatactttntatcttagagaaataatggatactaacttattttattcaaaaaatttccaagtcgaatctaattgattgtgtggatgcatgtcatttgtgaagataattatatgtaggttatttcatatgtgtacaaagaaacttgtgctttatctttagggaaaatggcatcaactatcatatgcatgtgaagacaatttgcatatattgctcagttganagatggacacactaaagaggatagaacaaaacatatntcttctaaagtcttctacactcgatctttgaaggaatggtgatataaacattcaacaaatttgttcaagtgagaatataacagatntctntacaaagtcttttgctaaggagaactntntagtaatcggtacacaagaattgaacttcgtgtcttatagacaatcatctacat

SEQ ID NO: 242476 - DNA, 477 bp, Glycine max
  unsure (1)..(477): unsure at all n locations
tatcccaataacactatcaacatagtatgaatnctacactatgagaatcctaattactgatattctaatcatttaacaccttgaagggcatacatgatattaagtaacaaaagcaagcagaagcttctttcccattaccaagcaaatgttctattctagacagaacaaggagataaaatacacctgttaatagcaattgtccatttactgtctataaagtcagttgctgcaagtaatgcagctggccaagccaaagcagttaagagtgagctcaaaacagtcatcattgcccctcgtttcatagctccatcgcaagtcctgatgcaagtcacagcaatactaacatcattcacagcactactaataaactgantacttagttttataagcacccctaaacctacaacaattacttgaagtaagccaatcttgaattcagtgctcacagaatcagatcttgactccactgagtgatac

SEQ ID NO: 242477 - DNA, 520 bp, Glycine max
  unsure (1)..(520): unsure at all n locations
ncccgcgtgatctgctgaccgtgatctctaagcacctgngctgcagctgtgtcanaaaaacttatttgattgaatgtctgtaagcgcgcggcctgctagtgagcctgtgagaaaccaacgtctcactggctcgcttagcgcagcggtcctctaagcgaaagtatcaaaaaactgcttaagtgagtgtaacaacagttacactcacacttgccagatttcggaaacttcgtctttgcattctctctctcaaaaatttgcacattttgcatctgtgctttctttttgcattatcaacttcgaagcaaaaaccatacaccatccccagaattccttgattccttttctctgttttcttggccanacttcaagatagaagacttcacttgtagntntagattttaggggttaatgggttgtagattagttaagatangactatgacgctgttactatatgagatgtgccacattatgttgattgcctttaagctganaggcagaaacgacttgttttagnatgn

SEQ ID NO: 242478 - DNA, 413 bp, Glycine max
  unsure (1)..(413): unsure at all n locations
ttacccgttgaagatcgaagaacgatgaagaacgaatgaagaacgtcgaagaacggttcaaacctttgcgagattcctcacggaaaacgttacggaaacgtttcggaagcgcctcggcttatattttcttcacggaaacaatttttcaagcaaattcgaaagagagagaagtgcctaaggggctggaccccttccttcttcatttcttcccctatttatagcaaaataggggaggtggttgccgcccagctcgcccaggcgagcagggttgcttccttcagaagcaaccgccttctggaggaatcttctggagggcccaaatgggcctgggtgctatntgcacccncatntttactaagtacacncccctctgctgtttttggtaattctttttcgtaaagtacggaaactta

SEQ ID NO: 242479 - DNA, 419 bp, Glycine max
  unsure (1)..(419): unsure at all n locations
agcttccttgagaagctagagcttagctacacacncatctaanaactaagctcacctcttagacaaaatacatgaaaataaaanaaaagtccctactacaaagactactcaaaatgccctgaaatacaaggctaanatcttatactactagaatgacaaanatacaaggcccaaaaaaaggaaaaacctattctaatatttacaaagaagagtggatccaaccttgacccatgggctgaaaaatctaccctaaggttcatgagaaccctanggccttctttagtagctctagcccaagcctcttggagtcttctatccaatacccttgnggggtaggatngcatcactagctagcttcgtcagtgcacctcacctgtgtcgacattggaactggcgagacagtgtccatgtcacgggtc

SEQ ID NO: 242480 - DNA, 484 bp, Glycine max
  unsure (1)..(484): unsure at all n locations
catggcttagtagtttgttccatgatcaatgacttcttttaattagctggcaacttatatggacagtagctaatttccaacttatatagagatcatataaggtacttttaagatattctaacatgaataatcatattctgagatatttcctagatactttggtgtcaacctagtgaactcttaaattgttgcaaggttgttagccagattgaatatccctcactggttgatctaaaggngcttcttctagacttagttgctcaactctaaggtgctctgtctcgtatcaggtatcccacatatcagagttgtattttaattntatccaacatgataaaaattatctaatgattatgaggttaatacatttaatgaatacatcttcatatcaatcagattcattnngttttgatacatacacaacatttntatgggctctacgagttatagacataatatanttttgtgactgatctacatatat

SEQ ID NO: 242481 - DNA, 478 bp, Glycine max
  unsure (1)..(478): unsure at all n locations
cctcatcgtctctggcagtctttagatttgggagccaatccaatccttgtgttcggactctcagccacttatgatagccgtcgatgatcccattactgcttcccctaagctctctgtcctttcttcacgccgcatcccatgccttgcgaactccttggagtaccctcgcgttgtggtcactgaaaccccgtgcgatgaaaggcgtgatgctttcgtctaatggcgctcctctcatggggtagccaagctgtcttatggcgagaacgggattataattaatacaaccccttgttcccatcaagggaacatttggacatccttcgcatgaagatagaatcttgattcttccttccttctagcgagggaaccaattaacagacgcccccccatgctagccaagagttggtcccaattcgcctttcctttntcaacgcacgagcggtgaccttgtagcggatagacgggcctaccttcttgg

SEQ ID NO: 242482 - DNA, 292 bp, Glycine max
  unsure (1)..(292): unsure at all n locations
agcttgtgcaaatcanatcactcctacatttcatctctagcatgcagttttttctttacccactcctcacgtttggttnttgtcaagggaaaaacaccataactaaacgcgccacaaggcattcctatcgcaccagatccaaatctagaacgatgggtgatcaagaggagacacaggaacagatgaaagccgacatgtcggctctaaaagaacaaatggcctccatgatggaggccatgttaagtatgaagcagctcatatagaagaacgcggccaccgctgccgctgtcag

SEQ ID NO: 242483 - DNA, 472 bp, Glycine max
  unsure (1)..(472): unsure at all n locations
tctacttatgtggcagggcgggtttccttcactttcttgtttccaacgcgagctctgaccactgttcttccttcccgcgatgcttcttttcatgtccgcctgagtgggcttatagcctaaaccatacttcccacgattcccttgggtttttatcagactagttatgccaccattgtctttgcctaaacccatcccgggttcataaccgttccccaacataactcgggccatcattaccgccgcatcggacagacaaggttgcccacagagggagtccacggaggaaatgctgaccacctcanaagactggaaagcggtttctaacgattcttctgcggcttccacataaggcatggaggatgggcagcttaccaagaatatcttctcgcctgacacgaatgaccaagtgcccctcactacgaatntcagctnttggtggagtgtagaaggcacaactcccactgagtggatc

SEQ ID NO: 242484 - DNA, 411 bp, Glycine max
  unsure (1)..(411): unsure at all n locations
acactcgtccggatccttaagcacctgcggctgcagcttggaaagatngtntcaccttctcgctaagccaatcttctggcttagtgagcatccnctaagcgcaacactactgggctaagcatgaggaagaatctagaagaagatgagttgtacaggtttgctaagtgcaacgcttcagttcatccgctaagggagaaaggcacgctaagccaaaaatcactaacatgcgctaagcggtccatacatgcactaagcgcacgagcacgaacaaggccacctatttaagcatgaaatcagaatttgtgaagagagtttggactangattcagagttttgcatgtctagggtttctagagagagaaaggtccaagttctagagagttttgacagaatctgctgtgtgaagatcta

SEQ ID NO: 242485 - DNA, 427 bp, Glycine max
  unsure (1)..(427): unsure at all n locations
tctaaactntatacaagaatgaagctcagataccacttgttggacaagtggcctcagatatcttaagaaggggggggggttgaattaagatatcacaaactattccccagttaaaaattctacttttaatttaacccaactacccaagattccttttaaacaagaactccttgataataatgcaaatttatcttactaaataaaaataataagcaataaatagtaaaggagtttaagggaagagaaaatgcaaactcagatttatactggtttgaccacacctttgtgcctacgtccagtccccaagcaacccgcttaagagttccactatcttgcaaaatccctttacaagatctgaaccacaccaggacaacccttcctttgtgttcagaattctttacaacaagagaaccttggtctcttaatc

SEQ ID NO: 242486 - DNA, 414 bp, Glycine max
ctgagcagattctatcgacaataactgtttacttggatgttcgatatagtcacgtaatatatcgagtcgctcgacatagaatacacaagctgtgagataattctgacgacaataactatctactcggatgtacgattgagtcacgtaatatatcgagacgcccgaaattcaatacagaaactctgagcaaattctaacgacaataatcttttacttggatgtccaattgaatcacagaatatgtcgagacactcgccattgagtacacaagctctgaggagattcagatataaataccctttgactcggatattcgattgagtgccgtaatgtatcgatacattcgaaatagaatacagatgctgtgagcaaattctaatagaaataactttatactcggatgtgcgattgagt

SEQ ID NO: 242487 - DNA, 443 bp, Glycine max
  unsure (1)..(443): unsure at all n locations
agcttcgttaatgattatgcatatggtctggtactaattcaaatttattaattccttttcttttgttatatatataccggttacgttataataattgttttaggcatgagggaactatagttagatatctcacagtaactaaaaaagtggttaatatacttctcataaaacttaagcaaatgatccttccttgaagtagctnttggaaaggaattaggtttggttcatttctaaagatatatatatatatatatcatangtaaaatttattacgctctgaaaaaaaatggcatggtgttctatactactttttttttgaacttcagccattacaaaanaacgtcatttgaatatgttacatggcttcgatatgaatcaactcatcatgagtactacattntactattatcactttatgaagtcagtattttatccccatttta

SEQ ID NO: 242488 - DNA, 442 bp, Glycine max
  unsure (1)..(442): unsure at all n locations
ttggctgcagttgaattggcttgaaccttgaagcttatgaaatntttatagtatgatataatgtggcatgacaaagttaacttttttttccaaataaatttgagcaaggaagacagctttactttgatctaatgaatttcaacacatgattagtttaagattactataatctcattagttggtgttgataatgattgctgctttagtacggagttgatcaaggaatttcagacagtgaagattacattttttttttgaaggagtgttgaaacctgtttctctgcttttggaatcctatactgaacttttgtctttatcttttgctgtttggaatgttagtgaagaacattagatattgttttaataattggcatctgttatgcatatctgaggagaatatctttaagacactagaatttacatggtctctcacttggtaagt

SEQ ID NO: 242489 - DNA, 437 bp, Glycine max
  unsure (1)..(437): unsure at all n locations
agctngctgatctggagagntttgttcgtcaggtatgatgtaatcacttcggggagctaaatntaattagaaattctaaatcctcgtacaagtttttcctactagtccttctactgattaaatgaataaaatattgagtttttttaaagatatttaatgtactttttcatttattacttgagaatgaattctctcatgaggaaacttagtaagtttaataattattcactagttntaattaaccacgctccatctatttatacttatgaagagagagatacaanaattcaacctatgtgaaattttgacatgagaggatctattcctcattntctttacatggggtataggaaagctaacacggatagngntntatcttactcataatatattatttgaaacccttgggtgtgcttaatacttggncgaataaaatg

SEQ ID NO: 242490 - DNA, 363 bp, Glycine max
  unsure (1)..(363): unsure at all n locations
gcttttccaccaccgcacgcgtaacagcaccaacactttttctataagtaactcatattatcaacgttaagagttcattatttcatgtatgcatggctaatatgaagaatcttccgctattatacataataataataatacaaaataaatatacattctataataaaataatttaaataactcctagaagtatttacccaccaagacacgaaaatgaactccagcaggctcaacagggaagttcaaaatattntagcaccaacgatttcgctataagctctggcgaaacaaggaacaaggaggaagaaggcaatattttaacacccaagcatcacgaaaatggcgcgttaaataagcacacac

SEQ ID NO: 242491 - DNA, 410 bp, Glycine max
  unsure (1)..(410): unsure at all n locations
gtcacctgccgcatgcaagcttgtaactctnggcaatttcttagtcacttaanaagttatgactttngaaataatcttcagaaacaagtcacttgaagaattgtgacttttggaaatagtattttcgaaatcagtcactggtaatcgattaccattgaggtgtaattgattacacatcaacatatgtgactcttcattntgaattttgaaaatcttaaagtttaaaacactagtaatcgattacagcttttgtaatcagntngaaaaacaatgcaagctactagtaatcgattactaccttctggtaatcgattaccagagagtaaaactctttggtaaaagatttgtgaaacttcatgtgaactcaatggtttgaaaactttttagtacttatcttngatgagtcttct

SEQ ID NO: 242492 - DNA, 225 bp, Glycine max
tatgctgtacacatgtattataaacctcctcagccgcgaaacctacagcaatagaataatcatgacctttaaagcacttgatactatcctagttggaggaatcatcctaatatcagatgggctattccttcacaaacacaacagtatatatctccttttctgaatgctgctggtccacgcaagccatatagttcttcttcaatgcagcaattgcaggaacaacaa

SEQ ID NO: 242493 - DNA, 199 bp, Glycine max
gcaagcaattaatggggcaaaacacacctaatgattatgattatggatggctcaaaatctcacaaatgtaaacctatcactttctaattgagccttcacaattatcatgacatgtagaggaaaaacaaggattgtaaattacaaaatgtcaacagatttttatcttctgaacgagtaccaatcccttgaacatatccta

SEQ ID NO: 242494 - DNA, 268 bp, Glycine max
atatgtcatatagtgttgataaaaatgttcaaataagtcaccagaattttgaattgcatcaaataataaaataaaatttcaaataacttaatgcaaatccaactgagaagataagaacggtagtagcttttaagctagttcatttctcatgagctatataaaataagcttgtgaaataataacttaatattgtcaaagtaacttataaagtgatcaaatgagcttatagtggtggttgtttcgcccataatattaacataattattta

SEQ ID NO: 242495 - DNA, 488 bp, Glycine max
  unsure (1)..(488): unsure at all n locations
agctcgcgccgagaaggaatgcacggagganatgcttaccacctcgaaagactggaaaacggtttctaatgactcctctgcggcctccacatacggcatagaggatgggcagctcaccaagatgtcttcctcgcctgatacgatgaccagatgcccttccactatgaatttcaacttttggtggagtgtagagggaacaactcccactgagtggatccacggacgccccaacagacagctgtaggggggattaatgtccattatatggaaggtaactnggcatgtgtgagggcctatctgtactgngagatctatctctcccctaacctctcggcgggtgccgtcgaaggcacgaaccaccatngaactcggctttaagtgggacgcattgaatggtaatttctccaaagtgctcttacgcatcacgtntaaactgggaacattatcgataacactntggctatgatatggtccatacacttgactga

SEQ ID NO: 242496 - DNA, 467 bp, Glycine max
  unsure (1)..(467): unsure at all n locations
gtactattattttgtatacacagtttctacattaggaagccttgaaaataagctgaataattatgataagtaggccattatgtcacaactaagccttctaatctgtctttctgaacaaggtgctatttgtataaatgtctggcttgtttgtcacgtttagcttatgcatgtacttatacaccaatttctagagattctgcgaaaccatgaataataactatgactgcatagctatgccatgtaaatttacaatgtagttgttggatttcctttttaaagttattagtttaatttatgcatctattttgtttattggaagatgtgtatgtatgtcaaatcgggttatgatatcatatacatgatgtgtggaatacatntgtaatttcataaatctctcgtgatttcatctgatatatntgggatggaacatactagacttttaatgatgatcatttttatatgataag

SEQ ID NO: 242497 - DNA, 567 bp, Glycine max
  unsure (1)..(567): unsure at all n locations
cccttgatcactcgacncccgatcctcttagtcacctgaccgctgcaagcttgtatagttctccaattatggntatttnggagtaaattttgtaattaaatcttgtttatggggtaacgtggctctagaacatctncattggatttaatgatgaaatctatgcattttcaggtgaaaaagaagcttagttttaaaattgcaaaagtagcagttgggctaagcgtaaatcaccgctaagcgcagcttcagcgcgcttagcgcaaaagagaatctggcagagcatcagcatcaaagctgcgcactaagcgcgagatcagtgcgctaagcgtagcaggttccttcagctaggctaagctcgagactgacacctagcctaatttcactttactcgcgctagcgtganggtgggcgctagcgtagcgtcgcgatttcagagtctatttaaagtctgtcttgtgcaaaantanggtacaccttttatgccaccttttangacataattccagagcagccacaggcctatttggngaaaagtgcccttaagcaganaagaggacaacttgtgat

SEQ ID NO: 242498 - DNA, 281 bp, Glycine max
  unsure (1)..(281): unsure at all n locations
cactaacaaaactggacaaaagaaacacatattccaatccaaattcagttgaaataacaagaacaaaaaatagaaagaaataaaaaatatataaatacgaaccaaaaatgaggataaaaggattggcatatccagcatcaccatgaacaaaaaatcgaccacctcgtcaccaccaccacaaatatcgcaccttcgccatctcagaattncaaagtcgtttcttaccccaaacctgtcttcaactccgatgattccatcttcgacttctttagaaatgtcat

SEQ ID NO: 242499 - DNA, 424 bp, Glycine max
  unsure (1)..(424): unsure at all n locations
ctataaaagaggaagaagagaaggagaatagacaccaaatattccagagaatacaattccttatagaaggtaaaactagaagcaggaaaatcaatcattaggaagtattccttcccttcattccctttcttacttacccccttcactactcattaccctcttgcaatggtaaagcatttcatgacaatgagatgctaaaacctctcttggttggagcttacaaccaattgcttttgatgaattactcttctatctagtaatgtatttaatttcatggctttttttcgtgctaatttaatgatggnggttgatcaccatattatggaagtttaggggtgcatgagaatgttatcttaaaagactaaaaanggatataatcatcattatagatatatgatttattagctatatacatgctattcta

SEQ ID NO: 242500 - DNA, 396 bp, Glycine max
  unsure (1)..(396): unsure at all n locations
atgcatgctaagctataagctctacaactgaataacacttggactcttaccattcttcctcctcacaaaactgccattgggtggtcgtgggtatataaaatcaaataaataaatgatgggtctatagaaagatacaaggcacatttagtcacgaaaggatacacttaaacagaggggtttggattatctcgataccttctcgccagttgcaaacctcaccaccattcatctncttttctagctntggttgctttccatcaatggcatctgcgacaactcgatgtgaataacgccttccttcacggtgagcttaatgaagagggttacatgcatgtnctctctggacttctagtcacaagcccgaaccacggttggtcgcttcaacgatctctatat

SEQ ID NO: 242501 - DNA, 529 bp, Glycine max
  unsure (1)..(529): unsure at all n locations
cgctgtccttcgacntgtgatctcgagtnaactgccgcatgcangctnntatanaagagatgacccagagggtcacggtgaactatctcttcaatggtagggagggaaaaaaatcaaaggagctgaattggagcacgttgaagaatactggaccacacgcctgggcttaacgcatgctgtgtgacttaacacacacctttagcgtgaatttacgaaaattcctaatttttggttatttgagtaatgggcttgagcctgatgtgaatagaccttatggttacttgttgacaagtgtccaattcattttaagtagtaaaagacctggaagtccgagtgtaaattcaagggactttggttgacttaagtgatgcaacctcattttaagcatgagagaagtaaaagataagactggagtgtgaaattgggtctagaaaagaagaataaagataataacatggttaatgcgaagagaatcagatgtgatatatggactacatgcaaactctatatgcatgtatgattcttatat

SEQ ID NO: 242502 - DNA, 490 bp, Glycine max
  unsure (1)..(490): unsure at all n locations
tgaagcttaaggaaaagcttgaagaagttntggctttcacatgcttaactcccttgaatggcatttgtattggttgttatcttggttgttgcaccttagtatatttgatatttgttttgtattgtgcatcatcatagtatgtgtggagacaattttctaagttagacaaatttctttagaggcaaaaacactctattttaatcgattacaacctcattgtaatagattacaacaagttgtctgaagcttgtagagttaagtcccatatcggtttaatcgattacggcaatattttaatcgattacaccgctgtttgagataatgactgatttattcaagggtctccgctctaatcggttacaaagtggattaatcaattatttctctcttgtttaagtgttcagaggtgaacaagaacactntaatcaattacttaagtcatctaatcgattacattgttcttgagtttgtttcaaatgttggataacac

SEQ ID NO: 242503 - DNA, 448 bp, Glycine max
  unsure (1)..(448): unsure at all n locations
agcttctttggcatcatgttgatccgaaagaaccttacggatcaacttgatccgtanaatgtatgaacaacgtttacggatcaagttgatccgtaacattcacgttcaatcttatttttttaaaaatgctaaatattacaaaaatatcaaagttaagtatactctaagaagaccaacttcaagctcttaggcgtgagtttacaaaagctcanaactatataaaaatcttaaattgtctttcaaggcatggagcaaaaaaccatgatataaaccttacttaagagatggagtctactactactctaaccaataatattttgtttcaagataggatagtttagtgtgcatttgtttgaaaggaaagaaacaatgtacaagggaaagtttgtactttgttttgtcggatgcacatctctctactttaattcaaaagaatatcttctatttc

SEQ ID NO: 242504 - DNA, 386 bp, Glycine max
  unsure (1)..(386): unsure at all n locations
agagcttatcgaccatattntattcctttattttcacgtgacgacctacaataatggctggtatattcttccttttgaaacagcaaaatagtttagagattatgagcggtnagaaagaaatgactccgaatagagttgtgaactggccattcaggactctatagtgaggattttccttctaaacctaattattgtgaaaagagaaagaaatgaaaaaaaaaagaaaaaaaaattaccatggtttttgttatttaaatcattactattaaaccagtcattattttggggacgccacaacgtgccctcttgcgggcaagcgaaggtgaggctcacgggtgcgctttccaaaggaggaaagatgcgcggagtcaccaccaacgtttatt

SEQ ID NO: 242505 - DNA, 381 bp, Glycine max
  unsure (1)..(381): unsure at all n locations
agcttatccaganatcgaagcactatgatcttctgctgaatattaggttgagaaacattctctaggaccctgagaacaatcatagggaaaaaaactccaatttctgccttcaatccagctctaaatcttgacaccagactgatgaaaatggagcatgacagttgaaacacaatcaaaagagttgaagcactgttcttcaacaaggatagacataagtactgcttgatggcgcctaaaaacctgctcatccacaaccaaatttaaccatcaggactatttttgtcatctggaaaaattatgaagtanaaaaaaaatatagtgtcaagtggtgtatagaacaaagaaagaaaatgttaatttgcattaatgatgagggacaaa

SEQ ID NO: 242506 - DNA, 456 bp, Glycine max
  unsure (1)..(456): unsure at all n locations
tatntaaacaatatataattgatgttntgtagtctatgatcaatgtacacatgtaacatgttatacctttcatcattcttccttcactttattcttatattactcttataaaatttatacataatgcttattttttatcaactttagtcgagtgatcagcctctaattttaaaaaatttccttacaaatatgttgataaataaaaaatattttaagttatacgaaatctttttatcttctttaataaaaaatgatataaaatatctttttgacaattatatttttaaacttagtttatgaaagaaataatttatttaaatatttctttaatgatttataaattggcgcaacccgtgaatgtgtgtctagttagttttaacagtcaaatacacgttctgtagtattaccacttaccagtgtaaatggctagttcctaaaaattctacaatacacttt

SEQ ID NO: 242507 - DNA, 475 bp, Glycine max
  unsure (1)..(475): unsure at all n locations
agctntctgaaatntctgaatgaagagagagatattggctntntaananaaattattttcttttcctattnttttttctcataaagcactctccacttgtcccattttaagtggagcaataagggcccacctttntcccttgatttgacttcatactcagccacaaaggagaaaaaaaaactgaccttntggatgttgtaatcctgtctcggtttgcatgccgcctctctggttccaattcctcgcgtttctatgcacccgttggggcccgttttcgaaagttggcaatatatatatcanaacgctcagaatgagaccctgagcgtggttcagagggtggtttcnngtaaatttaagttccacgccaaatggataattttagactaattcattggcgaataatctataactggtccagtatgggatactcttcgttaatagtctaacccgcgtatctttcccccatgtacatact

SEQ ID NO: 242508 - DNA, 395 bp, Glycine max
  unsure (1)..(395): unsure at all n locations
ggccacccagcttgcccaggcgagctaggttgcttcctccagaatgcaccgccttttggaggaacttcctggaaggcccaagtgggcctggttgctatttgcaccccctgtttactaaatacacccacccgcctttttttgctgattctttttccgtaacgttacggaactttacgaattccgtaacgatacttgttttctttccgtaatgttacagaaccttacggattacgtaatcatcccttttttggctttcagaatgttacggaacctcacggattntgcaacaatacttccttttgatttccggcatgttacgaatcttcacggattgtgcaacaatgctttcttttgacttccggcacgtcacgaaacttcacgaattgcctaacgat

SEQ ID NO: 242509 - DNA, 419 bp, Glycine max
  unsure (1)..(419): unsure at all n locations
agctntagaagaccgtggaattagccattggtgtgtggcctgtgatcttctgtggactagttngacccctttgcttgacaccatgtggcccaagtactccacctgngtttgggcgaaggaacatttcgagagcttaatgaagaactggccctgcaacaaaaccttgaaagccaattccaaatgaagtaaatggtcattgaaggagctactataaattagtatgtcgtgatgtggacatcaaagcccaagcccatgacaaccaccagccccaggcccatgactagatggaagcccaagacccaatacaaggcataggaagacccatgacaagagcaagagctaaaaaggcacaagatgctttggacatatggtgatattctgagggtagtcaaatgcanggagaggccaacacttggagt

SEQ ID NO: 242510 - DNA, 390 bp, Glycine max
  unsure (1)..(390): unsure at all n locations
ggagggagaactggatgccttggtcaacctagtaactcagcttgccatgaatcagaaatctgcatctgcacctgttgcaagagtttgtggtctatgttctatagcggatcaccctgtggagcgggagcatctttaatgaaataatctggagncaangagcaacctgaagcttatgctgcaaacatttataatagaccccctcagcagcaaaaccaacaacaacaaatacaatctaggttggaggaatcatccaaatttgagatgggcaagtcctctacaacaacaatagcctgtcccttatttccaaaatgttgctggtccaagcaagccatatgttcctccctcaatgcatcagtagtagtaacaacaacaacaaagacaacaagcaac

SEQ ID NO: 242511 - DNA, 433 bp, Glycine max
  unsure (1)..(433): unsure at all n locations
agctntaagtttctgcacacataggagaacagtacacattgaattggcatgttatcagcaaataaaatccaataaatctataattaggtcaattaanaatgtccctttatgcatagacccacccaaaagcatgggtaattactaggtgaaagctcatgaatgcatagacctaccacctactttatgctaaaattcaatagttaatcataagagggtaacaaaaagataagcatcccaacttaactntgatatcatgcaaaaaaaccaacatttcaattatatgttaagctaccagacaacagataaattaaaaaaataaaaagtaaaaaagagctacttttaagtttctacacacagtagaacagtacaaataaaataggcatgctatcggccaatgaaatgcaatanatcttttaatcaagtcaattaaaat

SEQ ID NO: 242512 - DNA, 432 bp, Glycine max
  unsure (1)..(432): unsure at all n locations
tccatcaagtggtaatcagagcacaagagcttcaagtaggtgctccttaaacctccattgngtttttgctttaccttctcttccattgttgtttcttcatttttctccatgtatctcctcacatgtcttgtgctaaatgttgttaacatgattctttagagtttccaccaattaaacttgctatggaagctatatttgattttctatggttcaaatttattgttcttgttcttgaaccatgaattgtgttgagtttaagttcctttgagttttgtcttgttattttttgtggctgaatcctaaaccataaaattcttacaaaaatattaaagtagaagaaaacctcacaaatctagagtgacttgttcacctattgtagttntgtcatagaagtcatgtctagtcatgaaacttgtcacataagatttctta

SEQ ID NO: 242513 - DNA, 328 bp, Glycine max
  unsure (1)..(328): unsure at all n locations
agcttatcattacacagtagcaagtagctcaaatcatttcactttatatgattaggcactttcaacaagataggtaattntggcttacatgcacctttaccattgcctatgttaataggattacgaaaagcatggcatgcatctcaaccagatgtttaaaattaattaatgataaccgtataacaagaagcagaatcttggcaatgaaatcagccgcagcaaagaaaaggaaaaccaatcagatcccacaaatagttaagctggtacaacagaattcattcgacttcataaattaaaaactatcgcaaccatttacatcacaatacct

SEQ ID NO: 242514 - DNA, 371 bp, Glycine max
gtctgcgccgggttaaagtcctacaacgatactcttcaaatattaagagccttgtgcagctgaagaagcttaacctactggggttaaagactcatgattgtcacatgttgatgcaacaattgttagccgtggtcatacgagacatattgcctaacaaagtcaggttagccataactcgcctgtgctttttcttcaatgccatgtgtagcacagtccttgatcctgtcaagtttgatgacctggaaaacaaggctacaattatactgtgccagctggagatgtattttcctcctgctttctttgacatcatggtccacttaattgtttaactggtcagagaatcaaatgttgtggtcctcgttatctgtgct

SEQ ID NO: 242515 - DNA, 219 bp, Glycine max
ccccccccccccccccccccccgcccccccccccccccccccccgggccccccgggcggccccggcgccccacataatttccggccgcccccgccccccccccgcccccccccccccccccccccgccccccccccccccccccccccccccccccccccccccccccgcgcccccccgccccccccccccgccccccgcccccccccccccccccccc

SEQ ID NO: 242516 - DNA, 170 bp, Glycine max
catgcaaacttgttccacttgcttcatctatatatcctcttcaagttctcacggagtaactttcaatactataacaccacgatggcggacagtaattgggcgtaaacgcgcattgccctttttgtctatgcgggaggtatccaacagctatactatccatcgttacacat

SEQ ID NO: 242517 - DNA, 316 bp, Glycine max
  unsure (1)..(316): unsure at all n locations
tactaatggtctcccttatgggacagntgagatcaaaagcgactccacaaaccagagcttcaaggtcaatggacaccgacttaaccctttactcacaaacccttctttagtggacgtaatggtggaagagacttccttactccaccctactcttcctctaccatgacttangcgagttttctttcccatctccttctttacttttattacattattcccattctatttgatgatttaatcgcttttaatcttctaatcgtgccacattgacgacaatgtgctgtttaagtatgacgggggggggacctaatccgac

SEQ ID NO: 242518 - DNA, 499 bp, Glycine max
agcttcgattggtgaaaggtatgttgctgaagaatctcttaagtattgctcgcagtacattgaagctgctaaatctgtcggggtacctaaacctcgtcatgtggcgacactagggggcaagggtacacaaggctacaatgttgtgacaatgactcgccacgagatctcacaagcacatctatatatattgaataatgcagcagaggtcattccatacatagatgcccacaaaaaagaagtcaccgcacttaacccaaaattcaacatgatgagggttttgcaagagcacaacagaactttcatgaagtggtttagacacacaatatttgctgatgaggctacttcgaaaacattacgaaatgtagctcttgggccaaatctaaatgtttcgacgtggcaagggtatcacatcaacaattattccttctatactaagtcccaagatgagaaaagctcgatgcaaaatagtggggcgactgttgatgctgattcggatcac

SEQ ID NO: 242519 - DNA, 496 bp, Glycine max
  unsure (1)..(496): unsure at all n locations
gcttatttctcactggtcctggatcaattgcatggagaaaggtctccatatacattctaatcaatggtcgtcttgcttaaaggaggaaatagtcttatgggtttttgtgtttgggtaaccacctatcgtggttaattntttgtaattggggatggcagattctgccttgtataatatgttttttcagtacatctagtactgacccctattaatactatcagatttttgctgtgcaaaaaaaaaaaagagttaagtacaattacactatattcataatcaagtttcagttttcacagtattgaagcttttgaaaaaatattgaaataattttctcaattcacaacaaaattttattcaccataacgacaatcttatnttttntattcttccatttataaattgtttttcatctattatttgaaatacggtaagctcacaatatgaacctgacaccaagatattgtgacccaatttgtgtatagaatcagtgtatata

SEQ ID NO: 242520 - DNA, 212 bp, Glycine max
ttcatggtagctaagccgaattccttacggcaatgtgagcgctaagcgagtccttatcagctaagcgcatgctcctctgtacttaagatgcatcattttagctaagccagccattgccttgcttagcgagagttgcaacttttcggatctacaaacctcgctaggcagtcttatcctagcgctaagccaagcatgtgtgttaaaaaaactga

SEQ ID NO: 242521 - DNA, 430 bp, Glycine max
  unsure (1)..(430): unsure at all n locations
ccctctttttcctcttctctttcaccaatattaagtagaataggcttactcaaagttttaggaattttacggaagcattacgagagcctcgaaagctgcggaacattttattttttttatgnggaggagctttataagttcaccccctcccctttgctaaatgcactcctttntattttcacacccctgtttactaaatacactccccttttgcttttttttttttgctgattctttttccgtaacggtacggaactctacggattacgtaatgatacttgttttcttttcgtaatgtcgcgaaactttacggattacgcaaccatcccctctttgacttctggaatgttacagaactntatggattgcgcaataatgctctctttcggctncgacatgttgcagaacttcacggattggctaacgatgg

SEQ ID NO: 242522 - DNA, 491 bp, Glycine max
  unsure (1)..(491): unsure at all n locations
atcctctaagcacctgcggctgcagctgctttacatgattctgtttgaactgcctgcttattgaacaagcctttaccaaatgaacaagttccctgagttcgatactccattcacaccgttttaattatttacttgacgactcagtgcacttgctggtagattntgcatccacacaaacaagtagtatcccggagagcgaaacaagtattntggcgccgttgccgaggaactttntccattttggaaagttagttcagtttgaaggcattaattcattattctttggattattaattnttggttntggtagtattttttgagttcagaatttattttcttcttcgaatggntaactactggctctattagtgtttgcatgcgtagatcttctgcaggtgaattggttcattggattagaaattgaagaaccttcagaagaacaacacagagagaaaaagaaaagctttgacgatagaacagtagcatcaatc

SEQ ID NO: 242523 - DNA, 376 bp, Glycine max
  unsure (1)..(376): unsure at all n locations
acatgagttacatgaatgccgtaaaatgattgggtagaattagtctaattggtggttaaaattgctacaccatgatgaacacattgcacctagattggtgtagagtgttaatttctttcaaaataatatgcactgagttgtgatttgttttattagttgcatgataacacatgcaattagcaaaaagaaaaaaaaaaccccaagttgattgacttcttgcttgcttangataactgacataatggttgcgtatttcatgtaaactaactttttatggatgcgtcattgcaggcaatggctccaaagaagcttctcactaaaagggcaaggaaggatgccgcaagggagggatccaaaagaaccccacaagcagaaa

SEQ ID NO: 242524 - DNA, 433 bp, Glycine max
  unsure (1)..(433): unsure at all n locations
agctntgctgatttagttntcaccgacgaaaggatcatagtatgtgtgaaaagaggcatatttaatcatcatgctttcatgaaaaaaactggngcaagtaaagagggtgagaatgagggagaaacccatgctgtgactgccattcctatacagccaagtttcccaccaacccaacaatgtcgttactcagccaataacaaaccttctccttccccaccacccaattatccacaaaggccatccctaaatcaaccacaaagcctgtctaccacacaaccaatgctaaacaccacctttagcacgaaccaaaacaccaaccaaaaaagaattntgcagcaaaaagcctgtaggattcaccccacatttcgatgtcatatgctaaacttgctctcatatctactcgataattcaatggtagccataacccctgata

SEQ ID NO: 242525 - DNA, 465 bp, Glycine max
  unsure (1)..(465): unsure at all n locations
tgatgataacaatgatgacaacaaaagattatgacaaaggtgatgaacaaaaagctcanagatcatctcaagtgaatcaagaacaagtcaagagttcaagaatcaattagaattcatgactcaagaagaaagcttagaatcaataatcaagattaaagattcaagatctcaagaatcaagatcaagattcaagattcaagaatgaagaanagactcaatcaagataagtattaaaaagttttttttcacaacattgaatagcacatgagtttttgacaaaacctttacgaaagagtttttactctctggtaatcgattaccatattggtgtaatcgattaccagtagcanaatgagtttgaaaaagttntcaaactgaatntacaacgttccaattattttcaaaaggctgtaatcgattacaatgatgtggtaatcgattaccagtgccctcgaacgttgaaat

SEQ ID NO: 242526 - DNA, 395 bp, Glycine max
  unsure (1)..(395): unsure at all n locations
agctngngctctngcctcactcaccagccttttggtttcatttctagctatcttatacttatcccaaggttcagaatttctacatctagaccactccttganacactccttttttactctaactttgctctgaacattttcattccaccaccacgattctttacccctaggtccaaaacctctagattcacccaacgtctctttagccactttaataatctcttatctaccaaattgtgacatccgcgtgaaaagttatgaccatgcgaatttctcgagtacttccattgtgcaatatcgagcctctcgatatattacgtcccacattctgacatccgtgtgaaaagatatgaccattcgaatttctctagagcttccgctgttcagtttcgagc

SEQ ID NO: 242527 - DNA, 379 bp, Glycine max
tgcacaacggaagcactcgagaaattcgaatggtcataacttttcactcggatgtccgattcgcgggcataactcatctagatgctcgaaattgaacatcggaagctctcgagaaattcgaatggtcataacttttcacacggatgtccgaatttaggacataatatatcgagacactcgaaattgcacaacggaagcactcgagaaatttgaatggtcataacttttcacacggatgtccgaatttgggacataatatatcgagacgcttgaaattgcgctaccgaagcactcgagaaattcgaatgatcataacttttcacacggatgtctgatttgcggacataactcatctagacgctcgaaattgaacaacgga

SEQ ID NO: 242528 - DNA, 455 bp, Glycine max
  unsure (1)..(455): unsure at all n locations
agctngaactgtgaacaaagcacagcctaccagtatggtgaaaaagaaattgaatttcaatttaattatgaagactgacaattgtaaagaattgagcccctaaacaattgtccatagaggcagcaagcaaggatcaactctcttaaaaacttaaacatctaggcctagtgcagaacctaagcattgagccatggccttgaaaaccatcaaattatatggctaaaacaactacaatgagctaaagtttggtcaaataggacaaattatattgctttcccttctttaacatgtatatattaatgtatntttttcatatattctagcatgcaaaatcttgtaaagatatgcttgatgaaaatgaaaaaaccataatacataaacgaagttcttgagtagcttaaatgtctattcttgatactagtgtcaatggatcctattctattcaacttacaact

SEQ ID NO: 242529 - DNA, 441 bp, Glycine max
  unsure (1)..(441): unsure at all n locations
tggcattggaatggcgaaagccccactccatcattaggattagtacctgacatctcanacaaacaaatcaaacgtaacaagacaattatagttgctgtttgaatacctcacccactcaagtgtatcacacaattatggcttttctctaatgaaacactcttgccttttaccactctaattccccttgagttcttaggtaattcaagagattatggccacaacaaagaacaattcaccaatatgtgtaaggtaaggctagagagacaaggaaccaagaaaaatgctaacaatgtttttaggcacaaatgaaggaaataaaattcagaatttaggaattcaagtaacaatccttcatgcaaccaatatattaccttatagagattnttttttaaaagttcttcaagcatgaaccattcagcccaattntatttttttntttta

SEQ ID NO: 242530 - DNA, 306 bp, Glycine max
agcttgagcaaattcaaacgacaataactgttaactcggatgtccaaatgaaacccgtaatatatcgagacgctcgaaattgataatagaagctcatagcatatgcaaaccacaataacttcttactccgatatccgactgagtcccgaattatatcgagacgcttgagattgaaaacagaagctctgagcaaattcaaacgacaataacttttaactcggatgtccgattgagtcccataatatatcgagacgctcgtaattgataacgaaagctcgttggaaagtcaaaagacaataaatttta

SEQ ID NO: 242531 - DNA, 388 bp, Glycine max
  unsure (1)..(388): unsure at all n locations
acgacaattactttntactcggatgtctgaatgaatcccgtaatatatcgagacgctcgaaattgaaaacagaagctcatagcaattgcagacgacaataactgtgagcggcggaagataataaatatttccgcnanacaccgagacgctcgaaattgaatacaaaagctctgagcaaattccaacgacaataacttttaactcggatgtccaaataaaacccgtaatatatcgagatgctcgaaattgaaaacagaacctcgtagcaattgcaaaccacaataacttttaactcggatgtacgattaagtcccgtaatatatcgagacgctcgaaattgaaaacaaaagctctgagcaaattcaaacgacaattactttttactcgg

SEQ ID NO: 242532 - DNA, 428 bp, Glycine max
  unsure (1)..(428): unsure at all n locations
agctagaagaggatgctntaatggagganaagatagagagaaggagcttcaagttaggatgctntaatggaactttgaagtgtgtctcataagacttttatttatcaaagctacaacaagtgttacacatgcttctatttatagactaggtagcttccttaagaaaacttccttgagatgcttctttgagaaaacttccttgagaagctagagcttagctacacacacccctctaaaagctaagctcacctccttgaaaagcttccttgagaagctagagcttagctacacacacttctttaataactaagctcacctncttgagatgagcagctagagcttacctacatacccccaataatagctaagctcacccncatgacaaaatacatganaatacaaaanagtccctactacaaagactactc

SEQ ID NO: 242533 - DNA, 415 bp, Glycine max
tgccacccagctcgcccaagcgagcagggttgcttcctccagaagcaacaaccttctggaggaatcttctggagggcccaagtaggcctggttgctatttgcacccccatttttactaagtacaccccctaccttttttttggtgattcttttttcgtaaagttacggaaacttacgaatttcgtaacgatacttgttttctttccgtaatgttacggaaccttgcggattacataatcatccccttttttgacttacggaatgttacagaacctcactaattgtgcaacgatgcttccatttgatttccggtgtgtcacggaaccttacggattgtgtatcaatattttcttttgatttccggcatgtcccggaacttcacaaatggcctaatgatgggtgccaagcacctcac

SEQ ID NO: 242534 - DNA, 376 bp, Glycine max
  unsure (1)..(376): unsure at all n locations
agaagataaaatctctgattcattccttgaaagtggttgtctaaatcttttattnttaaagaacaacacctcatctcanagagttcatcatttccaagccaaatacacatttatacttttaaatatattttttttattccttaaccagtatccttatgaacaaggaggatgaggcanaagagtgagggttgaaagaaatccaagcatgtcatgccagctcctgttcctcattggatcctctttgtccatttcgactgtcggctntgtcactagcaccgaattctatcattctgtataactgccagaatttntggtttgttttgttntgatggcananataaaatacttttattaatcagcaatagaaatatagcag

SEQ ID NO: 242535 - DNA, 489 bp, Glycine max
  unsure (1)..(489): unsure at all n locations
ntctcatattacttctccacaagctacattttaacctatgcataaactagttntagtttatgaactagttntagtttatggagaagcttatttcattttttcttttattttcttctctcataagtatttatggagagatttatccaaacaaaaataccatgaagaacataaaattagtcagcttaacctcaaaagtacaaagaaggttaagtcaattcataaactatcattatgttgtaacacttacaatttgtgtacaaagaaggttaagtcaattcataaactacagcagttaaatcatctcccccgtatatatgtttgactntgaatgccacattccggtccatgcaatgagtgagcctctttgtgatgttggagtttattcccagccaatggcatgaagctcgatcaggttggtaatttgactacagcatccattcactagcaatggcaactcgctgacactaatatattcttgctatatgactt

SEQ ID NO: 242536 - DNA, 421 bp, Glycine max
  unsure (1)..(421): unsure at all n locations
agctatgagccatactattccaaactaaaacttctgtaccaaatcgacgaaaggtgttggaacttggatacatactgatgcttttggtattgcaaaaaaatggaacatcttagaatgtggattttggtctaactcaaccccaaaagctatctcttatggtgagaggtgccctccacttatatactctatcttggtactatcgctagtcaatgaaggacttggattgttttcaatacaccccctcacgtccaagcacttttgagcttggcgtgtggataacatggtgggtgaccctttgaatggatctaggataggctctaataccatcttagaatgtgggtttaggcctaactcaaccgcaacagctaactcatanggtgagggtttcctccacttatatactctatcttccactatctct

SEQ ID NO: 242537 - DNA, 398 bp, Glycine max
tttaaatatatgattataatttattaaaaaatattattttcattattatatgctctatgtcaaatcttcaatcattctaaagaatataaaattatttttttaagggtttattttccaattcccacacatgaatgtatctatcaaatattaaattagtaaaaaaaatatttcaaataaatgatgagaaaattaagtactccaatatacaaactttaaaattaattaactcctttaaattaatgagctaaagttaagtttttttttttcttccacaattgaggctaaactctaaattcttaacacaactacactccacaatatcaataaatgtgttttaaaaaagatcataaacatcaatattcaaaatatctagggataatctctcatgcatcttaatt

SEQ ID NO: 242538 - DNA, 464 bp, Glycine max
  unsure (1)..(464): unsure at all n locations
gcttgtacacataactcggttggttggatatttataattacactagcctatatgactcanacaacaaagacactaaaagtagagaattacataccctgcagaagagcaagaatattaataattacactagccactgtgaaaatttcatggcaactaatttagtaactacttaaagcagaagagcaagaatattaataatcttacctcaatgccccctccaagaccttcaaatacatttttcagatttctagatgcatcccagacttgaacaattccatggaagcaccctgatgcaagaaactgtccatcatagttaaaatctaaacttgatacacaatctttatgacctacacaaaatcaatgacaaactcacgatggaaattcaatcaattgagagtaacatgacattaccaatcatgatgtcgaacctatcctaattagaaaaatacacatccagtagtagc

SEQ ID NO: 242539 - DNA, 439 bp, Glycine max
  unsure (1)..(439): unsure at all n locations
ctaagcttgactacccaacatggcgagttcaacatgctttcaacaaatttcttcacatttaactatcatgaagcagaaacctagcaaaactacccatcatatctcccaaaaccccatacccacgaacatcaagagagaaagaagtctacccaaacctgaaatttcgaggtcccacacgtagagatgcgcttcacgactctgaaaatgccttccttttgcgatttggagcagaagtgggcaccaaaggttggagctttaatggagtttcaatggaggatgaagaagaaagaaaatggcaacgtgagagagagaaaaagagctgtctaaaattatggggctgagtgaagagagagagagtgttgctttctggtttaaaaaggctntttctctcttctattantttaatttaagctatgccacatggtctcatttgagtgga

SEQ ID NO: 242540 - DNA, 421 bp, Glycine max
  unsure (1)..(421): unsure at all n locations
agcttggcaacatagttgacacggaagggatatctnctctatatagaagcataatatcatctgcaaaagtcaaatgagatagctgaatacatgcacaattgggatgaaatttaaaattggcatcatccttaagactgctcatatctctggaaaagtactccaaacaaagcacaaacagataagggaagagaggatccccttgtctaagaccccgctaccccttgaagtggccataaatggatccattgactgtgacactaaaggaaaaagggtcaacaaaaatacaccaatgaaaacatatttttgtggtgtaagtatataatagaatcatgttttttgtttgttaaatgatagcgaaaaagttatcgacggaaacaaaatttatntcatatatatacaaacatgtacaacgagtgaaatg

SEQ ID NO: 242541 - DNA, 353 bp, Glycine max
  unsure (1)..(353): unsure at all n locations
caggatcatactccagcattggttttacaaccctattgagagaagaataacagcactgttagtgcattcgtgtcattaaattctgaaaagattcagttaatgccatcaacaagaagctatttgaggtactgctgcaatcaaaccattatctactctcgcagatgttccattccccatgtttcttggtcacagtgcgatatcatagacacaaaaaagaggttgaatntggctctagacttggtcaagagtgaacgacacacggaaaggatatatcacattggtatgtggaaagaaacaagacagatgacggattccaaattttctaactgatagttttaataaaactaataaat

SEQ ID NO: 242542 - DNA, 284 bp, Glycine max
  unsure (1)..(284): unsure at all n locations
cgagtatgacagtcatcgctttatgagcgctgtgcaccagcagcgcttcgaggcccatcaagggatggtcgttcttcgggagcgacgcgtncagctcanggacgacgagtatacttgattccaggaggaaatanggcgccggcggtgggcaccactggttactcccatggccaagtttgatccagaaatagtcctttgagtttatgccaatgcttggccaacagaggagggcgtgcgtgacatgagatcctgggtaaggggtcagtggatcccgtttgatgctg

SEQ ID NO: 242543 - DNA, 436 bp, Glycine max
  unsure (1)..(436): unsure at all n locations
agcttagctcaacattggccagcttagcggaacaaatcagcctcagatgcaagggttgggcgctaagcgcttgagactcacaacttagcgcattaacagagttgcgcttagcgcgaggcttgtgcttaaggaaaggactatttttcagaaaaaagttttctgagttatttttcagtcctttttccaagaaattgaaacccttatgttaaacattcaaagaatggttgatatactcctatgtacagattatatagcangttccaaatgattaaatgcatganaaacanagacaacagaaattaaaactgggttgcctcccaggaagcgcttctttaacgtcattagcttgacgcttttacctcactgggtgatcttatgttttggttcttactttcaaaacctcttgacctcccttcattacctgtaaccaaacatt

SEQ ID NO: 242544 - DNA, 356 bp, Glycine max
  unsure (1)..(356): unsure at all n locations
gcttataagggcgtccaaaggtgactntcttctgaaacccacttttgggtggttccaattcctgtgagggatccctcctatgtttctcanacagattcctagcgaatattgtttgagtgattttctttgttttgcacttctgaagggttgtccatgcaaaagttagtgtaacctcagtggatggacaaacacgttgagttccaggtgctagtcagtgtggttgcatcttgatgacttgtgactgcattggacgtgtccactgaggaggctgtaaatgaactatggtatctaaaggaagagttgtaaaggcttcagatgaggtgtgtgaatagacatatcaagtccacctgtggagc

SEQ ID NO: 242545 - DNA, 383 bp, Glycine max
  unsure (1)..(383): unsure at all n locations
atcgaagtggttctgaatagaggaaaaattgatcatcctgctctgatgaatgggaagcctgnggcaaatagagaggatgagaataaggaagcaacccatgctgtggctgccattcctacatggccaaatttcccaccagctcaacaatgtcattactcagctaatatcaacccttttcattatgcaacacccaaccatccacaaaggccatccttaaatcaaccacaaagcctgtctgccgcacatncaatgccaaacaccacccttaacacanacccaaacaccaaccagggaggggatattccagcgaaaaagcctgtagaattcaccccaattccggtgtcctatgctaactngctcccatatctactcaataattcaat

SEQ ID NO: 242546 - DNA, 326 bp, Glycine max
  unsure (1)..(326): unsure at all n locations
agctttanacaagctaccaaacaaactataactataaactganatttanaagttgaactggaaattaanaactaaagcataaacataaaatgtactaaagaaagaataataataaagatgttcaaaatgcaagaaaataaagatcctgtcaaacatcctatgaatgatcctctgcatgctcgttcaggtccagtgctggtgcagatggtggatcctgagaaatangcaactntggcactggtgtagatggctctgcctgagaagatataattgaatcatcctcaaaaatgaaaggctcaagtggagagggctcagagatgttagta

SEQ ID NO: 242547 - DNA, 373 bp, Glycine max
  unsure (1)..(373): unsure at all n locations
ttcacttttcttgttccaacgcgagctctgaccactgttcttncttcccgcgatgcttcttttcatgtccgcctgagtgggcttatatcccaaaccatacttcccacgattcccatgggtttttatcagactagttatgccgccattgtctttgcctaaacccatcccgggttcataaccgttccccaacataactcgggccatcattaccgccgcctcggacagacaagggtgcccaaagagggagtctacggaggaaatgctgaccacctcaaaagactggaaagcggtttctaacgattcttctgcggctttcacataaggcatggaggatgggcagcttaccaagatatctntctcgcctgacacgatg

SEQ ID NO: 242548 - DNA, 479 bp, Glycine max
  unsure (1)..(479): unsure at all n locations
agcttctggaaggattacgtgatatcttaactagcatgaatgaatattacaataggaatattaatattgcttgctgccagtaaccgtatttgtcacgtagcacataccatgcatatgctggaatattctagacagcactaatgattagctctaaatattccctttgatatgaaataaagcaagcagaatatattcagttcactttccctctctctctcgctttattgctttcttcacggagactccctttcggtctcgaatacgaaggatattacccatcattggtccgacctgccgaccggcgacgccatggccgaacaccatacacgttccaagactaccgaccgcctggaagaggccatcagccgccttacccagaaccagtccacccttacagacgctcaccatgacctcacccttcgtctcgattccatccangaccaactactttaacttcaacttcactttccaccccacac

SEQ ID NO: 242549 - DNA, 422 bp, Glycine max
  unsure (1)..(422): unsure at all n locations
tatcagttgagtgggctccacttcaacagtcttatgtgggactntaagaggatattaaagaatatcttgaagataagttgaagcattccatttaaagaaacttgagcttggtctttgtgtcagaaatctacattttctattataaccctctctgttgagaatgaccaacttatgtattgaacttgtaatttgtaatagatctaagataaaagtaagaaactatattttcctaagtgtagatcctctatgaggtgaaaatatgtgtttgtgcaatctgaaaacacagaaaccctttttgttgttgaaagtgcaatagtgactagcattgttgaaatccagtggtgttgttggtctagtttgggctacgtttaaagtccagtgggagtactagcaagttgttgaaatccagtggttcactacaa

SEQ ID NO: 242550 - DNA, 464 bp, Glycine max
  unsure (1)..(464): unsure at all n locations
agcttatccatgcctccttagtggatgttgcatcanaaatcttctcgaacgcaccatcatctaatccttgatagatgaggaagagagctttcttgtctctctttcttgaatccttanaagtctattnttgtgcttggggtagtgaagtcactactagaaaataaggttttaacattggttatttaggactttcaagatcggttattaacaaatgttgaaagtaccgacgttgaaagtattaacgttaacatcagtttttgaaaactgatgttaacgtaaaataacaacatcagttatttaaataaccaatgttatataataagaattacaaaaaanaggtatatatgttcataccaacgttgacagttaacatcgattnttcattcaaaaccgatgtaacttccanacgttaacacgtttaacatcggttttttaaaaaactgatgttagttacaaacgttaac

SEQ ID NO: 242551 - DNA, 485 bp, Glycine max
  unsure (1)..(485): unsure at all n locations
gggactagctagtgatggaatgaatccatatgacaatttaagcactcaacatagttcatggccagttctactagtaatttacaatttgcttccttggttgtgcatgaagtgaaaatacatgatgttgtctatgatgatatcaggcccaacacagccaggaaatgacattgatgtttatctaagtccgttgattgaagacttgacaaagttgtgggacgaggggattttagtgtttgatgggtttcagaatgagattctcaaatgtgtgcaatgctcttttgtaccattaatatcattctagcatatangaatttaagcagttacagtgttaagggtcatcatgcatgccccatctgtgaagaagacacaagctacatacaactgatacatggtagaaaaacagtctacactatgcatcgacgttttctaaaacctcatcacccttacagggcgatgaaaaagcattaatggaagtcagacatgaa

SEQ ID NO: 242552 - DNA, 409 bp, Glycine max
  unsure (1)..(409): unsure at all n locations
agctngtgggattatggggtacccgtcatatgtggtactatgtggcgatcgggcgatggtgcaaatcaactctcccacatccacaaatcaaacatgaacccaccatgcccagttgcccaccttcaactgagctcacgtactcctacgtagcccttatcctcgttcctctcagcaccgggtgcccatcaacccctccaagcttgcacaatatccaagcaattcaatttccaaatatcatgaactaccctaaaccaagaaaacagggcagaggcagaaaactctgcccaaaacacattcacatattacaactttccttactcagatatcccagtaacattctctttggtccggttcgttaaccattggatcgacttgaaaaatttactggaggttcctagtacatacatct

SEQ ID NO: 242553 - DNA, 499 bp, Glycine max
  unsure (1)..(499): unsure at all n locations
nggaaggtagtcatacctcacanaatatatatatatatatatatatatatatatatatatatatatatatatacatatatatatatatatatatatatatatatatgtgtaggtagagagataccttggatatgcatgtatgtagcacaaaaaatttcacaaaatatatatatgtgtgtttaggtagcaagataccttggatatgcatgtatatagcaaaaatatctcacaaaacatatatacgtatgtgtaggtagcaagatacctgggacacacatgtatatatcaaaatacctcacacaaatatacgtatgtttaggtagagaaataccttctgaganaaaagagagcgagcgcgacaagaactagaagacaacaaacatagagagacatattatatanaaatatatacaatcattaacgttgtctagctacaaaacaacatgcgtgtgagaagagatactatcagctcttccttgaaaatgcactgatcataccg

SEQ ID NO: 242554 - DNA, 423 bp, Glycine max
  unsure (1)..(423): unsure at all n locations
agcttcttagtttcagatgatgcagatgggcttgtagctacctcatgcactcctctaatgactatggcgtcatttctggcgctaaactgttgggagttggaagccatcttctcaattaaatntttggcttcagcaggagtcatgtctccaagggctccaccactggcaacatctatcatacttctctccatatttctgagtccttcataaaaatattggagatgaagctgctccgaaatctgatggtgagggcaactggcacatagtttcttaaatcgctcccagtactcatacaggctctctccactaagttgtctaatacctgagatatctttcctgatggttgtggtcctcggaagcagggaaattttttctaagaatactctcttaaggtcatcccagctcgtgatggaccttggagca

SEQ ID NO: 242555 - DNA, 502 bp, Glycine max
  unsure (1)..(502): unsure at all n locations
ctgagaattcacccaagaggtttagattaatgcgtgaacttaatttgatatcatatattagatcaaacactactcattactagactaaaagatgtagctgatggtaaaaataaaattctgttaatttcctcaaagaattttagagttacaactaacttaagagtatggaaattaaattcatcatggagtactgtgagatgttaaattcatcaaattcttgttggaatcgcgttaaccaaattaaataaaatcaacacatcttataaagttttaaagtcaatatatagttgaaagtaaaaattaactgttgatcatattaagaattgcaaagggagaaagcatagcccttaaaagtctttntttttacataaaataaatagtaagtttagcattactactttctatacgtacattntacggataatttcatttgaaaaataatgctactcanaataaatgcatatatattaccattngctataaactattacaataattatgg

SEQ ID NO: 242556 - DNA, 343 bp, Glycine max
  unsure (1)..(343): unsure at all n locations
agcttcaggttgctcattaactccagatcgctgcanagtatgacaaagatctgcatggtgatctgcacaagaacatataccacaaactctcgcacaggtgtagagttctgattcatggcaagctgagttactacgttgaccaatgcatcacagtttccttcaagctgtttatttccagaatatgaagatgaatgcgtggccacctcatggactctcttaagaacaatagcatcatttcttgcctgaattgttacgagttggaagccatctctctatcaaatttctagcctcaacaggtgtcatatcaccaaagagctccaccactggcatctcaatcaatact

SEQ ID NO: 242557 - DNA, 346 bp, Glycine max
ctataatactcagctatgatgatcattctatactccttccacagtggtgcctcaacaccgaagcttgcatactacgcgtataatctgtagcatggagagacgtgggaaagaccaataacttgcaggtcattgtatggtttattttttggtggatacaggggattctagtatacatacagactacatacatatatagcacatatggtacattgatagtgggtctttcattgcttttgtttgctctgggtatagtttctttggctataaccacacgcatatttgcaagacgtactcgggtacttcttggatagcatactgtgtacttgggtactccatgtgcaacgtt

SEQ ID NO: 242558 - DNA, 131 bp, Glycine max
acatgctttagaaaattacaccccgacctgccacttattgcagactggtgtattcattaaacatctgccacatggagcctttacaacggatgatgacctatattcatcgtgttataccttgctgcttgtct

SEQ ID NO: 242559 - DNA, 402 bp, Glycine max
  unsure (1)..(402): unsure at all n locations
tattggatgctgannnattttgtacttgatgtgcttaacatatcttantttttcattctagcgcactgntaaggtatatcattagaaagatggatgtctcacgggtcacgaggttgctaacttacaccaaatatgctgtgtatggtcgtctctgtccaaagntggatggggaaggtgaatcgtgtaaaatactcagaacaaacttctgtgagttcccttaaccctaaagcttacatganagcttacacaatgatttttcactctaattttgctttttgcgatttcagatttgctgtcaagctagcttttcagtttcatgtcaacgttaaatatcttcgcatctactaacggtcttacaggnagaatgttntacctatatttgattataatataccttaagtt

SEQ ID NO: 242560 - DNA, 436 bp, Glycine max
tatagttagtgtcccagagccaccaactccaatgttaccaaaggaaaacactaattcagaggcactgtttgcgggattcattaaatgctaaaattggatacagtgaagttcattaattttctttatttgttcatgtagtatttgcaaaaggattttttaaaaaataaataaatgtacgtatgttttagtttaacattactagtaatttttaaaataagaaaccaaatgattaagtaatactaccactattaatgtaatgattttattcatttatttgtattaatatcacaactatatcaatttttaatctaaaatacaatatttttcttcctttccaaaactcccaaagtaataaccttgttttctcttccccgcaacgcttcaaccattctcttacagtgtccgtcatcttttgacgcgtggtggtataaatggc

SEQ ID NO: 242561 - DNA, 444 bp, Glycine max
  unsure (1)..(444): unsure at all n locations
cgagcagggttgcttcctccagaagcaacaaccttctggaggaatcttctggagggcccaagtgggccagattgctatntgcaccctcatttttactaaatgcacccccctttctatttttgtaattctttttccgtaacgttacgaaactttacgaatttcgtaacgatacctattttccttccgcaaggttacaaatcctcacggattatatattttactcttttttacctttcgaagaagccacggaaactcacagattgcgcaaaaacacctcttttcgacttccgccacattacggaatttcacggatcgcacaagcctgcttccttttgatttctgagacgtctcggaacttcatttattgcatgtcatcaagtaataatccccggacgaaaatagggtatgacagttgcccctctctacttacctctcatcggagat

SEQ ID NO: 242562 - DNA, 431 bp, Glycine max
  unsure (1)..(431): unsure at all n locations
caagtactaagaagaatcaaaactagccacgacccatgagcataaagtggcggacgaatatgcctgagtgcatgcggaaaaggaggctagaggaagggtgattgactcgttacatcaagagggaacgatgtggatggaccggtttgctcttactttgaacggtagtcaagaacttccctgattgctggccaaggccaaagcaatggcggacgcctactccgcccccgaggagatccacgaactcctcagctattgtcagcatatgatagacttaatggcccatataattaggaaccactacgaagttngtattgtcactcagatcttgactagttataactntctgaataaaatgagtttatctcgcgtttttactccaaaatcagtgcgaatcaaatcactcccacattttatctctggcatacattcat

SEQ ID NO: 242563 - DNA, 249 bp, Glycine max
  unsure (1)..(249): unsure at all n locations
aaagaaattcccgatcaaagatcggaagaaagaaaagaaaatccccaatccaagatttggagaaaacaaaagaaatatacagaaaggtctttggaccagacaatatctgaataacatgcagaattgtcacaaacaagaaaaggaaagaaaggaaactanggcttgcgacacatgaagtggtcccctttttattaccaaccaaaatcctttgtgtcggcaactctttcgcctcgcactanacacaaacag

SEQ ID NO: 242564 - DNA, 429 bp, Glycine max
  unsure (1)..(429): unsure at all n locations
tttcagtataaaatggggattatatcaccttttgcatattcaacatattatattggatccatcttatgaagtgatgaggatgcaacaaatacaattctagttagtggataaaataaataatgcttcaagcataacctgtgattgcagagtgggtatgaaagcaaaattggattggatacttttaagtctggaaatgctttaaagtagtgaatcttgaagagtaaagtgctaacaagagacaaacaaatgtgcagtggagaagagaatgttgagatggcgatgagttcattagacaacagataagattagaaatgaatgtattcaggagaaaagtggaatagcagctatccagttaagaagatagacacacattcatagcttattgttcanaaaacatgtaatgtgaactggttgcaatcttcatactta

SEQ ID NO: 242565 - DNA, 331 bp, Glycine max
  unsure (1)..(331): unsure at all n locations
agcttgtatggtctanaacanaccccaagacaatggtacaagaagtttgaaagctttatgcacaacgaaagtttctagaagtgcaacgccgatcanttgtgtttctttaagagatataaatctagttatattattttgctactttatgtcgatgttatattagtagttggatcagacatggatgaaattaanaacttaaagatgcggctataaaaaaaaattgacatgaagcacttagatctagcaaagaagatccttggtatgcaaatcacgaaagataagtaaatagggattttgcagttatctcaggtaaagtacatcaatcgtgttt

SEQ ID NO: 242566 - DNA, 481 bp, Glycine max
  unsure (1)..(481): unsure at all n locations
agaattcctctataataaaggttattacatcaatccttttcattttttggtggtaaggacggctntagcccatcaatcctttntctatatctatcatattaatgatccgggctcctttgaatattttacaggaaagattctatttcacctgtaatccgatttcgtaatcccgtgatgtgaccgttttatttcatataaattaattccttcttttatatgtgcacatacaagagttgggttagcggtttttttcttgtacaaaagtaaattaaaccattttcaccagtttagcggctntcgccaccttcttctacctctacaatatcccaccactgccacaatgccccctccacgtgtcacctcagggcgtcggacatnctnctctgtcatgttgcctctttntaccgtcatgtcacccaccacccatccaccatgcactacattattgtcgtcgtacattcaaataaccctctaattttta

SEQ ID NO: 242567 - DNA, 406 bp, Glycine max
  unsure (1)..(406): unsure at all n locations
agctgtatatatatgatacannaaatgaaattcanaacaaaattggtgcagtaagggtaatagtgtgttttgactctatttgcattaaatggctatgtgcatttttttattcaattgtgataccgttaaatgaatgactatatgcatgacatgttttaaacttgtgcaaggcaaaatatacttgattcacagctggtctccaagttaaaagaaatgtntgatgaacacaatatgnttgctaagtcttttaggatggccaaagatagatatgataactttcagacatagaatcatgacctacaattgatagctgacagaaaaaaaagatggaagaatctataatttgcacacaattttaaagggtggttgcagttattgttggtgatgcaagtcaacctatcaaatc

SEQ ID NO: 242568 - DNA, 461 bp, Glycine max
  unsure (1)..(461): unsure at all n locations
gcatcatgcacagttgttggatattgtctacttgtggcctcacaagcaaagaacaattgatccctatattttctttctttntgaaggcaaaatgtatattatattaatgagataaacagaacagtacaagtggtactgaaaaaaaagaaaatacaaagcacctctggtgctgcctcccaaagatacaacccaagctaacccatcagaaaatcaaaaccacctagattaaccaaattgatcctttatattagaggaccaatgattaaagctagtgttgaaccctttctccctagctnttagccaagaccaagctgaaaacatagcctcttccatgactttcgaggagtcaaattgttttccttgaaatatgaagttattcctatgttgccaaatagtagtagttagggccacccaccacccataccatctgctatggtttccattagcttcgaatccttcac

SEQ ID NO: 242569 - DNA, 441 bp, Glycine max
  unsure (1)..(441): unsure at all n locations
agctntaagtttccacttctttaagtgcacatttatcttttattaatttttttaaaagaaggagagagagagagagagagagagagagagagatcgatgtcacgactcacatctcattaataatttttcgaaaactatctttcaatcatggcaaaaattatgacgcacatttctcaataaaaactgaaatgtttttgtctttttgaacacgtncctccttctgtctatacacttcaacaaacattagtcccaactgattaatgaaaataaagtaagatgatgctatcgtctaaaaagagatctctttaatccgatacactagtcatatntaaatgttcccttatatagacgaaaccattttcaagcaaaggcttagtgaagataccaaaaacatctttttgcacataatcatgaatgagatgatatcttatctcaatatgc

SEQ ID NO: 242570 - DNA, 228 bp, Glycine max
gcgtctcgagatctgatgcgcctgagtcgaacgtccgagtgagaagaggtgaccatccaaatttgtcgagagagtacggtgctcaatgtcaagcgtactgatatattatgtgcctgaatcggacatgcccgcgaagaggcatgaccatttgaagttctcgagagcctacgctgtccaatgaacaacgtccgcacctgtgattgacctgaatcggtcctcgagcgcgtg

SEQ ID NO: 242571 - DNA, 313 bp, Glycine max
  unsure (1)..(313): unsure at all n locations
agctggaattatagtggttggtgactaattggcacataanagcaaagtaaagctccaagaagcaaaattaaagatctaaaattactcgctcagcatttctcaggtgctcagcgcaacgcagatgcttagcggacaacgcacgcttaacgccagatagtatgaagacgtctgaatcatgaatatgtgcttagcgcgagtcactcgctaagcgcgagattactatcatactcgctaagcatgaaattgcacttagcgtgaaggttacgttaaaatcaaactgaactactcctataaaagaaggagagagaataag

SEQ ID NO: 242572 - DNA, 409 bp, Glycine max
  unsure (1)..(409): unsure at all n locations
tatggaattatattattntctgatggcactaatttgcaggactgagagtagcgtctcgaagtggcctttggttccagtagacgaattgttttctctggttagcattaataaaatcatttccagtgctcgtttttatgttatttcctggattacatattgctttctatctttcttatccttggtgtttatcactatcccaatttccaattagctctatttcattgtacagctcaggttcattgtatcttaagaaattgagataattacccttatttgtgagtgtactctattaacaatctctgtatacatatcatttaactgagtgtgtgtaagtgtgtattgaccattcaagaatattcacacganatcaatcttatttttatcttcaactatatttttcacgcctcac

SEQ ID NO: 242573 - DNA, 428 bp, Glycine max
  unsure (1)..(428): unsure at all n locations
agctnggcttcattcctgccccacttctaatacttttatcattntctaaaggtttaattgcattttaagaaaattatgtgacaatttaaaagtaggagacaaaaaattgcggataagaatagattagatcatccgttaggtatctatggtctcaccaataataagcttatgttatatcatacttctttagaaaataaataggttaagaccttttaaaagtctatttagttaaaaaaaattggactctatcacttaaaaaatcttttagacataatagatcaatcttagtgttattattatattaaatttgttatgatatattgaatacttgtttatcggaaacatttgtttcaagacatcttttanttgcgaaaatgtaagagtgagaattattattntcatatcttttagaaggttatgacaatata

SEQ ID NO: 242574 - DNA, 426 bp, Glycine max
  unsure (1)..(426): unsure at all n locations
gcggattggtcttcgccagtgaaaggatcgaagtggatctgaatagaggcaaatttaatcatcctgcttggacgaatgagaaaactgtggcaaataaagagggtgaggatgagggagaaacccatgttgtgactgccatccctgtacggccaagtttcccaccaacccaacaatgtcattactcagccaataacaaacctcctccttacccaccacccagttattcacaaaggccatccctaaatcaaccacaaagcctgtctaccgcacttccaatgacgaagaccacctttagcacaaaccaaaaaacaccaaccaagaaatgaattntgcagcgagaaagcctgtagaattcaccccaattccagtgtcctatgctgacttgctcccatatctacttgataattcaatggtagccataaccct

SEQ ID NO: 242575 - DNA, 493 bp, Glycine max
  unsure (1)..(493): unsure at all n locations
aagtcagcaacacttccaaatgccaattcttcctgtcgcatccgtcttcaagacgatctatgcacatagtttcacttattagttaggaggagatnttgcccccagtgtatctcgaaagcagataaaatagaactcattctagagagcttggtggtcttaataatggttcgggtggtgggttctcttaagaataaataagacgaatagaatctaattcatgttcatgcaaatagaagagcggatctaagacacagacaacttctttctcaacaagtactagctgcacttctttctcatgaagttgcaagacaggagctagttccctctcggggttctaagagccaatgctttctatcgctcagcccttacgcctgaactccttaacacaagcactaagaaagcccgcgaagggcttcaatatcgcacctactaagacagnaatgtccgttacgatatgactacttccttctttttngacgctatggtcgtgccg

SEQ ID NO: 242576 - DNA, 519 bp, Glycine max
  unsure (1)..(519): unsure at all n locations
agcttagccgccacaaattactntagaccaaaccatttcatatgtcacaaaatcaacatcaaacgttgtctattaagatgcaaacatactagtctaacgtcttatagatacacaatattaagctcattgtctttttctctcaggatttacaagatattttgaaagctntttacaacttataaattttgaattcagagacttaaaagatgaaaaatgaatttgacaaaaaaaaaatactaataatttcatcgcaacaaaattcacaacaaaggttgtgtgagggaattgtcaaacaagtatggaaaggtagaacttgcaaaagtctttgaacagtcatcgtnttaaacttttatgttatacttttcaaagtcattcattatgtttccctcaaacaatngtcaaacaagtgcattaacatgcatgcatgttgtgaatggaacaacattataccttatcctnaaacctnnctcattnccctgcacttcctaactaacttgcaacaatacttcacactctcac

SEQ ID NO: 242577 - DNA, 491 bp, Glycine max
  unsure (1)..(491): unsure at all n locations
tcttacgcagcgaacataaccaaaggacaacatcctntatagaacacanaacaaccagttgtcgatgggccctacatttgaaaataattgggtacgtaaaataaaaacattctatacatgtatttgataaattttacttactgattcaagtaagctcctaaatagaccttttgttgggattccttaacccatgttttaatgtaatgttgacatttagcacgtctgtcctttgcattgtgatggactgaggctcaaggaacccatacaccacaccatgacccaaggtcgaactccactcatccataaacctattntcatcatttgaaatgaaaaattgaaaatcatgtatgttataaccaatattaattaatagtgatatggtatagaatgtacttacatcatccacaattgtagtacaagtatgtttagacatgtgtcacctaatattatctcatttacatcagaatatgttaagaagaatgatgcatctg

SEQ ID NO: 242578 - DNA, 406 bp, Glycine max
  unsure (1)..(406): unsure at all n locations
agctntgagcaaattcaaacaacaataacgttntactcggatgtctgattgagtcctgtaatatatggagacgctcgaaattgaatgttgaagctctgagcaaattcaaacgacaataactctttactcggatgtctaattgagtcctataatataacgagacgctcgaagttgaatgttgaagctttgagcaaattcaaacgacaataactttttactcggatgtctgattgagtcccgcaatatatcaacacgctcgaaattgaatgttgaagctctgagcaaatncaaacgaacatatatctntaatcggatgtctgattgagtcctataatatatcgagacgctagaggttgaatgttgaagctctgagcaaattcanacgacaataactttcactcggatg

SEQ ID NO: 242579 - DNA, 440 bp, Glycine max
  unsure (1)..(440): unsure at all n locations
ctcagcttcacattcaacttcgagcgtctcgctatattatacgactcaattagacatccgagtataaagatattgtcggttgaattntctcagagcttcaacattcaatttcgagcgtctcaatatatgacgggactcaatcagacatccgagtgaaaagatattgtcgtcttaattggctcagagcttctacattcaatttctagcgtntcgatatatgaccggactcaatcaggcatccgtgtaaaaagatattgtcgtttgagttggctcagagcttcaacattcaatttcaagcgtctcgatatattacgggactcaatcaggcatccgatgtaaaagttattgtcgtttgaattggctgagagcttcaacattcaatttcgagcgtctcgatatatgaccggactcaatcagacatccgagtanaaagatattgt

SEQ ID NO: 242580 - DNA, 359 bp, Glycine max
  unsure (1)..(359): unsure at all n locations
agctngatgcattcatcttgtgggatacaatgctgctaatgttaaaagaatcacctttgngtagttntgtaagctatcttgtatggntcctcctagttntctaggagtttgttgcctcaagtgtttatctttgacatatactcatcttaatagttaacacagtgtttctcacttaaaattcacaaggtttgacacaatgattatatttaaaggacacccttttcttggtagcaacttcttttaattttggaatatttccttttctcttctatcatatccatcccttcccttaacaattggttattggagcttgatgggaatgatattggaggttcgagtacaccttggataccaaatgc

SEQ ID NO: 242581 - DNA, 290 bp, Glycine max
  unsure (1)..(290): unsure at all n locations
cgtctttttaagggtatacaaaagaaggcccagganattcaaaaatttaatgactgcccacacgtactgtctcgtggggggtatgaactgcttgacaagaaacttatggaggagaagagcaagtgtgggcatgaggaacattcgtgtactgaaagcccaacactcaatgtcaacccaccatccccagttgcaagacacttgaagtggaagatcgcctgcacaaagcggcatggccaaatgacgtctgaagtggcacaagaaattgtagacaaaattgtgagttcatatat

SEQ ID NO: 242582 - DNA, 401 bp, Glycine max
  unsure (1)..(401): unsure at all n locations
gcttgtagaaaccaaagagacagagatatatagagaatattcagcttgtagaaaccatagaaagaaaataattttntgaattgatnttttttgctgctntgagttgcttactaattataacaaaatttcacttctttcacatttgtgcatttgctgtcacatgaaggcttgtctgtttggccttattgtgaaatattatggagtacactcgttgacaacaattntgtgtgtctactactctgctgtcatataaaaacactaaaaagaatttgacaaaacactatgaagagttaaaagatatgtctagctttctacatcggttcaggccanaaccgatgtagaattctagacattctacatcgattatagaatgatcgatgttgaaatctgacatctacatc

SEQ ID NO: 242583 - DNA, 487 bp, Glycine max
  unsure (1)..(487): unsure at all n locations
gaattcaccccaattctggtgtnctatgctaacttgctcccttatctacttgataatgcaatggtagccataacccctgctaggtttcctcaacctccatttttccgaggatacgactcgaacacaacatgtgcttatcatggaggagttccggggcattccattgagcattgtatggccctgaagcataaggtgcaaagtctaattgatgcgggctggctaaaatttgaggagaatcgcttgtgaatcctaacattgacaagcgacaccacacatggngcaatnttgaaagctgttgttatatgtctctaatgactcatcaggatttttaagtctatgccattattaaccatagttacaacgctaaataaaatggataaatttgacatctttgtcccacatnctctcataattacatctgttgcttcactggaatatgggtgcgagccattgatttgtttgctcaaacaactgancgctctgagtg

SEQ ID NO: 242584 - DNA, 137 bp, Glycine max
tcttgtgttgaaatccatatgctaattatgtgcagactaaatttctacaagcaaagttaaatccttctaatacttatatactgaaacttatgatcacgaaggagatattatatatctctgctggtaatgttaactat

SEQ ID NO: 242585 - DNA, 478 bp, Glycine max
  unsure (1)..(478): unsure at all n locations
ctgcagcagttaactgaacaaatgaagtgtccacagtcattggatggttgcctggtagaggtacatgttataaactaataagatttcctgcgtgttaggtataattattaagaagaggcactatatatatagacttttatatataaagcttattagagttttaacacactctttttaacacactctccactgttggtcctcaatttattgagaattataaaatcagaataatgactcatcatatgagtagttggacctgtcaaatttgtgatntttaagacatttgagccaacaaaaaagagtgttcaagagaatgtgttagagacagagttgctaccatttctctggttaggaatggtgtttgtagttattagtgaaaatagaaatagaaaatattttccttatgtcaaacaggcttctgcattactaattttacgttttacaacattatgatagatgcatatatattctttctttc

SEQ ID NO: 242586 - DNA, 85 bp, Glycine max
ttgatactgaacagaccagaccaaccactagtgagaatcaagaaatgtgctgccaatcaccctaatcttaacataatagtgatgc

SEQ ID NO: 242587 - DNA, 163 bp, Glycine max
taatgagctggtgaagaagactgtgacatatacttggtgtgaaagacaagagcaagccttttatttgctcacagaacagcttaccaagacacttgttgtagctcttcctgacttatttaaaactcttgagctagaatgtgatgcctctggaatgggtgtggga

SEQ ID NO: 242588 - DNA, 305 bp, Glycine max
  unsure (1)..(305): unsure at all n locations
agcttgtagcatttgtcctttatgtgtcccaacatgtcacagtgagcacanttgggtctttctttcttgatgtatttccctttattgatatcacattggttctttgatgcagaattaacagaaaatactatattttctaaagtattggtgggtgggtgagtaaacaacaatctcctttgagcttcttcttgaaggattagggagaaaacattaccaattgaaggcaaaggatcagagatcaggatctgacctcgtatttgagagaaagaatcattcaaacccatcaagaatgacattacatactc

SEQ ID NO: 242589 - DNA, 412 bp, Glycine max
  unsure (1)..(412): unsure at all n locations
cttaaaggatatgttgactaggaaacccaagtacattcaccaggaaaatattggtgtggaaggaaattatagtgctgtgattcaaaagatccttccacccaagcataaagaccttgggagtgtaaccattccttgcttaattggagaagtcactatgggaaaggctcttattgacctaggagccagtattaatttaatgccattcttcatgtgcagaanggtgggagaagtggagatcatgcccactacgatgactttacaacttgctgaccgctccattaccagaccatatggagtaattgaagatgtgctggtcagagtaaaacattttatcttgccgacagactttgtggtaatggatatatgtgaagataatgacattcctgtaatttgggaaggccatcatgtaact

SEQ ID NO: 242590 - DNA, 468 bp, Glycine max
  unsure (1)..(468): unsure at all n locations
aagcttccatatggggtgtntaataagacttcccgttgtacataaagcacgaagatctgtctgaaattgcacacggtggtcaatgtctcaacatatctgttatacagttgtggattctgtaagtcaatttaaattatcgttaattacttaagttattgttttaaattcatacataattaactttgtgttaataaaaataggcatctgactgagacaagtatgcgagcggngaattccgatgtgtatggattcctcgagccacagtccatctagagatctaggcaatcggaatttgaattagaaagttacatgataaaatggatgcataattcanaacgcgatgtttacctatgagcctacctgaatggataagtaaaactgaacaactgaatttanatagtgtataatactacaataacccatattggtctccactgcagtgcacactggcanatggtcgtcattttg

SEQ ID NO: 242591 - DNA, 511 bp, Glycine max
  unsure (1)..(511): unsure at all n locations
tactcagctatataatttttggtagagaanatatcagactattttttgtcccaaaaaaaaaaaaatatttgaatccttctccacttgtgtcaaaccaaagaatctcctactaataacaagttttaatcagctaaaatagtttgtttgtgttataagaaaactaccaacacctaaaactaactattaaaatcacgcaaaatatagctaacattacaatactcttagaatacatggcaactttctatatgcctttggatttcaacttaacaagaacataagcaaacaatcagtatgaagttttggatttcaacttaacaagaacataagcaaacaatcagtatgaagtataaaggaaaatccaagagagagaatgagaggatagtaaaacctaaggcttcacaggaagtccatcaataatcaaataattaananaaataaggataatttttaagtgagaaatgaaggataaattcttaaaacaactataaattattaataaatataatattat

SEQ ID NO: 242592 - DNA, 298 bp, Glycine max
  unsure (1)..(298): unsure at all n locations
agctnnggattcctttagtaaggaatctatccttcctaagatggagccaaacccagtcaccctcattaagaaactagctttttcttcttctattgcctttagttgaatacancctttgttggttctctatttggttcttaaccctctcatgcaacttctttacaaactctaacctagattccccttctttatgtatanaagaaagtgtccagtgggaggggaatgacgtctaacagtgttatgggattgacccatagacaacctcaaaggggactgcttggtggtctatgaacccctc

SEQ ID NO: 242593 - DNA, 432 bp, Glycine max
  unsure (1)..(432): unsure at all n locations
tctagccaaatggacttaccttgaattaattcctttgatagcctctttgagcctatgttcccctttctttgttttgaagctcattacaacccttaagtgaaaaaccatgatatcaccttacccttaaggaattttggagctttggaattgttttgggaataagctgggaataagtgtggggggtatgtttcattggaagatatgatttttggccatgcttgatgtatttgtatattgcctagttcttgctttaatcttcaaattcgttcttaacaaaaacaaaaaaaaaaaaattcaattgctgcaaattcgtactattcaaaanaaaagaagaaaagaagtgaagttgaataaatgaggtcttgttatgaggacttgatttgggagccttgattgattctcgtgatattagagggtctgggtttagtactt

SEQ ID NO: 242594 - DNA, 495 bp, Glycine max
  unsure (1)..(495): unsure at all n locations
agctttaggttgtgctgcacaagggggaggtatgaacatttcaactntaattgttgtgttaagagtgtgcaggtagtttctaacatttgttacttatttttatttgtagaacaagttgaaaataccatgcatttcatataaagatggggcatgaactagaagaaacaactggcatcaaggatcaagctggacttcaacacagtgttgtgattgttgtggaggtcgacaatggaaaaggcaaactgagagcctactttggcgatgaaattatgtttattattaatgagtaccacacttatcanagttgttatggtcaatttcaattcatgggtgaatgcaagtntatgaacccatttacccccgatagtccattagcaatgcctcatactcaatgcctgactcattccanaatcactctntanaggatagtcattcattgggagaaaacgtacctcgaaggccctatccggagtcaagcattggtgtatatcatct

SEQ ID NO: 242595 - DNA, 533 bp, Glycine max
  unsure (1)..(533): unsure at all n locations
cgccacggcnnnntttgacgctttattagtgcactatgatactcagctggagatatgggacccatacatgtggaccacgtggctggtcggcgatggtgcacaacaagtttcacattcaaatgcggcataacccaacttcgctggtgcgcacctccaactgagctcacgtacttccacgtagcccatatgctcgattctcttaacaacgggtgcccgataatccctccaagcttncacaacattcaagtcgaacaacattcatacagcacaagctatcatagtcaagcanaacagaggcaatgcagaaaattctgctcaacacatcaagcaaaatcacagcttttctcacttaaagaccacaggaacaatctcttcgatcaactccgtaacccgtggatcgacttcaagatctactggaagtctacagtgcataagcctacattgcgaccggtgggatctacgtagaaacattcataactcattctacattactcttgtcacaatcagcagatacatgggattgtctgcacttg

SEQ ID NO: 242596 - DNA, 469 bp, Glycine max
  unsure (1)..(469): unsure at all n locations
atcctcagagtcacctgcggctgcagcttgaggaatatggngtacccatcacatgtggtactatgtggcggtcgggtgatggtgcacaacaagtttttccacatccacaaatcgcgcataaacccaccatcccctgttgcccacctccaactgagctcacgtactcccacgtagcccatatcctcgtttctctcaacaccgggtccccatcaatcctcccaagcttccccaacatccaggtaattcaacatccaaaacatcacaaactaacaaaccaagcaaaacagggcaaaggcagaatactctgcccaaaactcaaaccaaaatcaccgctntttctcacttaaagaccccagtaacctttttctctagtacataagtctancgtttgaccgttgggatctactagcaaacatccagaactcantttgtactactctntccacagccaaccacacacaangcattt

SEQ ID NO: 242597 - DNA, 413 bp, Glycine max
ttatctaatcattccaatccactcaaatcatacaattgcttattcaaatcattctcaaacattcatttcatgcaaaacaatccactgcatatcattttcaatcaattcactattcaaacacgctttatgtacaagcaaacaactcaaagtgctgaaatttaaataactgaaattaaaataactgaaatatgacaacgaaatcagctggaaatataaggtgtttaaccttcaccaaaacatcttcaatgactccatatggccttgtgatggagcggtcaactaactggagggtcatgcgtgtgggcattatctctatctctccaagtcgctggcacatggaaagaggcattaaatcgatactagcttccaagtctatgagagctttgcctacaacaacctcaccaatataacac

SEQ ID NO: 242598 - DNA, 431 bp, Glycine max
  unsure (1)..(431): unsure at all n locations
agcttctatcactgccagactacacatgtgagtccgcttataggtaagggatgagtntatcacaattagggntagaatgaacatgtgcagagattcttataggatcaaatcgggggttattttgggatgcttattgtattagaattcttcatttatgattataataacgagattgttntatttgatggattaattgatgccctaatgcgaattggttgataaattgagtgctcatggtgtgaaattatttgaggggtcccatgttgtgagaagcattcttgtataatttgtttgtgttttggacaagatatactatattagcttgatatattgctatatcgcgatcatgacattgtgattaaaattatgtgtaagcgataaattgaatatgtgatgaattatgagacattaagttgtggacatgggatatg

SEQ ID NO: 242599 - DNA, 288 bp, Glycine max
  unsure (1)..(288): unsure at all n locations
agcttctacattcaatttcgagctcttcgatatattactgtactcaatcggacatccgagtaaaaagttattgtagttcgaatctgctcanggcttcggtattccatttcgagcgtctcgatatattacgggactcaatcggacatcagagtataaaggtattgttgtttgaatctgctcagagcttcggtattccatttctagcatctcgatatattacggcactcaatcagacatccgagtaaaaagttattgcagtttcaatatgctcacggcttcggtattcca

SEQ ID NO: 242600 - DNA, 445 bp, Glycine max
  unsure (1)..(445): unsure at all n locations
ttgagcatantcaaacgacaataactctctactcggatgtctgattgagtcctgtaatatatcgagacgctcgacatggaataccgaagctctgagcaaatttaaacgacaataacctttttactcggatgtctgatcgagtcccgaaatatatcgagatgctagaaatcgaatgtcgaagctctgatcaaattcaaacgacaataactttttactcggatgtccgattgactctcgtaatatatccagacgctcgaaatgcaatatcgaacctccgaccgattccaacaataataactttttactcggatgtccgattgagtcccgcaataatccgaacgctcgatattgaatgttgaagctttgagcaaatccatacgacaataactttctactcggatgcctgatcgagtcccgaatatatcgagacgctcgaaatggaata

SEQ ID NO: 242601 - DNA, 391 bp, Glycine max
  unsure (1)..(391): unsure at all n locations
gcaagcttcttaagaagattcctanagaagctagagcttagctacacatacctctctaatagctaagctcacctccttgagataagaagctagaacttagctacacacccnctataataactaagctcacccccatgacaaagaacatgaaaatacaaaananaagtccttactacaaagactactcanaatgccccgaaatacaaggctaaaaccctatactactagaatggccaaaatacaaggcccaaacgaaggagaaacctattctaatatttacaaagataagcgggcttatacttagcccatgggctcgaaatctaccctaaggctcaagagaaccctagggccatccctgggatctctagcccaatctacttggagtcttcta

SEQ ID NO: 242602 - DNA, 331 bp, Glycine max
tcgacctcgttctttctttcggaccctctttgtttcccgttccaatgcttcggctgtggccacattgacgtctctcagttcgtcgcattatttttggacctttatagttgtcatcttgaacttttccttgactgtttgcgccctttcaagttctaccttcaaagcttgcacctcctcactctcctcaagggtttcagcctcttcctcactcgaggtttttagcttcgggagacaatctagctcttgcatccgagcctttagccacttgtgatatctactgatgatcccattgctgcttcccttaagttctttatcctttcttagtgaccct

SEQ ID NO: 242603 - DNA, 223 bp, Glycine max
  unsure (1)..(223): unsure at all n locations
agcttgagatgaggaagtgtagaagggtgaaacttcctgcttttattgntgaccacagagtggtacctggagatatgtcgcgggggtcaggagaccttatggacgtcaggtggggtgctattgcccaaaaccaagcttgaccaatcccaacccaacccgggcatagtcggtcaatgagaacctgtgaggtacctaaacaggcgagctcctggcagtcaacaga

SEQ ID NO: 242604 - DNA, 402 bp, Glycine max
ctcacaacattcattagtccaacacacactcaacaaatagtcatcatccatccacaattccaatcaatcatgctcagtatgatgcaatgtggtaccacttgacctcaactctcaaatgcaatgtggtaccatccccaaggaaatagcctaagcatgtccacacgacactctcacttatgaaaactaggcagtaagtgtcgaggtcaccctgtcgtgcacaagcaactccccctccccacggtgatctgcctgagtctcaagggagttctaaactgagtgacatacccccaagtacaagtatttctcctcatgagaaactgcaagtactcactgacaaagtttatactattttcatgtcatatgaagtatgaaacatgggcaccatcaatgcactaatcacgg

SEQ ID NO: 242605 - DNA, 373 bp, Glycine max
  unsure (1)..(373): unsure at all n locations
acctttagaaatttgaatctaaatttcacagtctataatcgactacagagtgtatataattgattaccagagttaaaattcaaatctcaaatatgaagagtcacaactctttagaaaacaactgtgtaatcgattacaccattctggtaatcgattactagtgaggaattttcgaaaataactcccaacagtcacatattntcaaatgtttttgaatggccatcaaaggcctatatatatgtgacttgtgacacgaatttctagagagagtttttctgaactgagatgtcttatcctctcaaagagattcctaggtcaaacacttgcatattcaataaggaatcttgattgattttaattgaatatccttctc

SEQ ID NO: 242606 - DNA, 432 bp, Glycine max
agcttaagtgttcacgggtgcatgcaaaggcacaaggatagcgtatgtatcttctagaagcttaggaggaataaagaatattcactgttagcatttctgttaagcagttaagcagttacgtaataacagaatgtataaaatgcaagaaaaaatgctcttgaataatatcagaaaacgcattctctagttccttcctttatctctctatctctctacccttctccttccacggaggttgcttgggcctcgaaagccaagcctaacattggtgctttcattgatcctttccgccatggccgaagctacatgatccaagaccagtgttgatcgctggaagatgcattcgtgaagctttcagcatcaatgtttccaaagtttgatgagctcttatccgataaaccagaagagactcgcttccaaatcttatgttca

SEQ ID NO: 242607 - DNA, 423 bp, Glycine max
  unsure (1)..(423): unsure at all n locations
aatctgtacctatcacgagagtctgtggtttatgctnctctaccgaccaccatatagacctttgcccttctatgcaacaatctggagcaattaagcagcctgaagcttatgctacaaacatttacaatagacctnctcaacctcagctgcaaaatcaaccacagcagaacaattatgacctctccagcaacagatacaatcccggatggaggaatcacccaaatttcagatggtctagccctcaacaacaacaacagcctgctctttcctttcaaaatggtgctggtccaagtaggccatacgttcctnctccaatgcaacaacaacaaccacagtagcaacaacaatagagacaacaatcaactgagacccttctcaaccttncttagaggaagtagtaaggcaaatgacaatacagaatat

SEQ ID NO: 242608 - DNA, 57 bp, Glycine max
  unsure (1)..(57): unsure at all n locations
tcataatctntatttacttatgctgccacttgtgacaacattacatcatacccagat

SEQ ID NO: 242609 - DNA, 340 bp, Glycine max
  unsure (1)..(340): unsure at all n locations
caaaaaatgaagcttcatatgagctcttcatgatcctactagtaaacctagcacatcatatacacgagtagagatcctcttcaattactggaaatctctagtagaagagaagactaaccccatacgcaccactcccctttgcaaaaggcaagatgacatgtagcatagataggcaatatactcactatacatgcatgccaagttatgtgtaataaaattgactttttttttcttttgtttatcaaaataagttatctcgcaaaactaattatcaaaatagatgttttacataattacttacctgtcatgttntatcacgaagaatgtaagatgtgtcacc

SEQ ID NO: 242610 - DNA, 413 bp, Glycine max
  unsure (1)..(413): unsure at all n locations
cctcattgtctctcacagtctttagaattgggagccaatccaatccttgtgtccggactctcagccacttatgatagccgccgatgatcccattactgcttccnctaacctctctgtcctttcttcacgccgcatcccatgccttgcgaactccttggagtaccctcgcgttgtggtcactgaaaccccgtgcgatgaaaggcgtgatgctttcgtctaatggcactcctctcatggagtagccaagctgtcttatggcaaggacgggattataattaatacaaccccttgttcccatcaagggaacatttggacatccttcgcatgaagatagaatcctgattcttccttccttctagcgagggaaccaattaacagacgcccctccatgctagccaagagttggtcccaat

SEQ ID NO: 242611 - DNA, 485 bp, Glycine max
  unsure (1)..(485): unsure at all n locations
gctttggagtagaaacatgggaccaactcattatatttcacaaagtggtatctagtcaaggtctgagagaccatacaagtttcctagcgatttctaattatgtgggccattaagtctatcatatgctaacaatagccgagaagcccatgaatttcttcgggggcggagtaagtgtctgccatcgccttggccttggctaacaatcggggaagttcctgactcccgttcaaggtaagagcaaaccgattcatcaacatggttgcctcttggtgtaaagagtcgatcacnctgtctctagcctctttnttcgcgtatacttgggcatactcgtccgcgatcctgtgctcgtgggccgtggctaaacttaactcttcttggtactcggcgatgatagctagcatgtnggtcttcgtctcgcataaacgctgagacaagctccttttggacctcgaacaggcaactaactcttctttcaaaccatgcta

SEQ ID NO: 242612 - DNA, 496 bp, Glycine max
  unsure (1)..(496): unsure at all n locations
ttatcaatatatgggtctaacacanataattaaagggtttaaattgattatttctagagaagtagatgatttccctgaacacaatttttatttgataggtaatatgataaaattactgcgaaagttacgaacttagaaatgaagagtaatttgaagaaataactttatatctttgtgtactgactccaactgaattgtttggatgaaagaaatcattttatctactaatcatagacaaattggagtattaccaaatgatgcacgtattgccaatgtcgtagatataggtactttgagaatgtcttcttaaacaccaatggctctgatgggcagttttactagagaattttgtaaagttcaaacctttgaaactgattgaagaaggtaagagttcccagaaggtggagaatgcaagatcttgaagacaattagaatcgttatttacgaacaaatgtgggagctttgaggtgtgtgactgtgaatgacttgcacacat

SEQ ID NO: 242613 - DNA, 438 bp, Glycine max
  unsure (1)..(438): unsure at all n locations
agcttctaaactntgtacaagaatgaagctctgataccacttgttagacaagtggcctcagatatcttaagaagggggggttgaattaagatattccaaactgtttcccctaattaaaaatctatttcactntntactcaagttatgaattcccttaatgacaatcttcttaaatattaattcaaatgaagcaacttgaatatgaatataaagcaataataaataaaggagattaagggaagagaaaatgcaaactcagttttatactggttcggccacacccttgtgcctacgtccagtccccaagcaacccgcttgagagttccactatcttgtaaattccttttacaagttctaaacacacaaggacattccttcctttgtgntagagatcctttacaacaagagactcacagtctcttaatcccttagagaatg

SEQ ID NO: 242614 - DNA, 485 bp, Glycine max
  unsure (1)..(485): unsure at all n locations
acttaccagttgaagatcngaaaanaaagaagaacgaacggtgaatatcgaagaacggttgaaaatcttcgcgtaattacccacggaaacgttacggaagcgcctcagcttggattttcttcacggaaacaattttcctcagcaattttaagagaataagaagtgctaagaaggatgaaccctttcctcttcactcctcctcctatttatagcaaaataggggaggagcttgccacccaggtcgcccaggcaagcaaggttgcttcctccagaagcaaccgccttctggaggaagaaactggaaggcccaagtgggcctgattgctatttacaccccccctctttactaaatgcaccccccttntacttttttggtgattctttttccgtaacgttacgaaactttatcgaatttggtacgatacttattttcttttcataagggtacgaatccttacggatcatgtatntactctntntaatct

SEQ ID NO: 242615 - DNA, 382 bp, Glycine max
  unsure (1)..(382): unsure at all n locations
agctnntggctttntcccagtcattgattcataacttgtccctgatgtaagctccattggagcttgtaggcctatgatcttcttcatcaatggattcctttgcttctcggaagatgaatggaagcggatgagtctagaagatgctcaccaccataggtggccatggataagagcttggaggaagaatgagatgaatgaagggagaggaagagaagagcatgannatttgtgctctaaaagagctctgaaatctgaagtttaatattcaaatgatcatagtttaaaaaatgcacacacatgacctctatttatagcctaagtgtcacacaaaattggagggaaattcgaatatcaattcanatttcacttgaatttgaaattg

SEQ ID NO: 242616 - DNA, 436 bp, Glycine max
  unsure (1)..(436): unsure at all n locations
tggtggtcttnctactgggtggactgatgttactaaggatgttctctacctaacaatgttcctgagttctatgttgtctcctggactactaaaccccgatgtctcgggcatgttcagcctaatcctaatcaagcatcatcctcagatgtctcttgttggaccaaacttaaccagaaccacattaagacataacataccaaaaactaagttaccgtactctgatgtctcgtgaaaatacgataagctagccccgtcctatcaggttctaaggatcaaaccatttcccaatgttgagtgaccctaactaagcatgcagttgcgtgatcaaggcaaaggcccactagaattaagtactaatagcacactgaacacataaaacattattagataaatatgaaagtatntacatcaggtaccccataggaagaaccaactg

SEQ ID NO: 242617 - DNA, 346 bp, Glycine max
  unsure (1)..(346): unsure at all n locations
ttctaggattcanagatttagattccaagagagcacaaatcctagacttatccaaatgatcttttccatacaagtagctttctcactatcttttcctattactttgcttctgaccttattataacaacacaatttttttttctttcctttttttttaacatacaacttatttgttgtgtgtgttgatgctttacccttttctttacatccctattaacttcactcccnccaaattggggtaaatttgccttgaaccatatgctctcctagaatctaagcaaggtatctggagataattatttaagttcaagggttcaaattttgacaatatcattcagctcataaa

SEQ ID NO: 242618 - DNA, 472 bp, Glycine max
  unsure (1)..(472): unsure at all n locations
ntattcaagacanagcaattaaagatattcaagatggatgatcaagacagtctatagagtcttagaaagggtatattaaataggaagggaattccaattgaagtagcaaaaggtttggccaagaattttaagttaaaaagtcttttacaagaaatttactctctggtaatcgattaccagaggatgtaatcgattaccagtagccaaaactgatttacaaacagctattaaaatttgaattcaaaatttgccctgtgtaatcgattaccatatatggtaattcanattntaaagcttgtaatcgattacacatatactgtaatcgattaccagagcagattttcagaanatattctcaactgtcacatctttttatgtggttcttgaatggctatcanaggcctatatatatgtgacttgagacacgaatttgctaagagtttttcagaacaaaaaggtcttatcctcttat

SEQ ID NO: 242619 - DNA, 511 bp, Glycine max
  unsure (1)..(511): unsure at all n locations
ngctntangaataagcttaagagacatcattattntgatagaattcaaattcacatgtccaagcctagcatgccacacatcanaacattcaacatttgcaacaagagaagaaatgctagatattctattaatagaaagaggcataagacttaacttaaacaaaccatcacaaatgtagcctttaccaataaaaacaccatgtctagtaataacaactctattggactaaaaaacaaccttgtatccttgttagactaacaaagaagtacttattaaaantttcctaatatcagaaacatgatagacttcatctaaaacaagaaaattccctagagatagctctagcttcacttgaccttctcctaacacatgtgtcatactcttattccccatgttcacagtacgcgtgcttgattctngatataaagaaaaatattttttttatcaacacacatatgataattagccccgagatctataaaccaatcatttgagttaaaacacaattaac

SEQ ID NO: 242620 - DNA, 489 bp, Glycine max
  unsure (1)..(489): unsure at all n locations
ctttatgagggaggcttcgggcaacatagatgcttttcaataaaaggcaacatttgttagatgttctcttgtgtccatacttttgcagttgtcgttttctctgtattatttatttcataaagccattaatgtttctttatgaggatgattattttttgtgtgcttgaaattcaactttattggaaaaatgaaaattctttggccaagtgattntgtgttgctaaacgcatgccattattgatttctaatgagaaggtcatacaatttttattatagttgcagcctttggatgtgcccctttccttaataaatttgtaaaacctacattgtcacttaattatttcattagtgacactgacacataattaatgcatatgcagcactntanaagcataattntgagcattactaattcagtactgagattcattntcaccaannaattagtanataaattgtgtactacaaaatcagttttatcaatcacat

SEQ ID NO: 242621 - DNA, 198 bp, Glycine max
  unsure (1)..(198): unsure at all n locations
agctagctactacanaagtccagtgggattaaatntattagtttggtattaattgttgatggcatcctactagcatcatacgatntagtgttgcacaatagttatatcgcaatntatcatgaattctgggtgtcctaaggtgatatatgagtaatcttggtatgcaacactggaaagtagtaaaatgtattatgtgct

SEQ ID NO: 242622 - DNA, 347 bp, Glycine max
  unsure (1)..(347): unsure at all n locations
atggaccttntcaggtgttggagaggatcaataacaatgcctataggttggaccttccagaagagtatgaagtcagcaccacttttaatatttctgatttaattccttttgcaggtggaactgatattgaggatgaggaaccaacagatttgaggtctaatcctcttcaagggggagggtatgatgcaatcctctctaggaagggaccagttaccagatccatgagcaagagactccaagaggattgngctagagctactaaagaaggccctagggttctcatgaatcttanggtagatttttgagcccatgggtcaaggttggatccactcttctttgtaagtatt

SEQ ID NO: 242623 - DNA, 479 bp, Glycine max
  unsure (1)..(479): unsure at all n locations
agcttncatcacatgttgtataattcttcttaatcccattacactacagatgctcttgtatggcgtccaatatttgtcgtctcccgttcaaacaatttatacaaggacaaaaaaaattttgtccccaactggttgacttctttcgaaagcaaattgtgagagctcttcgaaaccttcctcatatgcaaggctcatgcaactttcattcatccaacttcgatccatctaaataataactctgtgatactcgcaaaattatttgatgcatgaaaatctcactttttcattataggtgtggccctatcccattcaggaagacattntttatggtagcttcatacgtcaaggttaagtctaatttgtaaatttgacaaaatttcggaacatttcgattgatcccaagtaccaacatgaaatgggtggattaattcccaacatcaagatgcctcagaaacactagaatgcatatccggatttat

SEQ ID NO: 242624 - DNA, 361 bp, Glycine max
  unsure (1)..(361): unsure at all n locations
tgtgcattcaatatcctgatgagggtgttccatatgttctcaaaactggactaatacatttgctgcccaagtttcatggtcttgtangtgaagatcctcataagcatcttaaggagttccatattgtttgttccaccataaaactccctgatgtccaacaagatcatatctttctaaaggcttttcctcattctctagagggagtggcaaaagattagttatactaccttgctcccaggtccattttcagctggtgtcacaacatacccttcggcggaaaggcgacgcggngctcgcacgtgcgtcttccacgaaaggaaaatgcgcggagtcaccaccaacgtttatttgatgaaaacgt

SEQ ID NO: 242625 - DNA, 600 bp, Glycine max
  unsure (1)..(600): unsure at all n locations
ctgtgcatttcttctttctccatcgccaattttagtacatcatntacctcnttctnnnnnnnnnaaggccgatgcgcttagacctctgaaaccgtgcgaccgcgatcttctagtcactgagctgcagctttcgatatatcttgtcccgtatgggcnacactgtgtgtcgagcattcttatacttcgtatgcgtactatttatactccgcggtgaccggcctaacgcatattacttatgtcgtctctcgctccaccttaacggaaaataaattcccgcgaacggtcgaagtcgattatccattaacttcgtgtaaaataaatccggaccgtcgagatagccgacacacatttgatattaaaataggtagaaataatatactaatctaacaacatcttttattgaataatgccgataacaatcggacgattcttctgtggatgtttcattctaatcctattgactataactcaagtgaattaatgcttaaataagtcgcctagtcaggtcgtcactaaataaggtattgagtgtttatttcattctcactagtaaaggataattttaagccaacgcttatatgtatctctaaatcaaaaaag

SEQ ID NO: 242626 - DNA, 458 bp, Glycine max
  unsure (1)..(458): unsure at all n locations
ntaacanaatggaaactctaaagcctaggcccaactatagagctnttaaaaccgtaaaggtttacattatgcttgttgcgtaaatgccggggcgttcctccactcgccaatttcccagctggaaatcaggagagcatggtcgtaccaaatccaaagtactcggaatatcatcttcgcatatcgcgaacgcttgacctttgtctcccgaacccgcacttataaagcttctacttatgtggcagggcgggcttccttcaccttcttgtctccaacgcgaactttgaccattgttcttccttcccgcaatgcttcttttcatgtctgcctgagcgggcttatagcctanaccatactctccacgatttccttgagtatntatcaggctagttatgccacccgttgttnttcctaaacccatcccgggtcaaaaccgttccccacataactcggccatcata

SEQ ID NO: 242627 - DNA, 428 bp, Glycine max
  unsure (1)..(428): unsure at all n locations
atcctctgagtcacctgccgcatgcaagctngctctanattacatngatgtttgcatttatgggaggaggttatatgccatttttgctttaagagtaatgtcccactggtaaaactaaccttccaaatgtttgccttcgcaggaatggccccgaggaagcttgcctcanagaggtccaggaaggacaaggcggccgaaggaactagttccgccccggagtacgacagtcaccgctttaggagcgttgtacaccagcagcgcttcgaagccatcaagggatggtcgtttctccgggagcgacgcgtccagctcaaggacgacgagtatactgatttccaggaggaaatacggcgccggcggtgggcaccactggttactcccatggccaagttngatccagagatagtccttgagttttatgccaatgc

SEQ ID NO: 242628 - DNA, 397 bp, Glycine max
  unsure (1)..(397): unsure at all n locations
gcagcttacatatgcttgttgcttgacattacttcagagcgcaattgctcttcccaagaaagcattgttctcaacaggttcacctaaaagataaattataaacagtgtcatgtttcataaatcaatctactggaataacggggggtaataaaacatcaactttcactttgcatggtggcagacaaacaatactcttatacccaaattttggccaactccgcaaattagactaaccaatttctaccatcttagcggtgttttgaaattttaaatttgcaactataaccattaccaaaaatataaatgatctgcaacanaatatatttggctctgggtcgagcaaatttcagacaagtgaatcaacaactttttagcatgtgaatagtcagtgacactg

SEQ ID NO: 242629 - DNA, 437 bp, Glycine max
  unsure (1)..(437): unsure at all n locations
tactcagcttccaaccacgacgacggcgcgaagctcggcgaggacttcaaggttgtgaccgtcgacgacccgccggaanattgccttcacttctcggtgctctcggaggcgaacgagagcgacgcgccggaggttgatatccaacccgacgacgcggtggcgatgccgttctcttncggcacgacgggtttacctaaaggagtggttctcacgcacaagagtttaacaaccagtgtggcgcaacaagttgacggagagaaccctaacctctacctcaccaccgaggacgtgctcctatgcgtgcttncgttgtttcacatattctccctcaacagtgtgctnttgtgcgcgcttanggccgggagtgcggttttgttgatgcagaagttcgagattgggacgctgttggagctcatacagcggcaccgcgtgtcggt

SEQ ID NO: 242630 - DNA, 349 bp, Glycine max
  unsure (1)..(349): unsure at all n locations
tatgttcacctgctgcatttagatcaaaattcanaatcttcaatgctcaataggctttgtgccccaactcaataggtaagtgacaagntttgccatagataaattggaagggagtcagtcctataggagtattgtatgcacacgtagctttatctaatttttgagactagtccttccttgactgagcaactattttctccagaatcttcttgacttccctattagaaactttagctcgcccaatggtctaaggatggtaaggtgaggctaccttgtgtctaacactatagtgttggagaactttcttgagttggaatgtatagatatgagatcctctatcacttataaa

SEQ ID NO: 242631 - DNA, 494 bp, Glycine max
  unsure (1)..(494): unsure at all n locations
gcttctcccaatttctataatagggggagaagtgaagtagaanagggttcagccccttaggcacttctctctctttcgaatttgcttaggaaaattgtttccgtgaagaaaatccaagccgaggcgcttncgtaacgtttccgtgagtgatttcgcgaaggttttcatctgttcttcaccgttcttcatccgttcttcgttcttcaacaggtaagttttcgaatccgagactctcaattcatttcttgtttttgttaagctttcatctttatttcgttcattttcgatttcttttcttccttctttaacgcgctgttaccatttatttaagccgttttctcacctaataaatgataaaatgaatttcaaccgatcatttgtgttgtaatctcatttaatcacttttaaaacgaaatctaatcgatcgttcacgctataacctcggttaaaccacaaaaaagtaaaataatcaaaatatcttggaaaataataat

SEQ ID NO: 242632 - DNA, 427 bp, Glycine max
  unsure (1)..(427): unsure at all n locations
agctnntgaagtagatattatttattattataatacatgcttatctattngttaagtatgtnttgtagttagttaattgagacttgngggtgtatatcagtgttttatacttactactttgatttggttagtgtgtgtatattacatagagtttatattttattaattaattgacactaaagatgttatagttttgctatgatatgaatttgaaaattattcgagtcgatgtatatgtatatgggttgggtcttgtaaacattgctacgaatgtataatatgatatatgagaataagtgaagtatgcgatgaattgtgagctatgaactgtgtagtcacacaactataatactctttaagggcgacgagttcatgcgcaatgagttttgtgatgggcttcactatgggaactcgacgagttaatcac

SEQ ID NO: 242633 - DNA, 458 bp, Glycine max
  unsure (1)..(458): unsure at all n locations
ctgtttgaaaagtacagtgtctntgaaagctataataactacttgcaagttgatgctgatgacttgcacaattggaaaggttgggtggaatcatgccttcaccaactaactttgatggtgtaaaacagatgttagtcaactgttttttattggcaagattattttacttgactgaaactaaaagaaagggtgttactctttctaatcttgggttaagatttaaccaattctgttgtgatttgagttgtaaatcgaagcaatcattcacgaaccgcgtttgttctataattggtcatgtggttttatgtgcatagatnttttcacctatgtatgttgtttcaatacaataagttgaactgcctggtccatttctttgtaattagaagctntatatagataaacgtcatanactagaaatttcacaactcataatgatgttattatntgatattttcatt

SEQ ID NO: 242634 - DNA, 330 bp, Glycine max
  unsure (1)..(330): unsure at all n locations
agctntcctacaagtcctaattganattctaaactagaatcaactcactntagaatccaatttccactaaccccaaatntggctttntaaccctcaaaatctcacactnttccacctacaacactaccattctcacattcaactctaagttaactctccccatcctctctaccaattgtctatctaacctttaagcatacatatatctcaaagcatcattattaaacccttaatcaacatgcgtagttnttcttacatcaaacatgtcaagtttagcataattacaacaatttccttcacaaacaactaccctanagcaataacctagta

SEQ ID NO: 242635 - DNA, 473 bp, Glycine max
  unsure (1)..(473): unsure at all n locations
tctataatgttgcattctactaatatatggagttggccactgcttcgcctgagtatgacaattggtagaccataacaatgctatcgacggtaaaggacaacgatttttcaaataaatctgtcgtacatgcaaaaataaataagtattaactcaatcgtacacaactgattgcataaatataaaaaaatttatatctacaatgtacttgaacaaaatgatttccatagacgtgaccgatacaaattatgcgatgcatcgaaggatcntccggtggttgacttctaagaggaaagaacgtcatgctttgttagtgagacaaggatataatgattacattataccatgatgcaatcacatatccncatgtcggntatatccatccacttatccatagtgacctgaacgaaacaaatatagacgtcaaagtttattttatagttaagtcttataaatcaaaaacacacattaaatac

SEQ ID NO: 242636 - DNA, 440 bp, Glycine max
  unsure (1)..(440): unsure at all n locations
gaggaacacaaccatcaacatttaatttgttggaaacttactctagggcttttaacaaatgaagggcaaaagaagaggacatatatgagagcaagatgacaactttaacatatatcagcatacagtgaaccatgttcaattcatatgtatatatttaagagatatactaataaaatacaaattatgttgttagtccttcaatgtttatcaatctttgttcttagtccttaaactctacttgatcggtcttggtttcagaattanttttcttcaatatttctaagttctatcatcatagagatttatctgttggttttataagattcattgttaatttctagacgtattaatattttttctacatactcttattttagtatttattttaaatattataaaaataattaagagataaaaaagaaaaacattatttaaataac

SEQ ID NO: 242637 - DNA, 495 bp, Glycine max
  unsure (1)..(495): unsure at all n locations
tgagtcgctgatatccacctagtccatcatatttagttcgccgattctacacgtctccaaacggaccgaatctccgtgactctgtctctatgctagttcgtgctaggtcatttttcactctttntttttagtaaaaggaatattttatgcattttttttatctataaaagatttcattgcatttttcaaagcttatttttgacttaaaggccttaggttttggtataccgtatacttgtaccaagttttataaaaataaattgtctatttctttttcataaaagtatacgagaatattcttatgtggcaaatgaacaatntttttcctcaataaatagcataaaccttattaattattttctaacaatttttttacatccttttagtattaacatcacctcttagctgagtatattgagaacactttaaaagtgcttctgaaacattcatttggtgctagagggaaatatgtacacaatacacatgcatgaattt

SEQ ID NO: 242638 - DNA, 471 bp, Glycine max
  unsure (1)..(471): unsure at all n locations
gcctgatcgctaagcgacaacttatccttggctaagcatgacctattgtcaccaagctaaattccttatgaccataactgaggttcatgaagctaagcgccaatcatggcagctaagctgaattccttgcagcaatgtgagcgctaagcaagtccttattagctatgcgcatgctcctctatacttaagatgcatcattttagctaagctggtcagagcctggcttagcgagagttgcagcttttcggatctgcaaacctcactaagcggccttatcctcgcgctaagccaagcttgtgtganatattaaaaaaaaacttattttgaatttgaaacgttggctaagcgcgtgggtccactaagcaagccttggtgagaaaccaaatgtctctctggctcgcttagcgcaacagtncgctaagcaaaagtatcgaaaaactgcttaagtgagtgtacgagtagtacatcaca

SEQ ID NO: 242639 - DNA, 419 bp, Glycine max
  unsure (1)..(419): unsure at all n locations
agctntatntaagtcatacctctaagcaatatgagactaatcacacctccttgaggctataattaaagtgggctaagggtgaccacaattaaggtaactntacaacacccncttcatgcccagagctatggacctagagtgtggtgttaagaaccttgggagaaccacaccacaaaagccaattattgtgattagagagtcatagaatgtgggtttgagcctatctcaaccccaaaagctagctcataggtagggttgtctcccaattatatattctgttgtggtcttatctctagccaatgtgaggcttgagttnttctaaacacaccccttcatgctcaacactattggacttgatgcgtggatgacatggtgggagggcccgttaatggatctatgatagactctaatatcatctt

SEQ ID NO: 242640 - DNA, 463 bp, Glycine max
  unsure (1)..(463): unsure at all n locations
ctataatatatagtcacctgcaccaatgaaagatccattcgcaatagttatgttgccttggctgctcagagtgataccaagatttagcagagttgctcctaatacggtatacatagttgccatttgtaaagccgttgctttccgagcagctctttcagactagcaaatcaagttaaataatttcaaatttacaaaacaaaagttccagaataacgacctccgaattagaaaattgttctcattaggaaaatgcttagaaatacttggtcacacatagcatacaccatgtgaagaaaaataaagatttaactattcaattggtcattatgattatcttcattntaagttgtagtccttatatgaaaaaanttgtaagctntaatcatataaaagttacatttctgtttgctaacactagagtccggagaagtattgtggacgatatacaactgttaatagacac

SEQ ID NO: 242641 - DNA, 395 bp, Glycine max
  unsure (1)..(395): unsure at all n locations
tgcaagcttctctgaccaatatgatagatcaagataacagcagtagcggctgcaacaggagctgaatatgcaacagcaatccaaggacgcatacccaaacgaaaactaagttcccactcacgcgccatgtagcaagctacaccaagtaagaagtgtagaacaattagttcataaggaccgccgttgtataaccattcatcaacagatgccgccttccaaataggataaaagtgcaaacctatagccgcagaagtaggaataatggcaccagagatgatattgtntccataaagtagagatccagagacacgctcacgaataccatcaatatctactggaggggcagcaataaaagcgataataaatacagaagttgcggccaataaagtatgaat

SEQ ID NO: 242642 - DNA, 498 bp, Glycine max
  unsure (1)..(498): unsure at all n locations
catcctggtcatggatagatcacccaggttcgggtccataagcagtgacaattgccctgtgaagactcgctttcgctacggctccggtggtttcccttaaccaagccactgcctatgagtcgccggctcattcttcaacaggcacgcggtcagagtcccgagcctcctcccactgcttgggagcttacggtttcatgttctatttcactccccgatgggggttcttttcacccttccctcacggtactacttcactatcggtcacccaggagtatntagccttgcaaggtggtccttgctgattcacacgggattccacgtgccccatgctactcgggtcagagcgtaagctagtgatgctttcggctactggactctcgccatctagggtgcagcattctctgctgcttcgcctagcagcacgacactttgtatagctctccacaaccccgttntcacggtttatgctgctcccatttcgctcgccgctactaccgg

SEQ ID NO: 242643 - DNA, 427 bp, Glycine max
  unsure (1)..(427): unsure at all n locations
agcttgtgatggttcttcaccaatcactttgttccttccatttccccaacttcaaattcatgagtacttttgacgtgttcctctntatccactccttccacttcaaccgttttgtctgcagtagtgcatgtttccgatttctctggctccccagatccacgatattcttttgtctcttcctgtgggtgctcaatctttacttcatcctttctcagaanaacttcagagccctcagttcctttgtcatcaactttatctttcaatgcaggtagttctccatcagcagcattggacttctcgtcaataggtacctcaacattntctacagctttagcttcttctccagaaatagtggatgtgttgacatctgtatcttccacacactngtcatcttgattttccttacaacatccttttccttcctata

SEQ ID NO: 242644 - DNA, 271 bp, Glycine max
acactatgaaactaagctgtagaccgggcgatctgatcaaacatgggggcgcgctcaacacacttcatctataacactcacatgtggaggtgaacttatcaattaaggggtgcactcaataaactatttctggaagactctcacacgaggtgctcttacaaatcttgctcacgaaacctcttagcagggaccaccttccctattctcctataaatacggggaggaggctgactctcaatggcctctgacctctatgctgagtatgaagttg

SEQ ID NO: 242645 - DNA, 357 bp, Glycine max
  unsure (1)..(357): unsure at all n locations
tgccgcatgcaagcttaatgattgagatattttaagagattctccttccttctctaatctcaactctaattcaaaaatcagaatccatttaatctnctacgcttgaatataataacttcgagaataaatcgatgtcatacacaattgtgttggatttgccatgccctataatataaaatngtctatggttgctagtaagtggtgaggacacaacaattcaattgatggaaagcttgagcctaacagaattcccactcctcttctaacagaatcgtatgcgtatggagctgtagagcatccatttcccataaattgcttnttacgagactggatcttgcgcctgacttctatcaatcc

SEQ ID NO: 242646 - DNA, 369 bp, Glycine max
  unsure (1)..(369): unsure at all n locations
ctgcacaattgactagggtctgttccaatagcattatattgctgtataatgtgttgacaattctgcagcctcattgatgatcacttgctggagataatccacggagcaacttccaatatgattttggattggagagaaaaattttatctgaagcagagaaggataacccacattggagcatatttggatcagataatatttcaactaaagtntctgattcatcaacagcaaaggcttgttcttcatttagagcgagttccaacttgtgctattcgtaactcataattatgcttctcctgaatttattgtacaaaggttatatcttactatttgttagctcatggctattttggtgcactgtctttgtgt

SEQ ID NO: 242647 - DNA, 324 bp, Glycine max
  unsure (1)..(324): unsure at all n locations
agctttcggtcagacctgtaccatttgatacacatcggatgtagaattccgcaaattctatgatttttcaggaatcgtgttcatttaaaagattgcagtggtaagtctgaggtttgagcttcaccaacaacttataaggggttaccttgatgaaatcttagaagcctagtgcttcttgtaatatacaagcatgcacatatactttatgaagataaatccctactggatatttcaatgggcagttttaacatacataaccncagagtaggtattgatgataataaaagctgttatgctactgtccttacaaatcagttgaatcat

SEQ ID NO: 242648 - DNA, 415 bp, Glycine max
  unsure (1)..(415): unsure at all n locations
ttggtcttagctcggctgtcaagtttgcgatatcattattgtgattgcaaaatgtggattctgaaacagataacaaagaagtggcagataagaggcttttgtctttgaatccaacttatgctgttggttttttgaggagacatagtatggagttgctcatgctttggctaagacatctccatccttcactagtcttcaagttttctatcaaactccctatttcattgctcatttaattaataatgaaatgccttgaatttgctttcgtcaaggaaaaaaaaaagagttgggtggtaaacaaactaaatntaaaaccctgcagagagaatcggactntntttttggtttgatcttatnntgtagtttctctctctctgatggttcttttctattctatattctatntatagntata

SEQ ID NO: 242649 - DNA, 464 bp, Glycine max
  unsure (1)..(464): unsure at all n locations
tgcaagcttgaggcaagagttaaagtagagcacctttttgccaatatggaactccttcctaagaatcctagagtcatgaaacctcttcactttctccttgtaaatcttggagttctcataggcttctaagcggatctcctcaagttcttgcaattgaagcttcctatccatacccacttcatcaaatgccatgttacaactcttcaccatggtgctcaatttccaccaaaaggtggcatgccttacctaaaaccaccctataggaaaacatccccaaaggtgttcagtaagcggttttttgggcccatagagcatcctcaagttgctttctccaatccttcccattaggctgcactaccttctgcaacacttgcttgatctctctattaaaaacctctgcttgcccattatgttggggatgataagtcataacaactctatgcanaaccccataattctagagc

SEQ ID NO: 242650 - DNA, 228 bp, Glycine max
ggaacgacggcgcccccagacaaaaccgaagcgaggggagcaaactcaacaccccccggctaggacttctccgagcgagcccaaccgaagccgcgctcccgccgacaccggcaggttcccatttgacgggcaaggaaaacacaacgcccaccccggcaaaaacaaacgcaggacacaccgataccgatcgcaataaacgccagccgacgccggccaggataaatgacc

SEQ ID NO: 242651 - DNA, 362 bp, Glycine max
acactgccaaaaacttaccttctccttttcggacaaagcatggcaagctaggggcaagtaaatcttcttcccatcagaccttggatgcaactgtgatcgtatccccatataagctagatcttgatgggtattcaagccatccttcgtctttccttgaatgttaaggagcatcccaatcacactgtcacaaacatttttctccacatgcataacatcaatacaatgtctaacgtctagatcagaccagtacggaagatcaaagaaaatggacctcttcttccatatgcaactcttacttttatcctctttttgggtttttcaaatataatattcaggtgtggaactcgctgatatacctgctc

SEQ ID NO: 242652 - DNA, 264 bp, Glycine max
ggcaaactaacaaactcgccaccagccgagacggggacagcgacgaacacgccccacggaatcgggacgaagaaaaagtggagaagaacattcctatacccgcccaactacctcaagaagaagatgaggaagaagacccaggtgaaccaccttcacctccatcacaacaacaagatcaagaactatcatcaccagagtctactccaagacgagtaagatccttggcggacatatatgaaaccctgaacttggccatacttgaac

SEQ ID NO: 242653 - DNA, 226 bp, Glycine max
  unsure (1)..(226): unsure at all n locations
gcgccccccccgccccccangcaggaatccacctgtcacaaagacttttgatgcacagaaccctatatccatgaatccatcaacgccatcttactagctagtcgccaagtcaaaccatcgattctcgacatccaatttcctgaacaatctccgagagcaaatactagagaaatttccacactaggtcaccaaaccaattacataagtaaacttgacatcatacctt

SEQ ID NO: 242654 - DNA, 294 bp, Glycine max
caactgaaaacttcgagtcccggcttctccgaaatcgaagccgcacactaaccgtaactttatgtgaggtgcagatgaatcctatcagatcactgataccgtgcacaggacctgccaagaaaacttgggcaattttagccatgaatgtgactgatttcaaagtcatgaacagaaacctatgctgttatttgacacttttttcttgcatacatgaaaaggtgcaactctcttttaggttttaaacccgagcacacctccttaaggatataatgctacagtgaaaaactgcgatct

SEQ ID NO: 242655 - DNA, 355 bp, Glycine max
acacacaccaaatatttactcacttcatgcgaaattacaaagctaccccaaatacaaaaactagcctaataaaatacaagggctgaaaaatcctacatttctagggcaccctacctatattgtggagccctaaatacaaggcccaaaaataatgaaaccttaatctaatatgtaccaagataagtgggctcatacttagcccatgggcccgaaatctatcctaaggctcattagaatcctagggccttctcttgaatctctggcccaatgttcttggagtcttctatccaatgcccttgagggggaggattgcatcactccctccctcttgaaaaggatctgacctcaaatcaga

SEQ ID NO: 242656 - DNA, 419 bp, Glycine max
  unsure (1)..(419): unsure at all n locations
aatctggtttcagagnatgccttgtcaccattaaaggtgcgtccttagtagaataggggtactcgggagggaaaccttgcaacgattcaaggtgtccttggtcgaataagggtactcgagagagaaaccttttagcgattcaaggtacacccttggacgaatatggatattcgggaggaaccttacaataattcaaggcgcatccttagccgaataagggtatttaggagggaaaccttgcaatgattcaagttgctccttactcgaataggggtattcgggaaggaaaccttgcaatattctgaggtgcatccttactcgaataggggtgggtattcgggagggaaaccttgcgacgagtcaaggtgcatcattattcgaataggggtattcgggagcgaaaccttgcgacaattaag

SEQ ID NO: 242657 - DNA, 314 bp, Glycine max
  unsure (1)..(314): unsure at all n locations
agctattntctagtagtgaacacgtgttccttattgatttccncatcatangagcctcatcaatgccctcaattcaaaggacaccactagattctaacttcactctcaactagaatgagatgtctatatacgggagatctagagattcttccttcactcatcccgactgagacagagcttgtgtcacaacctcagaaccatatttccattgcctcattgaacattggcgccatctgtggggggaaatatcaccacaaaaatctgaaataccatcactgatccatcacttccagttggatcccataaactctctc

SEQ ID NO: 242658 - DNA, 409 bp, Glycine max
  unsure (1)..(409): unsure at all n locations
cttgnggagcttctatggaggctgtgttctttgtttcttcaatgagggccttcaatggtgattgttcaccatggagatgcagcggaagacaaacgagaagaggtgagaggaggcgccatccattaaggaataagccatggaaaaaaagagcttcaccaccaagatgagccttggataagaagcctggaagaatgcttcaatggaggaaaagaaagagggagagaaagagagaggggggagcacgaaattgaaggaagaaaaagggagagaagtcgaactttgagttgtgtctcacaagactctcattcatcaaagttacaacaagtgttacacatgcctctatttatagactacgtagcctcctcgagaagcctctcttgagaaaacttccttgacaagcctctttgag

SEQ ID NO: 242659 - DNA, 403 bp, Glycine max
aacctcagcagcaaaatcaaccacagcagagcgaatatgacctttccagcaacagatacaaccctggatggaggaatcaccctaacctcagatggtccagccctcagcaacaacaacagcagcctgctccttccttccaaaatgctgctggcccaagcagaccatacattcctccaccaatccaacaacagcaacaacctcagaaacagccaatagttgaggcccctccacaacctttcctcgaagaacttgtgaggcaaatgactatgcagaacatgcagtttcagcaagagaccagagcctccattcagagcttaaccaatcagatgggacaattggctacccaattgaatcaacaacagtcccaaaattctgacaagctgccttctcaagctgtccaaaa

SEQ ID NO: 242660 - DNA, 232 bp, Glycine max
  unsure (1)..(232): unsure at all n locations
catgcaagccccctgcgtagccgctctagctgttcggaaaattccaaaaacaaatccctcggattactagcgatcntgaagcctctagttcctgaatgtacaaccttcaaattgttgctcgttcccctcttcgagaatgaggaggatcttcataggacttaatccaaccgatgtgcgtnccgcgatcacggacgagacccccagccaacccagcgcccaccctcgcccgcac

SEQ ID NO: 242661 - DNA, 416 bp, Glycine max
gagtacatctcttgattttttattcataacttttcactggtaatcgattactataaccatgtaatcgattacacaaaacattttatgaaaagatgtgactcttcacaattgaatttgaatttcaacgttcagatacactggtaatcgattaccaatatattgtaattgattacaccgtttaaaaaaacatttggaacgttgcaaattcagttaaaagcttttgaaatcaaactttaccactggtaattgattacaggtcattggtaatcgattaccagagagtaaatactctggttacttagaaaaatttggaaaaacttttcttgtaaaacataattgtgctatgtttgattttcgaaaaatctcttcaatgcttcccttgtgaagtcttgacttgtcgcttttggttcttctct

SEQ ID NO: 242662 - DNA, 234 bp, Glycine max
caacaaaaacacaaaaccaaaacacaaaccaaaaaaaacacaaaaaaccaccaaacaaagacaaaaaaaacaaacaaacaacaaaaaaaaaaaacaccaaaaaacaaaaaacaaaaaaacacaacaaacaaacgaaacgaaaacaaaacaaaaaacaaaccaaaaaaaacaacaaaaaaaaaacaaaacaaaaaacaaaaaaaaaacaaaaaagaaacaaaaaaaacacaaaaa

SEQ ID NO: 242663 - DNA, 287 bp, Glycine max
  unsure (1)..(287): unsure at all n locations
cactacnacatcatggccagcgagctggccgacccatacaccgcctttctccggatcaagaccaaggaatgctggactcctcgtggtgtgtagctcatacttttttccacggaacacggtcacaacaccttctccagcctctagcttctcagcttcttcttcagacaactcggctgcaaccccatgaaaagcactccgcgaagggtaaactattctctccccattgcccatatcacctcctggagatgtggacagtgctgatttcaccttcgacgaataccatccaa

SEQ ID NO: 242664 - DNA, 395 bp, Glycine max
gaggttaggatggactgaaacgtcgccaccattctagaaatgcaaatcaaagccttgcttttatagactcttcatgtctggcccagagaaccattagaagagttatgacttttagaaaaacttaacaccaatttgaaaagccaaaaaccatttgaagagttgcatcttttgattcgttcagaaactaacactggtgatcgattaccaaatcagtgtcatcgattacacaaagcctttttgtgaaagaatgtgactcttcacatctgaatttgaatttcaacgttcaagcacactggtaatcgattaccaaaacatcgtaatggattacaactttttgaaatcaatcggaacgtcgtacattcagctgataaccttttcacaaacattttgctctg

SEQ ID NO: 242665 - DNA, 263 bp, Glycine max
  unsure (1)..(263): unsure at all n locations
ccgcgaacnatcagcgggtgattacacttgcccttatcgacatcacacgactccagttgagcctaccccatcgccactattaacacaactgagcctaatcgcttaagacagattctgtgaacttgtaagcactcattaacaaagcaatgcactggatcaacaaactaaaagggtaaatatagatgaattcttcagcaatgacacacatttcttctctagtgggttttgatgtaacatgactgaactactatatactactgcca

SEQ ID NO: 242666 - DNA, 414 bp, Glycine max
  unsure (1)..(414): unsure at all n locations
caaanatagatgaagggtattaaatattaacaaacctcacaagcaagcaatgctggataattagatattaaaaatcttacaatatggccttagggcttaactcaagctcacaaaaccggcttataagatgagaaactttccaatcctcttaaggactacattggtcatatctctgggatctcaagaaaaatcattcaaaaccccaatctctgcttaataaaagtacacaaggtgtgccacatcccagtctatccaatgattattttcagatccagaacatactttcagcttgcataaaataaaatatcaaattatgttgacagtgtaccacgacaagtggaccaatatctctcatacagtactataatgacaagccacaccatactctagttgcacttgcgtttctccaatata

SEQ ID NO: 242667 - DNA, 337 bp, Glycine max
  unsure (1)..(337): unsure at all n locations
atgcaagcccgaacctcactcaagccgaattatttatatgttaaaagaatatngaataattcggcatctgcgcagtcaatgatgtaccaacgggaactatcctggccaattcctttgtcttatccttgttagatatgttaaacgctaatagcttcctttagcacaattccagtgcttgaatctaaaatctctcaatgctaaatcttcagttttaccaaacatgctcgaaataacatggcttagcaaatatcgaggcagcgaataaaacaccttatcatatggagcactcctatataaatacctttctctaatacagctcgatgcgatcttggaggca

SEQ ID NO: 242668 - DNA, 331 bp, Glycine max
ctcttgttgaacgagaatagataaaaccttcgtctaaatcagggagggggtccatcatcatgatgttggatctaactgcggagtatcgttcattgaggccccctaagaatctaattccataatcaccttctctgtaactcttaataacagaaataagatcacaagcacaaacaacaacacatgtgcaggaaggaatagcacgaaaattgcctaattcttggatcaaatctcttcattttgtaaagcaagaagcgatagtatgttcactccgtggcaagtgtaccacatcgctacaagtagtaaagttcttggaagtcccagtgtccaatcc

SEQ ID NO: 242669 - DNA, 381 bp, Glycine max
ataccaccgccgggtcggacttacagactatacgtcacacgaccattatagtcgttgtttgaatacctcacccactcaagtgtagcacacaattatggattttctctaatgacaacactccttgccttttaccactctaattccccttgagttcttaggaaattcaagagattatggccacaacaaagaacaattcaccaatatgtgtaaggtaaggctatagagacaaggaaaaggttaaccaagaaaaaggctaacaatgcttttaggcacaatttaaggaaataaaattcagaatttaggaattcaagtaacaatccttcatacaaccaatatatttccttaaagatatatttttttttaatgtcttcaagcatgaac

SEQ ID NO: 242670 - DNA, 183 bp, Glycine max
ccaaaaattctcccaaatcattataaagtgatctgataatatttagaaattttgttggaaaataccgttgttggacacacaaggaacaataactatgaaaaatagattcttgcaattcgtctggcttgagaaaaatatgacatattattaaggttaaggaacatccctattaaatcttataaa

SEQ ID NO: 242671 - DNA, 306 bp, Glycine max
  unsure (1)..(306): unsure at all n locations
caaaaccaagcnctcccctccttcttcttctcattcctcccagccgaatccttcaactgaaaaataatagcaaaaatcccgtcaatacaaatttgtaaggtagaagggaacccataaaagggggcttaacaatcaaactcaccacaataacaagaatccggacaaaaactgcaaccacaatcggaaacaagggcaaggcatgctttacatagtccagatcgcccaagtgtgccctctcaactatttcttgggtgtctactacaatgtaacctacaaacaccaaaagcccaaagtacaactgcaaca

SEQ ID NO: 242672 - DNA, 276 bp, Glycine max
  unsure (1)..(276): unsure at all n locations
cccaacacagtcacgccacccataactcggctgtgctttntcttccatgctatatgnacgaaagtcattgattctgtcaagtttgatgagttggaacataaagccgtaattatactgtgccagttggagatgtattatcccctgctttcttagacatcatgattcacttgattgtgcatctagtcagagaaatcaaatgttgcgcgtcggtttatctactgtggatgtacccggttgagcgatacatgaagatcttaaaggcgatacacaagaatc

SEQ ID NO: 242673 - DNA, 336 bp, Glycine max
cagccacacccacaagaagtgtgtgattttcagattcattcttcccactacctactttatctgctaccctttgcgatgcttactgtgaattttctcttgggcagcgctgtaaactgaaaaagatcttttttttttttttttatgattaggaggcaaatgggtcatttccaatggtgcccttggtggaggctgggaagatggagatcatgatggtgatgaatgagagcacaaggaaacttggaagcttcatatatgtgccttgtgcacctgctgtggtggagcaaaagggatgtgcttgccctctccttgttgctatgccatcaattgcaacattcc

SEQ ID NO: 242674 - DNA, 331 bp, Glycine max
aacctttcaccaacaaaggtttgaagaccatcgaacctgtccaaaaccttttgaagaagagaggaatcttcttcaccatgtaaatgtccttcttcatcaatgggttgagcaccctttttaacccaagagccatcatgctctttacggtaaccaaaggatgcaatcacagtagcaccgattaagaaggatctcttgattgaaacataaggttcataatcaagagggatgttatagtgtttatggaagagagtgactatgtgtggatatggcaatggagcatttaatcccaatgccttatgcatgcgatattggactaagtgtgccaatcaat

SEQ ID NO: 242675 - DNA, 56 bp, Glycine max
  unsure (1)..(56): unsure at all n locations
cccgagggggggtttttttccccccccnaccgccgccgacccaccccccccccccc

SEQ ID NO: 242676 - DNA, 422 bp, Glycine max
  unsure (1)..(422): unsure at all n locations
tttttgagctggngaagaagaatgtggcatttacctggggtgaaaaacaagagcaagcctttgctttgctcaaagaaaagcttactaaggcacctgttctagctctttctgacttttctaaaactcttgagctagaatgtgatacctctggagtgggagttggagctgtattgttacaaggtgggcaccctattgcttattttagtgaaaaacttcatagtgccaccctcaactaccccacctatgataaagagctttatgccttaataagagccctccaaacttgggaacattaccttgtttccaaggaatttgttattcatagtgatcatcaatcacttaagtacattagagggcaaagcaagttaaacaagaggcatgcaaaatgggtagagtacctagaagcaatttcatatgttatc

SEQ ID NO: 242677 - DNA, 342 bp, Glycine max
acttgattattgcacaattttgttcttcgattaagaaatttggtacgattcgttgtttcatgcggttagggttctagaaacgaaaattttcatttgttgctaaggggattagggctttctgtggaatttatggttacaagtatatctatggcggctggtagacatggaggttatcgtgacaacgagtttatggaccgtgagtccaattttgatgtttcaaggcgggtttttaataataattctagacaagagtatgatagtttgacgaatggtagccgcgatgctgtgagggttgggagcaaggatgcaagagataggattagactgaggcacatagatatt

SEQ ID NO: 242678 - DNA, 388 bp, Glycine max
  unsure (1)..(388): unsure at all n locations
gatctcgncnagaagaaagtatcccgagcccaaaaagatcataggggaaaatgggctccgaactatgaaggacctttcattgtgaaaaaagcattctcgggaggagcattggtgcttgccaacatggaccatgaagggtttccttcgcccgtgaattctgatatcgtcaaacgatattatgcttaaatacttagggcatcttgagggttcaatgcatgattgttctccagagactcattggaatctccaaagtcgtccaatcctttgtacaccacgatcgcaacattaataaacattggattgatgatttgcatttcaaattcttgagttggtctcctatttctttagagacacactctcgacctgaatccggagcattcgtttcatc

SEQ ID NO: 242679 - DNA, 442 bp, Glycine max
  unsure (1)..(442): unsure at all n locations
acgcgtaggacagatcattgctatatgcgatgtatattccccaaggatgtcgaatttggtacaaccatgccctcccggtttccatctaaggaactggcgggtggaggaacgctcggaggtttacacgacaagcataatgtaattttntagcttcaaaccctacggttgagcctatgctttagggattccttttgtaaggcattatgtcttttgttcttgaaagtttatcatataaagacctttcttcatctattcttgcgcctccacctgttctcattcatttgcatgtttatgtccttggtacgcttaaacgaggcagatccaacgacgagtcccatgaaggtgctgataccggngacccggccttcgatttgagcaagaatgagtccacgaagatgaaaagatgagatattgtcaagagataatgctcagagatcaagat

SEQ ID NO: 242680 - DNA, 243 bp, Glycine max
gcacgggctacatcacccacagacaccattagccaccacaaaccaacggtggcccccatagaaaccccacaccgagaggaaccccccaaccgaagcagaaacctccaacacggcccgcggttacgagagagaaagaaaccccgatcggaccaggcacacacctgcgaggcaaccacgcgcccacgcgaggaacccgatagaggcaccttgccgagcgcagcaccccgacgtaggaaccgccag

SEQ ID NO: 242681 - DNA, 370 bp, Glycine max
caccccacactctaattcatctaaaatcatgacactaaaatgcttaatggtgtgtcttgtcacaaaggctgccgcataattatttttttgtatagctaacagggatatcaaaccaccaagataacaattggcatacaggcggaatagtcttaattaagaagaacaaatttctaatcaaactttcactacgggagaaaataaacccaacattaaaatgatgcaataaaaaacatcaacttatcaaaatcaacacttaccctttgtctagatgataaccacagagagcttcacctcacttgcttctaaggtagcctcaaagagatatttcaataacattctaaaataaagcatcatacatattacacaaaat

SEQ ID NO: 242682 - DNA, 432 bp, Glycine max
  unsure (1)..(432): unsure at all n locations
gctcttatagcaacacatttgtttctttccagngtactcacattcacccaaaaatcagggctatgtctagtcctcactctttcaatgagattttcactaaacacaaccacaaccaccaccactagtttacaaacaataatctcaacaggtttatcattacacaaagcttcacccaagctcttgtagtaacacaatggatccttaatcaatgtacactaccttaaggtgacaacacacttgctccctcacaacaacaccacatcttggtcttggcttggagacttaacaatacaacaaagaatttttgtgaatcactgcacacaacacagattctccctaacaaaggtttccactcaggaaatacaacttcacacttctcactttttacaataatgaatagcctaatgagtttacaaaagtgggcactctcat

SEQ ID NO: 242683 - DNA, 443 bp, Glycine max
  unsure (1)..(443): unsure at all n locations
agctcctatttatttatgtcctactngngcttttcctatctagtttgcaccttgcaaaatcataatctaaaaagccaattagatttaaggaggtacctttgggataccgcaaaccaacattggttgttcccttaaagtacttaatgatccttttaacagttgttaagtgagattccttaagattagcctgataccttatacacaagcaaacactaagcataatatcaggttgacttgcagttaactaaagaagtgaaccaatcatacctctataccttgactcataaagtgatttgcctttctcatataattcaagataggttgatgttgccattgaagtttatgcttctttgctcttttccatgatgaatatcttaattagtattggacagtatttggattgacatangaagcttccatgtttcattttcttgacttgaagt

SEQ ID NO: 242684 - DNA, 387 bp, Glycine max
  unsure (1)..(387): unsure at all n locations
tctgaaaacaagataaacgatatacaatttgtaatgcgtgcactcatccttactccctcttaagattggaatttatggcctagtttttagattaaaatctacccttagtttctctccccctttggcaacatcaaaaagccaaaaatgataggagataagaacaaaaccagaaaatatctaaaacaagtagcttaaatcattcacaaacttaatcaatcacaacataagtcaagcaaaatctaaatatccaaaccaaagcaaaagccaatcaaaggccaaatatccaaacaaaagtaaatcataaactaaaaatccaaggcaaaaagcaattaanagcagaatatccaaaagataactaacgtaccanacaacgaaagccaaaataca

SEQ ID NO: 242685 - DNA, 433 bp, Glycine max
  unsure (1)..(433): unsure at all n locations
tgctatgnncactttgaacttcagaagcaataatcctttaattattcttctaagttcttccctctaatctaaagggatggacactacaccttttgagatgctttctattgagacttctggcacgaacatgtttatagacactcttacatatttaattttactttgactccatctagagtgttttggctaaggaagtttcttgttgttggagttagccctagtgaccaatccatttcagactatatttgttatcgggatattgttttatatattntatatacatgagacatgtcaactattatgttattagttttatagcataataatgtcctaatgataggtgattcgttcaatggtaaatcaagtgagactcgattgtgagaattattgaacaatgaaacattgtttcacaagtatctatagtcatgtacta

SEQ ID NO: 242686 - DNA, 407 bp, Glycine max
atttgttaatgattaatggtgatgggtatttatatatccatttggaaaatgactaatagagtctttgggttagagttcaactgaacataacctacttttttaaaaaaaataaaatctaccagtgttattacttctctattttgtgcattgaggtgtgcaaacagacattttgtgtttgcgagtgtgcatgttcttatgtagaggttatttacatgcaaacaactttactgtctgcagaaaggtaaacgaagttattgtaagatagacaaaacattgaaccttttaaccacttcactttttaaagttctcagtagagtaggaaagaagtcagagatacaactattgacaattctgagaaatgaagaaatagcacagatgagatactcaataagagagaaagagatggt

SEQ ID NO: 242687 - DNA, 318 bp, Glycine max
cacaaggctcccctagccgtagctccatagtggaggtgtccatcctgcctagcacgctgtgttggtttcggcgcaacttctctagcccacccgtccttttgccgcttgacgaaggtgcgccttaattactatagcggaccctgctgcaagcctcctgcgtgctcgcagctcacacacgcacttcacttcgacgcagcacacgcataccgtctgcgaaaggccaccacctgccgccacgccacgcgcccgagtgtgtatgccgctattggacctcacctgagctgccagcaacaccgcagccagcatttggctatgaca

SEQ ID NO: 242688 - DNA, 400 bp, Glycine max
  unsure (1)..(400): unsure at all n locations
gcatgcattggatgttggtctcgtcctttgtcacgggaagccggaaggtccatatcaccttcttaattgtacacatggggcactgcacccccaaatgcgcaagtaagaagagataatctttcgggctctcgtgtccgtaaaatgcattcatatcatgcatcgcataagcatctcttcataacatcataatggacatatcctgcatttgtccgttatcatattccggcctcacattttgcatgagtcatggcatcatcatgcatatgcgttcaacaaactttttgatctgcaaaattgcataccatttggtttcatgtttgctcatccttgccgtttcctctacaaaacanaaacataaaagggggaagcgngagacttcacactaccatcttagtttcat

SEQ ID NO: 242689 - DNA, 375 bp, Glycine max
cgcagacatgtcttctgaacctgaaaccagcatctcaggcttgatggtggttgagccgcccatggattgactatgctggtgtctaactctgggcctttcattagtcccaataacaacattctcggtagaagaggtgggtgcccctgacgccggtgttgaagccgatgctcccacagcattagacggctcaaccatttgaaacgtggacgttgccgacgatgaattgaacttatccatatcaaggtacatggacagcaagtcctcctcggcatcatcggagaaggaaggaccatcaccacctccaacaacaccaaggtcactgtcgaaactaatatcatccggtaaagtgagaatctccgactgagcacgcctatg

SEQ ID NO: 242690 - DNA, 423 bp, Glycine max
  unsure (1)..(423): unsure at all n locations
gatgcagaacctttagaagattgtgaaaaattaacatcaacttgtcaaagcaagactcgaattttcacattgaagtcgtccaccacatcccatatgctatgagctgcctcccaagtagctattgctactgccagaactgcttaaaacggaaggcatatcacgaacaagaaacctgacgctacgtgtgccaatatcatccaatatttctatacactcttgcaaatcagcatcattcaccaacatcacccattcctcttcatcatctagatatttgagctgaaataacccattttgtagtttgaatcttgctgcaacttcttcatatagtctgaaacaaccttcagatggatcaaacttgaaacgaatggtgtcttctctataggtagctttgacaattagttncgacccacaatcaatgatggg

SEQ ID NO: 242691 - DNA, 336 bp, Glycine max
agaccttcaaccctataacgcaacgaggcggacaaaagagggcaattaacttgaatggtcatcattgtcaatgcggaaggtattctgcgcttcactatccatgttcacacattattgcagcttgtggttgtgtgagcatgaactactaccaatatatagatgtcgtttacacaaatgagcacatattaaaagcttactccacacaatggaggcctcttgggaatgaagcggctattcctccttttgatgacgcatggacacttatccctgacccaactacaattcgtgcgaaaggtcggtcaaaatcaacatggataacgaatgagatggattggc

SEQ ID NO: 242692 - DNA, 310 bp, Glycine max
gcaagcttcatggtgaatcaaagatgattcagtgttgtttgttgataacaatgatgataacaaaagatgaattcaagagacaagaatcaagattcaaggttcaaagatctcaagaatcaagatcaagattcaagactcaagattcaagaatgaacagaagacttaatcaagataagtattaaaaagtttttcaaaactttgaatagcacatgagtttttgacaaaaccttttaccaaagagtttttactctctggtaatcgattaccagattgttgtaatcgattaccagtagcaaaatggttttgaaaa

SEQ ID NO: 242693 - DNA, 459 bp, Glycine max
  unsure (1)..(459): unsure at all n locations
aggctcttaatatttgatgagtatccttgtggaaccttcacccgacgaagacactgacaaaaacttatcttctccttcttggacaaagtatggcaggctgggggcaagtaaattttcttcccatcagaccttggatgcaactgtgatcgtatgcccatatcagctagatcttgatgggtattcaagccatccttcatcctaccttgaatgttaaggagcgtcccaatcacactgtcacaaacatttttctccacatgcataacatcaatacaatgtctaacgtcaagatcagaccagtacggaagatcaaagaanatggacctcttcttccatatgcaactcttactnttatccttcttttgggtcttctcaaatacaatattcacgtgttgaacccgctgaatacctgctaccagtcacggtatcaacaatatatgctcttgattcattaaaaacttt

SEQ ID NO: 242694 - DNA, 405 bp, Glycine max
  unsure (1)..(405): unsure at all n locations
caacagntctgagtaaacagaaaacttggttacccacaataagcaatttaactataaatgggacaatttcactttaccactttaagcataaaaaataagtacgttattactaatctccttcctcctcatatattcaaaacaaaataagccaacaaaagattacatttctagttttagacgtgaggattgatcaattatgttccaaacacagtgaatcatgttcatcaatctattagtcaaggcacctgacggcacaaactaaaagtatcatgctatctgatctgccataacatntatacatggcagactaggacgcaattgctcattgactctctcaacagccaaccacattgacctcattcatctcacatatcatattagtgttacaaatagtataaaataact

SEQ ID NO: 242695 - DNA, 240 bp, Glycine max
tctacgggtgctggagggaagtcccaagactgggagaccacaggaaggatttcataaagatcccatttcacttcccattcctactgcaaaacagggtgacgcttgactgtcaaataatgacccatattatctgcacaaaatctctttatccatcaacatcccccgggatgcctctcaaaggatacccctgttattgctctctgtacccttatcatcatctctcctgggtgattcctatgc

SEQ ID NO: 242696 - DNA, 414 bp, Glycine max
catgcaagctggctgcgacatctaaattcgatgtacggtaaatccccgtgcgaggtcagttggaacatggatgccagagtggcaagggcatcgatcatctgattctcctttctaggaatgtagtgaaaggatatgttatcgaagttctctatcaatttcccgatgtaggcctggtaaggtataaacttatgatccctggtctcccattctcctttcaactggtggattaccaaggctgagtcccatataccatgagcaacttgacctttgtcgcaacctacccttcgacgggagggcgacgcgagggctcacgggtgcttcttccatgggaggaagatgcgcggagtcgccaccaatgtttattcgaggaaaacgtcggacaaatcggaaaggtgtggtctacgaaccttaagt

SEQ ID NO: 242697 - DNA, 380 bp, Glycine max
  unsure (1)..(380): unsure at all n locations
cacaacngggcacttnnatattacaatcagaagtagaaacaatgtttatacaaggaggaacagcaggggctgaagaagaaacagctggggagagcttgagactgggaaattgataccacccatcaggtccaacatcaccttgaagaaggatttcattggaaccctgagatttgacaaagcaacaattaacatgaaactcagaaaacatgattatcatgagcacatttgcttacactgatgagaattttagtgatctgagggaaatgaagcatgtgtttgagggaaagattatgattattgtgagaacgataaatagagtgaccagaggcagaatatttcagaccttggccgctaccaaaaaagatttgatctggaccctc

SEQ ID NO: 242698 - DNA, 428 bp, Glycine max
  unsure (1)..(428): unsure at all n locations
ttggttatggaattcaaccaataggtcattgagttccatattctagagtgaaacccaccattttgcatgtntccttttgtgctttcttcaaccattatatcaatgaagattttcactgcagtctcaggacaaagttttgattccatacatattgttaacattagttgtcatcatctcctaaaataatatagtgagtatacatagtaaaacaattatatgtagcaaagttgaacagtgcatgcttaatgagccctctctaatgatattgatagaaagaaaattgtgtatatacttaaggaataaaactgaatttagttttttgggacatcctaaaatcatatcttaacatactaanttagctgtgatttctatcttagccttgtgggtcttaaatcatatttttaacatgtagcttagcgatttatcac

SEQ ID NO: 242699 - DNA, 366 bp, Glycine max
atgccactaggtctgcagacagcagtacgggatttgaatactttgattgaaataattgctactacattttattgtatggcacggtgtatcggctgacataatatgagttgcaatattatattaacctcgttgtctataatagggattacgctctctagcgttatgaataccagcacttgtacattattaagagcgtgctagcctatgttttctcttatagagagtacgtgttctttcatagagagaagctgtgctcaattcatattagatagagtttatatttcgataatttccattaatatccacttatatgacctgtggatgatggaccctattactacttaacatcctattataggactcatg

SEQ ID NO: 242700 - DNA, 427 bp, Glycine max
gctgggaggtgtggagggggacccgtacgtgatgtaataggataagggctacgtaggagtacgtgagcttagttgaaggtgggcaactggggatggtgggttcatgtttgatttgtggaagtgggagagttgatttgtgccatcgcccgatcctagtaccacatatgacgggtaccccataatccaacaagcttgatgtgagaaagcgtggaagagtcagttttcctacttttgtttgttgaccacagagtggtacctggagatatgtcgcaggggtcaggagaccttggggacgtcaggtgggatgctatttcccaaaaccaagcttgaccaatcccgacccaacccgggcatagtcagtcagtgagaacctgtgatgtacctaaacaggcaagctcttggcagtcaaccaataaaagaacaaagt

SEQ ID NO: 242701 - DNA, 126 bp, Glycine max
attggatgagggaaagagtggttttcgaaatctgcactttatgcagaattttgctgttgaaatgtgcagcagaattttgtataagtgccgaaacacgcttgtgtatgcgctgcatgtgaaccgggt

SEQ ID NO: 242702 - DNA, 402 bp, Glycine max
  unsure (1)..(402): unsure at all n locations
ctcgaantggctggattgagtcccgtaatcatatcgagcacgctcgatcattgaatgggttgaagctctcatnccaattcaaaacgaacaataactttntactcggatgtctgattgagtcccgtcatatatcgagacgcttgaaattgaatgtcgaagctctgagccaactcaaacgacaataactntttactcggatgtctgattgagtcccgtaacatatcgagacgctcgaaattgaatgttgaagctctcagccaattcaaacgacaataactttttactcggatgcctgattgagtcccgtcatatatcgacacgcctcgaaatgaatgttgaagctctgagccaagtcaacgacaataacttttactcggatgctgattgagcccgtacatatca

SEQ ID NO: 242703 - DNA, 402 bp, Glycine max
  unsure (1)..(402): unsure at all n locations
gacanccgagtaaaaagttattgtcgttcgaatattctcagagcttcaataatcaatttcgagcgtctcgatatattacgggactcaatcagacatccgagtaaaaagatattgtcgtttgaatttgctcagagcttcaacattcaatttcgagcgtctcgatatattacgggactatatcagacatccgagtaaaatgttattgtcgtttgaatttgctcagagcttcaacattcaaattcgagcgtgtcgatatattacgggactcaatcagacatccgagtaagaagttattgtccgttgaatttgctcaaagcttcaacattcaaattcgagcggctcgatatattatcggacttaattcgacatcccaggtaaaaagtattggccgttgaattgctt

SEQ ID NO: 242704 - DNA, 366 bp, Glycine max
  unsure (1)..(366): unsure at all n locations
cctgcaagagttggctcacaataggccaatcatatctatggagcattttcttgagcaagtagcctggcctgaagctcaacttccattggtgagacccaacgaggctgcttcgcttgagcccacacctgtgcaggtcaatttagagccagctaacccacaatctccagtggtgaatccaccttcttcgcctgagcttgaagcagttccaccatctcctcctctgattgtcatttttgacacatcatcatatgctcctcctgattcaccagttgtagaaacagctgacccccctgtttccccaattggaggaattgctgatcttnttgattcgttatctggagaaactgttgctctcactgattcccc

SEQ ID NO: 242705 - DNA, 427 bp, Glycine max
  unsure (1)..(427): unsure at all n locations
cttagatccctcttgttggactaggcttaatttatatcaaccctcctaggtttagactaacttaaactaagcttcatcctcagatccctcttgttgggctagactcagcttaaatagcttacaaaagtttagactaatttagcctaagctttgtcctcagatccttcttgttggactagacttagaccaaacaacattattgtaacaacatatttaaaactaaaacttaatccgcagatccctcatttaagactaagtttcaatcctgcttcattcaagttctaaggcaacaatacatttcccaatgctaaattctcctaaccatgcacancaaatggtgatcaaaccaagagcatacagaatttaagcacttgaagaagcatttgacacaagaaacacaattaattagatattaaagtattacatc

SEQ ID NO: 242706 - DNA, 365 bp, Glycine max
ccaaccaggcctaaatagttcgattgaacacctgtacgacaggacaggatctgtggattcaagtaaaatgaccatatttcattcacttcttcttcattgtccggatcgacagcaggaaaatcgtcagtaaaccaggccgggccgacctctcgactaatgaatggagcatgtcggggaagaaacttgtcaaaactcagaaaaatcttcatgtacttgaggaacagctcttgtgggttctgatcgaaagtcttgggtgttaatcgaagtactctctggccttcgatcgagcgagtggcaacttcttcagcatagtcctgcgggatcattaatcccatttttggctcgaaagtgcattaagccacact

SEQ ID NO: 242707 - DNA, 356 bp, Glycine max
gcggccgggcgatggtgcacaacaagttttccacatccacaatgcgcgcataaacccaccatcccctgttgcccacctccaactgagctcacgtactcccacgtagtccatatcctcgtttctctcaacaccgtgtagatgcaattggctttgatgttttgatgatgatcatgatgatgtgttgcaattgatgcaaatgggcttttcacgattaaaattcaagacaatacttcaagattacaaggcacaacatcgagatgatcactagaatattaggaagggaactcctaattgaattagcaaaggtttggccaagtgatttacaataaaaagtggttttcaaaggttttactctc

SEQ ID NO: 242708 - DNA, 322 bp, Glycine max
acaagttcgtcataggaagaagcagccctttctaccagaacgaaggtgattgttttggtatttccctgaatgatgattaaaatgttaattgttttaccggtcatataacccggtgaatgctttattgtagtaatagttccggtcaagtaaccggtactgtagcaaatagtgaacattttggttataaaaggagtcttcgaccatgatgtgagacaccctcttagatagccaattttttcaggttttagagaggcgctctgcatataaaaaatctttgtaactcttctttcgatttgaataacacaaagtttttttatattcc

SEQ ID NO: 242709 - DNA, 319 bp, Glycine max
gctatgcagttgtatttttttgttattcagtaaaaaattattatgtctaataaaaaatattaatttttataaaattatcttaaaagtaatattggcaataatttgaaaattagaagaaagttttattcacttgagtacatctccgctaaattcttgactagtgctttcttaggtttcttggtttggtttacggtcagatgatggtggaggtagatcttttcttttggtatgcagattgagtttggggtggctaggattacactaagtcgaggggtttgacttggcttatagttgcttcccttaaggctgttgagacaat

SEQ ID NO: 242710 - DNA, 407 bp, Glycine max
agagaggaaaggctgaattccttggagagtgaggaagtgcaaaccctaaaggcggaacttgaaagagcccaagtagtgaaagagaagttcaagtcaacagccatcaaagtctggaaagagtacgatgaactaagggatatcaatatggccactgtcgaagccttggaacgagaaaccaagagggcccgaaaggaagaacacgaccgaaacaagttctgaggagctttgtggggcaacaatagtgagcttgagcttcgaagagccgaaagggatcaatcgtgggtcaaagacatgatcttgaaagatgagttaaaggcttgccaaaggtcgaaaagaagcttgtctgagcagttaagcaagaccaaagaaaatatgtgggccatcatcgaccagtacaaggaaaagct

SEQ ID NO: 242711 - DNA, 257 bp, Glycine max
tggggacaccaggcggggcgctattgcccaaaaacaagcttgaccaatcccgacccaccccgggcatagacaatcagtgagaacctatgacgcacctaaacaggcgagcttctggcagccaaccgataaaagaacaaagaccacccagctacgaggcttgtgtggtggctcaccaactatggatctcgactgatatctggaatatggcctctggcaatccattaccaaggaggcgtaaacgaccacaagggtcaaaa

SEQ ID NO: 242712 - DNA, 388 bp, Glycine max
  unsure (1)..(388): unsure at all n locations
cttcctacgtggtacttgatgtaaatactcttatatctatctaatgatgtcgcatgtgttctctgtgttatcagtacttccttttagtatgcttttgccttgatcacgtaaatgcatgcttagttagggtcattcaacattgggaaatggtttgatccttagaacttgataggacggggctagtttatcatatnttcacgagggatcggggtacgcgaacctagttgtcgatatatatgtcttaatgcagttctggtcaagtttagtccaacatgagggatttgaggatgacgctcgattatgattaagcttaccatgcacgagacattanggttagtagtcagaagaaacattaacaccagattgtgttaggagagacatcttagta

SEQ ID NO: 242713 - DNA, 324 bp, Glycine max
ggaggtaaagatatcggattcggtggagattttcgccaaatactaccagtcattccaagaagaaatcgctcagacattataaatgcaacaatcaattcatcctatctatggcattcgtgtgaaatattaagcctaacaagaaacatgtgtttacaaagaaatgtacaatcaattgatgaacaagaaactgccgcattttctaaatggattctacacattggagatggaattattggtcatgaaaatgatgattatgctacagttgaaattcttgtccacctgctcataactgaatacgatgatccaatcaatgctatagtcaaa

SEQ ID NO: 242714 - DNA, 308 bp, Glycine max
ccttgagatttgtggatattgagaagtctggaagctcattcagcaatacacaccaacggagtttaacattctttaaattcaccagattctgcaacaaaataagagatgacgcgtcagattaagttgctaattaagctttgctgaattgagagacatatgtaaaaggaagaaacatatttactttcacttcatgccataatttttccactctgctacatgacaagtctaatataacaagcttctcacaaaaaattgctctgcaagcatgtcaagggttatgatccaatgaaatatttacttattggcaa

SEQ ID NO: 242715 - DNA, 405 bp, Glycine max
  unsure (1)..(405): unsure at all n locations
ccctcancgcggaggagcttgacgcgtcaaaactgcattacgtcgggctcgacacgttgggcctttgcacagaaggatctaaggttagcaagcaccactatatcaccatgagtcgttgggatgattgctccctcactggggagcaagttaagtatgttgttgttgatgcctttgtctcatgtggaatagctttcacatgtctaatctcaatgtttaggattaatcaactacgtttccatggatttatgctctccttctattggtgatgtgcatgtggttcgcggatactatatacatattctgatactgcgccttacccgcgactgtgatggatgacgttgaccattgggctttaatgaatattcatgatgtatggaatagagatcgggaatgctctctccgctt

SEQ ID NO: 242716 - DNA, 366 bp, Glycine max
tctcaattgatagatgatacaaactgtatagtccatgtcactaactctttgtgtgttatgcaggaccgcactttgaggacgctgattggagtgggtgaacgaagagatgggctctactattttagagggattcgtcatgagaaagtcttcaaagtaggcgatatgtctttatttgatctttggcacaagcgtatgaggcacccttccttgaagattactcaattaatttcaaatgttgatagtagcgtaactagaaataaagcatgtgatgtgtgttaaagggcaaagcaaactacagatagtttcctttgagcagtcatcaagctagtagtacgtttgaattgggtcactgtgatttgtgggggc

SEQ ID NO: 242717 - DNA, 229 bp, Glycine max
ggacttatagtgtcttcttctgcgaggaaaactaatcatgaatttcctctctcttggcgtcgcctatgagagagatcctagagatacatctaccacgtgtctctacgttaaaaaaaaaatgcactagctatgactaagtttacatttgaaagacttcatttactattcatcatacactttgatcttgaatggatcccaatcctctttgaacgacatattattttggatc

SEQ ID NO: 242718 - DNA, 403 bp, Glycine max
  unsure (1)..(403): unsure at all n locations
agcacgcagagactaacgacgacnttttgctctcttcgtcaatcgcgaccgacaagcccgttgacacgcggtgatttacgtaatcttccgcgctcacaagatctgtcatactgacttttgagtcacgctgacgggcggaaatacccgagtggttatccgtataaactttttgctgtctgtaagacgaaaagcctgataacacgcagagactaacgtcatcttctgcgaccttcgtcaatcgcggccgacaagcccattgacacgtggtgatttacgtcatcttccgcgctcacaagatctgtcatactgacttttgagtcacactgacgggcacaaatacacgagtggttatccttataaactctttgctgtctgtaagacgaaagcctgatancacgcatag

SEQ ID NO: 242719 - DNA, 366 bp, Glycine max
  unsure (1)..(366): unsure at all n locations
cccgtcagcgtgactcanaagtcagtatgacagatcttgtgagcgcggaacatgacgtaaatctccgcgtgccaacgggcttgtcgatcgcgattgacgaagggcgcagaagacgacgttagtctctgcgtgctattacgcttttcatcttacagaatgcaaaaagtttatacggataaccactcgggtatttccgcccgtcagcgtgactcaaaagtcagtatgacagatcttgtgagcacggaagatgacgtaaatcaccgcttgtaaacgggcttgtcggccgcgattgacgaaggtcgcanaagacgacgttagtctctgcgtgctatcaggcttttcgtcctacagacagccaaaagttta

SEQ ID NO: 242720 - DNA, 360 bp, Glycine max
cttagacaatgaaggaaagctggagttgctgcacaagatgtccaacgttatgtcaaagaataagatcgggctgcacaatgcacaaggcaagataaaggtgtcaatgaagaattgaagctgcaggattcacgatgtcggatacaatgtccaggacatcctgcctgaaaatactggaattgctaaaagcattgaagctgcaggatccacgatgtcggatacaatgtccaggacatcctgcccgaaaatactggagttgctaaaagcattgaagttgcaggatccacgatgtgggatatgatgtccaggacatcttgcctcgaaatactggacatataaatctgttatatctttaacagatta

SEQ ID NO: 242721 - DNA, 342 bp, Glycine max
  unsure (1)..(342): unsure at all n locations
ccattaaatctatcatgtgttgacagtaattgattaacccgagaatttcctctgaggctgaacatactttgaccatggcccttgctttagctagaagtcgcgggaggtcttgacttccatttaaggtcaaggcgaacctatccatccacatggtcgcttcttgatgcaatgcatcaatcaccctccctcttgcttccttctcggcgtatgcttgtgcaaagtcctctactatcctttgctcatgggtcaacgactggcttaactcttctctgtactgccctattatagctagcatgctntgcttcgtggctactaagtggtgggccaaactattcttggatc

SEQ ID NO: 242722 - DNA, 405 bp, Glycine max
ctcgctagccactaatagaagaccaaaagcctcttagactctgacccaagaaacacaactcgcaaagcgcggcacgccggcttagcgagttcatacgacacttaaacaaaactagaaatttaaactcccgctaagccgaagtgcagtgacttaacgagttcatacagaaactcatatattcaaacaaaaatgatgaacacgcttagcgggacagggtcaacttagcgagttcattagaaaacccagaaattcaatagaaattgatgaactcgcttagcgcatggacacgcttagtgaacacatcgaatatttcagagaaattggggctcttcagcccctaaccttaggcccctattaggcctcaaaacctaatcaaatcaacacagaagaacatacattgcacac

SEQ ID NO: 242723 - DNA, 278 bp, Glycine max
atctagtcttcggaaaaataaaacaaaaatctttcgcatatagtccttttttttgtaagaaacacatccccatggttaaagcttcccttatcttgcttggacaaaagcaccattgagtttgggccctttttgtgtttgaaattagcaggcttcaatcacttaaggtgcggcgtagattaacatttcggcttcgatagaaattgaaactcgaagcaaactcatttatgcatttaatatgtattcatgactctgagctctggttttggttaataaactgg

SEQ ID NO: 242724 - DNA, 156 bp, Glycine max
acagaacacaaaattccaattcatcatagcagaagctgtccaatccataaggactcaaaatattggcactgattttctagctaatgatacaagcgaagttcatgaagctttaacttctaaacctacagctgaagagaacacacatgctgcttcctg

SEQ ID NO: 242725 - DNA, 333 bp, Glycine max
ggtgactttgagcgtttgtttatggaggagtctgagtcaatttctgaatatttttctcgagtattggccgtagtcaataaacttaaaagaaatggtgaagatgttgatgaggtgaaggtcatggaaaaaatacttcgaactttaaatccaagttttgacttcattgttatcaacattgaagaaaacaaggatttaaagaccatgactattgagcaactcatgggttccttacaagcatacgaagaaaaacaaaagagaaaaattaaacaaaaggaggctacggagcaactactacaactcaacgtaaaggaagcaaactatgcaaattacaag

SEQ ID NO: 242726 - DNA, 438 bp, Glycine max
  unsure (1)..(438): unsure at all n locations
cagagaaggagtccacggaggttattcttatttcctcaaagactggaaagcggnttctaatgactcctctgcggcttccacataaggcatagaggatgggcagctcaccaagatgtcttcctcgcctgatacgatgaccagatgcccttccactacgaatttcaacttttggtggagtgttgagggaacaactcctactgagtggatccacgggcgccccaacagacagctgtagggagggttaatatccattatttggaaagtaacttgacaggtgtgagggcctatctgtactgggagatcgaactctcccctaacctctcggcgggtgccgtcgaaggtacgaaccaccattgaacttggtctaagtgggaggattgaatggaatttctccaagtgctcttcgcatacgtttaactggaccatttcgatgacact

SEQ ID NO: 242727 - DNA, 425 bp, Glycine max
  unsure (1)..(425): unsure at all n locations
cttgatctgcttttctatgtttccaccttgtgtcaactaaatagnngtagagtatttaaggcttgggttatctcttgaaatgctgttgagagctttgtggatgtgattgtattatatgtaatggatggctatgatatttgtggtaatacatttacattttgggaggttgcaagtgcagatatgactaaatttaggaaaaaattgcatgtttggtatcataaccaatcccaagcctacataaaggagggttatgttaagtctttggaagtcaacataaatcttgtcaatataccaaacatgaatcactcacaacggatttttttattgaagacaacgagagaaaaaatctaagagtagcataaatgagaatgttatgatggatgtgtagccacatacaaaaggataggatgtggaatgattatata

SEQ ID NO: 242728 - DNA, 343 bp, Glycine max
  unsure (1)..(343): unsure at all n locations
tgaattcgggaaagattcttccgttggtgctatcctcaaacatagtcagttgaggtaaggtggtttcatgatcttcccttngggtttttcttctttcagcaccccttcttttgcattttcgatctctgatgatgcttctatcgtcttatcatccttcgatccttagaacatcaccttgtcctcaaagtgatagtccctctgtaattgcgtccaatcctcccaagaggtttcattaggagaaaggccctgccattgaccaacacctcccaaggagcctttgcagatggtctgcgatagtccacaatggccacgggatacacaagatgatggtcattgagaaaat

SEQ ID NO: 242729 - DNA, 329 bp, Glycine max
gggaacggtcacgaaccccgaatgggtataggcaaagacaacggcggtataactagcctgataaatgccaaaggaaatcgtgggaagtatggtttaggctataagcccactcaggcagatgtaaagagaagcatcgcgggaaggaaggacggtggtcaaagctcgcggttgagacaagaaagtgaaggaagcccgccctgccacataagtagaagctttataagcgcggcgctaggagacgaagttcatgtggtcgcaatatacgaagatgatgctccgagtgcattggatttggcacgaccttgccctcctgattccaacttgggaat

SEQ ID NO: 242730 - DNA, 413 bp, Glycine max
  unsure (1)..(413): unsure at all n locations
gtggagcattggatgagatttttattgattgcgaggctnctagaggtggaggagacatccctactacttgtaactcttcaatctttcactttctcttctctttgttgtaaaagaagcctccctgatatggagagctaaatcctcagttggttcttcctatggggtacttgatgtaaatacttttatatctatctgatgaggttttatgtgttcattgtgctatcagtacttcattttagtatgcttttgccttgatcacgtagatgcatgcatagttagggtcactcaacattgggaaatggtttgaagcttagaacttgataggacggngctagtttatcgtatcgtcacgagggaatcgggtacggtaaactagttgttgtatgtatgtcttaatgccggtctgtcaagtt

SEQ ID NO: 242731 - DNA, 369 bp, Glycine max
  unsure (1)..(369): unsure at all n locations
aaaagggggagaatgtgaatgtatgtatacatgattttgatgatgtcaaagaagaatctaacaaggctgcttcaaatgataagcatttgcttcaagaataattcaagattgcttcaacaaacaaagccttgtttcaagattcactaaagaccaagccttgccttataacaaagtgctttcaagacatgcaaggctctggtaatcgattaccaggaagtgtaatcgattaccagaagacagggttgagaaatagctgttgaaaaaggttttgaatttgaatattcaacatgtaatcgattaccatatgtctgtaatcgattaccagcaacgaaactctggagancaatatcagaagtcataacccttcaa

SEQ ID NO: 242732 - DNA, 427 bp, Glycine max
  unsure (1)..(427): unsure at all n locations
gaaagctaaaatgaatcgtctagtgatttctatagagttttgctttaaagttattctcgttttcttgtaataatttcattgtcttgctttatgggcatagtctaccttttatggacttcagtgaaagatctgttatgggattggtgctgagtccttgaaatgattgttgtctcactctggaagataaggttacatgacatgttttgattcaagaggaaaaaacaaaggtaaagacaattgcatgtgctccttgtacttgttgaaattgacccttgaggaatattttgtgtagaccttctattctcttctattctcgcgtttccttagatccaatattaaccattcagataaagaaaggcanagtgaatttttatgagagaatatgcgtacttcccttttcggttagcataatctattcggacaacac

SEQ ID NO: 242733 - DNA, 256 bp, Glycine max
gacggggagctcgcacaccatgcgagagactcctcaccatctgtccccttgactggagaggccctatatgctcattgctatagcttcacgagatcaggagatgatcttctcttacgccacacttaatggcgcgtgctgagactgtggatcgacctacagacagacgagactcctcgagctttacagacggcgctgattaaggctggcaacccatacctagaggagtcctgctaggcgatcatagatatatgatcag

SEQ ID NO: 242734 - DNA, 359 bp, Glycine max
cgtaagagtttgaacaacggctcacaaatggcggtgagctgcgatatgaatctggaaatataattcaagcgtcccaggaaacctcagacttgcctctctatacggggttctggcatctcaaggatagccttcaccttatcggggtctacctctatccctttctggcttacaacgaaaccaagcaattttcctgatttgaccccaaaggtacacttagcggggttcaaccttaattgatatttcttaagcctttcgaacaacttccgcaggttgacaaggttgtcttcctcagatatagattagcaattatgtcgtccacgtagacctcgatctcttgatgcatcatatcatggaataaa

SEQ ID NO: 242735 - DNA, 375 bp, Glycine max
agcttctcaaggaagttttctcaagaaagcttgtcaggaagctacctagtctataaatagaagcatgtgtaacactagttgtaactttgatgaatgagagtcttgtgagacacaactcaaagttcaaattctctccctttttcttccttcaatttcatgctccccccctctctctttctctccctctttcttttcctccattgaagcatcctctccaagcttcttatccaaggctcatcttggtggcgaagctccttcttccatggcttattccttaacggatggcgcctcctctcacctcttttcctttgtcttccgccgcatctccatatggtggaacatcaccattaaaggaccccattgaagctcacagat

SEQ ID NO: 242736 - DNA, 310 bp, Glycine max
  unsure (1)..(310): unsure at all n locations
ccctcctgatttccacctgggaaattggcgagtggaggaacgctccgacatttacgcaacgagcataatgtaaacctttacggttttacaaactctatagttaggcctaggctttacagtttcttttgttaaggctctgcgtctttcgttttgaatttataatacaaggatctttcttcatctgttcctacgtctctacccattctcatacatttgcatgtttacttctttactttttaaaacggcagatccgatgacgagtccttcgaaggtactaatacctgngacgccgctatcaacttctagcaaa

SEQ ID NO: 242737 - DNA, 372 bp, Glycine max
  unsure (1)..(372): unsure at all n locations
ttactacaaagactactcaaaatgccccgaaatacaaggctaaaaccctatactactagaattgccaaaatacaaggcccaaacgaaggaaaaacctattctaatatttacaaagataagcgggctcatacttagcccatgggctcgaaatctaccctaaggctcatgagaaccctagggccttcccttggatctctagcccaatctacttggagtctgctacccaatgcccttgcgggataggattgcatcanaaaagagcaatagtgagtgtgctagagagaaaaaagaaagaagcatctccagctgaagggagagaagtactatatcccttggtacctcttaggaaggacaaaaaaagaaatctggcac

SEQ ID NO: 242738 - DNA, 378 bp, Glycine max
  unsure (1)..(378): unsure at all n locations
aatctctacatgtggagaatcagcggccgcaacattaaaggcttacttgcccgtcggatgcttggttctttgagcacttcttttctctaacttgctggcgtgaggtcgagtcgggggaggtggagcccgctgagctcatttaatactcttcatatgaggcacaatggtctcatccgaaggaggcgcaacttccctctttctaaacaccaatccatcttcatcactgccaggctcactaagtgccattaggcattctacagtggacgatggttggtggttcttcttgaatcaagcacctccatcacccatccactctgatcgactccaccataaaggaacacctgccataggccccaacctgangcaatcctatccccc

SEQ ID NO: 242739 - DNA, 351 bp, Glycine max
  unsure (1)..(351): unsure at all n locations
aataacaatctatctttcaatcttctctcaacatcattcaatatctttcaactgtttctatagaattttctgatccatttctcttcatctttctaaaagtttttgttcaacactttcttttccaagaaaatttctttgctcaaaaacttgtgctattcatatttttcattctcttctccctttgccaaaagaacagaaggactaaccgcctgaattcatttgtgtctctcttctcccatacaaaagattcaaaggactaaccacctgagaattcttttgattcttcccttccccttaagcaaaagatttcaaaggactaaccgcctgatatatctntttgttccccttaca

SEQ ID NO: 242740 - DNA, 378 bp, Glycine max
aaaaacattgtaccagcttgagagttaactaaaaaattaatgatgcatctttgtttccgatcagtctatgtatcggacataatagtacaatcatacttgacccattgctccctatagcctttcatcaaattttcagtgtattcaacttccttcttcaggagtgaaactctgatatcatgatagcttggaatgggcaaatgtggcccatattgaccaatggctacaaccatattctcaaagcatttcaatttaatgaggttgaatgacaaaccagctctgtaccataagcaagcaatatattgatgcaccttcaaaacttcattcttatccattgactctcatatgttcctttgcctcaacatttccatttttctccga

SEQ ID NO: 242741 - DNA, 485 bp, Glycine max
  unsure (1)..(485): unsure at all n locations
ctaagcttgtacctaggagatatgtcaaaggatacattcaaattattatatttgtttgtgattcttgccatccaaacttgtcatggtatttgttttatatttatctctctcattttcaatttgatgttttactcaaatatactcatatcgaaactataaacttaactttctaggcctttcatcctcacgagaaccaaatacaaaggcaggagaggtaaattatgctagatgtgttagagatggtgattgtaatccctaccctccctatttggattgaatgggagcttcagctcgttgttatcagggtacctgttactgttattggggaaaaaaaatcaggtgtgcaaattaaaactaaagaaaataaattctntgaagagaaagaagtnntattttttcttagcgaacatctagttttttatttatttcatcctatattataatatcaatattattcaaagacctataantttgtatcaacattt

SEQ ID NO: 242742 - DNA, 385 bp, Glycine max
  unsure (1)..(385): unsure at all n locations
aaaagaaagagtcgctgcngaacaacaagagcttccctcattcttagttaatctcacaaggaaggtacgttagatccttaacacccttaccgcgtgtacttgctccctcaatccattgctgaaatgaatgctcataaatanatatatttgcaggctacaaatctctgctcctagattcttgtttcttaattatcaatctagcctctaaattatattaaaagatataattcgatttccaatttttaaataatttaatttaatttctatattattttaaaatagattaatttgaccatttttgtccaattgtgattagtataacaaattccaccggctcttatttatgaacaggggaattatttatttattattatattaaaaaata

SEQ ID NO: 242743 - DNA, 180 bp, Glycine max
  unsure (1)..(180): unsure at all n locations
aaagcccagagnaagaacaccgaacaggcggaagaagcctctcccacgaaattctccacgccagatcatctccagtccgctttcaccgagcgacaggcactgtaagatggacgtaggctaccaagagaaaccgaaagccaagcaaaagcaggtcagggaggggggaaaagagacgaacca

SEQ ID NO: 242744 - DNA, 430 bp, Glycine max
  unsure (1)..(430): unsure at all n locations
caatgcatatttgaatttgttntcttcaattggaaaatacaagcttgagaatgataattctttaacacattgtttgttagtgtgcagttagtctcaattgtcactattataaaatacatcttctacatcggttatttaggactntctacatcggtttttaaccaatgttgaaagtattattgttaacatcagttttccaagaccgatgttgacataaaattgacaacgtcggttatctaaataaccgatgttatataataagaattacaccaaaaaaagtgtatgaatgttgatagttgacatcggtttttccacacaaccgatgttaacttatagattaacatcntttttgtataaaaatcgatgttaacttatatattatcatcagctttctataaaaactgatgttaaatgggtatagggtaacatc

SEQ ID NO: 242745 - DNA, 446 bp, Glycine max
  unsure (1)..(446): unsure at all n locations
acctttacatgtatcattagttctctagttcaagaaaatgtcttataattaattagcatttcctttaatttttataagaaaaattatttgacaattaatccttgtttttcaagacatgaaattaagaatagtataaaagcttatagctacatgtattttattggctcgtattggtttaattttgattttcaaagataggagaatcatactatgtgttcttccattatatatatatatatatatatatatatatatatatatatatatatatcttgatgttacctctgattgatgtgaagtttaggtcttgtctaatgccttatgtttgtgtatgaatcagcttcacacctgcatatgaactaggtattntttttctgtgtgtgtgtgtgttgtgtaagcactttcctcangatgtatatatcataaagaaactagtattgggttat

SEQ ID NO: 242746 - DNA, 470 bp, Glycine max
gctagagccctaggtgagtggagtttgagatttttgccacgccaaacatgcttaatagatgtgacatttgtattgaatgttttcagactgggcatgtgtgtgatatagcctaagtcttttacatttttagtgttgatcaaatatgaagcgaatgaagtattctagttctctaagtttcctaagaacttaattctacatgaaatttgactagaagcatcgaattaatagattgcctaacctagtaatcgagtgtccaagccagttttagaagaaggaagaatctgtagcataggataatcaattgtctcatttggtaatcaattacccaactcctagaaacaaagaaactctctgtgtgattctataatcgagtaccatatgtgacaatcaattacctagaaagcatagtagaaatacagatacccatactaaaacgaattaatcgattactcccattaataatcgattat

SEQ ID NO: 242747 - DNA, 395 bp, Glycine max
agctcaccccatgacacaaaaacatgaaaatacaaaaaaaagtccttactacaaagactactcaaaatgccccgaaatacaaggctaaaaccctatactactagaatggccaaaatacaaggcccagacgaatgaaaaacctattctaatatttacaaagataagcggactcatacttagcccatgggctaaaaatctaccctaaggctcatgagaaccctagggccttcccttggatctctaacccaatctacttggggtcttctacccaatgcccttgcggggtaggattgcatcaataagggcatgacacatttacatgttaatttaagaaaaattgtaacaatattaaaatgatatgggtcccaacaggatcttcagttaacacttacaca

SEQ ID NO: 242748 - DNA, 341 bp, Glycine max
gaacatataaacacaaaccttatgatagtcgacccttcgacaaagggattgccgctcaagacatttatagaacatgttgaaaatattcgttattgatgatcattaagtgtaatttaccttatttattttactgacactcttagttcatctatgatatgcctctaataatctggcctctatgtttgcatgaatattagtattacaataatgttagcaggtttagtttagaaaaagacattatgtcgatcaattatgtactcctaactaatgatcatatttaggagaagactaatttgaatacatggaggaactatgagattaatgatgacaaccgcccgact

SEQ ID NO: 242749 - DNA, 408 bp, Glycine max
gcttagcaattgtgcttatactatcggccaactctaagctctcatattggtcttggttcaatctattttatcttgttattatattttctaaatacttctaaaataaaaccagccaatttcaaagctaaagtgaatatcatacataagcaacaagaaagaataattaattagtaccttaacaccatgacgatgagagatcatattgatttgtgtaatatattatattatattccaattttcaaataaaacataatttatttacaaaatatgtcagaccatattgattcatgtaatacattacattcctaataccaaatacaaaagtttccaagtgatttcactagttgaatatgaaggttagaaataattatgcaaaacccaagggttgtgttgaagcaatactggtat

SEQ ID NO: 242750 - DNA, 392 bp, Glycine max
caaattctggtaaaaaattctaaacctttaccccctttatttgaatgttaggtagtgaaattggcttgcctcggcccaagctgccaactggtattgttggagaaggttcaccacatcacgaataatcttcatcatttaagaatgacttacattttgtcaactgattagtattatagttttagaagctcgtaaaaagcactactcaatcatacgtctcacgtacatagcacactaatgtttacaataatgcattatagccaatggctttgtgatattctgaaatccgtgatatttcctttctccataccagatggcatgaagatataaactataataataccatcgtcgtcaaagttgatcatataacacaattgtaccccacacacattcga

SEQ ID NO: 242751 - DNA, 293 bp, Glycine max
taaccggtaagttaatttgccgatcgtgacttcaaatgaatattttacaacaaattcattattttcatttcaaaaaacttgatggcaattatgtatgtcacattacagggtattaggaaacgagcacaaccaattcaaaaacacaacgactgccctcacgtactttcacgtgggggatatgatttgcctgagaagaaatcgctagacgagaaaagaaaaaggctacacaaggaagcattgttgagtgataatccagcaagtgttgatgaccccccatctccaattaaaagaca

SEQ ID NO: 242752 - DNA, 412 bp, Glycine max
  unsure (1)..(412): unsure at all n locations
caagttgctttctaaccaacttgagattttaacagaaacactcggtaagttgtcaactaaactgtcttttggtcaacctacatattcttctgttttgtaggttacaagttgtgccatctatggtgaggctcatgaaacaggccagtgcattcccattgaagaaaacactcaagaagtttactatatgggaaatcaatagagacaaggatatactcaaggaggattttcgggcttccagcagggtccttataatcaacaaggacagtggaggtcacaccctggcaatcaattcaacaaagaccaagatggactnttgaataggccaatccaacaagggcctaacatcttttagaggactactaatctagaggagacnttgactcagtttatgcatgtaacaatgtcaaatcat

SEQ ID NO: 242753 - DNA, 298 bp, Glycine max
acctctgcctgctactggctgcgtcgcatcgcttatgtgacagggcaccggacattgggatgttaacttatggttatggattgcagatgaccgatttccgtgatcagcttatggttaagtctttgtcgacgatgaactgtgcttatatgctttgcttgcacttctctgattatgagtttctttcatagaacctattccttgccctcactatcgaaatcggtatggcgaggcaaactttcacaacgaatcttatgtgtcgagatatgttggctctatctactctgcttgagccgactat

SEQ ID NO: 242754 - DNA, 429 bp, Glycine max
  unsure (1)..(429): unsure at all n locations
gcagcttaacattcagatggagcgtctcganatanntcgggactcaatcagacatccgagtaaaaagttattgtcgtttgagttggctcacaggttcaacattcaatttcgagcgtcccgatatattacgacactgaatcggacatccgagtaaaaagttattgtcgtttgaattggcttagagcttaaacattcaatttcgagcgtctccatatattacgggactcaatcagacatccgagtaaaaagttattgtcgtttgaattggctcacaggttcaacattcaatttcgagcgtctctgtatattacgggactcaatcagacatccgagtaaaaagttattggcgtttgaattggctcaaagcgttaacattcaattttgagcgtctcgatatattacgggactcaatcagacatccgagtaaaa

SEQ ID NO: 242755 - DNA, 387 bp, Glycine max
  unsure (1)..(387): unsure at all n locations
atatatcgacacgctcgaaattgaatgttgaagctctaagcctattcaaacaacaataacgttttactcggatgtccgattcagtgacgtaatatatcgggacgctcgaaattgaaagttgaacctctgagccaactcaaacgacaataactttttacttggatgtctgattgagtaccgaaatatatcaagacgctcgaaattgaatgttaaagctctgagccaattcaaacgacaataactttttactcgtatgtctgattgagtcccgtaatatatcgagacgctagaaattgaatgttgaacctatgagcctattcaaacgacaataactcttttactcgatgtctgantgagtcgcataatataacgagacgctcgaaattg

SEQ ID NO: 242756 - DNA, 358 bp, Glycine max
  unsure (1)..(358): unsure at all n locations
tgaacagcatacacaactgaataataatccattgataaaactccaagggtccttaacaaaaaccaaccacgacgctataagaagaagtactgcactctctctggattaagataactcacaaaaatgactatactactaaagatagattcgacacaaaacatatggggcttaaataacaaatcaaatcctaataggcccattcgagagtggcactttactcttcttcggcggctgatccaccgcacttcttgatatgcttcctcgcgtacctctggctcctcagaaactttggatccatctacaaaaatcgccaacaaacanatatacacgagggatatgataaatgaatcctccgaaa

SEQ ID NO: 242757 - DNA, 423 bp, Glycine max
atgcagaaccaagggtttgatacatctgcaaagttgtcatatgagcatctctaacttcaataccaaattatgaaattctcttcttctgttttttcttttgcaatttatttcattcaaagtaagtaccgtcaagtttgtacatattgcatttggttgctctagacattttgtatggccattcttttctggttgattctgtgtacttcgttacgcatgtgtttttctttgttccattgtgttttttattctctgtacatatggtttacgccttggcatgtttggcgcatataactcaagtacattctttctcggttctatataagaaactatacggttagagaatctatcaaattgcatttgcaccatgatgctgcttgtgcttgtgctcatgtgtgcccgggtacatcaaggcttaaaaattta

SEQ ID NO: 242758 - DNA, 311 bp, Glycine max
ggcccttaaaatatatcttgcggctaccatactagatattctattacttgctgccttagtttttctacataaacacacattgtgtgctctgcctacaagattatctgggaacaatgaaagaataggaaatatcaattatccactggtaattgggtcttttcgctagttactattgagttcaagacatgacaatcgtataactgtctaaagtgagagactgttcatccgaacatttatacgctgaatactcgtgaggttgtaccatggatgtccatcactttgaagcaacgggtggattactactaccccgt

SEQ ID NO: 242759 - DNA, 360 bp, Glycine max
gttcaaggataaaagggatgcctcacattatttccatgacacaaatgcaaaaatgatgatttggaaactctatgcaaaactggtcatgcatgcgcctatgcggacgctcaagtgtcaaatttttatggtcgggtgatgcctaggttcacgattcatttcctctattttaaatcaacccaacgtttccaaaatatgttcttttatcaatttgtgcattcatccgagtccattttgggcgcctgggaaaatcttcacagcattcaccctttaggtgattacacattttttcaaaaactacctatgatcagcgaagttttcttttaaagagaagattgaaatcatctcttttcaaaacatgtc

SEQ ID NO: 242760 - DNA, 413 bp, Glycine max
  unsure (1)..(413): unsure at all n locations
tagcgngcctaaggggattttggcttagtgagcttgtttcacttagctgatgagctgaagcagtgcgcttgatgacctggagcggtgcgcttagcaaacttgacagctcatcttcttctggattcttcctcacgtttagccactgaatgtcgcgcttagcgaatgctcgctaagccagcattggcttagcgagaaggtgaaaacaacacttttgccaatttgcctaattaacctgaaattgagataaattgattattaaacacacaaaacacaagtataaattatctattacctatatttaacaaacagtaattataatataacacaacaaccataaattgggaaagttgatacanatacacaggttctatacacaaagtaatcgattcataacaacagaagtgacacctatg

SEQ ID NO: 242761 - DNA, 406 bp, Glycine max
  unsure (1)..(406): unsure at all n locations
ctctgatcccacacnccatncaccatgaactgatcattatacttcaatggtggacggaaccagacataacatcccccatgattatcaagtaaaccaccaaaacaccagcattgttgacaatgatacaaaattcagacaaaatcctggcaggccttcccatagcatgttgaacaacctcaccataagaggatgccttacacaaaacagaaaaccttaccaacaattcgacgctaatctcagacaaaattcccataagaacgatcaaaacaattcccaaaaccacacctagaactttcatagtggcagggagggccataatccctgccccgattacagtggttgttaaattgacaacagccccaggtatcccagaaccgcgattgggccccataacaataaggggata

SEQ ID NO: 242762 - DNA, 219 bp, Glycine max
  unsure (1)..(219): unsure at all n locations
tggattaatgatgaaatatgtgcattttaaggtgaaaaaaaggctaagtttggaattgcaaaatgtagcatttgggctaagcttagtatttgggctaaatgtatatccaccgctaagcgcagcttcagcgcatttatcgcanaggagaatcttgcagagcatcagcattaaagtcacgcgctaagcgcgagatcagtgcgctaaacacagcaagtgcct

SEQ ID NO: 242763 - DNA, 356 bp, Glycine max
  unsure (1)..(356): unsure at all n locations
gagccgcagcggaagataaaggagaagaggtgagaggaggcaccatccactagggaataagccatggaaggaggagcttcaccaccaagagagtgcctcggataagaagcttagagaggaagcttcaacggaggaagagaatgaaagagagagaagggcgcatgaaattgaaggagaaaaagagggagagaagtttgacactcatcaaagttatgacaagtgttacacatgtttctatttacagcctagatcactaactaaatgaaagcttccttgangaagtttctagagaagcttccttgagaagctagaggttagctacacacacncctctaatagttatgctcacctccttg

SEQ ID NO: 242764 - DNA, 305 bp, Glycine max
  unsure (1)..(305): unsure at all n locations
gccacgagggcgggctcatgatccactttgggataaacaagacccttgtcttactcaaagaaaagctttattggccccatatgaagaaagatgtccataaccattgcactacgtgtgtggcttgttaacaagccaaatctatggtgataccttatgggctaatcacacccttacccattccatctgcaccttgggtagacattataatggactttgtccttgagcttcctagaacccagagaggtgtagactctatcttngtggtggtggataggcataacaagatggcacactctataccatgc

SEQ ID NO: 242765 - DNA, 420 bp, Glycine max
ttcggagccccatgaatggcgttttcgttcatgcgtgcttcacccacgagtttggagtcgtccgtagtgattggttaatgcaattctccattctccatcctttttcggagccccatgaattgcgttttcgttcatgcgtccttgacccacgagtttggagtcgtccgtagtgattgcttagtgcaattctccattctcaatccttttacggagccccatgaattgcattttcgttcattcgtcctccacccacgagtttggagccgcttgtagtgaatgcttaatgcaaatctcatccaaaccctatttcggagccccatgaattggtgtttcgttcatgcgtcctcccacctcgagcttggaaccgtgcgtagtgattgcttattcgcaatcttcatcctcaacccttttcggagacca

SEQ ID NO: 242766 - DNA, 396 bp, Glycine max
  unsure (1)..(396): unsure at all n locations
actaggcggcggacgggcgatggtgcacaacaagtcttccacatccacaatgcgcgcataaacccaccatcccctgttgcccacctccaactgagctcacgtactcctacgtagcccatatcctcgtttctctcaacaccgggtccccatcaatcctcccaagcttccccaacatcaaagtaatacaacattcacacagcacaagctatcacagccaagcaaaacagggcaaaggcagaaaactctgctcaaaacaccaaccaaaatcacagcttttctcacttaaagaccccagtaacaattccttcgatccaattcagtaaccgttggatcgaatccaaaaatntactggaagtctctagtgcataagcctaccatttgaccgtcgggatctac

SEQ ID NO: 242767 - DNA, 398 bp, Glycine max
  unsure (1)..(398): unsure at all n locations
aatagaggtaacaatggcggtaatgacggaccgaggcagaaccgggttgagggagtaaagctcaatgttcctcccttcaaaggtagaagtgatccagatgcctacctggactgggaaatgaagactgagcacgtatttgcctgcaatgactacactgatgcgcagaaagtcaagctagcagcagctgaattctccgactatgcccttgtttggtggcataaataccaaagagaaatgttgagagaggaacggcgagaggtagatacatggactgagatgaanagggtgatgagaaaaaggtatgtgcccactagctataacagaaccatgcgacagaaactccaagggctgtcccaagggagattaaccgtggaagaatattataaagagatggaaat

SEQ ID NO: 242768 - DNA, 308 bp, Glycine max
gagaaagaaagtgtaccgcaccctcacttagaaccatagatttaaagcgtgtaaatagaatgaataaaaagggatatttcacactacaaaatctacacagacacacaattattagaccggaggttcacactcctcccgacctgcaatacaatttaattgaaaataaatgcatcacacacatcatctaattggtggatgagaatcacatttttgcggatcttacaataacttaaaacaccaagctatatatgtaatcataagtcaattaaaaaacaacgccctcatagaaaaacaatcaaaattcatag

SEQ ID NO: 242769 - DNA, 414 bp, Glycine max
ctttgatgaatgagaaaactggggcaaatgaggagtgtgagaatgaaggagaaacccatgctgcgactgtcgttcctacatggccaagtttcccaccaatccaacaatgtcattactcagccaataacaaccattctccttatccaccacccatttatccataaaggtcatccttaaatcaaccacaaaacccacctaccacataaccaatgcccaaacaccacccttagcgaaaaccaaaaaggaattttgcagcaaaaagcctgtagaattcaccccaattccggtgtcctatgcttacttgctcccatatctacttgataatgcaatggtagccataacccctactatgtttcctcaaccctcatttttccgaggatacgactttgaacgcaacatgtgcatatcattgag

SEQ ID NO: 242770 - DNA, 368 bp, Glycine max
atgacgtgactgatcatattgctttacatgatattgatgatagcaatgaacggttattgggagaactggaaggagaagaaactgcttatgattcggtctttgatgatgacgacctgaattgcctcatgctgctgaggcaactggggctggtgaacctttacataatataccgagtcacacacatataaacaaggcagcagctgtacttgcacctactcatgaataaggaaaataggtggtggaagtgcaacaagaggatgaagatgagggggaagaagagtacaattctaatgctagtgagagtgatggatttcacccacacactgatttgcatcttgaagaggatgaagattctgactagtaattta

SEQ ID NO: 242771 - DNA, 393 bp, Glycine max
  unsure (1)..(393): unsure at all n locations
gaaaganacacaaagatgctaaggaaaaactcagaatcagaatcagtatattgataaacttacaagaaagtttacaaaggctatatctcccctagtcatcagctatacacaaatatatataagaggaacagtaggaaactacaaacagaatagttataacagaattaactgtataacaaaaagtgattaaaacagaatgacaacatatgcagaatacatatgcagaagtagcatgcctggtccaataaatattgaactaatttacccttcttctaaagtccaagaacttgagaagacaaataccctcctccaccttgagtacttgttgactaaatcaccgngaatggatggagaaggcatcgtcaactttgtagaaccccacctactcacaac

SEQ ID NO: 242772 - DNA, 439 bp, Glycine max
  unsure (1)..(439): unsure at all n locations
acatgaccaaatagncttaagacataaaatatctaatttataatatcaatgacataaactgtagactaatgataaaatcacaattcaggaatggtaaaatcacaactcgtatgtacatattacactntggtcaatatgacttgttgctggaattatggaatcaagttgcaaaaagggtgttataaagaaagaaaaatgttgtaaaaagtatatttcctaaatctattggttggtttacacgttgcactaacgtccaaatgtaggaagaaagaaacctttaacaaaacaacaaaagtactgtattataaagaaataaaaggaacaaagagaagacaatgcgattcaccgatcttccagagccattacaaatttattcattgaaaagaggaaaaaaggatgtctatantaaaaaaaaataanatcaatacattacataata

SEQ ID NO: 242773 - DNA, 213 bp, Glycine max
gcatttaattgcttaaaaatgttggagattaccttttggtcgttgatactcatttctagattgtcattccccatatctaccacgcagttggcaattagcataaagggcatgcctatgataagaggaattttttcatcttcttctatgcccatgatgacaaaatctaccgggaaagtaaaatggaagactttgaccaggacatcttccactacc

SEQ ID NO: 242774 - DNA, 447 bp, Glycine max
  unsure (1)..(447): unsure at all n locations
tgaatcgaaacaaaagtctcgattcgattttagatgnatatttcaaaaaataatttccaagagtcacatctattcaaatggtttatgaatgaccatcaaaggtctatttatatgtgacttggaaacacgaattagaggagagtttttattgcccaaaaagttttatcctctcaaaagattaagagagtttttctaaactgaaatgtcttatcctctcaaaaagattccttggtcaaacacttgcatattcaataacaaatcttgattgatcatcattgtacaatctatctctttcaagagagattccttcttctcttcttcttacttctgaaaatggattgagagactgagggtctctttgtgtaaaggattcctgaacataagggaagggttgcccttgtgtgttcagactttgttaaggtatttacangagagtggaaatctcag

SEQ ID NO: 242775 - DNA, 265 bp, Glycine max
aacgcaactcgtgaaaagagctctaataggctcctctttatgggcacacgagctctatcacgcaaaatagcatgaccactggcagtcataatcccaataagttccattgcttcttcaggagtctttaatttaatcttccctccagcagaagcatccaataattgcttggatggcagtctcaaaccatcaatgaaaatattcaactgaataggctcggagaatccatgaggaggtgtcttccgcagctagctacggaatctttcaa

SEQ ID NO: 242776 - DNA, 389 bp, Glycine max
ttataactttattctaaagttgtttggaaatgcaatgtgcagttttaggaaataatgtcataactcctgtgtatatggttattgcatctgataattgataaattacttgaaattcttttactttcaattaatatatacagggtttgatattatagtttcttgtttttgtatcaatttgttttatattgatgtttcaaaaattatttactttttgctttataattttgatatggtttggttgctgcttgtttattcgggtttttagttttgattaagattaggattatcaaaagtaactattaaatttccttaataacttcaagtctggtagggtgtgaacaagttaatgattggaatgtgaagtgtagcaactaagacgtgtgatcctg

SEQ ID NO: 242777 - DNA, 419 bp, Glycine max
  unsure (1)..(419): unsure at all n locations
actatcacatatatgcttattactattttcttgccttttggatcatatagnttgtaggctccagtaggatgatacccaatgaagatcattggatcacttctatcatccagtttcttccccacttgttctggaacatgcttatagcttaaggagccaaagatcttgagatgagaaacatttggttttcttcttgaccaagctttgtctggagttatctcttgcaaccttcttgtaggaattctagtcagaataaagcaagttattgacacagcttctccccaaaatacttaggcaatttcctgccttttaacatgcttctcaccatgttcatgatagttctgttccttctttcagccaccccattggggtggggtgtataatgagtangtacttcatgaagcatcccttcatcacaatta

SEQ ID NO: 242778 - DNA, 371 bp, Glycine max
cgagcgtccgctaagcgcaacactcatgggctaagcgcaaggaagactctagaagaagataagttgtacaggttcgctaagcgcactgcttcatctcacgaagtgcaccgctttggtccatccgctaagcgagaaagtcatgctttaagccaaaattcactaacgtgcgctaagcggtccataattgcgctaagtgcacaagcacgaacaaggccacctatttaagccataaatcagattttgcgaagggagtttgggctgggattcagagctctgcatgtctagagattcaagagagagaaaggtccaagttccagtgagttctgagatattatggtgtgtgaagatctacagagactatagcttgaagc

SEQ ID NO: 242779 - DNA, 451 bp, Glycine max
  unsure (1)..(451): unsure at all n locations
gcaagcttcccagatccgatcatggaaggacnngtcatctgttcttattaggcagtactagtacaatacggacatggctcccgatcggaaccagcttcagagtatgactaagtgagagcatgagtccattaaggaatatgcccaaagatggagagatctcgcagcctaagtcgtaccgcccatgacggaaagggagatgatcacaattatggtagatacgttacccacgttctactatgaaaagctgataggctacatgccagctaactttgcggatctcgtcttcgctggagaaaggattgaatctggattacgaaaaggcaattcgaatatgcttccaatgtggcccccaacaacaacagaagagtcccagtagtgggcgcgaggaataaggaaggagatgcccacgcggtcaccaccgccccgacgtggatgaaagcaccccaaaata

SEQ ID NO: 242780 - DNA, 404 bp, Glycine max
  unsure (1)..(404): unsure at all n locations
aagttgatagcaaaagattagttcccatttcagtattttcttttaatcaaatcaacacagtaactcgtgtttgtgttcctttacaagtgaattgaaataaaaaaaatcaagttagggtttacaggagaaagatgatggaaaatattttgtaccttgctaatacccctgtcaccaattcagttagaagatatcaacctatttcataccttgtacatgacggtgctcaaggtagcattgtcgtcagtcccgatttattgtttttaaattactatggccaatagtcacaagagtaggagaaggtatggtcttgtttttcagatcacacaatataataagtagaggacttanatggaacaatgtgcanagggtattttcatggtcgttaaacgatagaattgactaaa

SEQ ID NO: 242781 - DNA, 352 bp, Glycine max
  unsure (1)..(352): unsure at all n locations
ttgaaccctctatgttgtccctatgtatataaaacagttccacaatcccaatcttacaaaactatattcatatgtcattggggcatttcaccgagcacttggtgggcgcatgtttaggcataaatagcaagagaatgggggcaatgtggcatgccccattgtttcagaatacaacataggcctaaggccattccctacaacccctcaactctaacaaatcaagcatagaaaaaaccccaaaactgccccacaaatatgagtacattctcacaatttagagcaccaaaagatgaacaanaggcaccaatggaaagctaaaactcaaggattgatacttacttgttgagtgagt

SEQ ID NO: 242782 - DNA, 362 bp, Glycine max
gcttgaacaagctagtacgctttggttttctagattatcatcttttcttaagtttgcaagcaatgtgcttttgaccattctttgttcattaagcatggttgcaacacaatttttgttttattggtttatgttgatgatattgtcttgttaggaaatgatttgcctggaatttagagaattacaaatctactcgacaatgctttcaaaatcaaggacttaggagacctaaggtactttctggggtttaaggtagctagaagctctactggtataaatctttgtcaaagaaagtatgcactagatattttcaatgatgttggcatgcttagttctaagtcagcttccacaccttgtgattatac

SEQ ID NO: 242783 - DNA, 456 bp, Glycine max
  unsure (1)..(456): unsure at all n locations
agagcttgagatgagtttgttattgtttgtgagatcctagaggtgaaggaggcatcctcaccacttgtatttttccaatccttcatcttgttcttctctttgttgtaaaggaggcttcctagttttggaaagcaaaaatcctctgttggatcttccttgtaggtacttgatgtaaatatctttctatctatttaatgatgttttgtgtgttctctgtgctatcagcttttcattctagtatgcctttaccttgatcacgtagatgcatgctttgttagggtcattcaatagtggaaactggtctgattctgatgaccttgataggacagggctaagctgtcgtactatcatgaggaatcggggtgcaataatttaagtgtagtatgtttggtttaatgcggtcctggnntgagttagtccacaagaggaatctgacgatgatgtttgatcaggact

SEQ ID NO: 242784 - DNA, 424 bp, Glycine max
ggcttattccttaggggatggcgcctcctctcacctattctcctttgtcttccgctgcatctccatggtggaaaatcaccattgaaggacctcattgaagctcaaagatccagcctgcgtagaagccccacaagcaagcttccatcaagtggtaatcagagcacaagagcttcaagtaggtgctccttaaacctccattaattatttgctttaccttctcttccattggtggttcttcattttttctccatgtatctcctcacatgtcttgtgctaaatgtttttaacatgattctttagagtttccactgattaaacttgctatagaagctagatttgattttctatgggtcacatttctttttctcgttcttggaccatgaattgtgttgagttaaggttctttgagtttggcctgtaattt

SEQ ID NO: 242785 - DNA, 432 bp, Glycine max
ctggaagttgattagatttaccatccaaactaggcttcaaggtctttattgcattggttagaaaaaaaacatcaatgtgggatggaggatttaaatatttacatacctaagttcataataaagaaaatgagttataatttaaaacttaatttgttaaattgtgactttgatgtgaatatcaggcttcttatgcaacaaacagaaccagacaacaacatcattcctaagacacacaaaaacaagttgctaataggccctgaatttgagaataattagctaagtataatgcaaacattattttaattcactatttaacttttacttatttattcaagtaagctcctaggtagacctctctttgtgattccttctcccatgtttcaatgtattgctgacattcagcacatctatcctttgcattgtgtatggact

SEQ ID NO: 242786 - DNA, 347 bp, Glycine max
  unsure (1)..(347): unsure at all n locations
tcgaacgtttcctcaagactatgcaggtgtcgtgggatgcaactatgtttggagtgtgcaatcataatattcccttctacataaagcatgaagatcttggggaaatagcacactgtagccaatgtctgaacattgntgttatacaattgtggattatataagtacatttaaattatagtattacctatgattgtattaaattgatcaatattttacattattacaacaaaaatatgcatacaaattacttaagtatgcaatcgaggaatccttctatgtatggactcctttgaccacacatcatacagaaatcaagacaatcatcatttgaatgtgaggaatatgtt

SEQ ID NO: 242787 - DNA, 219 bp, Glycine max
  unsure (1)..(219): unsure at all n locations
gcgaaaacgaaagaagggaaattcccaatcaaagaaaaggaaagaaggaacatntcccatcaaagagacagcaaaaaaagaaaagaacgaaaactcccaaccaaagagcgggagaaagcgaaagaatagaaagaacatcccaatcaaacaatgggagacagcaaacaaccaagaacaaggaggaaagaaagcccctgatcgcggaccataggaaaaaca

SEQ ID NO: 242788 - DNA, 381 bp, Glycine max
  unsure (1)..(381): unsure at all n locations
agagattctctaatctttgatgattcaagaacaccttggctgtatcaaatgactatcacaaccttggtgagatgccctcgctggaaagagtgattctttcctttctttcatgatcagccttgttctttctaaccacattcccagaaaatccacctctgcccagaattatctcgtggccataactcccattttacgcactctatataagtgattcttgagcctaaattgaatttcgaaacgagacctttcacctcgttttggaatcacctcatttggagccctgtagcttcagatattgccatttctatattactgtccagccaccacttaacctacgtctnaccatcccattcatccattttatgccaagaaccaccttat

SEQ ID NO: 242789 - DNA, 339 bp, Glycine max
  unsure (1)..(339): unsure at all n locations
gcctaaccccattacaagcctagaaagtccttcggattcattttgtgttcattgttgtatgatatgagatgaaatgcaaaggttgggacttgtgttacttgtttatgatggaatgagcctaaacacttgagcttaagtgaaacaatgacagtgaggttctggttgatgatccttccttgatttctatcattggtagtagcttatttcagttgtgactctaatgcatgtgttcctatcttngaaaagctgcatatttgtgaaaagcaattgagtgaagcattccatgatattcaattcatatggttgaatttctctgtgaagcacacgccattnttgagt

SEQ ID NO: 242790 - DNA, 373 bp, Glycine max
  unsure (1)..(373): unsure at all n locations
aactcaagctggcnccaactagtcatatatgcatgttatacttttttgtattttaactntatgtttagtaacaagactaaacttcataataatatgaaagataaattttttatttaatacttgttagtatatattgaaaagaaaactgttgaaattagtaatttttgattatttttgcaacatataagaaaggtgttatgtgtgctttctttagtgatacgatgttacgtgttttaatagactaataatgtaatgtaacattgaaacatcaaattataaatattttgtataacaattaatggtatatttttgttggatgtatttattcagcaaacaaatctattggatgtgtttatttttgtgattggccctc

SEQ ID NO: 242791 - DNA, 416 bp, Glycine max
  unsure (1)..(416): unsure at all n locations
tgggaagcacaggagttattgcggacaagtggtccatgagaattctttgggcatgtgctattggaagtgccgtcagtaagtattcttgaccttttctcagcgatgtcttctttccccagatcttgttatcaaactcagtcttgtagtatgtctccaagtatgttcctttcctcacagaaaaattcattcaattaccatcttactttctaactttgataactacaattgtctaggcctgtatatggttgctgtagaaaggcaagcacagaataagcaaaggatgctggctgtagaattgatagcaatggagtcaggggaaagcaaccgcgaaaatggatgaactgtcgtatgctataattttatgaaanatatggtagatcaaatagcacatgcagaggttcagatattctgaaact

SEQ ID NO: 242792 - DNA, 228 bp, Glycine max
cacgaggagagaccccacccaagaacgggaaacccccagcagaagagaagactaaccccatacgcaccactccccttggcaaaaggcaagatgacatgtagcatagataggcaatacacccactatacatgcatgccaagttatgtggaataaaatcgactttattcttcttcgtctcatcaaagaaagtcatctcgcaaaactaactatcaaaatagatggtcacat

SEQ ID NO: 242793 - DNA, 426 bp, Glycine max
  unsure (1)..(426): unsure at all n locations
gagctctgaccactgttctaccttcccgcgatgcctcttttcatgtccgcctgagtgggtttatagcctaaaccatacttcccacgatttccttgggtttttatcaggctagttatgccgccattgtctttgcctaaacccatcccgggttcataaccgttccccaacataactcgggccatcattaccgccgcatcggacagacaaggttgcccaaagagggagtccacggaggaaatgctgaccacctcataagactggaaagcggtttctaacgattcttctgcggcttccacataaggcatggaggatgggcagcttaccaagatatcttcctcgcctgacacgatgaccaagtgcccctccactacngaattctagctttggtggagtgtagaaggcacaactcccaccgagtggatccac

SEQ ID NO: 242794 - DNA, 355 bp, Glycine max
tatatgttgacttgaccaacgctgttattggaatgttgcgacaatctttcaacaccttattcacacattctaataggttggttgtcatgtgaccatatcgtcgtccagatgtatcgtaagccatgctccatttttcctttgaaatgcgatcaatccatcttgctatggctggactcaattgacgaaatttttctaagttttgatcaaagacatgcttgcaaggagtgtacgctacatcaaatttgttatcatcaaaagttgtatgtagacatgaaactcaaattaaattaatgtataaaataaaccttacccaacttcttgaacatctctttttgtttcgcgttgttgaatttgc

SEQ ID NO: 242795 - DNA, 353 bp, Glycine max
cggactataccaagctctaggatccatggtctgagaaagatctatatataggcttgctaagggtagagagaggaagactagagatttggatcaagtaaagtgtgttaaggatgaagaaggcaaagtcttagtgcatgaaaaagatatcaaggaaaggtggaaggtgtatttccacaacttatttaatgatggatatggatatgactctagcagtctagacacaagagaagaggaccggaactataagtactatcgtcggattcagaaacaggaagtaaaggaagcgttgaaaagaatgagtaatggtaaggcggtggggccagacaacatacctattgaagtgtggaaaactc

SEQ ID NO: 242796 - DNA, 412 bp, Glycine max
  unsure (1)..(412): unsure at all n locations
atactcacctatttttgtnncatgtcttgancggctactntttctttgaatcaagtctggccactacattgaacgagactactagcattatttgttttagttggagattcggaatatcacgcaaacagttctgattttacacattaattggcttttgatataaatatttaaacataaattatttctgctgaaacacattttcaattaaaatcaatttttataaaactaagactatgttgaacaatatatttaaactagtttataatttttttaatgaaaaacttatttgattattcggtaaatatttttttaataaattttcagtaatttttaatatcttttaaaatactattngaagtagcatttgtttaaatattaacttctatgtctttatttttccttagaacgatac

SEQ ID NO: 242797 - DNA, 428 bp, Glycine max
  unsure (1)..(428): unsure at all n locations
cttgaatgatcaagagctggccttgatttcttctttgtagcatagataagaaatgctctgagctctgagcaaacctgtaagaactggagctgctagtgctagagggaggggagaggtanaaggagctgagatagggggagctgaagtagatagggcctcagatatcctaaccttggaattttgggttccccgaaaagtgaccgagggtcatccaggttccggtagttctttttaacatatgccaaattaatggcttggctcaagttctcgaaagtcaaagagtcagaggtgactccccgggccttgcacaaggcagtgatgagggcaggaaaacctagcctcagggagtcttgctgagcaataagagtaatctgactcgagatgaggtacccaaggttcatgtccatcttttgaataatcccatatat

SEQ ID NO: 242798 - DNA, 388 bp, Glycine max
  unsure (1)..(388): unsure at all n locations
ttttataaatgttgtttaaggttgcgacaaaaaaaattataactaatgttcttgtaaaattacttttaataattgcatacataagaggatattttaaaggatttacataaatattacttaaatttatcaatgttatatttttattaacatttaatatatttcaataaatttatgataaatcttatcaaattatattttaaattattttatttaatttaaaatcaattttatgatatagactctcattataaatttattgaataaatatttagttaaactatttcttcaaacaagtctaaatatataaaaactagtaattntgttactaataagttaatatataaaaatgaaaagggtttactatctttntaatccttaaactcttaaa

SEQ ID NO: 242799 - DNA, 329 bp, Glycine max
aattttggctactaaagaaaatcaaataagaaaactaaaatacctgaatatccatggttctttaaagaggaaaaagctgagttagttaacattatcaaaaagcactgtatgagttatgtaaatgaatgtaccgaaatgaaatacataattagaaaattacgttagacaatgttaattaattctcctttatcatgaccattacgattaacatgaacgtcatcagcttcttcttctcaacgacattaggagtcatttgtgtggacaaaggactaacataagtgtccatgtatgaatcatcatcttctacattaacaccaattggtttcccg

SEQ ID NO: 242800 - DNA, 377 bp, Glycine max
  unsure (1)..(377): unsure at all n locations
ctaaaaagaggcaaatctgatcatcttgctttgataaatgcaaaaaaaaaaaaaaactgtggcaaatgaagagggtgaggatgaaggagaagcccgtgctgtgactgccattcctatacagccaagtttcccaccaacccaacaatgtaattactcagcaaataacaaaccttctccttacccaccgcccaattatccacaaaggccatccctaaaatcaaccacaaagcctacctaccgcacttccaatgacaaacatcacctttagcataaaccanaacaccaaccaagaaatgaattttgcagcgagaaagcctgtagaattcaccccaattccagtgtcctatgctgacttgctcccatatctacttgataat

SEQ ID NO: 242801 - DNA, 361 bp, Glycine max
gtgcatgtgcagtatttgagaagttcatgcataatgaaattggcaagattattagtaatgttggagttagttatagctcactctctcatgttgatgcattcattaaggacaaatttgcagagaaaaacatgattgcaggctttaaggaggaagctctaacaattaagtataaagcctttgattgcctatggaagagagatatgtgcttaagatatctaaggaaatgcacccgaacctctcctagcaatctcatattgcatctcaaagttgtcactaattgttgtatgaagaacctatcctctattcattattattgttttcctttccaccctggtatggatatgaatctttctaactcatt

SEQ ID NO: 242802 - DNA, 410 bp, Glycine max
  unsure (1)..(410): unsure at all n locations
tggcttattccctagtggatggcgcctcctctcacctcttctcctttgtcttccgctgcatctccatggtggaaaaccaccattaaaggacctcattgaagctcaaagatccagcctctatagaagctccacaagcaagcttccatcatgtggtctcaacccatctataaatatgttgagctgtattggttttgaaaaaccgtgagtgggagtcttccgcaataaacctctgaatctttcaagtgcctcactcaacgattcatctagaaactggtggaaagaagagatggtagctntgccttctgcagtcttcaattcagggaagtacttctttaagaacttttataccacttcatcccatgactntagactggttcctttaaaagaatgaagtcatctcttagcttcta

SEQ ID NO: 242803 - DNA, 323 bp, Glycine max
agcgcagacgcatatccccatcaaaaaccacaatcacacaaaacaaacaagcagcattgaatcataagaagactaatacgcatcatcatcacacctgagaaagaaaggcacacttctatttccaataactcattccaaaaagccacatctaaccatatcggcaacgtaaaatgaaacgactcaacctacaaaaaggcatgcaatgcaattggagagagagagagctaaagatgcatgaagatcaaatgcatcacgacgcgtggggatgaacagcgcacaagctattcatcatagttgaaatcaatgcgctaagaaacgaggac

SEQ ID NO: 242804 - DNA, 291 bp, Glycine max
  unsure (1)..(291): unsure at all n locations
ttataggaacngcaacaaccccgagaagttaccaaccaaggaccagaagttccaagaaaataaattactaacatatggagacacaccctccttagctagaaaaaccgcacataagttcctgccaagcatagtatctacgagtcgaacaaccctatcacggcatcaaccacgcatcaggccatgagccttccgaataaagacaacttatatacttccggggaccacttgaatattgttgttattagatgatccgcacagacaagccatattaagaagcctgtcaggaaaaaa

SEQ ID NO: 242805 - DNA, 323 bp, Glycine max
  unsure (1)..(323): unsure at all n locations
cttccaggttnccttggccacaacagctgtttggatatctgtaatccaaagtaaatcaagatcgcaaacatataaaaaaaacttcgtactccattgcccagaggctcttcgctatgcgaaggtatgggggagggatattgtacgcagccttacccttgcatatgcaaagaggttgtttccggattcgaacccatgaccaacaagtcaccaagatcgctaacatataatattataaaataaaacatgcaaaattctgctcactatcaactaggccaaaatcatcgtgcaaactcataatcataaacatgtatatagctagtctc

SEQ ID NO: 242806 - DNA, 436 bp, Glycine max
  unsure (1)..(436): unsure at all n locations
gtgttccttttggacttgaaagggtattcnttttttttatcagtgcatggcaattaattctgggtttaagtatcaaatggatgaatagattttatttctaattttagattttagataagcagcattctttattacatttggccagaatcatatggcaatttaaagaaattgaaattactaattggcctgtttgttgtggttgaaagtgaaagaaggaaagatccaatattgttttccttaggtactagattttgaaggctttactttttaatttttttaattttataaataaaatacaatataaaaagaatctgattgttgctggtttgacgacatcntaattttccaaagatattcaaagacgatatgtacgttaggaaattatttgagacttagtatattatttgacttgtcacgagaacttttataacattat

SEQ ID NO: 242807 - DNA, 375 bp, Glycine max
  unsure (1)..(375): unsure at all n locations
ggatttaaaaatatttcatattggatttaaagccatgttcaaaatggaagatatgagtgtggctattatgtcatgcattggatgtggaacggaatcaatgggggtttgaagaatgaatgaagcatgatatatttactttaacaagtttcaattattagtttactatttggttttaatcattctacatgtaattgactaatttgnatattttatattttggagcgggttggtgatggaacaccattagacattgagaccatnaaaacaattcgcaagaaggggcangatattattanaagttanaacatatgattagaaaggttacatgattagaagctattatgataatgttattgagacatataaataagttgt

SEQ ID NO: 242808 - DNA, 412 bp, Glycine max
  unsure (1)..(412): unsure at all n locations
ttcttctatacattatggncactnnngcttcccttgcacaatgtacttctgtttattgctcaaaagttgggaactacttgtacacagaataccatgatgtgatctaatgataaaatggggggaaacagaaaacaacatatatatcataaaactaatacaacaaaatctcttctcatccatgaaggggattgtttaaaaatcgaaacaaaataaaagataaacatcaatttgaaccaacattctttgttataaatccatttgcaagcaaagtctaccttctcgttggagttcaaggacaagctcattaagtccaccattatntgacagatccttgtgtatgagaagagtttctaagaataccanaacaaaatatttgatgagcacagccatanatccataacatacacatacc

SEQ ID NO: 242809 - DNA, 321 bp, Glycine max
  unsure (1)..(321): unsure at all n locations
aatgtggcatttacctggggtgaaaaacaagagcaagcctttgctttgctcaaagaaaagcttactaaggcacctgttctagctcttcctgacttttctaaaacttttgagctagaatgtgatgcctctggagtgggagttggagctgtattgttacaaggtaggcaccctattgcttaatttagtgaaaaacttcatagtgccaccctcaactaccccacctatgataaagagctntatgccttaataagagccctcaaacttgggacattaccttgtttcaaggaatttgtcatcatagtgatcatcaatcacttaagt

SEQ ID NO: 242810 - DNA, 268 bp, Glycine max
gtcaactcaacaaggcataaaaattatgcaattaatttattaaaaatgcaattattagatgataatgaccatccgccaactaggggaatcgaaaataaagtcaacagaacgaatttaattgtctgaattagtaatgtgttttagcgataaatagatatgtaagtatcacatggtgggtaatttataactgactttgtaagtgtcttttttagtgttcagacatgtcttgttcttaataagtatccaactcatttaaatctttatatac

SEQ ID NO: 242811 - DNA, 420 bp, Glycine max
tgcacggaaaatgtaattatgattttggatgcttaaagaaacaccatttcctagttaaccatgcattaggtaccatgttcaattattttgttttgttgttgtgtgtgttttttttaagaaatgggtttatgatcccaacatggttggctcatggtgcctaacacatgcaactaagaatgtagtgtgaagtttcacgctttcccttttttgtttttgttttgtagagcaaaacgcatggatgagcaaacatgaaaacaaatggtatgcaattttgcagatcaaaaagtttgttgaacgcatatgcatgatgatgccatgactcatgcaaaatgtgaggctggaatatgataacggacaaatgcaggaacgatatgctcattatgatgttatgaagagatgcttatgcgatgcatgatatga

SEQ ID NO: 242812 - DNA, 348 bp, Glycine max
  unsure (1)..(348): unsure at all n locations
tagccaaatggactcaccgngattaatttttttatacccttncgagccttggttccctttccttgtttagaagctcactacaagccttaagtgaaaaaccatgatatcaccatatccttaaggaattttggagctttggaattggtttgggattaagagcgggggtttttgttcattggataacatgctttgttggccatgcttcatgatatattatgagccatacttgatgtacattgcatattggttaaatgctggacatgctgaatgagatgttgtttctcaaaggcttccaagctataataaaaaattggaaaagaaaaagaaaagccacaaagtcgagtgaat

SEQ ID NO: 242813 - DNA, 208 bp, Glycine max
ttgagaggatctggtttcagagctagaatggatctccttattgactcaaatccatgggcacaccaccatcagaaccctagttcaccaccacaacaacgattagtaaccgagcttcatgaaatcttttttatttctcagacggaagaagcaatttaaagaagataacaaacttttcccctttctagcagtaacattttcattgaaaatt

SEQ ID NO: 242814 - DNA, 386 bp, Glycine max
aaacttggccaaataaataataaagtcatctcgactcaaagaaggtcatctgagacttcatacaattaatataaaaccctataccccaatgtcacatcctatcagagtgttgtgtctcgacgtccttcagcacaatatcccttaaagcagttcacctagttatctgctcccccgaacacagagttcaagatcatcacaggattcaaacacacacaacaaaccgggagtgagttatcacattcctaactaatagagaaataggacaactagatatacatatcatataaaccaaataaaatttacttacacgtaattcacgtaattccaccactttgtcatctaagttcacttttatccatcatcacacttttcatcataatcacata

SEQ ID NO: 242815 - DNA, 379 bp, Glycine max
  unsure (1)..(379): unsure at all n locations
tcttcgnnngntcttcgntcttcaatgggtaagttttcaaatctgagactttcaattcatttcttgttttttttagctttcatcttcatttcgttcattttcggttttcttttcttccatttttaacgagctttaaccgatcgtttaagtcgttatctcgcctaataaatgataaaatgaatttcaaccaatcatttgcattgtaatctcgtttaatcactgttaaaacataatctaaccgatcgttcacactataaccacgattaaaccaaaaagggcaaaataataataaaataatcaaaatatcttgaaaaaataataatcaaaatatctttgaataaaataatcaaaaaaatcaatcggacatttttctttggaa

SEQ ID NO: 242816 - DNA, 378 bp, Glycine max
  unsure (1)..(378): unsure at all n locations
gtgtgttacacgaccttgcaaatgtatcttgttttcatgagtgtcacttagatattagcctatatctcatagngatagcccaccactacacttactaggtgaaccctcaacgagtgatctatgaccagcaccacacaatcaactatcatttaaaatgatctattcattaaattaaatatgtatacatcaaccttataattgcctaagtttaccgtacacctcatcataggaatgagaattgaaacgactatacaaaaataataatttcgatgtactttaaccaacaaataacttcattgggtatcggtgaattccattcatgagatcgtcaatcacacaaagacgggtgtccattgttgtgactgatcgatggactct

SEQ ID NO: 242817 - DNA, 291 bp, Glycine max
aaatctggaatttgagtttggatcaggttgatcctaccactcattggaaatgaatataatgtgctcttatttgatataatgcttcacggggttccaagatttggagtgctgcccttcccccttcttagtcctttctcacgtggaggatttttcataaccgaatgcctaatgatgaaaatcgtattaagaggggttgcactgtcatctcttggtgtagcctttgctgctccacttttgaaaccacccatcacctcgtttttgatcgtgctcttgcgaaaaatctttgggctt

SEQ ID NO: 242818 - DNA, 371 bp, Glycine max
agaaaaaggagtatgatgagaagaaaaagaagttttctttgtaaaaataagacaatattttcacaaatgatttttcagtgaaacacttggtgtgaagatagtgccaaaaatatctaaaaagaatattcaataaaaccacttaagagagatatagaaacacttaatttatactggttcactcaaacagagttgcatccagttctcctttattcaattgtaaagggttctactaatcaaaactttgattacaaacaagtattctaatctaccactcatggctatacaggtatcttttttgtcacttctagcacacctttagactcccctaaatctaagaccaccaaaagtattgctaacactaagtcactcct

SEQ ID NO: 242819 - DNA, 298 bp, Glycine max
cgggagaaaaatcaccaattgtgaaaaaatctaaatcatactctagtaaaaaggctgctacccccacattatgcatttgattcctctttgacattcaaatgtggtattttcctgtatctttccttgcctagctaaattcaacttcaattcggattctttcttctttgttctcctcattcttaaaattgatttgatacttaatacaaccaagcccttggatcaacagtgacttaatttcatcttactattggaaaaataggaccttgcaattataacagttttggcctgtgagggactt

SEQ ID NO: 242820 - DNA, 248 bp, Glycine max
tgcattgaatgtcgtaacgcaccccatctgtactcaaccatatataatctgaatcctaatctggcttctttcaatccccccattatttttaccggaggattcattaccacctggagtcaaccattttgcaccgtttctaggttcatatgaaacatctccgcctcccccttataagtccaattatgatttactgaagtacaatattaaggttctacctgtcccactaataccccattatgatttgatct

SEQ ID NO: 242821 - DNA, 250 bp, Glycine max
gtgccagctccttttgaattggtttatcttggaatctgctttatttcatccagtagaggtatgttcacctctacttttctgaatgtttccaagatctctttctctgcctctttccatttttttgtggaaactgctcttggagggaatggaagagggggaatgtgctgcttctgccaatcacaattaccagtggaagaagatcacctgcacagaaattgttggaaatttttgtctcaccttttctggagta

SEQ ID NO: 242822 - DNA, 269 bp, Glycine max
agaaatatttttgtctacacacacgtggtacctacacctcgcacacacattgagatattacgccctatacccgggtctatgtgagccataaggagtggaggtcaatttgtggtcatgctgggtctcccactcgcttgatgacagtgaagtctcatctagagttttcctcttttagtgatgcattatcactgatagtccctatcgccacaatgtattacctaagaggatgatatctctaaaagctgataacaccctttggagttgtcact

SEQ ID NO: 242823 - DNA, 310 bp, Glycine max
  unsure (1)..(310): unsure at all n locations
gaggaatcatgttccctcatgggaagatggctaggaaaggggttttttttaaaccttaccctactctaacatacccaacaccactaatatatattttttattctttttataggngttgagggaaaaagcccagagtttcaagaacctatggatttgaggtcaaatccttttcaagggagaggggataatgcaatcctacccccaaggacattaaatagaagatcccaagaagattggaccagagatgcacgagaaggccctacggttctcatgagccttaacgtagattttgggcccatggactaagtat

SEQ ID NO: 242824 - DNA, 406 bp, Glycine max
  unsure (1)..(406): unsure at all n locations
attcataccatattnactttttactcggatgtctgattgagtccagtaatataacgagacgctcgaaattgaatgttgaagctctaagccaattcaaacaacaataactttttactcggatgtccgattcagtgacgtaatatatcgggacgctcgaaattgaatgttgaagctctgagccaattcaaacgacaataactttttactcgaatgattgattgagtcctgtaatataacgagacgctcgaaattgaatgttgaagctctgagccaattcaaacgacaataactttttactcggatgtctgatngagtcccgtaatatatcgagacgctcgaaattgaatgttgaacctatgagacaattcaaacgactaataacttttactcggatgtctgattgagt

SEQ ID NO: 242825 - DNA, 304 bp, Glycine max
agaaaattatagttgatctcttttatcttagcgagagtgattctcctaaattcttgagtgattcaagaacaccctcgctgtatcaaaggactttcacaacctttgtgtgttgccctcgctggaaagagtgattctttccttcctatcatctccacccttgttctctcgaaccacaattccagaaaatccacctctgcccaaaattatctcgtgaccataactcccattttacacacttaaattaagtgattcttgagcctaaatggaatttcaaaacgagacctttcaccttgttttgaatcac

SEQ ID NO: 242826 - DNA, 399 bp, Glycine max
  unsure (1)..(399): unsure at all n locations
aatcgccttgctcctgtgccttccctcaccacgcccaactccacaccaatccctcaccactccacctctgttcctgcacaaactcggttcgcaccatcacggtatgaggaccccgccgatgccctgttcaaactcactcagacgggttctgtgccaacatacctgaaggagttcgaagacttggctaatagaattatcggcttaccgattcccttcctgttgagttgcttcatctcgagtttgacgtcggagatccgccacgcagtctaggcccatcaacctatgactntggaccaggtcgccggcctcgcgaggctccaaaagcagaagttatcagaccttcgtctgctgcctcatccgcaacccccacctatcatccctcncacccctcgtcccatg

SEQ ID NO: 242827 - DNA, 257 bp, Glycine max
gaggtgagaggagacaccattcattatggaataagccatggaaggaggagcttcaccaccaagagaatgccttggataaaaagcttagagaggaagcttcaatggaggaaaagaatgagaggggggggggcaccaaattgaaggagaaaaagagggagagaagttgaactttgaagtgtgtttcacaagtttcacattcatgaaagttattgacaagtgtacacatgcttctattatagcctaggtactaactaaat

SEQ ID NO: 242828 - DNA, 335 bp, Glycine max
tatatcctcccaaacgtcaaattctccgcctatatattcaacctttccatcactggcacgtggagtgaatcttcctccatggtgcaatactaaagttatattgtcattcattctacacaatcagaaaccgcaaacatggtcagatattaggaaataaaaaaacctacctcaaaaagcgcgaagacattgacattgtcaaaaaccgcgaagacacaatcaaaaaccaaaaacattgtcatctataaaaacagagcatcataaacgaaaataataaacgatcataaacctccctacgaagcgcgaagacaatgccacagatgaaacccctcgaacat

SEQ ID NO: 242829 - DNA, 284 bp, Glycine max
agaaaaaatcaagaagaaacaaggccagacttcatataggataagtattaaaaagaattttcaaaaaccaaaatagcaaaattttcttttacaaaataaatttctcaaattttctaagttaccagagtgattactctctggtaatcgattaccagttagcagtaattgattaccagtgaccattttggttttcaaaatattttctaatggtttgcaatgttccaaaatggatttcaaatagtggaatcgattacactatattagtaatcgattacgagtgaatc

SEQ ID NO: 242830 - DNA, 372 bp, Glycine max
  unsure (1)..(372): unsure at all n locations
ccgatcaaattatggagatcatggtatggtattgaagtgacatccttggccagagtggatttgattgggatgacactaagcacatgatcacagttgagaatgaaaatgcttggaatgaatattgcattggaagtatcctttaatatgttgctatttgtttttcaaagtagattggatttgactttntctttgttttccagtcgcataaatcagctaaaccgtttcgatacaaggtgcttcaaaattgggatgatatagtggatttgtgtgctaaagatagagccaccggtcatggagctgaaactgctatggatgctgatgaagtgatgagtagagaaacaaatgaagtggaattcatggggtaggtgctac

SEQ ID NO: 242831 - DNA, 119 bp, Glycine max
  unsure (1)..(119): unsure at all n locations
aaccangnacaccttttcattcaagtcaccatgtaagaaagcattgttcacattcaatcgcttaagataccattgattgatagtagctaaggccaacataagtctcactggggataact

SEQ ID NO: 242832 - DNA, 256 bp, Glycine max
  unsure (1)..(256): unsure at all n locations
aaaaaaagcaagtatctaacatttcttaaatttttgttaacgtgcatgatgcatccttagagaatgcatgttaaaaacaatgttcaataaaaatacaagggttcaatatcttggaagtctaaatatcatttaatattttactctgcaaataattaagaaaagtaagaaatatacgccaataaggaggaaagtggtttaagagccaaggcanaagataacttcagtgctatatgcaagttttacgctcttcatttaa

SEQ ID NO: 242833 - DNA, 275 bp, Glycine max
  unsure (1)..(275): unsure at all n locations
cataaaagagccccaccaccccaannggcaaaatcacatccacaaagcacgggggcagaccaccgagcacgaggggggcgcacgtcgggacataaatggcaagagaacgggggcaacgtggcacgcaccattggcccaaaaaacaacacaggccaaaggcctcctcacccaaaccctcacatcaagaaaacaagcagaaaaacaaaccaaaactgccccacaaagacaagcatatgcccacaagggggagcacaaaaagacgaagaaaacacacc

SEQ ID NO: 242834 - DNA, 335 bp, Glycine max
  unsure (1)..(335): unsure at all n locations
caaaagaatactggaaatcaagaaaccattcatttattagccatttaccaagatctatataggccagaaaaagacattatttaagatcaaggtgcaaatagcggtcagtacccatatccacaagaaatatgttatttggaacgcattctgcaagaaaaaacaaatcagttaggaacaaacattaaaaacttaaaattcaaaactacagcaaagtttttctcactaaatgagactatttttaattaaagtcagctaggaaatattatactatttatttaatagcaaatccgtcaacatatcttaaataatgtanatgaactattttttttaataaa

SEQ ID NO: 242835 - DNA, 317 bp, Glycine max
  unsure (1)..(317): unsure at all n locations
cttncatcaggacttgggtcaccctctgatcctggaggagcgaccaactgtgctagcactaccagagaggtaggctatcgcacagctactatgcataccggggcaaggtttcacccgtgccgctgcaaaaagacaagtgtggatcgtgcgcaccaacaagaccactcttaacagacatatatgacattgctacttagcaacattctgcccagcgaccgtaatgccgatctccccctatggaagtatcaattggtctgtgccgtcccgacataggtaggtatgcattatgtccaactganttctgatgccatctacta

SEQ ID NO: 242836 - DNA, 317 bp, Glycine max
cccaaatgcagtaaacctatgcaatgcatgtcatctgatgttttttatagacagtacctacaaaacaaacaggtacagactcccactacttgactttggtggagtgacaccaacggcgatgacattctctgttgggtttgcatatctggaggctgaccgtgttaataatattgtatgggctttggaacgatttcgaggcctatttttaagaaacgatcgcctccctcttgttattgtcactgacagagacctagcactgatgaatgtagtgaaaactgtgcttcccgagtctactaattttgtgtgcaagtttcata

SEQ ID NO: 242837 - DNA, 368 bp, Glycine max
catgatgaagaagatgtcattaatagtgcacaataaaatataatacaataagttgacaaaaaattataaattatttgtacatcatataaaaaaaattaagtacatttatcaaaatttaattaaatatatctaaaaattattaatgacaccataaatatattctacaaaataaattaaaatacatgcaaataaactaaacaaataataacacaatttactcatggaacaattatgtaacaaaaataaaaacacaacataggtgtatcaaaaaatacatcaaaataatatgtataaaaaatggatacaacagaataaataaattttgtcacacaacaattatgcacaaatctttcctcaatatctaactc

SEQ ID NO: 242838 - DNA, 370 bp, Glycine max
  unsure (1)..(370): unsure at all n locations
gccatggctatacaagacatcttgccaaacaaagtcaggttaacgataactcgcctgtgctttttcttccatgctatatgtagcaaaggcattgatgctgtcaagtttgatgagttggaaaatgaggccgcaatatactgtagaagcaagcttcatgatgaatcaagattgattcaaagaagttntgatgataacaaaggtgatgacaaaaagctcanaggtcaagaatacttcatgataacaaagatgatgatctcaagaataaaagaatgagttcaagatgttcaagattgaatcaagaacacttcaaggttcaagaggaagtttgatttcaagaatcaagaatcaagattcaaggttcaagcttcca

SEQ ID NO: 242839 - DNA, 360 bp, Glycine max
cacttagcaaaccaccaaatgtaccatgatagtacaaagcctatagatgtgaaactacaccttatcagagatgtgattgaatctgacaaggtgaacgtggacaaagttctaacacaaaaaaacccggctgatatgtcataaaggccctctctagggtcaagttcaagcactgcctggacttgataaattttgaaggtgtctaaagccgattggtagaagagcagcccacaaacacacggtacacacttgctaatttagattcaaggcggagatttgtggtgtgtgactcacaatcacaattgacaccagtgagaaggcttaaagtagtgttgcataactgtttcaattatataactgaat

SEQ ID NO: 242840 - DNA, 144 bp, Glycine max
tacccttggcactcctcttttaaactgcttagaaaattgttccggcagaaaatcccgccgaggcgcttccatccgtttcggagtgatttccgaagttttccaccttcttcacaatcttattcggtctcatgcgactcactgtta

SEQ ID NO: 242841 - DNA, 338 bp, Glycine max
  unsure (1)..(338): unsure at all n locations
aactttgatgaatgagagtcttgtgagacacaactcaaaggtcaacttctctccctttttcttccttcaatttcgggctcccccctctctctttctctccctctttcttttcctccattgaagcatcctctccaagcttcttatccaaggctcatcttgggggagacgctccttcttccatggcttattccttaatggatggcgcctnctctcacctcctttcctttggcttccgctgcatctccatggtggaaaatcaccattaaaggaccccattgaagctaaagaaccagcttcatatagccccacaagcagctccataatattgcatgcatcta

SEQ ID NO: 242842 - DNA, 335 bp, Glycine max
  unsure (1)..(335): unsure at all n locations
gaacaccggtcatgtgtctactatcattgngataatctctttctctgtttttgggggtgctacttgagttgccaagtctctccaccttttgggcgtgttttttgaatgatccgtccccctttttgcacatgttctgtagttgcatcctatccggaaccatatcaaaattgtagtgatactgcctaacaaaggcaaccattaggtccttccaagaatggactcgggaaggttccaagttagtgtaccaggtaacagctaccccagtaagactttcttggaaggaatgtatcagcaattcctcatcttttgcgtatttccccatcttctgacataca

SEQ ID NO: 242843 - DNA, 280 bp, Glycine max
  unsure (1)..(280): unsure at all n locations
gcagaccattataactttttactcggacgcccgacggagnccagnaatataacgagacgctcgaacacgaatgtcgaagctctaagccaatccaaacaacaataactttctactcggatgtccgattcagcgaccgaacatatcgggacgcccgaaattgaatgttgaagccctgagccaattcaaacgacaataaccttttacccgaaggaccgactgagtcccgcaatataacgagacgctcgaaattgaatgccgaagctctgagccaattcaaacg

SEQ ID NO: 242844 - DNA, 344 bp, Glycine max
  unsure (1)..(344): unsure at all n locations
gagtggaaaatcctaatttggttaagcctgaaattttgcagcatttgcaaagcagattcaaattaattgaagttatgtacgagcactgtagcttttacaaaaataagcactgcagcttatttaaggcacaaattctgcagcatctgcagtatgtgggtggaaaaagggtgggagtggaaatttaaatggagaagacacttgtttgacagagagcttgagatggcagattgtttccgtaatgatagtngtggtagttgtattcagattcacaaaaaagatgactggagaactttgacaaggacttttccttcacctacagctattggtcgtctaaacatagcatc

SEQ ID NO: 242845 - DNA, 347 bp, Glycine max
acaagaccaacaacacaaggtttattattgacagcggtattgacattggctggcaagattatatggttcgttagtctcagtcagattatcacccactgtgtatgttaccatgttttctctaatgcttgtgcgttttatgttctagattcggtgaataacctgggtaccttccaaggtctgggaccaatgaattcatggaagccctggctgctggtgctgatgtcagcatgatacgacagtttggtgttggtctctactcgcgttatcttgtatctgataaggattctgttaccactagacagaatgatgatgagcagtatgtttgggaatcccatgcttgtggctca

SEQ ID NO: 242846 - DNA, 325 bp, Glycine max
catacgataattgttagccttatcttgatttcaaactactaacgtccgtagtcttctcgtccattttattgatacttgattcaaggaattggtttattcttttgcatgcgattaaagatctcccggacgcccagaaagtcactgacagaagtggcgaagttgatggtgtacctcaagaatgactacatccttagtgtgtattggaattcatttctattaaatattaattatttataatgaactaattatctgttgtgatatttttctttttgctgcttggatacccattgagggggggggtaagatagaaaatgaaagggattga

SEQ ID NO: 242847 - DNA, 238 bp, Glycine max
ctaagggagtttagagcagcaaaacttcttgctctcgagggttggtctacacaccttgaatcctagaagtgttcgtaatcaagttcacccttcactttagccttgttcattcatcttcatcacttgaaacttctctcatgttctcgagttttgttgaaggttattttgactcaagagaactttattcttggtacccttctctttcacgtggagactacaagaggtaaagggagggggg

SEQ ID NO: 242848 - DNA, 237 bp, Glycine max
gggccgacaccacacaacaagacctacgacaccacggagccacccaccaacctgccacggaaggcgcacaaccctcaaaacccaacacacaccagaaggccggtggcatggaccatacgacgcccccccatcaaagccaggccacttcccccgaaaacgaccaccctgacgcaccgcggctcaccgcgaaaccccaaaccagaaaaaaaaagctgcaagaggacccgcagaacagca

SEQ ID NO: 242849 - DNA, 381 bp, Glycine max
atgacgcccatctcttgggaattcttttcatagtctccatgtctaatggtgtttcatcaccaaaccattacaaaatataaaaaaaatataaatttgtcacgtacatgtaaaattattaaaaaaatcaatttatattgttaaataaaaagatgaatgtatccatgctaacaatagagtaaatgagttataatttaaaacttaacttgttaattgcggctttgatgtgaatactaggcttcttatacaatgaacaaaatcacacaacaacatcgttcctaggacacaaaacgacaagctgccaatggcccctgaattggacaataattagctactgataatgcaaactttctttaaatgcattcagtaaattttacttactga

SEQ ID NO: 242850 - DNA, 372 bp, Glycine max
  unsure (1)..(372): unsure at all n locations
ctctcatccaccaaaaacatgtgccatttggatcattcaagagtatcaacataaggctattttagtaatttcttgagaccccctcacacaacaacacatttacattaaccctaatccaatctagttcaatcaaatcaatcaccattaggtttaaaccaaaaaacaataacatttaaaccctcaccaaagatactggtaaatagtgaaaggccctctttcgaaagtgaatttgttggagagattgatcacntaattggctagggacacgacgtaatcctctttgtcgaagacctcgatgacaacattgttattggtccctaccatcgacactttcactagctagggggaaagtctcttgggacttatgacatt

SEQ ID NO: 242851 - DNA, 200 bp, Glycine max
  unsure (1)..(200): unsure at all n locations
ctactttnattcgcggaccatagagtggtacctggagatatgtcgcgggagtcaggagaccttggggacgtcaggtggggtgctattgcccaaaaccaagcttgatcaatcctgacccaacccgggcatagtcagtcagtgagaacctgtgacgtacctaaacaggcgagctcctggtagtcaaccaataaaagaacaaa

SEQ ID NO: 242852 - DNA, 388 bp, Glycine max
  unsure (1)..(388): unsure at all n locations
cattttttgtggtactagggggnggncgggcgatggtgcacaacaagctttccacatccacaatgcgcgcagaaacccaccatcccctgttgcccacctccaactgagctcacgtactcccacgtagcccatatcctcgtttctctcaacaccgggtccccatcaatcctctcaagcttccacaacatccaagcaaaacaacattcaaacagcataagctatcacaaccaagaaaaacagagcaaaggcagaaaactctgctcaacacatcaaccaaaatcacagctnttctcacgtaaagaccacagtaacaattccttcgatccaattcgttaacccgtggatcgactccaaaatttactggaagttatagtgcataacctacatt

SEQ ID NO: 242853 - DNA, 380 bp, Glycine max
  unsure (1)..(380): unsure at all n locations
agctagattgatatatgctantttcgacagnccatgggtaggccctgtgtaagtagtccccaaagaggatggaatgacaatgataaagaatgacatgaatgagctgattcccataaggaccatgactggtttgagaatgtgtattgattattgccttctcaacaaggcaacaaggaaagaccactttcctctcttcttcatggatcaaatgcttgagcggttagccaatcaagccttctattgctttttggatggatactcaaggtataatcaaattcttgttaatctggaggatcaagagaaaacaaccttcacatgtccatttagagtnctttcgtatcggagaatgccctttgactttgcatgcaccaccacattca

SEQ ID NO: 242854 - DNA, 316 bp, Glycine max
gggttcttgcgtgagttcaggaacacaatatgacccttaaaaataaattaaggactcaagttgagttctagtattaaagtgaaaaactaataaatgttcttacatcctatatgaaaaaaataaactctaagaaaaattaagatactaaattgaatgttctaatccatcaaatcaaattgactgatatcgatatacaataatatgtaagagactaaattgattagttcacaccaacttattaatgaattgacttacacttcttaatgcattaaatactttatttgtgtccacgaccagattttgagggcccaaagct

SEQ ID NO: 242855 - DNA, 347 bp, Glycine max
tgtgaaccaggacgaatcaacaagaatcaagccaaggctatcgtgcaagcaatcaatggggcacaacacaccaaatgattataatgatggatggctcaaattctcacaaaggtaaaatcatcactttcaaattgagctctcaaaactatcatgacatgtagagaaaaatcaaggatttcaagtcacaaaatgtcaagaacttttattttcaaaacaattacccatttcttgaacatatcctataattcaaagaaaaacatgcaaagtcgtacgtgcacatgaaattgacccaaaatattaaactgaaaatccgacgaaactaacaacattaacaaattaacacaact

SEQ ID NO: 242856 - DNA, 366 bp, Glycine max
ctcggcacaacccctaggggatggtgcctcccctctcctcttctccttttccttccgttgcatctccatggtgtaaaatcaccattgaaggacctcattgaagctcaaagatccagcctctatagaagctccacaagaaagctttcatcattttggcccacactctttaaagatgctcactagcatgtgctacactatgatcaatgtcgaaggatgggaggtatatcaagaagaaatgaaatgcctttacaaaatatcatggaggttgaggtatttgattgctgggggatttattttgtaggtacctctcctttgtcttttggaaatgaatatatactagtggttggtgactatgtttctaagtgg

SEQ ID NO: 242857 - DNA, 377 bp, Glycine max
  unsure (1)..(377): unsure at all n locations
agaaagctnagnatttcncccgtccttgtaaagagcatagccaaagactggctgagcatcaatctcacccacacaatctgaaacaactcacaacttaatctgttaataagagccttgaatttgacaagcaaaggcaagggagttcacacctaagattgattacttcaattctcacacaatcttccatacatctacttatgtgacataatatgtgacatgtttcttgcttggttaccttggagacccaattcaattaacttaagataccccccaggttgtagcaattcccccacaatcctgtctggttcagtcaagtccctttcaataacatgcactcgccttcctttctgaaagcagaccatagaccacatcttgat

SEQ ID NO: 242858 - DNA, 397 bp, Glycine max
  unsure (1)..(397): unsure at all n locations
tttttttgttctaccaagacactactggctctaaaacaaataagaagatttgttgttggtttgcacacatgctaacttaagcgcttagtcttttctctcaggataatcaaaatgctctgagagctttgcaactttacaaaatatactaaaaatgtttgagatgagagaacaagagaattcaaatattttcccgtaggttcattaacctaaactcttcaaagcttattgtatttataggtctttttcaacaaatgtatgatgtctataaacaaatagattttttcaatggaagcttgtgtctaaagaagtgtttggtggatcatttaatgcttatattaaatgcatgtcccctccatgctaagaaaccactctctttagntttcttggagcatacttt

SEQ ID NO: 242859 - DNA, 283 bp, Glycine max
agggttcagccccttaggcacttctctctctttcaaatttgcttaggaaaattgtttccgtgcagaaaatccaagccgaggcgcttccgtaacgttttcgtgagtgatttcgcgaaggttttcgaccgttcttcgacattcttcattcgttcttcatccgtcttcaatcttcaacgggtaagtacctcaaaccaaacttttcaattcattctatggacctcgggggggccacatttgggttcaaggatctttattctcggtttcatttactctttataccccc

SEQ ID NO: 242860 - DNA, 347 bp, Glycine max
  unsure (1)..(347): unsure at all n locations
gcgcctcngaacgttgaaattcaaattcaaatgtgaagagtcacatcctttcacataaaagctttgtgtaatcgattacacttatttggtaatcgattactagtgactatttctgaataaatcaaaagatgtaactcttcaaaaaggttttgactttttcaaattggttttaagtttttctaaaagttataaatcttctaaatggtcttcttgaccagacatgaagagtctataaaagcaaggcttagttttgcattttgaatcattcattctatcaatcaatcttttccaattcattctttacacaagcaagttttccacattggattctgagtctctttcaactt

SEQ ID NO: 242861 - DNA, 393 bp, Glycine max
  unsure (1)..(393): unsure at all n locations
ctnactcctggatgtgccgnttggtttgatctaggngaaatttctccccagccatggcgcatctaccaactccaagtcatctacccaatcgttgaactccttgatgtcgtttgtccctaaacccctttggcaaatcccaaatctctcagcaaggtacctgatgctattaaagtcacccaagatgcaccagaaatcccctgatagagaatgctttagctgcctaacctgatctcacaatatcctcttattttgtatttcacagggggaataaattgtaagtatactgatttgttgtgcctccctcaaccattcttctctcaggaaataaagcacagccaacaactttcatttngtagttaaatggtcgtcactccacaagcataaatacacctg

SEQ ID NO: 242862 - DNA, 335 bp, Glycine max
  unsure (1)..(335): unsure at all n locations
tgaaaagccataaccttatttctcctaaaaaaggtattaataccctaaggattggattaatacaatgatctgagataacaccttttgtttaaaaagtttatttttatttttttcttgaacttaatggatctaagatgagacccttacatctagggatggatggatatatggttcagactcatccatttaaagtctgatcaacggagttcgcattntagcattttacattgacaggatgaaattgatctataaaataaattgacttattattttttatttaaaaaagtgtaattactttacaaaataatataaaaattagctttgagaattgcata

SEQ ID NO: 242863 - DNA, 316 bp, Glycine max
  unsure (1)..(316): unsure at all n locations
tttattcgncgaccacagagcggtacctggagatatgtcgcgggggtcacgagaccttggggatgtcaggtggggtgctattgcccaaaaccaagcttgaccaatcccgacccaacccgggcatagttggtcagtgagaacctgtgatgtacctaaacaggcgagctcctggaagtcaacagataaaaggaacaaagaccaccaagcaagaaggcttgtggtggctggccagctatgaacttgattgatgtgtgagatatggcctctggtaatcgattaccaagggtgggtaattgattacaaggcttaaaaatga

SEQ ID NO: 242864 - DNA, 356 bp, Glycine max
  unsure (1)..(356): unsure at all n locations
aaaccaaattactgtgttttctaacaaaaccttacaaatttgaacttatctaagaaatttgagtacaacactatgcctttgggggaagactacgaggatgctaggaaccttaggaagcctttcgtgatcaacaacaacaacaacgttggttatagtgggaatctctttgttgcgctatgtgtcctcatcgtggctttgggtccgatccaattcggnttcacggtgtttatttacattatacatctacaatntcacaatttcccttaacttcatacccctttttttttatactttgattattaatcaattacctttttttgttcctctttgcccatgctaattatatattgcttata

SEQ ID NO: 242865 - DNA, 223 bp, Glycine max
  unsure (1)..(223): unsure at all n locations
canagcacccgtgaggtagcatgtttgctttctatatagccaangngcgaggatgctgactctgtttcaaaatttttatacatgtaaatagatgatccatgatgttggtatctctcttgattcacggctacttataactaatttcacacttataactatcctaatgagccctatcaccacttaaatatggaaatgatcgaattacttccttgatattatacca

SEQ ID NO: 242866 - DNA, 350 bp, Glycine max
ctgacttctctagttcagctctcactgttaataataatagctctactgtaatgcctaattctgttgtttcttctttcaatgttgctaatctcggcatgctaggttagggcatcctaatgatcatgtaatgaaagttgttctcactcattgtaacatttcttcattgaataaaagttccacaggattttgttcttcttgctgtatgggcaaatatcataaattaccctttcatagcctctacttctgtttattctcctttttaaagcttattttacagatttgtgggaccttctcatataacctatattctgttataaatatatgtctccttattgatgcttctctaggat

SEQ ID NO: 242867 - DNA, 416 bp, Glycine max
  unsure (1)..(416): unsure at all n locations
gagaatagggggtttttctattgtggtactagggggcggncgggcgatggtgcaaaacgattctccacgtccacaaatcacgtataacccaccatcccctgttgcccacctccaactgagctcacgtactcccacgtagcccttatcctcgttcctctcaacgtcgggtcctcatcaatcctcccaagattccacaacatccaactaattcaacattcaatcatcacaaactaacacagccaagaaaacagggcaaaggcagaaaactctgcccaaaacacaaaccaacatcacagcttttcacattcaattaccccagtaacattctctttgttccagttcgttaaccgttggatcgactcgaaaattttactgcaagtctctagtacataattctacattttgaccgttgggat

SEQ ID NO: 242868 - DNA, 91 bp, Glycine max
cgccccagagggctgattagcgggacaaccaccccagacccaacgacccagagcccaaaacccaagaccaccacaaaaaacaggacaccgg

SEQ ID NO: 242869 - DNA, 360 bp, Glycine max
  unsure (1)..(360): unsure at all n locations
cacagcagttctctctgttcgtttatttgaggctatatcnaagcatatacttgttttatctcctaactaataaacttaattgaacatcagggtcttttgttctgaaagtctccccacctatccccctaacaaaggtacctctcaaagtcaatgtgtgaagtctgggagtctaccatagtcatgtccaccttgatatgtgcaagccaactctaaattttaataagtacaatgtataatataattttttgacctaaatatattaaaatgaattaggaaaagtgtgtttaggcaacttagactntntacaaatatacatcctaaatttaattttgtttcaaatgacccctaaaattatctatt

SEQ ID NO: 242870 - DNA, 368 bp, Glycine max
  unsure (1)..(368): unsure at all n locations
taaaatcttaatactttaaaattataaattattaactatttatttactgatctgagaattttttaaatttatgtaaatgaaaaaataaaaaaatattttaaaattttaaaaataaaataatttaaaaactttcattaaataaataaaccataactataaaaaaaataaatcccaatgaattatataatagtaaaattctaacatcctttttttgaccattacaataacgtcttattaggatacacataagatgatatttttanataataaaggggtaatataatgtgtaaagtgacgtcaatataatatatatataatggatgtaaatataaggggaaaataattatacattaatagtggacaaattt

SEQ ID NO: 242871 - DNA, 144 bp, Glycine max; identical to SEQ ID NO: 242840

SEQ ID NO: 242872 - DNA, 337 bp, Glycine max
  unsure (1)..(337): unsure at all n locations
taggcccggattcaaggcgggctgcagcaccggctccgcttccttaactgtactggaggcggttgcggnggctctatcctctatggttttctggagtcttaacatgacctccaagatggaagccatttgatcttttaaggccgatagatcggccttcatctgttcctgcacaccctcttcattatccatttttctggatcgagtgttataggggtgccttggtgttttcttagttatgatgacatccctaagaaataacacacgtgagtatgccaccaaaacatgagtatgcaaatggatgatcggagcacttggaatccatccaaggttttagata

SEQ ID NO: 242873 - DNA, 268 bp, Glycine max
tagagagagaaagaggaggggggcgtgggatttgaaggagaatagggagagaagttgaacttttcccattcatcaaagttatgacaagtgttacacatgtttttatttatagcctaggtcactagcacatgggaagcttccttgagaagcaaggaaggtagcttccttgggaagctaggaagaaagcttccttaagaagctagagggtagcttccttgggaagcaaggaagtaggcttccttgagaagctaaaaagaggggggggggg

SEQ ID NO: 242874 - DNA, 195 bp, Glycine max
  unsure (1)..(195): unsure at all n locations
ggcccggatttaaggctggttgcagcaccggctctgcttccctaactgtactggaggcggntgccgnggctttatcctctatagttttctggagttttaacatgacctccgagatggaagccatttgatcttttaaagccgatagatcggncttcatctggtcctgcacgacctcttcattatccatttttctgg

SEQ ID NO: 242875 - DNA, 295 bp, Glycine max
ttacatatatcatccaaatcatttttcataaaactagcctataagttaattggaaggtaaaaaatgaactgaaagtctaaaagttaattgaaagctgaaaaatcatcttattaaaatataaatctttaataaattcggtttatgaagtaattcacaagtttaaaatacataaaaaaaaatcatcatttatttaaaaaatataataagaaaattgaatcactttattgagaataaaaatagaagataatatactcagttaaaaacctagagatgactctctttaacacactatttg

SEQ ID NO: 242876 - DNA, 417 bp, Glycine max
gctatgctaaacaagccaacatagggagaaagaaggttgtcttctaacccggagattgggtttgggtgcacatgagaaaagaaaggtttccggaacaaaggaaatcaaagcttcaaccaaggggagatggaccatttcaagtgcttgaaagaatcaatgacaatgcttacaaagttgagctgcccggtgagtataatgttagttccaccttcaatgtctttgatttatctctttttgatgcagatggagaatccgatttgaggacaaatccttctctagagggagagaatgatgaggacatgaccaagagcaagggcaaggatccacttgaatgacttggaggacctatgacaagggctagagcatggatagccaaggaagctcttcaacaagtgctgtccatactatttgaataca

SEQ ID NO: 242877 - DNA, 175 bp, Glycine max
gcgacatagctctaaataagtgaaagacacacggccacgaaaaaaatccaataagcaaatacaaacacgaaaataaaaaaataagctactagtactagggcaggaaacaaagaaagtagattcaaagagcagagcaccaccaaagcaacactcaattattaatgataaggaaatg

SEQ ID NO: 242878 - DNA, 427 bp, Glycine max
  unsure (1)..(427): unsure at all n locations
tctcgangaagaactctatgtgaatgacagtaagcaatgccacagagaatttgataaaggaacatctgcagaaaggatcattaaggaattcaaattttaaatccaaactaactggtattttcaccaaaattagcatctcccttatataacccttgacaaaatagaatttacattaatgatgaatgttaaagtggaatattgaaacataatcttacctgcataaaacgagatgggaagggaatgtaatgggaacatcacacatagcatcataagttcttaactaatcacattcagatagtacattaatgagggagccaatcacacagacaataagaaaggaaaccaaaaccaatgaaatacatgacagctgcatctcagtacagcgtcttgatttccattaagggtgttcacggatatgggtcacccc

SEQ ID NO: 242879 - DNA, 383 bp, Glycine max
  unsure (1)..(383): unsure at all n locations
ccagccatcgaataaggaaaggctcacgggccaacagattgctttctcacttagaaaactgtgattttctctcttgcttgaagtcataaaatgccttgtagtgccatcatcaaatcatgtttctgtaaaacacgcgaaatttgctctgctngtgtaatctaaaaaattgaacatttacaaattacaagcaagaaaatgaagatgaggataactttacataagtttgaaagaatcggaattngtggtaaccatttatatcatattctcaaacttatcaagcattcttaccctctgcatggatctgacaaagagtgtcataaaaatacctgcacgttgaaatgctatatctatcagccttgagaataacattgaacacgattgga

SEQ ID NO: 242880 - DNA, 341 bp, Glycine max
ataacgcataatcccttcttttatttcatctatttaatgtctcaagaaattctctcataccttcaaaaacgacgtattatctttcttctaaatctaccggtatcagtaaggcgagattaaggatcttccaagacaagacaactcatttaagaaaacttacttgtatactcaggaccattgctaacaataaggaatcctttttaaatcttaacctacggtccaagggagccagaatcccattaacaaatttattattttctaccgaaaaaaaggccattttttatttatccctctttccttttataaattgcctaagaaaaatcccattcttactaattcat

SEQ ID NO: 242881 - DNA, 419 bp, Glycine max
  unsure (1)..(419): unsure at all n locations
cagcggagaaaccgaaaaagcgcgccgatacttttatggncgccgcaanntactgccgatgctaccttcttccactcgaattatatgcattgggcaaaagatcacctttacttcctttacccaacagattaatcagaaagtgatggtggatcagaaaaccaaaacacttgtattgagtactgatataaatagctaactcatcaaaagccggtgccctacactttggccaaaaggccacatctgttcaacatctaggctaggcagaattccctttacagaacaagcattaatagaatggcctcctagaagaaaaatatcgccctctatgggatatgggctgcctaaactcataactatgggcaacctcaacactctgttggggaaaaagcttctttacttcttcgaagttaccatcaaaa

SEQ ID NO: 242882 - DNA, 401 bp, Glycine max
tgaccagccaccatatttagagagttaaactctaacccatagctgtaagctgatcagaatgcaaaagcccataaccatctacccaacaaagctaagttgaatttggagatattctttatccccagtccaccatcagacttaggcaaacaaatatcatcccatttcacccaagggatgtatttatgatcaatgtctccaccccacagaaaatttctttgaagggatatcagctttttgacaaccttttgaggtatcttaaagaaagagaggagataaattgggagggcatcgaggacagaatttatcagagtaatcttccccgccatggatatatatttctgagcccactttgggtatactgatttgagttagtgacaattgatcccactcacctgacttga

SEQ ID NO: 242883 - DNA, 417 bp, Glycine max
  unsure (1)..(417): unsure at all n locations
aaacaaaaaaaaccacaatcgcaaatataaaggaaccccccaaatcaaaatcccaaaaggcaatatcaaattcaaatcaaaatcccaaaccataatttcatattcagcaaaatcccttaatcataaccccagattcaaatcaaaatcccaaatcacaaccctagatccaaatcccaaaccacaatcaaaacccaagcacaaaattaaggcgcgattgttgcctgaagacngccacaatcaatttcttagactcattcatacacaaaatgcaagcaccatatgaactccattgaaaggggactacctagcaaccaacattcaaaaccaaataaaggactaagccaccataacctggaacatctttgacagggacattgagtgatcgtcaatacaaaaaaaatgaggcataaacaagga

SEQ ID NO: 242884 - DNA, 341 bp, Glycine max
atgaagactaaacatgcattggttatgtaattgtattcattatgcgatataatatgttgtaacccgttactaactaattaatattatcaagtactcgtttggttaagtaaggaaattgttggtccaacaaaaatcatttacgcgtgcagcttacatcattgtcgtaattgacaacacataatgacatgcatgcgtattacatttcgagcgcgacaacacattggctgactttaatacacattctgaaactagcaagcgctcgacaacacattggctgacttgactacacattggcgacacacattggctgacttgactacacatttactcgtgtttatttt

SEQ ID NO: 242885 - DNA, 464 bp, Glycine max
  unsure (1)..(464): unsure at all n locations
ctgnngctgncacaggcagctgacttcccttgataatatgaaaaggaagaagctgcagcaagatcttcggtcagcagcccaagctcacgagtgtttaatgagacagaaggcgagatcgcgttggattaaggagggggtcagatatctcgatattttcacctggtgattaactcccatcgaagtttgtagctttttccagcagagatttcaagaaactatgagcagcagaccagttttggatggcacctcttttcaagaaactatgttctttggggaggttactatgaaaaatgtcaagactatcaaattaattttgagggcttttgaattgtcatcaggacttaaaataaattatgggaagagcagctntggggtgttgggccaatctgaataatggaaattgcaggttgccagttatttgaattgcagaatcatgcctctgcctttctcttacttgngaatac

SEQ ID NO: 242886 - DNA, 345 bp, Glycine max
tgatgcaatcctaccccgcaagggcattggatagaaaactccaagtagattgggccagagatgcaagagaaggccctagggttcttatgagccttacggtagatttcgggcccatgggctaagtacgagcccacttatctttgtaaatattagattaatgtttcattatttttgggccttgtatttagggctccataatgtaggtagggtaccctagaaatataagatttttcagcccttgtattttagggcacctagactagtatttgtattaaggatagttatgtaatttcatatgcactaagcggatattcgatgtgtgtggctggaaataaatataattga

SEQ ID NO: 242887 - DNA, 310 bp, Glycine max
aaaacctccaaaaatgaaggataaggcatcttcgcgtctccagaagatcattgcattgcatctcctcaaaaggcgcccataggaagcctactcagaaggggtaaaaagacaaaagtcctccagaaaagagctcaggactccatgcaaaactcctcttcaaggccgaaaacaataacctcggagggaaaacgcaataaaagacaaaggagcacaatatcaaacactaactaattgaagcaaatgttgcaaaataacatgacacggccctggaggaacaaaaactcgcccaaggagcatgtcagaactcctc

SEQ ID NO: 242888 - DNA, 274 bp, Glycine max
  unsure (1)..(274): unsure at all n locations
tacatgagttcgtatatgagcattcaagatcctttgtgagccatattttgtattgggctaagatattgacattgtggtctcataagtgtgtttgagtagaagcatcatcacccttacttttacttttaatttatttttatctgttgaatttgtatagaatcgcacatattatatttctaacttaaattcaaccaaataacctaaactgaatagtaaaaacgcatagaccataccaagttagatatacaattaaatcactacaatntacggatga

SEQ ID NO: 242889 - DNA, 388 bp, Glycine max
  unsure (1)..(388): unsure at all n locations
gcaagctggaatcggacctcagagtgaaaagttattatcatntgaatcnctcaagagctcccgntgttcaattctgagcgtctcgacatgtgattcgctcgaatcggacatccgtgtgaaaagttatgaccatttgaatttctcaagagcttccgatgttcaattttgagcctctcgacatattatgcgcccgaatcggacatccgtgtgaaaagttatgaccatttgaatttctcaagagcttccgatgttcaatatggagcccctcgacatattatgcgcccgaatcggacatcccggtgaaaagttatgaccatttgaatttctcgagagcctccgacgtataataccgagcgtatcgatatatcataagcccgaatcggacatc

SEQ ID NO: 242890 - DNA, 335 bp, Glycine max
aatgcaaatggccagagcttctgacacggatgtccgagcctggcgcattatatgtcgccaggctcggacttgaacagacggaagctctggccaaattcatatggtcataacttttcacacggatgtccgagccacgcgcattatatgtcccgaggctcgaaattgaacagcggaagctcttgacatattcaaattatcatgacttttcacacggatgttcgatgaagacgcatcacatatagacacgctcgagacataacaacggaagctctcgacaaattaaaatggtcataacttttcacagtgaagtcccattcaggcttataatatattga

SEQ ID NO: 242891 - DNA, 353 bp, Glycine max
  unsure (1)..(353): unsure at all n locations
aagggaccgaagggcttatgacttgcaccaaanatcttggtttccaaagcattgatattagtgataaaatcgatgataatgacaataataatgatgatgaggatgaatataattgttggaggaaaacaagggtgacagaaggtaaaggaaactttcctccaccactttcgtcgttgaatgggaatggacaacctagtttcattcttgtaccggtatggaaaaatggaaggttacaactcagcaaagtaagaattaagaaaccaaaaattctctatgctacccgacaagatggacgattgaaattgttcctcgttccagatcaatgtgtaaaggataatgcncaagatgatgag

SEQ ID NO: 242892 - DNA, 365 bp, Glycine max
tgctgcttaaatctgaactctcaagtaatgatcctaacaaaataaatcttgtcttgatatataattaccgaaagttactttcaaactaaaaggtttcccaagactacaacttagagcatccaacccaaatcatgaatgaaacccaataaagggtctatagcatatgcaacaaacttataaactttaggattaagaaacacagaaaatagggtgagggcatacgaaaacatttgtcgaggtaggaaagttgaaggaatgatcccaagcaaattgtgcaacagcaactggaatcctccacctctggctctggagaaacatggttccttacctcaatcgctgcgtcatcatcttccatcgtttccagg

SEQ ID NO: 242893 - DNA, 293 bp, Glycine max
cccaacgcgcaacgacacgcaggcaaacctgaaacaaactcacaagctggaagcaatcactatgggccacggcgaaacaatcacgagagagtaaatcccaagaaaaacactttctaacatgcactacatggccaaacctgttgctaaacaaaaggaattactcctaacgactaggacatctaacgatgcgaccgcatctcaatcacgcgtgaatcaaactgaaagcgcgtgcgcaaacatacgacatcacaaaacacaagcattgctctacaaatgggaaaaaagaaggacaa

SEQ ID NO: 242894 - DNA, 442 bp, Glycine max
  unsure (1)..(442): unsure at all n locations
gcatgtttctttgtatgtgggagcgaaattaatccaactcccccaccctctccccccccccccctttatataacacttttatgtggtgcaaaataaacacactctcttcaagatttttctaattctctaccttgaaagcgaaaattgtgattatgcactcctaagagacataattggttcactgcctttactggaaattgcctccctctgattatgcactcctaagacacacaagagacacactagtttcaagttgtgttatttctccgtatctctctcattttaatatttctcgtatgtctcctttntaaaccctcacatcatttacaaatttttttgtaggattaagttttaatctcaagttcaactgaaatagtattttttataattagattatcttattttgaagttattgctgttatgaagtaatatctataatatt

SEQ ID NO: 242895 - DNA, 321 bp, Glycine max
  unsure (1)..(321): unsure at all n locations
gtgccaagccnaaccaaancaggacgaagctcaaagagccctgtcactgcggaggagaggcgaacatctgaaatccgaggcacaaagagacaatcctggaagcacaacaagcctcttgagactctgaaagccatacgcacgctcccaacaatatccacccatccaaacagttattggccctcaactcatgaggaaaaacacttgagtaacgtttccaaacagctaactagaagctagtctctggcatgagtgggagaaagattcgagaagcctacatcatgagaattatacggaggcaaagggtaagtacaccactatctc

SEQ ID NO: 242896 - DNA, 354 bp, Glycine max
  unsure (1)..(354): unsure at all n locations
tgaganagagaggcccttgcaaatgcaaaatctgaatggagagggttagggaaggcgttatgaccttcataattatccttctcatattcaagctgtctcttagcacacccacccccttagcacacatcaaagcccattggatcaagcctaaactcattaaaattcactaaacatgaaaacataagcaccacaaccccacataaataattaatttactcgaatcacttaatataaatttaattatactcgataattaattaaaatcacgtaatcaatcattatgaaaacacacgatgttacatgtgctatgagtggaggtgggggtcatgagctaagacggcggcatgaggagga

SEQ ID NO: 242897 - DNA, 339 bp, Glycine max
aagctgttctaagaacttgagatgagtttatgagcgatcgcgagatcctagaggcgaaggagacatcctcaccactcgtgttttcgctgcctgtcatcttattcttctctttgctggaaaggaggcttccggactattgaaagctaaatcctctgttggagcacccctgcaggtacctaatgtaaacatattccatctatggaatgagggcgtatgtgcactctgtgctatccgcatatcataccaacgtgattgtacctcgatcatgtagatgcacgctttgttagggtcattcaacagtgggaactggccggaaccaaagactatggcagacgggac

SEQ ID NO: 242898 - DNA, 360 bp, Glycine max
  unsure (1)..(360): unsure at all n locations
gccaaccttgagcatgcatctaaccctncaaccacaccatcttctacctcgcccaaccccgcaccaaacacaacccataacccaccaaaaatgaaactcaatgttccaaaatttaatggcaccgacccctctgggcgggagttcaaaaccacccaatttttggcctatcactctacgctgaaaccaaagcgccttaccatcgcctccttcgctatggaaagccccgctcttacgtggttctagtggatgacccgcaaccaccagctcccgacgtgggtggcgattttgcaggccatagagacgcgctttccccactctccatacgaggacccaacaggaatcctcttaaactcacacaac

SEQ ID NO: 242899 - DNA, 381 bp, Glycine max
gaggtattgattttttgcacacaaaatggacgcactgaggacctattacccatcaccaacacaaataaaccacgaagctacaaacgaaccagaaatcggaggagttatgatacaatcgacataagacctatacacaaaagtgagaagtattcatcgactaacacaccgccccggaaacgggagaccactatgggcgctaagcgcgacaaaccgcgctcaacgcaatcccctcacgggatggaattacgcttagcgggcttcatgaactacacgagaggtcaaaatgtgtcatttagaaaatctcaacagccaaaacgtggggcatgtgttaggaacctatagtccaaattgggagacgatccaacgaataacagatcacgg

SEQ ID NO: 242900 - DNA, 401 bp, Glycine max
ctaaacgaaaaattagggaacttaggataactaaatccttaatggaaggcgtaagtgacaatcatagcgaattactatactagattggtagtttgcttataggcattccaaatactccccaagcctcggaaaatactttcaaaatggtaacaagaagtacctccgaagtaattaatgttattaatgaagatagtgaccaaaactcagataacacaactgagataggatcagtgtcagaaaagaacataaatccgataaattccaaacactggtaaacaccctccaaattatattatcaacgtccaactgcccctgaccttctattagaagatagaggtgaaaacaattttaacaagtgtagtgtcaataatatctatgaatggaacatatatgcacaaacg

SEQ ID NO: 242901 - DNA, 454 bp, Glycine max
  unsure (1)..(454): unsure at all n locations
tggatcttgcgagagaataatggtgnctttgggtggactatatataacatcaagggtaccctatagtgtgaacccataggattcatatgtaagcagactaggaacctaggcagctgcctcagaggaggcttaaccccgacatgatgaaggttgtaaagggagaggttctaaagttgttaaatgtggatatcatctaccctatctctaacagtgagtggggaagcccagttcaatgtgtccccaagaaggggggggggaccactgtaatggaaaatgagcagaaatagctcatagatattagaatgaataccaggtataggatgtgcaatgattgcaggaaattgaatgaagccacttagaaggaccacttccttcttccctttattgatcaaatgcttgagaaattgtatggtcatgaaatttattgttgtcttaataggtattctggctatct

SEQ ID NO: 242902 - DNA, 383 bp, Glycine max
tgctcgccaatgaggattggcattaatgaaggctagaggaaacctatgaccatcatttaatggttcccttggagataccattctgaatctgtcgagatgcagagaagatagaggtggacacaattgtgtggatagtgcatgctttcaaaggagcgagaaaggattgtcatcagtggactcactatttgatgaaaaagaagttggattttctgtgtttccagtgcatgaaaccacccattctttatcaccaatcttcgggttagccttggtcgccctcatctttatgtgtcgtggaatgatagaggagatgataaatgcctgtggtttatgaatggttaggcttttttggccttctttggatgagaggcttctagagctgcaac

SEQ ID NO: 242903 - DNA, 303 bp, Glycine max
cggggtccctagatggcgcttggtagaggacttacgtgtatgctgtgacgattgttgtgaattaaataccattaccttcaactcctgggtgaggaacactcctattgcttgagctgcaatcattgctttccttggaacactgtgcggacgcctcttaggatggaggcgccccagaaaattgtacttttttgtgaggcctgtaacaaatatgtttaggcgcaaagggcatcatattatggtgatagaaacagcctctaattttgaagagaacattgatataacgctaccattatttttaagagc

SEQ ID NO: 242904 - DNA, 355 bp, Glycine max
agaagcatcttatgctgagaaattaagaaagaaaacaaaccgacggttcttcttattcttccatcattgtcgaatccagtttaaggtagttgggattgggttggacatggatgataacaaaacacttagacttcttctttaaaataggtataacaagaaaggaacttgatcctaagtacggtggaaccaaacttatcgtaatcctaactgcgacatgatcaagttattaacccataacaaagaaaaaactatcatggtagagaaactctaaaatttcattaattttcaaatgctataataaatttcctatttatggttaatcttgagatgatataataaattctcattgatatgc

SEQ ID NO: 242905 - DNA, 383 bp, Glycine max
ccttccggaggaatcttctggagggcgcaagtgggcctggttgctatttgcacccccatttttactaagtacaccccctgccttttttggtgattctttttttgtaaagttacggaaacttacgaatttcgtaacgatacttgttttctttccgtaatgttacggaaccttgcggattacataatcatcccctttttttgacttacggaatgttacgaaacctcactaattgtgcaacaatgctcccatttgatttccggtgtgtcacagaaccttacggattgtgcatcaatattttcttttgtttccggcatgtcccggaattcacaaattgctaatatgggtgccagcacctacaaggacaaacaatagtgcatgtcatt

SEQ ID NO: 242906 - DNA, 413 bp, Glycine max
  unsure (1)..(413): unsure at all n locations
ggcgaccagaattgccattcgttggattatagggttgaaccaagctcatgcttttacaaaaaggttcatcaagtcaagttgaaatatggaagtaaccgtcttgcaaaattggggcaaaagatgaatcgagtcacatcactgcttcgtctactgccaaacatatttaggattattgatgtccttgttacttccagtttcaccttgacaaagatgtcatggaccatgttgaaaatctaaattgattcaaccccatatcttgcgtaaaaattcgcaatacttcaactgtacatcattcgcatacatccatgcttttcattggttgcatngctcattgcattctttccttgaaaaagagaataaaaataaataaataaattaaataaaataacaatgatcttaatcatctgtatcaa

SEQ ID NO: 242907 - DNA, 411 bp, Glycine max
aagcgtcttagaggtactatgaagtaagaaatgcgtttgaagcaggggtagaatgagccaataaggtgataaagaggcaaaataatttaaggacagacaaaaatgaaaaatataaatttaatttctaaaaaaatatgataaattagtagattttttttagaaattcgatattcggcccacctgaatcagaattaaatattgatcttacggcgagtaattttgatttaatatttttaaataaatgagaaataaacataaatttagtcttttaacaatgtatgggataatattcatgtttatataaataaatctttttaataaataagtcattttaactatataaattatatttgtttaaaataaaaagcatattcaatatattttaacataaataatattcgcgtgttatat

SEQ ID NO: 242908 - DNA, 409 bp, Glycine max
  unsure (1)..(409): unsure at all n locations
tggcttgtaaaaaaaagaagcttgagcttgacttgtttaactcatttataacttatgatttttgcttttacaatttgttaaattattttttaactttatcgattaagcatttgataattattttaataccagataattatttactacttaaaaaatgtgcttaacatgtgatatgtggaattaaatttttttagactattaaaatagttcatagcttattgacctttacaaaaaagaaacttcaaaatcaatttaacattctcaacaaagttcaaattacatattttcataatcaatatataaataacaaagaccaataaaatcttcatcaattnttttatcaactaaatcatttagacctcaatgaaacataaacaacaacacctttcatgttgtctaatttcaacta

SEQ ID NO: 242909 - DNA, 328 bp, Glycine max
  unsure (1)..(328): unsure at all n locations
cggcggacagacgacggggaacaacaagggntccacacccacaaagcgcgcataaacccaccatcccctgtcgcccacctccataagagctgcacgacacccacatagcccatatccacggtgctcgcaacaccgggcccccatcaatccacccaagctgccacaacatccaagcagaacagcgatcaaacagcacaaactaccacagccaagagaacagggcaaaggcagaaaactctgctaaaaacaccaaccaaaatcacagctttgctcactaaaagactccagtaacaagacctgcgacccaatgcggaaaccggtggagcga

SEQ ID NO: 242910 - DNA, 382 bp, Glycine max
gctcttccttgcaagccctcttggtttcttgttcaagggctcttgcggtagctgcattttcttctcgtaacccggcacactccttccggacgtctgtagcgaccaacttgaatttttctttggcaagtttcacttttcctagttcggtttttagagctcggacttcttcatcctcttccagagcttcgaagttctcttcattgataatctttaacttggagagccaatctaaccctcgtgtacgaactttcagccattcatgataaccaccaatgatgccattacgaatgcccctaagttctttatctttccttaacgggctttcccatgccttatggactctttgataaccttgaaactttacgtgccgaaatctctcaca

SEQ ID NO: 242911 - DNA, 224 bp, Glycine max
  unsure (1)..(224): unsure at all n locations
aacactaaccancgactcgggcgacaagaagagagatgagagatttttaaaaaaaatgtgaacgcgcaccccacacaatatctaacaaaagatcaccctgaatttcttatagtccaccctccacacaaccaaactcgacctataacgcgtgccagagttattggctgagaaacaaacactttataaacaataaagggaattctgctttggcatctagcaccgca

SEQ ID NO: 242912 - DNA, 385 bp, Glycine max
  unsure (1)..(385): unsure at all n locations
aagccacctactctataaatagaagcatgtgtaacacttgacgcaactttgacgaatgaaagtcctatgagatacacttcaaagtgccactcttttccttcttttattccttcaatttcgagctccccccttctctctttcttttcctccattaaagcatcctcttcaagcttcttatccaaggcaattcttggtggtgaagctccttcttccttggcttattccctagtggatggtgcctcccctatcctcttctcctttgccttccgctgcatctccatggtgaaaaatcaccattgaaggacctcattgaagctcaaagatccagcctccatagaagctccacaagcaagcntccatcaataactcatctagacgctccaaa

SEQ ID NO: 242913 - DNA, 337 bp, Glycine max
gaggggagaaaaaactcattagccgacaacggccgcgaagtagcgactgataattttgagccgacaatgcacaattctttataaaaacgctcgctggccgataatggtttttttacggcagagcaagatttcttggtccggcgatgcataaaaaagatacaatgtacttcacccagggttttcgtgcgagctcaaccgacgttttgtttcggccgaaactggcatcttcccatttattcggccaagagaacaatagcctacctcggcaaaaaaatatatgctaaccgccttcatgcatatttcattcagggattgaatagaaaactcaatagccgac

SEQ ID NO: 242914 - DNA, 395 bp, Glycine max
cgggactcaatcaaacatccgagaaaaaagctattgccgttcgaattggctcagggctccaactttcaatttcgagggtttcgatatattacgggactcaatcagacatccgtgtaaaacgttattgccgcttgaattggctcagaggttcaacattcaatttcgagcgtctcgatatgttacgagacccaatcagacatccgagaaaacagctattgccgtttgaattgggtcagagatacaacattcaatttcgaacgtctcgatatatgacaggactcaatcaaacatccgagaataaagctattgtcttttgaatttgctcagaagttcaacattcaatttcgagcgtctcaatatataacgggactcaaacagatatccgaggaaaaatt

SEQ ID NO: 242915 - DNA, 381 bp, Glycine max
  unsure (1)..(381): unsure at all n locations
ccgcaatatatcgagaccgccgaaattgaatgttgaagctctgagccaattcaaacgacaataacgttttactcggatgtctgattgagtcccgtcatataccgagacgctcgaaattgaatgttgaagctccgagccaattcaaacgacaataactgtttactcggatgtctgattgagtcccgcaatatatcgagaccctcgaaattgaatgttgaagctctgagccaattcaaacgacaataactgtntactcggatgtctgattgagtcccgccatatatcgagacgctcgaaattgaatggtgaagctctgagccaattcaaacgacaataacattntactcggatgtctgaatgaggcccacaatataacgagac

SEQ ID NO: 242916 - DNA, 394 bp, Glycine max
  unsure (1)..(394): unsure at all n locations
atgtgtaacacttgtcataactttgatgaatgtgaaacttgtgagacacttcaaattcaacttttcttcctctttttctccttcaatttcgtgcccctccccccccccccccccctttttctttaatttttttccttcattgaagcttcctctctaagcttcttatccaagacactctcttaatggngaagctcctccttctatggcttattccctaggggatgacgcctcctctcacctcttttcctttatcttccgctgcatctccatggttgaaaatcaccatcgaaggacctcattagagctcaaagatccagtctccctagaagcttctcaagcaagcttccatcaccttggtcaataacaattccacaccttgttngcttatcttcac

SEQ ID NO: 242917 - DNA, 271 bp, Glycine max
  unsure (1)..(271): unsure at all n locations
ttgcgtgtgggtgttgttaataatatttgtgctctattacgaagaaattgacaggcggttcttgttgtttctcctagggaggcaaacaatgtgacaaacacacttgtaagatggggtttctctacatccccaatgattaaatcttggtcttcacctattgngattttagcttctctagtttttgactcataccttagtgtaatttttgcctctcttacttactcttgttaccatatatatatatatagggggcatatcaagtgagaggagt

SEQ ID NO: 242918 - DNA, 406 bp, Glycine max
  unsure (1)..(406): unsure at all n locations
cgatttataaactattgcgtcgaatttgttcagctttgagcttaagcattatattgttctgctcacaattacagtgaaattcaacactgtttgatccacaattcagtctaagtatcagtcgaataaattctaacagaaaatcatacaaaatcattaattaaattttaaattagattgtttttctttaagtaaaatcaatcaagttaatcacaattacataaaacatggtgtcacacctatctaatgatttcaacataacttacaaaggtgtcaatctctgtacaccttgtacaggttgctttntgtaactatgcttgacacatcaatacaaatcctatatttggctgttcaaaaaaaatattttgatctcttaattatactatggtttcaacattggggcagagat

SEQ ID NO: 242919 - DNA, 418 bp, Glycine max
ttacgcagggcaagtttgaggggattatacagaaacaaacagacgaggattatagaaacaaatccaatggcagtgacatttatgtaattgagaataaaatccatccgagttaattaagtttgtgaattgtaaggcctgaagagatatgcaataatgctgtccttaaatagattattcattgatatgtaaagaatgaaaaagtcaagtgtagggcaaggggtgaagaggacgtacattaaaatttagggctctaagtcaatattaataagacaagataagtttataggataagaattgaatttgattttcttgcacatatttgatgaagaggaatgaggagtttaagtgcatttaagctcctaaacaaaaattagtcttataattaattagtctaaaaaaattaaaacttgtgaaattt

SEQ ID NO: 242920 - DNA, 335 bp, Glycine max
ccccaaaccaagaaaacagggcagaggcagaaaactccgcccaaaacacactcacatattacagcaatcccactcaaaaccccagaacatacacttcacacagatgcataaaccgaagcagcgactcgaaaacagtacaggaggaatctaatacataagactacattctgaccgttgggatctcctaggaaacgtccagaacccacaatgtactaccttgcccataaccaggaatgcacaagcatttgctgtacaagttgagcaattctgctacacaagatagacagctgatagctgcacaagtctggcagactacgaaacacacctgacccaca

SEQ ID NO: 242921 - DNA, 417 bp, Glycine max
  unsure (1)..(417): unsure at all n locations
caaaccaacaacagcagagtaattatgatctttcaagcaacagatacaatccaggttggaggaatcatccaaatctgagatgggcaagtcctccacaacaacaatagcctgtccctcctttctagaatgttgctggtccaagcaagccatatgttcctcctccaatgcagcagcagcaatagcaacaacaaagataacaagcaactgaggctcctcctcaaccttccttagaagagttagtgaggcaaatgaccatccagaatatgcaatttcagcaagagacaagagcattcattcagagtctgacaaatcagatggggcagatggctactcagttgaaccaagctcagtcccaaaattctgacaaattaccttcacaaactgtgcagaatccgaanaatgtgagtgccatcacct

SEQ ID NO: 242922 - DNA, 403 bp, Glycine max
actactacttactcattcattttctaagttacttctctttcatgtatatgtggagagaagagaaaaatattggtaagttgcatcttttacccttgtgtacacagcagcaacaagcctttcttcatgatttagccttctgatccaatcaagcaacatgattttcacatcagagtatgtgacatcaatagcccttcatccagaaaccacctccaacacaacaatcacaaagttgaacacatcagattttgaggtagcaatgctccttctctggaagctccagtggcaccagctagccaggcttctctatagttaatttcttttaatttacattttcaccctgttagtgtaggtcccatcatggattagcggaactaggctagcagcagtttcgacacaagcgaaa

SEQ ID NO: 242923 - DNA, 467 bp, Glycine max
  unsure (1)..(467): unsure at all n locations
agcttaatatcaacacatttttctaacattctttctgtgtttggttacagagagttaggtcaatggtcattntcacttagtcatagtcaaaaatcccaagatcttcaacaacacatacaaaatcttaatccatttattgtttttttagtttacttaattgcccatgattataaaattaaaccgagaaacaacaaggggtagagaaaataataaacagagaaaccaaacactcgtaaaaagttttggtgggtgatgtcgagttatgacatatggctgtgctagccaagaaagctccatgtgatgttccttgtatagttcaaaagacttttgattaatcaatgaaataaaatacgccccacatacagttggaaccttcccacacacattatatcaatacatgaatcgatcaattattattattatacaaatgtgtattatattgttatattccttagctttcacataca

SEQ ID NO: 242924 - DNA, 457 bp, Glycine max
ctaagctaacaagccattaaagttggtacattgaaacaatgccttagctgttatttccctctcaaacctccaaacatagtttaaccccacaagcagctcagtgatggcagcttctgtcttctccttgtttgcaaagaacaaagtctgcaacaacaacacattggtctttggaaccaagttctgatgctcatagctcctctcactctgccactttatcatgttatgtgccaaaggtcccaaccatcccaatatcctccccaatgcatccctccactccccagccagcacgtgatcatcacatgctgaaaaccccacgtgcacccctctcaaccttgctctcaaacatgaccttatgctacttggcaacatcccatacaaatcattccttgcttccaccccaaccaactggggtgactttatcatcttttctaacaccatcaccaagtttgcatagtgc

SEQ ID NO: 242925 - DNA, 428 bp, Glycine max
  unsure (1)..(428): unsure at all n locations
actaggnggcggncgggcgacggtgcacaagaagttttccacatccacaaagcgtgcataaacccaccatcccctgttgcccacctccaactgagctcacgtactcccacgtagcccatatcctcgtttctctcaacaccgggtccccatcaatcctcccaagcttccacaacatccaagcaaaacaacattccaacagcacaagctatcacagccaagcaaaacagagcaaaggcagaaaactctgctcaaacaccaaccaaaatcacagcttttctcacttaaagaccccaggaacaattccttcgattcaattcggtaaccgttggatcgactctaaaattgtactggaaagctaaagtacataagcctacattgtgaccgttgggatctactagcagaagaccagaactcattctgtactactc

SEQ ID NO: 242926 - DNA, 467 bp, Glycine max
  unsure (1)..(467): unsure at all n locations
tctagccaaatggacttaccttgaattaattcctgttattttctcttttgagccttgtttccctttccttgttttgaagctcactacaagccttaagtgaaaaaccatgatattaccatatccttaaggaattttggagctttggaattgttttgggaataagtgtggggggtttttgtttcattggacaacttgttttgttgactatgcttcatgatgtattntgggccatacttgatgtacatcgtatattggttaaatgttggacatgctgaatgaaatgttgtttctcaaaggcaaaaaaaaaaacaaaaaaaaaaaagcaataaagttgagtgaataagatctttaatggcacaagaatgatgaaactctcggttctactctacatgtttaatttatatctttacttctttatattttcttagtttatcttaatatgcacttattccactttgctcctctat

SEQ ID NO: 242927 - DNA, 283 bp, Glycine max
cctttccttgggttgaagctcactacaagcctgaagtgaaaaaccaggatatcaccatatccttaaggaaatctggagcttcggaatagctctgggaataagtatggggggattgtgcaccataggacaacctgtttagatggcgatgcttcatgatgcatttagggccatatttgatgtacattgtatattggctaaatgttggaaatgctgaatgaaatgtcgtttctcaaaggctgtggagtaaaaaaaaaaaatattcgaaaaagaaaatattccaaaa

SEQ ID NO: 242928 - DNA, 458 bp, Glycine max
  unsure (1)..(458): unsure at all n locations
cgcttgagcaaatntaaatgacaataacagtgtagacggangtccttgtgagtcccgcnatatatcgagacgctcctaagtgaaaacggatactcctacaaaattcaaactacaataactttntagtcggatgcccgacagagtgtggtcattcatcgagggatgctccaaattgaagactgaagctcgtatcaaattcaaacgacaataactttttactaggatgtctgattgagtcccgtaatatatctagacgctcaaaagtttgatcctaagttctgctaaaattgaattgacaataactttatacatggatgtccggttgagtcctgtattattttgagacgctgcaaactgaaattggaagcttgtttgaattcaaacgacaaaacgtcttacttggatgtcctattgacttgggtactttatctaaacctctaaattgagctagatgcttt

SEQ ID NO: 242929 - DNA, 418 bp, Glycine max
  unsure (1)..(418): unsure at all n locations
actngcactgatagtcaattaaaatttctatttcgcaactagctagtcatatttccatttgatttaaaaaaaaatacactattaccattataaaaaatatatatgacagaaatgtgtatatgaaaactgtatcagtggaaaagtggatagttaatttaaaagaatggacaaaaatcagagtaaattacgtacaagaactccactaaggcaacaactagattagtatatgatggatgaaaggtattgttttggctttgttatggatatttattattcttactattgtggttaacagtacgtatatctcttttgctttctctcctatttatcaaactgacggaagaatgatactattttctatgttatttgccacaataaaaattaatggttcttattctatggngtatatccataactt

SEQ ID NO: 242930 - DNA, 453 bp, Glycine max
  unsure (1)..(453): unsure at all n locations
tggtacacttgaggggtttcttctccaggtacgctcantttcttgtctaattctgttttctcaacttcctagatcataagattgcaggacctttcaatcttgctacattgtcccaatctggattgcacctaaaatcataacttcataggatcatagtaagaatgtagagagctcgtattgagatcatgcaagtttatcaatcctgcaattgctggtttcctgattgggttgcacaatccggttcacataaaccttgattttaatcctttttgtgccctaaaatgtgactcttccttccctaaacagaacccaactctcattcaagcctctccagctgcgcccaagctctntgcagttacatctctagttttgaactgacatctttcaggttttgaaatcccatccccatctctcttgaccttctcttctgctgtctcactgattccctgaatc

SEQ ID NO: 242931 - DNA, 421 bp, Glycine max
cttcaatgatgattttccaccatggagatgcagcggacgacaaaggagaagaggtgagaggaggcgccatccacttgggaataagccatggaagaaggagtttcaccaccaagatgagccttggataagaagcttagagaggatgcttcaatggaggaaaagaaagagggatagaaagagagaggggggagcacgaaaatgaaggaagaaaaaaagggagagaagttgaactttgagttgtgtcttacaagagtctcattcatcaaagttacaacaagtgttacacatgcttctatttatagactaggtagcttccatgagaagctttcttgagaaaacttccttgagaagcttctttgagaaaacttccttgggaagctagagcttagctacacatacccctctcataactaagcttacc

SEQ ID NO: 242932 - DNA, 451 bp, Glycine max
tctagagatgggggatttgaatcttcctttggagatgagttctgtggttgcgacgacaatgaggtttctcttcagattgttgcgagcggcgaacatactaaacgcttttgaagcctatagagatgcgttggagaagaaaatagggttacagctcaaagaggccacgctcggcaaccacgggtctcggttagggtaattgttttcatcaataattgttagttacctaattattgatgagggtaaactacatatacctcttaaacgatcaattatatgcgaacatgtgacagtgaacatttttacacaaacaatcaacgttcaaattttcctctaaggactcaaatagtcaatgtgaaaaacaaaaaagactctgatagtgaattaaaaaaatagagagaccgctttaatgaaatgagaaaaatatgaacactatttctgcaattaagcctaa

SEQ ID NO: 242933 - DNA, 373 bp, Glycine max
gatgagggaaatgtatgtggtgactgagagattcttctctcatttgctttggcttattgtatacctcacaactttctttcttttctatattaacaatatatggactgcgaaaaggaattcctgaatgcgcgtgaagatgaacgtggaactacagtggacattatgcgtattatttaacttatgggcttgattcaattatgtgtttcatttttccatcgacaaataagaagcattttagtttgttgcctctattcttatattagatatgcttggccttttctactatataacaataagcccatatctattatagatagattgttccagaatttttgttcatcattaccaaccaacctacaattacatataactt

SEQ ID NO: 242934 - DNA, 367 bp, Glycine max
  unsure (1)..(367): unsure at all n locations
atgcacatnnntagnaagaaggaggagggcaaagattgaactctggagacttctaaaagtttaaggccttaatataagctcataattgattctatatccctaactaggttacaagatctctaacccctgtgttttaagggtttttccttataaaaaggaaaacctctaatgaatggaacaataagtatactatcccatcataatttttactggtttcaaatcttttactaaatgcatcgcatggattgctttgatgacactaatattaagatccaaggtcaggtaccttaaccttgggtatagtacctccaccatggaggttatgaataactctttctagacatcctatatgtcattaacacactga

SEQ ID NO: 242935 - DNA, 189 bp, Glycine max
gcaacaatattcaaagctcagccacacttctaaaatacctctacgcaggaacactcaacacttcgtataaaacaaaaagagaacttttaaaaaaaaagctatatatactgggaaaaaagcacgcgccaatttctaaaaaggattcacacacatgcaaaacaacccacagcgatctaataaaaaaaaaaa

SEQ ID NO: 242936 - DNA, 418 bp, Glycine max
gtggcctcagatatcttaagaagggggggttgaattaagatattccaaactacttccccaattaaaaatctatttcactttttattcaagttatgaattcccttaatgacaatcttcttaaatattgattcaaataaaacaatttgaatatgaatataaagcaataacaaataaaggagattaagggaagagaaagtgcaaactcagatttatactggttcggccacacccttgtgcctacgtccagtccccaagcaacccgcttgagagttccactatcttgtaaattccttttacaagttctaaacacacaaggacaatccttcccttgtgtttagagttcctttacaacaagagactcatggtctcttaatcccttagaaaatgaggagaagaagaagaataaatctctctagaa

SEQ ID NO: 242937 - DNA, 411 bp, Glycine max
acatgcaaatcaaacacatacacatgtgcagcacatattccaatgtttttctgacatgttttcagaaggcacaaaagtcaatatataagatctatatctgccttccaaaaaatataagatctgtatctactaataggaaactaaccttcaacttttctaaattgaatgcggggttgatatctttctgtgcttgccccacttttctcgctcatgccttgaaagaccatgaactagtaatttgacatgcagattcattttaggttttccaaagtcataagtcttggtgagtacttctttgattagtttaggatttgtgacggtcatccttggtattggtacaaaccagataaaagagtgtttgcctgcataccatcagcaacaataataatcaatgcttaaaagagaaaattt

SEQ ID NO: 242938 - DNA, 417 bp, Glycine max
accgcatctttactatcaaattccatgccaacatataattcttggccaacattaaaggtcgacggcatctccaaaccgcaaatgtcctcctcatcaggataactccaattgatattgttataatgtgaggcatcattccaaaatggattttcaattcgttgtgcacctaacagttcaaaataaaataaaaaaatcaaataatacttatttagcattaaatacaattgtcatcaaataataaatgtattgtctaattttttcatacaacaaattataccttctgctgggtgaacaattcttactggttgaggaatgtttgagacttcatcgtctgtatcagatataccgtcaacactgtcatcttcgtctaaagactcttcaacgtatgagttagacacaagataatcatcatcgtct

SEQ ID NO: 242939 - DNA, 418 bp, Glycine max
  unsure (1)..(418): unsure at all n locations
agctccaattgaattgactttcagctggaaaaaaaataaattcaaattgagcttcaaacataactgattcttatccagtcaaattgagataaacaagttcaacatgattatgactcatttctcagtggtgcaaactgcaacgggagtataaagtcaattgtaccaaaatataattgacatatagtaaaaaatataaaagttaggaacaaattattttcaatacattttcttttattggttgacattcattggaaatgacaaaatttattgggtctcacatcatatgtaatgattttctctctcttgaatttgtagttttcaataaattccaactaattacagatggtgtgttagaaggagtatgctaaaaactatttcatagccctcctttgngtaataaataactatcattttcctt

SEQ ID NO: 242940 - DNA, 379 bp, Glycine max
atacgaggtctagctagaaagttagtcatgataaaactcatattttcttctccaaaaatattaggtgggaaaggcaaccagatttgagtcagcaattgggttttgttcacaccgagaatttgggcaagtatttagtagtccccattttccataagagggtatcaacaaacacatttcaatttattctgactaaggttaatcaaaggttgtcctcctcgaaaacctgacaattatccttcgcaggacgagcaactctggttaaatctgtccttcaggcacttcccacttatgctatgcactctacctacattcctagagccgatgaatcatgtcatctgtgtggagctgatgttgagaacctagttcatatttttcgtga

SEQ ID NO: 242941 - DNA, 345 bp, Glycine max
actatggtctctggggctgaagcatatagggaatgtgtcaacctccaaacggttcatattggaagcattgcgcgcggctggtatgattaaccttgatgatgactaaggagattcttgttaaatgcatccaaggacatcgcatgatgtggagacatgtcaaatagcgaaggagctactacaagaaatgatgaacagggggcagattgaagtctacagtgcgaataaagaggaaagagatgtatgctttctgtcagatgacaaaaacccgagtaaaagtgataaggcagtgccatggaaatatgccgcaccacggtccgatggaaggaaggacgctgtcatcatacg

SEQ ID NO: 242942 - DNA, 372 bp, Glycine max
tattcttggccaaagtggatttgattgggatggcactaaacacatgatcacaggtgagaatgaaaatgcttggaatgaatatcgcattgtaagtattctttaatatgttgctatttgttattcaaagtagaatggatatgactttttctttttttccagtcgcataaattgactaaaccgtgtcgagtcaagacgcttcaaaactggaatgatatagaggatttgagtgttaaagataaagccattggtcatggagcttaaactgctatggatgctgatgaagcgatgagtagggaaacaaatgaagcggattcatggcgtaagtggtgtactgctccatagattacaagaaccaactctatacaaaagaaa

SEQ ID NO: 242943 - DNA, 416 bp, Glycine max
ttcccgagggaaattctataaatagacctcccatctttaatggagtgggttaccactactggaaaacccgcatgcaaatctttatagaggcaatagatttaaatatttgggaagccatagaacaaggaccttatgttccctctataatagccagaagtgcaacaatagaaaaacctagagcagattggactgaggaagaaagaagattagtacaatataatttaaaggccaaaaatattattacatctgccttaggaatagatgaatactttagggtttcaaaattgaaaagtgctaaggatatgtgggatacactacaagtaacacatgaaggcacaacagatgttaaaagatctaggataaacactctaactcgtgaatatgaactttttaggatgaatataaatgaaagtata

SEQ ID NO: 242944 - DNA, 244 bp, Glycine max
aaccctttctgaatatccgaatgaactggttgctgaggatattataagttgaagaaggaggtgcaagaagcaatttggatataacaaagtagattgggctaagaacagaaaggcagtcaaggtgttagctatgagtgttgtttggtagagtgttgctaggtgcatccagcattattgtcggtgcacccatcaaagctattaaatgccaaaattgcccctgcttgtttttcttcttacggatcac

SEQ ID NO: 242945 - DNA, 440 bp, Glycine max
  unsure (1)..(440): unsure at all n locations
cgactgtttttgttaaacgagagaagaaatgatgattctacaccctaacattcaactttattgtcttttcctgggagcagcttgcatcatcttttctcccttctgctcactttttcttcatttcccccaaatttgctcttcctagccaacggatttgatggcccttctatatcctcttcatatagccagcgatatccgtatttcttcacctccgcatatgactctttccactcatcatcacattccaaaaccaatctgccaagatatttgtgcttgagatgaaaatgataaatgaaatccattcgtttaacaaggaataggcacatgtgatctgatttgtctaaaacaagttctagatctacatctccataaaaatccactagaatatcaccaaaatcagggtagatcctttctgtctctgaanaacacattgctgagag

SEQ ID NO: 242946 - DNA, 294 bp, Glycine max
  unsure (1)..(294): unsure at all n locations
actcaaagggttagatcctaagagagcacaaatcctagacttatccacgggagccttttttatatacaatcgcttactcactagctgttcactttcatttgcttttgaccttattgcatgagcacacactccctttgagggctgtcttttgttggtgccctctacttttttgtaaaccacacaacatatgngttgtgtgagctgaggcttaatctctatctttgcatcccaaagagggtcacctccccaaatttgggggaaatatgccccgaaccatatgctctcctagaatcc

SEQ ID NO: 242947 - DNA, 359 bp, Glycine max
aagcaagcagctcacccaggcgagctgctatgcaccttcacccctatttgctataaataagcatgagggggcttaaggaaagaggtcccaaggtccagcatctgaaatcaagaagaattgagagaaattagtgagaataatgagaaagaagaagaataatcatggcccaggcgcttctgtaacggttccatgatcgatactgtgagcgttctttatcatttttctgccaatattcatcgttcttcgaccgggtagtttccattatttaagctttgaattcattgtatgcaccccttagggggcatcctttgcttacatggcttcatcttcattcttctttcatcgatgaacgatttttt

SEQ ID NO: 242948 - DNA, 419 bp, Glycine max
  unsure (1)..(419): unsure at all n locations
ctacacacaccccctctcataactaagttcacctccttgagaagcttccttaagaagattcctaaagaagctagagcttagctacacatacctctctaatagctaagctcacctccttgagatgagaagctagaacttagctacacaccccctataatagctaagctcacccccatgacaaaaaaacatgaaaatacaaaaaaaagtccttactacaaagactactcaaaatgccccgaaatacaaggctaaaaccctatactactagaatggccaaaatacaaggcccaaacgaaggaaaaacctattctaatatntacaaagataagtgggctcatacttagcccatgggctcgaaatctaccctaaggctcatgagaaccctagggcctaccctgggatctctagcccaatctact

SEQ ID NO: 242949 - DNA, 394 bp, Glycine max
aaacacacctagccgctctttcatttactaaagtatctaaattgcatattagtcactctatttttaatacagacccctcatgtattgatgtcattatctttgatgaaataatataaatacttttgagtaaaaaaaagttaaatcaatttgtaggtctttgaattatttgataatatttaactaagtatcttaattgagcctctaaaattatagtttttttccaattagattcctataggtaactatttctaattgtcattaatgataataaataaatgttcaaggatctaattaaaagaatatttatgaatgtaattaatattttctaaaataatttaggggtctgttcagtaattttcacatgctatcaagactttcacaatatatttcccaa

SEQ ID NO: 242950 - DNA, 374 bp, Glycine max
aagcacgcaactcttctacgtaaagactacatgagtgaggtccgggctgtgcttacatagatggcgaggtggaggtgcttccaatatgaggcagtcctttgattaagaacaagatctgctcgatcttaatgcgattgtgaatgtgctttgcagtataaaatgaagattctcgttgatgaatccaaaaatcgagtttatacaaagtcatttacgttcagggaacctagggaagccattaaatgcgatgctttgtgtttgtagtgcaagaccctagctagagcgagcccatattgaaccgcttaaactaaagaaaaaaattgggttttaggactcacagccaccgcttatgaagactaccttgggcctgcctaagt

SEQ ID NO: 242951 - DNA, 398 bp, Glycine max
ctcacacccctccaagagctatataaataatagcaataaattatattcctaatataggaagaaatgtagcaacacaataacctggagatttacattaataaaagtaaagcacaagtaaacattgcaagactaattagaggcaatttatcagccacctgagcaaaaagctcaggtagaaacctgactctccatcagatatcctaaaaacaaaagcaaagagggccctagtcagaagctacctcagttatgtatatattgatcgtacagaggaaatgtttgcagaacaacttcaaaccaacatcaggtgagatatgataactcatagatagacataatgataggaacagaaaaagcagagcatactttatggatagaaaacagctaaaatcccttctcca

SEQ ID NO: 242952 - DNA, 398 bp, Glycine max
gaaactctactacttcttattctctttttgagggagtttgggggtctagtctattggcccctcttaatttgctacctttgcctaacgtttctgctatgatgaatatgaatgaactttctaaagacaagtttgttaagagtttgcatgagaaggtgaaggtgccaattgagaaaaagattgaacaatatactatatatgccaataagtgcataaagaagatggttttcaaatcgagcgattgagtttggattcacttgaggaagaacaggttttctctcaaagggaattaaactttcagaaagaaaaatggtcttttaaaggttggaatcctaaaaataatgcaataaaattgattaccacttgatatggggagcacacttttaagtaccgattgctct

SEQ ID NO: 242953 - DNA, 375 bp, Glycine max
  unsure (1)..(375): unsure at all n locations
tgcaaactccttttgggtatgcgctataggtgttgttcttcattggaagtgcggtagacagactttgtggttgatttagggatggcctttgtggatgattgggtgagagggattgttattggctgagtaatgacattgttgggctaatgggaaatttgaccgtgtaggaatggcagtcatagcaagggtttatccctcattctcatccacttcatttgtcccagctttctcactcatcanagtaggatgatcaaatttgcctcttttcagacccgctttgatccttttgccggcgaagaccaaatccgcaaagcttgaaggtgcgtaccccaccattttttcatagtaaaacactggtaatgtgtctactataat

SEQ ID NO: 242954 - DNA, 365 bp, Glycine max
cagaacaagaaggacccctaagagcaaccaaatggtgcggccggccctcctgagacgaaaggggaatggcggattgcaaacgactcggaaatcccgggcaagcaaacgaactcgtagactaaccctattgtaagcctaggctttagggcctctccctatttgggtaatctttcgtaccacaaaagaaaaataaccaaccttcacatttgtcttgcactgtcaccattctcatcttctgatgtaattttgggcgataaacggacagaccgacatgagcctatagggaatgaattgggacccaacgcgatttgagcacagaaaccaacaaggaggggaaaagggaatggggatcccccaagcaaaag

SEQ ID NO: 242955 - DNA, 381 bp, Glycine max
gtacctgaagatatgtcttggcggtcaagagaccttggggatatcaggtggggtgctattgcccaaaaccaagcttgaccaatcccgacccaacccgggcatattcgggcagtgagaacctgtgatgtacctaaacaggcgagctcctagcaatcaacagactaaaggaacaaagaccacaaagcaaggagggttgtggtggctggccacctgtgaattttgtgtgatatatgggttgcggccaatactaatcgattaccaaaggtgggtaatcgattacaaggcttataaatgaacacaggaggctaatatggcctctggtaatcgattaccactgggtggtaatcgataccacgcttgaaatcgaggtcaggaagccat

SEQ ID NO: 242956 - DNA, 374 bp, Glycine max
  unsure (1)..(374): unsure at all n locations
cgaatctgnatcgctggattatggaattttttattatactgacgcatcaatgctagaaatcaagtagctttctatgatataattgtgaaaatgacaaatgaatcatcttgtttccctctttttgtgcttttctctttttccatgtggaaaaataaatgtagatttttctttacttgctcttggaggtgttaccaaatactttcaagttaaaactatttttatgttctcagaataggggggccaggtatcaatgacctttttagattttgtaggatagcttgatctccaacaaggatcatttcatttgttccaagattataattgtgaactgatgatagtactatacgatgacgcctttgtatatcgtcattctt

SEQ ID NO: 242957 - DNA, 346 bp, Glycine max
  unsure (1)..(346): unsure at all n locations
acactatgaggagggagatgaagattaattttgcatcgcnnatgnaatgggatgcattatgcgatataatttgttgtaacccattactaaccaattaatattattaagtactcgtttggttaagcaaaaaaattgttggtccaacaaaaatcatttacgcgtgtagcatacatcattgtcataattgacaacacataatgacatgcatgcgtattaaagtttgagcgcgacaacacattgactgacttgactacacattctgaatgatacgtaaacacgatacatgttcacgcgtgtctattatttttgaaacaaaatgaagcaatcgctcggtcacaaccattta

SEQ ID NO: 242958 - DNA, 75 bp, Glycine max
ctgcagcttgatatttatggataatgatttgttcttctatcaaaagatcttgttgttgatttcgcttgatggtta

SEQ ID NO: 242959 - DNA, 354 bp, Glycine max
cactatgggctccaattattctggtatgggttcgaaatctcgtttacatcctattttaaacatcagtagtataatggtataacttttttctttccacgtatactttatggatacccaaatttggtatgccatattctcaacattatttggcggtatttatggtgcctttcgtcggcttggggaggttaatagattggccacactcctatagttgcttataactgagaattcttttggattgctcattattattcttaattcattgtttgtacttatttttatataatttggtcacaaatctaaacatattcaaggtattattgaaattactatcaaagcaatctagtattttga

SEQ ID NO: 242960 - DNA, 431 bp, Glycine max
  unsure (1)..(431): unsure at all n locations
caagcangcaagncgcacaacagaggaggagaangactctttatcctacaannaaaacaacccaaggccacgaacctagggagaaaaaaaaaaaacacaatggcggagagcaacggaaaaagtggcaaccaaaagacacccccccaacagccaacaagtcagccaccataggggcatccaaaaggcggatgggccctcaatacaactagaactaaacctaactaaagccctataagatgaaaaacccacaacatattcttgggcagccacctttacaaggagagggccattacatagacaaactaaacactcaaaaagtgagacaaagnggagccatgtagtcctccaccataagggccatgagacaactcacaacctaggactttcctccaagaaactcgggcctagagtcaaaaagaatggacaacact

SEQ ID NO: 242961 - DNA, 383 bp, Glycine max
  unsure (1)..(383): unsure at all n locations
acagaacaaaggcgganaagtctgctcaacacatcaaccacaagcacagcttttctcacttaaagaccacagtagcaattccttcgatccaattcattaaccggtggatcgactccaaaattttactgggagtctatagtgcataagcctacatttggaccgttgggatctactggcaaacatccagaactcattctgcactagactgtccacagccaaccacacacaagcattttctctgcacttgagcaaaatgctgctgcacaatatcacagcaaaaattctgcataagtgcagatttcgaaaatcacacttgctctcatccaatcttgcccaaatcaattcctacaagtgccaaatcatgtatcaatcatgcctaaacc

SEQ ID NO: 242962 - DNA, 415 bp, Glycine max
taattgcaaattcacattcttgttctttctttgtctaacatacacacttgctcaacttcatgaaaggaaacacaaatctcatcttaagcatgctttcaatttaaaagaaagtcatacacccattttcacaaaataaataaactacttcaatgccataccatcaagagttaagttaaatggttcatgatgctttaagatgagcaactatactactcatgcacaaaactaacaaaaagtaactaatgtactaacatcaaagttatactaataattcaaaatcacaaaaaaagcataaaatctccagaaatatccacattcttgtcaagatggaccacaacttcctcactagtccatccaatcagaaaagtctgaaccattctctaggtagtaggctgggtgagtaggaggagctaca

SEQ ID NO: 242963 - DNA, 391 bp, Glycine max
gattttggggaagaatggggtgaaaatggcttcacccctcccctttttatgttttttcgacagtcatgctcgcctaggcaagctggccactaacccaggcgagctaataatatttttttttttgaaaaaattctttgcaaagttgtgttattcattgttatattttctctcttaaaatcctataattgcatataaacttaggcaaattcaggatatagttcaagaaaatgaacaagtatgaaattaaagagcaaggatagagatactaggctgcctcctaggagtgcttctttaacatctttagccagatgcgggatgatgatcgatcgatcacggtgctagcacctattcgtacctgcccctaagcttagactaagaaagtttcatcatg

SEQ ID NO: 242964 - DNA, 423 bp, Glycine max
  unsure (1)..(423): unsure at all n locations
ggattttttctttcgaaaaaatgttcacccttgaataaagttatgcttaagaaactttattatcatgaattatacaagaaacaatgttttttgttaattatgtaaaataatcaaataatataagatagttgcaagttgtataaatcacatactttgtgcccccaacaaatattgttcgataaaaagttgtttaattttgttttgattagaataagtgattgtttcaaagaagactaaatgaaaaatgaaaaaaaaaaacaattgtaggaaaatactattatttatatagaggagtttttctttttantaattaggacaaatattcttatctatttaacgaacaaaaataggaggggaagataatgaaaggagaaaaccaccttctttcgtgagtggtaggtttaaaaggagataaataatgga

SEQ ID NO: 242965 - DNA, 415 bp, Glycine max
  unsure (1)..(415): unsure at all n locations
gtacaccgaggagtttgtgggcttaatatatctcatagagagagtgagtatggccctacacggtaatgcaaattacactttattgaccaaatgtagtgccctttaccatagactatttattgacatgttatatcccatgggaactctcacctcatgcaaagctctaatactatgatgatactcatttgtatctcagattgaaagagccacgttctgctttggaattcttattgaatccagaggagtacaatgaacaagacaacgtttgtcgatacaacatgcaacgagtacacccagtggaggttatagagaatcgaggtgaccatttagacatgtctntgtggaagcaatgccttcaatggttattttgatgatgccaaagaattcaagaatcaagagaaagattcaagagaag

SEQ ID NO: 242966 - DNA, 411 bp, Glycine max
gcccttttgagccttgattccctttccttgttttgaagctcactacaagccttaagtgaaaaaccatgatatcaccatatccttaaggaattttggagctttggaattgctttgggaataaatatgggaggtttttgtttcattggacaacttggtttgttggctatgcttcatgatgcattttgggccatacttgatgtacattgtatattggttaaatgttggacatgctgaatgaaatgttgtttctcacaggctatagagttaaccaaaaaagacaagataaagagagataaaaacttcgaaaaaagataaagataagcaacaaagcagtaaagtccgttcttaccagttaatactacatgcgcgatctggtgcacttgctggaagcaacaaattttggcgccgtgc

SEQ ID NO: 242967 - DNA, 395 bp, Glycine max
  unsure (1)..(395): unsure at all n locations
aaagaggcaaatttaatcatcctgcttggacgaatgaaaaactggggcaagcgaagagggtgagaatgagggagaaacccatgctgtgactgccattcctatacaaccaagttccccaccaacccaacaatgtcattactcagccaataaccaaccttacccatcacccagttatccacaaaggacatccctaaatcaaccacaaagcctgtctaccgcatttccaatgatgaacaccacctttagcacaaaccaaaacaccaaccaagaaatgaantttgtagcgaaaaagcctactagaattcaccccaattccagtgtcctatgataacttgctcccatatctacttgataatntaatggttgccataaccccagccaaggttcatcaacct

SEQ ID NO: 242968 - DNA, 389 bp, Glycine max
gcggacctttaggcctccatgtttatctttttggtgcttaaccttttcttgttcctttgtttcttgaaagtgcaagcgacactatacctagggatgaagttgatcttaaaaaggaggttttatcgtagagaatgagagtgagagaaacatgagagacagaagcgggcttgttcgtattgtccagattcgttacttaggccacccacacgtcaacaagaatgatccgtgaattcacccttgcgtgacacgtgcttgcatatcagccacgatttgttcttattaactctccccaattctagcttgttcttctagcataaccatcgactaataaaatcaagctacttagtcctgccttgtgtacctgcactatagatagattgagaagagtc

SEQ ID NO: 242969 - DNA, 358 bp, Glycine max
  unsure (1)..(358): unsure at all n locations
aaaccgaggacccgngaagggtgaccggatatacccagttagaatcatagactcacccgctgagacaggaaccaaaacatacatagcactatgagcttaatattaaggccatagaccataaaggccagacacataggccgagtgcgagagagaatcagaggagcgatgccattgccagctatgaattagaaggaggaaaagctgccccatgagggtcaaagctgccaaatgacaatatgaaggcctacattgtttaggcattcacccttccctcgggtccaccttatagctgcatttacacaaaatcgccacactaaacacccatataagaggcttcactggctcttccgctctattc

SEQ ID NO: 242970 - DNA, 418 bp, Glycine max
aaacaaattccctatgaatatgatactcggtcttatcgatttatactatttttgcaaatcggtacacttgttgaccacattcgaacaggcgcgtcttccaaaaaggagaacacgcgggagtcgccaccaacatttattcgaggaaaatgttagaaaaaccaaaaaaagaggtttgcaaattttgaagataagagtttgggagttgtttacgcatgaggaagatattatcactccacgcgcccgttacaagggacagcagccaataatcaagtgtgcaacatgacttcaaaagttatttacttttcccctttttatatctttttgtttattgggggcgacaaggggatgcccttgcttccatgtatcctcaagtgcgatgaagaattcagacctacatagttatgtaaagtgagaaagt

SEQ ID NO: 242971 - DNA, 399 bp, Glycine max
agcccgggtagtcgaagagaagttcaagtccatagccatcaaagtctgaaaagagtatgatgaactaagggatgtcaatatggccaccgctgaagccttggaacgagaaaccaagaaggcctgaaaggaagaacacgaccaaagcaaagttttgaggggctttatagggcagcaatagtgagctcaagctctgaagaggtgaaaggaatcatcacgggtcaaaggcatgatcttgaaggacaagctaaaggcttgccttaggtcgaaaagaaatttgtcccaacagttaagcgagactgaagggaatatgtgggccatcatcgatgagtgcatagagaagctaaatctagcggcgacttacgagcataggctagaggatgagtacgccaagatatcagc

SEQ ID NO: 242972 - DNA, 456 bp, Glycine max
  unsure (1)..(456): unsure at all n locations
tctggggacatcttgactggcttttctatctgtctttcaccacagattctgccttcttctattttcagattggggatgcctctaacagcacctttgtcaatgattttcttcatgcctcttaagtgcagatgtccaaatctttgatgccatattctgacttcatcttctttggaggatagacatgtggaggagtagctggtttcttgaggtgtccataggtaacagttgtcctttgatctgctgcccttcattagaacttcactcttctcatttgtcaccaagcattctgactttgtgaagtttacattgaatccttcatcacacagctgactgatgctgatcatgttngcagtcagtcccttcaccagcagtactttgttcagactaggaagtccatcatgaactagctttcccattccaatgatctttgctttagagccatctccaaatgtcaca

SEQ ID NO: 242973 - DNA, 387 bp, Glycine max
aatcgaccaccaagggtgggtaatcaattacaaggcttaaaaatgaagacaagaggctaagatggtctctgataatcgattaccaaggggtgtaatcgattaccaggcttgaaaacgagattatgaagctaggagagcttctggtaatcgattaccaaggggtgtaatcgattaccaggcttaaaatgggactggaagattgtggaggcctctggtaattgattaccagcctgtgttatcgattacacagaggaacacgccactggtaatcgattaccaggtatgtgtaatcgattacacagtgcctctttcaagtttacatgttctgaagctgtgtaattcgagtttggcctctggtaatcgattaccaaggctgtgtaatgatta

SEQ ID NO: 242974 - DNA, 375 bp, Glycine max
  unsure (1)..(375): unsure at all n locations
cttcaaataactaagctcacctccttgaaaataaaacatggataaaataacacaacaaaataatcaaacatcaaatataattactaataatatttcagggtgttacattttgacctttcccttttctgtttttgtttaatgtggggcgagaaagtcgccagtgcacaggattttggtcggcaaccaaagggagaggaccacttcaagtcatggtttcctttcttttcttatttggttgtggctattctgcattgtttggatatttgtctggtccgaagacccttttgtataattctttcattttcttcctatctctgaatgggaattttctttttccctgtgntttcttcgatctttgaccgggaacttctcttt

SEQ ID NO: 242975 - DNA, 401 bp, Glycine max
agccttggctacccggcaacgagacacacacagatacacaaacacacacacatagagacaaacacacgcagcacaaacacaaacacaaacacacacacacacataaagatacacacacagacacacacacacacacgtagagtcacacacacataaagacacagataaagacacaaacacactgagccacagacacacgcagagacccacacacaaagacacacacactgagtcacaaacacacacatacacaaacacactcacacacatagacagacgcacacacacataaagagacaaacacacacacacacacacatagagaaagagacaaacacgaacacacacacccacacacagagtcacacacacataaagagacaggaaaacacacaaacaca

SEQ ID NO: 242976 - DNA, 276 bp, Glycine max
agaatctttgcctcttgaagaaaattttctaacctagaaacttttcttcacactaaccatgatgatgaatgatgcaatacatatatcatatgtactatgatgcaacatataagataacaaccaatacaaatgccacttaagggagttaggcatgtaaaagtcaacacatcttcaagcttttccttgagcttcaagctgtggcatttatgttgttcaccatgttgcttatgttgctccccctatctctaataaatctcccctttttggctttggtga

SEQ ID NO: 242977 - DNA, 265 bp, Glycine max
cagaacgggcaggggcacgctcacaacggcaaaagactcggaacagcactatcacgggcaagaaaagcgcctcaccacaaacacgggcaagacaacaacgacaaccgcaaccctcgcggccaaaaagaagccaagaaggacgaagcgcctaaagccatggagcgacacaccactcccgagaccaaaagaacaaaggaccaaccggcagaaatcgaaagaggccccccgcgcgccacccaagagaaaccaaaaggacatagacgga

SEQ ID NO: 242978 - DNA, 315 bp, Glycine max
  unsure (1)..(315): unsure at all n locations
cacaggaacacgaaccagggacaatatccggggttcccaagaccctcaccaacggaccatcgtggagaagacatgaggacaatacaaaaccaacgggacaacctcgggaagaagacctctctcgcatgagatgcgcagaccaacaaccaccggagtgagcagccatggagaagagcactctaaatgaccaaaaccaatccaaggctcggatcggaccgcaccacaaggcatactccacgggccgcgcgggaagagacaaacgcacaacaccccaaggaacgnttggggacaaaaggaaacaaagacggccgggcc

SEQ ID NO: 242979 - DNA, 340 bp, Glycine max
ggaccaaaagcgagcaatatgttgatgcaccttcaatactcattcttatccattgactctcttatgttcatttgcctcagcatctccattttctccattgattgcattttctggattcttacagaatttgccattggcctctttagtcccacactttgtcttgcacttgcagcatcattacaagagtccgaaactcatcttcttacttccatacatccaatcggccaccaaattaaaatctcttatatttgccatattaccactccagaagtactgaatggtcccacttttttttgagccatatattccttaactcttcgattacatatggggagttttc

SEQ ID NO: 242980 - DNA, 379 bp, Glycine max
atcctgaaaccaagagaatatatgcaatatttgatctatcattcactcatccctttctccccttttctttatgaatttatgcttaatttaaaactcaataaataatttcatgtcttgattcctaaaatacacattttctctcccctctggcaacatcaaaaagccaaagtgcggaaatgaaataaaataacaaacatatatcatatgctaacagacatagcaacaagacaaataactcaatgaacacctacttatctaagtcactaacatctacaatgtgcatctattcctagggcagaagtaatgatgttttcggctataagattatatggaactctccttctatcttcttcggaccatcgatctctaggtttctcta

SEQ ID NO: 242981 - DNA, 115 bp, Glycine max
aaaccccccggccaggcggcagggcaagattgtcctctcaccacaaaggggccgagcatgacagtgcaaacccctcgccattaacacctataaagctggaaggactcgaaagcca

SEQ ID NO: 242982 - DNA, 401 bp, Glycine max
  unsure (1)..(401): unsure at all n locations
cccctatgaacaggaggcaagattactgctagctacggattggggnaggataaaacggctcccactacaatgaagaagactttgcaaaaaagactattttctattctttcttgactataggattctgttgagaataggaaacaagcatccccattcgattacatgccggttgtcctaacaagcctaattcttaaaataataatttatctcgcactactaatatgattaaaaaataataataaatacaaacaataatcagtgtataacatttcatgcttgttgttctttctaaatctacttataacccaagtcaactcaaaaataaaataaagtgtcatattacacataaattatattaaagaacattttgcaaatacaaatactaacaatgcactatatag

SEQ ID NO: 242983 - DNA, 352 bp, Glycine max
tattccctagtggatggagcctcccctctcctctgttactttgccttccgctgcatctatatggtgtaaaatcaccattaaaggacttcattgaagctcaaagatccagcctgcatagaagctccgcaggcaagcttccatcaagtggtgatcagagcacaagagcttcaagttggtgctccttaaacctccattaataatttgctctaccttctatgccattggggtttcttctttgattctccatgtatctcctcacatgtcttgtgctaaatggttttaacatgatactttagagtttccaccgattaaacttgctatagaagctagatttgatttcctatggttcaaa

SEQ ID NO: 242984 - DNA, 355 bp, Glycine max
cgcagacaaaagaagtacggcttatgaaatggcacaaggaagattctttggagtcttcttgggcagcctcaattgcagccataaatctacgaaaatatctagaattcttaagttataggaaccaaatagagttggcaacaccaccaaagttttagcaatgctcattttggtaatcataccaaaaaaaaaagaatgataaagaagcgcaatgaaatatggacctaatgatgagaatccataaactggccaaatacacgctaaaggcccaagtggagaaggacgaacgcccaagcggagaaggacaaagcccccgagtggagaaggatgaatgcccacaggcaaagacattatcaag

SEQ ID NO: 242985 - DNA, 388 bp, Glycine max
aacgcccaagaacgggggaaagcgctgcgagattcctcacggaaaacgttacggaaacgcttcggaagcgcctcggcttagattttcttcacggaaacaatgtttccaagcaaattctaaagagagagaagtgcctaaggggctggacacttccttcttgctttcctcccctatttatagcaaaataggggaggtggttgccgaccagctcgcccaggcgagctcagctcgcccaggcgagcatggttgcttcctccagaaacaaccgccttctggatgaagcttctggagggcccaaatgggcctgggagctatttgaccctcattttactcagacaccccactctgctattattggtgatctttatcgtaagtacagaacgtacaa

SEQ ID NO: 242986 - DNA, 389 bp, Glycine max
  unsure (1)..(389): unsure at all n locations
atgaaaattactctctcacaacatcaaataaatataaatttgtaatataaaagtagttaaatcaaatatacattaaattttcccttaaaaatatataataaaaaaatgcatccaaatgtccttaaataaaatgtataactcaattgatttaatagaatacatgaataattggaaaccttttgatattatttccgattcttacaaataaaaaaaagaattattagttaaattggattaaatccactttgagaatgaattacaaatctcaaccatctcaattatgagtaagttgccacttgaattgggttggcttgctataatntataaaataaaagtataaaagggcgatctatgacaccaaataagtatataataaaaaataaaaatat

SEQ ID NO: 242987 - DNA, 410 bp, Glycine max
  unsure (1)..(410): unsure at all n locations
cacttgaggacgtcgtcctgtggatccttttccgaatngcatagntcgagagggtgacctttttttgaattaaagacatatatttttggagagaacaagacatgtttttcgtcaaagcgttgttgaaacaacgtgatttatgtgccaccggcgggattcagcaaacgacaaagatatgtaatgttgcgaaccagctcgcatcatagaagccattgccacctaatattcaaattttattttaaaaacaattttaatattaaagcattttaaataagttaaagaaactattcttttaatatatgataagaaattcaaagttattatactataatcaaacaaatttaagtgttcagtatatccatgtaccaaaaaaaaaattaagtctttaagtaaattaatggatctaaata

SEQ ID NO: 242988 - DNA, 372 bp, Glycine max
  unsure (1)..(372): unsure at all n locations
catgacaccacaagncctacaatgaaccaaaaagatggtgttcaatttcaatcgctttacgcctttacctgaagaaatatttgggtaagatatagcatacctagggtacatgcttaaattgttccttaaaaacacttttatctcttacaaaggatatgtgaatttgtaaacgagtgtatttcaaatgataaaatataattataatcattagttagagaaacaataggtgagatttagataaaatacatacacaaataaaataataaattatgaagttgttaaaatttcaattattaacttaaatcaaattctaaaaacaacttaaataaactattattacatcttatatctgtttttcaagatattctatat

SEQ ID NO: 242989 - DNA, 271 bp, Glycine max
cctcatctcgaatttgatctagaatatgctcttctaataaatagagaatttcaaaatgtaatagctcgcttttgacacttctgtttggattctattttatccatatttgatttgccccaaatttggacgtcttagcacgatttctaattggcctcttcaccaaattccctgtgccaaaaatatctgccaaaactggggcatgatttttctttgtaaatgactccactaattttgttgtaccctttttcacatccactttaacctttatatg

SEQ ID NO: 242990 - DNA, 241 bp, Glycine max
  unsure (1)..(241): unsure at all n locations
ccgcaaaaaaccgacacgctcngaaaagaacgctgaagctctaagccaattcaaacaacaataactttttactcggatgtccgactcagggcacgaatatatccggacgctcgaaaatgaatggggaacccctgagccaactcaaacgacaataaattnttactaggagggctgaccgagtcccgaaatatatcgagacgctcgaaattgaatgtgaaagctctgagccaagtcaaacgac

SEQ ID NO: 242991 - DNA, 340 bp, Glycine max
cagagcatatctcttttatcttagtgagagtgattctcctaaatacttgagtgattcaagaacaccttggctgtatcaaaggactttcacaacctttgtgtgatgccctcgctggaaagagagaatctttccttcctttcatcatcacccttgctctttcaaaccacaattccagaaaatccacctctgcccagaattatcttgtggccataactcccattttacgcactcaaattaagtgattcttgagcctaaattgaaattcacaacgagaaatttcacctcgttttggaatcacctcatttggagccctggagcttcagatattgccatttctata

SEQ ID NO: 242992 - DNA, 421 bp, Glycine max
  unsure (1)..(421): unsure at all n locations
tcatctgacttagcatcaaactttcctaagttttcttttccattgtttaatagaaaacacttgcaacaaaaaacatgaagatgcaagatgtttggtttccaaccattgaacagttcatatggagttttctttaaaatgggtcttattaaagccctattcatgatatagcatgcagtattaacggcttcagcccaaaaatattttggaagaaaagtatcattaaaaaaggttctagcaatttcttccaaagacctacttttcctttcaacaactccattttgttgaggggttctagttgcagaaaagttatgttcaatcccatgcttatcacanaataaatcaaattctttattttcaaactcacccncatgatcactcctaatagatataatnntgagattnttcttattttgacataact

SEQ ID NO: 242993 - DNA, 409 bp, Glycine max
  unsure (1)..(409): unsure at all n locations
tcaaacataaaaagggaaaaggtaatattgtagccgatgctctttctcggcgtcatgcattactttctatgcttgaaacaaaattgattggtcttgaatgtttgaaaagaatgtatgaaaatgatgaaacttttggagaaatttttaaaaattgtgaaaatatttcagaaaatggtttctttaggaaggctttcttttcaaagaaaacaaattgtgtgtgcctaaatgttctactagaaatttgcttgtttgtgaagcacatgaaggaggtttaatggggcattttggggtccaaaagactctagagacattagaagaacatttttattggcctcatatgaaaaaggatgtgcagaaatnttgtgaacattgcattgtatgtaaaaaggcaaagtctaatgtaaagcct

SEQ ID NO: 242994 - DNA, 423 bp, Glycine max
  unsure (1)..(423): unsure at all n locations
atatcacccnnngccaggccgcttcttaagctgtttattccatgcataagacttcaacaagagatgtaagtcgttttggacaggtaaggataagaatttaaatcatcaaattcaacactgcttgatagaggcttgtcttgaagattatttttgaccacacggttcccatccagccccaaagtgtcctccttcaatccaacaggggaagctttcggagttttagaaccatctagttcacatacagacttttttttcacgtgaaacactctaccttgagtgtgtaaaatcatacaacacaaattctgtcaccatagagttgtcaaatactntgtcatctagttcagaacataaattacaggaaactagcatttgtgctactaatgaggaaatcttgcaaaatcatgggatcccaacccattagca

SEQ ID NO: 242995 - DNA, 338 bp, Glycine max
  unsure (1)..(338): unsure at all n locations
agtaccagaagatacatgcataccctaatgattgtattttatacaaaaataagtttgcagaaatgcataagggtcccacatgtggggtatcacgatacagagtaaaggatgacgatactattgatgatgcaaccgcaaacaatagttgtacgacaaaggtgtgctagtatctttcaataatttcaaggttgaagaaattgtttgctaatggacatgatgccaaaaacctaacatggcatgtagttgctataaagagtgatggattgctctaacatccggctgattctccccaatggaagacaatagattgtttgtatccagattntgccgaggagccc

SEQ ID NO: 242996 - DNA, 292 bp, Glycine max
aaaaacccacacacccaaagggaaagggaagggaaaggggagggagaagaaggaaacggaaaggaagggaaggaaaagagaagggaggggagagaatgagggagaaagggaggggaagaaaagggaagagaggaggagggggaggaagggaaaggaaagaaaagagaggaagggaaaggaagtgaaaagaaggaagaggaaggaaaagggagggaaggaagggaaagagaaaggagggaagggaagggagaggaagaaaaagggagaagagaaaggggaaaagggaaaggaa

SEQ ID NO: 242997 - DNA, 337 bp, Glycine max
tgttactaatgtttttccttatggtacagctgacatcaaaagcgactccacaaacaagagcttcaaggtcaacggacattgacttaagccattcctcacgaacccttctttagtggacgtagtggtggaagagacttccttactccaccctactcttcctccaccatgacttagggagtttttcttttcctatctccttctttgcttttattacacttgtccgattctctttgatgatttaattgtttttaatcttttaattgtgctacattgaggacaatgtgttgtttaagtatgggggggggggggggatctaattacctcacgtctaacgcgg

SEQ ID NO: 242998 - DNA, 391 bp, Glycine max
agaatgagaaatcccaaagagaaaatgtccggctgattatccgctttattttactaaaaggtatatttttggtattatattattattttatctctttttgatttccaatgtggttacggaacgaccgaacggtcggaatttattttaaccaaagtttacggatcatacaattcaaacgttcggtggaaatttattttatttttaagttaagcgagaaattacttaagtaaaatggcttaagcatgtcaacagggggtataaaaagtaaatgaaatgagaataaaaatacacgaaacacaatgtggaccaccacgggtacatagaatgaatcgaacagcttggttcgaggtacttacccgtcgaagatcgaagaacgatgaagaacgaatga

SEQ ID NO: 242999 - DNA, 415 bp, Glycine max
gacagaacaaatacttgtaacttgttgaagttagtagaacttggtttgccaaaaactagaggtagtctcagtggttgaaatgaaccagtctaatttttttgtgtcatattctttttattttctcttttgttatttgaactaacctagggtttgaatttgatctttgcttttgaaaaactctgtttgttttataaagattcaaaactattgtttgatttgctttgcaaaagtttgatattggttttcttaagtcttaattcatcagacgataattttgttatttacaaaaaggtgttattttgggaaaatcacaattcaaaccttctttttgtgatatttgcctttacaataacaattgcatataagaggacatgataaatgaaagtgtagaaccattgttttatatatccttttg

SEQ ID NO: 243000 - DNA, 384 bp, Glycine max
  unsure (1)..(384): unsure at all n locations
tacatgttattgatttttgttaacatgttagtgtcacaaacactaatgagaatgttaatgatccatgttgatgtcacatttattatcacatgaacttcaaagtgtcaccataaaattaactgttattaaataataagtaaattatcaaactaatagatatacttagatcaaattatttattcttaaagcttgagagaataaatttatgaaattaaaaacagagtgaccaaataaaatcacaaattaaaaattgtaggatgataaaaagtataatgaagtctaaattttttcttaataatatattttatatacataaatatcaagatggaattcatgctgtcntggttatggaactgaagattcatttctcttaaatcaatacac

SEQ ID NO: 243001 - DNA, 402 bp, Glycine max
  unsure (1)..(402): unsure at all n locations
caacangacgcctaaaaattagtattactatcaataaagaggtcatattcgtttaaggcctaattatattcaactaaaaaatgtctcattgattcattaacagattaatgattcattgattcacaaattacacaagaagctgttgcatctgcatattttcatgctcttcctctacatcttacacttgaagaagaatcatccctcgattgagacattttaacatacatcctaaaagtgacaacaaatagaaataatatttctccaatcccaaatttggggcaacaaatgcaaatcctacaccaatcccaacttccacctccaccaataactcataatgctcataatccagaaatatggagtaagagaacacatttttttcacacaaccaagctataatattca

SEQ ID NO: 243002 - DNA, 336 bp, Glycine max
  unsure (1)..(336): unsure at all n locations
ggcagacaagnnaagaataagggcaggggagtcttttatatctagncaaaatcattaatagcgaattgttaagtatcaatgtttaagacattttgcagctagtcgtacttagtctcgatcagttcagtgctatttctttataatgttaataacatcctaagtggaagccctcttgatgttaacaggatgcttgtatatggacgcttgaattgattcgattcaaatataataccttatcgaatgatcttgatcaaatgttggcacattgttcttgatttgttacatgacatgtatcaaaacattatgaaagcgcaatacatgatggttcatagatca

SEQ ID NO: 243003 - DNA, 280 bp, Glycine max
caatcaaagagtgggagaaagcaaaaagaatagaaagaaaattcccaatcaaagaatgcgagaaagaaaaaaagagaagtcaaaaagaagaaagctcctggccaaagaaaccaaaagaaatgtgccgagaggtccttggactagacgatatctgaacaatacagaattgtcaccaaatgaacaaaagagagaaaaggaaaccatgacctaaaagtggtcttctccctatgataccaaccaaaagcctgtgcgctagcgactgtttcgccccgcactaaac

SEQ ID NO: 243004 - DNA, 402 bp, Glycine max
agaggatcaataacaatgtctataggttggacctcccataagagtatgcagttagaactttataggtggagctaatactgaggagcatgaaccaacagatttgaggtcaaatcctcttcaaaggggagtgggtgatgcaatcctccctaggaagggactagtcaccaaagccatgagcaagaggctccaagaggattgggctagagctgttgtagaaggccctaggattctcatgaaccttagggtagatttctgagcccatgggccatgttgtgtccacttatctttgtacatattagattaggatttcattatttttgggccttgtatttagggctccataatgtaggtagggttccctagaaatgtaggaatttttagcccctgtattttagggcacct

SEQ ID NO: 243005 - DNA, 230 bp, Glycine max
  unsure (1)..(230): unsure at all n locations
cttagttatgagaggggtgtgtgtagctaagctctagcttctcaaggaagttttctcaaagaagcttctcaaggaagttttctcaagaaagcttctcaaggaagctacctagtctataaatagaagcatgtgtaacacttgttgtaactttgatgaatgagagtcttgagacacacaactcagagttaaacttctctccctttntgcgccttaaatttcgtgccccctct

SEQ ID NO: 243006 - DNA, 383 bp, Glycine max
ctcttgacatcatcaaaatcttcatgatgtacaccaacgccttaacgttggtctcctttcaaaaaacaagagatcgtcaatgggccaacgccttaatgtctctctcctttcagaaacaaaagatcatgtaatgggccaatgtcttaaacgacatttgttcagtcaaaatatatcttgcaaaaaagataaaaacaacttaaccaacgttcagttctcgaagaactacgtaggtctgatttccttaccacaattgaggaatacgtaggagcaagggaaacacccttgtcgaccacaaaaagataaaaaaaatataaaaggcacagaaagacataaagacgtaacagggaacatataacaaatcgaagtcatgttcgcacatttga

SEQ ID NO: 243007 - DNA, 433 bp, Glycine max
ccctggctttcaccatgggtataggtttctatgttcctcaacttatttttaagggcaattcccccccccccccaaccaccctacagatctgtattccaagcctctttgatcatagagtggtaccctttatgattaagccaccagtccacaacccgaaaaggcttagggccccagtccaccatccttgtcttcaaaatgattggacaatgatcagaataatctctttgaaggacatgttgggaagtatcaggccacaaggataaccactgatcagacaccaagaatctgtccagcctactcttggcactgccattgggcctaaaccaagtaaaattgctgccaaagcatctaatatcatggagctccatctatgatatccagtcattgaaatctgaagaatctgaggtgacaacagtcctttgagataagtaat

SEQ ID NO: 243008 - DNA, 419 bp, Glycine max
  unsure (1)..(419): unsure at all n locations
gaccatgctatgcgctcgtgattggtctctctcttcccttcgaagcttgagctcactattactgcccacaaagctccacggaatttgtctcggccatgttcttccttgcgagccctcttggtttcttgttcaagggctcttgcggtagccgtattttcttctcgtaactcggcacactctttccggatgtctgtaacgactaacttgaatctttctttggcaagcctagcttttcctaattcggtttttagagctcgaacttcttcatcctcttccggagcttcgaagttctcttctttgataattntcaacttggagagccaatctaaccctcgtgtacgaactttcagccattcatgataaccaccgatgatgccattacggatgcccctaagttctttatcttttctcaacgggct

SEQ ID NO: 243009 - DNA, 403 bp, Glycine max
  unsure (1)..(403): unsure at all n locations
tccctatnggatggtttttttggggggcttcaagtaagtcagattgaaaaacaatcagactaagtaacaattgtcaacttcgattcccaataaataagggactacaccaatctagaaaaagtcctaccttgaacttgaagcaaccaactaaactaaaacattcttgcaagaaatctccaactttggattntgaagcttctggcctttcctcttcctgggttcttttattggaaaaattaggagaaataaaaaaaaaaaggcacgttgaaaagggtattgctacttgctggcgttcacagaaataaaatcttagactaataatatcttatttctattaaatatgtttaaatttatatattaaaaatcaacatgactatatgagaaagtgagtagtataaataat

SEQ ID NO: 243010 - DNA, 400 bp, Glycine max
gctacttgagaagattagactgacatctatttattctatccaaatgctgtagatcttcagtgcatggattcaccgcattctcagtggccttgggacaagggggagcctgcaattgtcaccaatgtgcttgaatgtacatctggtttaagctgggaatcgcttgtcatgtggcgtgcattacgtcatgtaactaataccaagcatggccaacatttggcggagaaaacaattgattgcttatattggactgaggtttgcttaatttcccaatctttaactttattgaccatggagagctttttacaaaaatttaattcttcaccttcattctcatgaagactattgaattccatatagtcatcataacagaatgtccttgtaatatcttgtgaagtactga

SEQ ID NO: 243011 - DNA, 370 bp, Glycine max
gaccatttcacaggtagccatctaattctgcattctacatatgtaacaaagcaatcctaacaacccaccctaagtttaggcttggggttaaaatatatttgtgaaaaaaagataatttaataaaaaaattgaaggtatttgttcatacaaattagcatgtttggtacaacttcaaagaaatttttccaacttcctgagtgagatttggggaaaaaattattttccaaaaaatagtctatcccaatcaaataaataaagaaatttcttcaagatttatgattagacaaataaagcaggttactctcttcttgaactatggcatacatctgtgtgtgtgcatgcatatggtgcacacacgcaagcttgcatg

SEQ ID NO: 243012 - DNA, 395 bp, Glycine max
aaaatcacgcaattgttcgagtatcattcgacgccggatcaagagaggttaatgatagcttccttctacatggagggaccaacacttgcatggttccagtggatgcatcgtaatgcgcagttgtcatcgtggtcagccttccttcacgctcttcattcgcgctttgctacgacgatgtatgaagatcctacgggattactttgcaaactttagcagcgttcgttggtgacggcgtacctctcggagtttgaatccctagcgaatatgatagttggtttaacagtgccatttgtactaagctgttgtatctctggattgatcccgctatttgcgagaagtgcggtgtacaactatttttagctacgcagtgtcgacacaaatgaggaggaaagctc

SEQ ID NO: 243013 - DNA, 411 bp, Glycine max
ttcattaaagcaacatggttcatcacatcttgtcagagtcaaagtgaaactagaaataaaacatggacatcaacagtcttcaattttgtaaattatttagctcaatcatgtgttggtagtagccaaagaagctatgtaaactcgatccatcttctaccccaacttctgcaagctagttacttccatgcttgaccctgacttgatgaaacccttttcttaaaaggatgtgcttggttcgaccccataatccaaggaatataatttttgattttcaatactttgacaacatatcatagagatgaatgattagggcttacttatgctatgcatgacaaatgtaattatgagattaacatgagactcccgtagaacacccttttcctagttaacaatgcattaggtaccatgttc

SEQ ID NO: 243014 - DNA, 394 bp, Glycine max
  unsure (1)..(394): unsure at all n locations
aagatgatgacaaaggtgatgacaaaaagctcaaagatcaatccaagaacaactcatgtgaatcatagatcaatcaaagaacaactcaagtgaatcaagaacaattcaagagttcaagataagaatccagaagaattcatgactcaagaagaaagtttagagtcaagattcaaggttcaagatctcaagaatcaagatcaagattcaagactcctgatccatgaatcaagagaaggcttaatcaagataagtttggataatttttcttcacacatgggtggcccgtgaatgttttttctcagaacatgtccaccagagagtttttactctctagtaatcacccaccagattattgtaatcgattaccagtagcanaatgttttgaanaagtttc

SEQ ID NO: 243015 - DNA, 210 bp, Glycine max
caagctcgcctgggcaagatccccccacacaagatggccttacctataaataggcattcaagaagaagagaaaacaagaaactagcctaaaattagtagaaaaaccgagaacaagaatgagaggaggaaaagtggaaccgaagtgctgcaaaggtatgaccgtgaaccacttcctacataacatcgctggctagtcttgcgccccgcaca

SEQ ID NO: 243016 - DNA, 354 bp, Glycine max
accacctctatgagagctaataatgagcactgttgcgtccaatagtctttctacattattcaagtaaattactaaggcatccattgcccgagatctctcatgcagtaagtaaacataaccataacgcgaatagtcatcaaaaaaggtgaaaaagaatcgttccttctcgaaagaactaacatcaaaaggggcacaaatatcagtatgcacaattccaagaagccgagtgcttcttgaagccccactctttggatgatacgttggggtccctcggaacaatccacacaaagaattagatccggcaaatctagatcacgaagaaacgcactctttataaaccactccataccttct

SEQ ID NO: 243017 - DNA, 285 bp, Glycine max
ggccaaacagaagcccctgcaaagagctttgcaagggtataccaccaaccgcttgcccttcagtggcatatccgaggcaaggctcgaagtcgactaggggagcaacatgaagactaagctttggagctctaagaaagtgcgtcactctacatgtccaactctttgagcggcattaatatcgattgatgcataccaatctctaacttttcatatgtacatcatacatcaccatgtagaggcagaaaaatcgccctaaagtaaaaactccttcaagcataaaaccct

SEQ ID NO: 243018 - DNA, 405 bp, Glycine max
  unsure (1)..(405): unsure at all n locations
accaagagaataattctcttttggtttctattagttgaatttccaatatggtacatattgtttaaagcatgtcaatttgatctctgtagttgcgttttttttttcttcttgtcaatcttgtcctccccaatttgatttctgtagatgcatttttttttctcttgtcaattttgtcctccccataaaatcacccttaacgtcatctgttctatcaatgttgtctttagtctgccacgacaattgttttgagtggaggtagattgcaattatggaaggctgggatggatgaactgttttaaattatagtcactaaactgaaaagtccgaacaactataagcatcaaaagaatatntaaagtttaaacctacatnttttaacatatttttaaacctattgttttatta

SEQ ID NO: 243019 - DNA, 352 bp, Glycine max
ggacattgcaatttacgcttgatacttccctccctcctgaggccccacccacacacaaaaaaacctttttttgttgattgattttgttcacttttatcttctatttcactttgccttgtcgcataatcttttgttccccttcgtttctgtatctctgtggatttaatcttgagctaattcataataggattagttactagaaaattaatgaaaaatgattgaagtatggaaggcactgtgtcgcaagagtattcgaaattcctgatttcttactttatctgtgttggaatattcctatggtcctaccttaccttccaacaccttgaacttaagtgaagaaataaaataaatt

SEQ ID NO: 243020 - DNA, 195 bp, Glycine max
gccacaacggcgatcaccacccacggagcggcaccggaagacacaagagacaaggcgaaaggaggcgccacccacaaaaaaagaaaccatggaaggaaaacctccaccaccaagagagcgccaaggaaaaaagctagagaggaagccccactggaggaagagaacgagagatacagacacagagaccgcgcggaa

SEQ ID NO: 243021 - DNA, 203 bp, Glycine max
agaacacccgccagaaaggcaaacgaaaagcacaggccacaaaagaaaccgcaggacacgaacggatactacccagccagagacagcaaggacaggggcccaagcgaaccacatcgcggcagacccagcccgggccacccaccgggcagagaacgaccaacaggaagacgagggtcaagaaggtaccacccgggcccgaaaag

SEQ ID NO: 243022 - DNA, 372 bp, Glycine max
aatcttctcccttcaaaaaagtcatcaatttgcaggtgttttgtgtggctgtgaaaaactggattgtgtgcgatagagaaagcactctgattatcacaaaagataacaggagtggtaaatggaacttgtaattctgtcaacaaggaatgaatccaagtcaattcagtggaagtctgagctatgttgcgatactcagcttctgtactagacctgcagtaaccttttgcttgcaagaccaccaaaatattaaatttggaccaagaaaaatagcagtccctgaggtagagcacctgtcatccacatctaatgcccagtcagcatcacagaatgctcgaatagcaaagggctttgtaacagaagtgggttgaagaa

SEQ ID NO: 243023 - DNA, 438 bp, Glycine max
  unsure (1)..(438): unsure at all n locations
aggaggtgagcttagttatgagaggtgtgtgtgtttctaagctctagcttctcaaggaagttttctcaaagaagcttctcaaggaagttttctgaaaaaagcttatcaaggaagctacctagtctataaatagaagcatgtgtaacacttgttgtaaatttgatgaatgagagtcttgtgagacacaactcanagttcaacttctctccctttttcttcctttaatttcgtgctcccccctctctctttctctccctctttcttttcctccattgaagcatcctctccaagcttcttatccaaggctcatcttggtggtgaagctccttcttccatggcttattccctagtggatggcgcctcctctcacctcttctcctttgtcttctgctgcatctccatagtggaaaataccattaaaggacctcattgaagctc

SEQ ID NO: 243024 - DNA, 272 bp, Glycine max
tcacatgagacacccaccacaaccacacacaaggggccaagacccaccaaccgaacgggcaccccaccaagacgcagaaccgagacccagggggaacccagacgcaccccccagaaaacaagaggaggactcacgcaggtgaggaggacccaccaacgaaccgcacgacaagacctccaaacaggtcgacgggacacgcacgcgtgccaaccagcgaaggacgaactcagcaggcgaagcggacccaccacccaccggcgacgagagacccc

SEQ ID NO: 243025 - DNA, 334 bp, Glycine max
acatccttctaataactaagctcaccttcttgagaagattcctagagaagctagagcttagctatacatacccctctaataattaagctcacctccttgagatgagaagctagagcttagctacacacaccccctataatagctaagctcaaccccatgccaaaatacatgaaaatacaaaacaaggacctactacaaagactacttaaaatgccctgaaatacaaggctaaaaccctatactactagaatggccgaaatacaaggcccaaaataaaaggaaaaacctattctaatatttacaaagaagagtggaccccacccttggccatggg

SEQ ID NO: 243026 - DNA, 254 bp, Glycine max
gcagcaccaaccagtcaccagtgagctgtctcgatgagcgcgagcgcgcccggaagacaacacggctcggacacgatgggaaagaaggctatcgcgccttcttggggacaccattcttccattttacgagtaagatcgtgaccctaccaaaacgggctctatcacagtaccatcacataattgggatcgcacaggcagtgaacaattgtcagactgtgttgtgtaaccctatgaccaagatagcaaccatgacc

SEQ ID NO: 243027 - DNA, 241 bp, Glycine max
ccccccagagggtgatatctgacccccccacccccccacccgggggggcattacccaccccaggagggcaagagacagcccccgggacgaacgagcccaacggaaccgaaacagcacaggaagcagaagacaaccgagcaaaacgaggacacaaaaaaacaagcccccaagacagagcacaaagacaggaatcccaaaacccgaaagaaaaaccaccgaagcccaccgaaaccaggaacgg

SEQ ID NO: 243028 - DNA, 233 bp, Glycine max
  unsure (1)..(233): unsure at all n locations
tctggaatcgatacaaagagtaaattcttgtaaaagactttttaactttaatttcttggcccaaacctttgctacttcattggaatcccttcctatnaagataccctttgtagactctatgactatcttgtcatctatcttgatattntaattgcttgtctgaaaaagcttgagacgcatgtgatctttggatcatcaaacatcggttgatctttgttacaagatagtttgac

SEQ ID NO: 243029 - DNA, 215 bp, Glycine max
agttaactgctgtgtggggctaaacccctcttccttgctaagctgttttatctcgaaattgaaataaaaaattaagcatgaagtcctagctcactagcccaccatgctttccaaagcggtaggccttgcgtgattgcatgaggagaagttccttgatcagctttaaaccacctgtactcgtcctttgacttggaatttatctctttacactcaag

SEQ ID NO: 243030 - DNA, 314 bp, Glycine max
tgaatggttcgatcagtctgaccatctgtttgaggatgataagctgaactaagctttagctttgtccccaaggcttcatgaagactggtccaaaatcgcgaagagaacctcggatccctgtcagatacaatactagaaggagatccatgcgaccttactacttccttgacgtacaactccactagcttctccattctatacttcatattcaccggaataaaatgagcagattcgggaagtcgatctactataacccacacatcatcatgtccaagacaagtcttaggaaactagaaacacaatccaaagatatg

SEQ ID NO: 243031 - DNA, 304 bp, Glycine max
aaaaaaatagagatggatattcaatatatagatagaagaaaagaaaacacaatcattttctactttctagtttttctaccaagctagtaaaatggaattgtttcaatccacatctttcatagaaacaaactaaatttgtcactcagtcaatagtaaagaggatacaaagaagtataatttaattgatgacattttcatactggtagtccttcgcatgtattattattgttgatcatgcaaacttgttcgtcaagtgggtccccaactcctcgactatcatcatggagaatacgccctgagtagt

SEQ ID NO: 243032 - DNA, 397 bp, Glycine max
aatggattaaaagttatatgagataaaagaaaaaataaattgatacatatcatatcattgatgttcttgattttttttatagcattgacaatgaaaaattatgtaacattatgtatttttataggaaaaagctttaagtatttttacttaagtttaactatttttaattttttttcataacattatgtattttataaaaatttggaatatttttttataaatatataataatttttccctcctaataaaatttattatcatattattaatatagaatatttatcaattttaccgatgattaattgatatcctcaacctacttaaaagaattaaattcaatatcacttacagaacgacgtgttgatacaagattatatatatatatatatatatatat

SEQ ID NO: 243033 - DNA, 349 bp, Glycine max
catctgaatttctcgagagcttgctatgtttaatattgagcgtctcgatatattatacgcctgaatcgaacctcagtgtaaaaagttatgaccatttgaatttctttagagcatccgatgttcattttcgagcgtctctatatgtgatgaaccttaatcggacctccgcgtgaaaagatatgaccatttgaaattctcgagagcttccgttggtcaatttcgagcgtctcgacatattatgcgcccgactcggacatccatgggaaaagctatgaccatttgaatttctcgagagcttccgttgttcaatttcgagcgtctggacatattatgcgcccgaatcggacat

SEQ ID NO: 243034 - DNA, 300 bp, Glycine max
tcgcggatgagtatgcccaagtatatgccgaaaaagaggctttaggaaaggtgatcgactctttacaccaagaggcaaccatgtggatggatcggtttgctcttaccttgaacgggagtcaagaacttcctcgattgttagccaaggccaaggcgatggcagacacctacttccgccccgaagagattcatgggcttctcggctattgtcagcatatgatagacttaatggcccacataattagaaatcgtaggaaacttgtatggtctctcagaccttgactagatatgatttcttttt

SEQ ID NO: 243035 - DNA, 155 bp, Glycine max
acttcgatcctttcgccggtgaaatctaaatcagcaaagcttgaaggcatggaacccaccatcttctcatagtagaacaccgacaacgtgtccactatcattgttataatctcctccgtcattgggggtgctacttgagctgccaggtttcttca

SEQ ID NO: 243036 - DNA, 372 bp, Glycine max
  unsure (1)..(372): unsure at all n locations
ctgaagggaccagtgccacccccgagtttgatagccaccgtttccggagcgctgagcaccagcagcgcttcgaggccatcaaaggatggtcgttccacagagagaggcgcgtctagctcagagaggatgagtatacagattttcaggaggagataactcatcgacattggacgtcgttggtgactcccatggctaagtttgaccctgaggtagtcctagagttttatgctaatgcttggcccacagaggagggagtgcgagacatgcgttcatgggtgaggggtcagtggattccttttgatgcagatgccctcagccagttcctaggtgacccgctagtgttggaggaaggccangagtgtgagttcagtc

SEQ ID NO: 243037 - DNA, 333 bp, Glycine max
ttagtgatggagccggagaaacggcctcggaagagggggcgaaagccggccaacggcagagaggagccgccgaatcacgtggaagccgagagacaaaggagagaaaagccgaaccaaagattctatgctccacgagctggagccccaaacgtatccaagatggacaaggcatcgctgtcaggagacgccacatcgtacacaaatgagccgaaattgaagcccaacgggccggacccagagaaaggggaattggagaagcaaccggattcagccaagaaggaactagagctcgcgagcaaaaaccctccctctcctccaccaccaccacgtgga

SEQ ID NO: 243038 - DNA, 183 bp, Glycine max
  unsure (1)..(183): unsure at all n locations
gacaaccgcacttagnaccaatggggactaagacgaaaactaacattctctaaacaccaaatagcaagcaaagcccgccataacccttacaaacctcaccctctcccattatacagacccccactcacaatctctcacctctaactatcactcatacacctgggacacataagccctttcggg

SEQ ID NO: 243039 - DNA, 418 bp, Glycine max
  unsure (1)..(418): unsure at all n locations
tagcacacaccagacatcggcggagagattccttctttcagancatggacaagtgtcttgggaagttgcagaccgaatttcgagaagatccaacggctaacgaaggctgggcagcgtttttaccgaggcagcttcatgtagctttctctagaagcttcattaagcggcttcctccagaagcttcctcgtggcttctttgagaagctttctcaagagacttctttgagaagctagatccttatctatccatacccctctattaactaaattaacttccttaaaaataattacggatgaaaataacgcaacaaataatcaaacatccaacctaattactaataatatatagatatttatatcaggggggtacaactaaactcgtcgggttctcacaatggatctcatcacaatactcatc

SEQ ID NO: 243040 - DNA, 336 bp, Glycine max
  unsure (1)..(336): unsure at all n locations
acggaancaaaaaatgcggaaaaggatgaccctagggcttgaaactcgtcaatcccgtgggtatggcttttgaaaggggggaaaagaaggttttgaatgcaaaaacgcccccctttcgtcattcttataatttggtgcagggggggctcgcccacgcgagctaacttgccattttttttttttgaggggaacattaaccatgtcccctcccttctcatggattagcatcttgcctaacttgaacttacttaggttagaattaggcgttgaatacttattttttttactttttaacacaacacaaaagtaaaagaaagctgcnaaatacaaaggata

SEQ ID NO: 243041 - DNA, 403 bp, Glycine max
  unsure (1)..(403): unsure at all n locations
acgcttattttaccacgaaaatgacatgctaatccctccggnttagaacgaactcatgtaatctatttatgcacacgcgcatgtgtagaaaatatcctactatttatgtccacatacaaggacatccaacacattctaattgtcctacacatatatgcatttgaaaagaacatacattctcacgcccaaggcattgcgtcaaagttcacacttaattatatcctaaacatttactattacaaactacctacacacatttgaaatacatatcatacaaaatttattgcttctctcacatttatttatatgcatattggagagctaattacatcctgcacacactcgcattcaaaagaaattncatgctatcatacatccatgtaggaaaaaaatcattcacact

SEQ ID NO: 243042 - DNA, 320 bp, Glycine max
taatattacgcagggctcggtcagagtgtatgattcagtttcagcagtgaccatcctcatgttgatcatgtgttccaaaatttttgctatcctttgccaagcatcctacaacattgacaacaaagtaaaaaataattattggaatcttgacacaaaaaatgactaatagtgaattgaaataatattataccactgtatgtcgaggcatgtctacatcagcagttgcaggtgcaggtagctctagcataactgctgtgtggacgggctgctgaggaggaattggtacaataaatgtatcatcatgcaccacaggtggatgt

SEQ ID NO: 243043 - DNA, 368 bp, Glycine max
cctgctcaaggtaagactaacactattaggccaagaaaggatatactctgacgatattacagatactttagaagatacacactgacatgaaaaagtccacaaaaacaaagaagaaggaatatcaaagattctcaatccaaagaaaaacaaataaacatggatcttccaagggagtggagaacttcaagggaccaccctcctgaaaatatcataggagacatctcaaaagtgtaacaactcaacactcttttaaagaagcatgcaataacatggctcttggttctctaattgaacccacaaacatacatgaagccataattgatgaatattggatcattgctatgcacgaagaatcgaatcaatttgaa

SEQ ID NO: 243044 - DNA, 309 bp, Glycine max
aaccagcccgcgtggacgaatgagaaaactggggccaatgaacaggatgagaaggagggagaaacccatgttgcgactgtcattcctatacggccaagatccctaccagcgcaacaccatcattactcagccaatatcagccactcgcattacccaccacccacttatccataaaggccacccctaaatcaacaacaaaaacccacctaccacacaaccaatgctaaacaccacctttagcacaaaccaaaacaccaaccaagaaatgaatgttgcagccaaaagcccgtaagagtcaccccaaactcg

SEQ ID NO: 243045 - DNA, 265 bp, Glycine max
gcattacctgaaggagatatgtaagctttgagttcctgaatggcacatgatcctcctttttggctaaggcgaatataacatcactcagtgatgataaacttttgttgattgcctggttacagatgaaagagagtttaaactattgtgaaatcaaataagcacaagtgagaataaaagcaccacgactctgcatacttgagtttctttaaccggtccccggttgatccactcttttgaaagccgctcgctaccagctagatcaatg

SEQ ID NO: 243046 - DNA, 121 bp, Glycine max
tgggcaacaatggatgaggggaagtgtggttttccaaatctgtactttgtgcagatttttgctgtgaaattgtacagcagaattttgcacaagtgcagaataacacttgtgtgtgattggc

SEQ ID NO: 243047 - DNA, 312 bp, Glycine max
cgctccgagggctaagagcctccctaacaagagaagaaccgctcttacaagaattcatcgccctgccttatcacatgaaattggcattatagacatcacgataacaaaatccggaattcgcaggatatgcaaataacacaacggactctgcactatggaatcggcccgcaagcacgggacaaggctgatatgccagctctagccattacatcgactctctgaagaattcaggcgtggcgctcctcccagcgggccttgccataggcaccccctctttcttcctcctccgatcatccctcatggctcggaaaa

SEQ ID NO: 243048 - DNA, 371 bp, Glycine max
ttttgtgtgtgtgtgcgacctcttttaattttataaactacacgcctgttccaaaagattcttcagttatgcttaaaaaggtccagttattgttatgaatttataattggaaaatgttcataatgtaaatattttctatatttttataagaattgtcacaaaaattattaacttttaatataattgtattaaaagttatattttggataattattaatttactcaaaattctttacaacagtgtatcaaaattaaactctattattactcatggaaacgtatctgaactcactcttatgacacaacaataaacaaatataaaaaattaattggataaacataagtaagtatttaatgttctaaagttaaaa

SEQ ID NO: 243049 - DNA, 355 bp, Glycine max
ataggttttgtgctccagtgcctccttatgaaaaaccgccaaagaataatgtgtagcatttttagcacaatctacttcgaaagtggggtaatttttaggttctatggaacagttgtagaagaaggagagattccaattttctgaacggtaggtaaatggagtttgataaaaggtgtaattatctaagggaacaagacacttgtcctcatagacatctatgttggccacagtaaatgaaaagttaagtagccacaaaatgaattcttgtcataacgatccaaaaggatacttatgggtggacattttcacatttctggtgtcacgctcaatttggattgaagataaacttgtagcc

SEQ ID NO: 243050 - DNA, 292 bp, Glycine max
ggctacaccacattgggtcatttttctacaagtggatgaagatttaagcccaaattgaagacaagacaagcctaaactcacaagacatgaagcactcatgagttggagtttaataagttttgggctaaatagttattgataacccattttcctaatttttaatgtaatttttgttttaactttggcgaaataagttcatgtcttttcatatttcctagttagattttagtttttttggacttcctaaaccattatgataactagtggaacttaatgagccactgtaatgaat

SEQ ID NO: 243051 - DNA, 339 bp, Glycine max
ctctgcaaagaattgcctatccttgacttcctcatgtagaagcaagttactgaatctggtattgtctcttatgtatttgattaatttggtcattcatagtgtattcaatgttgctaaacttgatgaattatatattactaacaggaactgcatgaggctggaaacaccaactttcatttgccaggagaaaagattccagagtggtttgagtaccaggccgggccgggggtccatcaatttctttctggttccataacaagttcccagccctagttatttgtcttgttacaggatcagtcgagtattcgccacccgaagatgaagatgagtattccctgc

SEQ ID NO: 243052 - DNA, 394 bp, Glycine max
tttttgccttatgaaacttggtctctttcttgaaggaaaacccaagaaaaatacaatattgtctatttctttacgtgagcgtgacaagcaattagttgagaagcaaataattatgatactgtttaatattactccacaaattgaattgtattgagccaagagtttgaatatcggtgatattatttaatactactcaacaaacttaaaattatgaggttcaattgaagataattattgaaatattatatctatattaaaaattgatattgtgattctaattatcttttaaaatcttttatcttctttggctaatatgctatctattagaaaatgaaattaaaaattattaagtgcgtatattaatttacatataatttattcagtagatcaataa

SEQ ID NO: 243053 - DNA, 287 bp, Glycine max
  unsure (1)..(287): unsure at all n locations
gttcatgttctggtatttcctgtattaggtaaaactacagatacttaattcccaaaggttaaacacaaatgcaaagattattatataagaatcctggaaactggcaaatatgagcatctatgttagggatgagggtggaggtcagtctgtgactgtaccaaagccatggctggtttacagcagaaagaatagaaagntagtagttaggggtcataactgatttatagtanatcaactatgacagctcagcattaggaagttatataaataaggcttgacccttgatg

SEQ ID NO: 243054 - DNA, 463 bp, Glycine max
  unsure (1)..(463): unsure at all n locations
catgcaagtcgccgtcaggtgggcatatgggaactccttttcttctaaccgcataacggagaatnttacgtggaacacgagcacttgagacacgcgtgacttcgtctccaattgtttagactgccaactagtgaagtacgaaatagccaaacctcgaggccttctatgtccgcttccggtaccatcacggccatgggaggacctttcgatggatttcatcgtaggcctctcggcgtatcgtagttacacatgtatcttggtcattgtggatcgtttctctaaaggagtacacctaggaatgctcccctctcatcacacatcacagatggtggctcaatcattcatggagatggtgggcaaattgcatgggatgcctcgcagcatcacctcagatcgtgacccgtttttcatgagcaagttctggcaatcctttgttcttttaagtgtaaccaaacttcgaatg

SEQ ID NO: 243055 - DNA, 421 bp, Glycine max
  unsure (1)..(421): unsure at all n locations
agtgcccaggaatgttgcatcttcttttgtggcctcgaacctgatgtttgaagttactattcgtaacattcccgcgatcttcaattagcaccttgtcctcaaggtgatactgttccttgaggccttcccactcttcccatgatgtttcatctggatgcaagccttgccattgcaccagaaccatgcgtgtaagcccctggtctgttggaaccattttttgacccagaatggctaaaggtgtcgtgagtggttgattgtccacagctccggcaggaagtgtttctactttcaccgactcagtcgagcccactaagggcttcaagagtgagcaatggaacaccgggtgaatgtgagagtgttccngtagttctagcttgtacgctacggggcccattctctaataatcctaagggtcataaaa

SEQ ID NO: 243056 - DNA, 409 bp, Glycine max
  unsure (1)..(409): unsure at all n locations
gcgctcgagaaattcaatgggtcataatttttcacacggatgtccgattcgggcgcataacatatagaggcgctcaaaattgaacaacagaagctctcgtgaaattcaaatggtcataacttgtaactcggatgtccgattcaggcgcatcacatattgagacgtatgaaattgaataacggaagctctcgagaaattcaaatggtcatagcttttcacaccgaggtccgattcaggcttataacatattgatatgctcgaaattaaagattggaagctctcgtgaaattcaaatggtcataacttttcacacggatgtccgatacaagcgaatcacatatcgagacgctcanaattgaacaacggaagctcttgcgaaattcaaatggtcatcacttttaactcagat

SEQ ID NO: 243057 - DNA, 383 bp, Glycine max
gcgaaggtgcacaacaaagttttccacatccacaatgcgcgcataaacccaccatcccctgttgcccacctccaactgagctcacgtactcccacgtagcccatatcctcgtttctctcaacaccgggtccccatcaatcctcccaagcttccacaacatccaagcaaaacaacattcacacagcacaagctatcacagccaagcaaaacaaagcaaaggcagaaaactctgccaaaacaccaaccaaaaatcacagcttttcccactcaaagaccccagtaacaattccttcgatccaatttgttaaccggtggatcgactccaaaatttttctggaagtctatagtgcataagcctacatttggaccgttgggatctacta

SEQ ID NO: 243058 - DNA, 291 bp, Glycine max
  unsure (1)..(291): unsure at all n locations
tcctcgccgacatcttttgtcttgaacggaatcgccatgacaggnttgacgttactgacttcgatatacggcacgcgatattgcgttgtgggagggaattccgactggataaactcaccatccttcacttgccaatttgttatgacattcgctgcaggattacctatgatgtcttgtttccaagggtagtcaatatcctttctgatggcataagcatgaaaccaatcagagaaaaggacattaattttgactctttccacaaattcccaaaacatcgcctggatatgtatt

SEQ ID NO: 243059 - DNA, 297 bp, Glycine max
tcctgaactttcagggcagcttcaagttctcctgccttacaaagcatgtcaattaaaatattgtaggatgaaagattgggaactgcatcaattttcatttcttcaaaggttctcagagcttcctcaacttttccctttcttccaaggcaagtcaggatgcaattatatgcaattacactaagtatacatccctttctcttttgcctctcaagtaagctgtatgcttcatcaaatttcccaactgaaccataacccattatcatggtattataagcgtaaacacaaggaacactcctg

SEQ ID NO: 243060 - DNA, 359 bp, Glycine max
  unsure (1)..(359): unsure at all n locations
gaatgaagaacgttgaagaacggttgaaacctttgcgagattcctcacggaaaacgttacggaaatgtttcggaagcgcctcggcttatattttcttcacggaaacaatttttccaagcaaattcgaaagagagagaagtgcctaaggggctggaccatttccttcttcccttcctcccctatttatagcaaaataggggaggtggttgccgcccagctcgcccaggcgagctcagctcgcccaggcgagcagggttgcttcctccacaagcaaccgccttctggaggaatcttctggagggcccccaatgggcctgggtgctcattttgcaccccattnttactaagtacacccccct

SEQ ID NO: 243061 - DNA, 349 bp, Glycine max
  unsure (1)..(349): unsure at all n locations
acacctacttaacaatcatataagataaaaggcctgttattggtatgaaatcaaagacaattatgtctgctatgctatagatacgatatagttcaagggatttaaaataacattaagagaaaaaaacattctagtttgaggtcctttcaactgaaactggattcggaaaagaaaaaattatatagactgcactttgatttaataagctaaaagttggcgggaaatagataccaccagaatattaagttaaagcataacaagtaatgaaaacagtgctttattaataacaaaatntcanagcatctaanatatataatagaggtactcgcataaaagagtcatactgagt

SEQ ID NO: 243062 - DNA, 337 bp, Glycine max
cccatacccacgaaaatcaagagggaaagaagtccacccaaacctgaaatttcgaagtcccactcgtagccacgcacttcacgactccaaaaatgctctcctttaacgatttggggcagaaacggtggccaaaggttgaagctttgcttgaagcttcaatggagaatgaagaagaagatagctacgtgagagagggagagaaaaggcttctgaatttctactttggctgagtgaggagaaagaacagctttttggttttaaaataaaaaggggtttccctttttttttccattattttattcaagctctgccacatgtccctatttgattggagcaa

SEQ ID NO: 243063 - DNA, 314 bp, Glycine max
gcttctcaaggaagcttcttaaggaagtttcttaaggaaactacctagactatgaataaaagcatgtgtaacacttgttgtaaatttgatgaatgagagtcttgtgagacacaccttaaagttcaacttctctccctcttttcctccttcaatcttgtgctcccccctctctttctctctctctttcttttcctccattgaatcttcctctctaagcttcttatccaaggcactctcttggtggtgaaactccttcttccatgacttattccccagtggatggcgcctcctctgacctcttctctttatcttct

SEQ ID NO: 243064 - DNA, 182 bp, Glycine max
  unsure (1)..(182): unsure at all n locations
tttcttcatcatctatttatntcatttttcttgacaggcataggttacacactcaatccaaatttctcctttgctaaaattgctacaccctacgcacaggttcgaagttcatatccgccatgaacaaatatttgtctcatagtgcattaaaatgcatgctcatacatttcactacgttacag

SEQ ID NO: 243065 - DNA, 342 bp, Glycine max
  unsure (1)..(342): unsure at all n locations
agccaagccaacatcaatgagattccctgattatattatgttttatacacagatcgcaaataaaaaattcattacgtggaatgcgcataatgattagctgaacatagacgtgccaaacctattttatacaataaagaaattttaagataagaataacaattggacatttagtttggcaactttgtgataaacttaacaacctaatttgtcatcccacttttgtccaagagaaccgaagaacttgtgttgttcaaagtccaaactatcttcaaagacatgagtgtcttggataaagatntggagtggtctgagtctgccacaacctcacccaataatttaact

SEQ ID NO: 243066 - DNA, 359 bp, Glycine max
aagagagaagattgtgctgagatgacatggatgacataagtatttgttagatatacaaaaccaagtatgtgaatgcacctaacaactacaatttgtagccaacttggtgcttggcatggtatcatagcttctttgatcaagtggataacattgcaattaaaactcatactaattcttgatattaaacatccaatcaattccaaaatttatcattcatataataatttaacagaagtatctacaaatcttgcaaagtaatttaattaattacatgtttcaaagaaaatattgatgaacaagagtcttttcaaataaattgtgtgcgaacttcatatcatagcaaaagttatattatatag

SEQ ID NO: 243067 - DNA, 379 bp, Glycine max
  unsure (1)..(379): unsure at all n locations
agcatgtgtaacaattgttgtaactctgatgaatgaaagtcttatgagatacacttcaaagttccacttatttccctcttttattccttcaatttcgtgctcccccccttctctctttcttttcctccattaaagcatcctccttaagcttcttatccaaggcaattcttggtggtgaagctccttcttccttggcttattccctaggggatggggcctnccctatcctcttctcctttgccttccgctgcatctccatggtgaaaaatcaccattgaaggacctcattgaagctcaaagatccagcttccattgaagctccacaagcaagcttccatgggcgcgaaatgtcgtaaaatgctacccatggtaaaacatc

SEQ ID NO: 243068 - DNA, 343 bp, Glycine max
  unsure (1)..(343): unsure at all n locations
atacagacgaacaagagaaacaacacatgggagtgagtaaatccgccccatgaaaaagatatcattggggttaagtgggtctataagacaaagctcaaccctgatggcaccatacaaaaacacaaggcgaggctagtagctaacgggtactcacagcaacttggaattgacaacaatgagacatttgcaccagtagctcgtcctgataccataagagctctaatagctcatgcggcacaaaaaggatggagtatccatcaactagatgtcaaatccgccttccttacggcggactngaagaagaatctatgtggagcaccacaatgatcatgcctgaagcaaa

SEQ ID NO: 243069 - DNA, 266 bp, Glycine max
ccctatccttggttcgaagctcactacaagccttaagtgaaaaaccatgatatcactatatccttaaggaactttggagctttggaattgctctgggaataagtgtgggggattttgtttcattggataacatagtttggtggccatgcttcattatatattttgagccatacttgatacacattgcatattggttaaacgttggacatgctgaatatgatgttgtttctcaaaaggctacagaaaaaaaaatattataaaaaaaa

SEQ ID NO: 243070 - DNA, 405 bp, Glycine max
  unsure (1)..(405): unsure at all n locations
taccatcacgattatcgtctccctttccattattgggggtaccacttgggccgccagatccctccaccttttgggcgtgttctttgaatgatccgtccccctttttgcacatgttctgtagttgcatcctatccggaaccatatcaaaattgtactgatactgcctaacaaaggcaaccattatgtccttccaagaatggactcgggaaggttccaagttagtgtaccaggtaacagctaccccagtaagactttcttgaaaagaatgatcagcaattcctcatctttgcgtatgcccttatcttccgacaatacatctttggatggttcttgaggcaagtaagtccctttgacttgtcaaagtccagcaccttgaacttgggangggtgatgatattgggtact

SEQ ID NO: 243071 - DNA, 361 bp, Glycine max
tcactctgcactacttgttacatgtgttaggatttcgtttaatgaaagtactataggcaaaggtgctgaaaggcgtgcctaagccactgaggcatggtgcatgaagctttctttttattttttaatcattttatgcctgctatcttttcaatgagttgtgtctatcaagttaatagtgtgttgaacttatctatttatgcttggtattgtcgtgcattacagcccttcgacattattttcttactttcaggttctggttgtgacattggatgaatggtcaagcgatgaaataaatgcaatgaatgaagttggacgaaattcttctgctaattcaatttatgaagcttattttcgaggatat

SEQ ID NO: 243072 - DNA, 372 bp, Glycine max
  unsure (1)..(372): unsure at all n locations
gcctcagatatcttaagaggggggggggttgaattaagatattacaaattatttccctcgattaaaaattctatttaactttctattcaagttataaattcccttaataatgaatttcttaaatattgattcaaatagaacaatttgaatatgaatataaaataataataaataaaggagtttaagggaagagaaaatgcaaactcagatttatactggttcggccacacccttgtgcctacgtccagtccccaagcaacccgcttgagagttccactttcttgtaaattccttttacaagttctaaacacacaaggacaatccttcctttatgtntagaattctttcacaacaagagaccctcggtctctt

SEQ ID NO: 243073 - DNA, 335 bp, Glycine max
  unsure (1)..(335): unsure at all n locations
gctaagtgcagcctttaaggagcatagtgcatatcctggcggaagatgttctgcttagcgggcgctgtccagctaagccaattctgcagaagctaaatttctgcaactttcgctaagcggctcctcatgtcgctaagcggtagtgttttttttgcaaaggccaactaagcagaccttgtctcgcttagcggccagtgtcttttttagtttttgaaatttgaataacttgtgtcctaattaattgtntagttcctttatatgcagatggcttctagaaaacgtanaagtatttggttaagaaccaccacacagtatgacacaaggagattctcttc

SEQ ID NO: 243074 - DNA, 305 bp, Glycine max
  unsure (1)..(305): unsure at all n locations
agaggggggagcacggaattgaaggaataaaagagggagagaagtggaactttgaattcggatactgattttcctgtcaacttgtgtgattattcgtattttttctttttatccaaatcacttgttgctttttttattttccacatgtctagaaaattcagtaaaaaatttagctcacaattcgaagtaaccaattctcagtaatttttacaagtttgtatgtccaagctgccagcaccagcgatttgtttctttaagcatgggatattgattgccttgngcttactttcaacctctctatgtat

SEQ ID NO: 243075 - DNA, 316 bp, Glycine max
  unsure (1)..(316): unsure at all n locations
catgaaattctaattctagatgttcgctntaatgcatgatcataatgcaatcactctatgtctaacaacgatcttattaagaatcccttccttttagccctattaaaaagtaccctctggcgaacgactaattcctaaaactgatgcatgcaaaaccttccttgtgttcctattaaggattaccctctgtcgaacacctaaccctcaaaataatgcacggatgaatgatgcatgaacataaaagtcagataggataatagaaaagacaacacttgcggcgttgcaaatataaaatatacaatacatcctttcgctt

SEQ ID NO: 243076 - DNA, 239 bp, Glycine max
ccctcggaagcaaaaaaaaggcggagagggaaaacttccaatcaaagaggaagcaaaaaggagagaaggaaaacctccaaccaaaggaaaaaaagagaggaaagggaacccccaaccaaagagcgggagaaagcacatagaaaagaacgaaaatccccaaccaaagaatgggagaaagaaaaaagagaaggagaagaaggaaagaaagctcccgatcaaggagcgaaagaaaacagaag

SEQ ID NO: 243077 - DNA, 323 bp, Glycine max
aaccgatcattcgcgtagaaatctcgcttaatcactggtaaagcaaaatctaaccgatcattcacattggaacctcggctaaaccaaaaaagcaaaataataataaaataatcaaaatatcttaaaaaataataataatatagtcaaaatatcgggaaaaaaataatactaaagtaatcaaaagaatcaatcggacgtttttctttgaaagtttccttgaatgaattgactaataatcaaagtgaaactaaggctaaaatcaactcacacaccaagcattgtccgcaaaagtcactcaaaactgttttaagggccaacgcctc

SEQ ID NO: 243078 - DNA, 408 bp, Glycine max
  unsure (1)..(408): unsure at all n locations
tatgcatgggaattaggacgcatcaacaagaatcaagccaaggctattgtgcaagcaatcaatggggcaaaacacaccaagtgattatgatgatagatggctcaaattctcacaaaggtaaactcatcactttcaaattgagctttcaaaactatcatgacatgtagagaagaatcaaggatttcaagtcacaaaatgtcaagaacttttattttcaaaacaattacccatttcttgaacatatcctataattcaaagaaaaacatgcaaagtcgtacgtgcacacaaaattgacccataatattaaactgaaaatccgacgaaactaacaacattaacaaattaacacaactaacaaattaacaaaaccaacaaaactagcanaaccaaagaacacttccccccccc

SEQ ID NO: 243079 - DNA, 351 bp, Glycine max
  unsure (1)..(351): unsure at all n locations
gaagctagagcttagctacacaccccctataatagctaagctcacccccatgacaaaatacatgaaaatacaaaaaattccctactacaaagactactcaaaatgcctcgaaatacaaggctaaaaccctatactactagaatggccaaaatacaaggcccaaacgaaggaaaaacctattctaantattacaaagataagcgggctcatacttaatccatgggttcgaaatctatcctagggcctttccttggaactctggcccaataaacattacagtcacaaaacttcttttcncaacagctagttctatgaataagataatttaatatgggcagaaaatatttatta

SEQ ID NO: 243080 - DNA, 392 bp, Glycine max
  unsure (1)..(392): unsure at all n locations
gcgcctcggcttagattttcttcacggaaacaatttttccaagcaaattcgaaagagagagaagtgcctaaagggctggaccccttccttcttgctttcctcccctatttatagcaaaataagggaggtggttgccgcccagctcgcccaggcgagctcagctcgcccaggcgagcagggttgcttcctccagaagcaaccgccttctggaggaatcttctggagggcccaaatgggcctgggtgctatttgcacccccatttttactaagtacaccccctctgctattttttggtgattctttnttcgtaaagttacggaaacttacgaatttcgtaacgatacttgttttctttccgtaatgttacgaaaccttgcggatacataatcat

SEQ ID NO: 243081 - DNA, 308 bp, Glycine max
ttgaagctcactacaagccttaagtgaaaaaaccatgatattaccatatccttaaggaattttggagctttggaattattttgggaataagtgtggggggtttttgtttcattggacaacttgttttgttggctatgcttcatgatgtattttgggccatacttgatgtacattgtatattggttaaatgttggacatgctgaatgaaatgttgtttctcaaaggctaaaaaaatataaaaaaaaaataaaattttcgaaaataattcggaaagaacaaaaaaagaaaagcaataaagttgagtgaat

SEQ ID NO: 243082 - DNA, 369 bp, Glycine max
ttcatgtatatttcaccagtacctctggtactgctatgattcatattaataatatataatttctgccttccaaaaaaaatatggctatatataaatatgtaaaattgtattcatttttaaaggtataaattatgtatgttctaggctctctctaagatctaaacatttacctacagttgaagatgatatgtacatattaaagacttttacctacagttaggagatgtaagtagaagttaatgacttttacctacacactatacatagtatgtaaaacctatagtgacaaacaattagccgtcattatattttccctcaaagttgacgggagaaatgtccgtatgacaaagtctatcatacatttaccta

SEQ ID NO: 243083 - DNA, 299 bp, Glycine max
  unsure (1)..(299): unsure at all n locations
gcgcgacctattggcgccaagctaaattccttacgaccataactgaggttcatgaagctaagcactagtcatagcagctaagctgaattccttgcgataatgtgagtgctaagcgagtccttatcagctaagcgcatgctcctctctacttaacatgccttattntagctaagctggtcaaagcctggcttagtgagagttgcagcttttcggatctgcaaaccttgctaagcggtcttatcctcgcgctaagccaagcctatctattcaaaaaaaaaaaaactgatttgaattgaaat

SEQ ID NO: 243084 - DNA, 241 bp, Glycine max
gcaccttcaatacttcattgatatccatagactctcttaagtacaattgccgcaacaactgcatttttctccgattgaaagcattttctggatactgacaaaatatgtccaacggtctcgttttaaacccacaccttggctatgcacttgcagtaacattacaagagtccgcaaactcatcttcacttccatcacatacaagtggtgcactaaatcaaaatctcttatattcccataaacc

SEQ ID NO: 243085 - DNA, 362 bp, Glycine max
  unsure (1)..(362): unsure at all n locations
gtctcctgacccctcgggacatatctccaggtaccactctgtggtcaacaaacaaaagtaggaagactgactcttccacgctntctcacatcaagcttagtggattatggggtacccgtcatatgtgatactaggtggcgatcgggcgatggcgcaaatcaactctcccacttccacaagtcaaacataaacacaccatccccagttgcccacctttcaattgagctcacgcactcctatgtagcccttatcctcgttcctctcagcaccgggtccccatcaacccctccaagcttccacaatatccaagcaattaaattccaaatatcatgaaactacccttaaccaagaaaacagagtag

SEQ ID NO: 243086 - DNA, 378 bp, Glycine max
  unsure (1)..(378): unsure at all n locations
tcttctatattcagattgggaatgcctctaacagcacctttgtcaatgattttcttcatgcctcttaagtgcagatgtccaaatctttgatgccatattttgacttcatcttctttggagaatagacatgtggaggagtaactggtttcttgaggtgtccataggtaacagatgtcctttgatctgctgcccttcattaggacttcactcttctcatttgtcaccaagcattctgactttgtgaagcttacattgaatccttcatcacacaactgaccgatgctgatcaagttcgcaagcagacccttcaccaacagaacttttgtcaaactangaaagccatcatggactaactctcccatccagtgaactttcctt

SEQ ID NO: 243087 - DNA, 369 bp, Glycine max
aataaattacgaattaatagttttaataataaaattaaattgaagaaaattaatatattaagattcaatgataaatactttcaatgcatttttagtttgattatttattaactctttttaattgaaaataatatagttcaatttaatatatacatgttttgtgccatgtaaatattaataaggtgtgatgtttatatgattcatgaggtgtgataatatgttgcgttaggattataacattgtgactgagattgagtgtatgtgataaactgagtatgtgttgaactgtaagatgtgtaatgagattttgtatgctttgagttgtgagctatgaactatacaattacacaactataagaccctttaagt

SEQ ID NO: 243088 - DNA, 179 bp, Glycine max
gaaaagagcacccccacgaaaaaaaagagccgctcgacaagcaagaactaccaaggcgcgatcacctcaacgcaacagaggatacgaaagagcaaaagccccgctgttgtccaccaccccaagagatcgggaaaggaccaaagccttaacgactctctcctttcaaaaacaagagaacg

SEQ ID NO: 243089 - DNA, 366 bp, Glycine max
  unsure (1)..(366): unsure at all n locations
cggaccngacaagagacaaatttaatcatcctgcttggacgaatgagaaaactgcggcaaataaagagggtgacgatgagggagaaacccatgctgtgactgccattcctatacggccaagtttcccaccaacccaacaatgtcattactcagccaataacaaacctcctccttacccaccaaccagttatccataaaggccatccttaaatcaaccacaaagtctgtctaccgcacttccaatgacgaacaccacctttagcacaaaccaaaaacaccaaccaaaaatgaatntggagcgagaaagcctgtcaaatcaccccacattcagnggcctatgctgacttgctcccatatttacttgat

SEQ ID NO: 243090 - DNA, 345 bp, Glycine max
  unsure (1)..(345): unsure at all n locations
ttttttggatggttgcttggtagaggtacatgctaataactaataagatttcctgtgcagggtatcattgtttttgcatgactgatggctaccttggggctggagatattggttgaatctgcctcaagtgttattttgaaggtaattgagataatcttttgttgttggttgtttattatatacctaaatttgggttgaagactatttattcaacatgtggattatctaccataagattgttctaatacgtgattttatcatttgagcagatgatattatcatttgaccttgcttttgctttgattccgctcctaaagntcagtagcagctaagtgactagcagca

SEQ ID NO: 243091 - DNA, 263 bp, Glycine max
caaaaaaccttaaaaaatcgagaacacaacgaccaactttaaacctggaggataaatcgaccctttaaaatttggagaccaaattgaaccatttaaaatgatttaaggaccaaattgataatcaagcctctttaataactaaccacatgacatcttctaaagtttaacaacaatgatctaatgctctaacttttataaatcaagccaaagtaactaacataaatattagggctttactaacataattattcgagtggtactta

SEQ ID NO: 243092 - DNA, 332 bp, Glycine max
acagacaggcattaccttgccaacccccacaatctaaaatcaagatagatcatccatgttagaagtaaaatgctgccatcatttaactcagatacacattcctatcaagatgatgatcagctttctaagggataataaaatgagaaccaagtgtgtttcggtctgtaattgccattgataaaagtccggtagcatcatgctttagcttaagtgactcatctaacacaaatcatagatacatattactttattatataatcaacactattgttgtttaaacaattcataatcaaaatatgatcttgagagtgtggatggcattctaaactggg

SEQ ID NO: 243093 - DNA, 403 bp, Glycine max
  unsure (1)..(403): unsure at all n locations
ccaccgggaaattaataggcatcttatnngttttttannccaaaccaangaccttatcattaatatattggccattatcatgccccttatatgaactctagttattatctggaaacattaatgatattaattttaaggatagttattactgtcgatacaattcattgttcatacatgggtaattgatgttgttccaaatcacaaaacataggatccatttgatctatttgctacaaacaaaaggatataccacatgtaaaagaaaacatacattntaaaaatagttacaatatttaaataaaatagcaactgattactcaactttcatatgcttgttcggcgatagctcatatggtgtgtagtcgtcagaatcaaattcactactgccttgctgaccactcat

SEQ ID NO: 243094 - DNA, 348 bp, Glycine max
tggggggaagaaaatttgaaacagaataaaaagaaagaggttaagcatcagcccacacaacaaataagttgtatgttaaaaaaaagaaaaaaaaatgagttgtgttgttacaatacggtcaaaagaaaattaaaaaaaagggaatagtgagaaggctatttgtacaaaacaagaaaagatcattgggattagtctaggacttgtcctctcttagaatctaaacctttgaatcctagaaaaaccaatgatattttgtagtcaagcctcactacaagcctaagaaagccctctgattttgttatcatttctgacttgatggatgagatgaaatgcaaggtcgacctcctg

SEQ ID NO: 243095 - DNA, 263 bp, Glycine max
  unsure (1)..(263): unsure at all n locations
cctgatgacgcgcttaaaccattttgcttaagtcatttctcgctcaactcacaaacaaaatcaattcccaccgaacgctngaattgcattatccgctaacttcggttaaaatgaattccgaccgttcggtcgtgccgtaaccacgttggaaatcaaaaagagggaaaaaataatataataatccaaaaaacatcttttagtaaaataaagcggaaaatcaatcggacgtctttttctctttgggaattctcattcttaatccg

SEQ ID NO: 243096 - DNA, 351 bp, Glycine max
  unsure (1)..(351): unsure at all n locations
ttgtgagatgttcaagcagcttaaatacagcacatccacaaagttgttaatcttgtgacctgttaaagagcatgtactctgaggatcattatagttgtagtttatttagtttgatagcaactataggatactctggaattgtttagttgtgctcatttatgttgggggtggttctttttaatttatgggatttaagtgtttttgatttgcttaacttcgaggttgaagctgtaagatgtcctttntgattcgcttaacctctcaaagatggaaaatatggtggctggcagctacaaagtcaacctggaagcttagaattacatggtctntcataatcagccttttgatatc

SEQ ID NO: 243097 - DNA, 293 bp, Glycine max
agagtaatgtcccactggtaaaactaactttccaaatgtttgccttcgcaggaatggccccgaggaagctcgcctcaaagaggtccaggaaggacaaggcggccgaaggaactagttccgccccggagtacgacagtcaccgctttatgagcgttgtacaccagcagcgcttcgaagccatcaagggatggtcgtttcttcgggagcgacgcgtccagctcagggacgacgagtatactgatttccaggaggaaatagggcgccggcggtgggcaccactggttactcccatg

SEQ ID NO: 243098 - DNA, 141 bp, Glycine max
gcaccacaaaaaaccaattctgcccaactgcaaaccatatctaccgacaacggaaggcaagctccaacgacggttctccgaggacaagcatgacctcttgaggggtagaaaacactgaatctaaaagggtcctcttcacca

SEQ ID NO: 243099 - DNA, 250 bp, Glycine max
cacagagcggtacctggagatatgtcgcggcggtcaggagaccttggggacgccaggtggggtgctattgcccaaaaccaagcttgaccaatcccgacccaacccgggcatagtcggtcagtgagaacctgtgatgtacctaagcaggcgagctcctggcagtcaacagataaaaggaaaacaagaccacaaagcacggaggcttgtggtggctggccacctgtgaattttgtggaatatgcgagatatg

SEQ ID NO: 243100 - DNA, 409 bp, Glycine max
  unsure (1)..(409): unsure at all n locations
agaccttcaatcctataacgcaacatggcggacaaaaatgggcagttaacttgaatggccattatcgtcaatgcggaaggtattctacgcttcactatccatgttcacacattattgcagcttgtgggtacgtgagcatgaactactaccaatatatagatgttgtttacacaaatgagcacatcttacaagcatactctgcacactggtggcctcttgtgaatgaagcggctattcctccttctgatgatgcatggacactnatccttgacgcaactataattcgtgcgaaaggtcggccaaaatcaacaaggataatgaatgagatggatttggtggaaccatctgaccaccaactaaaatgtattagatgtggataagatggcacaatatgcgccgatgccaatgc

SEQ ID NO: 243101 - DNA, 325 bp, Glycine max
caaactgtcaattgaacggcagctcatgattttttgatttaacaatgacagtattctcaacatctaagtttggaacaagtcatgtgataccatttggcaaataaaatttttaatggatatcaaacgggaggaagtccgaaacacatagctcataaagcctcaaactttagagacataaacatctcctaaaagataaaggcaacagtttgaatttactgccttaaagtacagacttttctgaacagctactaatataacgagcatgcttcaattttcttgatacaaatttttgataagactaatatatcttaaaagcctacaatat

SEQ ID NO: 243102 - DNA, 318 bp, Glycine max
  unsure (1)..(318): unsure at all n locations
agcgcanagaagncgnctaccaacccaatgattggggtatggtcacactacggccacgtcgacagttgactgccacggggtcaaacgcccgtggggagaaactagctaagcagtattacgggccttttaagattgtggaccgcatcggtgcagcggcttatccattgcaattgccggaggggacccgagttcatcctgcatttcattgttctgtgctcaaacctttcataggcactgtggagtcgattactaggcccaccctgcccctacagttcgaagaaagacaaccacttgtgactcccctcaccattcttagac

SEQ ID NO: 243103 - DNA, 299 bp, Glycine max
  unsure (1)..(299): unsure at all n locations
tttgaagaccattaaacctgtctaaatctttgaaagaagagatgaatcctctccatcatgtccttcttcaccaacatgtcgagcacctttctttacccaagagccatcatgctccttttgataaccaaaagatgttatgactgaagtgcctataaagaaagatctcttgattgatgtcatgccctaatttcgtccggggattattactagatgacatgcaacctttggttagccactttgagatacttggcgtnctttgttgcacaataaatgaagtcccgagacgtgtcagaaataaa

SEQ ID NO: 243104 - DNA, 382 bp, Glycine max
ggctacgcgggagtacgtgagctcagtgaaggtgggcaactgcggatggtgggtttatgtgtgatctgtggatgtggagagttgacttgcaccatcgcccgaccgccacctagtaccacatgtgatgggtgccccataatcctacaagcttgaaatgaggaagtgtggaagggtgagacttcctacttttatttcttgaccacagagtggtacctggagatatgtcgcgggggtcaagagaccttgtggacatcacgtggggtgctattgcccaaaaccaagcttgaccaatcccgactcaacccgggcatagtcagtcagtgagaacctgtgatgtacctaaacaggcgagctcctggcagtcaaccgatataagacaaag

SEQ ID NO: 243105 - DNA, 280 bp, Glycine max
  unsure (1)..(280): unsure at all n locations
cacttctctctctttcgaatatgcttggaaaaattgcttccgcgaagaaaatctaagccgaggcgcttccgaaacgtttctgtaacagcttcgtaaggaatttcgcgaaggtttccactgttcttcgacgttcttcattcgatcttcatcgctcttcgatcttcaacgggtaagtacctcgaaccaagctttccgattcattctatgcacccgtggnggcccacagtgaggttcgcgtattcatattctcggatcatttactctctatacccctctttga

SEQ ID NO: 243106 - DNA, 327 bp, Glycine max
  unsure (1)..(327): unsure at all n locations
agcagngcactctcacccatctccattacaagcctttcttcttcctgaacacacatggtcattaattcattgatagaccatttatctttatgtgtgttgtaggaaatcttaaatggcccatattcatgcggaagggtgttcaaaatgaaatgcactaggaaggactcagacatatcaacctctagtttcttaagttgagctgaaatatttcgcattttcatgatgtactcacgcacaccttttacactggtgagccgaagagaagaaaacttcatgatcaaggtgcttgctaaagtcttatctgaagtgatgaactggtcatcaatg

SEQ ID NO: 243107 - DNA, 327 bp, Glycine max
agacagacgcacgtagaggacttatataccagtgagcttacaaagaaaaaaaattcatttaaaatatttgcaattcaaagacggtgccaatgaaaaccttcgcggtccacttaaagaacaaaggcgggtttataataaccatcgtggactggggaaaaagaccctataacattcaaaaatgccactgtgagatttaccacatcagtttcttaataaccgatgaagatttggcgaagttaattcatgcttttggagcagcggaatacagaccatgtaatgaggtcaacaaaaatcatggcgatataacccccaacaccaaagggcgaa

SEQ ID NO: 243108 - DNA, 263 bp, Glycine max
  unsure (1)..(263): unsure at all n locations
ttccatggcttatnccctagtggatggcgcctcctctcacctcttctcctttgtcttccgctgcatctggaaaatcaccattaaaggacctcattgaagctcaaatatccagcctccatataagccgcacaagcaagcttccatcagaatggcaggggaaaatcggcctttttgcgaacctggttcagcctgctatagtcaatgcagactctccaactgttctgcacccaaataggaatcagctcctccttctcantttttat

SEQ ID NO: 243109 - DNA, 316 bp, Glycine max
acgaggcggagggtgtgccatgttctcacaatgtgcaaaatcagaatgctcagaatcagaatgctcaaaattataatgctcaagatcaggatgttcaaaatcaccaataacagaatgcacagattcaacagtaatggaatgctcagaatgatcaaaaggtataaaatgatgcctgactaatctatgaaatgtcctatctatctcacgattaaagggttgtaagtcagatggattgcctctagtcatacactacattcagcatgcacacaactagttgccttgtcatgtaaataaaggtgtatggttgaactaccac

SEQ ID NO: 243110 - DNA, 264 bp, Glycine max
gatatatttaccaacacggcagccaccggcagcaagtaccaagaagaaataaatctagccacggcccacgagcacaaagtggcggacgagtatgcccgagtgtacgcaaaaaaggaggccagaggaagggtgattgacccgttacatcaagaggcagcaatgtggacggaccaatatgctcttactttgaacgggagtcaagaacttccccgattgctggccaaggccaaagcaatggcggacacctactccgaccccgaggag

SEQ ID NO: 243111 - DNA, 303 bp, Glycine max
gatcattttaaggtccaatgccttaaaaggaccaccttccaagtaaaaagaatcgcatgattcacccttttgaaagaactacctaggtctgatttcctcttctatggagggtacgtacgaccaagagccccgcttttgtcgacctcataactaaaaaagaaataaaagtttagatacataatttcacacaattctaatctaaggctgttgtcctttgtgacaaacgtgagaggtgctaataccttcctcaaacgtaaatacaactcccaaatctggaatattcttcatgacccgattcctttg

SEQ ID NO: 243112 - DNA, 303 bp, Glycine max
  unsure (1)..(303): unsure at all n locations
ttatgttcaaaatggtaatatgttctagtgcgatagattttagctctaaaaaatgagatcaattttttttttaattttatatactttccccttctttaaaaatatttattctataaaaaatagtttttttaaaattattatttgggtctgtggacctgtccatttatccacaaaatgttngtgggttagatatggatcttgaaaaaaattcattcattttgtggactaaacttacgtggcctttctaaaatgagagtttcaagttcatatatccactcctcatttgcttttattaatccatat

SEQ ID NO: 243113 - DNA, 339 bp, Glycine max
gacgcttctgagaaagttgaaaattaagctgcagtccatcgatgctctggctgatgatgcagaacgaaagcagttcgcagatccacgcgtgagaaactggcttcttgaggtcaaagatatggtttttgatgcagaggatctcttggatgaaatacaacatgaatcatccaaatgggaactggaagctgaatctgaatctcagacctgtacgagctgtacttgcaaggtaccaaatttcttcaaatcttctcatgctagttcctttaacagggaaattaaatccaggatggaagaaatccttgatagattagaacttctctcaagccaaaaagatgatct

SEQ ID NO: 243114 - DNA, 303 bp, Glycine max
ttctttaaactagctccgctccggagtatgacagtcaccgctttaggagcgctgtacaccagcagcgcttcgaggccatcaagggatggtcgtttctccgggagcgacgcgtccagctcagggacgacaagtatactgatttccaggaggaaatagggcgccggcggtgggcaccactggttactcccatggccaagttcgatccaaaaatagtccttgagttttatgccaatgcttggccaacagaggagggcgtgcgtgacatgagatcctgggtaaggggtcagtggatcccgtttgatg

SEQ ID NO: 243115 - DNA, 364 bp, Glycine max
  unsure (1)..(364): unsure at all n locations
gaaaccaacttcaacttgcttattcatgatcatttcaccatcttcaataagccactgaagcttgtaaggtcgtggatgtggtttagtctccaaattcagttttgacaccaatcttgcactagccgccttggtgcaactccctccatcaattatccaagaatataactgatgcaatcctaccccccaagggtattagatagaagactccaagaggattgggctagagctgctaaagaaggccctagggttctcatgaacctaagggtaaattttttgagcccatgggccaaagctgggtccactcttctttgtaaatattagaataggtttttccttctttttgggctngtattttggccattct

SEQ ID NO: 243116 - DNA, 392 bp, Glycine max
  unsure (1)..(392): unsure at all n locations
ttttttttttacaacggataggacacatataagggtgccttataatttcacaatcgtcctttgcttgttttttctgttttattcatatttctcttattttgtacttgtttattatggctttacattggaaatcaataaagtattacatctatttgcttaattttttcatattttatttatgaaaaacaaaattgattgagcgaagggttccttccatgcatacaaaactacaccaaccaaatctcaaatcttatctttgtaagggtagaagactaatcatgtgagttaacctctcgttggcccttnttcaaatttcaaaaagttaaaatttagtattttgatttagagcttgaacctttntagaatcagactatggatctgagcagcctttt

SEQ ID NO: 243117 - DNA, 381 bp, Glycine max
gcacatcgttcgcgtgtacgatatccactcgacaaggtttgaagtaaaggagaccttcaatcctataacgcaacgtggcggacaaaaatgggcagttaacttgaatggccattattgtcaatgcggaaggtattctgcgcttcactatccatgttcacacattattgcaacttgtggttacgtgagcatgaactactaccaatatatagatgttgtttacaccaatgaacacatcttaaaagcatactccgcacaatggtggcctcttgggaatgaagcggcaattcctccttctgatgaggcatggacactaatccctgacccaactacaattcgtgcgaaaggtcggccaaaatcaacaaggataaggaatgagatgga

SEQ ID NO: 243118 - DNA, 362 bp, Glycine max
tattcaaggcatgcacgtaccttatgagtagcatatggtacatacaaagatatcatagacttaactatgattaatcatctagtctcatatatttgcaagtaattaattaattaccaagtaactaaataagatgtactagtttgcttgatagttgattgataaccttccttgtaggtacgtaggttcgtttttatgcttttgggtcatgtcattccttacattatctctgggcttatggcagggaaaggaacccagtggatttcaacaagctggacacaattaggcaccagtttaaaggaagcagcttcaggtaacaacctaatgatgacgataagtgagtattattattattattattaata

SEQ ID NO: 243119 - DNA, 397 bp, Glycine max
ataaggtgaagccttttttttatgggaaagaaaaaggctctatgataccatattaaaacaaagaaaccaaaagaaaacatctggaagaagagagaaactcttatgaaaatcaattgtataaaactgagaaacatcaaaactgaaatacaaagggagatcttagtcctatttataaggtgcaacataacttagcaaaggctaagttagttacatagttcaaacagaaaggagacctatgagctatttaacaactgttacaaatcttaacagagcatatcaactaacaaagaataaaagagagtcttttattctcatactcctaatataataatgcctaaaagtatcctttaaccatttattataacaactactccttaaaagatgtctcttgattatt

SEQ ID NO: 243120 - DNA, 256 bp, Glycine max
tatctaggcattagtaggtaacacataggttttctactatgacatagtgcatagatcctaccaataattttcaagtactaattaattaaataattgaaagttgaaactacactatcgatatacattgattagcttccacaacttgctaaacactagaacactgaaacattcttcattttacaaaaaaaatactaataagaaataaaaagacggggtggtgctggaagaaccaaaaggtaccaaactagactataac

SEQ ID NO: 243121 - DNA, 391 bp, Glycine max
  unsure (1)..(391): unsure at all n locations
ccgaccacaaggaatagtaatcaattatcaaaccctaaaacatagttttttctataaaaacttactattgtttactcataaaacctacacactcattgtaactattatcaacaacaattaaagatccaaaatagacattgaaaaacaagcatcataaacttcttaactacaatcatcaagcacaatcaaaaatacaaaaacaatcatcaaaacacaaacaaagacaatcaacgacaatcattaatcttcaaacaacaattaacatgactatcanaacacaatcaaagacaatcattaagccacaattaataataaccatcagacacaaacttaaatattaagaaagagaatactccaccgatttaactatttatctaagtcattggtatct

SEQ ID NO: 243122 - DNA, 315 bp, Glycine max
tttccttatggtacaattgagatcaaaagcgactccacacacaagagcttcaaggtcaatggacaccgacttaagccattcctcacaaacccttctttagtggacgtagtggtggaagagactttcttactccaccctactcttcctccaccatgacttagggagtttttcttttcctatctccttctttacttttattacatctggccgactctatttgatggttaacatttttttaatctcttaaatgtgctacattgacgacaatgtgtttgttaagtatggggggatagttctttggttttggttttgata

SEQ ID NO: 243123 - DNA, 325 bp, Glycine max
cccacacagacggaccttatatatctatatatctatagacagatatacacatatagatatatagatatagatcatacaatgaagcaccgcacgagtgggtatataggaatccaaatctgccgaatcactcatgttatgaccttctacatcctaggtcttcccgttccttcatctggcttatgccctccatgtagcattcagactgaacgactctatgaaactacgtcgctacttccacactggacggcgaacgtacgagacatctctattcttcccggggggaatccttagaatcaccacagcttagctttcaattcgcctctga

SEQ ID NO: 243124 - DNA, 286 bp, Glycine max
ttacgcttgcagatatataaggtgacattttaggattccattttctagtaccgcggccaaaatgaactcctgcttccatcatctcttccaagattatgttccaatatctttttgtcatttatatttatccccacacttttctttcatttcaaaatcgaaattctataaattttttgaaatgaaagaaagagacccggtatactgaaatagaaataagtgttccaaaggaaccttcttttctaccgaagattggcctttgataaatgatcgggccatttttttatta

SEQ ID NO: 243125 - DNA, 407 bp, Glycine max
ttccccgagagcttccatttttcaatttcgaacgtctcgaaatattatgcgctcgaatcggacatccgtgtgaaaaattatgaccaatagaaattctcgagacgcttcgttgttcattttcgagagcctctatattggatgtgcctgaatcggacatctgagttaaaagttatgactatttgaatttctcaagagcttccgttgcccaattttgatcgtctcgatatgtgattcgcatgaatcggacatccgtgttgaaaggtatgactttttgaatttcacaagagcttccgttgttcaattttgatcgtctagatatgtgattcgcccgaatcgaacattcgtgtgaacagctatgaccatctgaatttctcgagagcttccgatgtttaatctcgagcgtataa

SEQ ID NO: 243126 - DNA, 287 bp, Glycine max
tgaatcggacatgcgagtgaaaagttatttccatttgaatttctcgagagcttcctatgtttaattttgagcgtctcgatatattatacgcctgaatcgaacctcagtgtaaaaagttatgaccatttgaatttcttcagagcatccgttgttcattttcgagcagctctatatgtgatgaaccttaatcggacctccgcgtgaaaagatatgaccatttgaatttctcgagagcttccgttgttcaatttcgagcgtctgcacatattatgcgcccgaatcggaca

SEQ ID NO: 243127 - DNA, 295 bp, Glycine max
aatcaagagtactcttaaagttttgactttcaaatggttaagtttttaaagttaactcttctaaaggtgcttgacgactgaaagttataaaacaagtttgtttgattcaaaatctgaacactattatacatccttacagcctgaatttttaactttttttttttgaccaaacttttgaagttttggttccaacctgaaaccggctttatcttcattttctcctttgcaaaaaatcccaggactacgctaatctttggcttctttcctttcaaaacaagctacactaattttggct

SEQ ID NO: 243128 - DNA, 393 bp, Glycine max
  unsure (1)..(393): unsure at all n locations
ggggtagtgctgatcgaggccgtacccgaataaaataaacatgataatgcagtaactaggaagtgatcctaggtcgtttcccaatgagcaatgatagaccaaatgttcataatatacttgcagtaacagtaacgattgggggggggttgtttgttttgtaatttaaggagcagaacaagtaaactggaatgcgaaactaataatattaaaaatgggttgtttcctctgattcagaagccattctcttatcctgggttatggagaattcatccctaacagtaaccacttaatccaaccctatttcaattnactaagcgaanaacaacttatggttgtcaatacgtgaatatgcaccacatacatcaagtaacccttctttcattaaacatgaac

SEQ ID NO: 243129 - DNA, 262 bp, Glycine max
tatcctagggagggcctcttaccttttctttgcttcactgcattctggggaaaataccattaggactattgaactaaaatcaccttataaacccacaacacttcatatgggtccgggcggacgacaatattggctggaaaagcggggatggccgccgtgcatgcgctatcagcgcctagaagacgctgtcgtgcacctaaatctggggtataaataaaggaggaacctgtcaattattattgtgaaaaatgaaaaataagct

SEQ ID NO: 243130 - DNA, 365 bp, Glycine max
gaaaataattgaacaaggtatatatcatctttatgagctagctagagatttatatttatgaaacgaagcaaggcatgtgggtgcctttaaaactggatagtagtagccagcaatgtttaggtttttggacccttctttgatttctttcctttggctataaattatttttccattcctagcaggggcaatcatctctttgttttttctttaatttcaaggtcacaagtatctacacaaatgagtctggtagctacttgaatcaaactgttccatgtagtgattgtccaaattcacaatctggtagtagttgcaatgtggtagaatgatatcaatttcatataataccacccacatcttagggcacc

SEQ ID NO: 243131 - DNA, 262 bp, Glycine max
gaaatatatatggccaaaaggaaacaagttgactcctgactctttgctggatgggtcagatatggatcatcatgaagactacaaggaaaaaagtgattaaaaatttgaagatttgcatgttcggttgcccatagaaaaaaagatacatgacaaagacagatgtgtttattaattaaagaattgaaagcaactctgtgatgctaattaaaagaatccctccggatgttgattctggtgaatttaaatataaaatccttatatg

SEQ ID NO: 243132 - DNA, 400 bp, Glycine max
  unsure (1)..(400): unsure at all n locations
tgagcatgtttcgcctttgccaaattaaatccagcagaatcccaaacctccaatgccatttatgatttagtattgaagactcacttagattaagagtgagccaatcctctagagtacctgcaaaaaagaaaccgttattgaaaactggtatgacccctctccccatgctcctcacatcttcaccatctctggtccttacttacataatggacataaaatcacttgtaattnttctgttccacctagccaagttagtgcccaaagcaccacgcgcaacattccatttccattagtgactaatantttatcgaattttgttcagttaataaggccatatgaataatattactactatgtcagtaaaaaagaaagagaatacgtcaagtctaaagagatttga

SEQ ID NO: 243133 - DNA, 385 bp, Glycine max
cagaaagctcatcaacatatggcgcaactttaccgctacaccagggctcaatattattcataaaataataatattcacttaaaaaataagaaacgataataacaaaaatattaccgatcccaatttggaaaactcccaacaagatagagacctccacagtcccaaggctctgcaataattttacatcttgataatactgcatctttagcaattgcctgcaaagtacataaaaattagttgactaaaacattaaaatttataaattctcaattctctagttgagggagaaaattactactcgattgttgtcttcaaatctctaaagtgaggtgtgttaaaactaatcaacttagataaacaaccaaacagatcaaaaccaaataac

SEQ ID NO: 243134 - DNA, 268 bp, Glycine max
gctgagccacagctaaaactcaccaaccataattagtgaacatctggctccacaaattcaactccaaattcctgtgaagatcgaatagaaattcaacactccctccaattttgtgcgacacttaggctataaatagaggccatgcgcgtgcacacctccaactctgatcatttgagaattacactccaaagctcagacctcatctgaggcacaaaattttgtgctccttctctccttctccctcccctcatcttctcctccttcaagc

SEQ ID NO: 243135 - DNA, 411 bp, Glycine max
  unsure (1)..(411): unsure at all n locations
gagctttggggttgttcttttgaagcttctggaggaagcctcttaatgaagcttctagagaaagctacatgaagctgcctcggtaaaaacactacccagctttcattaaccgctggatcttctcgaaattttggtctgcaactttgcaagacaattttccatgatcttaccgttgggatctttgagaaaatgtttggagtgtgctanaagcttccgttcccgagagcatctcttatttaagcatttcagccattgctttcgtgtagcttaggaaaaaagtcatttcttcttctttctttcttccaaagccatttctaaagttccaagcactttcaccatcacccacagccaccattagccaccacaaaccatcattgttctccattgaagacccacaccgagaggaaccct

SEQ ID NO: 243136 - DNA, 160 bp, Glycine max
tcagagcaagaaacgcatgcgccctgcttctccaagcatactaagtccagaactctccaccccacagcccataccaccacaaccacgtgtcccacaccggagaccctcaccgagcgaaccccaactggctgcggatcgagaaacaacccaacaacctcgt

SEQ ID NO: 243137 - DNA, 356 bp, Glycine max
  unsure (1)..(356): unsure at all n locations
aaacatgagtcacatctgacccttcagattcacaaaaatatcttttcattgccttctgtaacagcatggaaagcaatctatgtaatggaatgtgtacagatatatcttgngaactaacatcataaactatttgtggccaatcaggcaatgataaaaaacgtggaccatctgattccaaggggaaatcttcttccatggcattatcatcaaaagtgggacgaatataagtattttctgaatcaattgcattattttcagaacactgcttaccatgatcttcaattgaacttgtaagcctaccaaatgtatatctacccctttcaaacttagatattgttctcttaaatgctgaaaaa

SEQ ID NO: 243138 - DNA, 360 bp, Glycine max
cttaatcctttcatgaaagactgggtttgaggaaatatgaagagtaccctgattatcacaatacaacttcatttgcaactcttcacagaacctcaattcttgcagaaattgtttaatccacatgagttcacaagtaactatagccatagatcgatattcagcttctgcactggatcgaacgaaaatagtttgtttcttgcttttccaagagataagatttcctccaatgaaaacacaatagcctgatgtagacctcctatccatgggacatccagcccaatcagcatcacaatatcccgatagttgcgtattacccttgtcttcatacaacaacccttgtccaggagctcttttaacata

SEQ ID NO: 243139 - DNA, 302 bp, Glycine max
  unsure (1)..(302): unsure at all n locations
ggacaaaaccagaacccctgatgcaaaagaggacgcccagaaacaaagcctacctaggcaaacaattggcaaaggtggagtacacggacggccaaaacatgatcgaacactggaacatctccaaaggatttgtgaaccaattggccaaagcaaaaacaaagatagaagaagagtgacaaactcttctactcaccagctgtttgcttgagaaatgcgacactctaagtggcactctcagcaatgccactccacaaggagagctcaacatggatcatggtatagacacgnttgttgattgaaga

SEQ ID NO: 243140 - DNA, 344 bp, Glycine max
ctacaagtgcttatggagaagattatccaaacacgccacacgtaaatgaagggtatacatataaagtttcggaacgaacctgcatagaggaaatccccaagtccattaagatgccgtcaacccccaactttagctcatcaaattctctaagcacagacttgacgtctctaaaattcctcaaaacggtaatcgctttgacaccaccgttcaaaacggcatcaagacgaggctgggcaatgtcgtgtgcgacagagtccacgtccatccccacgaaatacttcaactcttgatgccccttgatcacctggttcattccattcctcaatcccttcaataacatactt

SEQ ID NO: 243141 - DNA, 338 bp, Glycine max
  unsure (1)..(338): unsure at all n locations
atttcattcaaataacatatatatatacaaataggagagagacagcttgacaagctttgacaagacagtacacactgctgttttctacaacaagataaaatagggaaatctactctaaagatacatctaataatacccataattataacatgtcccttattaaccgccaagcgaataccgttatcttgctaggaattctaatcttccataattccttacaccattcctcttgccgacctcctgtaatagtttccaaaatcagattatatgcgctgcttgtcaataatttcctgatgatcacctaaccactccangatctgatctttgtgtgaatgtca

SEQ ID NO: 243142 - DNA, 400 bp, Glycine max
  unsure (1)..(400): unsure at all n locations
agagagaggggaaggtgtgttttgtgggttattcatgcggcgagggaaagggagagggattgagctacctccctctgtgaacgagacgacgctgttcaaattagaactttagggtttattcgcgagtggtagtaattttaagaaaataaaaaaatcatttaaaatattaacaattcaaagatggtggtatatagaaaactgatgtagtttgcttagaaacaaaggcggttttacactaaccattgttgacatgtgaaaaagttcatgttaatttcaaaaatgccaccgtgatatttactacatcggttntttaataaccgatggagatttgacgatgttaaatcatctctttgtagtagtgaacaatgcacgtgagggtgactttctacaccaagataca

SEQ ID NO: 243143 - DNA, 355 bp, Glycine max
actcgaagaatcgtgacttttggaaacgtatttctcgaaaccagccactggcaatcgattaaacgtgactctccattctgaaccctgaaaactaaaacgtttagaacgtctggcaatcgaccacaagtgttgcgtaaccgatcacacaacgtcataatgattcaaaactgttaaacacaagtcgcaacttctgaaatttgaaatctgaacattttaaactctctgcgaatgattttgtgaaaacttcttgcggtattcaatgtttcgaaaagcttttttagcacttacctcgactgacgcttctcttgattcttgaatctcgactcttgaatcttgaccttgattattcttgaat

SEQ ID NO: 243144 - DNA, 392 bp, Glycine max
  unsure (1)..(392): unsure at all n locations
cttaagcaccgcggcagcactttgacctaagattctgtttggttantttggcgcnatcactcacataagcgtgtctttgcaggttacctgtggagccacccgccaagtaatgatgaaagactcatctttgtgggtgatggcaaaaaggtcgcagtacagactattggaaatttcaaattgcagttgaagaatgaatcttatttgaattcatctgagacttttgttgtctcgccttttagatggaacttgatttgtattggtagtttacacacaattggattttcttgctcatctggaaataataaagttcacntctaccacaaatcaaattcttttggttccggttctttaactgataatctctacatgcttgaggttagttcctataatga

SEQ ID NO: 243145 - DNA, 282 bp, Glycine max
cccaacgacaaggggggaaaggggcgcccggccccacaccacaacaaacaaaagacccgccccgggcacaacaaaacgggccgcaaaaccaccggaaaccaacggacaaaaaagacgcaccggacccaccgaccaaatggcccctgctttgacgcaaaacaaaaaaaaaaccccccgaaaaaactcaaacatcgcttaaaaaatcaaaaaaatccaccgagctttgcgatgaccaccgcaaaaaacaaaatccggtaccacaaccatatagaaactgacgca

SEQ ID NO: 243146 - DNA, 326 bp, Glycine max
cctacctataaggaagctggtaacacttgtgaactttagaatgagagcttgtgagacacacaaaagttaacttctctcctttttttcttcaatttcggctcccctttcttttctctccctctttttttcttcattgaagcatcctctccaagctatcttggtgggaagctcatcttccaggcttattccctagtggatgccgcctctctctcctttctctttgcttccgtgcatttcatggggaaaataccatccaggacctcattgagcttaagatcagcctcatagagcccacaagcagcttcatcaacattggaagtaattac

SEQ ID NO: 243147 - DNA, 455 bp, Glycine max
  unsure (1)..(455): unsure at all n locations
ctgcggcatcaagcttctattctaattagaaatcctgttttgttttnatcctgaaatctatgggattaagatggcattgaccaatccttattttatgatttaacaaaattgcctagtgaaggtgtgccttttgagggtgcactgattgatgattggaaattctatttttctgtgcatgatgcctgccggttggttcgcaccaaccaagcggatatgatcggaaggcttcttgcctgttcattggcttttgagagccgcatcctccataaccttattgttcgcatcttactccctagatcttcaaaccttgctcaagtttctgaagaagatctcattgacatgtgggcctttcataaaggtttacaaattgattgcgcgcaccttgttagatatcgcatgcataaggcattgcgattgaatgcactattgtcttttgctcatcttgttaccctttt

SEQ ID NO: 243148 - DNA, 182 bp, Glycine max
ccccacccgcaacgcaccccccccccccaccccaccaaaccccccacccccacaccccaccccaccaccccacccacacccgccccccccgcccacccccaccccacccactccccccccccccccacacccccaccccacccccccccccacccccacgcaacgcccgaccgccccccccc

SEQ ID NO: 243149 - DNA, 210 bp, Glycine max
caactatcagcaatttcacatgttctacacgttaaacattggctgatgagcatcaaccatgtttcttgcagtgttccaatctgaggatagcactaatctgcccaaattagcctgcgtatttacatatttactacttcctaatgcaataaatctgaacaaacccgatccctatctgcttaataaaaaaccgctttgttaagccaatctgca

SEQ ID NO: 243150 - DNA, 71 bp, Glycine max
agacgggcccccaaaaaaaaaagttaccccccacacagcgaacaccacaaaccaccaccaccccacacaca

SEQ ID NO: 243151 - DNA, 311 bp, Glycine max
  unsure (1)..(311): unsure at all n locations
acaccttagggcactaccacctatcacccatggaggaaccaacagaagagatcctacgatgtcctccacgcggaaggagaccatacctctcctcatggncctatccctcattagctagaattcctaagatagtccaaatttcggcacaggaactagaccgcacaaagcaagttgaaaaaggggcggtcggagcaccgagaaaatatctcgaggccaaagcaacaatcttggcaggtaaaggcgaatgggccccattcatagacattctcgcactgctgatcttcggaggagccctctttccaaaagaggat

SEQ ID NO: 243152 - DNA, 463 bp, Glycine max
acctgcggcatgcaagctctcccttagctcggagaatgtgtcattttttgtacataagagttaaaaggtcgtttggttcttgtatgtagcttataaacataaaatagaaacttcgaataggtgtgagtagaatggtcagtttaattagttttaatacaacataaaagatataaaaagattattaaattctcaaaaattaactaaaaaaaggaaaacattaaaagctaaaaataaaagataaatatcctaagtactataaaataaaatcaacaaatgatacatatgttttcgattaaaattttaaaaaaattatataagagatatatctaaaaattaaaatgataattatatatagatttatttaaagaatagttaacattctaataaggagaaacatcacacataataaaagatatattcattcttaatctttttcttcgaatttgatcactagaagataaat

SEQ ID NO: 243153 - DNA, 200 bp, Glycine max
  unsure (1)..(200): unsure at all n locations
aaaaccaacccacccccccaacacccaccacaacacacaaaacgccaccncacaccacacacacaaacacgcgagaacgagcaccaccacacaagacgaaccagggacaaaaagcccggacacgaccgcccaancgaggaaaacaaacagggagagaaagagagaggggggagcatgaaaccgaaggaacaaaaagggac

SEQ ID NO: 243154 - DNA, 297 bp, Glycine max
agccaacctccaacacaaaaacaaacaccagaacgaaaaacgaagacatagccaacaaacagccacagccacaagcatatgccgcgccgcatcaggaacgattcccaacgcgacaaacaggtccgaaccgggcaaacaaacccggacgacacgctttcccacgctatcaagctccacccgactacccacacaattacacttcacaccgagcgccgtgacacaacaaaaaatacgtcaaacatgaaaaaactactttcgacaccccaaactcaaggacggattcagaaggccaccgaa

SEQ ID NO: 243155 - DNA, 344 bp, Glycine max
ccccactaagcaaaacggatcatgtttaacggcccacgcttcaaaatgatcacctcttaagcaaaaaaagaatcacctgacaagaaagaactacgtaggtctgagttcctcactgaggatacctaggagcaaaagccccgcttttgcccaccaccccaagagatcgttaatggtccaatgccttaacgtttctctcctttcaaaaacaaaagatcgttaatggtccaatgccctaacggatctctcctctcaaaaacaacagatcgttcatgcgccacagccttaacgtttctcctcctccaaaaatcaaaagaccgtttaatgggtcaacaccttaaatgacc

SEQ ID NO: 243156 - DNA, 315 bp, Glycine max
caaccaccaccaggagacgaagaaacaccaccaccaccccgacaaatcaaaccacacaccaccaaaccaccacaacaaaaaacaaccacacaacaacaaccacaacaaaccccccaaagcgaccatcccaactacaccacacaacaacacgaacacaacgcaaccaacacaagacaacccccaaagggcaaaaaaccacgacccaaaaccaagacggcacaaaaacacaaaaacaaaaaaaccaaaacaacacaacaaaaccacacaaaaagacgccgaaccaacgaaaccacgacgaaaaaaccacccaaacaa

SEQ ID NO: 243157 - DNA, 234 bp, Glycine max
  unsure (1)..(234): unsure at all n locations
caaaatatgacgaaattatcaacacatatgaaaacacattatcataatgacaaaaatagtgagccgtgaagactaaataggaaaagaaaagaatggacaaagaattacttgatgatgagcaaagagagtgaagtgcaatgaggagggaaaatggaagggcatgaangtgaggttgcangaaggtgatgagaancacgatgtatagaagagaggagattatgttacgtaaaatga

SEQ ID NO: 243158 - DNA, 290 bp, Glycine max
  unsure (1)..(290): unsure at all n locations
gagcatgaaantgaagaaggaaaggggagagaagntgaactcttgagtgtgtctcacaagactctcattaatcaaaattacaacaagtgttacacatgcttctatttatagactatgtagcttctctgagaagctttctcgagaaaacttacttgagaaacctctttgagaaaactttcttgagaagctagagcttatctacacacacccctcgtatagctaagctcacctccctgagaagcctccctgagaagattcctaaaaaagctagagcttagctacacacaccc

SEQ ID NO: 243159 - DNA, 309 bp, Glycine max
ctctttgcttttatcgggtaacatggaccgttcataagcataaaatcaacccataaatttaccgcttttgcaagaactacgtaggtctgatttcctcatcgcaattgaggatacgtatgagcaaaatccccgcttttgacgaccaccccatgagatcgttaatggtccaacgccttaacgtttctctgctttcaaaaaccaagagatcgttaatggtccaacaccttaacatttctctcctttcaaaatcaaaagatcgtttaatggtccaacgccttatatgaccttttgttcggttaaaatatatct

SEQ ID NO: 243160 - DNA, 378 bp, Glycine max
tataaccatgcttaggaccatgttcaattatttgtttttaagtgaacgggttatgatcccaacatggttggctcgtggtgcctacacatgaaactaagaatgagtgtgaagttcacgcttccccctttctgttttgttttgtagaggaaaacgcaaggatgagcaaacatgataacaaatggtatgcaatcttgcagatcaaatagtttgttgaacgcatatgcatgatgatgccatgactcatgcaatatgtgaggctggaatatgataacgaacaaatgcaggatatgtccattatgaatgtatgaagagatgcttatgcgatgcatgatatgaatgcatttgtcggacacgagaacccggaaaattatctcttct

SEQ ID NO: 243161 - DNA, 309 bp, Glycine max
ggagcatactctcacctcacacaagtctataacatcaatctaaacttgctcaaactggatttacacctaaatttccaccgaatcaaaatttgactcctcaacacccaattttgccctacaaatggctcttggttcactctggtcatttgtttttctctctaactcaacctaacctttctcacatgtcctaaatgacatttcaagctattattaactcactttaacctccatttaccacagaattgagacttagccttccaactctcaaagtctcactctgttgtcactcataacatcacattctcactt

SEQ ID NO: 243162 - DNA, 379 bp, Glycine max
tcttgctcactgactaaatctcaatcatcttatagacatatatgaaatctaagcaagcacttagtcttttctatcaaagtgtttgaaaaacacataagatagagatttatactacttcatctcacctgactacgtccagttcttggctaaccaccaagttctactaacttcatcaagttataagcattagtcatggccacttctatctctacaactcataccctacaccaagcttgacacaatcaatattctttgtcttatcaagccactgttgaattttaaacaaataaaaagaatttgtggttgtttgctcactgactaaatcttaattgtattacagaccaatatgaaatctaagcaagcacttagtctttctatc

SEQ ID NO: 243163 - DNA, 276 bp, Glycine max
ttctcacctctctgagaagattcctagagaagtgagagcccagctacaaacacccctctaatagctaagctcaactccttgagatgagaagctagagcttatctacacacacccctattatagctaagctcaccccccatggcaaaatacatgaaaatacaaaatagtccctacaacaaagactactcaaaatgccctgaaatacaatgcttaaaccctatactactagagtggccaaaatacatggcccattagaaggaaaaacctattctaata

SEQ ID NO: 243164 - DNA, 361 bp, Glycine max
  unsure (1)..(361): unsure at all n locations
tatagaanacaatagcaataatagagaaatcaagtgaagtattccaatcatgaggagagagagagggagaaacagaaagagagaggcgggaaatggaaagcgtagaactctgagagatttggagagtgaacgtgtgtgcgtgtgtgtgcgcttcttacaaaggacacaacatgaagatgatgtagtgttattaaagtggcttcttccccatgtctcctctttcatcctacacaaacacgctcacatggttaattgtttttcccctcacagtgctgtgtgcctgtcactcttcctttctgctcatccaaagttgttttgttctacacctcttgggttatgacacataacctacaagtacaca

SEQ ID NO: 243165 - DNA, 212 bp, Glycine max
caactacgcgggatgtctcggacacctctatgacttcacaatcactcataaactcatctcaagctctcaatacggctatctctcccaactctggtctctgcagatcttcacacaacatattctctcaaactctcgggaacttggacctttctctctcttaaactctccaattatgcacaagctttaagaaaatgcccaactctccttataaa

SEQ ID NO: 243166 - DNA, 397 bp, Glycine max
tttccctggtttgaagctcactacaagccttaagtgaaaaaccaagatattaccatatccttaaggaattttggagcgcttggaattgtttgggaataaaagaggagggtctatggttcattggacaaatcgtttcgcggccttgctatatgatgttctttgtgccatacttgatgtacattgtataatgagtaataggtggacatgctgaatgaaatgttgtgtctatatgctaaggagtcaataaaataaaaacattcgaataagagataaaatcgattagttgatgaatagatctaatggacaagaagacgaactgttggtcaccgtcatgtgaatttatactaacgcctttatttctttttatttctataggcctattccctttgtcactttc

SEQ ID NO: 243167 - DNA, 315 bp, Glycine max
  unsure (1)..(315): unsure at all n locations
atcgtccctacttctcacacgtccgatcttaatatggacagggcgagattagtttacggactggtgatgaagatggacatggatgtgggctccatcatttctggacagatatcacagatggtccagtccaactcctctcggcttggctgttatacaagtggcctcatatatcttaagaagggggggggctgaattaagatatcacaaactttttcctaattaaaaattctattgtgattttaacccaacacccaagattcctttanaatgaattctaaaaattatcaaatatacttctgattgaaccatatcact

SEQ ID NO: 243168 - DNA, 332 bp, Glycine max
tcttccttcccgcgatgcttcttttcatgtccgcctgagtgggcttatagcctataccatacttcccacgatttccttgggtatttatcaggctagttatgccgccgttgtctttgcctaaacccatcccgggttcataattgttccccaacataactcgggccatcattactgctgcatcggacagacaaggttgcccagagagggagtacacggaggaaatgctgaccacctcaaaagactggaaagcggtttctaacgattcttctgcggcttccacataaggcatataggatgggcagcttaccaagatgtcttcctcgcctgacacg

SEQ ID NO: 243169 - DNA, 347 bp, Glycine max
acaaatcacacataaatccaccatccccagttgcccaccttcaactgagctcacgtactcccacgtagctcttatcctcgttcctctcaacaccgggtccccatcaatccctccaagcttgcacaacatccaagcaattccacatccaaacatgatgaactatcaaaaaccaagaaaacagggcagatgcataaaactctccccaaaacacaaaccaataccacagctttccttactcatataccccagtaacattcttttcgttccaattcgttcaccgttggatccactcgaataatttactggatgtccctagtacataagtctacatgttaaccgctgggatc

SEQ ID NO: 243170 - DNA, 358 bp, Glycine max
ctacaatttgtgccagcatttcttctcttcccgttggcctatatatacacccgatcagagcttatccaaatgcttgcgcatggctttaggtttatggctgtttgggatagtagccaattgttatttgtcggctccaatatatatcgtaagatatgcaactgtgtgtttaacataattgtaaagctattttcttcccttccttttttgtgggtaggccatttaatttgaggcaattggaggattgtgctcctcaagttgctccattcttgttatctgatttccattgagatgaagtgattcatcaatggaagtgtgaagtagaactcattcatattcgttaatattgtgaaaagcatac

SEQ ID NO: 243171 - DNA, 324 bp, Glycine max
acccgagtagtcgaagagaagttcaagtccatagccatcaaagcttgaaaagagtatgatgaactaagggacgtcaatatggccaccgctgaagccttggaacgagaaaccaagatagcccgaaaggaagaacacgggcaagcaaagtttcgatgggctttatagggcagcaatagtaagctcaagctccgaagatgtgaaaggaatcatcacgggtcaaaggcatgatcttgaaggacgagctaaaggcttaccttaagtcgaaaagaaatttgtcccaacagttaagcgatactgtaaggaatatgtgggccgtcatcgatg

SEQ ID NO: 243172 - DNA, 349 bp, Glycine max
aggacagtgtacagctgaaaggatctgaaattactggtgaacctaaggatctcttaaacttggtgacattgtgttggcacttttcatagaagccctttcccttgttgttagaagatactggctacacggaagaaaacgttctccttcgagaagcaaaagcaggagtaagtcttgtttaaatttcaggaaaagttgataataattcaatatctgtactgtgttgactaagtcatttatagttattaacatacattcctttcaaggagggatggaaggctgaaagcaacagatgatgcgtgtttatgctgataaaatatgggatcaacaattgataatagaatgtttctct

SEQ ID NO: 243173 - DNA, 252 bp, Glycine max
tggggcaaatgaagagggtgagaaagagggagaaacccatgctgtgactgccattcctatacggctaagtttcccaccaaacccaacaatgtcattactcagtcaataacaaacctcctccttacccaccacccagttatccacaaaggtcatgcctaaatcaaccacaaatccttgtctaccacactttcaatgacgaagaccacctttagcacaaaccaaataaacaccaacaaaaaggaattttgcagc

SEQ ID NO: 243174 - DNA, 311 bp, Glycine max
tacctatatttaacataaaatacttattacactacaaaataaccataaattggaagagtttgatacaatttaacacaagttgtatacacaaaagttagtcgtattcactgactaaacactccaccaaatttacaattttgtttgtcctcaagcataaagagaacaactcacttgtcctcaagtgaaaatatacatgcagtgaactatgtacaaaaggtgtatgcaacaaatagtactgattgcatgataagagaaatgaagaaaatgccctcatcacttatctttcacaagatatgcagttatccaaagag

SEQ ID NO: 243175 - DNA, 332 bp, Glycine max
tctactaaatgatttcatgcaaaggttactcatgtcagctattggaccatataactagtgaccataacaacaggaatttgacattcaaaattgtgacaattataggacaatgtcctttacttcaaactctatgatactagtgaaaatatcttgaatgccttaacgtttcagatatattagcaggacgttgtctatacagactcttttaaacgtacaatctatcattgactaaatctttattaaaatcacacactgtcatagatcgctatattattactagaatgctacaatccttaagtaacaataaagaatgtggtaaaagatcgctggta

SEQ ID NO: 243176 - DNA, 338 bp, Glycine max
  unsure (1)..(338): unsure at all n locations
tttcacagagcttccattttcaatttcgagtgtctcgatatattacgggacacaatcgaacatccgagtaaaaggttattgtcatttgaattttctacgagcatctattttcaatttcgagcgtctcgatatattacgggactcaatcagacatcttagtaacaagttattatcgttagaattgtctcagagcttccattttcaattgcgagtgtcttgatatatgtcgggattccttcgtacatccaagtaaaaagtaattgttgtttgattntgctcatagcttctgttctgaatttcaagcgacttgatatactacaggagacaatcggacatac

SEQ ID NO: 243177 - DNA, 257 bp, Glycine max
  unsure (1)..(257): unsure at all n locations
gaaaaaaaaaaagaggggtgtcgtgctgcaacnnaagaaaaagccagagacagcagggggcgagtgtatgtcgcccgccaaaggacccggaaggggaccaagaccgcccaaccacccgattgaaaaagcactgcaacgccgacaacggcgaaaaaagcgagaccaagggggcacaacaggaaagagaacaggacagggaaagaaactcgaacccccccaaagagccccggaccgcccggcagggagcagacaagagg

SEQ ID NO: 243178 - DNA, 346 bp, Glycine max
gagggagagaagtggaactttgaagtatgtctcacaagactctcattcatcaaagttacaacaagtgttacacatgtttctatttatagactatgtagctttcttgagaagctttcttgagaaaacttccttgagaaacttctttgagaaaacttccttgagaagttagagcttagttacacatacccctctcataactaagctcacctccttgagaagcttccttaagaagattcctaaagaagctagagcttatctacacatacctctctaatatctaagctcacctccttgagatgagaagctatatactatgctcacaccccctataatagctatgctcacc

SEQ ID NO: 243179 - DNA, 274 bp, Glycine max
cggaaaacactctatatcttatgataaaacaactaagagatcagctacaattaatcggcaactcatgatcttctttttgtttgtggattgcaaaagatacaagttcaagactatttgctgctttgcttctgttggtgctaatgagggtgagggattatatcacggaaatcatagcaacatactgagaaataaaaaaaaagccgcacgggaaataatgaagattacgatggaaaagccctttattttatccatgcattatgttaacccttacatt

SEQ ID NO: 243180 - DNA, 279 bp, Glycine max
aagtgggcctggttgctatttgcaccccctgtttactaaatacacccctgctgtttttgctgattctttttccgtaacgttacggaactttacgaattctataacaatactctgtttcctttcataatgttacggaaccttacagattacgtaatcatcccttttttggctttcggaatgttacagaacctcacggattgtgtaacaatgcttcctcttgatttccggcatgttacggaacatctcggatcgtgcaacaatgcttttttttgacttttg

SEQ ID NO: 243181 - DNA, 343 bp, Glycine max
ttgtggtttgagctcctctgctgaccaccatacagacctttgcccttacatgcatcatcctggatcaattgagcagcctgaagcttatgctgcatatatttacaataaatcctctcatcctcagcacgctaatcaaccacagaagaacatatatgacctctccagcaacagatacaaccctggatggaggaatcaccctaacctcagatggtccagccctcaacaacaacaacagcagcctgctccttgttacaaatgctgctggccaacagacatatttcctcaccaatccatcacagaacaacccaaaacagcacagttgagccctcacaccttcctcaaa

SEQ ID NO: 243182 - DNA, 242 bp, Glycine max
aaaaaaaaagggggtagagaagaccccaccccaagaaagaaaagcgaaaaatagagaaaaggaagaagaaggagagagcaaaaaaagcgaaggcgaaaaggagagggaaagacaaagaagaggaagagggaaaagggaaaagagagaaggaagaggaagaaaaaagaagaaagaaggcgcaaaaaaagaaggaggggaaggagggggaacaaaggagaagaggagagaacaaaaggagaaag

SEQ ID NO: 243183 - DNA, 396 bp, Glycine max
  unsure (1)..(396): unsure at all n locations
acatcgacttaagccattcctcacgatttttttttttttgtacgtaanggtggaagagacttccctactccaccctactcttcctccaccatgacttagggagtttttcttttcctatctccttctttgcttatattacacttgtccgattctctttgatgatttaattggttttaatcttttaattgcgctacattgaggacaatgtgttgcttaagtatgggggggagtgttctttggttttgctagttttgctggtttcgtcaatttgttagttgcgataatttgttaatgttgttagtttcgcccgatttctcagttaatattttgggccaatttcgtgtgcacgtacaacttctcctgtttctcttgtattatatgatatgtcaagaaatg

SEQ ID NO: 243184 - DNA, 159 bp, Glycine max
aagagccacgaaacacaaccaaaaacaaggaagacgagagggcaagggggcaaaacacggcacacagaacaaaaaaggaacaggggcgaaaggaaacgcccgaccaaaacggagagcccacgagcaagcggacagagaagaggcggccgccgacaaaaa

SEQ ID NO: 243185 - DNA, 335 bp, Glycine max
gcccaaaagaacgatctcaagaatgagtcaacaagttcaagaccaagattaaagaaaagacatcaagaagaatcaagattcaagagaagatgaattcgagattcaagagaagaaaccaaaaagcaactagttgagacttcacaagggaaggatggaaaaagatatttcataaaccaaacatagcacaattttattgtacaagaaaagttgttccaaatttttctaagttaccaaagtatgtactctctaagaatcaattatcaattacctggaatcgataatcgatacaatatatgggtaatcgattaccagtgatctgaacgttgaaattcaaa

SEQ ID NO: 243186 - DNA, 382 bp, Glycine max
  unsure (1)..(382): unsure at all n locations
tctaagagaatttgctgtgtgaagatctgcagagacaagagctcgaagcggaagctggtctgagagcttgagatgagtgtgtgagtgattgtgagatcctagaggtgaaagagacatccttaccacttgtatttttgcaatgtgtcatcttgatcgtctctgtggtgaaaggagggtttcggactatggaaagctaaatactctgttggatcttccctgtaggtacctaatgtaaatatatttctatctatgtaaagatgtgtttgtgtgttctctgtgctatctacttttcattccagtatgcctttaccttgatcacgtagatgcatgctttggatgggcantcaacaatggaaaatgggtgattctaaagccttgaagt

SEQ ID NO: 243187 - DNA, 335 bp, Glycine max
attgtcgtttgtattggctcggagcttcaacattcaatatcgagggtctcgatggtctccacatattaccggactcaatccgacatccgatataaaaattattgtcgcttgaattggctcagatgttcaacattcaatgtagagcgactcgatatagtacgggactcaatcagacatccgatttaatagctattgtcatttgaatttgctcagagactcaacattcattttcgacgttctcgatatattactggactctatcagacatccgagtaaaagttattgtcgcttgaattggctaaacagtcaacatccaatttcgagcgtctcgtata

SEQ ID NO: 243188 - DNA, 184 bp, Glycine max
aattctctgttcgatcataagattacaaaatggactgatccctgctagcaaagccttttacatacatatgaataaacctttcagcatattaaacaatgcaatataccaaactctgttgtgggataccaaaagcctaaaaatgataatttcaacgttacctacatacattttgtttcacttcacc

SEQ ID NO: 243189 - DNA, 324 bp, Glycine max
aaagagcatcgcatgtgtaagtgtgcactattttcccttattaattattaataataaatataatgtattttattaatttcgcgcaggagatttttcttcattgtctaattatacctacattgaggtactgtgaatacacaatattcatgttccatcatcaaccttactttatctaaatgttcaaatcaatcatagtagataaacattaacatgactggttctacctccatgcaaacactataatagtattgctcttgtgcgtttgcatgaacacactccacttgaatctattgaaacatttcattggatgattatattctccta

SEQ ID NO: 243190 - DNA, 309 bp, Glycine max
aaggaataaaaaagggaaagaagtggaactctgaagtgtatctcataaaactttcattcatcaaagttacaacatgtgttacacatgcttctatttatagactaagtagcttccttgagaagctttcttgagaaaacttccttgagaagcttctttgagaatacttccttgagaagctagagcttagctacacacacccctctcataactaagctcacctccttgagaagcttccttaagaagattcctaaagaagctagagcttatctacacatacctctctaatagctaatctcacctccttgagat

SEQ ID NO: 243191 - DNA, 263 bp, Glycine max
  unsure (1)..(263): unsure at all n locations
caatctcgagcttctcgatatgtgattngcctgaatcggacatccgtgtgaaaagttataccagttgaatttctcaagagcttccgttgttcaagtttgagcgtctcgatatgtgatttgcctgaatcggacattcgtgtgaaaagttatgaccatttgaatttctcaagacctttcgttgttcaatttcgagcctctcgacatattatgcgaccgaatcggaatccgtgtgataagtatggccatttgaatgtctcgagagt

SEQ ID NO: 243192 - DNA, 293 bp, Glycine max
  unsure (1)..(293): unsure at all n locations
tcaccctgattcagtgaagttagttaacgcatgcaatttagtgttnttgatagacagcacctacaaaacaaaccggtatagactcccattgctcgtatttggtgggatgacactgactgggatgacattctctgccggttttgcatatgtggaggatgaacgcgttaataatttggtatggactttacaacgctntcgaggcctttttttaaagcgtgatgccctccctggagttattgtcactgacagagaccaaacattgatgaatgcagtgaaagatgtattcactgaat

SEQ ID NO: 243193 - DNA, 360 bp, Glycine max
  unsure (1)..(360): unsure at all n locations
cagggagcttctcaaagaagcctctctgtgtatcttcctaaacctatntcagtaaaatcgctctactgattcgctaaccgttggatcatccttataatgtttctggaggttcgtatgacaactatccacattttgaccattgcgatttgcaatataacatatggagtgtgagataatatgtttttaccgaagcagataatttgagtgttgtatgctttaaattacgtgcagcagcggaaaatagccatttcttcctccttctcttcccctaaaccctccccaacgcccgcatacttcttctctaccacccatgaccaccggtggtcgctgctaaccgctgttgtttgccttgatccccca

SEQ ID NO: 243194 - DNA, 384 bp, Glycine max
aaacttgaggaatatcatgaaatcgctagagatgtcgttattgttgtcatagtacacatgtgagcccgcttataggtaatggatgagtttatcgcaattggggttagaataaacatgtgtaggggttcttaaaggatcaaattgaggtttattttgggatgtttatcgtattgaaattatttttgtatgattatgtgaaattggttgaggggttgtactccccgtggattgagaaatatttttggataacttgtttgtgtcttgaataagatcatccgaataaatagttatattgagatcatgaatttgtcgatgaaatcgtttataattattaattgatattgatgaactgtagaaatatatttcctttaattatatattggt

SEQ ID NO: 243195 - DNA, 298 bp, Glycine max
  unsure (1)..(298): unsure at all n locations
ccttctggaggaatcttctggagggcccaagtgggcctggttgctatttgcacccccattnttactaagtacaccccctgccttcttttggtgattcttttttcgtaaagttacggaaacttacgtgatttgtaaagatacttgttttccttccgtaatgttacggaaccttgtggattacataatcatccactttttgacttacggaatgttacggaacctcactaattgtgcaacgatgcttccatttgatttgcagtgtgtcacggaaccttacagattgtgcatcaatattttc

SEQ ID NO: 243196 - DNA, 223 bp, Glycine max
ctcttatactctcaatcatgtactgctgactaatgattttttgtctgcaccctgcagatctctgctgacctcactgtctaatgtggacgaacctgtcttatgctctcctgcgctatttcaaaaaactgcgttgacttctcgtgacatatgcacttggcataattatctttccatttaacttccatgttctttgactctgtcattcgtcacattaagttgatca

SEQ ID NO: 243197 - DNA, 251 bp, Glycine max
  unsure (1)..(251): unsure at all n locations
agctnnataaattaaatagatcacgcctagttttattacaaagcccnacaagcccgagaggccggcctatatatatatatatatatatatatatatngcgacctaaaaaataatatatatatatatatatatacatatatatatatatatatatatatatatatatgggaataggttaggtcggcccacaagagtctatgacccgacctatataaagcctcggctgaactgacctatttaattaaaatggt

SEQ ID NO: 243198 - DNA, 180 bp, Glycine max
gatatacacaggcacaatgcgcgcataagcccaccatcccctgttgcccacctacaactgagctcacgtactcccacgtagcccatatcctcgttgctctcaacaccgggtgcccatcaatcctcccaagcttccacaacatccaagcaaaacaacattcacacagcacaagctatcaca

SEQ ID NO: 243199 - DNA, 191 bp, Glycine max
atgtaagccaagtcataggaccctgtatgccggcctatcctattcccacccttagccgacggattcgatgaggaagccatcgcccaattgttgtgcacaccggggcaggatttctcccggaccgctacatggaggcgggtgcggatcatgcacactatcatgaccaccttgacctagacatggatgacatt

SEQ ID NO: 243200 - DNA, 315 bp, Glycine max
  unsure (1)..(315): unsure at all n locations
gcccccccccccccccccccaggcctatatgcagacccccccnncnnggcngnacccccncaaaaagagagaaatttagcgcacacnccacacaacgcgaagcaaccccgcacacacaaaggcaacaaaagggccacccgggaaacaacaaaagggacaagacacacacgaagaacccagaagaagcaagcccacgaagagggaggaaaaccccaccacacggaaaaccgaggaaaccccgacaacggaccaacgaaaaggacaaccaaaaaaaacaggacaaacaacaggcagaaacccaaaaccacaacgaaa

SEQ ID NO: 243201 - DNA, 229 bp, Glycine max
  unsure (1)..(229): unsure at all n locations
agaaccacntccgctcctgagtatgacagtcacccgctttaggagcgctgtacaccancagcgcttcgaggccatcaagggatggtcggttctccgggagcgacgcgtccagctcagggacgacgagtatactgatttccaggagaaaatagggcgccgcgcggggacatcactggttactcccatggccaagttcgatccaaaaataatccttgagttttatggcaat

SEQ ID NO: 243202 - DNA, 223 bp, Glycine max
agcctgtgagtgattgtgagttctaaagtgaggagacatcccccacttgtatttttcaatccttcatttttctcttctctttgttctaaggaagcttccgagatatggagaactaaaacctctattggttctcccttgtaggcacttgatgtaatacatgtatatctatttaatgatgtttatgggttctctgtgctatcacgacgtcattttagtgtgcttt

SEQ ID NO: 243203 - DNA, 384 bp, Glycine max
  unsure (1)..(384): unsure at all n locations
gacactcatgttatagctaggcaaggtttgggagggcagattgcaataccaaggtgcatccccaaacaggtcatagcctttctagttaggctctcaaattggcaccctagaattgtcttcttattagaggtgttcatgttaaacatatttacctacagttgaagatgataggtacatgttaaaattttttgcctacaattaggagatgtaagtaaaagctaatgacttttacctacacacaatacatagtaggtaaaacctatagtgacagacaattagccgtcattatacgccccctcaaagttgatggaagaaacgtctgtaagacaaagtctatcatacatttacctacaaattntttatttacaagtgacaattttgtct

SEQ ID NO: 243204 - DNA, 333 bp, Glycine max
  unsure (1)..(333): unsure at all n locations
gcganggcccatcctcttcggaggcattcacgctagcccttccatgactagctagcggagtagttttaacatttgggccttcctcttgaaacgatagccagccggcactgattaagaggtgtaccttatactcgaacgggcagcaggagccaatggtgtgtccggcaactccactatggtacgcacactcggcactcgggtcataccacttggggtaggagggctggaggaccctcccgggtatggctaccaccaaatgattctccaataatgaaggccataattcggagcatgccatgggaataggagagaagttatctttcgggagtgggc

SEQ ID NO: 243205 - DNA, 374 bp, Glycine max
  unsure (1)..(374): unsure at all n locations
aacgagggcgaagcttaaggagaacccaatctcctatctggtagttcacttcacgacgtttcccatcagcttggcttttcatagcagcttgttccttagaagcttatttcgaatagcttggaaagtgttatccctatcagtcaacatctcttcaacggcctcaatgttcgaagaccctgtaatatattcaggaaagttaaagggtcttccgccaaaggtgacaccatacggattggctccagttcccgcattccatgaagtattatgggaccattcgacccacggtaggagctttctccccatgcttggccgacgatagatgaatgctcccanatattgtcaattatgcattcaaacctctgctgtcattaatt

SEQ ID NO: 243206 - DNA, 288 bp, Glycine max
ttttttttaaccgaccatacgaaagacttgcacacgggcaacattaccgacacagagagcttgtgtgcctctccctcacgggaatctctttccgcaacgcgaataattgtggtagtatatgaaaacgatgccttcaaaccctccctgagatatcattgctacatgggcatcgtaacgaccttatcaacagacacgatgaggctggagctatgagtagttaagcaagagaccttgctgagtttattcatagtccatacttaactccttgtggagaggcgagattcatgg

SEQ ID NO: 243207 - DNA, 340 bp, Glycine max
caattaatttacatattccttgtttattgttcccatagcatcttccaaggaaaaaaaaattactataaattatgccatagctttttgtcaattttcatgcctcaatttaaacatgttttaacgaagaggttcatcccttcccaaatagtcatatttgtcttcaggcttaccaatacctagtgctggttaagacaaatctattttcaattcatcactaagctataaataatattcttttgcagctattgtttctgtatattatccattaagggcgtccctctgtctttcctttctcttattaaaagtgacatctactggtatatcataatccttacaatta

SEQ ID NO: 243208 - DNA, 154 bp, Glycine max
gagataggaaaacctgctggtgccatctgccgcaagttccccacccaatatttactagcatacaactttcttacccccccattatcacagtatcctaattaccaagctgttaccaccttcatgcacacactttccaaccaaaccacagaggatt

SEQ ID NO: 243209 - DNA, 285 bp, Glycine max
gaaacggcaacatccttcaacatcctatattcatttccttataagtcatataataataactctttcctcttgcaactgggtctatacgacacacgaaagcttggcgaaatttatataaaagcatcatgcattagattatactgtttctatattatgtaatttgccgtttactatatctaacttcaataaaaagaagattcaaaatctggtgaaaggcctgatgttgtggaagtttggaagaccagacacatgagatctaattgaatgtagcacattccacaagga

SEQ ID NO: 243210 - DNA, 382 bp, Glycine max
  unsure (1)..(382): unsure at all n locations
aagttggaaccaagggccttgaagtgtatcctcataggctatccacaaggagtaaagggatacaagctatgatatttggaacctggacacgggaagtgcatcatcagcatagatgtagtgtttaatgaactataaatggcaattttaattatgccattcaagtctgctagaagttagagttcataagttcaagtgaagtctgaagagataactactcagactcatgaggaatcagtagtgataagatngcaagttgttcttgcgcctggacaataaaatgaagaagcaacttatgaatattgtttggctagagacaggaaaaggaggacantccaaacccctgaaagatatggcatgcagaatctgattctatgcttaatag

SEQ ID NO: 243211 - DNA, 460 bp, Glycine max
  unsure (1)..(460): unsure at all n locations
ctctgcattaattataactgaactctttattatgatacaannactttttcttctgaattatattaatttgatattggttcttaattctaagctcattctcattttttttacataaaccatatctatattttgtctcttgttcgactcacataaaattattataaatgatacatctctttatttaatgttaaattttttaattaacgtaaattaatggtacattagttgatttacacgattcggttattcattttcatttgatctaacaagtcaaattgacgttgcttcctttaattagattaatatccttccggtgattntggagcctccattgaattgaatgttcttccacgactacttagataccaagacgactcatatttgtgcactttattttgatcactttatttctttggcatacataaattgtgtaacttgtaaactccggttgcgatttctg

SEQ ID NO: 243212 - DNA, 297 bp, Glycine max
ctttttccctgccattaccatgctgggacccgtcatatttgctcgtgtgaagctttccttagaatggctagatccacaggtggtctgggcctatactgcatataagtagggaagtccgcttcccttatgtctgttgtaaggaacactgatacaacatgaaccaggttgcattgaacaaaatgtgacctatctgcatcctgctagccatgtagcgttatatacgaaatccacattgtttttatgcctaaagttatcatctgatgagcttacaccaacccaaaatcttttctggcttgg

SEQ ID NO: 243213 - DNA, 303 bp, Glycine max
  unsure (1)..(303): unsure at all n locations
cacacacagaaaacagccccaccatcccaagtttgcaaaancatatccatatatcatcggggcacttcactgagcacttggggggcgcaccgctaaacataaattgcaagagaatgggagcaatgtggcatgccccaaggcttcaaaatacaaccttggcctaaggcctttccattcaaatcctcaattcaagaaaacaagcaccaaagcaaaccaaaactgccttacaaatataagcatggtctcacaattcgaggcaccaaaagaagaagaaagcacatcaaaggaaagcaaaaacatcaa

SEQ ID NO: 243214 - DNA, 358 bp, Glycine max
  unsure (1)..(358): unsure at all n locations
atatgagaaggaacactctcactacagatgagaatctgcctcctatttcagtaaagttcttattcaactgattttggaatcagaaatgtgtgctacaaaacaaattatgtacatatgattctaataacttgggatatatcttatctcctatgttattgcctccctattccataaacacgatctatgacatgccttgaaagagagaggtntagattttctctttctccctctctttctgtctctctcttcctgttctctcgcgtgtgctgggtgtgaatagacgggaagacaatggtaagaggganaaagttttttctgagagaagcgatctaagaaagtgaggaagttgaaaatcctc

SEQ ID NO: 243215 - DNA, 383 bp, Glycine max
  unsure (1)..(383): unsure at all n locations
cttcaacccttctggttaacctttcttgttctgctagatctttatgcctctcagcatcaacagtttgataagtggtgggttaagtagaattttgagcccgaaggatccttagttaattcaggttagtgacagttgaattatatcgttgctaatgcatgccatgattaaagaatacatcactagtagacaaccccgttaggatatgggacatggttatctcttttctctatgaaacgatatggtagaaatgtgtgatatacatgatgggagtatgaagatgatgagctttcaaaacatcgacactntaacttgaattgtgctaataagctcttctcttacattacatgacttgctaccacttatgtctntatatagggtacata

SEQ ID NO: 243216 - DNA, 229 bp, Glycine max
  unsure (1)..(229): unsure at all n locations
ggcccgcccacgaaagcaaaagagaaacgaaccaagagccaaagccaaccacgcagcccgccagaacgccaagagacaccgagacagaccacgcaacagaccaaagggggccaacccaaaacagccaaaccccncaacgagaaggaagagaaaccagaaaaaccacggccaaacagcggaagcacaacaaaagaaacaaccccagaacaggcgcgcacgcaaaaagggc

SEQ ID NO: 243217 - DNA, 184 bp, Glycine max
cttttaaactaccaccccagaagaaagcagacaaccccaccccaaaagcgaccacccagacaaaacagaaacaaaaaagcccacacaaacaccaaagcccgaaacaggaaaacccaactacaaaggcaaaacagccaacaagaaaaaccatcaaatacaaaaaacggccactagccagccaaac

SEQ ID NO: 243218 - DNA, 190 bp, Glycine max
acgagacctcggggacgtcaggtgcggtgctattgcccaaaaccaagcttgaccaatcccgacccaacccgggcatagtcgggcagagagaacctgcgatgtacctaaacaggcgagctgcgggcggtcaacagataaaacgaacacacaccacacagcaaggaggctcgtgcgggctggccaactgaga

SEQ ID NO: 243219 - DNA, 444 bp, Glycine max
  unsure (1)..(444): unsure at all n locations
attatcaagaatcaagccaacgctattgtgcaagcaatcaatggggcacaacataccaaatgattataatgatggatggctcaaattctcacaaaggtaaaatcatcactttcaaattgagctgtcanaactatcatgacatgtagagaagaatcaaggatttcaagtcacaaaatgtcaagaacttttattttcaaaacaattacccattttttgaacatatcctataattcaaaagaaaacatgcaaagtcgtacgtgcacacgaaattgacccaaaatattacactgaatatccgacgaaactaacaacattaacaaattaacacaactaacaaattaaccaaacccacacaactagcaaaaccaaagaacacgtgccccccatacttatacaacacattgtcctccatgagcacaattaaagaataaaaccattaatcat

SEQ ID NO: 243220 - DNA, 359 bp, Glycine max
  unsure (1)..(359): unsure at all n locations
ttttattctcgttttgtctactattcataccccctgttgacgtgcttaagccattttacttaagtcatttctcgcttaacttaaaaataaaatcaatttccaccgaacgtttgaatcgtattatccgttaacttcgattaaaatgaattccgaccgttcggtcgtgccgtaaccacgttggaaatcaaaaagaggtaaaaaataatataataataaaaaaaaacatcttttagtaaaataaagcggaaaattaatcggacgttctctctntgggatgtctcattcttaatcgaattgattaataactaaagtgaaactaanggctaaatcaactcgcctagtcaagctcgtccacaaaa

SEQ ID NO: 243221 - DNA, 340 bp, Glycine max
atgttcttttggatatcaccatacagatctctgtgcttctttgcagcaatccggagtcaatgagccacctgaagcttatgctgccaacatttataatagaccccctcagcagcaaaaccaacaatagtagaataattatgacctttcaagcaacagatacaatccaggttggaggaatcatccaaatctgagatggagcaagtcttcacaacaacaacagcatgttcctcctttctacaatgttgatggtccaaagaagccatatgttcctcctccaatgcaacagcagcagcagccatcaaaacaaagacaaccaagcactgatggctcctcctcaacc

SEQ ID NO: 243222 - DNA, 359 bp, Glycine max
  unsure (1)..(359): unsure at all n locations
actggaatgtggctactatcatggttatcatctccctttccatcattgggggtgccacttgggctgccagatccctccacctttgggtgtattctttgaaggattcatgctcctttttgcacatgttctatagttgcatcctatacagatactgcctaacgaaggcaaccattaggtccttccaagaatgggctcaggaaggttccaagttagtataccaggtggcagctgccccagtaagacttccttggaagaaatatattagcagtttctcatcttttgcgtatgcccncgtcttccgacaatatatcttttagatggttcttggggcaagtagtccccttgtacttgcaaagtct

SEQ ID NO: 243223 - DNA, 216 bp, Glycine max
cacacctcacgtttggtttcttatggaaaaacaccataactaaacgcgccacaaggcatccctatcgcaccagatccaaatctataacgatgggtgatcaagaggagacacaggaacagatgaaagccgacatgtcggctctgaaagaacagatggcttccatgatggaggccatgttacgaatgaggcagctcatggagaaaaacgtggccaccg

SEQ ID NO: 243224 - DNA, 413 bp, Glycine max
  unsure (1)..(413): unsure at all n locations
aaaagcaaaancagaaggggaacacccccaagggggccaacggccacncncaaaagcaaaancannagaggaacacccncnngggnnccaanggccacncncaanancaaaancagaaagggaacanggcgnnnggnnccaaaagccaccctcaatagcaaaancagaatgggaacacccctnnggggtccaanaggcactcctataaataaaaaagtgagattttcatgcatggaattgcttaaatggatcgaagttggatgaatgaaagtcgcatgagcccaaaatatgaggatggcatcgaacagttcttggcaattgcttcanaaagaggtcgaccgaatgaagaaagaaaantatatcggccttgcatcaactggttgaatggaaacgacaactactggacgacatac

SEQ ID NO: 243225 - DNA, 339 bp, Glycine max
acagctgggtgaataatacaagaatgtttaatcatcctaattagaaatcgatctctcccagaatccatcacccaaattattttccttaatatagggttcaaaacattcttaaaacctcttcgacaagcaaaacaccggttagaaatcaagaacctagcttgatagaattcaaggtcagaaaagaaggctgggagaaaatggggattccctgaattctgaatccgattggtattggttttctctattagctagatctgaatatatcagcaaaaagagataagcagacaaatatgaagtaagaatccatgatgaaataatatatagtacgatcaagagtta

SEQ ID NO: 243226 - DNA, 206 bp, Glycine max
gcgcgaggaagactctagaagaagatgagttgcacagattcactaagcgcaccacttcatctcactaagcgcaccgcttcaattcatctgctaagcgagaaaggcgcgctaagccaaaaatcactaacatgcgctaagcggtccatacgtgcgctaagcacacgagcacgaacagggccacctatttaagcctgacataagatttt

SEQ ID NO: 243227 - DNA, 319 bp, Glycine max
  unsure (1)..(319): unsure at all n locations
acccaacaaagactnncgaccctactgacgnganncaccaagctgtatgggaagttgcacaatccttaaaacctatagaacattctagaggccgttgcaagggccatatagacgccttcctatcgaagccatcgccattttccttaagatgcgacaatccatgttgtatggctggactcagtcacgaaatcttctaaattttgaaaaaaaacgctcgcaggagtgaggctgcaaaaaatagcacgaaaacaatttaagataaatgaaagaaaagaaacgcaccatcagaatgaaatctacccaagtcttcaacattctt

SEQ ID NO: 243228 - DNA, 343 bp, Glycine max
gcagccacgctcaacaaagtactttcgacacctactgtacgttgatttcaccaatgctagtatgggaatgttgcgacaatcctttaaaaccttattgatacattctgagaggttcgttgtcatgtggccatattgacgtccttctctatcggaagccatcgtccatttttcctttgagatgcgatcaatccatgttgctatggctggactcaattcacgaaatttttctaaattttgataaaaaatgtgctctgcaggagtgtaggctgcctaaaaatagttatgaataacaatttttagtatacatgaaagtcaaataaacgtgaccatcacatatgaaatc

SEQ ID NO: 243229 - DNA, 350 bp, Glycine max
aactttttcagccaactaactaactatttctgttaaagctgtttatactgctaagagcccccctcaagctgggaatggatattcatcattcccagcttgttacaaaggggctgaaaggtggctggtggtaaagctttggtgaatatgtccgcgagttgcatggaagatgagaccggaaggagctttacgagacccgcaatgactttgtggcggataatatggcaatcgatctcgatatgcttagtgcgttcatggaaaacgggattcgttgctatctgaattgcagatcggttgtcacaatataaggtggctggctgaataaatgctacaccaatgtcttggagaatata

SEQ ID NO: 243230 - DNA, 390 bp, Glycine max
  unsure (1)..(390): unsure at all n locations
tagttagtgggaaaaacggctgacaagaagcttatatattgggaaacaaatgtgtngacaaacataaaaattgtaattatctcaccatagatattaatatctgatacttgacataattngaaggtgtactgtcactctaatgcagataaaattagtgggcttcctgaccaacccatacataagcatttggtagttatcaaaatatgtcacagtggatggcaagacacatgagtttcttttttacaatccttgtgagtcagaaacaaattcaacttcaaatcctctaatactgtggctcataggaggtctgcaatctttggatccaacagttcgaatctttttacgacttgggattaaatacgaatagccacaatagtattcacatcatgt

SEQ ID NO: 243231 - DNA, 81 bp, Glycine max
ccgacccaacagaaaacatccaccgacccaactcacctaacctctcgaaccacgaaaatacaaaacctgaacacccaagac

SEQ ID NO: 243232 - DNA, 293 bp, Glycine max
  unsure (1)..(293): unsure at all n locations
aacgacgaagaacgaaggaagaacggcgaagaacgggggaaacccccgcgacaacccncacggagaacgccacggaaacgnnncggaagcgccncggccnagaannncgncacggaaacaagngngccaagcaaagncgaaagagagagaagcgccaaaggggcggaaccctcnacntcgtcactccctcccctatttatagcaaaataggggaggtggntgccgcccanctcgcccaggcgagccagggtgcttcctccagaagcaacagcctcctggaggaatattctgga

SEQ ID NO: 243233 - DNA, 136 bp, Glycine max
  unsure (1)..(136): unsure at all n locations
ctctccgancccngncaccgccaacccttcaacctcctctagaggaatttctctttttcaaaactatcataatctgatgagatgaatttgtgatttggggttgcgattcgtggctccttacttgntttacgttatg

SEQ ID NO: 243234 - DNA, 252 bp, Glycine max
  unsure (1)..(252): unsure at all n locations
ggaccccccccccccccgctaaccagcccccnnnnncncgggnnnngaaaagggaaatataagggcaggccccccgaacgacacccccaaccagaggacaccaggaaggagacgacccagggacccggaagaccgagagagaangagaaaggccccccacanaagcgaagggcaacgaagagcgaggccggacaccacacgaaaaaagagaacggccgcacaaacacgcgaaaacgacggcaaagggcagcc

SEQ ID NO: 243235 - DNA, 289 bp, Glycine max
ccataacccagcaaagaaactaacccaccccgacagtgtaacctgcaacaacaccagaaattatcaggctgaaaataacgtatccgcaaaagaaactccggcacccaccaactacactttagcgtagccaacaccagatcctactacgaagagccaattccgcagcgcgagagacaacctaacactgagtataaaaaaaaacaaacattaatcaagatgaaagctaacagcacgtagaacttaacaaacaataggggcgtgaaccagaaactaccccgaaaagcaccgc

SEQ ID NO: 243236 - DNA, 413 bp, Glycine max
atgaagaagtcagcatgctcactggatgaagagaaaaaattcaagacatgatatgtaatcaacaaataaaggataagaagaatgttgcagacatgaacatctgcacaatgaacatgacatgaagaacaacattgtttcaacacttagaaaggattttcatcaacaagatgagttcattttgggcattgtatctcgagtttcaaaaatgcaattgatctattcttgatggctatggaaattttgcataaagagctttaaatttcatgaacaagttgtggtctaaatcaacttggatcatggtcaaaattgagcatgaagttgtagacgttgattcgctcggacaacttgatatgtgtgcagtaatttaaaggtttcttgagctatagatatgaacttaagaatatttagtgttg

SEQ ID NO: 243237 - DNA, 398 bp, Glycine max
cgaaacacatacaaactctatcttctaatcgatcactcacttaattccctccctatggtttttgagtgctacacttcaacttgaagttaaagctatttaattatatgagttcttgaatcagtcccaatttcttctccccctttggcatcaacaaaaagccaaagcgcgtatagagacattaaatcatacacaaactcataatcatccaagcattgtaatccatacaacaatgcaggaggacaataattcatacataaactaagcaaggaagaaaataaatcatccattaacctataaaaacgccagatattagatggtcttcaagataccaaatataacactattagaaagaaatactatagtgatcaataagcatagacatctaataaacaatcatt

SEQ ID NO: 243238 - DNA, 369 bp, Glycine max
atcaataacaatgcctataggttggacctcccaaaagagtatggagtcagcaccacttttaacatttctgatttaactccttttgtaggtggagctgatattgaggaggaggaactaacagatttgaggtcaaatcctcttcaaggggaaggggatgatgcaatcctccctaggaagggaccaatcactataaccatgagcaagaggctccaagaagattgggctagagctgctgaagaaggccctagggttctcatgaaccttagggtagatttctgagcccatgggccaaggttgggtccatttatctttgtacatattagactaggatgtcattatatttggtccttgtatttacggcttcatatt

SEQ ID NO: 243239 - DNA, 318 bp, Glycine max
  unsure (1)..(318): unsure at all n locations
caggagtcatgtcttcagggctccaccactggcagcatctatcatacttctcttcatattaaggtcatcccagctcgtgatggaccttggagcaaggtaacacagccagtcctttgccactccctctaatgaatgaggaaaagccttcagaaatatgtgatcctcttggacatctgggggtttcatggtggagtagacaatgtgaaattctttcaaatgtttgtgccgtcttcacctgcaggccatgaaactntgaagcaatgaacagccagtttaagacatatgcgcatcctatcaggtattgatcacaagcttcat

SEQ ID NO: 243240 - DNA, 318 bp, Glycine max
tccgacaagaggcaaacgcaatcagacgaaggagaaaactgcggcaacaaaagagggtgaggaagagggagaaacccacgctgtgaccgccagtcctatacggccaagcttcccaccaaacccaacaatgtcattactcagccaataacaaaccacctccttacccaccacccgaggatccacaaaggccatccctaaaacaaccacaaagccggcctaccgcacttccaacgacgaagaccacctttagcacaaaccaaaaaaaaaacacacaacaaaaaggaattttgcagcaaaaagccagtaggggccacccca

SEQ ID NO: 243241 - DNA, 342 bp, Glycine max
  unsure (1)..(342): unsure at all n locations
caaaaatgggatacaacctcctttaataaacacaaatattaatgtaaatttaaagtaaactcatgcacatactcccttacgagcattggactcgcacaagatattcttctaactaagaaaaaatgccccatgctccattaaagcgccttcgtcacctagattatatatatgtacttccaaggtgtanttgctacctacatcacatgcaatttctttggctaaataacatacatgcatactcaaagcatcttggctaccaanaattgcacacgtgcacattttggtatttctatacctatgcatatacaaactttgtgatgaaccttgctatctacacaatag

SEQ ID NO: 243242 - DNA, 377 bp, Glycine max
  unsure (1)..(377): unsure at all n locations
aagctttcagcttgtgcaactcagcccacaaaagggattctataatgaaaggaaaaaaaatcaccaactaaccaagaggtaaagaaatgattggtcaatcctaaatgcacaccacaatgtataagataaaccaagtcgaagaaaatgaaaaaatgggggaaggaaagttcaacaaccaacccttactctgaattggaaaagaaaaactatcaaataagcaagctatgggtctattagaaaaagaataaaattagacttttaatctaaatacttgaattggacaaaggaaaatgctagttgttatgaaaattgtttcgtanaacagtatacaaaggagctaattggttaactntttcaacagtaatgcaatatgatgc

SEQ ID NO: 243243 - DNA, 280 bp, Glycine max
  unsure (1)..(280): unsure at all n locations
gaacaacaaaaggccaaaaaacaaacaagcccgcggggaataagcacaagtctctccaggagaaaagctctctcataaccccaactccagaaaccccaagaaagaccataatccctttgagtagccaggccacagtacaagcaaataaaacgcctcagtgatccaccaagtgtaagcaggataactntaactaacataaagcgcaaaacacgggaacattaactgcagcgggtagaaattttaaacaccgatccaagacacttccgcacagagagaaaca

SEQ ID NO: 243244 - DNA, 386 bp, Glycine max
tggtgtctccccctgaagagaagaattgggtgatgccgaggagtataaatggtcaaattccaagaatgtaacatccatagttacatacatgcgtcgagtagtagggtcatagcagcgataccctttctggtgtgcaccatatcccaaaaacaggcagcgaacggcacacggatcaagctaggtacgctggtttttatataggtgaacaaatgcaacacacccaaagacacgaggtggcagcatttgtattgtaggcaacagtacaaatgtggacaaggtctgcagcggagttttaaattcaagaaccttcgatggcatccgattgatgagatatacttgctgtagtacaacatcagtccaatggtggtgatgcacatgtgctccat

SEQ ID NO: 243245 - DNA, 371 bp, Glycine max
gttttagtgatgatgtttgtgatgtttatatgctgaaattgctcatggaaaactgttagagatgaaaggtagagttaacctacggttggaaagtgagaatgtggtgttatgagtggaaaaagagtgaggctttgagagttggaaggttaagtctgaattctgtggtaaatggaggctaaagtgagttaatactagcttgaaatgtcatttaagacttgggagaaggctcggactgtgctatagagaagaacaaatgatcaaagtgaataaagagccatttctagggcaaatttgggtgttgaagagtcaaactctgattcggtgagatcttaggtgtaaatccagtttgaacaagtctaaatagatgttat

SEQ ID NO: 243246 - DNA, 313 bp, Glycine max
agaacttccgacacggatgtccgagccgggcgcattatatgtcgccagactcggacttgaacgacggaagctcttgacaaattcatatggccatagcattcacacggatgaccgagtcagctaatcacatatcgcacgatcagacctgccagcggaagctcttgacatatcaaatggtcataacatttatctcgaaagtccaagcaggcgcatacatatagcgatgatcgaacttgacaacggaaactctcgagaaattcaaatggtcataactcttcacactgaagtccgattcacggttataatatatcga

SEQ ID NO: 243247 - DNA, 206 bp, Glycine max
caacaagctttttgtacaggcagtcaaacaactacactacaactgaaattaaataactggaacctaaagacttaaagttaaatgattggacataaattcattaaataactgaaataaacttaattgttcaaaatgcacaaattaaaatgtgctgcttctgtgattgcccctgtgcatgcttattgagattcaacacctgaactgtg

SEQ ID NO: 243248 - DNA, 398 bp, Glycine max
  unsure (1)..(398): unsure at all n locations
acaatgaacatttattgaagataatttggtcatctactagaggaaatgcaacccacttgggaagagtaaatattttttagccactaaccatttggtaattttagcattccttcacacacacactgagtaccattaggcacaaattggtaactgagaaagaacaaagtcaaagacaatatcaaagattgaatagactcactttgatcaacaatagctttacttttaaagtcatacgcataataccaaatttaaaagatcacctgagtgaaaataccctttgctttagaaacacgttgcaatttctttnggaacanagctatcagctattgataccaaacaacacatcctgcaagaacaatggctagatatataatcacagcattgactgtcatttgcat

SEQ ID NO: 243249 - DNA, 387 bp, Glycine max
  unsure (1)..(387): unsure at all n locations
atttcccttcacgcaatcttatggatcttttcattctgatcttcatgatctttgatattgtggaaaattgagggcattnggggcctatggtcgtagaggtcccaaaaaccctagacccaaattgtgattatgtattgtttttttaaatccttttttttaatcattttcttgcgttttatttttatttatgtgggtgttcctctttttttttggtagaatttgcatgtgatgaaagatagtgaagtcaaaaaggattacaagaagaaggtgtgctctaagaaaaacggcatgtaagaaagatgtgaggtaaagcacgaaatattgggataaccatccactttcttatttctcttttttgtgggtggtaaaccaatgtttgatgtatga

SEQ ID NO: 243250 - DNA, 233 bp, Glycine max
acaccttattcaagcatagagcttcggggatacggggaggaaatctattccactgcatagttgaagatgctagaacatcaagcttaaatactgagcagcgctagtattaagaaaaccatgataaggataacatcaagttttatgttatctgcgaagggcataacacaacccttctccttaatccggccttcagacctgctatgaaaagacactggtcgagtttgatgtttttt

SEQ ID NO: 243251 - DNA, 427 bp, Glycine max
gcacaccatcacgaacatgtataatacactgggctatggatatctaggagtgcaataaagctttacacaaagaacatagtataggttaaataaatatagctgaagatctaaatcacatagaaaacacctttaattcctagtaaacatagctaattctcccaactgctgctcgctctgcaattctattgcaatactctacatggaaaaatgaggtatattatttgtgatataaaatgacaaatcaaactaatgaagagaaacgaagaaaattagatacccgagttaacaactttcacaagataaacaatatctcctagtagacatattacatgagcatacctttgctacatctaagttttcaagctgtattgctagatcaaatatgtagtcacgagcaataagctactcaagagcatcgtctatcata

SEQ ID NO: 243252 - DNA, 367 bp, Glycine max
  unsure (1)..(367): unsure at all n locations
ctaagagaccactacaagtttcctaacgatttctaattatgtgggccattaagtctatcatatgctgacaatagtcgagaagcccgtgaatctcttcgggggcggagtaggtgtctgccatcgctttggccttggctaacaatcggggaagttcttgactcccgttcaaggtaagagcaaaccgatccatccacatggttgcctcttggtgtaaagagtcgatcacccttcctctagcctctttttccgcgtatacttgngcatattcgtccgcaatcctatgctcgtgggccgcggctagatctaactcttcttggtacttggcgatgatagctagcatgtnggtctccgtctcgcataaacgctg

SEQ ID NO: 243253 - DNA, 321 bp, Glycine max
ttttttaagctccgacagaggagcacaatatttcatgccgtggccttttctagatgtctgacttgagcaccttttatccctcttccatttccacctagagcaatttcaaacaaatgatggaagaacgggataaggagatcttggagaccttcaggaaagtacaggtgaacatatctctgctatatgccatcaagctaatttccatgatatgccaagattctaaaggagttgtgcacccacaaaagaaggctcataggcaatgaaaggaattacatgggcagaaatgtgtcagcattgataggtacactgttcctcacattc

SEQ ID NO: 243254 - DNA, 352 bp, Glycine max
  unsure (1)..(352): unsure at all n locations
aagaacgaacgaagaacgccgaagaacgggtgaaaccttcgcgaaattcttcacggaaaacgtttcggaagcgcctcggcttagattttcttcacggaaacaattgttccaagcaaattcgaaagagagagaagcgcctaaggggctaaacccttccttcttgctgtcctcccctatttatagcaaaataggggaggtggttgccgcccagctcgcccaggcgagctcagctcgcccaggcgagcagggttgcttcctccagaagcaaccgccttctggaggaatattccagagggcccaagtgggcctgggcgctatntgcaccccccattttactaagcacacccccctc

SEQ ID NO: 243255 - DNA, 394 bp, Glycine max
  unsure (1)..(394): unsure at all n locations
acttcctgctnatttagttgaccacagagtggtacctggagatatttcgcgggggtcaggagaccttgcagacgtcacgtggtgtgctattgcccaaaaccaagcttgaccaaatccgacccaacccgggcatagtccgtcagtgagaacctgtgatgtacctaagcaagcgagctcctggcagtcaacagataaaaggaaaacaagaccacatagcaaggaggcttgtggtggctggccagctgtgaattttgtgtaatatgtgagatatggcctcttgtaatcgattaccaanggtgggtattcgattacaacgcttaacaatgaagacaggaggctcagatggtctctggtaatcgattaccacggggtgaattcgattaccatgcttgaa

SEQ ID NO: 243256 - DNA, 366 bp, Glycine max
  unsure (1)..(366): unsure at all n locations
tttctaaatacgaccctctgacataaatctgcctcacagaaatatctgctgcccaatctaaaataataaatagtaagagaccctcattcccggttttaacttatcctggttntaacctgtgcaacaaactagccatttctgctatacatgtatttttcttctctttcttaatagaataactgctcatccttgtaatatcaacatgaaaacaccacactagggaaatatagcaaaataccatctttatctatctgatacatacaataattttacaaatctattccatacattctataatgttacaacatggacttcacattatataaactaataaaagaagaactatacataattagaatgtataca

SEQ ID NO: 243257 - DNA, 354 bp, Glycine max
  unsure (1)..(354): unsure at all n locations
agactctgtggtttatgctcctctaccgaccaccacacagacctttgcccttctgtgcaacaatctgaagcaattgaacagcctgaagcttatgctgcaaacatctacaatagacctcctcaacctcaacaacaaaatcagccacaacagaataactatgacctctccagcaacaggtacaatcccggatggaggaatcatcccaaccttagatggtcgaatccttcacaacagcaacaacaacaacagccttattntcaaaatgttgttgcgccaagcagaccatacgttcctccaccaattcagcaacaacaacatcaacaatagccccagagatagcanatacgtgaggac

SEQ ID NO: 243258 - DNA, 325 bp, Glycine max
  unsure (1)..(325): unsure at all n locations
gactctcaggcacttatgacagccgccgatgatcccattactgcctnccctaagctctctgtcctttctctacgccgcatcccatgccttgcgaactccttggagtaccctcgcgttgcggtcactaaaaccccgtgcgatgaaaggcgtgatgctttcgtctaatggcactcctctcatggggtagccaagttgtcttatggtgagaacgggattataattaatacaaccccttgttcccatcaagggaacatttggacatccttcgcatgaagatagaatcttgatccttccttccttctagcgagggaaccaattaacagac

SEQ ID NO: 243259 - DNA, 270 bp, Glycine max
gggctacgtgggagtacgtgagctcagatggaggtgggcaacaggggatggtgggtttatgcgcgctttgtggatgtggaaaacttgatgtgcaccatcgcccgaccgccacctagtaccacatgtgatgggtaccccataatcctacaagcttgagatgaggaagtgtcgaagggtgaaacttcctgcttttattgttgaccacagagtggcacctggagatatgtctcgtgggtcatgagaccttgcggacgtcatgtggggtgctat

SEQ ID NO: 243260 - DNA, 358 bp, Glycine max
ctcagaagtctgatagagtcctgcaatatatccgaacgctcgaaatgcaatgtcgaagctctgagcaaattcaaacgacaataactttttactcggatgtccgattgagtcccgtaatatatccaaacgctcgaaatggaataccgaagctctgagcaaattcaaacgacaataacgttttactcagatgtctgattgagtctcgtaatatatcgagacgctcaaaatggaatgctgaagctctgagccaattcaaacgacaataaccttttactcggatgtccgattgagtcccgtaatatatccgcacgctcgaaactgaatgtccacactctgacaaattaaacgacataacctt

SEQ ID NO: 243261 - DNA, 365 bp, Glycine max
  unsure (1)..(365): unsure at all n locations
gaggaccaaatcagccttatatgtcaaggttgggcgctaagcgctagagactcacggcgtagcgcatgaacagagatgcgcttagtgcaaggcttgtactaagcgaaaggactggttttcttttttttcagaaaaaatgttttctaagatactttttagtcctttttccaggaaatcgaaacccttatgttaaatattcaaagataggctgatattctcttatgtgcagttcatacaacaagttctaaatgattaaatgcatgagaaacaaacaaagataatagaaattaaaactgggttgcctcccaggaagcgcttctttaacgtcattagcttgacgcttntaccttactgggtgatcttat

SEQ ID NO: 243262 - DNA, 222 bp, Glycine max
aacactagataagataccgcgattcttgtttctatctcacacgaataccatcaatgacaatgaagtattgtgtgtgagatgtgttttgactgtaaatatgcttggcacttgttctttgaatgcaatttctttctctagagttcggcgtggcaactttatgtggtggggtcttcatttagcacaatataacgactcttcttctaactgcttacaacttctggg

SEQ ID NO: 243263 - DNA, 199 bp, Glycine max
  unsure (1)..(199): unsure at all n locations
ctggactaacacatcngctgcccaagtntcatggtcttgcacgtgaagatccttataagcatcttaaggaattccatatcgnttgttccaccatgaagccccctgatgtccaagaagatcatatctttctaaaggctcttcctcattctctggaggggatgcgaaaagattggctctaccaccatcgtctcacgtacat

SEQ ID NO: 243264 - DNA, 273 bp, Glycine max
  unsure (1)..(273): unsure at all n locations
tgcatncacctagtcaagaacatttttgttctgcaaagagagctttgaggaatataagacgtacaactcgacatggtctgtattctttaaaaactcaaagtggagaacttcaacgatatgcaatactgactgggcaagaagtgcacatgaagctaagagcacctctggctatgctccctcatctgggagtgctgctcattccatggaattcaagcaagacattgaggcccaatcctcactagaagctgagtctatccaactgcagctgcatca

SEQ ID NO: 243265 - DNA, 119 bp, Glycine max
  unsure (1)..(119): unsure at all n locations
gagccagacatggtctttacgcaatactcgcaacnccgagagacgncagcgaaactcgcgcgccggacaagaaccgaaatcctaacgatcaagacgaaccactacgactaactctacac

SEQ ID NO: 243266 - DNA, 304 bp, Glycine max
atatattgagacgctcgcaatcgaattctgaaccttagagctaattcatacgacaatagctttctactcggatgtctgattgagtcccgtaatctattgagacgctcgaaattgaattctgaacctttgagctaattcacacgacaataactttttactcggatgtctgattgagtcccgtaatacatcgagacgctcgacattgaatgatgaagctctcactaaattcaaatgaccataactttttactcggatgtctgattgagtcccgtaatacatcgagacgcttgaaactgaattttga

SEQ ID NO: 243267 - DNA, 423 bp, Glycine max
taaccaacggaagctctcgagaaattcaaatgggcataacttttaactcggaggtccgattcaagcgcataatatatcgagacgctcgaaattgaacaacggaagctctcgagaaattcaaatggtcataacttatcacacggaggtctgattcaggcgcataatatatcgagaccctcaaaatttaacaacggaagctctcgagaaataccaatggtcataactgttcactgggatgtccgattcacgcgcataatacatagagacgctccaaattgaacaacggaagctctccataaattcaaatgggcataacatttcactcggatgtccaattcaggcgcatcatatatcgagacgcccgaaatagaacacggaagctctcgagaattcaaaggacataactttaactcggatgtcgat

SEQ ID NO: 243268 - DNA, 218 bp, Glycine max
aaccacagcagagcagttatgacctttccagcaacagatacaaccctggatggaggaatcaccctaacctcagatggtccagcccttcacaacaacaacagcagactgcgccttcctttcaaaaagctgctggcccaagcagaccatacataccttctccaatccaacaacagcaacaaccccagaaacaacacacagtggaggcccctccacaacct

SEQ ID NO: 243269 - DNA, 342 bp, Glycine max
atatatggtggagcaccaaattgacggactctaagatgtagagaactggaactcttaacaatgtctcacaagactctcattcatcacagtacaataagcgatacacatgcctctatttatacactaaggagcttccttgagaaactctcttaagaaacctcctcgagaagcttcctcgagagaactcccttgagaagctagagcttatctacacacacccatctaaagactaagctcacctccttgacaaaatacatgaaaatacaaaaaataagctcctactacaataactactcggaatgcactgaagtacaacgcgaaaaccctatactatgagaatgg

SEQ ID NO: 243270 - DNA, 345 bp, Glycine max
  unsure (1)..(345): unsure at all n locations
caaaaccacccatcatatctcccaaaaccccatacccacgaaaatcaaaagagaaagaagtccacccaaacctgatatttcgaagtcccactcgtagacacgcacttcaagacttcgaaaatgctctcctttcgcgatttagagcagacatgggcaccaaaggttgaagccttgttaggagcctcaatggagaatgagggagaaagaaaggcaacgtgagggagagggagagagaaagctnctgcaattnttctgctgagtgaagagagagagagatgctctctttcttggttttaagaggctcctacctcttttcttattattgtattcaagctatgccacatg

SEQ ID NO: 243271 - DNA, 323 bp, Glycine max
aacaagccaaggctatagagcacgcaaccaatggggcaaataacaccatatgattataatgatggacggctcaaatactcacaaaggtaaaatcaacactctccaacagagctttcagaactatcatgacatgaagagaagaaactacgatgttatagcacaaaatgtcaagaacttttataatcaaaacaaatacccatctcttgaacacatcctaatattcaaagaaaaacatgccaagtcgtgcgtgcacaccaatatgaccccaaaaattaaccaggacaccgaccaaactaacaacatgtacaaattaacacaactaa

SEQ ID NO: 243272 - DNA, 367 bp, Glycine max
  unsure (1)..(367): unsure at all n locations
tactcagcttgtattagatcctgttggtggtgcgaagacanattttcttaagacaaattaagacccttaacgtatttgactatatgtgaacaaatatagaggttgaaagttatgtcttatgcgttatcataacatgttccgcgaagtctgtgtttgatgttttagatgatagcaagatggaatcattatctgagacgacattatagttgaatttgagacttcatctaacaatttgtgtttgaaatctattttgtatagacattctcctaagatatgtccaatcttatgaagaataaatcaagtcaaggtctgaaattcctcaatcgccattaaaagaagagttatgctacacacacctgctctacat

SEQ ID NO: 243273 - DNA, 194 bp, Glycine max
  unsure (1)..(194): unsure at all n locations
cttctggcttcaaaaggccttctcctcttttcctattattttattcaagctctgccacacgtccctattcgattggagccacaagggcccactttctctttttgactgtgacccatactcagtcacaaaagtgagaaaaacctgacctttgaaacgctaaaatcctgcctcggnttgcgcgccggtcctctggt

SEQ ID NO: 243274 - DNA, 292 bp, Glycine max
gatgaggaaagacttgtgtgcaccatcgtccgaccgacacccaagaccacatgtgatgggcaccccacaatcctacaagcttgagaagaggaagcgttgaacggagaaacttcctgctctcattggtgaccacagagcggaaccagcagatatgtcgcgggggcaagagacctggggacgcaggcgggtgcatgccaaaccaactgacatccgaccacccggcatagggcaggagacctggatgaccaacagcgaccctgcagcaacaaaaagagaaaaccacaacagagct

SEQ ID NO: 243275 - DNA, 323 bp, Glycine max
gcacaaagcctatatacttgttcacatgaagtgtgctgtccaaatctcaagactattcgtgtccgaaagtgcaacaagttgaaatacctttctcataattttgtatttgggagtgaagaagaacatgatcttacatggctatcaaatgtggaagatctggacattatagaatgtaatgagttgaagtatatatttggcagtgaaaaagaacatgatcttatatggttccagcaccaaagtcgttgtcagactaataatcacatttaccacattctacggttgtgaactttacgcgtgattccgttaccacaattgcttgacat

SEQ ID NO: 243276 - DNA, 364 bp, Glycine max
gtgcgccaccgagcagtctcagagctccgccgccactccgccgagtccttctttggagtctccgtctgcgtcgccgtccacgctggtggatactcccaactgcggcggcggaggcgcgagttctgtggtgaatcggcaggactttttctcgtcggaggaagagtgtcaggtgcagctagccctaactatcaacgcttccaattcggagttccgcgaggatcctgagaacgatcagatccacgcggagacgctgttgagcttgggaggccatcgaatcgatctacgatgaacatgacgatgtgcggagctctgctaagaacactggaaaggctgcctcttgtcaatggcgaaatcactcctgcat

SEQ ID NO: 243277 - DNA, 278 bp, Glycine max
aaggggaaaaacccgcgaaagaaaggggttgttatcaacagcaaaaaacccaccgagagaagagccgaaaagctaacgcacaaacgaaacacacagacgcacagcccaccaacagagacctagatacaccggggaaaaacaagacaaacttcgagaacctgggccaatataaccacgaagatataaaaaaaccaggaacagaataccgccccgcccgcgatgcaaaaaaaaaagcccttcccaaacacacataggagcccaagaccaacaaaccagcc

SEQ ID NO: 243278 - DNA, 283 bp, Glycine max
acttggaccgatcataagcgtaataattacccactactttaccgcttttgcgagaactatcctaagtctgattcttctcatcacaattgaggatacgtaatagcagaagccccgcttttgcaaccaccccaagggatcggtaatggtccaacgccttaaacgttttgtactttgaccccaagagatcgctaatggtccaaagccttaatgtatcttcctttcaaaacaagagaacgtttatacgtcaacgcgctaaaaacctttggtccgtaaaaatatatct

SEQ ID NO: 243279 - DNA, 124 bp, Glycine max
attacacggatggggctcggagaaaaatacaacccaagtggatgtaaaaaaataaatttatacaccttaaaatactaacaggtggtatgagacacgacacacggccttacgaaataaatctcat

SEQ ID NO: 243280 - DNA, 362 bp, Glycine max
agccatgttctcattatgaaaattggcatccgaatgctcaaaatcagaatatttataatcagcagcaacaaaatgctcagaatgctcaaaatgcacataatgattaggatgcacactatgcctaaccaatctatgtaaggttctatctatctcaagatcaaagggttgtaaatcaccccgattgcccctagtcatgcactatatgcagcatatcatgtatttcccatacaaacaccacggttaaaaagggggtaaaactacgggttaaactacaagtatactcaaataatattcaaatgaactgaaaatttgtgacgaacaccctaatatatgataagataaccaaatttctcacaaaatct

SEQ ID NO: 243281 - DNA, 269 bp, Glycine max
gggggttacctcccagtaagtcccgcttacggcattagcttgacatataatatcgttaccctagagcaatctggggtctctccttcagaaccttctcatccaacttctttacctataagaatacatcctggtccaacaattcttttccttcattaaaaagaacaaagcggatttattggttgtcgagactcatttccaactatttcttcccttgtccaccacacaacttgcagtggacataaatggacgtcccatactgacaggaatat

SEQ ID NO: 243282 - DNA, 415 bp, Glycine max
  unsure (1)..(415): unsure at all n locations
ctgttatgacgaacatattgtatggtaaaggaaattcacttactccatgagtcagtttaagaagttactctcattttgaaccccttattttatgtgaaatccgagagttcagaaatatactccctcanagaacccacatggcgaccgtctccttcccaactagtccacgtaaagctctatcgtattctagccagttcttcaccaccgaaaagtagatagcattaatggtgacgccaacataagaaaataaaaagagaagttcatctgctcgatgacacctgcaattaggcctttgccgtgactaaactacaaggttggtctgattgacagatatatgcctagatgaattgactgatagtcaacacaatgaactttaattatatccaaagagaatagcatgatcgacataggttat

SEQ ID NO: 243283 - DNA, 356 bp, Glycine max
ttgacttgatagaacctctctttaagaaaggcatttgactagatcccatgttttactaaagagaacaaaaatcggtgcgaatcataactccaacatctatcatgggtggaatggatgcatgcatgaaaaaatgcatatgacacaggtgcaatttacgaatactggagcccgtgaaattgtctccctcttagatacaaccgctcggggtagcaaagtgctcaacgtatgtatttaagaaggtgacacggaccctccgctggtttgtaaaaagaggggatcaatacagaatccgtgcgtacccatatgccaaaggagcaacacgggaatgtacatagtatgaccatattcacaaatat

SEQ ID NO: 243284 - DNA, 419 bp, Glycine max
  unsure (1)..(419): unsure at all n locations
acgacatatctccaggtaccactctgtagtcaacaaacaaaagtaggaagactgactcttccacacttcctcacatcaagcttgtgggattatggggtacccgtcatatgtggtactatgtggcgatcgggcgatggtgcaaatcaactctcccacatccacaaatcaaacatgaacccaccatgcccagttgcccaccttcaactgagctcacgtactcctacgtagcccttatactcgttcctctcagcaccgagtccccatcaacacctccaaagcttcacaatatccaagcaattcaatttccaaatatcatgaactaccctanaccaagaaaacagggcagaggcagaaaactctgcccataacacattcacatattacaaccttccttactcagatatgccagtaacaatctc

SEQ ID NO: 243285 - DNA, 260 bp, Glycine max
cctacaaaactctcaatctcaaaaacagacgtacgactctcccacttaagaacaacttctatcttagagggagccacagctctaccaccctgagatatcacatgccctacgaaactaactgtctctaaccagaactcacacctgggcagactagcatagaagtatcgggccttaaggggatgcaacacaatcctcaaaagggcttcatgctcctctctaggcttggagtataccacaatatcatctatcaaaccaccaca

SEQ ID NO: 243286 - DNA, 422 bp, Glycine max
aaacacttataatctgagacgctcataattgaatgctggagctcttaccaaattcaaatgccaataacttgttactcggatgttcgattgaatcccgtaatatatctagatgctcaaaattgataacagaagctctgagcaaattctaacgacaatagcttgtgactctgatatccgattgagtcattaataattcgagacgctctaaatgaatacagaatctctaagcaaattcaaatgacaataacttttgaatcgtatgtccgattgagtcatttcataatttgagacgctcaacatcgaatgcaagagctcttacaaattcatatgcagtaacttttactcgatgtccgatgatcccctatatatctaaagctctgaaggaaacagaatcttgaccaattcaaacacataggcttgac

SEQ ID NO: 243287 - DNA, 414 bp, Glycine max
atctatgcacttcttcaaaatactactttttgcatggaactagaggaaatataacattaattccatgtcaagaggcttgtactgagcagagatcataacaatacaatattatttacaatcctacctaatagaaccataaattgggagggtgatatacatttgtgaaaacatttctatacaaaagttattcttaaacgatgactaacagtcgagctatgacccaacccaacccaattatattgggctagagatattaagtgtatgggtcaaacttgatcatatatgaattaggaacactgtttgtacacctcaaatttatactgaaatatagctaaaaacacttaatcaattattcttgaaaatgtgtcttttcacaccttttataataataaacatcttctatctattttttat

SEQ ID NO: 243288 - DNA, 291 bp, Glycine max
gaattgattattgctaccccatagagctccgcgaaatttgttccaggcatactcttacttgcgagccctcttggtctctcgttcaacggctcttgcggtacatgcattatcttcccggaacccggcacactccttccgaacgtgtgtagcagccaactagaagcttcccttggcgagtatagccatacctaactcgctatagagagcttggacttctacgtcctctcctgtgcttaaaaatctcttccgtgagacttttaactaggcgagccaatctaaacctcagatgcg

SEQ ID NO: 243289 - DNA, 366 bp, Glycine max
tctgaacacaccaccactgcggcaacaacaaatattccgttggagagttctacacgctcccataatcattagtccgaaactggtcgaacgtctcttgcatcgctgagacccaatactaaccagacatggaatcatctacgtgcatatggcaatctcacatagaaacggtgtggtcctaagagagagccttcctgtactctgccatagatcacaatgatcaagctctagagttgtttctcacaggcatccataggtctctggccctcaggtgggtgccactgggagaaaacacaagtggtctgactcgcacacagagactaacaatatctcaacttcattatcaaaaacactcccttcacatgaacg

SEQ ID NO: 243290 - DNA, 330 bp, Glycine max
  unsure (1)..(330): unsure at all n locations
agacacganagcgggaaatagaacaagagcttctgagttattccataatttacattgtttaaatgaaataaaattatacaagtatcctttaatacatgctaatctacatagaaaaaaaaggtaattctattgtccaacataaaaggtgttgaatgctaacatacgtcttctgatttttgttagctaatatacaccttttgatttttaagtgtgtgtatgtgtatgtgttaaagcattatcatttctactctgtattgaattccaagttgcaaagattttactggctcagaacaagctttaatcaggccaaccacttgaacactttacata

SEQ ID NO: 243291 - DNA, 335 bp, Glycine max
aactcgaagatatcacatcaacttccgtgttttctctttgatgagatatagctcacaatctgctatgttgcagacttatgaaatatattttgtgtttatcttaatacgcaaattttttatgagtattagctgtataagaacaaagcttatgcttgtgcatttcttattttagattaagcttatctattgcttatcttcttgggtaccccttctacagtacgaacaaattaaaaaacacaggtgttcatatcttcttctctgttctcaagttgggatcagaggcataagtgctcatagaagctaattccaacaatgaatatcagataacaagcatg

SEQ ID NO: 243292 - DNA, 297 bp, Glycine max
agggaaagaagcccccatacctgaatttgagcccaccgaggccgcattacgatgcaaacgcctccttacgatggggcgaatgaggcaaggttgaacttgctgggctcatgggaagagaaagatatggacgtgaggaaaagaagctgcgaatttgtggggctgaggaaaagaaagtgttctggttaataaaggttctttttttatattatcagctctgcaatgtctattatggacaagggccctttttttgatggcctatagccaaaggaaaattgcctgacctaaactgcaggtggg

SEQ ID NO: 243293 - DNA, 332 bp, Glycine max
ctcattaagaactaactcctttcattctctatagcctttagctgaatacacacttagattggttctctatttggttcttaaccctctcatgcaacttcattacaaactatgacctagagtacccgtttttatgtatacaaaaatcgtaatgtgggaaaggaatgaggtctaatggagttacgggattgaactcatagacaacctctataggggagtgcctgcgggtgtatgaaccctcctattgtaggaaattctacatgaggatgatactcatcccgagaattataggtgcctttcataaaagaccttataaggatggataaagacctatt

SEQ ID NO: 243294 - DNA, 184 bp, Glycine max
atatccgcaactacagctacacagactacacataaaaaaaaaaaatgcttaagatttcacctgaacacaacctgcacctaacaacacaaacagctaccactacaacaaaccaaagctcaaccaaactaaatatcacactacaaagaagtaaaaacacctctcagacgttgtcttcctccaacta

SEQ ID NO: 243295 - DNA, 153 bp, Glycine max
tcatatatcattggcgctctttaccgagcacttggtgggcgcatgtatggacataaataagctacatgatgggggcaatgtgtcatgccccattgcttctaaaaacaacacaggcctaatgccttcttacaccatatctgaactcaacaaatc

SEQ ID NO: 243296 - DNA, 430 bp, Glycine max
  unsure (1)..(430): unsure at all n locations
cttcgcaaccacgacgacggcgcgaagctcggcgaggactttaaggttgtgaccgtcgacgacccgccggaaaattgcctccacttctcggtgctctcggaggcgaacgagagcgacgcgccggaggttgatatccaacccgacgacgcggtggcgatgccgttctcttccggcacgacgggtttacctaaaggagtggttctcacgcacaagagtttaacaaccagtgtggcgcaacaagttgacggagagaaccctaacctctacctcaccaccgaggacgtgctcctatgcgtgcttccgttgtttcacatattctccctcaacagtgtgcttttgtgcgcgcttatggccgggagtgcggttttgttgatgcagaagttcgagaatgggacgcntgtggagctcatacagcggcaccgcgtgtcgg

SEQ ID NO: 243297 - DNA, 137 bp, Glycine max
accagacttcaacactagaaaactaccttttctgaagccataatgggtgtaagcaataggattaaggtaacgctatggctaagcaaggataacggtaaactacttattgtcgattatttgagtaataagcttgacaa

SEQ ID NO: 243298 - DNA, 437 bp, Glycine max
  unsure (1)..(437): unsure at all n locations
ttcatgctgtgtttcattttatataggaaaacgtaaaggacaccccatatattaatatacatcttgaaagagaaaaaataatagaaaaaatctaatatatatatatatatatatatatatatatatatatatatatatatataatgctagtaattgggtgtcaaatgctaatggggtgtctaaaataattgggtgtccaactagtactgccctataaattatgatgctagtaagattgtttaaaggttgtatgtagaatgatttttgattagttggtggtgtaaaaatatgtgctactcacgtgtttgaaataagtcggtcattctctgtataactaacaaaaaatgggagatggcataaatcaaaatgtgaaaaactaaatntatattgcattatttcatatcaatcaccgagaaaaaatatagctttgaatgtca

SEQ ID NO: 243299 - DNA, 390 bp, Glycine max
  unsure (1)..(390): unsure at all n locations
acaatggagatgcagcggaagacaaaggagaacaggtgagaggaggctccatccactacggaataagccatggaagaaaagcttaccaccaagatgagccttggataagaagctaggaagaatacttcaatggaggacaagaaagagggagagaaagagagaggggggagcacgaaattgaaggaataaaagagggagagaagtggaactctgaagtatgtctcacaagactctcattcatcaaagttacaacaagtgttacacatgcttctatttatatactangtagcttccttgagaagctttcttaagacaacttccttgagaagcttcttgagaaaactttcctgagaagctaaacttgcttcaccacccatcttaaactagctc

SEQ ID NO: 243300 - DNA, 117 bp, Glycine max
tggaggctactgggtgttttgtaaagaaaatcttgatagaagaaatgtgggagtgttatgtgcaaaaagagatttatttttataactgtttaaatagaaaagtatgtacattaaagg

SEQ ID NO: 243301 - DNA, 399 bp, Glycine max
cagagttctccgactatgctctggagaggtgtgtcaagttacaaaaggagagaacaagaaatgaagagtcaatggttgatacatggacgaagatgaaaaagatcataaggaagcggtatgtgccaagtggactaccacctttgaggggaattgagcatcaaattgatctcattccgggagcttctttgcccaataggccagcctatagaagtaatccacaagaaaccaaagagattcaaagacaagtggatgaactcattagcaaaggttgggtaagaaatagtatgagtccttgtgctgtcccagtgattttggtccctaaaaaggatgggacatggcgcatgtgttccgattgtagagcccttaataacatcaccattaaatataggcatcctatac

SEQ ID NO: 243302 - DNA, 234 bp, Glycine max
aacaccgagaagccgatcacaggagaagtcgctggtggctttctttatctctttgccattgaaaagtttatctgctctgtccacattactggcattcagaatcccttcacgctctttggctatccgcgcttgtgcttctctgatgcgcctgtggcgtttgagagtacacaggcaatgatggctaggatgagtgcagctccagccccacatactgaacctgcacattgctgccat

SEQ ID NO: 243303 - DNA, 112 bp, Glycine max
  unsure (1)..(112): unsure at all n locations
tctttnctaaancttttaaaatattacctactttctcacgtgacagttaataattaataatgtgttattaattactttgataataaataacatacaatgaactgtcaatacg

SEQ ID NO: 243304 - DNA, 377 bp, Glycine max
aatcaaaagatgtaactcttcaaatgttttttgactgtttcaaattggttttaagtttttctaaaagttataactcttttaaatggtcctcatgaccagacatgaaaagtctataaaagcaaggttttgttttgcattttcaatgaatctttctaacaatccaatcaattcattacaatcctttacaagccttgaatcttgaaattctgatactggggacagatgtcgtacaggatgtcacgacatcacgcttcagaacatgcagatagtctttgactgtatgaacagattaaacaagtaaataacacaagagaattgtaacccagttcggtgaacctcacctacatctggggctaccaaccaggaggaaatcacta

SEQ ID NO: 243305 - DNA, 178 bp, Glycine max
  unsure (1)..(178): unsure at all n locations
gatgaagctttgagctggatattanccttcctgaagccaatgggtgagtcccgtgcaggctttcagaagaaaatcgtcgaaagagatatttggaaatgagtgtctagtaagaaagatctatattgaagtactggattatgttggttgtttaaaatctgaagaaatctgtgtgttgggt

SEQ ID NO: 243306 - DNA, 411 bp, Glycine max
  unsure (1)..(411): unsure at all n locations
ggaggccttaattaacctcaatctcaggcaccagtggtgcaaccattctcaagctttgttggagctttgtgtattcgggtgatcaatgggttggtgtccttagagctagaattttgcgaaaccattgtcagtatggtggatacaaaaagtattctcttttgtcatcgctgaaacaacatctccctactatttttcgtaataaagcttgggtcatggctccaaaatcaactttnggaataatgcttggtgcatggcggctcctattgttgaatctcttgggatccctttgcgcattcgcagccttctctcatctttagtcatggactttagaactntgaaccaatggaacatccctcagttgttgtacccttgcaatggtctatgaatctcatctatctttttatatctgcc

SEQ ID NO: 243307 - DNA, 204 bp, Glycine max
taccatacgtttatggtctagcttttgaatttttagaaggaaatgactaaagtagacatacacaaaaatggagtgaatagacaatttagtccctgagattgtacctattttgcatactaccccctaaccttatgttaaatcctaataaacccttctctgcataaatgcccacaactgtcacttgtaatttcaaagcgcattgat

SEQ ID NO: 243308 - DNA, 126 bp, Glycine max
cctaaaagattgaaagcggttttctgactcctctgcggttaagaaagataaagtctctgaaacactctatattcaggagaacatgtgtcgcgcaatggggatcttgagatggggagtttgaattca

SEQ ID NO: 243309 - DNA, 324 bp, Glycine max
agagaaaactactttcacttgtccttttgatgtttttacatacataaggatatcctttggattgtgaaatgcaccaaccactttccaaaggtgtatgttagctatcttcttggatttagaggaaaaatgcattgaggtatttatgaatgatttctttgttttggaagcttgtttggtgtgtgcttgtccaatcttgaaattgtgttgaaaaggtgtgctgagacaaatctcattctcaattggaagaaatgccattttatggtgactgaagggattgttcttggtaacaaaatatcatcaaggggcattgaggtggataaagct

SEQ ID NO: 243310 - DNA, 408 bp, Glycine max
  unsure (1)..(408): unsure at all n locations
attntttactcaacaagccaaaggaagatgatgccacaataattcccaatcatagagtactctttacaaaatgaaagccgcatgacagaacttttgcacttcttcaccgccttaacgattttcatagtgtcctaaatataagaaacacatgtggttggaattcaatttgaacaattaatggtattggtaatagaaatccttgcatgtaaaacaaaatattaaaaaaaaatgatgaatgaagaaagtggctgagccttccatgaagagggatgttntaattttcaaatccattgctaatgcatctgacacatacacnaatatttgcagcttctcaattgatagccttccatgaagaaatgagtcctcaagttgctcaacattgaactngctactttntctaacacaaaa

SEQ ID NO: 243311 - DNA, 159 bp, Glycine max
aatccccataatgcaaaagggttgtcgtcatatttattcattcagtgtacaagttaaaaccaagcgactgtgtgagtggagtggacataagagtattacaatgacatatatagagattatttgcactgtgatagataatatagttaattatagatgggg

SEQ ID NO: 243312 - DNA, 400 bp, Glycine max
  unsure (1)..(400): unsure at all n locations
atcacaaattgaatcattttttttttctcaaaccaatcacgactcattataggcttaatttgtataaatttgactttaccatgtttatttcttattttaggagcctgaaattaatttgacctttcttactttaatatgctataattctagatttgcatataacttgcaagctagttcaacttgaacttgcaagatgaaatgttggtttaagctttaaatttgattttttttaagtccgattcaagcttatccaactaaatctcatagaaattaagatttcatagaacttagacttcactctaaaagctcaaattaaatttgagcttgtgggcttgagtcaccataacctacaattcactttgantaaattcccgtgataaatatatgactagatttaaat

SEQ ID NO: 243313 - DNA, 389 bp, Glycine max
  unsure (1)..(389): unsure at all n locations
cacaagcaagacggcctatacatttgctctttattatgcngncngttgaagccntntggattttctatgaataaagggccttggtttaatgagctgacactcggtatggtatcattaaacttcagtccacattagcctgcatcaagatgggaaggcctgatttggcacaaaaagcagtcgattcagcagagaaaaggctttcagcggatagatggcccgaatattacgataccccaaatggaaggtttatcgggaagcaatcgcggatggtgcagacatggaccattgctggtttcttgacctcaaagatgcttctagagaacccagaaagggcatccttgttgttttgggaggaggattttgactctttcatactgtgtctgcatgct

SEQ ID NO: 243314 - DNA, 346 bp, Glycine max
  unsure (1)..(346): unsure at all n locations
accacnaggcanacacccaacgnnccgcccccaccccaacgggcgggaacacaaaccaaagaaacaaaaanaagncagaaagggggaagnccaaacccctatggctgcattcatataaatcaaacggggaagacctcaattgtcactcttcgtttttcccatggacaaaaggcagaagctctcccatcggtttcacgctgtcattgcactttatttccattttccactctttggcagggtttcaaaaaatggtccacgactgcaattgtgagggtaacaccaagagtttagaggtctgagcaaccgcataacaactgcaattgcagccacaatcttcgataatatc

SEQ ID NO: 243315 - DNA, 419 bp, Glycine max
cctagctagattacccatcatatcaccccaaaaccccatacccacgaaatttaagagagaaagaagtccacccaaacctgaattttcgaagtcccactcgtagccacgcacttcacgactccggaaatgccctccttttgcgaattgaagcggaaatgagcaccaaaggttggagctttgttggggtttcaatggagaatggaggagaaggaaaaagcaacgtgaggaagagggagagcttctgaatttctgctttggctgagtgaggagagagaaaagctttttggtcttatataaaaagggttctccctttttccattattatattcaagctctgccacatgtgcctatatgagtggagcaagaagggcccactttctttttttgatgtgaccatactcgtcacaaagtgaggaaat

SEQ ID NO: 243316 - DNA, 378 bp, Glycine max
gcaggggctttttaatatcttactttcactcagcctgatatatcttatgccgcgcagcaaatttgtcttcatatgcatgctccgacaaatgagcatatgagtgctctcaagcgtatcatatgctaccttcagggtactttatcccatggtttgcatttgtacaaatccaccattgatagactaatctcttatacagatgctgattggggtgggtgtcctgacacccatcgttccacttctgggtattgtgttttcctcggagataatccgatatcttggtcttccaaacgacagcctattctctcccgcagcaatgcagaggcagaatacacgggtgtggctaatggtgtttctgattcctgctggatcagaaacctg

SEQ ID NO: 243317 - DNA, 321 bp, Glycine max
aaaaaccattagactgacatttctttcttttcttaaactaatctctcttaattgctttaaaatattaaagtgtgttctttataagatacactattgtaaacgttaaaataggaggaggatttgcgcaattttatgaaatctcaattattataaaagacaaaatatatcttctattttataggaacaaaattcatataaaaatttatacaattgtattcttatacacaacttaattattaacaaaattgcttttattgattaatacattttttacagcaaatacacatttatctttacttaagattttttaccaacatctta

SEQ ID NO: 243318 - DNA, 137 bp, Glycine max
cgacatcgttcgcgtgtatgatctgactcaaaggtttaaagatatataagggaagatataacttagagttcttttgtattgtggttatatcattaggacaaattaagtataggtgaagtttgaggtatgatatgagg

SEQ ID NO: 243319 - DNA, 407 bp, Glycine max
ttagtctccccattctgtccaaatggactattcaagattcaatacaatgattaatgcaaactgtccgcaagaatcattgtattcaatcttaaacgggaatctaaggttcactcacgatgaacataatttgtatagcatatatcatttctcattaatggcagtgaacaagtaataaaaacattggtaacaaacataaaaagttttcaaaaaaacatttgtacttgtgatgatgagcacgtcctaaaaacagagtaacaatccaataaacaactgaatgaccacctacatcaatcatcattaccaaaaacattagatataaattttgctcacctatatcaatcatcaactagaatgcttaaacatgtgacatacaaaagttgatggataaacttaccaacaattcaagt

SEQ ID NO: 243320 - DNA, 149 bp, Glycine max
ttgaaattggtattcttgtttcggaataaacttgcccatggattagtgattactcagtgctctgcgaaacgggaatttagtgcatggtacttgtatgcatgaaatcattaaattataagaattatacgatggtgatttactagaaaaaa

SEQ ID NO: 243321 - DNA, 299 bp, Glycine max
  unsure (1)..(299): unsure at all n locations
caagcacaggcacatatgggacaataaatgaagtgacgtacaattaagtccttggaagaaagaaaggggaaaaaaaactagtggaagctcaataatggaggaagagaaagtgtggagcagagaaagaaacagaggtgtgtgtggcttcttgtggagaaagaaggaaaaagaagaggaaggaggagcacgttaatgtcaatgctgatttataaagctagaaaatgaatataatacaataatctcttacgtaagattntttacatgtgtattgtcattaatatacttgacagctaatatcc

SEQ ID NO: 243322 - DNA, 276 bp, Glycine max
  unsure (1)..(276): unsure at all n locations
ctcaatctaaaatttctgggcgttcacgcaggaagatcatgtactccatagggctncnncaccactggcaagcaatctaatcataccttctcgtccataattactcgagtcccttcataanaaataattggagaaagacagctgttctgaaatctgactggtgggggcacactggcacataagtttcttaaatctctcccagtactcatacaggctctctccactgagttgtcaaatacctgagatatccttcctgacggctggggtcctggaagc

SEQ ID NO: 243323 - DNA, 341 bp, Glycine max
tatggggcgaaagcttatggtacttaactagcatgcagtggtgcgtgtgcgcatcatatgctttagtctgaaatgaaattatggtcgagccatgttggttctttgctttaggaagtgtcaaatgaaatttgctagtagttttctgctcaggtgttggagcttttatgcagactttggaggaattcgtgctagcaattttctctgcatttgtacaatttccataatagtaaggaactattcatatggactatgaccactgttaaaccttaaagcagcttgtagtgttgaaaaataatcacatgatttaatgtcctattcttctctttctcttggatttacac

SEQ ID NO: 243324 - DNA, 106 bp, Glycine max
  unsure (1)..(106): unsure at all n locations
tagagcgaccgcggcatgcacttgtcttacacaccgtttctctcatttagacttatatnnnaatattagggcccattctcagccttgttccatatgtaatcatcct

SEQ ID NO: 243325 - DNA, 304 bp, Glycine max
caagtgggcctggttgctatttccacccccatttttactaaatacaccccttgctcttttttggtgattctttttccgtaacgttacgaaactttatgaatttcgaacgatgctcggtatctttccgtaatgttacgaaaccttacggattacgtaatcatccccttctttgccttccagaacgttacggaacttcatggattgcgtactaacacttccttttaatttctggcatgtcacggaacttcacggattgtactacaatgctttcctttgacttccgacatatcacggaactttatga

SEQ ID NO: 243326 - DNA, 111 bp, Glycine max
gacccttcagaagggcatgagcaacctgatggtgataatcaacgacttatgctgtttataaaataggaaacctacctggaaagatgaactgcactgagatgtgttgaaaaa

SEQ ID NO: 243327 - DNA, 129 bp, Glycine max
aagctgtggatattttaggggcggctataataaaaagtgaagggataatagtgactttaagaagtggaaggaaatttttaaaaagttttgttgaatatgaagatcttaattttttaaatgctttgtttg

SEQ ID NO: 243328 - DNA, 365 bp, Glycine max
  unsure (1)..(365): unsure at all n locations
tgaatatgaatagatttaccattttgtttgaagacatgatgacatacttcataaatgtcatcattcttgtcaacctgaaagagtgaaggattattaaagggaaaaaatatttcattcctgatagagtgaanacatgcatcataaatgtcatctatccaagttttccaacccttgagcaacttccgtgacaggtcagcaggaaaatgctaagtcgttcaatgatagtgatttgttttaaaatgttaattgacagaattgccaatccatattattttctggtaaacatctccatgaatatggatgaatcagaagactcgattataccaaacttcaactgtatttaatcatgggtgggagacatttca

SEQ ID NO: 243329 - DNA, 141 bp, Glycine max
ttctactgctttgttcacaaactgttgccaatgataagaagcttcatctgcatctgcccgatacatggaggaatgctaactgtgtgagttgaattttgctataaaacatatatcagggacttctttgtgagtttttttagt

SEQ ID NO: 243330 - DNA, 413 bp, Glycine max
ggtagcgctaacttagaaaatcccttaatgaatatcctataatagccggcaaaccccaagaaacttcgaacttctgttggaattgccggttattaccactccataaccgactccactttaatcggatccaccgcaaccccgtgtttagaaatcacgtgccccaagaactgcactttctctaaccaaaattcacatttcgacaatttggaaaacaatttcctatccctcaggatatgcaacacaattctcaagtgcttttcatgctcttctttattccttgaatacactagaatatcatcaatgaacacaaccacgaactaatctaagtaatcatggaatatgcggttcatatagtccatgaagatagccggatcattagtcacttcaaatggcatgactaaatacttataatg

SEQ ID NO: 243331 - DNA, 134 bp, Glycine max
tgttataaaaaaatgggagtacgctgagacgtacatcaattgtttgtttgtcatagagtatttaaatatcagtatagattataagttttattttggaataaaggtggagagttagatatttaattaattaatta

SEQ ID NO: 243332 - DNA, 409 bp, Glycine max
  unsure (1)..(409): unsure at all n locations
atctcaaataattttaaatatgttataagtgttatgaaaataaaagacaacagatattgtaaccaaaagaaaaacaaaatatataaagatagtagagagatctttagactgaggtgccatctcccctaaattttactcattacaaagatagtagagagatgtaaaaaaagtattatgtaatattttgtttacataaacaagagatacataacaaaagattgaagctgtaaaaaaacaagagattgaaaaaaatttagcacgtcttcttaaaatgaaatccttatgaaaggaagttaaatatatcatatccttatcagaagaaataaaattaaatctaataaatgatattttnttcttttatttngtgtgaaaaatgaagtgttatgcataaggaagacaagtgtggatt

SEQ ID NO: 243333 - DNA, 61 bp, Glycine max
  unsure (1)..(61): unsure at all n locations
gtgcacttncaaaaatataatctcgtaggagattggcgtattggtccagagtataaggtgg

SEQ ID NO: 243334 - DNA, 328 bp, Glycine max
  unsure (1)..(328): unsure at all n locations
gaagccatttgtaaagaccaatgtcttataatggtctnttccgcttttattggntaaacgtcgatttctaaaaagcctacaatcaacagttgctttattacctcttttaaaaaataacaagagatcattaatggtccaatgccttaatggaggtgatcggtcagctccagcggcaagcttttcgcacagctgacggtaaaatctgggacctatccatggtagaagtctccacagaggccattgcctcccttgcccagtattatgataagccgttgaggtgcttcacctttggggacttncagctatcacccatggtagaagaatttga

SEQ ID NO: 243335 - DNA, 417 bp, Glycine max
  unsure (1)..(417): unsure at all n locations
cacccatttttaattncaatcaatcataatcagtatgatgcatgcacctgacttcaactctcaaatgcaatatggtactatcctcaaggaaatagtctaagcgtgcccacacgacactctcacttatgaaaactaggcagtaagtgtcgaggtcaccctgtcatgcacaagcaaccccccccccccccccgccccacggtgatcagcctaagtctcaagggagttccaaaccgattgacatgcccccaagtacaagtattccttctcatgagaaactaaaagtacttactgacaagatttatactatttccatgcaatatgaagtatgaaacataagcaccatcaatgcgctggccgtggataattaaagatctaagtattcccctccagagagcgctaaactctttaccactttat

SEQ ID NO: 243336 - DNA, 387 bp, Glycine max
  unsure (1)..(387): unsure at all n locations
agacctacatgttacttgtttgttgacgactngagttgggaacgatttcaggagcaatattatcttcgattttcagttaccggtactatttttcttttaccaacttttagttactgaatcaatcaaaccgttgttgaatttcaatttcgaagtttgtttatcctcttttagtaacagatgcatttgttgcgttctgcaccgcttctttgctagtatttagtttgatcattttgcaatgccacctgattttggatttctcactttttgtggttatacttattttcttccgtgctatgcctattaattaatgattctaaacacacgcaggctaagcatgtntattaattttgaatttgatcgagcattttattattatgcatgtaaatg

SEQ ID NO: 243337 - DNA, 423 bp, Glycine max
  unsure (1)..(423): unsure at all n locations
tatacatatgactatnggngttattnttaaggtaatcgttgtacatgaccagntggtgattggatgacggtaagactatcttacagagcggaaaaaatttagtaggcatgtttaggattatttttaattgactcacaatgtaaaaaactttatgctgtaaactctaaaaatattggttaggctatatcttgattcttgattgtttttcatctgagaatctgaatctgggtctgagtttttgttgtttattatttcaggggactcgagaactatttaagtgtgaagcaagtgaccaagtacatatctgatgaaccgtggggctggtatcagtcgcctttcaaactgtgatatgaattgctgttctaaaatctggcatgaatatgttgttgcggacatttactctgtgatgatgatcttcaattc

SEQ ID NO: 243338 - DNA, 132 bp, Glycine max
tgcagctatagtaaggcgaatatcaaaagaagcaacttattgattatgtctgttgtgttttagaggggtcagaagttaagcggtaagtggtgattacgcaattgtatttgttagtctactttatattttaat

SEQ ID NO: 243339 - DNA, 333 bp, Glycine max
agaagactaagtgtttgtcataccctaagttcatccggggactatcgttcgttgatcttttgatccttgctagtcgacttacggtgttgaacgccagttatagggctaaatagatgatcatttagtgttttgatcaagaatgcgaaaaataccaaaaaaaggggggcaaaagggtcttttcgttggttttcctggaccctagctcgcccaggctagcctctggctcacccaagctagcctctggctcgccttggccaccaaatagctttatggtgaagaaaccaacttgcctgggcgagctcactactgcaggggttagtttcagctcgcctg

SEQ ID NO: 243340 - DNA, 289 bp, Glycine max
tccgcactaacaaaaatcaacgtacagaaattatgtgtgttgaacctaccatcaggttaacatatggctttttatgacacttgctttaccacttaattccttgagtttagcatcaagaatatggccaacaaaaacaattaccaatattgaagtaagtaagaacaagaaagtaacaaaaaagtaacatgtttagccaagaagaaaaatcaaattagaatagtacaatcttatgcccaatatactaagaatttttaagtcttagctaccatagccattttttttatttgta

SEQ ID NO: 243341 - DNA, 421 bp, Glycine max
  unsure (1)..(421): unsure at all n locations
tgtgggagatagtttcttatgtaagataaagggaagtttcgnactctctatcatcttatgtttaattctaggcaagaaagctcttcttccaacatggtgaccacttaggatttcaacatccaaacatgttcttaaaaaaaatccatgacatagtagtcttctcccattgcacacacagaatttagggtctatgtagtttgttatgtaagtattttataaattttacgacttttaaaattggtttgaaaattccgagtattttcataaacattgatgcatttaattttctattcttttatattttttatcagctctagtttaaaaatttaaaaatatatatgtnaaatcaaaatgaagtttanaaaagaaaaagatatagtattttaaaaatcaattattttgtaaaaaaataaaatatttt

SEQ ID NO: 243342 - DNA, 124 bp, Glycine max
  unsure (1)..(124): unsure at all n locations
agctgncgttggtgtaaaaagtctgcatggatgcctatgtntcgaaaatattcagattcacaagaggtttatatttatatatatatgtaaaattggtgtaatgagattggtgattattaggaat

SEQ ID NO: 243343 - DNA, 400 bp, Glycine max
  unsure (1)..(400): unsure at all n locations
ctgaaagagctcataggaaggtcattgcttntttaaagcccaaataagcccttccaaatccacactgggataattttagatagaattatagaaacagtaaaattgaagataatttcaagaaatacgctaatgctgttgaatgtttgcaggttcttagtgctcatttccgcgcttatatacaagcattggagaaactacaactggatatagcaacatataatgatttaattggtgtagagactataagcagtggcctgttcataagagcaagggaaccgctgaagaatcgatctgcagtatttgctcttggggataggattagtatattgaaggtataaccctgtccagaanaaaaaggaaattcatgcaagatgattctctttatgactactaatcaaat

SEQ ID NO: 243344 - DNA, 105 bp, Glycine max
gaatgcgttaaatcataagtatacaatgagggattaacacacggatctaacaaagtagtaggtatatgatgacatcgttatgttttttttctgtggtggagtggg

SEQ ID NO: 243345 - DNA, 341 bp, Glycine max
cataccgctagtcttattgtaatggaaggacatctaagagctaaacgacacctagagaaaagtgtaggcatgatagctgagatatatgatgtgatacgataagtattgggaaatacttaagtcccacatcggctgccacaatccttggagtgcagcttatatatttgttggacaatttcacttaatgtcaattgattttaagatgaaatctaacaataagagatatatagagaaataatcctaaagtgtaggacatctatgggtctcttccttgtcgacatcacctaaatatgaagagagacacatctttccttcttatcatgtctgtttataagagcaca

SEQ ID NO: 243346 - DNA, 336 bp, Glycine max
taacaaacaggggaattaaccagatctatgccacgtactttgaagttccacggatggctaaagagggggagaattatagtatctaaacatgcattctaaatcgtgtatatttggccggtgttaaccacagccacccacaacgacactaggtgctttaatgtattcattcatgttatacatcttgtgggttgggtataccttgtaggcctcgactcaactacatcgtctttaataaatctatattataaaagaaatgatcttctgaaacatcattaaagtattatttacgctaataccattcttaataaacttttagctcatttcacttgcattata

SEQ ID NO: 243347 - DNA, 101 bp, Glycine max
attcaatgggttttggggtttgtggagatattggaaacaagaatacaaattattaatgaagtatatcaaattgtaaattgtaattgatgatgtttaaagat

SEQ ID NO: 243348 - DNA, 398 bp, Glycine max
gtaatcgattaccagggtgtttgaacattgaaattcaaattcaaatgtgaaaagtcacattctttcacaaaatagctttgtgtaatcgattacactaatttggtaatcgattaccagtgatagtttctgaacaaatcaaaagattcaactcttcaaatagtttttgactttttcaaattggttttaagtctttctaaaggtcataactcttgtaatggttctcttgaccagacatgaagagtctataaaagcagcaaggctttgttttgcattgaaacatctatactttcaatttattctctacacaagcaattattccacattgatttctgagtccctttgaacttcttaatcttcttccttttgccaaacattgcaaaagtttctggtttctaacc

SEQ ID NO: 243349 - DNA, 130 bp, Glycine max
  unsure (1)..(130): unsure at all n locations
taacctggcagntagagatttgagcctagatgaggtgaacgtgtaattagagtgtattttaaataataatttagatatgttggtgtttgatttggtatagaaaaactagtgtaagttgttgtatgatttg

SEQ ID NO: 243350 - DNA, 376 bp, Glycine max
  unsure (1)..(376): unsure at all n locations
tctatttacgcagccaagcttacactgttatacctattttcacaactgcataattaaatttagtcaaatttactttagaattttgcataaagtactccagttttgtttagagtttaaattgctcacataaacttcattttttatattctcaaaatttactttaaatgttttaataaattgtgaaaaacttaaatagttcttaaaatgtgggtttgagcctcttaacctcaaaagttaacttatagggtgaggcttgtccttcacttatatactcattctatcttggccttatctctagccgatatgagacttatgttttctccaatagtttaaaatgaaaatattgcaaaaataaaattatacttattcnatttta

SEQ ID NO: 243351 - DNA, 325 bp, Glycine max
  unsure (1)..(325): unsure at all n locations
agaagactccctgactngggcgtaatttaacttgaaaaggctgagaaacgggagaagaagttaggacaatgggatattagactagtaattgaagaatcttatcaatctacgtaaaggtttaagtcaacagacatacgagtaagccaattggcctctttcaatcttcttaaagggtgtgatacctcattggacacatccatcctaacatttccaatatgccaaaacaaaacttgacccttaggtttgtccctgatgagaaaaagtgtaagaaaaatccaaaaaatcttaaggctcataatggaagttgcggaatagatgagaatga

SEQ ID NO: 243352 - DNA, 364 bp, Glycine max
ctcttagagaaaatgatgagaattgaaaatgttgatgatgaacacaatgcaatagctgtgatggaatctgagcgagggaggaatcattcaaggagacatgatggtctatgaggaagatcaaaatcgcaatcgcatccacaacgagatatgagtaacattcaatgttactattgtggcgagaatgatcatgtgcaagtgaggtgtaaacaaatgaaggaggacttgaaaaaattaagagatatgaacaaagatggcgtcaactcccaagctaatgtagtaaaaagtgtgaaagatgaggttcatgcatatcgagaattgaatttttattactaacggttatgtggcttaaatgcaaagtggaaga

SEQ ID NO: 243353 - DNA, 219 bp, Glycine max
gtctaaagtgacgacagaggtcatcaccttcaaaaattgtggttcaagaaccaactataggtcatgatcaggttaatgaatcaatcttagagtcaattcagcaacctatgaacccaatgcacgagacttctataacatctattgaagtacatcgcgttcctgattgattaaacttgatggtcctagatgacacatcaaatgagggtcatcatggcgatg

SEQ ID NO: 243354 - DNA, 149 bp, Glycine max
aaagtttacaagatattttctttattttctttaacaaaatataataattatactaatgtattgaagaatatttatttaataattatatagagttaaatgtgaaaaaaatggatgattatgctatgctccttgtatagaacattttaata

SEQ ID NO: 243355 - DNA, 393 bp, Glycine max
attcagaaaaattagaggttatcttttttatcttagtgagaatgattctcctaagtttttgagtgattcaagaacaccctggctatatcaaaggactttcacaacctttgtgtgttgccctcgccagaaagagtgattctttccttcctttcatcttcaaccttgttctttcaaaccacaattccagaaaatccacttctacccagaattatctcgtggccataactcccattttacacgctcaaattaaatgattcttgagcctaaattgaatttcaaaatgatatctttcaccttaatttggaatcacctcatttggagtcctgtcgcttgagttatagtcatttctatatttctgtcaatcaccacttaacctacgtttatcatctcatc

SEQ ID NO: 243356 - DNA, 290 bp, Glycine max
  unsure (1)..(290): unsure at all n locations
cgaaagcgagagttgcacgctaagcctgcactgcacgttgagcaaattgtctaattcttccgactcttctcaattctttttcttccacattatttcggcaatcttcctctaaaacactccaattcttcttcttttgacttctgataataaaaaattacacagatgttaattctttcgtaatttcattaaaaataatactaaagtgaagaaactattattattattaaccaaaaataacgatcaatgtagctcanatctcagagttatcagtgcgtaatatgacaattcta

SEQ ID NO: 243357 - DNA, 147 bp, Glycine max
  unsure (1)..(147): unsure at all n locations
ccatgatcatanngagcttaattacgaaattatttttagctatatattagaaaactgtatactctactcacttagtctagttctgttcaatgtgttggtacttataaataattggattgaggatgatttatagattgtatgtggtcc

SEQ ID NO: 243358 - DNA, 423 bp, Glycine max
taactgaatagagctaatctttgcttgattccaaactataatgacacctctatggatcataaattcagcatctcacacagactttttttaggtgattttctagaaaaatatagaaatcaaaagcaaaaaatggattagggtgagaaatgataaaataagatcacaattccaatgaattgataagttgagatggagattcctcattttgaattaaaaaattcaaagataagaaccaagagagagtttttctctcacaaaacttcaaagtttaattccaaaatgagtctaaattaattacaaggtcaacatttgtcctatccaaggtctattactaaaggtccaacaataaactaaaaataataaggtcaaacaaactaatgaaagaggcttaagtccaatacaaatgacaagaatcaacaaaaa

SEQ ID NO: 243359 - DNA, 332 bp, Glycine max
cttccttttcgcaacttggattgtaatttcccggttactcttctttttcatacttcctcttggattcttgcctcatgttctacttcttccaccaagtccaaatctaccattcgacattgtctactgcattatatatcattcttcaaagtgaaggttcacgatctctattggaatcatggcatcggtaccatatgtcaacctgaaaggtgtttctttcgtagttgattgtgcagtacaatgataaccccagcgtatgcttggaagttcttctacacatagtctccttggcgttgtttataatctttttcttaactcaataagaataactttat

SEQ ID NO: 243360 - DNA, 334 bp, Glycine max
cccatgagggcgcgcttagcacaattataaaccgcttagcgcttattaatggattacggattagcgcgcgcctttctagctcaccggacggactgaagcagcgcactttgctggatgaccctttgcttaccgcaaatgcacaacttatccttcgttcagattcttactcacactcaaccaaggagtagtgcgctcagctgatggttcgctaagccagaagactggcttatcgagagaatgaagatcagcacttcacaaacgtgcctaattaacctaaaattgacagaaaattattatttaacacacaatatgaacgtactaattatttattacc

SEQ ID NO: 243361 - DNA, 158 bp, Glycine max
acgaagaggaggaagaagagatttctgtacgatattccatatatgctaagtgatattggataatatgatgaaagaaatgtacatatgaaggttggagggataatatgttgtgaaaagtatttatatgaattaggggggggtatagagattatggtata

SEQ ID NO: 243362 - DNA, 378 bp, Glycine max
  unsure (1)..(378): unsure at all n locations
atatttagtcatatactatatatcacaagctgaagtatgggaactccatcgatgtccaaaagccaaggttgtcactaatcatgatctcatatatataacaaaaagagaaaagatggctntcaacctatggctttttctcctttgccttcatttttttgtttgctgcaaccaatttcatgttcaattgggttgacctcgtaagtaatctctctctttttctatcttaatcaattctcttaactaatttcagtgtctgtgttcaagttatccctttgtttagcttaaattcatgctttgcttgttttgcaatatatcttgcttgcactttctttgtaattcttagtaacatatgggtgtgctctgcgatagtactactac

SEQ ID NO: 243363 - DNA, 129 bp, Glycine max
atgcagcttctcgggctggttgagagttttctataagcttctttgagaagctagatccttacgtccacactcctctaaacaattaaatgggaaagcaatactaattataatatatcggctatatgtacg

SEQ ID NO: 243364 - DNA, 422 bp, Glycine max
  unsure (1)..(422): unsure at all n locations
acatcagnnggcgctntcctatactctaaacggttaatgagctcttgtactgaattaaagagaatgttggatgcaactttttcccaaacacgccctanattaatcttgcctattgcaatctctattttcaagcctaaacttcctattttcttaagggatgaagataccagccatttatttttcaaaaaagataaacttaattggcacattgtggagaagtcattagtctttgtaagacatttacaaagatagtcaataagacagtaaagccaaagctattaggagggtagagcctctaatacgaatgaggagtttgtgtttcacaggtcacagccctatggtttgatccanactctttataatatcacatggatttatcagctaaataaagtgattaatgaaattcatnattacaatttgga

SEQ ID NO: 243365 - DNA, 194 bp, Glycine max
  unsure (1)..(194): unsure at all n locations
taaancctctcatncaaacaaataacacggacacacaaaaaactaaccaagagtatttaaataatagcaagtcttattataattactctgtgtgtttttgttgttcacatgccaaaaatactgggacagttgagaattatgcctgcataatttttctaaaaaaggtcaatcctatatatattattgagagaaat

SEQ ID NO: 243366 - DNA, 131 bp, Glycine max
acttgtccaacaaacaacacaacacgcatactgacatagtaaattctaatgcgctaatatatagcgagtgtcttcttttagagccttaatgcttatgactataacaagcctgagagccctttcctatctcc

SEQ ID NO: 243367 - DNA, 415 bp, Glycine max
  unsure (1)..(415): unsure at all n locations
cgcatactattaattcttaaggctatttgatggatcagctctctcttgtcagagaggacaaacaccattctttgagttcatcatcagggatatgtggtgtgatgtcctcaaaaggtgtttcatctacatttcatagttcaaatagtggacagcttgaaaggtcgtctgaaccatccaagaacagcaaaaaaagggccaggccaggggaaagttgtaggcctcggccacgggatagacaactgatccaagatcgtatcaaggagttgagggagctggtgccaaatggagcaaaggtatcttgctggaatctgtttcctaattgttttttgggttgagtgatgatctcagatctggttcatgtggctaanatttttattggaacttcaacagtgcagtatttgatcactcctggagc

SEQ ID NO: 243368 - DNA, 410 bp, Glycine max
  unsure (1)..(410): unsure at all n locations
taacaacantattttttttgattaccagagatccgtacgaaattaaaacatgttttcatgctctattttataagcttgaattttaagctctatctaatttgaactttaagtccattctatagttatttcaaattccaaattgttgtaacttatcaaaaatctaacatataatttatatattaaaaaatattctgtatataaattctattataataaaatttatacattgaacaatatgtatctattataaacttgttatataaaataaaatattttgctaagaatacatgcttttacgatttcatactatccttcggagctccattctaattcttatatcattgactattgaggatatttaggcaattcctcatatcacctattatataaataatgttattttgaatctc

SEQ ID NO: 243369 - DNA, 307 bp, Glycine max
tatctgtatggggacctgcagaagaacatagaccacagactcttgcaacaggtgcagatttctgattcatggcgagctaagttactaggttgaccaaggcatcaagatttccctcaagctttgtattttcagtacatgaagatgaaatctgggccacctcatggactcctctaatgacaatagcatcatttcttgatctacattgttgggagtcggaagtcatcttcatcaatcaactcctagcctcagcaggagtcatatcaccaagagctccaccattgtagcatcaatcatactcctttcatgt

SEQ ID NO: 243370 - DNA, 113 bp, Glycine max
  unsure (1)..(113): unsure at all n locations
aacggtttggaaattggaagtatccagcactgaactattagtnttgcgtatatgagatttgtatatttaaagtgtgaatttaattgtcttggaggagtatcggtaatcatata

SEQ ID NO: 243371 - DNA, 354 bp, Glycine max
ttcattatgcgatataatttgttgtaacccgttaataaccaattaatattatcaactactcgtttggttaagcaaggaaattgttggtccaacaaaaatcattgacgcgtgcagcatacatcattgtcataattgacaacacataatgacatgcatgcgtattacagtttgagcgtgacaacacattggctaacttcagtacacattttgaaactagcagtcgctcgacaacacattggttgacttgactacacattagcgacaacacattggctgacttgacaacacatttacgcgtgtctatttttttgtaaacaaagttaaacaaaggctcggtcacaaccatctatatat

SEQ ID NO: 243372 - DNA, 386 bp, Glycine max
ttgatcacattcaattcatatatttgtttgtgatatgattcatacaaaagtttgtttgtaactgtttttagaagtacattctgttttgaaaccaattcacccccatcttggtttattgagctccatcatcttttttcaaatatttgttttgttttgttgcgtcaatatggtgatgtttgttctctcaactctcttttgttgagtatttgtctctatgtgtacttagaactagttagaatgtcaatacattttattgagtttgatggtttgtgtctagatttactagttgaatttagagggtgaatggagaaagatagaataaaatgtcttagagagaattgagaataagaatgctttcttagtggaaactatttccttaaactata

SEQ ID NO: 243373 - DNA, 119 bp, Glycine max
acctttaagtaacgaaaatctgttgggttttaaagagaccacacatccataatgtggtatacccactgaggtattttaattataacttggagtgagattattattggttgaaagtggtt

SEQ ID NO: 243374 - DNA, 380 bp, Glycine max
  unsure (1)..(380): unsure at all n locations
tgaattncaagttatatgtacctgaatttcaagtttctagcattccaaactttatagagataaaatccttttggaatctctagagatgaatgaattgcctaatttgatggatgaggtaaagaataactaaatgatgaaaatactctttgacattccaacaggatcactatgaatggtttgcaatacattcacaattgtctccacacaaacacacataaagaaaaagcatattgttggttgatctaagaactctgaattggtatgaaactttatattctaagatagaggaaacttatcctactactaaccctttgttcattatgtttgtgtcaagaaagatattcatgtggaactaaccaatcagaattatgtaagaactc

SEQ ID NO: 243375 - DNA, 51 bp, Glycine max
tgggcggaatttgattaattgtatgttttaggaaggtagaatgtaaaacgt

SEQ ID NO: 243376 - DNA, 161 bp, Glycine max
  unsure (1)..(161): unsure at all n locations
gcagcttacaccatgacattgttattttgnttttttaaggaatcataaattatttatcttatttttaaacacgtttcttatatctcttaaaaactgaatcactgtgaaaagtagcttatgggaatgttttgggagctgatacggagaagacgtggagacaa

SEQ ID NO: 243377 - DNA, 338 bp, Glycine max
  unsure (1)..(338): unsure at all n locations
actatagagattntnttttttaaatnnanntatgcaatnngnaagactgcgaaaaacattgcaaaacccataattgccgaacagattcctaaatacaaaattgattctgttgagtttgaaacactcacattggggtcgctgccaccaacatttcaaggttagtagatctggataagaaccttntagttgcctgcgcagatacttagggtattgccaatgttttgtgaacagtgttagctattttcacggagtttctattctattgtttacgaagggataaatattggatttggatttctgcagtcagtgagagagagaaatttgaatcttaaccttta

SEQ ID NO: 243378 - DNA, 402 bp, Glycine max
atgaatgtgttaagacaaaaagtcagagtaccacttattgatgaaagatgatagaatttcgccttagatggtctggtcatttgagaataaagacgaataaaagctccactatgaagatgatcaaagatgatttgatactaatatgctggatacctactaaaaaatgtaagaatctgttacatcccataccaatccacatcttctctttacttattccactaaataccgaatgtctgaagacagagcactagctacaccaactgcccacacatgcttacacaagactattgtattacctctgtcggactgccttctacatgcacgagatgccaaccgccacgctgttcaatttttcctttatacaagttgatgctttacaatacgttatagctactgagtcac

SEQ ID NO: 243379 - DNA, 437 bp, Glycine max
  unsure (1)..(437): unsure at all n locations
ttgaatgctctattcaatggagttgacaagaatatcttttgactgatcaacacttgcacagtggccaaagatgcatgggagatcctgaaaatcactcatgaaggaacctccaaagtgaagatgtccagattgcaactgttggccacaaaattcgaaaatctgaagatgaaggaggaagaatgcattcatgacttccacatgaacattcttgaaattgccaatgcttgcactgccttgggagagaagatgacagatgaaaagctggtgagaaagatcctcagatccttgcctaagagatttgacatgaaagtcactgcaatagaggaggcccaagacatttgcaacatgagagtagatgaactcattggttcccttcaaacctttgagctangactctcggatagggctgaaaagaagagtaaaatctggctttcatg

SEQ ID NO: 243380 - DNA, 155 bp, Glycine max
tgatcaaatgattgtcggtacaaatgcaacgtgcaaaaggcgcctctcaaattacaagaaattaaagatatgtctgcttttacaagtcgtggagttacacaaaaaggtgatattttcatgcagtttcagggatgcctcttaagttcgtacacata

SEQ ID NO: 243381 - DNA, 149 bp, Glycine max
agttacctaacacagccaccacggtgttttgacaaggacactgtctcactatacaggcccgccattaaaagagaatgaaagatcgtttatgatgacctgactggtctctacgactctacctatacacggactgatacaaactgtgaatt

SEQ ID NO: 243382 - DNA, 139 bp, Glycine max
cgtgacattctaagtggagtactgggaaagtttgattagaagaaattataatataatgattaataagattgtattatttttttagctagaatttaaatttgaacagtattattataagatttatattagttgtttagag

SEQ ID NO: 243383 - DNA, 331 bp, Glycine max
atcaatcttatctgcggaatcacttcttactaatgaagaggctgtaatagctgctgctgcatctgaagctcttgctcttgctaaagcagctgtgaaggttgcaaaggatgcagttttactagtaaaaaagaagcctccagcagaagcagagtataaatcccatgtttcttccaaatctgatgatttacttctcaaatggtttcatcaaatggaagcggaagatggtgtagcagaagagtccatgggtgctggagcagaaataatggaaggtgttgacataagccccagcgaagaggaatctgatctagagccttcccatgaggaacttgag

SEQ ID NO: 243384 - DNA, 54 bp, Glycine max
ccaagttaatgaataggtggctgcgcgtcgaaaatgctttctttctcaacgggc

SEQ ID NO: 243385 - DNA, 369 bp, Glycine max
  unsure (1)..(369): unsure at all n locations
tgcgtctttntaggttacttattggtaatcgtcaggtatattataataaatcatttagtttataaaatataataatatttaaaataataattatctcacttcctactttaagactatcatattctatagtattttcatagttggccattacatgtcactattcaagattgataaagatttctatgggcaactcttcattgatacttgcgaactcatgtgtatgtttaacttctttacactttctttcatttgatatatatcatggaatattggtctatgttgcatcgattcataaagcactcggagaacattgngaatgcattctgattgtatatctagatgaaatcatcttaccaatgtcatctgaaa

SEQ ID NO: 243386 - DNA, 123 bp, Glycine max
tcatggaagggaaaaaatacgttggatagctaaaatcggggaatgtggctgtgtgaggacaaggagaaaagctttttttaattttaaattaagatttatttttaatagtaaagtttaaaaaaa

SEQ ID NO: 243387 - DNA, 365 bp, Glycine max
  unsure (1)..(365): unsure at all n locations
cttctcagcattattgggcataagagagcgtacctcgtattcataatctcttattcctttggcaaaatcatcacacaagttctctaaaaggatccgtgtttttctctctttctcaagatctctcagagaaccactgaatgaagacttcacttcagaaagctccctagccagcctccggtgcaggctttctgaatgctttcttaacctcctttcatcttctatctcttgcatgacagattgaattgcagctntacatttgtcatgttctttgttcttcctaacaagcttctcctcagctatttgntccattaagttctccatatcacgcttattcaatngcttttcttgttgtaactctttaacct

SEQ ID NO: 243388 - DNA, 136 bp, Glycine max
ttggtctcttatatatactggttccgacatctgatccttgaatatatgtaataattgaatagaacgaaaataacgtctgaaagatgatgagtgtgacatacgattttttataataatggattttaacattttttgt

SEQ ID NO: 243389 - DNA, 407 bp, Glycine max
cacaatttataagcaagtaataatattgagtctgagatattttccgatcttaggctgaaatgtaaatagcaatggctatgattatagcctcaagcattcatattattagcagcattgttttatctttcctttttgtttcaatatctgcattactttatccacttaaactgaccctgcttgtatgtttctaatgatagtgaacattgattccatgcctaaaatctgaaaacccttcattattatttatgttacgtaaccaaaaatagtttatatgtaattactaattgagttacagccttacaggaatcacatgacatgatgaaacacggcaatacaaattatatatacaaccaattacagctaccacaaagtgtcgatcacgtgaaaataatgtaatatttccgatc

SEQ ID NO: 243390 - DNA, 345 bp, Glycine max
  unsure (1)..(345): unsure at all n locations
aatgccatttatgatttactactgaagactcacttaaattaagagtgagccaatcctctagagtaccttgaaaaaagaaaccgttattgaaaactggtatgacccctctccccatgctcctcacatcttcaccatctctggtccttacttacataatggacataaaatcacttgtaatttttctggttcacctagccaagttagtgcccaaagcaccacgcgcaacattccatttccattagtgactaatattttatcgaattntgttcaagttaataagccaatatgaaaattattactactatgtcagtaaaaagaaaggagaaatacgtaaagtcataaaga

SEQ ID NO: 243391 - DNA, 295 bp, Glycine max
aggcagaagagcatcaacaacctaccgacccacccacccgacggcagcccccaccactctcacaacccgattaacccaaccaacatcccggatccaaaaccgcggcggcccccggacccacaaaactgaacgaacaaaccggcaactatacacagaacccttcaacaccccgcacaaactacaaccaacgccgaaagagacgccaactacctgccccacaacaaccgatcagcagaagcgaaaacgaataccaaggaaaagagccgagcacaccaagcccaccactaagtcgacg

SEQ ID NO: 243392 - DNA, 364 bp, Glycine max
  unsure (1)..(364): unsure at all n locations
aggatatgggctacgggggagtacgtgagctcagttggacgtggccaacacgggatggtgggtttatgcgcgcattgtggatgtggaaagcttgttgtggaccatctgccgaccaccacctagtaccacatgcgatgggtaccccataatcctacaagctcgagatgaggaagtgttgaagggtgaaacttcctgcttttattgttgaccacagagtggtacctggagatatgtcccggcggtcatgagaccttgcggacgtcaggtggggtgttattgcccaaaatcaagcttgacctatcttgacccaaaccgggcatagntcgctagtgagaacctgtgatgacctaaccaggcgactcct

SEQ ID NO: 243393 - DNA, 379 bp, Glycine max
ttactaacgttttccccatggtgcagttgagataaaaaatgaagttaccgacaaagtattcaaagtgaactgtcatcagctccagctttttcatgagagccctcaagtggaagagaagcttgtggtggacctctctttggtctagccaattttatgtgatgatgtaccttgaatgacgcttgaggagcttctatctcccttatttatatgttggctctttgttttcatttcattccttgcttacatttaggagtatgtgcacttcaagtgtggggggaagggtttagaaaagaaaaaaatatatggctcctctgcttcggttttttcttctagctgctcttttctattcctggtggtttctggttctcgattctatttt

SEQ ID NO: 243394 - DNA, 397 bp, Glycine max
  unsure (1)..(397): unsure at all n locations
aaccactatattgcgaaaacacaacttatattcttaaccgaagcaatcgatcaaataaatcttgttaatggaaataaaagagaatttcaaaaacttacctaccaacatggaacatgacgagttttccctctaatgtaaggcacataagaacacaatatggtgagcgttctgtcctttcctccacaccaagttgaaccccaactttttgatagattgaaacattatctatgcatagccctaagagcaaattatcatcaccattttttggaaaaagtgaatttacaaacttacataagtgtatatcaaactcactccaagagatagattaagaaagagtcaataagtattaggatgctgctatatatatgcatgcattattntatgatatcaatgcttc

SEQ ID NO: 243395 - DNA, 442 bp, Glycine max
  unsure (1)..(442): unsure at all n locations
cgcggcatgcaagcttatggngcatcaaatcggacgcagttttagtttgtttattcaaagcgnttatcataagcctgtgtacatcctgtgtaaaactctgctatatcagagagatattgggaaacgcaatgagtgggtaacgaggttgcaaagccaaattggaattacagggaagttctactggagagctttgattaaaattagaatggggattggccttaaattagaatgaaatcaacggttaagaatgggcgtaatttttgtaaaatcctcatatatatatatatatatatatatatatatatctgacattccttactcttcgttctgctattatattatatcattcattatatctactatctttctcttattccttgctctctagggggcgatgaacatatacgcatccacaaatgctatttcacaattaattgctgaa

SEQ ID NO: 243396 - DNA, 392 bp, Glycine max
tgaaccccatggctgaaaatcaccattgaaagaccttagtgaagctcaaagatccaacctccacagaagcttctcaagcaagcttacatcactaggcctacccagatcagatacatataaaagaaaaggtcctaaactcagagtaatcatctctaacttcccgcctagtgtggaaactacacaaaagcataagtcagcaggcatccacgaataacaaagatgtcgaaggaagtgatccacgcctctggtcacgttgggtatgcaccacttccaattgcattcatcctcaagatggagggtcgacctctcgctagacatctgatcctaaataaacacataaggagtgaatcttcccacttagtcaactagacacacaaagacttacacaagat

SEQ ID NO: 243397 - DNA, 378 bp, Glycine max
  unsure (1)..(378): unsure at all n locations
gaaactgggactgcatctagctgaaggataacattagttgtcgagtcattttttctgtgatcgactcctccagctagtccttgatttgttgagtcagctgctctagctcttcgcgagccctagaggaagacgtgcaggaggtccttggagccaatccaaagtattgcttgatcgtcacaccagctccggcaacacgcacacgaccggggtgttctggtagcccaatggcaatagccagtacatcctgacatatatgggcgataaaggaaccctgtgacgcctcgctctncaataaatcctcgtaagaaacatttattggtttactccatcccccaataaacctaaattattacaattattaattgagagtgagttaca

SEQ ID NO: 243398 - DNA, 367 bp, Glycine max
acagatacagatctaaaagtgttcatttaagctacatctcaaaataagaagaaaaaaaactaagggtgcagcaaaagggtcttctagcaaaagaaacaaaagaaagatgaagaacttacctattacttttgcaagaagtctagacacatgaagaaagagtgtccaaggtacgttgcatgacatctaaagaaagggaaatctcttgctcttgtttttttttctaaagttaatttagcttttgtacctaaagatacttggtgggtggatgttggtactactactcacataagtctaaccatgaaggcgtgcctgtggacctgactgtcgagtgacgatgaaaaattcatctttgtgtgtgactacaaaa

SEQ ID NO: 243399 - DNA, 398 bp, Glycine max
  unsure (1)..(398): unsure at all n locations
taattttttttaaattanatcttttatactcatgttaacataataaaaaaaagaaacatgaagaaaaaggactaagtttccataacattaacaagataaagtttatacaatacaatacccaaaaaagttatatatatatatatatatatatatatatatatatattatgaaagaatgactaaattaactctaaataatatatctaatactatatgtatgactaaattttaattaaaatatttatttaactgtataattaataaatttctaatgtaaaatctctctattatattttgtaaaactataagtacattttaattaaattatcttactctatttttcttcaaacaaaatttctagtccaaactagcttcatattctacagccaattaatagag

SEQ ID NO: 243400 - DNA, 387 bp, Glycine max
gagaagggaggagcaccaaattgaaggaataaaagagggaaagaagtgcaatttcgaagtgtatctcataagactttcattcatcaaagctacaacaagtgttacacatgcttctatttatagactaggtagcttccttgagaagtttccttacgacaacttccctgagaagctttcttaagaaaacttccttgagaagcttctttgagaaaacttccttgcgaagctagagtttacctacacacactcatctaacaactaagctcacctccttgaaaagctttcttgagaagctagagcttacctacacaccgctataatagctaagctcacccccgtgacacaacaacatgaaaataccaaaaaaatcctactacacagactact

SEQ ID NO: 243401 - DNA, 406 bp, Glycine max
acttagagaaggctaaacctgttggccttcctgagtctcggcatgatgacagagtgggtggtaagggttcaagaggactacatgtgatcactccaagtgtagaagatttgttacaagttcacttgtatggtttgaacaacagtaatgaaattttgccatacatagctaagcatgaagctttagtcaaacagaataatccgaaaatgtcaaagaattgggtgttgaaaaagcataacaagactttctgtgattggtttaaagatacaatctttgcagatgagaatgcttcagaaacattaagaaagctagcagatgggcctaaaagaaatgttataacctggcaaggatatgacataaataggtattcattctacacaaaagcacaagatgacaaaagtacaatgcc

SEQ ID NO: 243402 - DNA, 375 bp, Glycine max
ttcacgaatttgacccattctttgcgtctataatatgtactcaaaacatgctaaaaaataatgtaatggctttgtattatttatgtacatacgaaataaaactaaaatatatatttttagaataaagatggacacctctactctatttgacttttgagagataaagggagagaaaggccagacgcgaattaataagaagagagagagaaaatagtcaatgttaacaaagtgtttgaactctgaagcgataaaacgctcgcatatagtactcactttttatattaaataaacaagtcctaagtatctaactgatcagatgagtgttacatgaataggttattggacacagcagtcattgctgacccaaaagataaa

SEQ ID NO: 243403 - DNA, 382 bp, Glycine max
  unsure (1)..(382): unsure at all n locations
tgaatccacacttgagcaacacgtgacagccttccctaggtttctatgccgaacatttcttaatgctttacattcagccacaaaacttttgttagaccctttcttttgaaggtttagaacctttatagccaccaatccttctgttgaatcaagtcttcctttatatacagagccatggcttcctattcctatcaagttctgagatgagaatccatcagttgcatggtttacgttctggcatgataccttaggaagttgatcaattgctgaattagcagatgactctttcttccttttccttatcaaatacataccacggatacatgatagtctacgaagaaaacaaccaaacagattanatcaccactaacttgaaatatgg

SEQ ID NO: 243404 - DNA, 452 bp, Glycine max
  unsure (1)..(452): unsure at all n locations
gcaagctttcagaaccaggaagtgtcacaatactttgntttattggtgaggctgcagcacgcaaggctcttatttacttaggagccattattaatttgatgtcgctctccatgtgccggagacttggggagctggagatagtgcctacttggatgaccttgtagttagctgatcgctccgccaccagaccctatggagtgattgaagacatgctggtccaagtcaagcatctcattttttctactgattttgttgtaatggacattgaggaagatgcagatatctccttaattttggaacgtccatttatgtctactgccagctgtgtagtggacatggggaaaaaaatgctacaaatgggtattgaagaccaacaaatcagctctgatctgtttcatgaagaaagagatatgtcgaaccacaatgtatgcttactggtgaatgtgatggat

SEQ ID NO: 243405 - DNA, 350 bp, Glycine max
  unsure (1)..(350): unsure at all n locations
tatttactttttatacccncttttgacgtgcttaagccattttatttaagtcatttctcgcttaacctaaaaataaaataaattctcaccgatcgtttgaattgtattatccgttaacttcggttaaaatgaattccgatcgttcggtcgtgccgtaaccacgttggaaatcaaaaaaagaggtaaaataataatataataataaaaaaaaacgtcttttagtaaaataaggcggaaaatcaatcggacgttttctctttgggatttctcattgttaatcgaattgactaataactaaagtgaaattaaggctaagatcaactccgctagtcaagctcgtccataaaata

SEQ ID NO: 243406 - DNA, 373 bp, Glycine max
ctactatgaccgacctctatatgatatacatccttatggatgcagggaacattctgttgggtagaccatggcaatttaacaagaaagacatccacaatggtctcaccaatgaaataaccctcacccatgtaagcaaaaagctcaaacttgttcccttgacaccttcacaagtggttggggatcaagtacaaataaaactcaaatgggatgaggaaaataataaaaaaaagaaaagaagaacaacctttaatggttaaggaggagtgtaaggaggtaggtgtctcctccaataggctagctaagaagaaaagtcattttgcaataaagacaaacattaaagacacttcccttcttagacaaccctcacatattc

SEQ ID NO: 243407 - DNA, 457 bp, Glycine max
gcggcatgcaagcttgaaaggtcaaaagaagaccatagttcattgtttggatcgaatgaagaagttaacatgctcactagatgaagaaaaatacttcaagccatgagaagtaatcaacaactaaaggacaagaaaaatgttgtagacatgacaatcttcacaatgaacatgacatgaagaaccatattgttgcaacacactcaaaatggaatttcatcaatagaatgagttcatattgttacaacacactcagaaccatattaggaattctagaaatgcaattgagtttttcttggtggctatggaaatcttgaagtaatctcttcaactttcatgaataagtcatggtttgatacaacctagatcgtggataaaattgagcctgaagttgcaaacgttgtgcttggacaacttgatatgtgtgcaataatttgaagacttcttgagctacagaagt

SEQ ID NO: 243408 - DNA, 367 bp, Glycine max
  unsure (1)..(367): unsure at all n locations
accatgatgcttattacgcactactatagatcttcgcttgcgggaagtaaaaattaacaaaatgtgaaagaagcatggaatgttaacaatgcacataggaatgggacataaagtgatttggacgtcctaccgtgcgcagaaaatcaatatataaacttcgacctacgataggggaggaatcataacaaagaccataagacagctttgctgttccttanatataagaataaccatgtgaagcgattcaagccaaaatttgggaatagtgttatgtcggcaataataaacattggctactggcgactaaggactaactaacggaagcaaagaacaatcacaactatgaaccacaaagccggattgaact

SEQ ID NO: 243409 - DNA, 460 bp, Glycine max
tgcaagcttggaaatcaggtgaccagtggttgtggattttccagagtcgacatggccaatgaccacaatactgatgtgaacctttttcttacccatcttccttaaatctgcaaaaatccagaaaaaaaaaaagttgtcaaaaccataacacatgaacacaccatataaagtaaaaataaaagtttaacaacattaagacctttgtcattacaaaacctttcataagcataaaaagattaagatctaaatacccaccatacaacaagcccaaaaataggtatgctcaatcgtaacgcatcaaactcagtatgattccaacagataaaaaaatagacataacagaatttatggcactcccatacataagatcgagataaaacaagggcatgtttagcacactgtgacgtatatagatctattcatcagtaaccacaaaactcgagcttgaaccgataaaagt

SEQ ID NO: 243410 - DNA, 407 bp, Glycine max
gttcgcacatcgttcgcgtggggatatccactcaacaaggtttgaagtacacgacacctctaatcctataacgcaacgtggcagacaaaagtgagcagttaacttgaatgcgcattattgtcaatgcggaaagtattctgcgcttcactatccatgttcacacattattgcagcttgtggttacgtgagcatgaactactaccaatatatagatgtcgtttacacaaatgagcacatcttaaaagcttactctacacaatggtggcctcttgggaatgaagcggcaattccttcttctgatgatgcatggacactttatcctgacccaactacaattcgtgcgaaaggtccgcccaacataaccaggataaggaatgagatggattgcgtagaaccatctgaccacc

SEQ ID NO: 243411 - DNA, 327 bp, Glycine max
acgaaagaaagcacaacggcgtgataaaaatattgagattatgttgaaagtgcgcatacaggaggtgaatgttggaaataaacctcacaaccacttcactaagcttggttgggcaaatattgcacaaaagttcaataaggcaacaaatttgagatatgaatataaacaattcacaaataggtgggattctttgaaaaaggaatggcaattatgggctaaacttattgggaaggacacaggtcttggctcggatggggagaagaaaatcgctgctgctagtgatgaatggtgggaagccaaaattcaggtgtgtattattcaacgaaa

SEQ ID NO: 243412 - DNA, 306 bp, Glycine max
atccccgcacggaggccccgcaataaggagcatgcatcacccacacaacactggcgaaatgtccccctgtacatgtatcgacactccttctggcgaacaagactgctacgcgcttcgctgggtgccttgcccaaacgaccacgcatgccatctcggcagcatcaatgtgaacacctattaaaaacaaactctctccgaacatactctcaaaagaaacccaaacgggaaactacgctcgaaaactaatcccaccccgggcaatgcgccaatcccggatcaaacatcttttatgacatccacttcaca

SEQ ID NO: 243413 - DNA, 395 bp, Glycine max
acaagttttgaataaaaatcaaaatatgcaactcttccaatggtttttaggttttctcaaggtcataactcttccaatggttttcttgaccagacacggagagtctataaaagcaagaccttgacttgcatttaaagaataacttttccaatttacttttgaatattttcttcttcttcttctttttcctttgccaaaagctttctgagttttctggtttccaaaccttgttctttcacagaaaacaaaagtttgctatatctttttattctcttgttcctttgtaaaaaagaattcgacaaggactaaccgcctgaattctttctgtgtctttcttctcccttttccaaaagaacgaaggactaaccgccttaattcttttgtgtctctcttct

SEQ ID NO: 243414 - DNA, 379 bp, Glycine max
  unsure (1)..(379): unsure at all n locations
atgcaaaaaaaaaattaaaaaataatattgacaaacgactctcagttatgtttttagtgttttgctccctaaatgacaaaaaaaaagctactgtacaacaaatcagccatgtcgaatgctaattttcgttgtaaattttatagtattaaataaaaacggcctataaggtatgtttaaacgttacaaattaaatatacaaaatctattatcctttattcgtgattattaatattttataatcatactttggaacgaaaaaacctagatatctaactccctcaaaactaaaatagccgtactctaattctctataaatacataaagtatctccagacaataacactagaactcaactggaatagataaatattncaatatt

SEQ ID NO: 243415 - DNA, 349 bp, Glycine max
tttcggaaaattgcatcttgaggtgcaagaaagaaaaggactacctatataagcatgaagtttagccgcttcaagaagctggaactcggctttgatatgcttatgaaggatagggacccaggctattaaactagtgttgagcacgagtaatgttataaactattgcgcaaattatcttcatgtattcattatcaatagaaagggttcaatccttagtcgacaccctgatattcaaatatctgaaacgtgtaatttactaagatgaaattcaatcgtcacgatatttcatctatgcaatagtttgttcgatgttatgactctgctgacttgatcccaatcacactaaatg

SEQ ID NO: 243416 - DNA, 345 bp, Glycine max
tgcctacaagattgacttgcctcacgagcataacgcaagcgccactctcaatgcgtctgatttatctcttattgatgcaatggaggagccttggatttgaggataaatcctttttaacaaggagggagtgatgaggacacaactaagggcaaggaccatgaagcacttaaagggcccatgaccagaggcatacttaaaaaggcccaacacagtgatgaggacacaactaagggcaaagaccatgaagcacttgaagggcccatgatcagaggcagacttaaacaggcccaacctgtcatagagacacggctgatcatttgtatagctgccattgatgatgattga

SEQ ID NO: 243417 - DNA, 138 bp, Glycine max
caaacgacaagggcaaagccaacgaaaacaacaaaaaaaacaaaggaaaaaaggacaaaccggacggagcgggcccgaaaaacagaacagacacagaacagccaaagaagagaaaaaaaaggggaagaaaaaaccccc

SEQ ID NO: 243418 - DNA, 346 bp, Glycine max
taaatttacctggtgacccttgtgtcagcaatttgaggctgaattcactctaagaaggaggggatgatgaggatcaaacaagtaacatggacaatgaggcactacaaggacttggtgcaccaatgacaagggcaagtgcaaagcaaaggaagccttacaccaaatggaggtaacttcgattgaagtagaatcatatctagattaattgaagccaaaattggttaactgcttaattcaacttgaggaataaagatggtggactgatttggatgacaaggcccatgaaaatgtctacttcttattacataaagtcttaataaatgtttgggctgcactactctggttt

SEQ ID NO: 243419 - DNA, 346 bp, Glycine max
cggacgcgagccacttacgacagccgccgatgaccccattactgcttcccctaagctctctgtcctttcttcacaccgcatcacatgccttgtgaactccttagagtacccccccatcggggtcactgaaaccccgcgcgatgaaaggcgcgacgctttccgctgatggcacccctttcatggggtagccaagctgccttacggcgaggacgggactataattaatacaaccccttgttccatcaagggaacattcggacatcctccgcacgaagatagaaccccgattcttccttccttctagcgagggaacaaattaacagacgcccctccatgctaggcaaga

SEQ ID NO: 243420 - DNA, 335 bp, Glycine max
gaccatcgaacctgtccaaaacctctcgaagaagagaggaatcttctccaccatgtccttcgtcataaatgggttgagcacccattttcgcccaagagccatcatgctctttacggcatccaaaggatgccaccacagcagcacctattacaaacgatctcttgattggaacataaggttcacaatcaagagggatgttgaagtgttgaacgaagagggtgactatgtacggatatagcactgaaccatctaatcgcaatgccttatgcatgccatatcggactaaagttgccccaaccaatctgtccgcctttatgaaaagcccacataacaat

SEQ ID NO: 243421 - DNA, 337 bp, Glycine max
  unsure (1)..(337): unsure at all n locations
attgcctttacttgaatacacctttgctcggttctctatttggttcttaaccctatcatgcaacttctttacaaactctgacctagattccccttctttatgtataaaagaagtgtccagtgggaggggaatgaggtctaacagtgttaggggattgaacccatagacaaccttaaaaggggactgcttggtggttctatgcaaccccctgttgtaggcaaattctacatgaggaagatgctcatcccaagacttatggttgccttgcacaacacnccttaaaagggtggataaagacctattnactacctctgtttgcccgtcagcttatggatga

SEQ ID NO: 243422 - DNA, 348 bp, Glycine max
ggagggaaaggaaatggttattctaagacaggtaagcatcttaatttggatgctgtgtttaaccttgataaggttttcagtgcaagcaatatcactagcttggttaatggaagcttggagagcttgagttctccaaaggatgagagctacttcgaacccatttctgtggtgatgtttccaaaagcaaattacaaatataccttgaattccacagaagttaccaatgagttctcttctgggagtgatgctatgaagggcggtttcgcattgagttcattgagtttttgttctccgtccctctccagggctattagaaggctcccattagagttctcttctgagtgcaat

SEQ ID NO: 243423 - DNA, 406 bp, Glycine max
  unsure (1)..(406): unsure at all n locations
cctgctggttagcgagcgtccgctaagcgcaacactcatgggctaagcgcgaggaagactctggaagaagatgagctgtacaggtttgctaagcgcaccgcttcatctcactaagcgcaccgcttcagttcatctgctaagcgagaaagacacgcactaagccaaaattcactaatgtgcactaagcggtccataagtgtgctaagcgcacgagcacgaacaaggccacttatttaatcctgaaatcatattttagagagggagttcggattgggatttagagctttacatgtctagggtttctagagagagaaaggtccaagttccatacagatttgagagaatttgctgtgtgaagatctgcaagaccagagcttgaagcacgagcccgctngagagcttgaga

SEQ ID NO: 243424 - DNA, 313 bp, Glycine max
accaaaccaacaacctcgtgtgccatcgtatgtcgacaatcataccgaacaaaatttagcaccaaaacgagctctcaccaaagatattgaaagatcaaactttacgaaacaaaaggcttttgtggatataagaaggctaaaacgtttacatgacccacggtctgctatagattcacagcagcaagttgaaacctccagcctctacctaatggaagtcctgctctgcttcacgcctcattctgccctttcaatgaccatcgctgacgctaccatactcactttcccgcttcctcatattacatggtgaacattc

SEQ ID NO: 243425 - DNA, 364 bp, Glycine max
  unsure (1)..(364): unsure at all n locations
tatacatataaaacagtcccacaacccanagctcacaaaaccatgctcatatgtcgttgaggcatttcaccgagcacttggtgggcgcatatttaggcacgaatatcaagagaatggggacaatgtggcacgcgccattacttcagaatacaccctaggccaaggccattccttacaacccctcaattcaacaaaaacaagcaacaatttgaggataaatccctcacgtttcttagcaaacacatgcaatttagagcaccaaaatacatcaatggaaagctagaaagcccaagaatgaggtacttacttgttggagacgaataatagagcaaaacggaatcaaaaacgcgaaaaatggtgacct

SEQ ID NO: 243426 - DNA, 373 bp, Glycine max
  unsure (1)..(373): unsure at all n locations
cgctttctaggcaacttgagattctaacagaaacacttggtaagttgccaactaaactgtctattggtgaacctacccattcttttgctttgcacgctacaggttgcatcatctatggtgaggctcatgaaacacgccaatgcattcccattgaagagaacactcaagaagttcactatatgggaaatcaacagagacaaggatctactcaaggaggatcntcacgcttccaccagggttcttataaccaacaaggacagtggagatcacactctatcactcaattcaaccagccaccaggcggaccttccaatagccaattcacaagagctaaatctttacacgactactaaccggaggagaccttgactac

SEQ ID NO: 243427 - DNA, 394 bp, Glycine max
  unsure (1)..(394): unsure at all n locations
cgtccatgaacgatacctactctccttggcttgctaaaacttccgccttctactccaagcaattcctcaacattcccgctacttcattgctactttgcttcactcgatctaattctcattatgagatcctgacccctcctgctattctcaccatacaaggatactacccacaaaagaggcatggcttcccttctcntatcgagcatcctaagatcccatcaaactcctctatggttagtgctaacggaaagtccccaaacgaaagcatctaacaaattgctcatagcattcagcgacagatgtaatggcctcaattgacacttctactattttcagatcctagatctttcacatagcttgctaagagatttacctcgaacttgatccatctact

SEQ ID NO: 243428 - DNA, 324 bp, Glycine max
cactaatagctctattttggccaacaaatcactcagtccaacactaatttatttacctcactaaacacattcttaattcacattaaaaaaaatggcagcgaacccacattccaaattagaagcctataagctcaaacagaaatgtttcacaaaaaaagtattacgcacaatcagcgaaacatactctactaaaccgctctatttcggtcaatacattatccagccaaacactaattcattcacctcactaaacacattcttaattcacatctcatctctttcttagtgaactcacatttcaaacttgaatcttggatatgaaaa

SEQ ID NO: 243429 - DNA, 355 bp, Glycine max
ttcacagtattgtgcctctttttttttgggcattggatagaagactccaagtagattgggccagagattcaagggaaggccctacggttctcatgagccttagggtagatttcgagcccatgggctaagtatgagcccgcttatctttgtaaatattacaataggtttttccttcgtttgggccttgtattttggccattctagtagtatagggttttagccttgtatttcgaggcatgtatccaatgcatcaaaacgtataccaaaaataaacataattaaaataaatgaaaaagtggtcatttcacagtttaaagggattgatatccaaatcacatgggtgactctaaaatga

SEQ ID NO: 243430 - DNA, 407 bp, Glycine max
  unsure (1)..(407): unsure at all n locations
gtggcctcatacgcgtcggtatcatgcgccgtaccgttctctctctcttcctccctcttcccgtttcttctttatttttaaagccttcccttctctttttccattgcagctagctgagaagcgaaaacccattattcttgttattaacagagtcacaaagaatcaaacttttctgttctctatagtaacgttctggtaatgaccatttctgtttctctcatatgttgttttctacttttacttttgatcatacacatttcaagccctgctgatatatttaaataaaacaaagagcaaaaaacaaaattttcagttagaatggattgtgggctttctcctttcttttttttttttttcggtttcattncgagaagcggggttgctgttttataatgtcttgttttatc

SEQ ID NO: 243431 - DNA, 345 bp, Glycine max
acaatgcctcagggttggacctcctagaagatatggagtcaccaccacttttaacatttccgatttaatcccttttgtaggcggagctgatattgaagagggggaaccaataaatttgaggtcaaatccttttcaagggggagggaacgatgcaatccctcctaagaagggaccactcactagagccatgagcaagaggctccaagaggatcgggctagagctactgaacaacgtcctacgtctctcatgagcccgagggtagatttatgagcccatggaccaaggctggatccacttatctttgtacatatcacacttggatttcattatttttgggcctttta

SEQ ID NO: 243432 - DNA, 413 bp, Glycine max
ccgacccacgcggaacatctccgctgctgacattgggtctcttccttctcttcctatctctacctccaacataataacctttctggcgatatacctgcctcattgtctctccaactcgttgcacccgatttgtcatataattccttcaccggtgttatctccacgacatttcaaaatctgcccgaattaactagtttgaatctccaaaacaactcgctatccggacagatacctaatctcaatgtcaacctgctcaagcttttgaatttaagctacaaccaattgaatggctcaattcctacagctcttcacatgtttacaaatctcttcttggaacgaaactttctcttatgtggaccacctctaaagccatgctctgcggtccccgctacacttctcttcttgactcacct

SEQ ID NO: 243433 - DNA, 385 bp, Glycine max
attaattgaacaatgcattggcattgctcttatttccaacattcatctaaatgagggacattgcgagtagagtgtaaaaaacgcggttttgtagattaaaacaaatgccattggagctaacgagaagaaacaaataaattaacagagtcttccttattagttttgcatataaaaggggtttctgttggtacacaagattaattgtattggaggaaaagaccttaatttgaagtgaacatggtgtccaaaactgtggccaactcgatgctttttctgaggattgttgctctcgcagcctcagctgcaactgtggccctgctatttacaaaccaggtccaatttgatgatggaacaaagttgagatctcaagatttctattcatacc

SEQ ID NO: 243434 - DNA, 286 bp, Glycine max
catatctttagctccctctatgtacctttccgctatccctatacttcccagcgtcgaagattcacctccttattttatcttatatattcatcacgagaaggaaggtttgatacctgagcttacaaaacagtcgagggtttctgatgatgaacacagagagctccttaccagggttaactccgatgaaataattcaccgcattacgtatcgaactattcgaatagtcgcaatagtgcagaaaaaacgattttggcagcccttccgcctctactcttcacaagctatg

SEQ ID NO: 243435 - DNA, 319 bp, Glycine max
  unsure (1)..(319): unsure at all n locations
attcaacttgggcaaaattggatgagggaaagagtggttttncaaatctgcactttatgcagaattttgctgttgaaatgtgcagcagaattttgtataagtgcacaaaaatgcttgtgtatggctggttgtgaaaagggtactacatatggggttctggaaatttgctagtagatcccaacggtcaaaatgtagacttatgtactagagacttccagtaaaattttcgagtcgatccaacggttaacgaattggaacgaaggaaatgttactgcggtatttgtatgtgaaaagctgcgattttgagttgtgttttggg

SEQ ID NO: 243436 - DNA, 265 bp, Glycine max
caacacaacgacgccaacacacaccacactccaactacacgaggcacccacactacccaaaccccccccgacagacacccaacaccacactcacgaaagcccctctgccacaaccaacaacactgcgaacacctccgacaacaacaccatcccccgaacccccgagaaaaaaatacggccagcctcacccccaaccctgaaacgcgccaaaacccactcctgccagccaactagactacgacccccaacaccacaccaccatccc

SEQ ID NO: 243437 - DNA, 209 bp, Glycine max
tacaagccttatatgaaaaaccatgatatcaccatatccttaaggaattccggagcttcggaactgttctcggaataagtgtggcgggttttttgttacattggataactcgctttgctggctatgcttcccgatgtattttgggccatacttgatgtacattcgatatcgcgcaaatgttggacacgctgaatgaaatggtgactctt

SEQ ID NO: 243438 - DNA, 413 bp, Glycine max
  unsure (1)..(413): unsure at all n locations
tggttgggaagaagaaggaacctgtttttatattgcagcatgctgatgatactgttcttgtaggggaggctgtgtgggacaacattcaagttttaaaggccttattaagaggttatgagctagtttctgggttaaggattaatttcgcccaaagtcagcttgggattataggtggtagagttaattgggctttggaagcagctaatatcctacattgcagacagctggagtatcctttcatctatctaggcatacctattggagctaatccttcaagtcagctggtgtgggagcctctcatcaataaattcaagtccaaactacccaaatgggctcaaagagatatatccatggctgggaagatcactcttataaattctgtncttaatgcccttncaacttatcttctctcc

SEQ ID NO: 243439 - DNA, 284 bp, Glycine max
aactcgatcgtcggccgcaactgtcgacattgtgttccttcacagcaagcaagacgcctatcgcgactaccaccgactttgcgtcattacaaaaacgaagctcatcattcaaaactatgcccccctccctcggcttcgcttcatctccctctcctttattgacattaacgatgctctcccgttccctgatcctattccttcgctagcccgcgggtacggatacttccatcaccgtgggggtgggcgcataaattatcgcgacaccatatgccaccaccacatta

SEQ ID NO: 243440 - DNA, 250 bp, Glycine max
taatcggctcgaacacgattgtataagtagctttaatgctcccgctgctattattattaaccaatccacataaattattccttattgctttatcgcatcttcttttttcttttatatggctatcacaatcaattaacaaaaacatagctgaaattacataacgtataaactgggtggcgttcttcgctcgtaaccaagactacaacatgtcaaattgctacctactgaacacccacatccttacaataac

SEQ ID NO: 243441 - DNA, 417 bp, Glycine max
  unsure (1)..(417): unsure at all n locations
actccagctcttagaagacacccctaccttgcaagtattttgttcaataatgtgactgaagcaaactttttattacatttaatcaaataaatgtttagtattttgttctttcctattagtctgttgatagctaactggaataaaagaaaagctaaggtcggaccagctgatagctaattggaataaaagaaaagctaaattgcagggaataattatgatatctttttatttcatcattacccctttttatagccatttcatacaagatattttgctaagttgttataacagaatcttgaaattgcataaccacacaggtatcaagtaaaacgtggaaaaagctntaagcgcacacgagaaggaattctagaatctgctatcggacttgagcctccctggccttatcgaagcactgac

SEQ ID NO: 243442 - DNA, 380 bp, Glycine max
gtctccacaaaacgacgcgttaattaccttttgatatttataattgtaaccatttttttagttgtttaaactttaagacattccattttaatatctatagctacagcattttaacttttttgttctcaccgtctaaaattcctaacgctgtcacggattgctttaaatcgttaaatataactaaacctgacaataaaaaacagcaaaaacaaactagacagttcttattttacagcggatctaaaacatcctcacttatcatacttatactttctcttcaaagagtcaaatagccatgggatcattttacaataatgaaaggccaatctcctgtctcatttgttggcagggcagaaaatcttttacaacttctaacacat

SEQ ID NO: 243443 - DNA, 131 bp, Glycine max
tcgtttcccaacgagcagtgacaagccaaatgttcataatatacttgcagtaacagtaacacgtaacgatggcgggggggggataaacgttatattacaaagatgtttattttttatgaatggatcttact

SEQ ID NO: 243444 - DNA, 271 bp, Glycine max
actctccacatccacaaatcacacataaatccaccatccccagttgcccaccttcaactgagctcacgtactcccacgtagcccttatcctcattcctctcagcaccgggtccccatcgaacccttcaagcttcctcaatatccaacgcatggcagtagccaatcaccggcattccactcaagtggacaagggattttcttatcaacacatctggacatggaccgagggaatatgtctaccgcgctacctacctttccacaccttgcactt

SEQ ID NO: 243445 - DNA, 229 bp, Glycine max
tatgaacctgatatcatggaatgattaaatcaatcacttatcacaagcatgcagcttttcaaagataggagcactactattagactcacagctcgaataagctagtaagcatgacaaaaattaaggaaggatcatcaaccataacctcacaggcattgtttcactcacactcacagtcttacgcttactccatcctatacaatccacacacagttcaacctttgccttt

SEQ ID NO: 243446 - DNA, 285 bp, Glycine max
  unsure (1)..(285): unsure at all n locations
ggcgcacaaacccaccatcccnnctgagccacctccaactgagctcacgtactcccacgtagcccatatcctcgtttctctcaacaccgggtcctcatcaatcctcccaaggcttccccacattgaattaatatccgtactcatcagcccaactttcctctcgcatgtattatcgaactctcaacacaactcgttcttctgctgaactaaaagtaaaactaagcataggatgcctaaaactggtaaatttcatccatttattataacccgctgtgtattgtgatt

SEQ ID NO: 243447 - DNA, 167 bp, Glycine max
  unsure (1)..(167): unsure at all n locations
acggactcccacgcagcccatatgctcggttctctcaacaccgggtccccatcaatcctcccaagcttccccaacatcaaattaatacaacattcaaacagcacaaactatcacagccaagaaaacagagcaaaggcagaatactctgccanactgcactcgatatt

SEQ ID NO: 243448 - DNA, 76 bp, Glycine max
aacaggcgagctcctggcaggcaaccgacaaaagaacaaagaccacaaagcaaggaggcttgtgtgatggctggcc

SEQ ID NO: 243449 - DNA, 191 bp, Glycine max
tggacgccgccgccttaaatgtgtgcattaaatgcatgtactgcttcatgttgagacaccactctttgtcgttggcatgttgaacactacaacaagaaatcactttcttttacgtcaaagtaggcttgtgcaatagaactcttcttttaatggtgcgaatcatgtatgttttgatgatgtccaaaagaaat

SEQ ID NO: 243450 - DNA, 379 bp, Glycine max
  unsure (1)..(379): unsure at all n locations
cgatgtntatatcccagcgcatccacctattatacacctgaatcggacattcgtgtgaaaagctatcaccatctgaatttcacgagagctggcgttgctattttcgagcctctctgattgtgatgcgcccaaatcggacctccgcgtgaaaagctatgaccatttgaacttcccgcgcacttgcgttgtttatgtgtacacttgcgccaaatcctccgctagcttttgttcatggatcacagactggttcaactcttcattgtattgccctatgatagctagcatgctacgctccgaggctttcaagtggtgagcccaacctgctcttggaccttgcgcaagccagtaactcttcttttataacatgctatgcacccgt

SEQ ID NO: 243451 - DNA, 262 bp, Glycine max
actttatcgacctgagatgctgagagggccccctgcaactctaatacctgccactgagttagttagcttccacattacctgtcccttcccctttgcaaagagatcatacaagcctgctcacaactttgtgagctgataaaccggctgagaaaatcataacataaacacctcagctaatattttgagaaaaaaaggttaatccttggtacatcccaaagacaagcatgcagacctcctctatcctacaacggatgaacacaaa

SEQ ID NO: 243452 - DNA, 326 bp, Glycine max
  unsure (1)..(326): unsure at all n locations
cttcccgcgatgcttcttttcatgtccgcctgagtgggcttatagcctaaaccatacttcccacgatttccttgggtatttatcaggctagttatgccgccgttgtctttgcctaaacccatcccgggttcataaccgttccccaacataactcgggccatcattaccgctgcatcggacagacaaggctgcccaaagagggagtccacggaggaaatgctgaccacctcanaagactggaaagcatgttctaacgattcttctgcggcttccacataaagcatggaggatgggcagcttaccaagatatctctctcgcctgacac

SEQ ID NO: 243453 - DNA, 321 bp, Glycine max
ggttcagccccttaggcacttctctctctctctcaattactgaggaaaattagttccgtgaagaaaatccaagccgaggcgcttccgtaacgtttccgtgagtaattacgcgaagattctcgaccgttcttcaagattcatcggtcgttctttgttttcttcagtcttcaacgggtaagtacctcaaaccaagcttttcaattcattctatgtaccccgggtgcgccacattttgtttcatgtattcttattctcgttctcatttactttttatacccccttttgacgcgcttaagccatttatttaacgcatttatcgct

SEQ ID NO: 243454 - DNA, 420 bp, Glycine max
aacttaattatattacacttgtttatgtatgtgtttttctcttgacttaaatataattttggtcattttattttactcaatacgtaattttggtctctctattttaaaattaaaatatttgatactcctatttttaaaaatctacaattttggtctctctattttaaaatacaaacattttgtccctatattttagaaaattcataattttgattctcatattatagaaaattcacaattttggtttaatatataatttttcctatgttttatttcttttattctttactttgtagttaattaaatcatttcttgatgatatcttaaatgaatatgtagatttaggatttaattagaccaaaacaaaagaaataaaatatagataagattgagaggttgatctaaattacaaaatttcta

SEQ ID NO: 243455 - DNA, 338 bp, Glycine max
  unsure (1)..(338): unsure at all n locations
gatgacaaaaagctcacaagtcaagaacacttcatgataaccaagatgatgatctccagaatcaaagaatgagttccagattgaatcaacaacatttcaaggttcaaaaggaaatttgatttccacaatcaagaatcaagaatcaagtttcaagattcaagactcaagattcaagactccagattcaagactcaagattcaagaatcacgagaagacctactccagataagtattaaaaagttntttcaaaaactgagtagcacatgaatttttcctaaaaccttttaccaaagagttcttactctttggtaatcgatcaccagattattgtcatcga

SEQ ID NO: 243456 - DNA, 411 bp, Glycine max
atcatctcctattgattttgagtatagtcccagtacttaaatcttaataatatattttaaaacataatattcatatttcatctctttaaagttagaagtaatatttaaaattaatagatagagcagctatgtatgtgtgtgtttgtttcatgagattagtgtgttatttatccaacattttaatctcttcgatgtttctaaatcataattaattgtctcaactgcatggatgtacttaaaaaacatatttgcttataattataaatatcaaacaatcattaaacaatatataaattgagggaataaagacaatttatgaaaggccttctaattaacatacttggctaattaaaaaatttctcctccatttatcaagtaaaactttattattatcatagttaatttaattca

SEQ ID NO: 243457 - DNA, 280 bp, Glycine max
tatatgctcgaattgctgatggaaaactattagagatgaacggtagaactcacctacggttagaaagtgagaatgtgatgttatgagtggaaaaagagtgaggctttgagagttggaaggttaactctgaattctgtggctcatggaggttaaagtgagttaatcctagcttgaaatgtcatttacgacttatgagaaagcttggactgtgctagagagaaaaacacatgaccaaagtgaaccaagagccatctttagggcgaaattgcggtgtgagggg

SEQ ID NO: 243458 - DNA, 256 bp, Glycine max
cgatcgcttgaattgcgcatcccgtaaatatggtaaaatgaatttcgaccgttcggccgggccgtaaccacgttgaaaatcaaaaaagagggtaaataataatatcataatcaaaaaatatctttttagtcaagtaaagtgaacaaatcaatcggatgttttctctctgggatttctcattcttaattggagtgagtaataactaacgtgaaactaaggcttatatcaactcgtctaatctagctcgtccacgaaa

SEQ ID NO: 243459 - DNA, 376 bp, Glycine max
ccatttctgtgaaaatgttggttccatgaaggcaaccgtcagttcaagtagtggagtatgaatcacaacaaagagagaaaatgttagcctgtctgaaagaaatcatggtgcgataatccaacaactttgttttgtcccggtgagttgtgtgaaacttacttgtgagagaacgtctatttctaattttctgattttgcatcgttcttagactgttagattaattacatgaggtggaaatgatcaaggtcttgtttcttcttattttcaaccacttagccaaaaagccaacctttgatgataatttatcccttgcaccttatttgagccaaaaatgataatcatgttttatgtaaaacccctaagcgtgctttaatta

SEQ ID NO: 243460 - DNA, 427 bp, Glycine max
  unsure (1)..(427): unsure at all n locations
acagaatattattgtttcaaatatgcaacaattgaagttggatcccagtcaatcaatctagataatcccaattaagaacataacaataccaaacatatgctcctgacaattaggatcagtctaggaatgcagatctcatagaaaactaccaattaaggaacaactataacggactcctcacccacattaaagctcttgtcattcacaatttaatcttaacaataacaaaatacaagacatgaatcaaaacagcaccaacacaaacgctctcatcaataaaaataattctttaacataagaataattaaaaagagtggtaatagaagatacccttaaacggtcagagagaatggaatgagtaatcaacttggtgtcttagagaggagctngtcatanatagcctgatccaacaacacctcgatattca

SEQ ID NO: 243461 - DNA, 280 bp, Glycine max
acgcatcacaaagaaccaacccaaggctattgtgcaaccaatccatggggcaaaacacaccaaatgattataacgatggatggctcaaattctcacaaaggtaaaatcatcactttcaaattgagctttcacaactatcatgacatgcacagaagaatcaaggatttcaagtcacaaaatgccaagaacttttattttcaaaacaactacccatttctcgaacatatcctataattcaaagaaaaacatgcaaagtcctacgtgcacacaaaattgaccc

SEQ ID NO: 243462 - DNA, 380 bp, Glycine max
ctaggagagcatatgcttcaaggaaaatttactctaaatttgggggagaaaagttgaaaagaatgaaaagaaaaaggttaagcatcagcacacacaacaaataagttgtatgttaaaaaaaaaagagaaaaaaataagttgtgctgttacaataaggtcaaaagaaaattaagaaaagggaatagtgagaaggctattttttttttacaaaacaagaaaagatcattgggattagtctaggacttgtgctctcttagaatttaaacctttgaatctgagaaaaaaccaatgaatttttgtagccaaacctcactacaagcctgagaaagtccttctggttctgtttatacatttctgacttgatggcatgaaatgaaatg

SEQ ID NO: 243463 - DNA, 401 bp, Glycine max
tcctctaaatctaatctaataatcaacacggaaaatttaattccaaagagagaacgaaagaacaacgtcccagccttgcaagaaagaagtaaaaccggggttatcattgtgatggtgctgagcgcgatggcagtggtaattgggagggggtggcagaggatacccgtgattgaaatagccttggtagccttcgtactgcggcggcggatacggcacgtaccccggcggaggctgcggcggcgctgacgggtaacccggtggcgggtaaccctgtggtgggggataaggaggggcgtagcctgtgtagtgtacattgaaattgaaaaaacaaagattacattgaacagtagaagaatttatataaagagaaagggttttattaatacctggaggaggataat

SEQ ID NO: 243464 - DNA, 372 bp, Glycine max
ctaactccaagcttatgagaaggatgacacacttgggttagcaccaaaatgatccaagacttaaaccctcaagtcaaggtatattttaaattctaatttctactcaatgtgtgatctacttcttcaacattgtcttgcatccactcactcacatgtggcttactctaacatttacagctttcatttgtcagaatattaattgccagactttacagatcagtgcacatatataacagtgaattagtagttcatcatggctattggagattctctaaagttaaacttttactttcagtcatgttaatggtgctgaattgtctggaacaataaaatccaagagaataaatcttatcttcatcacttaaagtacct

SEQ ID NO: 243465 - DNA, 402 bp, Glycine max
tttatgtccattgtctttaaacatatagaaatcttcacttaagcactcatctgaagattgtggcctttgtggaatttaatgcttgcattaaatgcacatccccttcatgttggaaagccactcttgttagcttcctttaggaacacctcaacaaaaaataattctttttcgtcagaataggtcaatcacagcagggcatgtcttttgatactatttggcaatagacttcctttattcttcatgggatttgacagatcctaggagaatgtcttataagacagttcatgtaaattgaatcttagacacaaaatattaaatgaagtcttaaatgccatctttaatggtgtatcacataatgaggtatctttgttttagatgcagactcatgaatgttggaccttg

SEQ ID NO: 243466 - DNA, 396 bp, Glycine max
  unsure (1)..(396): unsure at all n locations
ccactnttgagggaaaacacacacctcttcattatgcacaacgatgagaaaacaaatccatctctacatctacaatcatcatcacaagtttttttgacaaacttgccaatcctccttcatgacccccctctcctctctcacttagggtgatgaccatctctataggttgaatagtttttcttatctcatgaatatttatttttataaacctaagatcttaatctcaaaagagaaaacaaatcgctaatttacaattaatatctttaaaaatctaaacaatatcctaaaaatttgaaattacaaattggaattgtttccaacaaaatatttactcactgataagaatatgatacttataataaacgcatattttgatgttgtattctttgtcttctc

SEQ ID NO: 243467 - DNA, 368 bp, Glycine max
  unsure (1)..(368): unsure at all n locations
cgaccacacataacaaagtactttcggcacctactatatgttgactcggcacacgctgttattggaatgctgcgacaatctttcaataccttattcacacattctgataagctggttgtcatgtgaccatatcgctgtccagatgtatcgcaagccatgctccatttttcctttgaaatgcgaccaatccatcttgctatggctggacttaattgacgaaatttttctaagttttgatcaaacacatgcttgcaaggagtgtacgctgcatcaaatttgttatcatcaaaagctgtacgtagacatgaaactcaaattaaattaatgtataaaataaaccttanccaatttctcgaacatctcttttt

SEQ ID NO: 243468 - DNA, 404 bp, Glycine max
  unsure (1)..(404): unsure at all n locations
acatttataacattgtcccaccatcccacatttgcaaaatcatatccatatatcattggggcatttcaccgaacacttggtgtgtgcacgtttgaacataaattgcaagagaatgtgggcaatgtggcatgccccattgcttcagaatacaacataggcctaatgtcgtcttacacaaaccctccactcaacaaaacaagcatggattcagatgcgaattgcttcactgaatttgtcaaaaatgagcaactaaagcaccaaaacacatcgatggagagccaaataaccaagggaaattgcacttactcgtggngagtgaagtaaaacgtgaaaagggaatgcaaaactcaacaatggaagcttggnggctgctgttctcgtagttccatgagctttgtgttttt

SEQ ID NO: 243469 - DNA, 378 bp, Glycine max
atccctcgatttataatttatataagataactttggcgaatctatcaatttataatttatataaaaatcctttattgatttataatctatgaatcctgaagtaggaactgaggctttgggatttgatctcacacacaaaagctcacatgtatttgcatattttatttttcatggcgcattaccatgtctattaagagctttattgatggacctgacagccttgaccgattttatatgttttttacaagaacaaatgatcaatttattggtaatggaccacgctagctgttttttgatgtagagacacaaacatatattctttttcctagaacacaatcctctctttaaataaatcattctcactcatatgaacgcaat

SEQ ID NO: 243470 - DNA, 472 bp, Glycine max
  unsure (1)..(472): unsure at all n locations
gccccttttaatgcatctggtcgngcataatttgatgtgntccttacattngnngctcaaagggttacaattccgtgcacgtctatcaaaacttgttttgtagcacttgcatataaatattgaagagcaatgttatatcttttcactattcttctcaatgttttatgaaaatgatgttaaatgacatagtaaataatgtcatgttttgacatttttaaaagctttcaatactttttgttatcgtctaataagtaaaaaagatttagaattatttttaaaaaaatctctgtccaatgataaagagtataaaggtaaataaaataagcatgtaattgctaataaaaagttaataataaagaaatgcgaacaaaataagtttatacacaataaaatttaaaattattataacttttaataacatattattatcatattctatttttaaagtcactactcagagtcaactctatac

SEQ ID NO: 243471 - DNA, 388 bp, Glycine max
cacagaggggaagttgaactttgagttgtgtctcacaagactctcattcatcaaagctacaacaagtgctacccatgctcctatctatagactaggtagcttccttgataagcttctttgagaaaacttccttgacaagcttctctgagaaaactcccttgagaagctagagcttagccacacacacccctctaataactaacctcacctccttgagaagcttccttgagaagattcctaaagaagctagagcttagctacacacaccccctataacagctaagctcacccccatgccaaaatacattacaatataacaaaaaagtccctattaccaagactacctacaaatgcgctgaaatacaaggctaacaccctatactactag

SEQ ID NO: 243472 - DNA, 421 bp, Glycine max
  unsure (1)..(421): unsure at all n locations
actggtcacaggttcttgtttgggttgaggacatcaatactatatttggcaaaacccaaaagaaggaaaaaagtaaaacttgcatatggaagaaaaggttgatattgtttgatcttccatattggtccaatctagatgtcatacattgtattggtgttttgcatgtggagaaaaatgtgtgtgatagtgtcatcgacatgcttcttaacattcaaggcaagacaaaggatagtttgaatactcgtcaagatctagctgagatggatctacgagaccaattacatccaaggtctgatggtaagaaaatgtacttgcctccagcttgtcatactntgtccaaaaatgggaagataagattttgtaagtgtctgtgctatttccaagtgccatagggatactcttcaaatattaagagtctagt

SEQ ID NO: 243473 - DNA, 326 bp, Glycine max
  unsure (1)..(326): unsure at all n locations
gtacctggagatatttcgcgggggtcaggagaccttggggacgtcaggtggggtgctattgcccaaaaccaagcttgaccaatcccgacccaacccgagaatagtcagtcagcgagaacctgtgatgtacctaaacaggcgaactcctggcagttcacagataaaaggaactaagaccaccaagcacggaggcttgtgtggtggctgcgcanctgtgaactttgattgatatatgggatatggcctttggtaatccgataccaagggtgggtaatcgattacaggcttaaaaatgaagacaggacgctaagatggtctctggtaat

SEQ ID NO: 243474 - DNA, 436 bp, Glycine max
  unsure (1)..(436): unsure at all n locations
tctgtatggtggncagcagaggagcacaaaccacaaacccttgcgacagatacaaatttctgattcaaggcatgctgggttaccaagttaaccaatgcatccggtttgccttcaagcttcttagtttcagatgatgcagatgggtttgtagctacctcatgcattcctctaatgaatatggcatcatttctggcgataaactgctgggagttggaagccatcttctcaattaaatttctgtcttcagcaggagtcatgtcttgatattattgagcatctatcatacttctctccatattattgagtccttcataaaaatattggagaagaagctgttctgaaatctgatggtgggggcaactggcacatagatttttaaatctctcccagtactcatacaggctctctccactgagttgtctaatacctgagatat

SEQ ID NO: 243475 - DNA, 350 bp, Glycine max
catgcacgcttgatacacgaaactcgctaactctattacagctaagattcacttaattcactcaagtgtctttcatctagtaacaactgacacgcgttacaacactttgttcgttttgactcagattattcttgtgagtcgacaacattaacacgaacatcttcaagctttatatacacttcatacctttgatttgttgaaagatcccaactagtcattgtctagtagcttggacgctttacatgagattgttactgtgtacagagagagtgtggggaccacaaacactttctgcagcatatctttagaaaagtacaacttgcccgtgtcaccttgcgctcaaagatgac

SEQ ID NO: 243476 - DNA, 396 bp, Glycine max
tggtacgaccatgctctcctgatttccagctgggaaattggcgagtggaggaacgcctcggcatttacgccacaagcataatgtaaacctttacggttttaaaagctctatagttgggcctaggctttagagttttcattttgttaaggctttgtgtcttttgtttttgaatttataatacaaggatctttcttcatctgttcctggtctctacccattctcattcatttgcatgtttacttctttttctaaaacggcagattcgatgacgagtcccccgaaggtactaatacctgggacccgcctatcaacttcgagcaagaaatgaatcaaacggaagatgaatgagatgaggatgtgggactttcttctgaactagaaagaatggtcgccatg

SEQ ID NO: 243477 - DNA, 352 bp, Glycine max
actcttaaaacacaaatggcatacaacttcttcccataaacatcaatgtaaatttagagcacagcctatgccgcatatccccttacgaacgtccgctcgcacaagacattcttttaactaagaaaaatgcacccatatacaagcaaggcagcctcgctacctagataatttacatgtactcccaaggtgcatttgctacttacatcacacacatcctccttggctaaattcacatacatgcatactcacagcattttggggtaccaaaaattgcacatgtgcacatcttggtattctcaatacctatacatacaccaacttcatgatgaatattgactatctacacaataaa

SEQ ID NO: 243478 - DNA, 411 bp, Glycine max
  unsure (1)..(411): unsure at all n locations
atangtagcaaccattagaacaaaataaataaataaatcttgcatgaatattgatgtgaaagattactagatacacatcatctgagtaccatgttttgtgattcatgtaagtagatttaagatccaatccatttgagtagatatcgattggatgtggattagattattaaaaatccaatccatgcccacccctagtgccaccaaggaggctataagacaacactatacaaaagtttggaaaaaggccacttctagatagaataacaaatatatcgtttgataggatttgagtgtcatcctatgaaagaacatttggaatcaaattctaattttcaaaatcaaactcatgagttcacttcaaattgaccagattaacatttagatccatgggttcagccaatagcacttaaa

SEQ ID NO: 243479 - DNA, 198 bp, Glycine max
tttcatcaccaacaagtgccccaccaacatggactatagaatattgcgcaacgccaatattctaattcgcaagcatgtgcataacaaatctagggatgtgtcttttacaaatatatataacaaccatgtcgagaataattcagtcaatatgaagaccctattgttgttgttgggcaatctgagtacttatattataag

SEQ ID NO: 243480 - DNA, 447 bp, Glycine max
  unsure (1)..(447): unsure at all n locations
gcgtcattaaataaatgcattacatgcacatactncttcatgtggagaaaccactctccatcactagtgtgttaaacactactatatgaagccacttccttttatgtctgagcaggtctgtgtagaagagctcttcttttgatggtgattgaggaattttagaacttagcttcatttattcttcataggattcaaaaattcctaggagaatgtgtctgcaaaatagatttcaaacacatggtattaaatgatctttaatttgtatcaaatcataattttatcttgctatcatctgaaacatcagacatcgacttcacaaatcatgttccgatagtgcatgagacataactcttaatctttgtatttntttagatctaataaaaataaataaggtcctgattcattttaagacaaatatattntgacttaacaatctccctattttga

SEQ ID NO: 243481 - DNA, 237 bp, Glycine max
ttttcatatttctaacgataagttaagcataattctttaataaactatccttattacttacccaaaagttataacaaattcattatttataggtgtcttttaaagcattaataattggtttctacatatttctatattctacagaattatatgagttttcccattttaacacttcacaaaataaaaatataaagcgatacaattaatatcaattcaatttctctttatttcttatac

SEQ ID NO: 243482 - DNA, 407 bp, Glycine max
gccttatccattgggtcatggagtcacaattttattgctctttcggaccaaaaccttaacctggtgccttagaccaactcggccatgccaacttgatgttaacttttgcaccaaaattttacaagtacttatatgttactagataataacgaaggtacttcaatttaaatattaacttcaagttgttgttaatctattgcttatgcatggctttttatttctaccctctgaaatctgagttttcaattgcagtattattctagagatactattatatatacgcttatacgttcataggtttctagttctacatcttctgcattcttgcatcccttgtccctaagttagaaaatatatataaacacttcagtaatattaagatttggaaatttatatattaatgcagt

SEQ ID NO: 243483 - DNA, 288 bp, Glycine max
ctcataagctcttaagaagaccatctcaatgtcttgcaatttaagctttctttcatacctgcttcatcaaatgccatgttacataccttcaccgcccaataagcacaatgctcaatctccatcaaaaggtggcatgccttaccaaaaaccaccttatatggagacatccccacaggtgttcgataagcgatcatgttggcccatcaaacatcctcaagcatcctggcttcaatccttcctattggggtgcactattttctgcaacactagcttgatctctctattaaa

SEQ ID NO: 243484 - DNA, 185 bp, Glycine max
agcttcgcgagtgttggttcaagacgcgattgacaagtcactattatatgcaatgaggactcctcgacgaggtccaatttggtcgaaccatgcctctcccgcttccaactagggaattggccgcgcgacgaaccctcacaggttcacacgacaagcataatgtgacctttttagctttaaactct

SEQ ID NO: 243485 - DNA, 428 bp, Glycine max
ttcttttatcaagttcatgcaaaaacatctaaattcatttggtatttgggaaagccattcattgtttccattctctgtgtttccaaaaatcattttgttgtgttctaattcaggccaaagtaagtttcaaaaaacaccgattgctgattctttctaaagcatgttatgtccaagaaaaattttctacttaagtcccaaatatatatatatatataatctacaactacactaacaaaacaaaatatatcaaagcacgtataaatcagtcaaaagcacaaagtcgcataagttttgaagaaaaaaaatcctaaacaataaataaggaaatatagtattaaaatttaatacaaagcaatacataaacataaagaaatagtcacgcatttttgacgatcattgatgaggagctcaatctccttatcgatcat

SEQ ID NO: 243486 - DNA, 398 bp, Glycine max
aaagaccctatctgatataaacttcttactaaacacttaaaggaaaagaaaaaaaagataagaaacttcaattattacctctgtttgatcaccaacattaatgacgagagcatcaaggatgattggaactttaaaccactgatcatatttgaggccttgcaagccttgtactagtttatcttgcaacagaaaagtaatggtggatccatccgcatgtggcttcatgccgagaacatgatcacgcattggacatggagggtagtagttgaatctcataaacataacatctctctctccacattcatttatgaagcaatcctcttccaagttcagtgaatttgtcatggccttaataattacttacagttcagccttatacttcctgtatacatgaagac

SEQ ID NO: 243487 - DNA, 382 bp, Glycine max
agggttcagcctcttaggcacttctctctctctcgaaattgcggaggaaaattatttccgtgaagaaaatccaagccgaggcgcttccgtaacgtttccgtgagtaattacgtgaagattctcgaccgttcttcaagattcatcgttcgttcttcgttttcttcaatcttcaacgggtaagtacttcaaaccaagcttttcaattcattctatgtacccgtggtggtccacattttgtttcatgtatttttattctcgttttcatttacttattataccccattctgacgtgcttaagccatttatttaagtcatttcttgcctaatctaaaaataaaataaatttccactgatcgctcgaattgtatcatcccgtaatttc

SEQ ID NO: 243488 - DNA, 255 bp, Glycine max
ccagcagattacacgctcagccctatggccctcaattctgaccgcaatgaattgcgcttggcgacattgggtctcgcttaaccaaggtgaagccatcggtcaaccatcagtctgccgcttaacggacatcaactccaatcgactttggcttacgccaaccttggctagctcagcggaaataatcaacctcaggtgccacggtggcgcgctaagcgcttgaactcgtggctcagcgcatgagtgacttatgcgctt

SEQ ID NO: 243489 - DNA, 416 bp, Glycine max
  unsure (1)..(416): unsure at all n locations
gtctctcggaagtgctatatacatacttcgtccgccatttanggatggcctctgtggataactgggtggcgcgcaacgacaaagcttgttattgcctgagctaagatattgttgggcttgggggaaatttggccgctcaagaatggcagtcacagcatgggtttctccctcatcctcaccctctctatttgccccagttttctcagtcgtcctactaggatgatcaaatatgcctcttttcggatccacttccatctttctgctggtgaagaccaaatctgtcaaacttgaacgtgtgtaacccctcattctttcatagtagaacacctgtcacccgtctactatcactgcgataacccctttctctgtttttgggggtactacattggtccgccagatccctccaccttttgggc

SEQ ID NO: 243490 - DNA, 387 bp, Glycine max
  unsure (1)..(387): unsure at all n locations
cagaaaacaagaggggatctcttttatcttagcgagagtgattctcctaaattcttgagtgattcaagaacaccttggctgtatcaaaggactttcacaacctttgtgtgttgccctcgctggaaagagtgattctttccttcctttcatcatcacccttgttctttcaaaccacaattccagaaaatccacctctgcccagaattatctcgtggccataacttccattntacgcactcaaattaagtgattcttgatcctaaatngaatttcaaaacgagaactttcacctcggtttggaatcacctcatttggagccgtgtagcttcagttattgacatttttatatttctgttcagccaccacttaacctacgtttaccatccc

SEQ ID NO: 243491 - DNA, 395 bp, Glycine max
  unsure (1)..(395): unsure at all n locations
gctccctctttcatggcttattccttaatggatggcgcctcctctcacctcttttcctttgtcttccgctgcatctccatggcggaaaatcaccattaaaggaccccattgaagctcatagatccaacctccatagaagccccacaagcaagtttccatcaagtggtatcagagcacaagagcttcaagtaggtgctccttaaacctccattaattttattgctttaccttctcttccattgttgtttcttcattttttctccatgtatctcctcacatgtcttgtgataaatgttgttaacatgattctttagagtttccaccgattaaacttgctatagaaactagatttgaatttctatnggtcacatttcttgttcttgttctcgaaccat

SEQ ID NO: 243492 - DNA, 383 bp, Glycine max
  unsure (1)..(383): unsure at all n locations
aaaacataacagaataaactttcatatggacttcagtcacagcccaacaattgaccaccttgaactaacattcatataagacacaaactgcaccctccaagcatacacgaactcaaccttaacaatcaacattgagcaagcttaagcagcgatcaaacttgctctttggaactggctttgtgaacatatcagcaagattgtgcagagcgctgatcttatgaactttgattcttctttctgaccgaatgaagcgatatctaacatntatatgcttggctctatcatgataaacctgatccttggccagcatatagcactaaggctatcacagtagatgttagcatattcttgattaattccgagatcatttattagacctctta

SEQ ID NO: 243493 - DNA, 372 bp, Glycine max
ttcttgagatgagaacctagagcttaactatacacatcccctataataggtaagcttacccatgcccaaatacatgaaaatacaaaaaagagctttctacaaagactactcaaaatgccttgaaatacaaggctaaaactctatactactagaatggccaaaataccaggctgaaaagaaagaaaaaacctattctaatatttacaaagaagagaggatccaacctttgcccatgggctcaaaaatctaccctgaggttcataggaaccctaggggctcctttacagctatagccaaatcctttggagtttctatctataccttgggggaaggatggttaaaagggtgccataaaattaaacaaactttaaa

SEQ ID NO: 243494 - DNA, 391 bp, Glycine max
tccatcggagctccgagtgaaatgttattgtcgttcgaatttgctacgagctttggttttaaatttcgagcgtctcgatatattacgggactcaatcggacttccgagtgaaatgttattgtcgttagcgtttgctgcgagcttcggttttaaattttgagccgctcgatatattatgggactcaatcggactttcgagtgaaatgttattgtcgttagcatttgttgcgagcttcggctttaaatttcgagcgtctcgatatattacgggactcaatcggacttccgagtgaaatgttattgtcgctcgaatttgctacgagctctggttctaaatttcgagcgtctggatatattacgggactcaatcggacttccgagtgaaaagtta

SEQ ID NO: 243495 - DNA, 466 bp, Glycine max
  unsure (1)..(466): unsure at all n locations
gacnataacatggcactcggatgttcgattgagtttcgaaanatatcgagacgctcgaaatttaaaaccgaagctactagcaaattcgaacgacaataacatttcactcggaagtccgattgagtcccggaatatatatgagacactagaaatttaaaaccgaagctcgtagcaaattcgaacgacaataagttttcagtcggaagtctgattgagtccagtaatatatcgagacgctcaaaatttaaaaccgaagcttgtagcaaattcgaacgagaataacatttcactcggtagtccgattgagtcccgtaatatatcgagatgctcgaaatttaaaaccgaagctcgtaccaaattcgaacgacattaacatttcactcggaagtccgattgagtcccgttatatatcgagacgatcgatatttaaaaccgaagctcgtagcanattcgaacgacaataaca

SEQ ID NO: 243496 - DNA, 401 bp, Glycine max
tacattatacattttactgaacttaacattcaaaactcaatacaattacaacgccatgccatacatgctctttctttctcttttcctttctaacgctttcagatgaacaaatattttcaggcatgactagcaactcgagtcttggctcttgtcttaacatgtgtcgaaatgttctctcaatctctcttgccatacatagcaagctcttcaggatatagctagttatgaaaaggaaaaaatgacaaaaataaatatttaacacatttgccaatatccaataaccatgataagaagaaagacttaaaaaatgaaatagtttacgagacacaatacaacagtgcctgtgttcttcatggatcctgtaaccggaaatgcttttagttcgctaaaataaacaacat

SEQ ID NO: 243497 - DNA, 381 bp, Glycine max
cgcgagctcttgccacattttaagaagattgttcgtaacaatgctcatatctaatagcattaagagaccagatcatgtgtggtctgaaacattggagtatctaattgatagtattctacatgatcagagaatgatcacatacataccaggttgagtatacaaaatctatacatcttttatgagttcgagctactgtttagaactcaaaaattaaatttattatttttgtccatagaaatagagctggcaattgaagaattacaaaattgggtactacttcatattgaagagatattaccattcaacaacaaatcattagagaagtatcctagcatgccctttcctagacatgtagtgcgaccacactctgatatatatata

SEQ ID NO: 243498 - DNA, 405 bp, Glycine max
tcagaacccctacaactaccaccaaagtttgagtgttcaatatagtaccacaactgtagtcaactaaacaagatccttctgcaatacgaaactgtgaggaagctcagagcactctcgcctctttaacatgcttcttcttcttcagaaatgcaacatggcaagaaagtatgatatagaatgcatataaaaggtagcctacaaattaaaaaatcactttatagattaataaaaacattaaagtctcatatacaaggtaaaactggatcggtgtaaatgtgtaattatatcctttactctaactttcaacacaagaaacttaaccattcccttcataaaaatctatgctgtacacaatccatatttaggaatgtatacacgtatccatatgggtgctctgataggtaa

SEQ ID NO: 243499 - DNA, 268 bp, Glycine max
ttcctcacacgattctgtcccgcccttgtttcgctgtgcagctttattatccactggctagtacaaaaacaccatcttgcatgcatgcttggatgggcgctgccacattaattttataaacttatttctagttaaaactaattctaaagtgatatgatttatatttaaatattcttattatcaaactaagagtacagtagtataaaactcagttaattctggacgtacccactcaatttaaactcttttatgccaacatttcccaacc

SEQ ID NO: 243500 - DNA, 408 bp, Glycine max
  unsure (1)..(408): unsure at all n locations
ggacaacctncaccctcttctattgtgcaggttgcacattgcgttatatatgtggagcacatgattatggttgctgcattcccatagaagatacatcacatgtagtgaactatatggggaaccaaccaagaacaacctttaatgcatgtggatattctggatttcaacatggccaacaatataatcagcaacagggatagtggagaactcaccctggtaattagttcaataaagatcggggtgggccatctaacaggccacagcaacatgggcctagtctctatgacagaatgacaaagctggaagagactcttgctcagttcaggcaagtatctatatccaatcaaaagagcacaaagtcagccatcaagaatctagaagtccaggtgtgacaatngggcaaacaac

SEQ ID NO: 243501 - DNA, 302 bp, Glycine max
gcacatggaccaccaatggtattagattatatgaaacatctttttaatccctagaaatcatataaatttctacctgaagttgggcaaacatatgttaaagattatccccataatattgcaaagttcaattatcgcggccaaattgattctgagtagaggtgaaagacttactctcatgggacatcaccgacaagcatacagtcaccatcctctgcctcataggttgggacataatcagagctgttcataagatcattcagctcgctctcattcatgaaatcctccattccttgggatccaca

SEQ ID NO: 243502 - DNA, 308 bp, Glycine max
tggtggaaaatcaccattaaggacctacttgaagctcaagattcaacctccatcaagcccacaagaaagcttctatcactaaagctagaaatcctaacttaacaacctacaactaagaaaaagcgaaatcatctatcctatggtttgagaaataacaatgcacatgaacgatgcaagagaacttacttgcattatgtctgtgcaaggaaatgaaccagcagatgcaatgtatgatttggaagcagacatgccgaccagaggagaggaactttgggatcaccaagtgcctatcttggcttttttaaaaa

SEQ ID NO: 243503 - DNA, 290 bp, Glycine max
ggcgcaacttcatcttctcctttgcaaagaacacaagatatccctaatctttggtccttttccttccaaaaacaagactaatgctgatctttggctcctttcctttaagaatcaaagaccagctaaaatctttgattcttcattcccttaaacaaaaattcaagacaccgctgaaatcttgttccttcaagatcaagctaccgctgaacttgtacactgaggcatcttgggcaagaaggacatactggtgtgactgacaaaaggactttatatattagggaggctcctgt

SEQ ID NO: 243504 - DNA, 314 bp, Glycine max
atgaaactaagttcgaaatctttaataaagaggtatacattatacagttttcccaagtctaacatccaccaactttgagaaagaactcaagtaagatgaagaaatattatgatctctagtgactatgatcacatcactaatggatgcatttacttagggatgtcaatgaagaacttcttcaacaatgatggctaaaattatatgttaagaaagatcaagctaatagtgaaatatcccaaaatgaatacgccacagttaatcactagaagggaggacaataataaaaattgagataacttataaaggaagttcca

SEQ ID NO: 243505 - DNA, 474 bp, Glycine max
  unsure (1)..(474): unsure at all n locations
tcgcnnagcaaagggacctgaggggggcccatgtttatcatatttttcgtaatactcaccacctctatcatatctaataattttcacatttatgtctaattgtctttttacttcattgtagtaaatttctaacgcatccattgcctaagaaatctcgggtagtaagtagacataaccgtaacgtgaataatcatcaataatggtgataaaatatccttccttttgaaagaactaacatcaaaaggtccacaaatatcaatatgcacaatttcaagaagctgagtgcttcttgtagctcttttctttgtatggtttgcttgtttttcccttaatacaacccacacaaatatttagatccgtaaaatctagatacggaagaatttcattctttattaatctntccatcctttctctagaaatgtgacctacacgtttatgccacaagaaagcagatccgtcgttcactanactacg

SEQ ID NO: 243506 - DNA, 354 bp, Glycine max
  unsure (1)..(354): unsure at all n locations
ttacctgtacacncatcaaagaccgcttaccagctatgttcaaaatatatctgtactcacagnacctctgcgactatttcatctatctaatacatatctattcctgctgagcaaaaaaaaagataaaaatacaaaaacattcaccactaacaattaacaagttctgacagccaaaatcacattcaatacttaaaagatatcactcccatgaaagaaaggtcatgtacagaggcatatcataagttacaaatataccactaatgcatacaacaacaatttcaaattagttttcgaatgacacatataaatacctgagttcgaggcttcagcacaattgactttctagcaatgacc

SEQ ID NO: 243507 - DNA, 276 bp, Glycine max
gtgctcgcgacagcacgctatctttctgtcacgactgcgagttcactatcgctaacacatagagctctcgcgaaatatgggccggccgtactcgtaccttgcgagccctatcgggctcttgatggatggctcttgcaaatgcagcattatattgccgcaaccaagatgactccttaccaacgtgtggacataacaacttgaacttgtcgttgttcctaaatgcctttcataaatgtctttagatagcttggactgactcttctctaccggcgctta

SEQ ID NO: 243508 - DNA, 410 bp, Glycine max
tgctatgagctcgcgactggtccctttcttcccttcgcaacttgagttcattattgctaccccatagagctccgcgaaatttgttccggccatactcttccttgcgagccctcttggtctctcgttcaagggcccttacggtaattgcattctcttcccgtaacccggcacactccttccgaacgtgtgtagcagccaacttgaacttctccttggcgagttttgcctttcctaactcgcttttgagagcttggacttcctcgtccttttccggtgcttcaaaattctctttgctgacgacttttaacttggctagccaatctaaacctcgtatgcgaactttcagccattcgtggtacccaccaatgatgccattacgaatgcctctaagctcttgatctttccttaac

SEQ ID NO: 243509 - DNA, 350 bp, Glycine max
aacctactctcaaaacgtaatccaacccgacgttcaagctataacctcggctcaaccaaaaacagctcaataattatagaataatcgaaatattcttggaaaataataataaaataatcaaaatatctttgaataaaataaattaaacaaatcaatcggacgtttctctctggaagtttccttgaatgaactgatcaataaccaaagtgaaacttagactaatatagactcacaaatcacagtttgtccgacaatcactaaaaaccgttcaaggtccaacgccttaaaccgtcctctttgctttatcgcctaacatggaccgttcaaaactaaaaacaacatgtacttta

SEQ ID NO: 243510 - DNA, 391 bp, Glycine max
  unsure (1)..(391): unsure at all n locations
taacacttaccttagagcaaaaaggtcatgctaatccttctgatggagaacggactcatgtaatccatttatgcacacatgtacatgtagaaaatatatcctattatcaacatacaaagatattcaaaacattctatccaccacacatatacattttttggaaagaatactcacatacatgctcaaggtattgtatcaaaattacacattgttcatattctaaccatttgctatttacaaactaaccacacccatttgaagtattntattaacatacaaatctttggttgttccattcctatctatacatatatgcacatcggagagccaatctcacgtcatgcacacacttgcatttgaaagaaactttcatgccatctatctactcttg

SEQ ID NO: 243511 - DNA, 336 bp, Glycine max
cacactatttcttcatttaatcttaatttagattcttacacctacatgttttgaatcaggactatgacatattattctaattagatgatggccaattatcgttaaggttattttgcttgctgttatttcaaacatactccctatgctttttattttctattgcgatatctttttttgtaaaataagacaattgtatctgagtgacttttaaaaattttacgctatgatgacaacacgtttatgtataggaattggcaacttgggttatgccccttataaatatatttacgtgattctgccacttgcaagtatgattattatatttagctattccct

SEQ ID NO: 243512 - DNA, 444 bp, Glycine max
actttgtatccatacattctttcttgctggatataaaacctgctccttcaaccaaacacaatcaattacaggtgaaaagttaatgcttcttaattcttatatacatggtctgtatggtgttgaagaattagtatttactagcaacctttctttgctatatgtgcttgttttcttaacagaatatcattaagcttggagaaggacttttgaaagagccagaagatgttggtgtatataaagaacggactctctatacagctacttgagatggttggattaaaagattgcgcaggaataatggaaaatgggagaattggaagcatatagatagccatactttgctagtaatcgcaacagcaaaacaacgtggtctcattgtttgtgatacttccaacgtaaaataaactcttgaacacaagacaaagtgagactatctcaatagtc

SEQ ID NO: 243513 - DNA, 268 bp, Glycine max
aaatgagagctctggatgtgccatctcttgtcccacttgcggactttaccgtacactgtccactatggggaagcgtactgaaggttcaaccaccgcttgtaatcgctcatcatagacagctgtgtttgccaataataccaatgttgaatcgagtgttcgccagtcacagtatttataatacataatgtgcatgctcatcgagagagaatgatgtgttgatcggcccctctgatgtcacaaggaaacattgactcctgatctctttgca

SEQ ID NO: 243514 - DNA, 324 bp, Glycine max
actttttactccaaaaatcactgccaatcaacgcactcccgcattttatctctagcaggcattgtatgtcggtctcgtcctttgccacgggaagctggaaggtccatatcacctttttaactgtacacatggggcactgtgcccccacatgtgcaagtaagaagagataatctttcgggctatcgtgtccgtaaatgcattcatatcatgcatcgcataagcatctcttcatggcatcataatgaacatatcattcctgcatttgcgcgttattatattccaacctcaccttttgcatgagtcattgcatcatcatgcatatgc

SEQ ID NO: 243515 - DNA, 449 bp, Glycine max
  unsure (1)..(449): unsure at all n locations
agaagtatcatatgttctatagtcacaactgaaataagctagtaagaatgacaaatatcaaggaaggatcatcaaccagaatctcacagtcattgtttcactcaagctcaagtgtttaggctcattgcatcataaacaactaaaacaagtcctaatctttgcatttcatctcataccatacagaaaatgaatccgaaggactttctaggcttgtaatgaggttatgctgccaacaaatcgtggtttttctaggattcaaaagcttagattctatgagagcattcatccatagataaacctttacttttcattcattttcaccccaatacttgccttttattgaagcacttagctntatttcattgatatgcagcacacatacttttatacatttntatttatacttacagntnnttttaacacataaaacagtgtgtgtatatacagaa

SEQ ID NO: 243516 - DNA, 259 bp, Glycine max
  unsure (1)..(259): unsure at all n locations
ccacccccccccctatgannncccccccaggcgcctgaataactgaccccccnccnccccgccccccccgcgcggccggcgtttcttccgcacccccacgacaagcaaacacggcacaaaacggcacaccgcgcgccgacgcacaccgccgcgcaaggaggcacaccagcccgaggcccgcgcacacccgacaccgaaggaccagcccggcacccggcacccccagacaagcgcgcaacccgagagaaaccacagagac

SEQ ID NO: 243517 - DNA, 260 bp, Glycine max
  unsure (1)..(260): unsure at all n locations
tttgactaccatctcacgtgcactcacttagggagtgggcccgtgctagtatccaacaagacatacctgagcttatcgatattagatgcaccaactcataatcatgtgtgagaaactagcgggctaatgagaacccacatttncaaagacaattgaacatatgcatattattggtagcattcccaaagcaatttatacttgtgctgccaatatgcgtatttagatgatagaaacctctatattaactgacatcttcctgt

SEQ ID NO: 243518 - DNA, 344 bp, Glycine max
  unsure (1)..(344): unsure at all n locations
caatgtgcaacacatggagtccaaaatatttttggtctcgtgacttgtaaaattttacctatcaagaccaaaatcaataaacttgtatgagtagtgtaacaatttataactataaaataaaaaacttcattaagcatgattgaattctcactcactaacacataattacttncattgtccgtcaccacttgaataacattcttttctccaatctcctcaacaaagctatcttaaagctcaaagatcttttgaccagtcttcatgtattcagaagatccacactcctcacaaactgtgttcccaatgaacaatttacaaaaaatcaatcaatcttattcttctat

SEQ ID NO: 243519 - DNA, 377 bp, Glycine max
ggcactcgtgacttcaaagtatcaaacctttcaccaacaaagggttgaagaccatcgaacctgtccaaaaacttttgatgaagagaggaatcttctccaccatgtaaatgtccttctttatcaatgggatgagcaccctttttcacccaagagccatcatgctctttacggtaaccaaaggatgcaatcacatcagcgcctattagaaaggatctcttgattggaacataaggttcagaatcaagaggaatgctgaagtgttgaacgaagagggtgactacgtgtggatatggtaatggagcatataatcgcatgccttaccatgtgatatcaactaagtgaggcaatcaattgttgggcttatgaaagccacatac

SEQ ID NO: 243520 - DNA, 279 bp, Glycine max
ggaggccatggataagagcttggaggaacaaggagatgaatgagggaagagggagagaagaccaccaaattttgtgctctaaatgagctttgaaatctgaagtttaatattcaaatgatcaaatttgaaaaaaatgcacacacatgacctctatttatagcctaagtgtcacacaaaattggagggaaatctaaatttcacttgaatttgaaactgaatttgtggagccaaactttggagccaaaatttcactaattatgattagcgaattttagctat

SEQ ID NO: 243521 - DNA, 451 bp, Glycine max
  unsure (1)..(451): unsure at all n locations
cacacttgttctatgctttttaatatatcatgtcttcataatggtttgtcatcattaaaacattagcttctggaaggcctttgtctcaacattatttaatttgtttttaactgtatatcctctctcattgagggtcattttgattgtattcattcaaacttgtagtttggaaagctaggggtggcttaattatcaaagaatgcttcgtgtgtatcaatctcacggtgagataaagggtgtgccaaaattggcccaaagaatacttgttgtaagccaagagtgacaaggaaagatacttgttttgtaatctattntgattagtagaactcttctaaggttgaaagagaactagaattaagcatgatttagagtgaaccaatataaaattaagtgttaccattatgctcttgtggctctgctcattttctctttgaagtatctttagacacac

SEQ ID NO: 243522 - DNA, 396 bp, Glycine max
cacgaacacattctgctagattatcaagagaggttatgaagaatacctagatccataatacgtagcggaattaacaattataaggagcaattgattggtgatcttcttcaaccaaatcattgttttcctttgttgagaccttcattctctcctcaaatggggagaagggaagttgtttcttgatttggtgtattggggaccacaaccatgctttgggtttttaacctattagagttttcattattccctaacgggccaaacctatttccacttttaagcccatattaattctctgatgatagcctaataggctcaccaaattacatcacttatattgagcccatagaacaatataaataactaatataaatgttatcatataatatgtacgccaca

SEQ ID NO: 243523 - DNA, 407 bp, Glycine max
  unsure (1)..(407): unsure at all n locations
ttgagacagtttcacttctgatgaaagaattcaacagctttactactgatgaaagaatgaatcataatagtaacgagacgaagatcaaaagtaaaattttgcaccatctctatgagaagcagagacaaagcccttactatgataatctttgtctcccttttatttattgccaatggaattagagatgtcactaccaactcgataaatattggttcttttgtatttccctcacattactttgtaatggaattagcgcctttgatgcactaccacattattatctcacttcaagggttacttcatttctagttactttgttagttattcacactntacttttgtgcttagtatcggcataaggcatgaacatgatcgcttataagaaaggctatatatattttaatctt

SEQ ID NO: 243524 - DNA, 294 bp, Glycine max
tctcagaagcaaccgctttctggaggaattctctggaaaccacgtgggcctagttgctactttgcaccccatttttactaaatacaccccctttcacttttttggtgattctttattcgtaacgctatgaaactctacgaattttgtaacgatgcttgttttctttccgtaatgttacgaaaccttacggattatgtaatcatcccctttttgccttccggaacgttatgaaacttcatggattgggcactaacacttccttttaatttctggcatgtcacggaacctcacgga

SEQ ID NO: 243525 - DNA, 408 bp, Glycine max
  unsure (1)..(408): unsure at all n locations
taaaacgctgtccagctctcgttaaccgctggatcttctcgacatttgctctgcaacttcacaaaacacttgtccatgatctgaccgttgggatctttgagaagatatttggagtgtgctagaagcctcttaatgaagcttctagagaaagctacatgaagctgcctgngtaaaaacgctgcccagccttcgctaaccgttggatcttttcaaaatttggtctgcaacttcacaagacaaatttccatgatctgaccgttgcgatctttgagaagatgtctggagtgtgttagaaatctcttaatgaagcttttggaggaaacctcttaatgaagcttctagagaaagctacatgaagctgcctgggtaanaaagctgcctagccttttgttaaccgtggatattctc

SEQ ID NO: 243526 - DNA, 360 bp, Glycine max
aaaaaatcagaattaacaatagtcataaacggaaatttctttgattcctatcatcagcttcacattcttacatgcaatacatacagccaaatatgcaatgcatttataataaagatctaattgctaaacaataataacattcactatttctaaatctacacattggataaaataaaaacagatattgaattggggatgcaaccttcaaatatgggcctgaaccagacagatcaaccttaaatgaaataaatattcacgtacaagttagaccaaagtagaatgcctttacgatttactacacataaaatgctctaacacaaataaaaggatcatgccatcactcacccttccaataaacaa

SEQ ID NO: 243527 - DNA, 407 bp, Glycine max
agccacttatgatagccgccgatgatcccattactgcttcccctaagctctctgtcctttcttcacgccgcatcccatgccttgcgaactccttggagtaccctcgcgttgtggtcactgaaaccccgtgcgatgaaaggcgtgatgctttcgtctgatggcactcctctcatggggtagccaagctgtcttatggcgaggacgggattataattaatacaaccccttgttccatcaagggaatatttggacatccttcgcatgaagataaaatcctgattcttccttccttctagcgagggaaaccaaaaacagacgctcctccatgctagccaagagatggtcccaatttgcctttccttttacgacgcacgagcggtgaccttcgtacggatagacgggcctac

SEQ ID NO: 243528 - DNA, 383 bp, Glycine max
ggacactactcttaaaacaaaaatgacatacaacctcctcccataaatacaaacatcaatgtaaatttagagcaagcttatgcgcatatttccctacgaacgttcacttgcacaaaacatcctattaactaagaaaaatgcacccatatacaatcaagggagcttcattacctagatcatttacatgtactcccaaggtgtatttgttatttacatcacacacgcctccttggctaaatttacatacatgcatactcaaagcatttcggggtaccaaaaattgcacatgcgctcatcttggtatttctaatacctatacatatacaaacttcatgatgaatcttgactacctacgcaataaggggctacatttcatgctcttt

SEQ ID NO: 243529 - DNA, 351 bp, Glycine max
cctgcagatatgtcgcgggggtcaggagaccttggggacgtcaggtggggtgctattgcccaaaaccaagcttgaccaatcccgacccaacccgggcatagtcggtcagtgagaacatgtgacgtacctaagcatgcgagctcctggcagtcaacagataaaaggaaaacaagaccacagagcaaggaggcttgtggtggctggccagctgtgaattttgtgtaatatgtggattgtggcctctggtaatcgattaccaagggtgggtaatcgattacaaggcttataattgaagacagggggctaagatggtctctggtaatcgattaccaaggggtgtaatcgattacc

SEQ ID NO: 243530 - DNA, 253 bp, Glycine max
tatatctagacgctccagaaacacaacaaaagctctgagcacattcaaacgaacataattacttactcgaatgcccgactgcttcccgtagtatatcgagaccctcgtaactgaaaccacaagccctagcaaactccaacggcaataaactttaacttggatgtccgaatgaatcccatgatatatccaggccatcgttactgaaaacagaagctatgagcgaattcggatgacaataactttttactcggat

SEQ ID NO: 243531 - DNA, 435 bp, Glycine max
tcggactttttagtaataagtcatcgacatttgaatttgctcatagcattcgttgtcaattacgagcgtctagatatattaaaggattcattcggacatccgagtaaaaagatattatctttctattttgctcagagcttctgttttcaatttcgagcatctcgatatattacaggactcaatcggatatccgagtcaaaagttattgtcgtttggatttgctacgagcttccggtttcaattacgagcgtctcaatatgctacgggacacaatcggacatccgagtaaaaagttattgtcgtgtgaatttactcagagcttccgtcgtcaattacgagcgtctcgatatattacaggattcatttggacatccgagtacaaagtcatcgtcgtctgattatggtcagggcttctgttctgaatttcagcatctc

SEQ ID NO: 243532 - DNA, 432 bp, Glycine max
  unsure (1)..(432): unsure at all n locations
acgctgctatttgtgcattcatcgcatccactaacagacgttgagcgccgtccaactgatggtactcgtcaccaccaccacctgctccagccataattcaacaggaaaaaaaaaatgtgcaataaaaattattaaggtttcaggacctcacaacactctactcacgtctcttagatggtagtacactcgtgtttaatgctctcaataggcttttgtgtaatgtattccctcttgccttttaccactcgtgtttcctcttaagttcctggatggaccaaattagacacacaaggtaatataaaataaaaggaaagacaatataatgatcacaaacagatctgatttgggataacaactcggactcgatttggataataatatattagatttggatttgataacaggtgagccttaattngggtaacagatatg

SEQ ID NO: 243533 - DNA, 212 bp, Glycine max
ggttgctccccatttttagaacggagacaaagggctcgaaatctacaacaaggttgggttcatagagaagtgtctacaggaggcgttggcgtgatttctggatgggttagggtttccttctatagacaggctgggccgctctacttggccaacattggtggcagacagcaatgcataaatactcgtcgctgatgagatgaacaccacgagat

SEQ ID NO: 243534 - DNA, 398 bp, Glycine max
  unsure (1)..(398): unsure at all n locations
aaggcgatctctggaacattttcattgaatttactgatgaaatatgtgcattttcaggtgaaaaagatgctaagttttgaattgcaaaatgtagcacttatgctaagctcaatagttgggctaagtgtagattcaacgcgcttatcacaaaggagaatctggcagagcatcagcatcaaagctgcatgctaagcacagcaggtgccttcagccaggctaagctcaagactggtgctaagcccaatttcacttactcgcactaagcgcgagggtggcgctaagtgcaacgtcgtgatttcagagcctatntaaagcctgtcttgtgcagaattatggtaacaactctctacagctcttacacgccttttaggacaacgtgtataacggctaggacacag

SEQ ID NO: 243535 - DNA, 267 bp, Glycine max
cacccgctacaaccccccccctcacccccccccccgcgccctggctaacttgactgaccccccccccacgccccccccggggcgggggggcatttctttgcaaaacagccaccacgagagagaggaaaagaaacaaccgagaccgtaggagaaaccacacctaggaaattccaaaagggggaaacaaaaagacaggcgaaaccacaacacccccgagaggggagagacgccaaccaagtcaggccagaaaagaacaacgcggggagc

SEQ ID NO: 243536 - DNA, 459 bp, Glycine max
ctcacgcgtacctgccagagcatatcgggggactctaatgtttcattgtacagcgttccctcagatcacacttctggtggattactatgcttatggaataattctgcttttgaggtagacagcagggtgaaaggcagcaacttcctaatgcttgcagatagatggataaaggatgatcagaggatatacatcgttaatatatatgccccctgtgacctacaggggaagagagctttgtgggaagagttgaggcaactaaaaacctctcacactgatggtctttggtgtttccttggggacttcaatagcatcaaaagtcaagaagaaagaataggcacatctcacagaatgggaagtagctctgatatctctgaattcaataattggatttctgatatggaactgcaggagatcaaatcctatggtagcagaattacttggttcagacccaatggatct

SEQ ID NO: 243537 - DNA, 352 bp, Glycine max
  unsure (1)..(352): unsure at all n locations
tcccacatacaccaattaactatgaacgatcattaagcatgaaccgtaattaagcgtagagacaattaatcaagcactaagcatgcctggattaatagcaaccaatacagaataattagtgaagaggagaagctgatcagaatttaatagtaataatagaacctcaaagagagctgtgcttgatcctcaagagaaaacaacgctggaaacttagccttccattaatcagtacagaacaaaattgtagattgaagcacgaaacacaatcttattgctaaaatgaaaagtgactacaacgaanaagagagtagcactcttaaactacaacgaaagagagagagaggagagagac

SEQ ID NO: 243538 - DNA, 425 bp, Glycine max
  unsure (1)..(425): unsure at all n locations
aagcaagcatcttgcctgtgcgagctatgttgcntttggaggaagcaagcagctcgcttgggcgagccgagctcgcttgggtgagctgttgtgcaacctccacccctcatttcctataaataggcatgagggaggactgaagggtccaacatctgaaatcaacaagatttgagtgaaattagtgggaagaaggagaaagaagaagaaaaatcaaggctgaggcactttcgtaatgtttccgtgattgattccgtgatcgntcttcatcattctttgtctgttcttcatcgttcatcattcttcgactagttagctnttatttttgaagctttgaattcattctatgcacccttaggggtccatcctcgctntacatgtcttcatcttcattcttctaccattggngatcttttttctttgtttta

SEQ ID NO: 243539 - DNA, 203 bp, Glycine max
cccctgtgacaggtgacggatgcgcacgccctttgaaggcgaaagcgtgtacccctctgaagacgacggcatgccactctttgaaggcgaggacatgtacccctctgaaggtgagggcgtgcagcccctcacaaggcgagagcatgcagctctctgaaggcgagggcatgcagccctccaaaagcgataggtactagtaccca

SEQ ID NO: 243540 - DNA, 445 bp, Glycine max
  unsure (1)..(445): unsure at all n locations
ggtgctggaactacttttatggacttgatggggcctatgcaagttgaaagccttggaggaaagaggtatgcctatgtggttgtggatgatttctccagatttacctgngtcaactttatcagagagaaatcagacacctttgaagtattcaaggagttgagtctaagacttcaaagagaaaaagactgtgtcatcaagagaatcaggagtgaccatggcagagagtttgaaaacagccagtttactgaattctgcacatctgaaggcatcactcatgagttctctgcagccattacaccacaacaaaatggcatagttgaaaggaaaaacaggactttgcaagaagctgctagggtcatgcttcatgccaaagaacttccctataatctctgggctgaagccatgaacacagcatgctacatccacaacagagtcacacttagaa

SEQ ID NO: 243541 - DNA, 291 bp, Glycine max
gaaacgaggatatgggctacgtgggagtacgtgagctcacttggaggtgggcaacacgggatggtgggtttatgcgcgcattgcggatatggaaagcttgttgtgcaccatcgtccgaccgccacctagtaccacatgtgatgggtaccccataatcctacaagcttgatatgaggaactgttgaagggtgaaacttcctgcttttattgttgaccacagaccggtacctgaagatatgtcgcggaggtcaggataccttgcggacgtcaggtggggtgctattgcccaaa

SEQ ID NO: 243542 - DNA, 419 bp, Glycine max
  unsure (1)..(419): unsure at all n locations
tttcttcccacccatggggcatcctctacctccaagtcatcaatccaatcgttaaactccttaatgctactatctccgtcccctctgtggcagttccccgtcctctctgctggatgtcttacattgttgaagtcacccaagatactccatagtcccccattgtgtggatttctcagctgcttgatagtttcccatagtagtcttttattctgaatatcacatggtgaataaatgcagacaatgtgaacttgctggtcctccttaaaacctctcagatagataaaacctcctccaatgactntgtcttgtagtttgaaagtttctttgctccacatacacaatatccctcctgctgtgttgttgcanggctgcgcttccacctcaccacggaatcccccacaacgcttgacataaacact

SEQ ID NO: 243543 - DNA, 246 bp, Glycine max
agcttaactgaagcttcatcctcacatccctcttgttggactacgcctagcttaagtagcccttgtaggtttagactaattcaaactaagctctgcccttagatccttcttgttggactagactcaccttaaacaacttacgtaagttagactaattcaacctaaactctgtcctcagatccctcttgttagactagggttagatcaaccagcattatcatcacactatatcaataaaactaaaac

SEQ ID NO: 243544 - DNA, 425 bp, Glycine max
  unsure (1)..(425): unsure at all n locations
atgacttgttgagactctttatcacctttcattaggagttgntctggtcatgataattggggcttattggcttttggttttgctagatgttttccatgggtttttttttctagtacaccgagcttttcttgttcttttttatttttattgcataaattgtaaggtcattgatgtgtcatcattttctcatatttcttaacccttttggtcaccattttaattactgattagccttaattgtcaaattatttatgcaattttatcatttgggcctactgcattaattttgagttnttattttaatttcaggagaattataagcaattgggcttgaatccagaattgngcttgggcttgaatccataattgggcttggacttgaagagagcagactattttattctaccacattttatcttatctag

SEQ ID NO: 243545 - DNA, 393 bp, Glycine max
tcctacatttttttccccccccccccgcccctacctgatgcacctcgaaccccccgagcagaaccaagcccaacggcaggagttggaatcattccagacacacagaccacgccgcacacgtcaatgcccccctctccacctctcctaccgacacacgccgaatcctacacattcctcaaagccatggggccaacggcacttaaatctaaacccctacaagctggccaaaaccgtcctccaagatgccggcatgccggcccccctgcgaacacgacaaaaccgccacaacagcaaaaaactcataaagcggaccaccggctaacccccaaagggcacacggacaacaacttgagtgtgaataaacctccccccaacgaaccctcccatgcaccc

SEQ ID NO: 243546 - DNA, 313 bp, Glycine max
gctcacgagacaccacggaaatatgaaatccactgcccaaaaccaacagaaactcagttatccaataataccacattttttttaccacccttctatattttccacaagtgcacaaaactaatatcagcgtattacctggattaaaaactgcatgacatacaaagcgatatgaaaactgccatttatttaaataggccatgctacacacatcatggaggtttataccaacgaaaccttataaaatacgatgcctcaaaatattctttaaaaaacagaggacccgtcaggaatttttttctcactacaggacaat

SEQ ID NO: 243547 - DNA, 387 bp, Glycine max
  unsure (1)..(387): unsure at all n locations
aagagaacgagagagagagaaagagattgtggcgtggaaattgaacgagaataacgagagaagctgaactttgaagtgtgtctcacaagtttctcatttgtgacaagtgttacacatgtctctatttatagcctacgtcactaactaaatgaatattccaaagaatatgccaaaggcatcttagcatattccctttagatgccacaagcttagctacttacacccctccaatagctaagctcaccccatgccaaaatacatgagaatacaaaaaagtccctactacaaagactaatcaaaatgccctgaaatacaaggctaataccctatattactaaggtaccnttaacttataggggaccctacaaacctaaaatgacccaaata

SEQ ID NO: 243548 - DNA, 322 bp, Glycine max
  unsure (1)..(322): unsure at all n locations
gagggagagggagagagagagctnttgaaaatgtggcgctgagtgaggagagagagggctgctttttggttctaataaaagggctctctctttttctattattttatttaagcaatgtcacatgtctccatttgagtggagcaagaagggcccactttctctctttgactgtgacccatactcagtcacaaaagtgaggaaaatctgacctttgaaacgctaaaaatcctgcctcggtttgcgtgctgtttctctggttccagtttctcgcgtttctctgcgtccgtcggggccagttttcgaaagcaagccatatatatat

SEQ ID NO: 243549 - DNA, 366 bp, Glycine max
  unsure (1)..(366): unsure at all n locations
accaggagaggcaagaaacacacactatcgcctttttccggatgtgtacacagcagtcatatctgttcctaatgacaccatgtctgatcaagaactcatcacatgtcagataccacattcgagggcttcggttgagaccatacaaagactatttcaacaagcacaccttgatctcctcttcttcaaaaccttcacgctggttcatgtagatggtttccttaagatttccatggagaaaacctgtcttaacatccangctgtcaagttccaaatactactgatttaccataccacgtgtgattctaattgaacaatgcttcataacgggtgaagaaatctcttgtgaatcaattccttcaacctatg

SEQ ID NO: 243550 - DNA, 181 bp, Glycine max
cggaggcggatgaaataacggatgaggtatttccctgaattgtgacagacatagatttctccttttaaaaaagcactatcggcatgcacaaaaaaatctttaatcggatttcttgtgtcattaatcgtctgatgttcagattgttttcctcgcgggctggcgcgcctcagaaagtaaagct

SEQ ID NO: 243551 - DNA, 377 bp, Glycine max
ggggtgggccattcttggatggccttgattttctcagggtccacttggaccccatttctaccaactacaaaacctaacaaaactatattatctacccaacaggtacccttatctatcatcgcatacagggtgttttttctaaggactgaaagaactcgcctgagatgccctaagtgatcatctacgctcctactatacactaaaatatcatgcaaataaacaactaccaatctacctatgaaatcccttaagacatgatgcataagcctacaaaggtgcttggtgattagtgagcccacagggatactagcattcaacaaacaaacttgtcttgaacagtttcactcacacctctttatctgattgcgataccactt

SEQ ID NO: 243552 - DNA, 409 bp, Glycine max
ccttatctatccacactcctcttttaactaaattaacctccttaaaaataattaccgatgaaaatagcgcaacaaataatcaaacatcaaacataattactaataatatatagatctatgtatcagggtgttacatgtaatcctctaaaggtgagggcgtgcagccctctgatggagaggacgtgtagccctctgaaggtgagggcgtgcagccctttgttggcgaggacatgtaatcctctgaaggtgagggcgtgcagccctcttgaaggtgaggacaagtagtccttggaaggtgaggacatgtagtcctctgaaagtgaggacgtgtagtcctccgaccgtgaggacgtgtagtcctctgaaggcgaggactcgtaaccctctgaaggtgacgacgtgtaatcct

SEQ ID NO: 243553 - DNA, 412 bp, Glycine max
  unsure (1)..(412): unsure at all n locations
aaangcaaagattggatattctgttagttgttatcaatgaatagcttaaaaacttgtgcttgagtgaaacagtagccgtaagactatggtttgagctactttccttgatatttgtcttatgattaacttcatctaactgtatagttcacattttgttctcctctttgtctagctgcatattctgtgaaaaaaagtgataggtacacattgcttcatctttctcatcatgcaatcaataaattttgatgcatacacctttgtacataaacactgcatatttttccacttgaggacaagtgagttgttctctttcgcttgaggacaagcaaaactataaatttggaggagtttgtagtcgatgaatacgactaactnttgtgtataaaacttgtgtatattgtatcaaacttct

SEQ ID NO: 243554 - DNA, 373 bp, Glycine max
  unsure (1)..(373): unsure at all n locations
atgggtaaggctgctaagactgaattaatgagggttattctacccnccattgatagatctctttgcttccattctgtaagtttagcctcgcatttgctaataatgggctgccacacagacctatttttagagctgacccctacaggaattccaaggtaagacaatggaatatccatttgactacaattgagagaagatgctgcctccttacaccagtcctcggatttgcccaaacacccaaattttctcttattgtagtttatcttaagaccacagaccaattcaaagcttttcaggatacactttagaattttccccgtatcttctccatatgcaatggccaccttcacgatttgaaatcaaataaagattg

SEQ ID NO: 243555 - DNA, 388 bp, Glycine max
  unsure (1)..(388): unsure at all n locations
gaagctncgccgagcgtccccattgaaaaacctttattcaaacctttcaaagttagtgataaggctaaacgaaaaattagggaacttagaaaaactaaatccttaattgaaggcgtaggtgacaatcatagcgaattactaaacaagattagtagtttgcttaaggtcattccagatactccccaagcttcggaaaatacttccaaaatggtaacaagaagtacctccaaattaattaatgttattaatgaagatagtgaccaaaacttagataacacaactgagataggatcagtgtcagaaaagaatataaatccattaaactccaaacactggaaaaccccctccaaattatattatcaacgtgcaactgcctctgacctctatt

SEQ ID NO: 243556 - DNA, 371 bp, Glycine max
caggagcactacttggagtctaaactagcccacctagatcatatactctttttgcataaacatatatcatgatcaaaatctacacgccactggatcagctagagagtcatattaagatataggagaccttcaatttctactaattcacacatgccaccaactgtatgatgcttctccaagatagtgatattattataaccaagcctatccagtgcataagcaattgataagccacttgaaccagcacccactattccaattctgcggtgtactggcatggaacgatgcacgttgcagaattgatcctctattgatctatttggatccatttctgatctcaatcctgaacctatggaggtattagaccagtg

SEQ ID NO: 243557 - DNA, 302 bp, Glycine max
  unsure (1)..(302): unsure at all n locations
tgacacgaatgaagntggcctacgaccccgacaccacgcccatggcctgcgattccgtcagaggagggcttctcttgacggagaggacacgggctacagaggaatactcttttagttgttgtttcgcctctacgagcttgcggcttggggcacaacctcgctattacggctctgttgctgctggcgtctggtggcaatcattgggaggcagccacaaccgcacaaggaggacaggggaagtggatgccaccgtcccgcgatgccggagcatggagaatgatgatgcgaacgacatgcaaaaa

SEQ ID NO: 243558 - DNA, 416 bp, Glycine max
  unsure (1)..(416): unsure at all n locations
ctgagctccaaaacaagaaggatgtgaaactgagaagagctattcctcttggagtccccatattcaactgaaattttccaagaacaagatgcaagtacacttcacttgaggcttttctaactgtaagtgtaaatcaacaaagatgttaatatggaacgttaacagtcctcaaatgggtgttgtttcatcactgtggtgttcaaaataagaaaagaaactcacttccttctttccatgctagaatctcattcaccgaaaaatcttctgtcagaccaaggggggggaaaatgacatgttnttggacagcataaagggaactaacatgcttgtcactgattcaggaagcctgtaacaaatattatatataatggccttaatcttagaacaacacatagggatgaataataaaccatatg

SEQ ID NO: 243559 - DNA, 392 bp, Glycine max
ttcatgatgaaactgaaggagaaggaaaaagcaaggaaatgagacaagtcactgagaccgaggtagaggtcattgtcacagccgagggcaagttggacgtggcaacaatggacgtggcaacaatggacggggttcaaatttcatcaacaacagttacgagaaaggaaaaagttcaacaagagaacgtggaagaggctatgcaagcacaagatatgataaatcttacacccgatggtataattgttaaaagattggtcactatgcttcagaatgtagattccgcaagaataaagttgaggaggagactaaccatgtggagcaaaaaagacgagaagtttgaacagtgctctaacagtggagaaatgaaggtagcaagaaacaatggtcctgaa

SEQ ID NO: 243560 - DNA, 415 bp, Glycine max
caaaatatctgtgggctgatcattagagttaatgaactcaatgacaatctctttggacagtagcttctcccgaataaagtgacaatcaatctctatgtgcttggtcctctcatggaagactgggtttgaagaaatgtgaagagcaacctgactatcacaatatagcttcatttgcaccacttcgcaaaatttcaactcttcaagaatttgtttaacccacataagttcacatgtaaccatagccatagatctgtattcagcctctgcactagatcgagcaacaacagtttgcttcttgcttttccaagaaataatattccctccaatggagacacaatatcttgatgtggatctcctattcataggacaaccagctcaatctgcatcacagtacctagatacttgtgtattacct

SEQ ID NO: 243561 - DNA, 412 bp, Glycine max
ttaagcaggtcttgctggagtctcttgtagatttacagatgatcgagcatatgtgtaatatgatcacccttgtgatcctcttctactcacaacatcttcaggcagctatggtgcctggagctttgtcgtactgatagagaagaaaatagagcttcagattggctagctcagttctctcactcaagggtacgttttttgttatcttatcaagctcctccaaagggattgtctgattctgcttgatgacttggggggagtagcttttcctactttagtacattagtacattagcttctgttcaattctctaggtatcttaaacactttcatgtgctcacaattggttcattttctatgtctttgaactctttcacgtgccccagagaattaatttaacgcatcattcttatatg

SEQ ID NO: 243562 - DNA, 377 bp, Glycine max
ggaaaaaatggtcattgacccgccccttttccatgacttaaccaaattacccaatgacggtgtaccatttgaaggtacactgaatgacgactggaaatttgatttctctgtccatgatgcccgccagttggtttgcaccaacaatgcggatatgactggacgtcttcttgccgggtcattggcttttgaaagccccatccttcactatttaattgtgcgtattttggcttcacggtctctcaaccttgcccaggtttctgaggaagatctaattatcatgtgggcctttcatacaggacgtcaacttgactgggaacacttatccagatattgcatgcataaggcattgcgattaaatggctcactaccatatccat

SEQ ID NO: 243563 - DNA, 441 bp, Glycine max
  unsure (1)..(441): unsure at all n locations
tctgtgacctagccattttttattagtctacagaggcctttgcctccctcgcccagtattatgatcagccgttgagatgcttcacttttggggacttccagctatcacccatggtggaagaatttgaagagatcctaggatgtcctctagcgggaaggagaccatacctcttctcagggttctatccctcattagctagaatttctaagatagtccaaatctcggcgcaggaattagaccacagaaagcaagtcgaaaatggggtggttggaataccgagaaaatgtttggaggcaaaagcaagaatcttggcaggtagaggcgaatgggccccgttcacaaacatcttgcactgttgatcttcggaggagtcctctttccaaatgtggatgggttggtggacctagcagcgatcaacgcttntttcacctatcatgacaa

SEQ ID NO: 243564 - DNA, 411 bp, Glycine max
cttgttcctttttatgctactaatagataagctacttattgtaaattatgttttctttaataccttgttattaatgatatttgggtacaattacagacatgtacacagtggaatttcaacaacgaggacttcctcatgtccatttattggtatttttacacgccaacaacaaatatccatctcgaaacgatattgatcatattatatcagcataaataccttcacaggaagatgatccagaactctataaattagtgcaaaatcacatggttcatggcccatgtggaattttgaggcctacatcttcatgcatgaaggaaagcagatgcagtcgattttattctaaagagttttacccacaactcttatatatggagatggttatcctgttgattatagaataaacactcg

SEQ ID NO: 243565 - DNA, 277 bp, Glycine max
  unsure (1)..(277): unsure at all n locations
catttgaacgccacccacaatgaataagagccttcgaccaaatcgatcaacacccgcagttgagacaagagtggaagcaaggttgaccagtcccagtataacagccgaaagcaacgccgagttattgccgattaccacagactgaaacaggttcggcgcataaaaggcgacagtgttgatccccgaaagttgctgagacaacggaatcgcaaacgccatcaccaactggggccgatactggtgctcataaatgactgcaaaactntcccgttccatg

SEQ ID NO: 243566 - DNA, 436 bp, Glycine max
cgatgataatgaatttatcaatttaagtcaaaggaaaaaattaattctagggataattaattaaagattaactaatatattggagattacccaaacaatttgatcatgcaatttggtataaaacattatctacttagatatactaattacatgaaaatgatcactactatgcaattgattgagtattagaatggttggttccaaataaacattagaataaggataacaattaattaacataaaacaatgaaaaattccattaagaacaaggacatgagtatatttagatagttacatcataaccctcgaactagagggactagccactcatgatcagagcaaaactagcaatcctataaaaagtaaacatagacatgctaataagaatgaatgatgatcacgatcctttctaacggtggttgccatgctcttcagc

SEQ ID NO: 243567 - DNA, 424 bp, Glycine max
  unsure (1)..(424): unsure at all n locations
gagctcagcacctcttggcccgctaagcccagcttaaaaactcaagttacagaatggatctggggcttagcgcaggatagcgtgcttagcggtgctacaataaaatttttcccgagaagaagtggcgcttagtgcatcatccatgctaagcccactagttaaagttcaattaccgtaaagatgcagggcttagcatagtgatgtgcgcttagctgaactattcagccaaccaatcaggggtctctgcgtttagcacgagaaagctcggcttagtgcgtgaagactgagcgcttagcgcanggtctgcgcttatcggataaacaattgcaaaaaaatttatgagtctttttctgtctatctcttcacacaagcttataaccccttgttcattaccaaacaagctgagattaatcacaatcacaag

SEQ ID NO: 243568 - DNA, 288 bp, Glycine max
tatgaatctacgatagtatgctgctaagccaagaaagctcctactcttaaacactgacttatgactctcccaacttatcaccgcctctaccttggaaggatctactgctatccctcccatagatataatgtgccctaacaagctcacctcatctagcccaaaatcacacttggacaacttagcatacagtctattgtctttaagggtttgcaacacaactctcaaatgctcctcatgttcctctctagtcttagaatacactaagatatcatctatgaagaccactac

SEQ ID NO: 243569 - DNA, 459 bp, Glycine max
  unsure (1)..(459): unsure at all n locations
actcaggatgtctttgaaattgctggntnntttttttatactnganccgaaatatatgcttaaatgtttgtttttatgaaaatttgtttaaaggtgttaattacaaggattaagccatatatagtttaagtgtaaggttctaaggccagagtattattttgaaacaataattgttttctcgggactgcctttttaatagtgcagtaccctatacctagcctagagatgaaattgtctaaaattatgcacaaatgggctgatcacacacactgatcaatgtactatatctggctttatatgagcaagatatctgccccagctccttatctgcagcaatcttttctccaattttcaacaatttgggattcacaccatgaacattgcaaattacagaatttggtaaatcctgagtagcaactgagagacgaacaacctgaatataaatcataaataattaag

SEQ ID NO: 243570 - DNA, 356 bp, Glycine max
cagccccttacgcacttgtctctctttcgaattcgcttggaaaaatcgtttccgagaacaatatctaatccgaggcgcttcgcaaatgtttacgtaacgttaccataaggacattctcgaaggtttccaccgttcttccacgctcttcattcgatcttcatcgttcttcgatcttcaacgggtaagtacctcgaaccaagcctttcgattcattctatgtacccgtggcggtccacattgtgcttcttgtatttgtattctcggtacatttactttgtatactccctgctgacgtgcttaagccatcttatttatgtcattccttgcttaacctaaaaataatatcaaattccacc

SEQ ID NO: 243571 - DNA, 194 bp, Glycine max
ccccttatggttatgagagactcaaacccttagttagggcctacaaggcctaaaaagtaaaaagatgtattgtatgtttcatatctatcaatgcaaacatttgttttcttctcctattatcctttcttaatttaatttcatgtatcattcatccttgcattatctttgagggttaggcgctccacagagggtaa

SEQ ID NO: 243572 - DNA, 419 bp, Glycine max
  unsure (1)..(419): unsure at all n locations
ctaacacantcgctgcccaagtttcatggtcttgcaggcgaacatcctcataagcatcttaaggagttccatattgtctgttccaccatgaaaccccctgatgtccaggaagatcatatctttctaaaggcttttcctcattctctggagggagtggcaaaagattggttgtactaccttgctcccaggtccattaccagctgggatgaccttaagagggtgttcttggagaaattcttccctgcatctaggaccactaccatcagaaaaagacattacaggcatcagacaacttagtgaagagagcttgtatgagtactgggaaagatccaagaaattgtgtgcaagcttgtctcaccaccagatttctgagaaactccttctgctatatttctatgagggacttagcaacatggaaa

SEQ ID NO: 243573 - DNA, 428 bp, Glycine max
gaggggggagcacgaaattgaacgaagaaaaagggagagaagctgaactttgagtcgtgtctcacaagactcttattcatcaaagttacaacaagtgttacacatgcttctatttatagactatgtagctcccttgagaagcattcttgagaaaacttccttgagaagcttctttgagaaaaattccttgagaagctagagcttagctacacacacctctctcataactaagctaacctccttgagaagcttcctaaagaagattcctaaagaagctagagcttagctacacatacctctctaatagctaagctcacctctttgagatgagaagctagaacttagctacacaccctctattatagctatgctcaccctcatgaccaacaattatgaaaatacgaataaatgtgcctactacaaagact

SEQ ID NO: 243574 - DNA, 260 bp, Glycine max
cctttgccaaaacgaattcgccaaggactaaccgcctgaattctttttgcgcctctcttctccctctttcaaaagaacaaaggactaaccgcctgaattcttttgcgtctcccttctcccatgtcaaagaattcaaaacgacacagtctgagaactcttttgattcttcccattcccttatacaaaagtgttcaaaggactaacctgctgagaattttttgcatccccattacaaagtataaaggttaacagcctgagat

SEQ ID NO: 243575 - DNA, 441 bp, Glycine max
gagcttagttattgaaggggtgtaacactagctctgatgaatgagagtcttgtgagacacacttcaaagctcaatttctctccctatcttttcttcattcccacgccacttttgctctctttctctctctctctctctcattctcttcctccattgaaacttcctctttaagcttcttatccaagacattctcttggtggtgaagcttcttcttccatggcttattcattggagtccatcaatcaccaccatagcagcggccatcattggagtccttcttagcacacctacagaggaagaagctccatatgcaaacatacatgcattgctttcctgatcaacaggcggccaaccataggggccaaatgtagttgaatgataactcttattattatacattgcaccagcatcgccaggaacataatctctaccctatgatag

SEQ ID NO: 243576 - DNA, 289 bp, Glycine max
  unsure (1)..(289): unsure at all n locations
tcccccccccgccgcctacttactaccctcaccccnccnccccccccncccccgccccgcggctgctggttttccggcccccagagagattgcataacccctaactgaaatacaagccaacatgtttaacacaaagttatatggtgaaccccctacggtggatgacgcaagaaattccttaaaagattcttaaggaaagacaactacttttataaagaaatacagaacttatggcaaacatgcgtatatacttggacacaatgaatatggcagaaccttctgacatgca

SEQ ID NO: 243577 - DNA, 390 bp, Glycine max
tatatcaactcgcatgggctgtatgactgcaacatgattacactgacattgttgtagtatgaccacaacaagttatggaacaaaactcatatataattgcttagaagccattatatcatgctctaattaaaattgaagttaagcttctataatgcgtattaaaggtattattagagaattatatgaattaactatgtgaaactttaatcttgattgaagaacgacaatcaaaatttgcatataaattttatcctttttgatagattgcgtatggtgttattttttaaataatgagaattacgctctgattgctaagattttgtgcggaacttttggagaagtgtgctacaacatcttgaatttctaggagcttcacttaatcatggactg

SEQ ID NO: 243578 - DNA, 281 bp, Glycine max
  unsure (1)..(281): unsure at all n locations
cacagagcctggccctagcatggctgcacactggcatggatgcgtgccaggccgcgtcatacttacatgcactagccatcaagtcaaactaggtgcgattcaattagagggattacgtcatgaaagctttcacatgttcttcctccacatcctttcatgcatttcgcgacactctcttaacaccatncaacttgggagcttcaaccccctcaaaaccaaccttcgaagatcaccatcattctcttttactcatggatggagcctgtgcgtactgcaccttc

SEQ ID NO: 243579 - DNA, 371 bp, Glycine max
ctatataacatataacaatgataccatatatttttatagttgcacacattaaatgcatttgcagatgatgaggtcagtaacaaaataataataattgcaaagtattcaaaaaatcagtgtattgaatattgcatatatgaataataatatataaataataataaattatggaagtctgggatacgttaagcatgggttaaatttttttaaaataataataataattattattattattatataatcggtattatttattataattattaaaatagtaataataataatactaatagtaatactaatattaatcgaattaaatattaaaaccatatataaatatataataatactgattctagtgtaatatg

SEQ ID NO: 243580 - DNA, 394 bp, Glycine max
  unsure (1)..(394): unsure at all n locations
cataaatccatatacgcttgtataaatgctccctataagataaatctgaggaactcgtctatntctccttttgtgagagtatagacttttatctctgaacttttgctgaactataggttatctgcaactcatatgatatggaaccatatttcagaaaaggatgagagactctgcacctaccggcaatgtacttgagcctttaaatgctgccagagaagttgttggggatgttgattcaataagtatgtgattccttatcacaacttctttttcttcttcttctaattaggggctgatctctatatcattctttttgcatatatctattaaacgatgaacttgcttcatggctcataaatgatgataatagaacttgcggtgtaacctgtgaaca

SEQ ID NO: 243581 - DNA, 434 bp, Glycine max
aattacctacatatgttatcttgcatacctattaaggatgagacataccatgatgaaactaattatttcttctctattggatctaaacatgagatatgccataaaatgttatacaacatatttaaaggttagataggaatgagagtagaggagttaaagacctatagtaaaataacaataaaaaagaaagatattataaacaagttaaatgatcatgattactcacccaaacgatagtgaccttcttacatggctcactttcgcctctacctttatctatcattaatataagtgaatacaatatcttcttgttgataaatggaaaaagaaaatatgaaattagatttgactagtcatgttggacagtgaaacaatataatcatatcaataataaagtaaagatgttttaataccattatgcttacatcgagtga

SEQ ID NO: 243582 - DNA, 407 bp, Glycine max
  unsure (1)..(407): unsure at all n locations
tgcagccgagaccggagctgattcatcttgagcatccagagtaaaccatcacaatatgctactccccagaagtctgaatatttgacatcaaccaaattctgtttgttgaacaatcatactcaattccaaaacagctaacaacaggatgatcatgtgcttgtgtaacaaactatntacactggcaacttcagtcagaaaggatttgttctatacaggaatgttgtctagagaatatccatcaaattcaaactcattctcagctggtcccatgccttcttgctgtgagcattagattagaaacacgtgagaaaaattgatttattcacaacggaaaattacaaacaactatacaagcatgtgataatattctatgtccatagaaagggatgaatggacaaaccttgttt

SEQ ID NO: 243583 - DNA, 447 bp, Glycine max
  unsure (1)..(447): unsure at all n locations
atgttgtattaggggaggttgttgtatgccattnncgcnccaagagtagtgtcccactggtaaaactaactttccaaatgtttgccttcgcaggaaatggccccgaggaagcttgcctcaaagaggtccaggaaggacaaggcagccgaagaaactagttccgctccggagtatgacagtcaccgctttaggagcgctgtacactagcagcgcttcgaggccatcaagggatggtcgtttctccgggagcgacgcgtccagctcagggacgacgagtatactgatttccaggaggaaaaagggcgccggcagtgggcaccactggttactcccatggccaagtttgatccagaaatagtccttgagttntatgccaatgcttggccaacagaggagggcgtgcgtgacatgagatcctgtgtaaggggtcagtggatcccgtttgat

SEQ ID NO: 243584 - DNA, 330 bp, Glycine max
  unsure (1)..(330): unsure at all n locations
tgttttagtaccttatatattgtttttgtttggttttcatattactattaatttcattttattaagtaatgatatgataaatataatgtgatatcatcattatatcactatgatgttatatttaaaaaaaatttatatcattaattaaaaaaaaaaaaacacacccacttaaactcgactctaacaaattggctattctttattattatttatgttagcctcgactctaattgcagtttttattaagccgactctaacagaagtaattgcagntctcggtaagctaactctaatcttgttgctgttgcagtagccatataatttctagtt

SEQ ID NO: 243585 - DNA, 446 bp, Glycine max
  unsure (1)..(446): unsure at all n locations
aagaagaaagaggagaagcaaatgtttctagatatctcanaagttgttcaaagaagtttaaaagttgtaaaaattgtttgaatgcaagtcaaggtcttgcttttatagattcttcatgtctggtcaagaaaaccattgaaagagttgtaaccttgagaaaatcttgagaaaaccatttgaagagttacatctcttgattttttattcagaacttgtcactagtaatcgattacacaaagcattttatatgtgactcttcacaattgaatttgaattttaacgttcagatatactagtaatcgattaccaatatattgtaatcgattacaccatttaaaaaacatttggaacgttacaaattcagttaaaagcttttgaaatcaaactntaccactggtaatcgattacaggtaattggtaatcgattaccagagagaatatactct

SEQ ID NO: 243586 - DNA, 315 bp, Glycine max
tcgttcctgagttgaataacacaattgatttgtttgtacccgaatcaaataaacattaaaatgcagtatctatgaagtgatcctaggtcgtctcccagtgagaaatgatcaaacaaacgttcataacatataataacaaaacagtaacgaaatggggggggggggtttgctctctttttcatataatccgctttcataacccttctcactattcctttctattccatacttgtttggcttttgttcctagctcactctcattctttctccattgatcttctattcctatctaattgtctcatctcttttttcttt

SEQ ID NO: 243587 - DNA, 246 bp, Glycine max
ctccaaggaacccgatcggtgacggcctcatgtaacaggtgggctagaggtatagatgggttacttatcgctaccatcgagagagctgcaagacgcaacgtcacagtaacgttttacactttgagacctatcgcacttttagaggctggacattctataaagcagcatgaattaagatatagggcggatacgtggaaaggaacgaaaacacagcgtggatgacatcgtcgcacccatatttgctgt

SEQ ID NO: 243588 - DNA, 384 bp, Glycine max
ttgatgataacaaagatgatgaccaaaagcccaagagaatgatttctagattgagtcaagaacaattcaagaatcaagtttcaagaatcaagattaatcaagatcaagattcaagactcaagattcaagaatcaagaaatgactcaatcaagacaagtactaaaaaggttttcaaaacattgagtagcacatgaagttttcacaaaagcttttaccaaagagtttttactctctggtaatcgattaccagtttactgtaatcgattaccagtagcacaatttgttttcaaaagctatcaaactgaatttacaacgttccaattaatttctaaatggtgtaatcgattacaagaatttggtaatcgattaccagtgcatctgaat

SEQ ID NO: 243589 - DNA, 413 bp, Glycine max
gcctccctcgcccaatattatgaccagcctttgaggagcttcaccttcggggacttacagttaacacccacggtggaagagcttgaagagatcctgcgatgccctctaggaggaatgaagccatacctcttgtcgggattctatccctccttagctagaatttctaagatagtcaaaatctcaacacaggaattataccgtgaaaagcaagtcgaaaatggggtggttggggtaccaacgaaatgtttggaagcaaaggcgagagtcttggcaagtcaaggcgaatgggccccgctcatggacatactgacacttttgatctttggggtggtcctctctccaaatgtggatgggttggtggaccgggcatcgattgatgcatttcttccttatacgaacgcaaggaaagccta

SEQ ID NO: 243590 - DNA, 345 bp, Glycine max
ataatagttcaaagcggagggaatctacacaactgactatgtaactaagcacagctcatgacgatacaggaaacctaccgtcgtgcaattcgagcatatatgaatacatcgcgtgtgcgagattaggccctgcaactccactggtccaagcttcccacctacgatcgtttctcttattttaaagccaaagcctaggccaattccctcactccgatgaagcctttgcagaaagaagaacacatatttttcctcttctatcaagacaaaccaagagatcctgaacacttcttccatcaagcttaacgaagtgatctctacttaccacaccaagcccgagtctcactc

SEQ ID NO: 243591 - DNA, 395 bp, Glycine max
agatgcagcggaagacaaaggaaaataggtgagaggaggcgtcatccattaaggaataagccatggaagaaggagcttcaccaccaagatgagccttggataagaagcttggagaggatgcttcaatggaggaaaagaaagagggagagaaagagagaggggggagcacgaaattgaaggaataaaagaggtatagaagtggaactttgaagtatgtctcacaagactctcattcatcaaagttacaacaagtgttacacatgcttctatttatagactaggtagcttccttgagaagctttcttgagaaaacttccttgagaagcttctttgagaacacttccttgagaagctagagcttagctacacacacctctctcataactaagcttacc

SEQ ID NO: 243592 - DNA, 410 bp, Glycine max
  unsure (1)..(410): unsure at all n locations
ctataacctgcctcaaaaaaataaacatgcaaaatcaatataaccagtgaattgatgccgaagaaactactgtactcactttcttaataaatgtaaagagatgacgtctgatgtccctttggaggtcttctggcaaattctcaaagagcatttcttcattcacacctcttgttgcggcccagttataacgttcagcttgtcgcactttcctacatcataggccaatcatataagtggactggaatatctctctcattntatatcatccacacattcatatgattagaatgcctgtattaaacgaatagattggtggatgtttttaagcgttagctccaacagacatgcaatcgcctgctaaacaacaacaacaaaactttatcccactaggtgaggtcggctacatggat

SEQ ID NO: 243593 - DNA, 406 bp, Glycine max
acctttttattgtttacctacaacgcactacaaggatgatttactttgtgaagcatgtcagacggggaaattgataaaacccctttatcaagcaaaaactctgttttcacctcaagatcacttgaattgttacatattaatttgattggcccaactagtacaacctttgtcaatggaaagagatatggtccggtagtaatgggtgactactcaacattgacatggggtatgtctgttgctcacaagaatgacacctttgagatcctttctaaattatgtaaaaggattcaaaatgaaaaaggagcatgcattactccaactcgaacaacattggcaagtggaaaagagatatatctcggtagtagtggacgactactcacgatggacatgtgttatgttccttgct

SEQ ID NO: 243594 - DNA, 423 bp, Glycine max
  unsure (1)..(423): unsure at all n locations
gaattttttttcattatctactcangctcccaaagagaaaacaaatacacttttagcttctaggctctattctaatggactcggtataccaccatgccccatcgtagttgtaatctccaccgctcatgttttaatcaacgactgctgactaatgattatggtcaacacaaaaatatgggcttagtaaatcttagctcagaatccgattattaacaagcgtagctaaatctttacctctctcttcgtcaagatcattcacacaatttcaaccgccccctgaatatgctcaactcttcacagtgggaaagtaaattatatatagctaaagagacaaattacattgaataattggcttaaatgccttgtaaaacaaaaaacaaactgacttgaatgaagattccactctcatccgactctntctat

SEQ ID NO: 243595 - DNA, 391 bp, Glycine max
  unsure (1)..(391): unsure at all n locations
atgctagcacgcgctaagcgcgtttgctgctcgctaagggaggcggntgtctcttctgcgctaagcgcaagattagcgctaagccaaatatcacttactcgcgctaagcgcgagaatggcactaagcacgccttcgaggtcagaaagccctttttaagcctgatttgtgtagaaaaaaagagaaagcgtgatgacgtgaaagatgtctgaattgactgtgaattgtgtgcagagaacagaggaaaaagctaagcaaggaagcaaaggtcctaacttttaggtagattataggttctagagttattttctaggttcttagaggtggaggagacatctccactgctttgtaatctggtattttctctaaaacccttctcctatttgtgaaagc

SEQ ID NO: 243596 - DNA, 371 bp, Glycine max
caccactatctaaattctctaatgacctgccgcattcaactcaactaatatacgtattataccctacgcatatcacatttaattattcgtttatgctatttaactttacaatatatattatatttaatgaaaataacacttaatcctactgaacagtcttccttactaatcatatatcaactatcgtatttattcaccatataatactatgaactttaatgatatatttaaacactatgtctattaaataaaatacttttattacacttaataaatacatcatattttttctcaacttatgataatcaaataaccctatctactgtaatatcctacactcacgataaatcatacatgcattcatcatacca

SEQ ID NO: 243597 - DNA, 402 bp, Glycine max
  unsure (1)..(402): unsure at all n locations
aggataaagctacgaaactatactgaatagccgaagaagctcttaaatcaaataatgaaagcattggaacaaaaaatagtttatatatatatatttaaaacacacacacactgcgttttgaataatcactaaaacttgagacttgagagcgcagctaagctaatctgatcacgcaagacataaaattaagaagcgggaccaatcgtggagaaggttaatcctattctccattaacctaaaggtaaaagggtagacagcacacactacatagtacacacacaaagatcatgttaaaagttaaaacgatctttttcttaaaacataatatttggtgagagaatngagcaaaaaagaccattctagaaccaatagtgaaaaataactataaacttatatatatgc

SEQ ID NO: 243598 - DNA, 313 bp, Glycine max
tgcgcttagctgagagggactcacttagcgctcatattgccgcaatgaatctcgcttagctgccatgactggcgcttagcatcatggacctcaattatggctataaggaattgcgcttggtgacaatatgtcacacctatccacggataagttgtcgcttaacgatcacgctgaagcttaactgaattcacatcgaatttaagttagcttatctcaaccttggccagcttagcggaccaaatcagcctcatattgcacggttgggcgctaaacgcttaacactcgcagcttaatgcattgacagagatgcact

SEQ ID NO: 243599 - DNA, 385 bp, Glycine max
ttgaacctgaatggcccgtcccatgtcagcccccaagtgtctcatcccaatcccatgttaatctatctgaggcatatggttccacaattacccaacatagcggtaattgtgttcttggttaggacccaccacccacattaatcttttcttcagacactagctccttcaattaatcaattgtgagtgctgagtagtagtagcaatgtgagcaaatatttctatcatttccctgcgtgatgaaaatgttgtaacgtaaacatttattgtgcatctcatttctcataaagcatttggaatctagtaaagattcatactagttggacatgcaaaagttgtcgccgttaataagatgcagcatctacacaataaggaaattgtcataaaa

SEQ ID NO: 243600 - DNA, 350 bp, Glycine max
catggaaggagcagtgttagcttggttccaatggatgcatcgaagtggtcaactttcgttatggtccgcctttttgcatgccattcatgcacgattttcatcttccacatatgaaggcccaacaggattactttgtaagcagacgcaacaatccacggtttcagcgtacctttcagaatttgaagctttggcaaaccgcatcattgggctgcctgcaccatttgtgcttagctgctatgtttcaggactgaacccaacgatttggcgagaggtgcatgtgatgcatcctcattccatggttcgagcgatctccttcgctaggttacatgaggagaaaatactggatgggc

SEQ ID NO: 243601 - DNA, 354 bp, Glycine max
  unsure (1)..(354): unsure at all n locations
gatgcccgagtactctggatttggtccgaccatgccctcctgatttccagctgggaaattggcgagtggaggaacgccccggcatttacgcaacaagcataatgtaaacctttacggttttaaaagctctatagttgggcctaggctttagagttttattgtgttaaagctttgtgtcttttgtttttgaatttataatacaaggatctttcttcatctgttcctggtctctacccattctcattcatttgcatgtttacttctttntctaacacggcagattcgatgacgagtcccccgaaggtactaatacctgggacccgtctatcaacttctagcaagaaatgaatcaaa

SEQ ID NO: 243602 - DNA, 427 bp, Glycine max
  unsure (1)..(427): unsure at all n locations
gatctatgaaggataaagcggctttatgtatctgttccgctcccgaatatgacagccaccgttttatgagcgctgagcaccagcagcgcttcgaggtcatcaagggatggtcatttctccgggagcgacgcgtccagctcagggatgacgagtataccgacttccaggaggagatagttcgccggcgttgggcatcactggttacccccatggctaagttcgacccagacatagtcctcgaattttatgctaatgcttggcctacagaggagggcgtgcgagatatgcgatcctgggtgaggggtcagtggatcccgttcgatgcggatgctctcagccagntcttgggataccctttagtgctagaagagggccaggaatgcgagtatggccagaggaggaaccggtccgatgggtttgatgagga

SEQ ID NO: 243603 - DNA, 339 bp, Glycine max
  unsure (1)..(339): unsure at all n locations
gtttgccttcgcatgaaatggccccgaggaagcttgcctcaaagaggtccaggaaggacaaggcagccgaaggaactagttccgctccggagtatgacagtcaccgctttatgagcgctgtacaccagcagcgcttcgaggccatcaagggatggtcgtttctccgggagcgacgcgtccagctcatggacgacgagtatactgatttccacgaggaaatatggcgccggcggtgggcaccactggttactcccatggccaagttngatccagaaatagtccttgagttttatgcccaatgcttgccaacagaggagggcgtgcgtgacatgagatcct

SEQ ID NO: 243604 - DNA, 364 bp, Glycine max
ttcactgaacgagtcagtgcaaagtactggctcagaacacaactgtggcgggttggcggttgtgtctcttttcctgatgatacaactgcatgtgttactttttgcccctagttatgtatactatgattgcgatatctaatatttctgcatcaatcttctctgataatggaacttaaacgactatggcatgggaaattcttctgtctttacatgtaagccctacatctttcaaagcacatttcacatgaaggttgtcctgccaacgtcagtgggtggagtagaagaccatcatctctactagctcttatgcaacaattgagcctggtgatatattctactgaatggttgagacttatacaaattc

SEQ ID NO: 243605 - DNA, 397 bp, Glycine max
  unsure (1)..(397): unsure at all n locations
agcattgaattgttgttttgcttctgtcttgagtggttaagcattgattttagcttcttctcttgatggttaagccttgttgcttctgccaagtggttaaactttgaggtatagttntttcttagtggttaagctttgatagtttcctggattgatgatttgagcttttgccaaatggccttgttgttcattttgcttgatggttaagctttgatgcttgctttggacttttggaagaagattgagaaagtcaatgatggtcgaagatttccagaagatatgcaccatgaccgcacctacattttgatttgtttctaaatttttgtttggccgatgtattttcgacatgtttagctatattcctattttcagacttattttcattccttgatgtgat

SEQ ID NO: 243606 - DNA, 385 bp, Glycine max
  unsure (1)..(385): unsure at all n locations
tttgcttcctctattaaacttaaactagacattgatacgtcattctaacaaaaaaattattactcaaattaaataattcaaaaaaaattccttaacttcaaaaacttcaagagtcacctctaaatagttttaactcacaaataccatcaacaaaagtttataaccgaaacgatcgcacatcaaatttctaagccacaaaaaccatgaacaaagaggattacaaataattactcataataattntaaaataaaaattctaattcaaaaaattaatactcttaaactttaccttcaaattttagtctaaccaaaaaaattattacttcaattaaatattgtgtcaatgatacaaataaaaatatntatttgcttgctctattaaact

SEQ ID NO: 243607 - DNA, 443 bp, Glycine max
  unsure (1)..(443): unsure at all n locations
tgcgaagggggtggaattcctagagctttttttttatgtttatcaaatataaaaaggcaaaaggtaatatagtagccgatgctctttctcggcgtcatgcattactttctatgcttgaaacaaaattggttggtcttgaatgtttgaaaagcatgtatgaaaatgatgaaacttttggagaaatttttaaaaattgtgaaaatttttcagaaaatggtttctttagacatgaaggctttcttttcaaagaaaacaaattgtgtgtgcctaaatgttctactagaaatttgcttgtttgtgaagcacatgaaggaggtttaatggggcattttggggtccaaaagactctagaaacattacaagaacattnttattggcctcatatgagaaaggatgtgcacaaatnttgtgaacattgcattgtatgtaaaaaggcaaagtct

SEQ ID NO: 243608 - DNA, 422 bp, Glycine max
ttttgaatagctagccgatcgctcaaagtccaaaagaaacttgtcttagcgtttatgcgagacaaagaccaacatgttagctatcatcaccaagtgccaataagaactaagtctagccacggcccacgagcatatggtggcagactagtatgcccaagtgtacgcggaataagtggctagaggaagggtgatcaactcgttacaccaataggcaaccatgtggatggaccgatttgctcttaccttgaatgggagtcaagaacttcctcgattgctagccaaggccaaagcaatggcgaacacctactccgactccgaggagatccacggacttctcgactattgtcagcatatgatatatctaatggcccatataattaggaaccgctagggaacttgtattgcactcatacttgactagc

SEQ ID NO: 243609 - DNA, 393 bp, Glycine max
gcagaaagcaatatattttggctatgtttccaataaatagttctatatatttagactacagtgcatataaatagttttttcctgataagcttttaaacagtggacataaacatttcttttatacaagtatcaagacttttaaaaattagtaaaaacaaaaactcatcattaaattggaaggagtgttttaaaaacttaactaattcaagccattaacataaaatgcaaggcatagtaatgatttaaaattggaaggagtattttaaaaagtgaacaagtttacatagaccgataattcgataaaatcatataacgatgtacacaaccttatgtcgttctcgcacagcaatagtgcaatacgaagagaataaccggcaccgaagtgctaccttt

SEQ ID NO: 243610 - DNA, 411 bp, Glycine max
  unsure (1)..(411): unsure at all n locations
ttttccttctgaagaaaattttctaatttacaaaattttcttctcacttattcatgatgatgcatgatgcacaaaagatatgatatggactaagatgcaacgtatagtataacaaccaatacaaatgccactcaagggagttgggcatgtaaaagacaaaacatcttcaagcttttctccaagcttcaagctttagtcttcatgttgctccccctatctctaaccatttccccctttctggctttgatgatgccaaacttgaatatgacattgagtgcatttggagggtccgagtcttgagattagagacttatttttcttagtcaatcctgaatgcttaagaaaatatncaattatatcatcatcatatatcttactatatatatatatatatatatatatatatatata

SEQ ID NO: 243611 - DNA, 384 bp, Glycine max
tacctcgagatatgtcgtaggggtcaggagaccttggggacgtcaggtggggtgctattgcccaaaaccaagcttgaccaatcccgacccaacccgggcatagtcagtcagtgagaacctgtgatgtacctaaacaggcgagctcctggcagtcaaccgattaaagaacaaagaccacatagcaaggaggcttgtgtggtggctggccagctatgaattttgagtgatatatggaatatggcctctggtaatcgattaccaagggtgtgttatcgattacaaggcttataaatgaatacaagaagttacgatggtctctggtgatcgattaccaacggtgtgtaatcgattactatgcctcaacatgggatcaggaagttgaga

SEQ ID NO: 243612 - DNA, 385 bp, Glycine max
gagcaagaagggcccactctctcttttgattgtgacccatactcagccacataagtgaggaaaatatgacctttgaaacgctaaaatcctgcctcagattgcgtgccgtttctctggttccagatcctcgcgtttctctgcgtccgtcggggccagttttcgaaagtacacaatatatatatcaaaacgctcagaataaaaccccgagcgtggttcaaaggttggtttcgttaaattttatgtcgcacgccaaacgatgattcttaaactaattaattaagaattaacccataacctcccagttatggacttctcttccttaattagcctaacccgcatatcttgcccccactattcctacttctaccaagaacatataggcata

SEQ ID NO: 243613 - DNA, 365 bp, Glycine max
  unsure (1)..(365): unsure at all n locations
agcattagacgatgcttttaccattgttatttattttcatcttatcaaaataattaggagtcctgattcatctcaaattaatttaacttttgacttaatagttcttattccctttggctttttcccagctaaaggaaaaacatcagctggagcatctcgtgaattaggtgtttggtttaggggaggggtaggaatgaagttgtcaaccattggggtggttccaatgagcgaggcggaaaacattcatattaacaccaacctaagccataactcttgcaaaaatattgcaagntgtaaatcaacatgttggagcaaggaattgacaaacacttaaaaaaaaacaattaaccctcacgatccaaaac

SEQ ID NO: 243614 - DNA, 412 bp, Glycine max
cccggagtacgacagtcaccgctttatgagcgttgtacaccagcagcgctttgaagccatcaagggatggtcgtttctccgggagcgacgcgtccagctcagggacgacgagtatactgatttccaggaggaaataaggcgccggcggtgggcaccactggttactcccatggccaagtttgatccagaaatagtccttgagttttacgccaatgcttggccaacagaggaaggcgtgcgtgacatgagatcctgggttaggggtcagtggatcccgttcgatgccgacgctatcagccagctcctgtgatatccgatggtattggaagagggccaggaatgcgagtatggccagaggaggaaccggtctgatgggttcgatgaggaggccatctgccagctgttatgtata

SEQ ID NO: 243615 - DNA, 235 bp, Glycine max
aagtacagagggaaaggggaaagcacacatcacattgatatttttaaatattgtgccctatgagtgaagtccaaatattagacatgcttgttggaatacacaactgacttgatgacaacagacatttgctaccatgcaatttgcccacagattcaggctaatcaagaaaaagggcaatgttcagctataactatgatgaattggatctttccaattttgctataaacagcatgca

SEQ ID NO: 243616 - DNA, 397 bp, Glycine max
agacactctatgtttcttgcggtggacacgaaactaatatgatgacccttttgagcaatgagcttggcaagttcaaggcttgggattaagtgtccgaaggctagccatggaaacattactaggtttgacaaaatttttgttttattaagaactcaatgcaaaaaaattattatggaccaaaaaaagtttaagtctttatttaactagcaaacattatattttgtttattgaatatattaaatttaagaaatattatatttaataagagtattaaatctaattatatattatatttaacaaatatattaaataatagcatttaatgttaatataaatactacattgatagcattaaatatatacattactaaacttgctcaaatccggtttactttat

SEQ ID NO: 243617 - DNA, 408 bp, Glycine max
  unsure (1)..(408): unsure at all n locations
ctaagnatgtattacctacacttaacagaaaatacttataacattacaaaataaccataaattgggagagtttgatacaatctatacaagttttatacacaaaagttagtcgttttcactgactaacacatacatgttcatagtccacacatatcttttcatacaagacacctattcactaaatatagctttaccatgtaacacaagttccctgagagttcaatactcggttcttaccgttttatactacttgcacgatctggtggacttgccgggttcgaccaagtttttggcgccgntgccagggaacttctttctatttggaaagttcttcaatcctacgtgtctattctttattctttgattaactgcgaatatttgctctcgattcatatctgtcttcttctt

SEQ ID NO: 243618 - DNA, 367 bp, Glycine max
  unsure (1)..(367): unsure at all n locations
gcttgagagtgcccttgtatatcgacgtgcttttatagtcttgcatttgatgataggagctattcaagttgtcatattaatgaagaatgggagagaggaaaaaaaatgtgtgattttccgcatcatttctttcaaatcaaagagttgatatctagttcctcttacccaacatctaatttgtatttcatgcaagtgtggaaaattgaatgtttgttgcttcaaaattcgagtaatgaagatgagttgactagaaccatggaaattgatatgaaaataaagtttgataaatattggagtgattatagcaatgcgctttcctttgngtgcattctagatccacactttataatcaaactttctgaagtat

SEQ ID NO: 243619 - DNA, 396 bp, Glycine max
aacagggcagaggcagaaaactctgcccaaaacacattcacatattacaactttccttactcaaataccccagtaacattctcttcgttccgattcgttaaccgttagatcgacttgaaaattttactggaggttcctagtatataattctacatttttaccgttgggatcttctagaaaatgtctagaacccaatatgtactacctttctcataaccagcaatgcacaagctatttctgcacatgttgaaaaattctgctacacaatttgacagctttttgctgcacacattggcagatttcgaaatccatcttacccatatccaattttgctcaaattggattctacaagtcctaaatcatgtataaatcatatctataccaaaaacaagcttc

SEQ ID NO: 243620 - DNA, 453 bp, Glycine max
  unsure (1)..(453): unsure at all n locations
gttctctctagaaagctactgaaggatgatttttatgtctataaatagaagcatgtgtaatacttgttgtaactttgatgaatgaaagtcttatgagacacacttcaaagttccagttctctccctcttttattcctttaattttgtgctccaccttctctcttttttttcctccattaaagcatcctcttcaagcttcttatccaaggcacattcttggtggtgaaactccttcttccatggcttattccatagtggatggtgcctcccctctcctcttctcctttgccttccgctgcatctccatggtggaaaagcaccattgaaggacctcattgaagctcanagatccagcctccatagaagctccacaagcaagcttccatcaagtggtaatcagagcacaagagcttcangtaggtgctccttaaacctccattgactttcagttta

SEQ ID NO: 243621 - DNA, 413 bp, Glycine max
tggtttctaattatgtgggccatcaaatctatcatgtgttgacagtaattgattagcccatgaatcttctcgggggccgtacacactttggcgatggcttttgctttggctaatagacgcgggaggtcttgacttccattcaaggtcaaggcgaacctatccatccacatagtcgcttcttgatgcaatgcatcaatcaacctccctcttgcttctttttcggcatacacttgtgcaaaatcctccactagcctttgttcatgggccacagactggttcaactcttccttgtattgccctatgatagctagcatgctttgctccgtggcttccaagtgttgagccaaacttctcttggaccttgcacaagcagctaactcttattataagatcatgccatgcacccgtgaccg

SEQ ID NO: 243622 - DNA, 330 bp, Glycine max
acaacccacgagagcacacgagctactatcgattcacaaagacaaccacaactcagcaccacgacacaactccttcataggcatcatgtaggaaacttataagacaaaaaaaaaaaaggtcacaaacaaaactactgccagaaactgatctagaacaagctatgaacgaacaaacatgcatgaatcacactcaaaatccacaagataggctaagaaggacaagaatacacgaacaaatgtatctagaactcaagcaacaaaataaaagagcaacacaaacttagaatagaacgcgacacttaatatgactaaacacgactctaaaacaac

SEQ ID NO: 243623 - DNA, 430 bp, Glycine max
tgtgtggagagatatctgtttttgctgctcacatgttatcacttcctaaggtatttcaaactaaagaaagattttttaattctattattattttttactgttactttattatgtattgttacctgtagtattcaagatagactatttcttccttaattggaaactttaaataatttatactgcatgaccctcaggtttcggatttctttacattgttaatacaaagagttactagcaagcttttggtgaagtctatgtgacacaaaagtttctagagaatttttgtggagaccaggtatatcaaaataagacatgttagtgctaaataatttatatgaagcttcactgtctagaacgagttgaatgttgtactggttcaccaattatatcatgcgataatttgaacggtcaaaagctaagacactgtgac

SEQ ID NO: 243624 - DNA, 399 bp, Glycine max
aagctccttcttccatggcttattccctagaggatggcgccgcctcttacctcttctccttatgcttacgctgcatctccatggtggaaaatcaccattaaaggacctcattgaagctcaaaaatccagcctccatagaagctccacaagcaatcttccatcaagtggtaatcagagcacaagagcttcaagtaggtgctccttaaacctccattatttattttgctttaccttctattacattgttgaatcatcatttattctccatgtatatcctcacatgtcttgtgctacatgttgtaacatgattctttacagtttccaccgattaaactcgctatataaggtagatgtgaacttctatgggtcaaattacatgatcttgttcttgaaccatga

SEQ ID NO: 243625 - DNA, 422 bp, Glycine max
  unsure (1)..(422): unsure at all n locations
gatttgacaaagtcgatgacaaanagcccatagaatgatttctagattaagtcaacaagaagaaatcaagaagattcaagaatcaagtgaaatttgatttcaagattcaagagaagaaatcaagaagacttcacaagggaagtattgaaaagtcttttcaaaaaacaaacatagcacagttttgttttttcaaaagagttttctcaaaattttcttaagttaccagagtttttactctctgtaatcgattatcagtttcttgtaatcgattaccagtggcaaagtttgattncaaaagttttcaactgaatttgcaacgttccaattgatttcaaaatggtgtaatcgattacaagatattggtaatcgcttaccagtgtatctgaacattgaaattcaaaatcaattgtgaagagtcatat

SEQ ID NO: 243626 - DNA, 289 bp, Glycine max
aacaaaagaattatatgctacccccaaccccaaataaatcaaataaagagaaaacgatatcatcaccgcatcatcactccaaattcatcaaagctaagcaagccatccccattcaaatcaaaaaggccaaacattgctctgcattggtccatggaatgtgattctcacaacctatacagcatcctttgcaagctttagggcgaataaacccaaacatatcagtgtcatggtacatatcaaaagcttgcgccaaaaacgtcgactactgatattccactgctggcaccat

SEQ ID NO: 243627 - DNA, 384 bp, Glycine max
  unsure (1)..(384): unsure at all n locations
tagtgcacgacattaagcactggtcgaattcctgcttgcctccttcaaaagcatttcttaaagattaaattattattccgtgataaaaatcttcaacaacacatttctcctcctttctgttgggtcaccactccggccgatcagctntgaccataaacccaacatgataaaaagtaacacacaaagatgatggcaacaattataaaaaccaacttttatatattgggcttcatcatcctgaggctgggtttccctcatcgtgcaaatacaatacacgaatctagtctaataaaaatgaattttgctctagtaaaagtaaaaggtgaacaaatttcacaaaacttgttggatttttggatttctctctatggcgagtaaatgcct

SEQ ID NO: 243628 - DNA, 418 bp, Glycine max
  unsure (1)..(418): unsure at all n locations
cctctaatgactatggcatcatttctggcgctaaactgctgagagttggaagccatcttctcaattaaatttctggcttcagcaagagtcatgtctccaagggctccaccactggcagcatctatcatacttttctccatattactgagtccttcataaaaatattggagaagaagctgttttgaaatctgatggtgggggcaactggcacatagtttcttaaatctctcccagtactcatacaggctctctccactgagttgtctaatacctgagatatccttcctgatggctgtggtcctggaagcagggaaatntttttctaagaatactctcttaaggtcatcccagctcgtgatggaccttggagcaaggtaatacagccagtcctttgccactccctctaatgaatgaggaa

SEQ ID NO: 243629 - DNA, 392 bp, Glycine max
atagccaattacaaaattacatagaaatgaaaagccctcaattgtggtggctattctctctttagtgtttcactcaatgtggagtgcttcttagtccaatagctcttaaagtggttggccccttgcttcttgactcgacttcttcaagggatggcaccaatcctcctttctaattccttatatggcaactcacacacaaggaaacaaagagacaagtgataaccaatgaccaaaaaaatgaaatgaaagctaaaccaatagatctttaacaagaaaaattttcaaggattattcaaaaattaaagcaatgaaaagcacataaaagcaagctatgactctaagagaaacctagaatggctctagagtatagttgaaaaactataaaaaaagac

SEQ ID NO: 243630 - DNA, 413 bp, Glycine max
  unsure (1)..(413): unsure at all n locations
aagctattgggtgtcgttgggtttataagattaagtatcatgctgatggctccgttgaacgatataaggctcgacttgtagccaaggggtatactcaaatggaaggattggatttccttgatactttttctccagttgcgaagctcacaacagtccgattattgttagcattggctgctattcatggttggcaccttcgtcagctcgatgttaacaatgcagtccttcatggagaattaaatgaagaagtctatatgcagctgcctccaggaatgcaactctcacaccttaatcaagtttgtcgattacaacgatcactntatggtttgaaacaggctagtcgacagtggtttcatcngttgtcctcatttcttcttactcatggtttcactcaagcttcaactgatcattcc

SEQ ID NO: 243631 - DNA, 400 bp, Glycine max
  unsure (1)..(400): unsure at all n locations
atatcaacatacagatcaacttgattcgtatcagccttacgaattaagttgatccgtatgatttacggatcaccccactcatgcacacccaacagaaatgcgtacctagtttgccaccgacgttgaaccaaccaccgcaacaatgaacaccggccccttcaccttcaccaaagctcacctatcgcaagaaaaaatcacatgaaagagagaaatggaagagaaaaagcttcgcagcaaaaagcattgtgcacccacctttttaaagaagaagatagaagaaggggcatttctggccttttcaaaaaatgttgggtgcacctagcatcaactcctacattataactngtcaccaagaagcccaacgtaaaagcccaaactaagagtacgtttggagtgtaat

SEQ ID NO: 243632 - DNA, 394 bp, Glycine max
acatgattagatttttgtcaaaattatattaatatgctaaaataactgagataagtaatgagttaccatgtatgtattcataactaatttttgttacttagaattaagttttgattctctgataatagatttagattataattatattttgttttttaaaacctagtatttggctatgtttttatgacatttgaacacttagtatttcttttaatacttgcttagtatgactgaacatgatgattatattgacttgctcttggattttatgattgtgtgtttaaactaattactttataatatatgactagtggtatgtacttacatttgatgttgcgtttatattttttttatatatcatataggtttatttgatattagaatgacttttgga

SEQ ID NO: 243633 - DNA, 390 bp, Glycine max
gggagaagtgtatttttacttgtttagcccctcaggcacttatctctctctcgaaatagcggaagaaaatacactggcgtgaaaacaatacacccgacgtgcttccgtaacagttacgagagtaattaccctcatacgctcgcccagccttcaagatataatagtcctccttccatttctacagtcttcatgagggaagtacctcaaaccaagctgtataattcattatatgaacaccgcgggggccacataatgttgcctgtagtgatagaaccatggccattgacctttgataccccctttcgacgcgcagtagccaagtatataagtcatacctcgcttgatctaataccaagataatactcctccgctcgatcgacacagaccatc

SEQ ID NO: 243634 - DNA, 403 bp, Glycine max
  unsure (1)..(403): unsure at all n locations
atctagcttgtgcactcttccggctgcatgcattaattaatgacttgactatcctaaaacgttatgaaaagaccggcttttggaattccaactaggaccaaaaatataagatgtgcatatttttattnttaatttgttctttctttcaaattaaatattttattctattactttcttcatccaaattaacatgaataattttttctgaaaataattaatataatactaactcctacacaaatcaaattaaaagttttaatttttttctaataaatctatttatttgttacgtgtttctttatttttcactaaaaatatggtttaattaaatatatttatatttttacatgttgctagtaatttctttagacattgttagtactgtcttcttctacaatggttc

SEQ ID NO: 243635 - DNA, 398 bp, Glycine max
gtgtaccccaaaaatcttgtggaaattggtcaaagggaaggaaaacatagacacagagacttttacatgcatggacacaaactttcaagcatatactcaacacacacgcactcacgctttcaagcatgttttcaaagtttccaatatgaggagtattgcccctaaactctcttgaggaagttgctgaaagggaagaaggaaaacgcacacaatttgaaacatgtgctcaaagtttccaatgagttgtattgcccctaaaatattttctggatgttgctcaaagggaaggaaaacacacgtgatttaaatctagatggggcacaaactgagtaatcatcatctatgtagtagtcctgaaaagtatcttgctctgttgctcatctctcttacatttgtgc

SEQ ID NO: 243636 - DNA, 458 bp, Glycine max
acacgggctcaccttcagaggactgcacgttcttatcttcatagggctacacgccctcacctttagaggactacacgtcctcgccttcagatggctacaagccctcgccttcagagggctacacgccctcgccttcagaggactgcacgtcctcgcctttgtagggctacacgccctcacctttagaggactacacgtcctcaccttcagaggactgcacgccctcaccttcagaggactgcatgtcctcgccttcgtagggctacacgcctcacctttagagagctatacgccctcaccatcagaggactacacctcctcccttttagagggctacgcgtcctcgccttcataggactacacatcctcgccattagaggactacacgtcctcgccatcagagagctacacgtcctcaccttcagaggactgcacgttctcaccttcagaggactgca

SEQ ID NO: 243637 - DNA, 413 bp, Glycine max
ggatgtctcctccacttctagaacctcacaatcactcaaactcatctcaagctctcaggacgacttcctcttcaagctctgatctctgcaggtcttcgcaaagcaaaatctctcaaaactctttggactcagacccttctctctctagaatctctaacatgcagaagatcttcaagaaaaggaccaaaatcccctccaaaatctgatttcaggcttaaataagtggctttgtttgtgctagcacgcttagcgcgactatggatcgctcaatgcgcattagtggattttggcttagcgtgcgcttttctcgctcaccggatggactgtagcagtgtgcttatggggatgacccttcgctcagttcagatgcacagctcatccttcttccagattctccctcacgctcagccgac

SEQ ID NO: 243638 - DNA, 388 bp, Glycine max
  unsure (1)..(388): unsure at all n locations
tcaatncattattgaggggattgaatagcaaagcttaccataacttcttgtattgatataccaatgatggttataacgtttgattctgaaaaaggttcttgctttagtttatgaaaaagcaaaacttatagattaaactggatcttagttcagctagctctaataatcacaagtagattatttttttcatggtgaaggtaatgaatcaaataattatttctacttttttcatgatttcatcatgattttgtagaataaaactaattaattttgtgtgttatccaaacactccgtgagtaaatttagtttcaccaaatgctgtttggttcgaatgtcaattcgtgaaaaatcacaaaactaaattcttaatccataatcaacaaatagc

SEQ ID NO: 243639 - DNA, 329 bp, Glycine max
tcccaagcaaacgaacaagcttccacaacctatgaaccaactaggatgttggaagccattctcggatgacacaaacttcaatacagtcagcatctccacacgcacaaacagaaacattaaaagatgaaggtccatcaccatcatcattgaaatgatccatcaccttcggttcagtgctctgaagctgacccatccatctcagagacttaatggcctgtgaaacaagatgtacggcagcaaactcggatgagactggatcaacaactggctgaaccacacgtgtggagactggacatacttcacaatccaaagagctatcatcacgaaac

SEQ ID NO: 243640 - DNA, 409 bp, Glycine max
  unsure (1)..(409): unsure at all n locations
ctatctactctatagaaaattccaaattaatgaaagtaagtacaatattttccaacattccattctgccctgattcaaataaacatagcccaattttgataagagtagaatcatatgaaagacaaaacttaacagcttacttagctggtccccgatcagagatatttctccataattttccctactttttcctcagggaaaacgaatcaccaccgtccatcctcatacaccacctatataatattctctccttcctcaatccttctcattacaagctgacgtggaggtagttgagacagttatcaaccactctttgtttgggcgcgagataccgttntagctcaaaacatcttgtatataaatcaatcacagaatctaagatctcagattcaacgaattcattcaatct

SEQ ID NO: 243641 - DNA, 422 bp, Glycine max
gtcgggcgatggtgcacaacaagttttccacatccacaatgcgcgcataaacccaccatcccctgttgcccacctccaactgagctcacgtactcccacgtagcccatatcctcgtttctctcaacaccgggtccccatcaatcctctcaagcttccacaacatccaagcaaaacaacattcaaacagcacaagctatcacagccaagcaaaagcagagcaaaggcagaaaactctgctcaaacaccaaccaaaatcacagcttttctcacttaaagaccacagtaacaatttcttcgatccaattcgttaaccgttggatcgactccataaatttactggaagtctatagtgcataagcctacattgtgaccgttgggatctactagcaaacatcaagaactcattctgtactactctttc

SEQ ID NO: 243642 - DNA, 309 bp, Glycine max
ctcctatgccgaccaccacatacacatttgcccttctgtgcaacaatctgaagcaattgaacagcctaaagcttatgttgcaaacatctacaacagacctccctaacttcagacccaaagatacccacaacagaacaattatgacctctccagcaacaagtacaatcctgagtggaggaatcatcccaaccttagatggtcgaatacttcacaacagacggtacaacgacaactacaacaacaaccttattttcagaatgctgctggcccaatcagaccatatgttcctccacccatccagcaacaaca

SEQ ID NO: 243643 - DNA, 305 bp, Glycine max
ccacgagttgactatttattgtatattctgttagcaacacaaattatgttgatgtgcttgaccctgagagggagctaacctgaactggttctacaagatatatgactatttatatgtaccccgtactattctctttagacatagataaacactatgtgtactcgaattgtgtcgtttcagccgtaatatgagtgtattagaagattctccttattcttagataaacacagaaagatcttaaatctttggtggaatattttgctagtgggggacactacaaaccacgttacagaggacatacttga

SEQ ID NO: 243644 - DNA, 359 bp, Glycine max
tccgtgagtgaggcatggtaatattgtctagagaaaactctcgattaggggtccttcaaaaattttagttgccaaattaatcccacaaatgatgttttttatcatcattttagtcccccagagatgtgtttttttttttgtcatcactttattccctcacagatgtctttctttcattgctctagcacttcttagatcgccaccaaattgttcctttgaaatttaattgcctcaaaattagtccctcatagtttctttgtgtcattacttttgtcttccttatggataaatatgctgtgacattaagaccacaaaatctttgggacactaacatggtgacaacttacatcttgagtgac

SEQ ID NO: 243645 - DNA, 389 bp, Glycine max
attctcctttgtcttccgctgcatctccatggtgtaaaatcaccattaaaggaactcattgaaactcaaagatccagcctccatagaagccccacaagcaagcttccatcaaggagcacattggtgtcttcttaccaagctcccaattgcattctgtaatgttttcccttcccaacccatagaattgccccaatgatctactttaataagtatgaattctccatctagcaagtcccacacatctagcatatttgtataacctctagtccttttttttttacctaaatcattcatggatatgacatttatcataaaaggaccgaaaattataattacctttaattgaactttcacttgcacttccaagagaagtataagactcaacatga

SEQ ID NO: 243646 - DNA, 361 bp, Glycine max
  unsure (1)..(361): unsure at all n locations
acaaataataactaataaacaaactgcgagttttatccaccaaatgtgatattctatgttaccccacactgcttgtttgaaaaagaggaaagttaacaaaataaaaacaattccttcttataaaatagcatagctcaagcaaggtgtcaatgtaagaatcaaactaatctatatgggccatggtcacctacataacctcggaacatcatgattatctgattgaaaactgaaatatcaagaatagatggatgaactcttttgatttggcttcccttcaagacgctctcaaattatcaacgatcacgatgttntaattggagtcaacactttggaaaattactactaaagagtaacatattat

SEQ ID NO: 243647 - DNA, 457 bp, Glycine max
cttcaactgcacaaggctcttaatatttgaagagtatccttgtggaaccttcacccgacgaagacactgacaaaaacttatcttctccttcttggacaaagtatggcaggctgggggcaagtaaattttcttcccatcagaccttggatgcaactgtgatcgtatacccatatcagctagatcttgacgagtattcaagccatccttcatcttgccttgaatgttaaggagcgtcccaatcacactgtcacaaacatttctccacatgcatgacatcaatacaatgtctaacgtcaagatcacaccagtacggaagatcaaagaaaattgacctcttcttccatatgcaactctgacttttatccttcttttgggtcttcccaaatatagtattcacgtgttgaacccgctgatatacctgctcaccagtcaacggtatcgatgcaatatcatgctc

SEQ ID NO: 243648 - DNA, 312 bp, Glycine max
cactaaaaccctattcatcagtctcacagagaagtctatggaaataagccaaactggaacgccataagctaccctcataacaaacaaaatgacttcactcccacaagcatcaacaaagatatgccacctacatagaacgcacaacggaaaaaaaatcaccaaactccccgcagaactataaattctgctcgtcgtcttctaaacctcagataatctctcatttaaagcccaaactcgaaaacaaggctcctcccacacggccacaagcttatctatcaactatgtcaatcgctgaatatgactccaatcacc

SEQ ID NO: 243649 - DNA, 228 bp, Glycine max
aaagggattttaaaggaccccccccagcggttgacaacatggataccagtgataaggagtatggtgttcttttgtcttaagtatttagaatgtcaatgattttacttaaatagggagtgggaaaacttatcaatttcaacttatattagcttgaggagcgaatctgaacagtctatgatcatcaagaaagtgccacattcttgcaaattaaaggtgttctctgaatca

SEQ ID NO: 243650 - DNA, 382 bp, Glycine max
taatgaattgggaatatctatccaattaatacttacataatatatatacgatagccaaccacttcatattagactcaattgcaaagaataagcctcatttaaccaatgcattggaatcaaggattcttattgtagtatgcactaacatacgtgacaaatttaagttcaatctacttaccgattgcctcctttatcatgtttaccaagctgttgcaacacctcaatttctatcatggctgcttctcgatacttctctataccacggacaatttttacggcaaccattatcttcctttctctataccagcattttaagacctgcctaaaagtacctttacccatgtttggtatggatcatatcacgcgaacatgatataagtat

SEQ ID NO: 243651 - DNA, 411 bp, Glycine max
  unsure (1)..(411): unsure at all n locations
gaatccaataatcaataatctatctttcaatcttctctcaacatcattcaatatctttcaactctttctacacaattttctgattcatttctcttcatctttctaaaagtttttgttcaacactttctcttatgagaaaagttctttgttcaaaaacttgtgttattcatccttttcattctcttctccctttgccaaaagaatgaaggactaaccgcctgaattcttttgtgtctctcatctcccttagaaaagattcataggactaaccgcctgagaattcttttgattcttcccttccccttaagcaaaagatttctaaggactaaccgcctgagatatctnttgtttcccctttacaaagattcaaaggactaaccccctgagaattctctgtcccaacacattgga

SEQ ID NO: 243652 - DNA, 408 bp, Glycine max
agatgatattccgagtactctggatttggtacgaccatgctctcctgatttccagctgggaaattggcgagtggaggaacgccccggcatttacgcaacaagcataatgtaaacctttacggttttaaaaagctctatagttgggcctaggctttagagctttcattttgttaaggctatgtgtcttttgtttttgaatttataatacaaggatctttcttcatctgttcctggtctctacccattctcattcatttgcatgcttacttctttctctaaaacggcagattcgatgacgagtcccccgaaggtactaatacctgtgacccgtctatcaacttcgagcaagaaatgaatcaaacggaagatgaaggagatgaggatgtgggacttccttcggcactagaa

SEQ ID NO: 243653 - DNA, 167 bp, Glycine max
cccgcatgaggagcacttaggcaatcaacttcctaaaagccaacctatagccaggagcaacacaaatcaactgagaatgggaagcgatatctggaggggaaaaagaccagaatagccaacaaacagatcaaaaggaaaaaagtcatgttatgcaaacggtttatgaa

SEQ ID NO: 243654 - DNA, 375 bp, Glycine max
accgcggctattagagacatcttgccaaacaaagtcaagttagccataactcacctgtgctttttcttcaatgctatatgtagcaaagtcattgatcctgtcaagtttgatgatgtggaaaatgaggccgcaattatactgtgccagttggagatgtattttccccctgctttctttgacatcatgattcacttgattgtgcatctagtcagagaaatcaaatgttgtggtcctatttatctacggtggatgtacccggttgagctatacatgaagatcttaaaagggtatacaaagaatctttatcgtccagaagcatctattgttgagaggtacattgcagaagaagccattgaatttgttacattacattga

SEQ ID NO: 243655 - DNA, 362 bp, Glycine max
gagaaaaggggactttttgaattttaccaccccaacactctaaacatcaacaccttgaacatccaccgtcactctatttaacatcaactctcaaacatctgtcaaacaatctgtcacatttgtcacagaacatccgagcatatcttcatcttccaaaagatgtttataagacactatatcctccaagaaaagatctttgctacaaaacatgcgtgatacatccttttcattctcttcatcctttgccaaaagaacgaaggactaaccacctaacttcttttgagtgtctctcactcctacaaaagacaccaaggactagccgcctgacaatccttttgattcttccctcccctcacgcaaag

SEQ ID NO: 243656 - DNA, 405 bp, Glycine max
  unsure (1)..(405): unsure at all n locations
ttttggtgacangccaccatgtagatgcagcggatgacaaatgataagaggtgagaggaggcgctatccactacggaataagccatggaagatagagctttaccaccaagatgagccttggataagaagcttgaaaggatgcttcaatgcccgaaaagaaagagggagagaaagagagaggggggagcatgaaattgaaggaataaaagagggagagaagtggaacttcgaagtatgtctcacaagactctcattcatcaaagttacaacaagggttacacatgcttctatttatagactaagtagctttcttgagaagctttcttgagaaaaccttcttgagaagcttctttgagaagactttcttgaaagctagagcttatctacacacacccctctaataac

SEQ ID NO: 243657 - DNA, 358 bp, Glycine max
aaacacatgagcttgattgaacatttacatccctatgtatttcaaaaggagtctccctagtttcatataataatgaaacactagctatgtgaattgtaagatagcatggaaaacaaaattgcataatagttcaactacgccaaactaattaattgagagaacctaattgtaacatccctaatctatggacattagtaatatataaaatacagaccttttatggatactctctacttataatagtaaaaggagacccttcaacacttttaatgatatgcgcctcatattacgaattgatgagaatacgataacataacctatatcgagaattgaagtcgaacgtggaccaaggcccaca

SEQ ID NO: 243658 - DNA, 255 bp, Glycine max
aaaattcaacaactcccataaaacacattcattagtctaatccttaaaagactctaaaattgctcaaccaccttgaatcataacgcccctcacaagaactggatagaaggcgactcaatatacggcggccccctggctacccagccacacccctgaagcccatttgaatctttcagcaaccacagcagctctcggttaatccttcaagaacccgtctatcctaaaagaggaaaaaagatccttaagaagggtaca

SEQ ID NO: 243659 - DNA, 410 bp, Glycine max
cacggccgacaagcccgttgacacgcggagatttacgtcatcttccgcgctcacaagatctgtcatactcacatttgagtcacgctgacgcgcggaaatacccgagtgggtatccgtataaacattcttttttgctgtctgtaagacgaaaagcctgatagcacgcatagactaccgtagtcttctgcgcccttcgtcaatcacggccgacaagcccgttgacacgcggagatttacgtcatcttccgcgctcacaagatctgtcatactcacatttgagtcacgctgacgcgcggaaatacccgagtgggtatgccgataaaccatactttttgctgtctgtatgacgaaaagcctgatagcacgcagagactaatgtcgtcttctacgcctttctcaatctgggccga

SEQ ID NO: 243660 - DNA, 293 bp, Glycine max
aatttctgacatcattctaaaatagtcacatttcttttacactctatgtgcaagtttcttggaaaaaaatgctattggatggccattctgatgtaatactgctccaataccagtgtcggaagcattagtttccaaaatgaagggcagctggaaattaggaagagctaacactggagctgaagtcatgactttctgcaattgaacaaatgttgtctctgcctctggtgtccacttgaatgcttcttttttaagtaaatctgtcaatggtgcagcaagctttgcatatccttttg

SEQ ID NO: 243661 - DNA, 365 bp, Glycine max
  unsure (1)..(365): unsure at all n locations
ccaacaaaancggatggatgaagattggatcccaatcgccaatcatatcacggaatccgaatgccgcagcagcgcgtcattggagtgcagagaggtaattgcgatagcacattggaatggttagggttttctcgggaaaaatgatgagaaaattctgagttttcactttctcgaagaccaaatgcggaaaagaaaaggttctggccgcttcagtcaatggatcaggtgaaacgcagtgcgagagaatttactgattcacagacacgtgtgatgagaaaaatgagtgaccgtcgcaattactgcgtaaaaattacccgcaatcaattggtcaacactcaacattacattgtccttgtattatcttg

SEQ ID NO: 243662 - DNA, 55 bp, Glycine max
  unsure (1)..(55): unsure at all n locations
gcagctgcaggcacttagaggacccggttttactcgatttttctttttgagngcg

SEQ ID NO: 243663 - DNA, 362 bp, Glycine max
aacgactatcggagaaaaattaccaagaacctttcgataaaaaagtaagattgaacctgaaatgatcatcaatgaagttagtcgatcacaacaattgattcataaaacacccttgctgagttatcttaaagagcttgtctaaaaatactaaaacaaaatcttctcaatccttgaagctttagggcatttgcatttctgaaagcccacattcattgtaattaagattatgtttgacaaaactagctaaaaactgaaaaactaactgggagttaaaagttgaaagtaaatgattagcttattaaattataagtggttgaagtaattgaaaagtgttaaatattaaaaaatttaacacgggtatt

SEQ ID NO: 243664 - DNA, 302 bp, Glycine max
  unsure (1)..(302): unsure at all n locations
ggcaaatgtgatttcgaatatctgcactttatgcaaaagtttgctgtcaaatatgtgcagcagaatnttggctttgtgcagaaaatgttgtgtatttgcttggtgtggaaagagcattacagattggattctggatgttttctacaagaatccaatggtcacaatgtacacttatgtgctatagacttccagtaaaattttctagtcgatccaacggttaacgaattgtaacgaagagaatgttactggggtatttaagtgagaaaagctgtgatattgtgttgtgttgggcagagttttct

SEQ ID NO: 243665 - DNA, 334 bp, Glycine max
tgatcataaccatatcacaaaacttgacccacgtgctataaagtgattccattgggaactctcctacccacaaacgatctaaatgtttttatccaaatacaaaaatattttttgtaagtatggatgttactatctttgagaaccaaccttttaatgacattcatcttcaggaggaagatcaaaggaagagtataatgtcctatttcacgagatactgaaacttgcattggtgcaccgaaacaacaaaagcaagattcattagctgaacccactctcataatgagtgacgtccttggtgaatccaaagctacatattccaagcacaataataacc

SEQ ID NO: 243666 - DNA, 342 bp, Glycine max
  unsure (1)..(342): unsure at all n locations
cccacaacaacccacaagccccacaaccccccctcacccccccccccccgctgaaccctaaaccccccnnnacaaaccaccacacaaaccacaacgagagaaaattatttcccaacacaaccccacaaccgaacaaccaaacccccagacccaaccccgccacccaacccccaccacaacaccaaccaaccacaccccacaacccaccacccccaccacccaccaccaacccccaaaaaacaccccccacacccacaccccacacagaaaacccaaacccccaccccccacacccaagccaacaccccaacaacccacccccacaaaccaccaccccacccc

SEQ ID NO: 243667 - DNA, 364 bp, Glycine max
ctagacttggagggaccacatgtagttccctttgaacccttaccacccactctgttatcatgccgagactcaggaaggccaacaggtttagccctctcaatatattctgaacaaaattcaatggcttcttttgcaatgtacctctcaacaataaatgcttctagacaatatagattgtttgtatacccttttaagatcttcatgtatcgctcatcctggtacatccaccacaaataaacaggaccacaacacttgatttctctgccagatcacaatcaagtgaatcatgatgtcaaagaagcagggggaaaatacatctccactgcacagtatatcgcgggctcattttcaactcatcaacttc

SEQ ID NO: 243668 - DNA, 341 bp, Glycine max
  unsure (1)..(341): unsure at all n locations
tttgttcttaagaatacacatgaagcagcaactacacagcacaattgaggacagcatgaaaacaacctattatgaaagacagctcgttcctttaaagtgacacaacacgatcaatctatgataattactgagataaacacattcaaagagagtacagagacatacatatcagcgattagttgtgtgctctatgctcattagggctcgcgtaaaaaagatcgcagttatttgaaaggaaaaaaaataggaaaaatgcaagcagagaatatgaaaatctacaaatgggctctggngagttgcatgaacggatngataaaagcaataacatgttatttgcccta

SEQ ID NO: 243669 - DNA, 364 bp, Glycine max
ttttttaaccctagccttgcaacaagtcctagggaagtagattctgagatggacaagataatccgcagtattgtgagtagcattctgaaagatgcttctgtgcctgatgctgagaaagatgttccaacatcttccaccccgaatgtttctgtgccggatgttgagaaagatgttccaacatcttccggtccatatgctgaagccctctcttcacccagtgaagaggaatcaacagaagaagaggatcaagcctcagaggagactcctgcaccacgggcaccagaaactgctccaggtgacctcattgacctggaagaagtcgaatctgatgaagaacccattgccaacaggtttggcacctgca

SEQ ID NO: 243670 - DNA, 214 bp, Glycine max
taaggaactccttatcaaggatgattaaaaggaagggaaagttacaaaaaaccacgatgtccaatcctcttagtgtagtcagcctgctgactgaatttgaatcctaataatgaaaggccctgatcagtaacactgtgataagcaggaatttggtgactaatacaagaccaggaaaacttatagtgcaaatgttatttttacgatgtttgcccaa

SEQ ID NO: 243671 - DNA, 394 bp, Glycine max
  unsure (1)..(394): unsure at all n locations
atttttgaccnccaaacatcaacggagagggttaccactactggaaaacctgaatgcaaatttttattgaggcaattgacttatacatttgtgaagccatagaaatagggccttatatacccgtcacagtagaaagaaccacaatagatggaatcacaacaagtggaagcacaacaatagaaaaacctatagatagatggtctgaagaggatagaagacgagtacaatataatttaaaagccaaaaacataattacatctgccctgtgaatggatgaatatttcacggtttcaaattgtaagagtgctaaggaaatgtgggacactctacaagtaacacatgaatgcacaacagattgttacaagatatangattaacacattaactcatgaat

SEQ ID NO: 243672 - DNA, 329 bp, Glycine max
  unsure (1)..(329): unsure at all n locations
tgaccatcttatattctttacaggcgccgatgttgaattgagagcgtatctatatattataagcctgaataggacctcactgggacnagatatgaccattagaatttctcgagagcttccgtngttcaatatcgagcgtctctatatatgatgcgcctcaatcgaacatccgtgtgacaagctttgaccatttgaatttctcaagagctcccgttgttacattacgagcgtatcgaaatatatgagcctgaatcgaacatccgtgtgaaaagttatgaccacttgaacttctaaagagctctcagtgttaattacgagcgttaaatata

SEQ ID NO: 243673 - DNA, 329 bp, Glycine max
  unsure (1)..(329): unsure at all n locations
aactgggctcacttcgaagagaagctaccttaagaagattcctaaagaagctagagcttaggttcacacacatcgntaatagcttaactcaccctattgagatgagaagctagagcttaactacacaccccctataagagcttagctcacccccatgacgaaatacgcgaaaatacaaaagattccctacaacgaagactacctcaaataccttgcaatacaaggcagaaaccctattctactataatagccaaaatacagtgcgcgtatgaaggaagaaacttattctaatatctacaaagataagcgggcgtgtacttagcccattg

SEQ ID NO: 243674 - DNA, 231 bp, Glycine max
tccgagcataaaaacacgattttagctaaagaatatcttcagaaattgccccctgctattatccagaattcataatactgtcgggaagggggtgttccactttctgtgctttctcctgtcgcccagtgatggcttgtgggagagctaagaccttcacattcaacatgcataatttatactatggttgaagccggaatgatatagtaacaggtggtgttcaagatactccca

SEQ ID NO: 243675 - DNA, 328 bp, Glycine max
  unsure (1)..(328): unsure at all n locations
ttcacaagcccaactcccttgagaggcatttgtattgggtgttatcttggttgtctcatcttactacattttgatatttgtattgcatcatgcatcatcgcggcttatgtgaacaaaagcttcttagttagaaagtttattcagaggagataactctctattataatcggttacatcctcatcgctatccattacaacaaagtggctaaagcttaaagaagtgaatctcatattagtttaatccattatagtagtcttttaatccactacactgttgcttgagatattgactgatttattcangagtctctgctttaatcgattgcct

SEQ ID NO: 243676 - DNA, 328 bp, Glycine max
acttttgaagcttttagcctgaagtatgatattgtataatggttgtttaagttattgttttaaaatttggttttgaggattttttgttcgtattaatgtatgaaagtataatgcttgtttaagatattttgcttggtgtgaatttatattttgaaggtttcagcggtttattactttatttatatcctgtatggtagtgaatatgcaattgaaaataagaacacatactaatggttgtagctttactttgaacacaaactattaagttttgctcaagtttctcctacttatgtgtttgagacccttaaatttagtgactcatttaaat

SEQ ID NO: 243677 - DNA, 332 bp, Glycine max
  unsure (1)..(332): unsure at all n locations
tcgcactnacacactnaatgacttacaccttacaggtttaatgctnttgggactatggatcatccgactaactcataccaatgaatggttgactcgtatataccactcaaatgacattgttagtccgttctaacttgcatttctatttcacacgttcttccattttcttcatttcaagctcagatagcttgcaattttcttcatgggcattgttgaacattctggtaaagttgagcaaagttgtgattattgaagaaaaaacatacattaattagttggcacgaggaaacaattatattgtatcaacaaatattaggactgctagagatgtg

SEQ ID NO: 243678 - DNA, 315 bp, Glycine max
accttgtcaataaatggttgaggatctctttcaataatgtcattgggatcaactatgtcttgagaattctctttctccaagagaagacttcacttattcttcacatctaccttcttatatgccttcccttcaaaccacttttctaaggatatggaccttggatgagcagttatggtagtcacaataggaataaagttggggttatccaatacatttgtagcttgactataaaaggtgtggtcctaatgcatgtggagtgtagatgatttggtgagatagggtgttaaatcctagccattcagcgagcttcatatt

SEQ ID NO: 243679 - DNA, 355 bp, Glycine max
gtgggccatcatcgatgagtgcaaagagaagctaaatctagcagcgactcacgagcaaaggctagaggatgagtacaccaagatatcagcagaaagggaagcaagggaaagggtaattgattcattgcaccaagaggaaacaatgtggattgaccaatttgctcttactttgaacaggagtcaagaacttccccgattgctagccaaggccaaagcaatggcggacacctactccgctcccgaggagatccacagacttctcagctattgtcagcatatgatagacttaatggaccatatgattagaaaccactatgaagtttgtattgtcgctcacaatcttgactagtataac

SEQ ID NO: 243680 - DNA, 99 bp, Glycine max
cccccccacaaccctacccccccccccaccaaccccaccccgacacccattaaaccaaaaccccccagcgaacaaccacgagggcgcaacaaccaccaa

SEQ ID NO: 243681 - DNA, 223 bp, Glycine max
tgtcgcgggggtcaggataccttggagacgtcaagtggtgtgctattgtccaaaaccaatcttgactattaccgacccaaccccggcatagtccggcagtgagaacctgtgatgtaccttagccggcgagctcctggcaggtcacagattataggaaaacaagaccaccatgcacggaggcttgtgtgggctggccacttgtgaattttgtgtaatatgtgga

SEQ ID NO: 243682 - DNA, 413 bp, Glycine max
  unsure (1)..(413): unsure at all n locations
cctaacgcacccacccagagggaagctccccaagttccaactccgaacacgactcgaccggccggtaattccaacacgacaaggaacttccctccgaggccatttccggaattcaccccactcccaatgacgtacgaagatcttttaccatccctcatcgccaatcatttggccgtggtaactcccggaagggtcctcgaaccccctttcccgaagtggtatgaccctaacgcaacttgcaagtaccatgggggtgtcccggcgcattccgtcgaaaaatgcttggcccttaaatacaaggtccaacatttaatggatgccgggatggctgactttccaagaagatcggnccaatgtgagaaccaacccgctcgccaatcattgatggggagcggttatgcagttgagtccat

SEQ ID NO: 243683 - DNA, 400 bp, Glycine max
  unsure (1)..(400): unsure at all n locations
aaatagataatttaagcatcattctcaaccctctccaaagtggtgaaatgaggaccttattggcagacttcaagttgtctatcaacgattatctgcaggagctcgttttttctcctgtgagattactagctgagattattgaattcaacatcaatcaccctgatttagtaagtgtttatactatgatttttagatgaatagtagcatggaatagggtcattactttttctggcagtgtagctcgtcaccccacattnttaagctgatattgcttcaaattcatcccaactccaatactataaattaaagtatttatttttctattggaatgaaagtctcttaattaaggacaaaacaagttaggccaagattcatcagatcattaaatatatagtttgat

SEQ ID NO: 243684 - DNA, 166 bp, Glycine max
tgtattaaatagggctatctactaggaagaatagactatcttaacataaacgaaatacgatctatgacctacatgatatatgacccatctcatatccaaaaaaaaaccactcactggtatgtgggacaacgatgctaaaaaaatatatgcggcgatttgtatatta

SEQ ID NO: 243685 - DNA, 170 bp, Glycine max
aaaacttcctatatcctctcttaataactcaatatgggcgttagacttataaaagaaatataagactgattcacacacttattccttttaaacacaattatataaactagcatagactgataaacacaaataaacattcataatacaattggcgtttggatggactgaac

SEQ ID NO: 243686 - DNA, 325 bp, Glycine max
accccgactgatctccctatgatttcacttagtgagagtgatctgacttacccattgtgaggcatgtcccatcatgtactcctaggtgcccgacgaagtttttcactgaaaaatggtaccatattgcatgtaggcttgagtctagcgtatttgttgcataacgcctgtgtttgactatcattgagttaacaattgcggtttgatgttatttctcggagtgtgtgaacttgaatgagtttgaataatgtgtgtgaatttgtgaaatgatgttatttatataaattcagctttaagattatatgttcacatgtcctaatgtttatta

SEQ ID NO: 243687 - DNA, 364 bp, Glycine max
atgtgcggccttctccttcttggaaggtaccacaggatatggtacttccgcaccttcattcacagctttctctcttttcttctctctagcttgttcacttctacttctctcttcattcttatttttctcatctttttcatttttttcattatctttttctttctctttttctacatctttttctttttctcggacatttatttctttttttcttgaccattatttgtttttctttgtcttgatttctttcacctttcacatcatctttcttttaccaatacctttctttccaacagctgtcttcttggaacaacactatcctcatcctgcgccttccacaaccctctactccttgtcatacaac

SEQ ID NO: 243688 - DNA, 313 bp, Glycine max
tttttctggcaagcgccacgactcgagttataccatacttatatgttgctgagcatatcatttagctcactctaaaactcatatgtataattttactatggatcccttaatatttatcaaacgatgattcgcgtaacaaaatcgcctctcgaattatatagttgggcaacggacagttgctacttgctaagtagtaagaaactttgttgtattattaaaaatgtcgagtgcaattaatagatgttgccttgattttttctccccgtgttaaggttttacagctctagtaaattaaactttcaagagaaagaag

SEQ ID NO: 243689 - DNA, 290 bp, Glycine max
ctttaacacacccatttctgtaatatgattctaaaactaacccattctgggaaattgccggtgtgaggaaacgcataactgcttcaatctagatgagcttatcaaatactttattcgcaagggtggtatctattcatggaatcatgtcttctgggagaccactcacgtactagatgcacttactaaatatgggctggcttttgatggaattgatacgatctctaacattcattctgattttatttcttttcacgtctaactgataaacatgcaccctttttcttgaggat

SEQ ID NO: 243690 - DNA, 383 bp, Glycine max
tttaccttctcttccattggtgattcttcatttttctccatgtatctcctctcatgtcttgttctaaatgttgttaacatgattctttatagtgtccaccaattaaacttgctatagaaactaaatttgattttctatggttcaaatttcttgttcttgttcttgaaccatgaattgtgttgagtttaggttcctttgagctttgtcttgttattttttttggctgaaaccttaaccataaaattcttacaaaaataattaagaataagagaacctcataaatctagagtgacttgtcacctattgtagttttgtgatagaagtcatgtctagtcatgaaacttgtcacataagaatttctatgttgtgctgaatttaatttc

SEQ ID NO: 243691 - DNA, 387 bp, Glycine max
  unsure (1)..(387): unsure at all n locations
ttcacccgacgaaggcactgacaaaaacttatcttctccttcttggacaaagtatggcaggctgggggcaagtaaattntcttcccatcaaaccttggatgcaactgtgatcttatacccatatcagctagatcttgacgggtattcaagccatccttcgtcttgccttgaatgttaaggagcgtcccaatcacactgtcacatacatntttctccacatgcataacatcaatacaatgtctaacgtcaagatcacactatttcgaaagatcaaagaaaatggacctcttcttccatatgcaactctgacttttatccttcttttgggtcttcccaaatacagtgttcaagtgttgaacccgctgatatacctgctcaccattcaac

SEQ ID NO: 243692 - DNA, 256 bp, Glycine max
gatgctatacctcttactttacatcccactcaactcccccatatttggggttattcgccttgaactatctgctctcctagaatctaaacaaagtatctggagatattcattgaagtttatggctcaattttgaaaatgtaatctatctcacagagggcgcaatggatacaactatcattcaaggtaagctttatggtcaattggcttgtatatacaatcatggccttcatcattgtcctcttcatacatttcttct

SEQ ID NO: 243693 - DNA, 383 bp, Glycine max
acacgcaaaaccgcgaactcatctgacatcattgtaccataatggtcgattggaatgtccattcgttcttgtaccctgcctgagtgcaaatgtatttcgaccggacagacagcatcgtgcccataagtcactctaaatggggtagtattagttgaatccttaggagaatttctacatgcccataaaacttgatctaacgttttattccaatttcttggcttttgggcaatgtgtctgttaatcaagctaattacaatcttattggctgcttcgacctgaccatatgcttgcgcgaatatggtgttaggttaataatccaaagccatttttgggcaaatctttcatattcttccccaacaactgaccttgatcatggtattgtt

SEQ ID NO: 243694 - DNA, 351 bp, Glycine max
tttccccacgcgcgaatcgcaggaacttatgcacaaaacataatgaaagccctgtcaacaatcatgatgagcatcacgggactcgtcctgagctggtgcatgctcaccatgaggtgaataaagagtatctttgggctgactgacgtgtcctctgtgctgctgaatgccaaggatcccatgtactctatgccgcctataaatttgctgcatagtaggtggtctcagcaccattttcaccctcagagacctccacaacaaatgatataacatgtgaaaccttgggagacgtatttggagtggcctctcatgcgacctcttgctctggctgaagtacctggctgaataagcctc

SEQ ID NO: 243695 - DNA, 313 bp, Glycine max
ctccggagcatgacaggcaccgctttatgagtgctgtactccagcagcgcttctaggccatcaagggatggtcgttttttcgggagcgacgcgtcctgctcagggacgacgagtttactgatttccaggatgaaataaggcgccggcggtgggcatcactggttactcccatggccaagcttgatccagaaatagtccttgtagtttatgccaatgcttggccaacagaggagggcgtgcgtgacatgacatcctgggtaaggggtcagtggatcccgtctgatgcctacgctattggacaactcctatgata

SEQ ID NO: 243696 - DNA, 255 bp, Glycine max
ggggcgtgggaactcgggggtacgatacctgtgacgcagtgggtgctattgccaaaccaactgaccatccacccacccggcatttcattacagacctggagtcctaacagtgagctcctgcagtcaacaaaaaaggaacaaacccaagcaggagatgtgtgggctgccactggaatttggcaatagggtatggctcggaatcatactaagggggaatcatactaagggggaatcataaaggctaaatgagacgga

SEQ ID NO: 243697 - DNA, 411 bp, Glycine max
  unsure (1)..(411): unsure at all n locations
aatcatgggaaagggtcttgcgaagttgcaaaccaaatttcgagaagatccaacggttaacgaaggctgggaagcgtttctaccgaggcagctccatgtagttttctctagaagcttcattaagaggcttccttcattaagaggcttctggcacactccagacatcttctcaaagatcccaacggtcagatcatggaaaggtgttttgtgaaattgcagaccacatttcgagaagatccaacggttaatgaaggctgggcagcgtttttaccgaggcagcttcatgtagctttctctagaagcttcattaacaagcttcctctagaagcttcctcgtggcttctttgagaagctntctcaagaggcttctttgagaagctacattcttatctatccacccctctattaact

SEQ ID NO: 243698 - DNA, 310 bp, Glycine max
  unsure (1)..(310): unsure at all n locations
gcacatctcacggcgaaaggcgtgttttatccacggnagaagcctccatagaggccattgcctccctcgcccagtattatgatcagccgatgaggtgcttcacctttggggacttccagctatcacctatgcgagaagaatctgaagagatcctaggatgccctctagggggaaggaaaccttacctcttctcagggttctatccctcattagctagacattccaagatagtccaaatctccgcgcacgaattacaccacaggaagcaagtccaaaatggcgtggttggaataccgagaaaatacttgga

SEQ ID NO: 243699 - DNA, 338 bp, Glycine max
aagtggtacctggagatatatcgcgggggtcaggagaccttggggacgtcaggtggggtgctattgcccaaaaccaagcttgaccaatcccaacccaacccgggcatagtcagtcagtgagaacctgtgacgtacctaaacaggtgagctcctggcagtcaaccaataaaagaacaaagaccacaaagcaaggaggcttgtgtggtggctggccacctatggatcttgagtgatatatggaatagggcctctggtaatcgattaccaagggtgtgtaatcgattacaaggcttaaaaatgaagacaggaagttaagatggcctctggtaatcgattac

SEQ ID NO: 243700 - DNA, 395 bp, Glycine max
acatgggactctgaatgcataaatcactgcgcctttggttttgggcgtgcagctgaataacagttctatccaaaattcacaaggaacctcgaacttgggttcaatgaatgaatctgcactaccctcttctgctgctggagtggcattaataagttccacctcagcttctatgtgccatgttgcaaatatgtcaatgttccccttcactgcttttgctgcttctgctaatactccagtaattggcactagcgctgttggtattccaaatgcaactctgcccaactttgaagctgtcaagcgtgctcatgagccttgtgtcaggatgggatttcgtcaagatccacaatgtgctcctctgataatatgtttcctggtcagatggtaaccgatgttgc

SEQ ID NO: 243701 - DNA, 123 bp, Glycine max
cgaaaaaccccaccgaccacacattacgacaacgcctccccacaaaaaacaaaaacgaactccgaacccccataaagaccaaccaacccgacaaaggagccaaaccgaaacgaaaaaaccccc

SEQ ID NO: 243702 - DNA, 326 bp, Glycine max
tgccttgattgtagacaattcaaccctgacccgcttaaagaacaacacataccacttatataaagcggacacaaaaaagcctaagcttcaaacacgaaattggattaatactgcatgtggctgccatcctttttttaaaactccataggatcctaacacctgtttcattattattcggctaatttttatggaaacaatacatggaatatataaatatttatacattccctataaaaaaagagaaaaaaaggtggtgcgcgccgttggaacatacagaaagagagtgtttgatatgccatgggatcaacaatgctcccacagagagt

SEQ ID NO: 243703 - DNA, 407 bp, Glycine max
aacccacaacacatgcacttgatgctaatgaaatcatctactacctctaaaataataatgatgaattatacacgaaaatattattgacaaactaatgatatctcaatattctgcttagaaataaaataaaaacacgactatcttttcaataaatactattaaaaaaggaaatgaaatatttatctataaaaatagttcattttattcacaatgataactataaaaggataaaaaaatattttatcaaaattatgaaaaagatatataatacttaagtattattatcaactctaaaatcaaaccctatcaaaaacagtaattacctgaattaaactatcacttatactacgaacaaaaaatcacaaccaggaatatcagtcgcgggtggatgggggctccccaccccc

SEQ ID NO: 243704 - DNA, 384 bp, Glycine max
taagaagtccaaaaatagccctttctaccagtgcacaaggcatcacagttgactgaacaatattggatatgtgctcataaacatccctccagagatgtccaactctatccctgttattgagagtgattgccaccagtaactccagacagaaaactgaagtgtcttcatcctcagatattctgctccctttcagatgttgagctccagcattaatgagcgctttcgcaagatgcaatagagattcagcttgcagaaatttgctctcagtgaatatgctgtcaacgtgacacttatgaattgcttgtgtagcttgctgatgagcgaccagttgttcttcagttggtattgattgtgcctcttcagcaccaagagacaagaggtgac

SEQ ID NO: 243705 - DNA, 273 bp, Glycine max
tcaatacaaaacagatattatatttgattttccatgatcgcaaatggggttgggatgtgatacatattcatttattctcttaactcagatacatagtacccactctcatgaaaaagcattacagttcacgtgcatactacaaccaccagccaatacttactttttggtttctctaaacacattgacgaggacaaatttacattactcacggcgcgctcctcgtatccgtctcttgcacatgcttgctctgcagctccactcgtataataactt

SEQ ID NO: 243706 - DNA, 125 bp, Glycine max
gcaaccccacaaccaaaacaacacgcaacacggccccacaccccagcaacacaaagaggaacacacccaccaccaacgcacacccagaaacccccccacacgacaaccaccaacgcaaaaaacca

SEQ ID NO: 243707 - DNA, 333 bp, Glycine max
  unsure (1)..(333): unsure at all n locations
tccgagcactctggattcggttcgaccatgctcttctgatttccagctgggaaattggcgagtggaggaacgctccggcatttacgccacaagcataatgtaaacctttacggttttaaaagctctatagtcgggcctaggctttacagtttccattttgttaaggctatgggtctctcgtttttgaatttataatacaaggatctgtcttcatctggtcctgggctctacccattctcattcatttgcatgtttactctcttgtctaaaacggcagattcgatgacgagtccnccgaaggtactaattcctgtgatccgtctatcaacttcg

SEQ ID NO: 243708 - DNA, 359 bp, Glycine max
  unsure (1)..(359): unsure at all n locations
agtgggacattactcttaaagcanaaatggcatataacctcctcccataaatacaaacatcaatgtaaatttagagcaagcttatgcgcatgtttccttacgaacgttcacttgcggaagacattctattaaccgaaaaaatgcacccatatacaatcaaggcagctttgttacctagattatttacacgtacttccaaggtgtatttgttacttacatcacacacatctccttggctaaattcacatacatgcatactccaagcattttggggtactcaaaaatgcacatgtgtacatcttggtatttctaatacctatacatacacaaacttcatgatgaatcttgactatctacac

SEQ ID NO: 243709 - DNA, 167 bp, Glycine max
atgatcatgatattgtcagtatgagggaagaatctgcaagaaatctctactaattacatggccgtacgaagaccaaaccactgcattttatcgttggttcgcacgttctcaaacttgtctacagtaaagaaattcatttcctactgtggcctgtcatcgacagattg

SEQ ID NO: 243710 - DNA, 307 bp, Glycine max
gcggattcgaatgacccctccgcggcttccacataaggcatagaggatgggcagctcaccaagatgtcttcctcgcctgatacgatgaccagatgcccttccactacgaatttcaacttttggtggagtgtatagggaacaactcccactgagtggatccacgggcgccccaacagacagttgtggggggggggggggggtgattctctttcgaacatgctcaattcttctttgcagtgtactcggctccttcagtttaaataatatcgtttcttgtctcccacccctatctcccatttctgttctt

SEQ ID NO: 243711 - DNA, 404 bp, Glycine max
  unsure (1)..(404): unsure at all n locations
gtgaggcaaactattggattgttagtnataccaaggaatgctactcttaagacaaaaatggcatacaacctccttcaataaacacaaacatcaatgtaaatttagagcaaactcatgcacatatttccttacgaacattcactcgcacaagatattcttctaactaagaaaaatgcacccatgcacaatcaaggcaccttcgttacctagattatttgtatgtacttccaaggtgtatttgctacctacatctcatgcacttccttggctaaatttacatacatgcgtactcaaagcatttggtgtaccaaaaattgcacatgtgcacattccggtatttctaatacttatgcatatacaaactttgtgatgaatcttggctatctacacaataaggtgataca

SEQ ID NO: 243712 - DNA, 392 bp, Glycine max
  unsure (1)..(392): unsure at all n locations
atattatactatttgagctcaactgagggcattttccactgatcatctagttntcagatttttacacttttaagattggatggagggaaagagatagaggaatagagtttgttactttaaaatttcatttcgagtaaaaattctccttatttgataatgtttttatattgaaatttatcatgtaaacttacaatcatttaatgcttattaattattataaacattttataatgttcattatgatccattcccttttcctttgtagctctcgttctgaacatactctctattctgctgcattnttccgtactgtgagttctactcatgttaatactatatggagctgaagtacgctcgagcaatgatgatgatgagtctgtaatttatgaatg

SEQ ID NO: 243713 - DNA, 290 bp, Glycine max
ggagatatgtcgcgggggtcaggagaccttggcgacgtcaggtggggtgctattgtccaaaaccaatcttgacctatctcgacccaacccgggcatagtttgtcagtgagaacttgagatgtacctaatcaggcgagctcctggcagtccacagataaaaggaacaaagaccacaaagcatcgaggcttgtggtggctggccagctgtgaactttgatagatatgtgggttatggcctctggtaatctattaccaacggtgggtaatcgattacaacgctataaaatgaa

SEQ ID NO: 243714 - DNA, 101 bp, Glycine max
cccccttcaaaccccgggccgcgcccacaagggggggtttttttcccacaaagagagcggccgcgacaacgcacgcagacaaaaaaacggcgacaagccaa

SEQ ID NO: 243715 - DNA, 337 bp, Glycine max
gctttttgtcaagaccaccgcatgataacaaaaatgatgacattcaagaatgacttctcgattgagtcaagaacacttcaaagatcaagtggaaatttgatttcaagaatcatgaatcaagagtcatgattcaggattccagattcatgattctagatcagagaataatcaagatcgctattcacgacctctagattcttgaatcaacagacgacttaatcaagataagtattaaagagttttttaaaacattgagtagcacaagaagtttcacacaatcattacctaagagttgtactctctggtgatcgcataccatattatagtaatcgattac

SEQ ID NO: 243716 - DNA, 363 bp, Glycine max
tatattatcatacaaaagacggtgttagtgaataaatcaacattagcttacaaaagtaaatggtatctttagtgaataatatatttacttgcacaaagtgatttccattgacaaatctaattgcaataagatgaatgagatgcaactggtgtgagactcctaaccggaaagatccaacttggcagcctatataagtggaccgatacaacattatatgaaccagtcataacataacccatgtcgggaatgatcatacacttcacagtaggcattgggcccgccacattcaacatacaaagaaggtattaatttcaacaattgttcttctaagccaaataattgaacatacggagagtatcatgt

SEQ ID NO: 243717 - DNA, 268 bp, Glycine max
gaccccgcaacatatctagacgctctacattgaatgttgaagctctgaccaaattcaaacgacgataactttttagtcggatgtctgattgagtcctgtaatatatccagacgcttgaaattgaatgttgaagctcttagaaaattcaaatgacaataacttttctactcacatgtctgattgagccacgtaatacatcgagacgatcgaattcgaattttgaagctctgacctaattcaaacgacgataaccttttactcggatgtc

SEQ ID NO: 243718 - DNA, 407 bp, Glycine max
  unsure (1)..(407): unsure at all n locations
caggcgagcttagctcgcccatgttagcattgttgcttcctccagaagcaacaaccttctggaggaatcttctggagggcccacagtggcctggttgctatttgcacccccatctttactaaatacaccccctgcctttttttttggtgattctttttttcgtaaagttatggaaacttacgaatttcgtaacgatacttgttttctttctgtaatgttacaaccttgcggattacataatcatccacttttttgacttacggaatgttacggaacctcactatntgtgcaacgatgcttccttttgatttccggtgtgtcatggaaccttacagattgtgcatcaatatattcttttgaattctcgcacgtcacggaattttacacattgtcttatgatgggtgcc

SEQ ID NO: 243719 - DNA, 355 bp, Glycine max
agttgtctgttcaattgtgtaatacaaaacactcgcaaccaaaaacatgatgatgtgagatgtttggtttcctaccattgaacaggtcataaggagttttctttatgatagggcttattaaaccatattcatgatataacatgcagtattaacggtttcagcccaataatattctggaagaggagtatcatttaataaggttctagcaatcttttccatagacctattttctctttcaacaaccccatctatttgagggggtcttggtgcagaaaagttatgtacaatgccatgcttatcacataataaatcaaatttcttattatcaaactctacccatgatcactcataatag

SEQ ID NO: 243720 - DNA, 351 bp, Glycine max
tgaaagagcctgcgtagtcgaagagaagttcaagtccatagccatcaaagtctgaaaagagtatgatgaactaagggatgtcaatatggccaccgatgaagccttggaatgagaaaccaataaagcccgaaaggaagaacacgaccaaagcagagttttgaggggctctatagggcagcaatagtgagctcacgctccgaagacgtgaaaggaatcatcacgggtcaaacgcatgatcttgatagacgagctaaaggcttgccttaggtcgaaaagaaatttgtcccaacagttaagcgagactgaagggaatatatgggccatcatcgatgagtgccaagagaagcttaa

SEQ ID NO: 243721 - DNA, 268 bp, Glycine max
ctacactccatgcattcaagttctgttttaacatgatactcttacttaatataacttttcatttcattttggtcgaattaacatgcactacatagatatattaacatgtcgctagttcgaatgatattctttttattcataggaattgaatgtgacatcacaaagtttacaacacctccacactttattcaatcaagtaaattacacccttttaataatctggaatgatatttgaattaaatttgttaagttcacaacactaagatac

SEQ ID NO: 243722 - DNA, 366 bp, Glycine max
ttaaagacgcgatctacgcgatcaggagcagcgctctggaaatatgattcctcaaattttttcttcacaaacctgaaaaaaagaagagtttatccaagtcaattagttgttttgattatgaacaattaatcatcgagtacttggagtttcctcttttccaggttatagtactggctcttttaagatagtagggccatttagtttggaaaaatgttttgttctcacttttaataacacaaacatcactttattttcactttactctctgctttcaaaaggttggatatgaaataatgaatacagaacacacttaatttctaagcattgcttatgtaaaaaatttacattatcaaccaatcagaatta

SEQ ID NO: 243723 - DNA, 349 bp, Glycine max
  unsure (1)..(349): unsure at all n locations
aactgagagtgcacttgattttaatgagactgcatatgacgtggaggaaattgtccatattgcagtggaggcacgattttgttaggtctattcatatctatgatctttataatctgcttctcacatgaatacagtctcaacctgtaattaagtgagatattgctctttgaaacctgaaggaatgctatatcacattccaacatcttcataaatttcttcaacttttcgagcttatatgacatcagttgttgtggaagggaggtatgctgataaagaaaaaatacaggtactaggttaaacacattaaaataatngatgagataaaaataataaaggcacccttctcttt

SEQ ID NO: 243724 - DNA, 298 bp, Glycine max
  unsure (1)..(298): unsure at all n locations
aatacttctcatggaagctacctaggctataaatagaaacatgtgtaacacttgttgcaactttgatgaatgagaagtcttgcgagacatacttcaaagtcctattctctccctctttcattccttcaatttcgtgctccccctctctctttctctccctcattcttttccctcattgaagcatccttccaagcttcttatccaaagctcatcttgagggtgaagctccttcttacatggntccacccaccggaaggcgcctactctacctgtattcttttcttccgctgcattccat

SEQ ID NO: 243725 - DNA, 274 bp, Glycine max
  unsure (1)..(274): unsure at all n locations
cagcaaagcgcacggataacgctcggcacctaaaatatacatgtatgccactactagatcagaaaatgcccctccagagattgcacatatatacaaatatgaaatatgcacgagtttgaaaagctgatcacctgtgtcagactttgggtttcctccattagttccactccctgtatgggcaacataatcaaacaccgtaacagattnaggggaagtgaaaaagaattaatgccaacacgccgagcgcaaggaacccattaatacacaaaaaaaa

SEQ ID NO: 243726 - DNA, 352 bp, Glycine max
aaaaaaaagaagtaaaaaaaaaaaaaaaaagggaatgtgatactgaaacaaaagaaaagaaggaagaaaagaggagaggggagatggtgaagaaagaagaaagaaagggagagaaggaatggaagaaaagggagcgaagggaggaggagaagaaggaaggaggaatgggaaggaagagaggaaggggaagagaaggaagagagaaagaaaaagggggaaggaggagggaggaggagggagaagagagaaggaaggagagaggaagaaggaggaaggaggagaggaagggagagggagctttaggggaggaggggggaaagaaatcagaaagaaagagggaaggaaaaaaaga

SEQ ID NO: 243727 - DNA, 276 bp, Glycine max
  unsure (1)..(276): unsure at all n locations
ggacacaccacccaccagctcgaacacaccccacgaaagcgcgggaaactggcgcaacaatgcacgggccgggaagtcaaagaaagctatggcagtggagagaatggaggaccgcacagcttgggattgaggagacaaccatgtcttcgcaccccattacccagaagctcctcgctatgcgaaagaacggtggagggatgttgcacagccgcacccccgctatgcaagaggctgntccggatcgacccatgccaacaagcaccaggcacaacctac

SEQ ID NO: 243728 - DNA, 299 bp, Glycine max
taaaaaaaaaaaaaagagaagagataaaagaaacaagacaatacaagaaaagaaaaagaaaaaagaaaagaaagaaacaaaaaaaagaagaaaaagagggaacagaaaaaaaaaaaaagagaagaaacgaaaaaaagcaaggaagaccaaaaagaacgaaagagaaaaacaaaagaaagaatacgagagaaggagaagaaggagagggaaagaaagggagagggaatttttaccaacgacagaaaggaagatggatataagaaccaaggaagaaaaaaaagagaagaagaaaagaaaaa

SEQ ID NO: 243729 - DNA, 234 bp, Glycine max
ttcccacgctgataagcaccctcactgacaacgtggcgccttaagcaatggatattaatcccgcctatagctgtctctcgggaagaccttggattcatgccctgtgagtggtcacttcatcgcttcaccagatattgaagatcgcagtgagcggacctttactgatagtgtcgggcgaagaagatatgttagtgagctgcccctactccgatccgtacgtataagctgccgaag

SEQ ID NO: 243730 - DNA, 265 bp, Glycine max
aagcgccacggcttatattttcttcacggaaacaattttccaagcaaattcgaaagagaaagaagtgcctaatgggctggaccccttccttcttgccttcctcccctattgatagcaaaatatgggaggtggttgccgcccagctcgcccaggcgagcatggttgcttcctccataagcaaccgccttctggaggaatattctggagggcccatatgtgctgggcgctatttgcaccctcatttttactaagtacaccaccctct

SEQ ID NO: 243731 - DNA, 312 bp, Glycine max
gatgcataaaaatgcgctaccctgtgattttaatgtgcttcgatatgatttccaataataaaatttcttctttaaattccttaaccaatgccctttatgcattattaagcaagactcctttttatatacgttcacttccataaatttctatggctcatgtacacattaaaactatacctgcattgggttcatagtatcccacgggatcttttcggtcgtaagttcccacaatatcaccccaaagctgttatcatcagacctaatcacgcccgacgccagccaagatactgaaatgggatttttttatatata

SEQ ID NO: 243732 - DNA, 261 bp, Glycine max
  unsure (1)..(261): unsure at all n locations
caaaaagtaatgaagaaggaataaaaaaaaaaaaatatatctctgcacanaaaaaaacaaagaaaaaagaaatttttttaaaacaaaaacaaaaaggcaaggcccacacagagacacaaatgccacgaacaaaagacgaataaaaacacgtaccacaagaactggaaatgacaaccatggaaagaactaagttcaaacagcctaagaacgatcacgcaaacaatgcaaagcattcccaaacagcgccaaaaatctaaacaa

SEQ ID NO: 243733 - DNA, 319 bp, Glycine max
actcccacggagcccatatcctcgttgctctcaacaccgggtccacatcaatcctaccaagcttcccctacatccaagtaattcaacattgaacagcacaaactatcacagccaagaaaacagggcaaaggcagaaaactctgccacaaacaccaaccaaaatcacagtgtgtctcacttaaagaccccgagaacaattccttttccagccgccaaccggcggatcgactcgaatattgtactggaagtgtctagtacataagcctacatttcgaccgtgggcatctactagaaaacatccaaaactcattatgcacta

SEQ ID NO: 243734 - DNA, 147 bp, Glycine max
aagaaaaaaaaaaaagaaagaatggctctgacccaaagaaaaaacaagaaaagaaaaacaaggggggccgtgaacaaaaaaaaagaagaagaggagaaccaccccccagcgcagacaagacagagcagcaaaaaaaagaacaccagg

SEQ ID NO: 243735 - DNA, 77 bp, Glycine max
gaaagaaaaaagaaagagacgagccgaaggaaacaacaccacaagaacggaacgaagggagacacgagaaggaagga

SEQ ID NO: 243736 - DNA, 127 bp, Glycine max
aaaaaaaaaaaaagaagaggagcgatactcaagccacataaaaaaaaggagagaaaaagaaggagagggggaggttctaaaaaaaaaaaaccagggaaacgcgacggaaccccaaagccaacaaaag

SEQ ID NO: 243737 - DNA, 242 bp, Glycine max
aagaagccttaacaaataacaggcaatcgtctacaaagaagagatgtgaaatagaaagcccagtccttgaatttttactgattgccactgacctaagtccactttctcttggatcataattgcaagtttttccatacaaagcaaaaataagtagggagatgtagggtcaccatgtctaaagcccttatgagaaataaaactattaagaatagaattatttcattttagagcataaaaggtgg

SEQ ID NO: 243738 - DNA, 251 bp, Glycine max
acctagcgaaacactaactaaaaaaaacttataaaatttcgtataagtaatgtacaaatccaaaaataattgataaacaaaatcatattgaattcaagtcgttaaagcacaaagtatatcaaaagaaaataaaaagagcatgatattaaaaaatgtatggattaggtcctcagccccaaagcttacaaatctattttaagtccaagcccataaacaaaataaaataaaatctggacaagataagataagat

SEQ ID NO: 243739 - DNA, 253 bp, Glycine max
tccaccattgaagctccatcaaagctccaacctttgctcaccatttctgctccgaatcgcgaagggaagccattttcggagtcgtgaagcgcacatctacgttgtgggacttcaaatttcaggtttgggtagacttctttctcacataatttcgtgggtattgggtgtttgggagatatgatgggtagttttactaggtttatgccttatggtagttatttgtgaaggaatttgttgaaagcatgctaaactt

SEQ ID NO: 243740 - DNA, 253 bp, Glycine max
tacgcatgcacatgcatattttttatcttgtgaatcgaaagatagggacaggatcgctttaagcgatggtcaaataccgcgccaaatccaagacagagatgaaccaaggtaagtggtagcgtagccacattttgctatgcaatgtcatttcctgctttcaggtgcttggggacgggtacgagtagatgctaggcccgtgatcagtagatcatcgtcccgtgtctggctccggacgatcaagaagcactactgg

SEQ ID NO: 243741 - DNA, 297 bp, Glycine max
tagccaacccgatcaagtgcaagttgcactattttttttaatgaagagcgataaacggccggtaacacactatgcaatacattttctcacaatatttattatgaattaaaatttattaaaaatataagattacaggtgaaactcatttaataaaaaataaaattttgtaatttctacttagttttaatcaacaatagaaacacattaaaagtagtgtaaaaagcgtgttactaaatgaatatattataagcgccatccaaattaaaattccaataatatactctattaatccaaagc

SEQ ID NO: 243742 - DNA, 242 bp, Glycine max
ccaggcaagcaaaccgcgcgcgacacagacaccacaacgagaaaaggcccgcggaaagcagccaggcacagacataccacaaacaaaggcataacaataataataacaacaacaataacaataaaaaatgaactggcacgcaccaaataatgatggagtacaaggcccgggcccacccgaaagatagccacattgacatgaaacccccaaaacatataccctcaaaagacagcactcgcaaa

SEQ ID NO: 243743 - DNA, 260 bp, Glycine max
ttttttttatctacccacacccctctaataactaaactaacctccttgaaaataaaacatggataaaataacacaacaaataaaatcaaacatcaattataattgctaataatatttcagagtgttacaccgtaaaattgactttaaagagattgaaagttaataaacaaagccaaaataaaaccaactcataactaaacttctttccatcaaaaatcacttaagatcgtttcgaggtctaatgccttaacgaccgtttt

SEQ ID NO: 243744 - DNA, 258 bp, Glycine max
ttttaacccaagcgctctaaagtcttactgcagcgattgcaacacgaattgcactaatttattgagtaatataaacactcctttgtcgctaaaattttaaaatcatgtacatatctaatatcaatataatattaatttcaggatgcgtccagaaccatgtacttatttatgaaagctgcaaaattcactcggttgaacttggaagggatcactaagggtacgattatttataatcatttgaggaagattaccaaaatt

SEQ ID NO: 243745 - DNA, 238 bp, Glycine max
accttgcacgtctaatgggatatgattacactatccattaccgggctgacaaacacaacttggcggcgaatgccttctcgcgcctacctgaccctccacagagcctacctaaccctccacagaacctacctgaccctctacagggccaaatttttgtgctaaccattcctaattgtgttttcttgcaggaactcaaaatagagcttgcctccaatgaggaattcatgaccaggagaaa

SEQ ID NO: 243746 - DNA, 265 bp, Glycine max
ttttttttctctatagcaactgcaaaaaatgtttgctatactaatgtttgtccttgatcaaaaacttacgcgtctatgttcggttcctcacaaaagttggggtaagaaatgcaacaattttttaccctctgagcacctatgctgtgaccagacagaaaagttgtgtgagttgacctgggaaagacagacataatgtataacacaaaccggattgggactacctcactgtctttttttttcctactaaggataatatctaaaatct

SEQ ID NO: 243747 - DNA, 223 bp, Glycine max
atgatttccagattgagtcaacaagttcaagatcaagattagtttctcgattcaagagaagatgaattcacgattcaagaaaagaaatcaaaaagcaacaagtgcggacttcccaagggaagtattaaaaaggatttttcaaaaaccacacagcacagttttgttttacaaaagaggtttctcaaattcttctaatttaccacagttttcgctctctggtcat

SEQ ID NO: 243748 - DNA, 270 bp, Glycine max
tttttttttaacacccacgcccttcgtacttgtggaaaaagagagcataaatgcgacatcaaagcctcgcaaagcaacatagagcacgagagcctacttactttgaggagaataagaggcacactggggggataaagaggcaaaactgatgcagaacttcaatccctcaggtttggtgaatagcatctatacccttggtgggaggcaactagagtgatgtaacagccaggccaacatctctgctgatcaaaggtttggagtttgaaaaca

SEQ ID NO: 243749 - DNA, 276 bp, Glycine max
taaggatgcataatgttttttctcggaaggtaccccagcgcgaatgacatgacgcagaccttgagcgggagaagacgccccacgcgattagagattttccaatggaagagggggccaaaatataaagggcctttaatagtcccaatggctttgtgggaaagagccctggtgcttaccaggatggttgtcgatcgaggatcctttacacagcgaactatgtttgcggaaaggtattctaaccttacaatatgtggccaataaagaattgtctccatg

SEQ ID NO: 243750 - DNA, 273 bp, Glycine max
aacaaggtatgagtctttatcttagtttggtgctcttcttattaagtttttaatcagtgcggtggcaatgtccgaaggttcttatcaaattattgggtcattttgtccacttggctaaccatataaaagtatcaataagaattgtaatgtggggtttcattttgttgtggtagttgattgtgctttacgtggttttcaagcttgacgagagttacatgccgagcaaagtttccatccttgcccgtgatggttttcacaacttgaaggtaaatt

SEQ ID NO: 243751 - DNA, 275 bp, Glycine max
tttttgcacttcagtctattttggaatacttctagttctgctcggcttaaagaaatcaaaacggtcactatttcaggcttgtaattgatgtgcattatgttccttcacttgtctatttcaagtgagcccctaataaggattggtgattccaagctagtgtgaatttctaggtttatgatgcttaaataagtgtgttctatttgattctgtatgtgttatatgtctagttagacttgggtaaggcaaggtttgtatcaaggatctttgattgtact

SEQ ID NO: 243752 - DNA, 246 bp, Glycine max
cgggctcccggggattaccgtgagcttttatgggggttgtcgacaccgccgggggtgacagtactcacgttaacatcgggtcttgaaaactaagggtaaactaaactatacaacatcagtttttctaaaaaatcgatgccaaataataagaaataacaaaaaaatataagatatgtggaaaccaatatctttttttataaaaaccgatgttatggttgactaggaacatcagtcttttctaaaaat

SEQ ID NO: 243753 - DNA, 249 bp, Glycine max
caaacagacatccgagtaaaaagttattgtcgtttgaatttggttagagcttcaacattgaatttcaagcgtcttgatatattacggaactcaatcagacatccaagtaaaaagttattgtcgtttgaattaggtctcagcgtcataattcaatttcgagcgtctcaatagattacgggactgaatcagacatccgagcaaaacattattgtcgtttgaattagctcaaaccttcaaaattcaatttcc

SEQ ID NO: 243754 - DNA, 191 bp, Glycine max
gcgcatgaagcaatcgagtcaatcttgtaagagggtctccgcatggacccaaaggaagttgcaatggatctaagcagtgaaagcctaactgcttcttgagacaaggactcggtggtgaaccataactggctaaagaaccatgctcgaaggagttcaaaaccataatcctgggccaaaaagaaaagaaccgc

SEQ ID NO: 243755 - DNA, 261 bp, Glycine max
caattttttttaggtgctccttaaacctctattaattgtcagctttaccttctcctccattgttgtttcttcatttttcttcatgtatctcctcacatgtcttgtgctaaatgttgttaacatgatttttttataatttccacagattaaacttgctatagaagctagatttaattttctatggttcaaatttcttgatcttgttcttgaaccataaattgtgttgagtttaggttcctttgagttttgttttgctatttt

SEQ ID NO: 243756 - DNA, 270 bp, Glycine max
cccggggtttatattacgaggatatgggctacgtgggagtacgtgagcttagatggaggtggacaacaggggatggtgggtttatgcgcgctttgtggatgtggaaaactttttgtgcaccatcgcccgaccgccacctagtaccacatgtgatgggtaccccataatcctacaagcttgagatgaggaagtgttgaagggtgaaacttcctgcttttattgttgaccacagagtggtacttggagatatgtcgcgggggtcaggagacc

SEQ ID NO: 243757 - DNA, 266 bp, Glycine max
ttgtgactgccctacctatgtttttttcacaacggcggtcttggatttcgtcatctttatggctttaattaacctagccaggctaataaggaagaaaaaaaattatgacctcattttcaaagctagggatgcaagtatggtttgggtaatgcctctacattttgttttcaatgaatattaaataggcattttggcccatgacttttgatcccttttgcaaattagcccctacttttctgaaatgttaaaaaaagtctctgtcttcg

SEQ ID NO: 243758 - DNA, 257 bp, Glycine max
ttttttttttccgctccaccccaaaatccattgtatattccctttacatgtctaaccgccatattgagttatgaatgacaattatgaaaaggtttgatcctatcaaacaaagatgcaaaatatctacttattccaggaaacaagatcaagatcaacaatgattatattatttaatactgaagacactttccttaattatgagactctctatattagacatcaacgatttgaagaaatttgatgaacaagtgtagaaa

SEQ ID NO: 243759 - DNA, 256 bp, Glycine max
ttttggctaggtggccacactcaacaaagtactttcgacacctattgtacgttgatttgaccaatgctgttatgagaatgttgcgacaatccttcaaaaccttatagatacattctgaaaggttggttaggcatgtggccataataacaaccttctctatcataagccatcgtgcatttttcctttgaaattcgatcaatccatgttgctatggctggaatcatttcacaaaagttttctaaattttgataaaaaa

SEQ ID NO: 243760 - DNA, 273 bp, Glycine max
tttatttgtcactcccaccacccggccgttccattcgttcttagccatcaaaaccttatcgttctaaatcttggttcgagattatcaacccatacatgttcctctaaccaatgcctcatttctgaacttatttcaccgctaaccaataggttccctgtggccggtactcgaatccatttggtttaattcttaaatacttgaccatccggtgtgctttccggccaaccggatctcccttgaatatattcgaacgaagaaaaagtggaacataaa

SEQ ID NO: 243761 - DNA, 275 bp, Glycine max
gccctctttcttcttttaaaagccaaagttcgtgggaatcaataatagataatataatgaagtggacaaagatcaatcataagtcataaccaaccatgagtaaatcataaataagtcataaccaaaatataatccaaacaatcataattcaaaaccacatagaatccaatcataaaagactaaagtccaaataccaaaagataaataaagtgcagaaaatgataacttaaataccatagccaaaatacacggcttattagaaaaagaaaattata

SEQ ID NO: 243762 - DNA, 257 bp, Glycine max
tttttttcctccaaaagcaacagccttctggaggaatcttctggagggcccaagtgggcctggttgctatttacacccccctttttactaaatgcaccccccttttctatttttttgtaattctttttccgtaacgttacgaaactttacgaatttcgtaacgatacttattttccttctgcaaggttacgaatacttacgtattatgtatttactcttttttagctttcgaaaaagttacagaaacttaccgattg

SEQ ID NO: 243763 - DNA, 263 bp, Glycine max
aaacttttttttgaagctagagcttagctacacacacccctctcataactaagctcacctccttgagaagattcctaaagaagctagagcttagctacacacacctttctaatagctaagctcaccttcttaagaagagaagctagagcttagctacacaccccctataatagctaagctcactcccatgacaaaatacatttgtgataccctaatttcatccggggattattacttgatgacatgcaacctttggttagccg

SEQ ID NO: 243764 - DNA, 253 bp, Glycine max
caacccacggggatgctattttttacatgtggaaagaatagcacgccataacttattgagccatgctgattgacatctctaattgtgtcactgaacttatcttacaatatattgtgtgcttttgctattatactgttgatactacaagataaaatttctgttaaagaatatagggtaaactatggtgttaaccactaaactttttcaaaatttgatttttagtacataaataaaagtgtttttatactataaa

SEQ ID NO: 243765 - DNA, 281 bp, Glycine max
cttcatttggagcgtgacgattattttttgactcaatcggacatccgaataaaaagttattgtcgtttgaaattttgagagcttcggtattccatttcgagcgtctcgatatattacgagactcaatcagacatccgagtaaaaagttattggcgtttgaatttgctcagagcttctatattcaatttcgagcgtctcgatatattacgagactaaatcagacatccgagtaaaaagttattgccgtttgaatttgctcaaagcttcggtattccatttcg

SEQ ID NO: 243766 - DNA, 272 bp, Glycine max
  unsure (1)..(272): unsure at all n locations
caaattattttttcatctacnctaaactatataacacaatacaataccaaacttaaacttggtttggcagatgaaaaccaaaatcaaaatacagttggtgcacttgttgggcaataggaataatgacattatatagtattgtttatattccaatccaccaattattttcttatatgtaagtctatggggagtattaaataataataataataataattacaaagatttaatatttaagttaatttttgttcatggtattttattttacatta

SEQ ID NO: 243767 - DNA, 278 bp, Glycine max
ttgactcaccatttttcttgtcccagggtgagaatgtcaatccttaccctcggaagcaaaaaaaaaaagaaagaaggaaaatttccaatcaaagagaaagcaaaaagaaaagaaagaaaattcccaatcaaagaatgggagaaagaaagaaaaaaaagaaaaggaagaagaagaaggaaagaaagctcctgatcaaggatcgaaagaaaacagaagaaatgtgcagaaaggtctttggaccagacaatatctgaacaatacagaattgtcaccgaatg

SEQ ID NO: 243768 - DNA, 283 bp, Glycine max
  unsure (1)..(283): unsure at all n locations
agaanggtacaagaatatttggcttatagtaacccctcgtaagatgctaattaatgtataatggctttcccacctttagataaaaaaacaaaaataaaaactaagcaagacgaatagcaatgaaatggaatggggaagagatgcttacggcagagtgcaaaggttgttggagaaagacagaaattaagtcattgattcgatcattaagtaaaacaatgagatttttttttattgctgttgtttagctttaccaaaaatccattcagaaatgccttgactgtgc

SEQ ID NO: 243769 - DNA, 279 bp, Glycine max
ttcccgtcttttgtcattggattgtaatttgaagctttctctaagtggtcatgatgtccttgaccgagaaaccaaagttccacggaagcagaccacgagggataattcttccagttcagcttagtagtagtgattgtcggagtcccggagaaggagaaaacaggtccagaggcagccattttgacccacaagatgaaaccctaaagggataaaaaggagagaagaatgaagtgatatgttccaggcaacaaaactcgaaactgaggcctggaacagact

SEQ ID NO: 243770 - DNA, 131 bp, Glycine max
tctcgagagattacgtagacctcgtgagagatccatagattcgactcgcgaacttaactcgtaaactcggaaaagttcatttcatataaaaataataacaaaatatctatgaataacataccaattaaaaa

SEQ ID NO: 243771 - DNA, 211 bp, Glycine max
tcatccccacctgtacattaagggaaaccagctctgggactaagcccccagacgataatggcaagacttttacaaagtgatcaagaaaggagcaatccaccattggagggagatagattgcttcctgttactgatggtagctcagaattggtagatagaaaatgcagtaaaaaactttatgagaagatttcaaagattccttatattgctg

SEQ ID NO: 243772 - DNA, 253 bp, Glycine max
tgtcatatgactttcagtcttgccttccatttccggaacctatatttttcacagttcagagttagatgcaatatttcgcaagtgatactcttgagtgcataatatttccagcaaacactgatggatgttcattcagagccattatccaaacacagtctccatacgtaaacataaaatccataaaatacctcaaattacttaatgaatcaggggatagctgacaaagaaatgatgcaatgacattactagccta

SEQ ID NO: 243773 - DNA, 243 bp, Glycine max
cgacccgggcatctagatcaaaaaataccttctacgccaatatctaaggaggactttgaacgtttcccacaagttcctatttccgataaggagtttagtgactggtgtaagccatggaagggggtccttgatggtcatggcgatggggaagagattgggttttcagcaataggaggccaagtttaattgtgagtgggcaaagaatggtgctatcaagatcattgatcattgatgtgccaagaa

SEQ ID NO: 243774 - DNA, 302 bp, Glycine max
gacctgaagcttcataggcatcatatggaggcgacaacttattttttcatccgctcaaagcgattgtgaatcgtgttctgtatcccgccgatctatctattcatccacctaatcattagaacccccgaacactagctcgagatcctctctggatccgaacacaatctcacactgggagtgagttctcacactcctaggtaacagagacacgagacgatgtaatatacatatgctacatatgagatgcgactcgctgaaacatagcttacgtaggcttaccactttgcttatcggccttaact

SEQ ID NO: 243775 - DNA, 261 bp, Glycine max
tttgcggcggacgggcgatggtgcacaacaagtttttccacatccacaatgcgcgcataaacccaccatcccctgttgcccacctccagctgagctcacgtactcccacgtagcccatatcctcgtttctctcaacaccgggtccccatcaatcctcccaagcttccacaacatccaagcaaaacaacattcacacagcacaagctatcacagccaagcaaaacagagcaaaggcagaaaactctgccaaaacaccaacca

SEQ ID NO: 243776 - DNA, 256 bp, Glycine max
tttttttcgcctcctcctcctccttccgatgcatcagcttcaccgtctgccgtgaagtggacacgcaaagcctcatgtctacgatccttgtctactagaccacctagtgctgagagaccagtggtccatgttgatcttgctatctgcaaggccgacgatccccacaggaagaaattaagaacatatttgagaattctggagcgtgataaggtggacgtcacgtacgagaattggaaggaggtccctactgctcata

SEQ ID NO: 243777 - DNA, 281 bp, Glycine max
acagaaattgagctaccattattgtttatgttagagtagtgagattaaagttctagaggttgaaggtgacatcatcaacccttcttagccattttcttccacttaaactctgttcttccttgtattgagagttcatttcttgtaatggaaggctaaacctcttggttgggaagttctgttgaacccttgatgtaatactatttcactatctatttaatgttgtttttctatgttcatttcttctatctatgcttatttttacatgcttgtggcttgatcac

SEQ ID NO: 243778 - DNA, 253 bp, Glycine max
tttgaaaccgccctgcaaaatgggggcaaaagatgaatcgagtcacatcactgcttcgtctactgccaaacatatttaggattgttgatgtccttgttacttccagtttcaccttgacaaagatgtcatggaccatgttgaaaatctaaattgattcaaccccatatcctgcgtaaaaattcgcaatacttcgactgtacatcattcgcatgcatccatgcttttcattggttgcattgctcattgcattctt

SEQ ID NO: 243779 - DNA, 285 bp, Glycine max
cccaattttctatacatagggggattttattactacaaacgggttcagccccttaggcacttctctctctttcgaatttgcttacgacaattgtttccgtgaagaaaatccaagccgaggcgcttccataacgtttccgtgagggatttcgcgaagtgttttcgaccgttcttcgacggtcttcatttgttcttcatcgttcttcagacttcaacgggtaagtacctcaaaccaagcttttcaattcattctatatacccgtggtggtccacattcggtttcatg

SEQ ID NO: 243780 - DNA, 266 bp, Glycine max
tttttttttttttcaacattagtcaataactctcttaaaatgtgggtttgaacctaactcaaccctacaaaattagcttataaggtgagggttgtctctcacttatatactttaatttggccatatcactagtcaatgtgagatcttcaacaaactcagtaataataattgaatctcacatctgaaatggaaatagaccactaaagtgactgaaagagtgtttggtgaaataaatcccaaaatgcgtaacattaagcattatgttc

SEQ ID NO: 243781 - DNA, 273 bp, Glycine max
aagcttcttttttaaaacttccttgagaaactagagcttagctacacacacccctctcataactaagctcacctccttgaaaagcttcctcaagaagattcctaaagaagctagagtttagctacacacacctctctaatagctaagctcacctccttgagatgagaagctagagcttagctacacaccccctataatagctaagctcacccccatgaaaaaatacatgaaaatacaaaaaattccctaatacaaagactactcaaaatgcct

SEQ ID NO: 243782 - DNA, 275 bp, Glycine max
ttttctgaaccattatttttttttggaggaagggatacggaggattcttgaagaattcactggtgagaaaattccacgcaactcaaagatacccactgagaagattgagtggataaggatgggtacaactgtggcaacgaatgcacttttagagcgcaagggagaaaggattgcagtgtgtgtgactcgaggctttcgtgatttactccagatagggaaccaggctcgccccagcatatttgaccttactgtgttgaagccatcaaatctctatg

SEQ ID NO: 243783 - DNA, 274 bp, Glycine max
gagcttagcctcttctttgttttttgactgagaaccaaattgattcttatcaaggaagctattcctttttgacgaatcctcattcggcttatcgattctctgtggatcggggcatcgatctattcatcttcttcatcttatccatattttatgtttttctgttcttgagtttttggaaggtcaacaatggtggttcttgaatttgcatctataatgatctgaaccaagcgtccatggcttggattgtataacacatgcacttcctttttacatg

SEQ ID NO: 243784 - DNA, 273 bp, Glycine max
tcgggaggttttttttatggccttgaactaagcaaatttgcccacactgtgagttagcatttagcaatacttgaaacttcttactaagtgcttttaacttctactttgtcattattcataattgagaacagcacattaataacgatgggttttgttttgtttttcaaaacttgaaaactacaaacaacatgcttgatgcttgtgtttccatgtatgcaaatatgatagtactaaccatgagtattataataatatcttatagtaataaattgc

SEQ ID NO: 243785 - DNA, 254 bp, Glycine max
gagaaagagagaaagtggcatggataattgaaggaagaaagggagagaagtttaactttgaagtatgtctcacaagactctcataaagttaccacaagtgatacacatgtttctatttatagcctaggtagcttccttgagaagctagagcttagctacacatacccctctaatagctaagctcacctccttgagaagcttcctttagaatctaaaacttagctacacacacccctctaatacttaagctcacc

SEQ ID NO: 243786 - DNA, 245 bp, Glycine max
accccataagttatttaaaatagtttggaagtgtccaaacatggtttgtatatcttcaccatcttccatagtgaagagttcatacttacgtgtcaagaagttgagcttgttgcattttacttgtgatgatccttcatacatcagagttaatgtgcccacatttgctttgcatttctgtagctatggatcgctgtatattctttctcagagagggagcacaatatattgtttcaagctttaaagat

SEQ ID NO: 243787 - DNA, 255 bp, Glycine max
  unsure (1)..(255): unsure at all n locations
tttttttatctncacactgatcaacacatgcacagtggccaaagatgcatgggagatcctgaaaaccactcatgaaggaacctccaaagtgaagatgtccagattgcaactattggctacaaaattcgaaaatctgaagatgaaggaggaagaatgtattcatgacttccacatgaacattcttgaaattgccaatgcttgcactgccttgggagagaggatgacagatgaaaagctggtaagaaagatcctcag

SEQ ID NO: 243788 - DNA, 287 bp, Glycine max
ttcttttatttctctaaagcgttgttttcttatgcctaacttatcctatggactccgagcaaacgagcactaacccatagagaacacataatttcttctaaaaaaaatgcatagggttagctcgcctgggcgagcaccccctgcacaaattagtttaaaagagagggagggtgagtttcttcacccaaaatttctccccttcactcaagaatgccatcacccacgggattggccatccttcactcctaggtcaccattcttttgcgtttccaaccccgttttgcatt

SEQ ID NO: 243789 - DNA, 279 bp, Glycine max
gttatataggattgacacatttttttttactcgcaggattcgatttgggcaaaattggatgagggaaagtgtgatttcgaaatctgcactttatgcaggattttgctgttgaaatgtgcagcagaattttgtataagtgcagaaaaaaatgctatgtatttgctggttgtggaaagagtagtacagaatgagttctggatgtttgctagtagatcccaacggtcaaaatgtagacttatgtactagagacttcaagtaaaattttcgagtcaatccgac

SEQ ID NO: 243790 - DNA, 244 bp, Glycine max
gaccacctcctctaatgctgactcacatttattaaaattcacaaagcatggaggaccacacctgtacaaaaccttgaagggtgccatcttgatagattgctgatgggaagaaatcaccactactatgttttgtcagggggaaagaaagccacaatccagagttaaccaccatagaatggaaataaacaacttgatccaactaaaaataactaggtaggcctagcacaccaagtttgatcattaa

SEQ ID NO: 243791 - DNA, 267 bp, Glycine max
aaatttttatttttcacacaaaatgggagtactaagtatttattacctatctttaacaaaaagtgattacaacattacaaaataaccatcaattggaggagtttgatacaatttacacaggttttatacacaaaagttagtcgtattcatcaactaacaactcccccaaatttatagttttgcttgtcctcaagcaaataaagaacagctcactggtccccaagtgacaaaaacatgcaatgactatgtacaaaggtgtatgcaaca

SEQ ID NO: 243792 - DNA, 261 bp, Glycine max
ttttttttataagaaacataaacaagaagctttcttgttttggctggccattttgacatattcgtgcatatttacatagagactaacccattgctaatagtctatattgagacgggtcaatggggttttatataactatgttaattgctaatagtcaatgcctatcagtatcatcacataatccaatgaccttagacttcattgtataatagtaacacaatcatattaacataataatttacataatatggttgccattat

SEQ ID NO: 243793 - DNA, 247 bp, Glycine max
cctcgaatcgggcataaaatacttggaacaactccagaaaaatatgaagccccattgacttccttggagaactcaaaaaatccttctattatcaccttggccgagcttttgaccgcacttcaggctctggaacaaagaagactcatgagacaagaagggactactgaaggggctttggtagctaaatcattggacaaaaaaaaagaagggcaagtcaggaagtttcaaccacaaaaatggtagcaaa

SEQ ID NO: 243794 - DNA, 247 bp, Glycine max
ccacgaagaagcgaatgctctatcagagctaatgacatggaagacagttgtagcggacattccttatggaggagcaaagggtggtattggctgcaacccaaaggagctcaacgacagtgagttaggaagtctcacttgtggtttcttccaaaagattgatgatcttattggcatttagagagatgttcatgcccctgacatgggaactaatgcacaagttctaatttaattatattccatttcctta

SEQ ID NO: 243795 - DNA, 263 bp, Glycine max
ctttttttttatcaccggcaatgtgtccactatcattgttatcatttccctctccatcattgagggtgctacttgagcagccagatccctccacccttgggcgtacactttgaaagattcatgcttcttcatacacatgttttgtagtttcattctatccggagacatattagaattatgctgatactgcctaatgaaggcaaccattaggtccttctaggaatggacccgggaaggttccagattagtataccaggtgatgg

SEQ ID NO: 243796 - DNA, 263 bp, Glycine max
tttttatagcaattcccttatgttatcaaacataaaaagggaaaaggtaatattgtaaccgatgctctttctcggcgtcatgcattactttctatgcttgaaacaaaattgattggtcttgaatgtttgaaaagcatgtatgaaaatgatgaaacttttggagaaatttttaaaaattgtgaaaaattttcagaaaatggtttctttagacatgaaagctttcttttcaaagaaaacaaattgtgtgtgcctaaatgttctac

SEQ ID NO: 243797 - DNA, 239 bp, Glycine max
cttgccggcgcctggatcatccattgcctcccctacggcgcccagacaatgatatttgctaatgtcttatgtcatgtccgcccatcctaagtaagtgtcacgtgaaactataatttcttgcctccatattaatttatagtaacttctctaactaccacacgtataactaacaaatattattgttacccttaataataaataaaattaatgttaaaatcataagatcgcgactcatgact

SEQ ID NO: 243798 - DNA, 246 bp, Glycine max
cgaagaggactccccgaggaggtcaaatttggtacagccatgccctcccggcttccaactagggaataggcaagtggaggaatgcccggaggtttacacgacaagcataatatcaaacaatgagtcccgtgaaggtactaataccggggacccggccgtcgatttcgagcaagaagcaagtcccacgaaggatgaagaaaacgaagatgtaggacttcccccagagctagagagcataattgctca

SEQ ID NO: 243799 - DNA, 264 bp, Glycine max
tttttttttttgagcggattcaaatcccgatgtatcattcccaattcatgcaaatgaacaaccccagacacaatgtccctgtgttgccatacaaacaatgaaagttaatttattaaaaaaaatatattataaacttagaaagtcaacttccatgcacgtacgagctttcatagatttatctcaacctcagtcctcaagttagttggatcaactacgtgaatccaaattgtaactaaacatgtttactcttgggcattctttatt

SEQ ID NO: 243800 - DNA, 257 bp, Glycine max
ttttatattgaactcaagtcaagctaagagcttattcattttttattgagcggagtcgaactggaccgatgacatgtatgacatgcgttgatatgtgtgtgggctattactgtctcttgaactcacgtcgtcaacacttgtaatgataagttgctctttttttagcactattgaaatgaaaggttgtgattggtggaacaatcacaatcgtcagttgactgatatgattgttggtctccaattgttagatcatttca

SEQ ID NO: 243801 - DNA, 256 bp, Glycine max
tttctttccccccacgcccggcctgtggtcttttgctcttatcaataatgcggcctcccttaaactttgctaaaactttgtccatgcagatgaggaatggacgcattttctgcaggccaattttctcaaaaacacaaaccatctatccttttacaagaaatcctcgctttggccttccctcaataggcactttgaggaggtttgttccaatattggttgggtccttagtgcaggagctttaactaacttttggaac

SEQ ID NO: 243802 - DNA, 236 bp, Glycine max
ccttttctatatacactctgcccaaatctaattcatgggaactgcggtgtcaagaggatcccactgtgtctatgaggaagggaaattaattcgttgaaagaaactacatagaaacatacacatacacatacctgttggtgttgcaaattatatggaggaggcataccaacgacacttgactgtgacagcaacggtggtgcttaacctgggcttcgcttactttgatttaactcaat

SEQ ID NO: 243803 - DNA, 268 bp, Glycine max
aaaattttttataccttgaagataatagcctcagaagttggttatcatgactcaaaattaaaagcaacatcgttatattgtcataccatttaaccacaagagaggatttaatgcaaactcgtactaaatttgacttacaccacatttgcttaagtcactaagtataaacattgcatgcagtatacacgcattcagcgtaaaactaaaacctggtggctgataagcattgttgcatcaaaacattagttgaatttacttaggcatacaa

SEQ ID NO: 243804 - DNA, 240 bp, Glycine max
tagactgtaactatttccccatttttcaaagtgccctgttccacaaattggtgcttaagaatataccaattttaaaaagcgatttatctttgtctcaagaggaatagctcaataaattttgcccgtgcctaacataaacttgctcaaaatcatgcttgttttttaacatgtactccaataaaatgctgaaattaccttgtatacatctccaaaacctccttctcctagtttattttcatc

SEQ ID NO: 243805 - DNA, 275 bp, Glycine max
ttcgagggtcctgattttttttgggactcaatcagacatccgagtaaaaagttattgtcgtttgaatttgctcagagcatcaagattctatttcgagcgtgtcgatatattttgggactcaatcagacatccgagtaaaaagttattgtcgtttaaatatcctcagagctttgggattcaattttgagcgtctcgatatattacaggactcaatcagacatccgagtaaaaagttattgtcgtttgaatttgctcagagcatcaagaatctattt

SEQ ID NO: 243806 - DNA, 243 bp, Glycine max
atcatggcaaagtgtcttgtgaagttgaaaaccaaatttcgagaggatccaacggttaacgaaggctgggcagcgtttctaccgaggcagcttcatgtagttttctctagaagcttcattaagaggcttcctccagaagcttcattaagaggcttctagcacactccagacatcttctcaaagatcccaacggtcagatcatggaagcgtgttttgtgaagttgcagaccaaatttcgagacg

SEQ ID NO: 243807 - DNA, 249 bp, Glycine max
gaagatagaagaggaacaacgtaaaactattagaaaagaagtggacaaactccccaatgctaacttcatcggagaagtcaagtattccacctggctcagcaatgttgtcatgataaaaaaagccaacaaaaaatgacgaatgtgcaccgactatactgatctgaacatggagttccccaaagatgcctactctctgcccaacatcaacaggctagttgatggagtgtctaacttccaagtgctaagctt

SEQ ID NO: 243808 - DNA, 266 bp, Glycine max
ctaaagtttttttttatgggaattgggttcctacctaatagatttcagatggactttaatcctaatcccacagccgaccttttcacgagatctttacttaaccctttggttaaatgatcggccaaattatgctgagttctcacaaactccactgatatcacaccatgcatgattaactcccgaaccatgttgtgtctaacacccaagagtctagagcgttccattatacacttgactatatgccttagccaaagttacctgactat

SEQ ID NO: 243809 - DNA, 256 bp, Glycine max
tttttttaaacgtaatcctttaagcacttgggcttcaggatcttccttttgggccttccttcttcttgcacctccctttcttcttccctcctcttctgctcttcttcctcagcaccttctttatcactctctatgtttcctgcacccgtatcatccctcggcccttgcaggatcaccttgtcctcaaggtgatagtcctggcaaagctgctgccagtcttcccatgatgtctcctctggtgacaggccctgccact

SEQ ID NO: 243810 - DNA, 263 bp, Glycine max
tttttttctgacctttgccaacctccgtcacccttgttgcccaaattcctttgatctctaagtacatcagccaatacacgttccatttccaaattccatgtaaaataatttcttgtttcctaattattttttcctaaaacttttcttttgtccgtcatttttttcattaaatgactccattgaagttaatgtcacttattcaacctgcacataacaaatagtagatatgacctactttattcatttgactagtccactgcaca

SEQ ID NO: 243811 - DNA, 261 bp, Glycine max
ttttttttttttccgcaatacttatcacctctatcatatctaataattttcacattcatgtctaattgccattttacttcattgtagtaaatttctaaggcatccattgcctaagaaatctcgggcagtaagtagacataaccgtaacgtgcataatcatcaataatggtgataaagtatcattcctttccgaaagaactaacatcaaaaggtccacaaatatcagtatgcacaatttcaagaagctgagtgcttcttgta

SEQ ID NO: 243812 - DNA, 289 bp, Glycine max
ccccccttctctcttctcctcatctagggcgcccgcttgatattttcaagccacgctctcccagaagatactcaccaacaaaatgctagaaagaccgcaactatggtacaactgggtctgcttctctgagtgcccatgcttacgctctagcgagtagaaacgacggctgaggcataagcttttcttaatgtttgagtgatgatatgataaacgtgtctgaatgaagagacagacaaacaattattaagaagaaaaagaaaaaggaatggacaaaattgcagcagcaatc

SEQ ID NO: 243813 - DNA, 267 bp, Glycine max
  unsure (1)..(267): unsure at all n locations
ccctttttttttcgcgcccaancccacaaaatcagagtttatctctttcatcttactgagagcgattctcctaaattcttgagtgattcaagaacacccaggctgtatcaaaggactttcacaacctttgtgtgttgccctcaccggaaacagtgattctttccttcctttcatcttcaaccttgttctttcaaaccacaattccagaaaatccacttctacccacaattatctcgtggccataactcccgttttaagcactcaaat

SEQ ID NO: 243814 - DNA, 252 bp, Glycine max
tccactttcttgatttgttaatgatcagtccctttggcaaccagcagctaaatggagatcatccattgtgtatattttatttcaggggagtattcttgaaccttggagcacgatctatggcattgattaaagcctgatgcaaagaagattactaggacactgttactctttccagagtatttcgcatcagttataacagatcaaaagaagatctgctgttcaaattaatgtgttggcaagatcttttatttt

SEQ ID NO: 243815 - DNA, 277 bp, Glycine max
gttggagaggtattttttttcgagaagatgcgctccatgagaggttggatcaaatggagaatagagatcataatgaagaagaaaggaggagaagagggaatgatagtgttcctagacaaaaccgaattgatgggattaaactcaacattcctccatttaaaggaaagaatgatccggaggcctacttggagtgggagatgaaaatagagcatgttttctcatgcaacaactatgaggaggaccaaaaggtgaagcttgccgccacggagttttccga

SEQ ID NO: 243816 - DNA, 271 bp, Glycine max
tgcgacaactttttattataagccagccttacaagataacacttatcttaacgcaaaaaggtcatgctaatccttctgatggagaacgaactcatgtaatccatttatgcacacatgtacatgtagaaaatatatcctattatcaacatacaaagatattcaaaacattctatccaccacacatatacattttttggaaagaatactcacatacatgctcaaggtattgtatcaaaattacacatgttcatatcctaaccatttgctattt

SEQ ID NO: 243817 - DNA, 194 bp, Glycine max
cccacttttttttacgagaacgaggctcaacgacattgtaaacaatcaaagaagatacttgtcgatggatccattctgattacctcaatctaagaaggactcgaatactaaaattacttgaagacattctgataaattcactattacattgccgggagctggtgaaaccactgatacatggtgaacgattcgat
